United States Patent Application Publication US 2017/0114356 A1 - sequence listing, part 51

SEQ ID NO: 68700 - DNA, 4038 bp, Zea Mays
gagagcccgaaacagtccaatcccaacacggcgacgacgccagcggaaatcgcatcgccctcttcctctttccctcgctgtgcaatctcccccaaactcccctctcgaaccctcgctctcgtcgccagagcaagcaaagcgcagtggcaaggagatggaattgataatcagtttatgcgaagcataatgataaagttgtgacattgcaatgttattatgcagaataatgaacttgaagatcagcttcgcaagtccgcacaatccaaagtcccatcagatcccagcatatggcttcagatgcgtgacaactttgagaagattattctcatagatcatgacctatctgaacagaaagaggtagagtatctcctatggaagttgcattacaaaagaattgaggacttcaggaggagcattagtgctgcaagctcagctgcatctcagagtgggaagagcaacgctaatccagatcgagtcaagagaattaaattaaccttcaaaagcttcctttcagaagcaactggcttctatcacgacttgatgttaaagatcaaatcaaatttgggccttccactcagttactttccagagggcatcgacaatgcaaacaactctgcgcgagatgacaagacaacagtgcagttgaagaaaggtttgatttcatgccatcgctgcctgatatatttgggagatcttgctcgttacaagagctcgcaaggtgatggtgattctgctagccgtgaatacgcagcggcatctagttactacatggaggctgcttctatctatccttccagtggcaaccctcatcatcagcttgctatactagcatcttactcaggcaacgaggtggtagctgtttataggtacttccgaagcttagctgcagatactccttttaccactgcacgtgacaacttgattattctttttgaaaagaatcgccaaagctatagacagctgccagacaacaacaaagttcccagcgctaaggcattacccccacggctatctgggaggggacaaggacggggagaagtaaagtttcagccaaaagatgttaacgcagaagcagctgaaagggaacaggagtgcaatgttcgtgatacattgaaggccttctatatacgatttgtcaggctcactggaattcttttcacgaggaccagtttggaaacatttggggagctgttttcttcagttagcaatgatttgcagattcttctttcttccggtcttgaggaggaccttaatttcggttctgatgctgcagaaaatgcattagctgctgttaggcttactatcatccttatattcacagtgcacaatgtaaataaagaacctgatagccagtcatattctgaacttgtgcaacgcagagtactgctccaaagtgcgtttacggctgcttttgattttgttggacgaattctcagaaggtgttcagaacttggtgatatcacatcaagcttctatctgccagccattctggtctacatcgaatggctggcgtcccatccagagttggctattgactcagagatggaggaacagcatgcaaatgccagatctttcttctggaaccaatgtatctcatttatgaataagttgatccttaccaaccttgcttctatggaggacaatgacgatgaggcttgcttttctaatatgagcatttatgaggagggtgaaactgggaacaggcttgccatttgggaagatcttgaattgagaggttttttgcccttggttcctgcacataccattttggatttctcaagcaaacacacatttggaaatgttggaagcaccaaggagaagaaagcacgggttcaacgaatttttgctgcaggaaagtcactgctgaactttgttcagattgatcagttgaggatatattttgatccatctttgaaaaagtttgtcttggccaagaactctcctgtttctagaactaacacccctcttcatgaatctcctgatgcacttaaaacaaatgggactgaaatggatcacaaggctgctagaagatttgattcagtttcttctaatgtgggctcactgcagtctaaagtgcagttttgtcctgatggtgatgatgaagaagaaattgttttcaagccaacagcttatgagaagttttcaaaagtttcttcagatctgtcagttaatggatacgtccatcctgtaccagtgtctgctgctggtgggccaaccaatgctagtttagtgcctgttcagaacactgcatcaatgtctgcaactcgtttaccatccaatccacatgcaactggtttgccatccaatggtgggtcacttccaagtactgcatctctatcagctgctggtaattacaacactgatcagtcgcttcccaggtcgtctgttggttggactgattgggctgtcaatagtgagcaaaatgttactcctagcattgctccaagatttgaactcatgcagtctgttgaggagcctgtttccagctggacaagcagtggggcacagcatgttggtcctcagcacaagcacacaggtttaactttcccagatgttgtctctgaaccatgtgtatctgcatcaatggttcaatgttttagtagctccgattattcgaaatttctcagagaacaagaaatattcttaatgaatggactgaagactgtcaacataactggaaatggctatctagagcagagattgcagcctggattgagtggtttacagtctatgggttattcatctcagatacctattcaacctggtggtaccactgcaaacctgatgcataatcatgtcaaaattactggagagactgtcccctctacacttgattcagttgtaccttcaatagcaccatcaggtggcatgccaatcaaacttacagaagcaccactaactgcttcgaagaagaaccctgttagtcgtccatcaaagcctgttggaccacctccaggatttaatcatgtaaccccaaagcgtcaagatgattctattccggttgaaaaactgcagaacccacaggtcgatgattacagctggctagatagctatcagcaatcgattgatcatgttcacagcttaagaactatttatcctggtgtcagtgatactagcactgcatttgccactccattctctttccctgggaggatacacacacaagggaccaatgaaaagacttggcaagatttccacctttttgagccttcaaaacagaacatgttccaaacttaccaccaaagaaatctgcaaagtggtcaaatggatgaacaagagccagcaaattctatctggtctagcagttaccatgtgtgatttggtaacttttaccaggatgattgctggagtttctggggacagactattggattaagtggcacgacctgatctattgagcttagcccatacctgcagcacttagtgttaaatttcttttgagaatggtagtctttcaagcatgacaatggctgctgttaagtttgggagtgccgccatcttttgggccaaagatggggtagaggatgattgatctgtcggcagtctgatggcgatgaattaatacgaggtcttcaatgctgacagaaagggttaatgaaacaaacttgaatccagtgattataggcactccgcacggaccacatgattcatctctcactggacatattgctaccacaagaagcggacggttgctgccgcaactaaaacatgccgtgtggatgtcagttttcagttggcctatgccatccagagagtaaaaagtgaggatcaacgagcatgttgccgagtagtttctcaagtataaattactgcgtctacttgctccttcgctttgggaacaatgtatcaggttgtaagttgcaattaaatgtttggaacagtttgtcatggtaattgtgtggctcctatatggctatattgttctctgtaattgtatggaccaaccctaagtgttacatacaaacatctttgatttgactcaatatcttgttcttcatccgtttttaaattataagaaattataagttctgttttctt

SEQ ID NO: 68701 - DNA, 3971 bp, Zea Mays
ctcgccgagagcccgaaacagtccaatcccaacacggcgacgacgccagcggaaatcgcatcgccctcttcctctttccctcgctgtgcaatctcccccaaactcccctctcgaaccctcgctctcgtcgccagagcaagcaaagcgcagttgctgaaacccgtgcgctgttgatggatgatgaccgttcccatggatagtgctagcgcagccccgtcctctgcgcgggactttgctgagcgtctccttactaggaataatgaacttgaagatcagcttcgcaagtccgcacaatccaaagtcccatcagatcccagcatatggcttcagatgcgtgacaactttgagaagattattctcatagatcatgacctatctgaacagaaagaggtagagtatctcctatggaagttgcattacaaaagaattgaggacttcaggaggagcattagtgctgcaagctcagctgcatctcagagtgggaagagcaacgctaatccagatcgagtcaagagaattaaattaaccttcaaaagcttcctttcagaagcaactggcttctatcacgacttgatgttaaagatcaaatcaaatttgggccttccactcagttactttccagagggcatcgacaatgcaaacaactctgcgcgagatgacaagacaacagtgcagttgaagaaaggtttgatttcatgccatcgctgcctgatatatttgggagatcttgctcgttacaagagctcgcaaggtgatggtgattctgctagccgtgaatacgcagcggcatctagttactacatggaggctgcttctatctatccttccagtggcaaccctcatcatcagcttgctatactagcatcttactcaggcaacgaggtggtagctgtttataggtacttccgaagcttagctgcagatactccttttaccactgcacgtgacaacttgattattctttttgaaaagaatcgccaaagctatagacagctgccagacaacaacaaagttcccagcgctaaggcattacccccacggctatctgggaggggacaaggacggggagaagtaaagtttcagccaaaagatgttaacgcagaagcagctgaaagggaacaggagtgcaatgttcgtgatacattgaaggccttctatatacgatttgtcaggctcactggaattcttttcacgaggaccagtttggaaacatttggggagctgttttcttcagttagcaatgatttgcagattcttctttcttccggtcttgaggaggaccttaatttcggttctgatgctgcagaaaatgcattagctgctgttaggcttactatcatccttatattcacagtgcacaatgtaaataaagaacctgatagccagtcatattctgaacttgtgcaacgcagagtactgctccaaagtgcgtttacggctgcttttgattttgttggacgaattctcagaaggtgttcagaacttggtgatatcacatcaagcttctatctgccagccattctggtctacatcgaatggctggcgtcccatccagagttggctattgactcagagatggaggaacagcatgcaaatgccagatctttcttctggaaccaatgtatctcatttatgaataagttgatccttaccaaccttgcttctatggaggacaatgacgatgaggcttgcttttctaatatgagcatttatgaggagggtgaaactgggaacaggcttgccatttgggaagatcttgaattgagaggttttttgcccttggttcctgcacataccattttggatttctcaagcaaacacacatttggaaatgttggaagcaccaaggagaagaaagcacgggttcaacgaatttttgctgcaggaaagtcactgctgaactttgttcagattgatcagttgaggatatattttgatccatctttgaaaaagtttgtcttggccaagaactctcctgtttctagaactaacacccctcttcatgaatctcctgatgcacttaaaacaaatgggactgaaatggatcacaaggctgctagaagatttgattcagtttcttctaatgtgggctcactgcagtctaaagtgcagttttgtcctgatggtgatgatgaagaagaaattgttttcaagccaacagcttatgagaagttttcaaaagtttcttcagatctgtcagttaatggatacgtccatcctgtaccagtgtctgctgctggtgggccaaccaatgctagtttagtgcctgttcagaacactgcatcaatgtctgcaactcgtttaccatccaatccacatgcaactggtttgccatccaatggtgggtcacttccaagtactgcatctctatcagctgctggtaattacaacactgatcagtcgcttcccaggtcgtctgttggttggactgattgggctgtcaatagtgagcaaaatgttactcctagcattgctccaagatttgaactcatgcagtctgttgaggagcctgtttccagctggacaagcagtggggcacagcatgttggtcctcagcacaagcacacaggtttaactttcccagatgttgtctctgaaccatgtgtatctgcatcaatggttcaatgttttagtagctccgattattcgaaatttctcagagaacaagaaatattcttaatgaatggactgaagactgtcaacataactggaaatggctatctagagcagagattgcagcctggattgagtggtttacagtctatgggttattcatctcagatacctattcaacctggtggtaccactgcaaacctgatgcataatcatgtcaaaattactggagagactgtcccctctacacttgattcagttgtaccttcaatagcaccatcaggtggcatgccaatcaaacttacagaagcaccactaactgcttcgaagaagaaccctgttagtcgtccatcaaagcctgttggaccacctccaggatttaatcatgtaaccccaaagcgtcaagatgattctattccggttgaaaaactgcagaacccacaggtcgatgattacagctggctagatagctatcagcaatcgattgatcatgttcacagcttaagaactatttatcctggtgtcagtgatactagcactgcatttgccactccattctctttccctgggaggatacacacacaagggaccaatgaaaagacttggcaagatttccacctttttgagccttcaaaacagaacatgttccaaacttaccaccaaagaaatctgcaaagtggtcaaatggatgaacaagagccagcaaattctatctggtctagcagttaccatgtgtgatttggtaacttttaccaggatgattgctggagtttctggggacagactattggattaagtggcacgacctgatctattgagcttagcccatacctgcagcacttagtgttaaatttcttttgagaatggtagtctttcaagcatgacaatggctgctgttaagtttgaaagggttaatgaaacaaacttgaatccagtgattataggcactccgcacggaccacatgattcatctctcactggacatattgctaccacaagaagcggacggttgctgccgcaactaaaacatgccgtgtggatgtcagttttcagttggcctatgccatccagagagtaaaaagtgaggatcaacgagcatgttgccgagtagtttctcaagtataaattactgcgtctacttgctccttcgctttgggaacaatgtatcaggttgtaagttgcaattaaatgtttggaacagtttgtcatggtaattgtgtggctcctatatggctatattgttctctgtaattgtatggaccaaccctaagtgttacatacaaacatctttgatttgactcaatatcttgttcttcatccgtttttaaattataagaaattataagttctgttttctt

SEQ ID NO: 68702 - DNA, 4026 bp, Zea Mays
gccagctcgccgagagcccgaaacagtccaatcccaacacggcgacgacgccagcggaaatcgcatcgccctcttcctctttccctcgctgtgcaatctcccccaaactcccctctcgaaccctcgctctcgtcgccagagcaagcaaagcgcagttgctgaaacccgtgcgctgttgatggatgatgaccgttcccatggatagtgctagcgcagccccgtcctctgcgcgggactttgctgagcgtctccttactaggaataatgaacttgaagatcagcttcgcaagtccgcacaatccaaagtcccatcagatcccagcatatggcttcagatgcgtgacaactttgagaagattattctcatagatcatgacctatctgaacagaaagaggtagagtatctcctatggaagttgcattacaaaagaattgaggacttcaggaggagcattagtgctgcaagctcagctgcatctcagagtgggaagagcaacgctaatccagatcgagtcaagagaattaaattaaccttcaaaagcttcctttcagaagcaactggcttctatcacgacttgatgttaaagatcaaatcaaatttgggccttccactcagttactttccagagggcatcgacaatgcaaacaactctgcgcgagatgacaagacaacagtgcagttgaagaaaggtttgatttcatgccatcgctgcctgatatatttgggagatcttgctcgttacaagagctcgcaaggtgatggtgattctgctagccgtgaatacgcagcggcatctagttactacatggaggctgcttctatctatccttccagtggcaaccctcatcatcaggtacttccgaagcttagctgcagatactccttttaccactgcacgtgacaacttgattattctttttgaaaagaatcgccaaagctatagacagctgccagacaacaacaaagttcccagcgctaaggcattacccccacggctatctgggaggggacaaggacggggagaagtaaagtttcagccaaaagatgttaacgcagaagcagctgaaagggaacaggagtgcaatgttcgtgatacattgaaggccttctatatacgatttgtcaggctcactggaattcttttcacgaggaccagtttggaaacatttggggagctgttttcttcagttagcaatgatttgcagattcttctttcttccggtcttgaggaggaccttaatttcggttctgatgctgcagaaaatgcattagctgctgttaggcttactatcatccttatattcacagtgcacaatgtaaataaagaacctgatagccagtcatattctgaacttgtgcaacgcagagtactgctccaaagtgcgtttacggctgcttttgattttgttggacgaattctcagaaggtgttcagaacttggtgatatcacatcaagcttctatctgccagccattctggtctacatcgaatggctggcgtcccatccagagttggctattgactcagagatggaggaacagcatgcaaatgccagatctttcttctggaaccaatgtatctcatttatgaataagttgatccttaccaaccttgcttctatggaggacaatgacgatgaggcttgcttttctaatatgagcatttatgaggagggtgaaactgggaacaggcttgccatttgggaagatcttgaattgagaggttttttgcccttggttcctgcacataccattttggatttctcaagcaaacacacatttggaaatgttggaagcaccaaggagaagaaagcacgggttcaacgaatttttgctgcaggaaagtcactgctgaactttgttcagattgatcagttgaggatatattttgatccatctttgaaaaagtttgtcttggccaagaactctcctgtttctagaactaacacccctcttcatgaatctcctgatgcacttaaaacaaatgggactgaaatggatcacaaggctgctagaagatttgattcagtttcttctaatgtgggctcactgcagtctaaagtgcagttttgtcctgatggtgatgatgaagaagaaattgttttcaagccaacagcttatgagaagttttcaaaagtttcttcagatctgtcagttaatggatacgtccatcctgtaccagtgtctgctgctggtgggccaaccaatgctagtttagtgcctgttcagaacactgcatcaatgtctgcaactcgtttaccatccaatccacatgcaactggtttgccatccaatggtgggtcacttccaagtactgcatctctatcagctgctggtaattacaacactgatcagtcgcttcccaggtcgtctgttggttggactgattgggctgtcaatagtgagcaaaatgttactcctagcattgctccaagatttgaactcatgcagtctgttgaggagcctgtttccagctggacaagcagtggggcacagcatgttggtcctcagcacaagcacacaggtttaactttcccagatgttgtctctgaaccatgtgtatctgcatcaatggttcaatgttttagtagctccgattattcgaaatttctcagagaacaagaaatattcttaatgaatggactgaagactgtcaacataactggaaatggctatctagagcagagattgcagcctggattgagtggtttacagtctatgggttattcatctcagatacctattcaacctggtggtaccactgcaaacctgatgcataatcatgtcaaaattactggagagactgtcccctctacacttgattcagttgtaccttcaatagcaccatcaggtggcatgccaatcaaacttacagaagcaccactaactgcttcgaagaagaaccctgttagtcgtccatcaaagcctgttggaccacctccaggatttaatcatgtaaccccaaagcgtcaagatgattctattccggttgaaaaactgcagaacccacaggtcgatgattacagctggctagatagctatcagcaatcgattgatcatgttcacagcttaagaactatttatcctggtgtcagtgatactagcactgcatttgccactccattctctttccctgggaggatacacacacaagggaccaatgaaaagacttggcaagatttccacctttttgagccttcaaaacagaacatgttccaaacttaccaccaaagaaatctgcaaagtggtcaaatggatgaacaagagccagcaaattctatctggtctagcagttaccatgtgtgatttggtaacttttaccaggatgattgctggagtttctggggacagactattggattaagtggcacgacctgatctattgagcttagcccatacctgcagcacttagtgttaaatttcttttgagaatggtagtctttcaagcatgacaatggctgctgttaagtttgggagtgccgccatcttttgggccaaagatggggtagaggatgattgatctgtcggcagtctgatggcgatgaattaatacgaggtcttcaatgctgacagaaagggttaatgaaacaaacttgaatccagtgattataggcactccgcacggaccacatgattcatctctcactggacatattgctaccacaagaagcggacggttgctgccgcaactaaaacatgccgtgtggatgtcagttttcagttggcctatgccatccagagagtaaaaagtgaggatcaacgagcatgttgccgagtagtttctcaagtataaattactgcgtctacttgctccttcgctttgggaacaatgtatcaggttgtaagttgcaattaaatgtttggaacagtttgtcatggtaattgtgtggctcctatatggctatattgttctctgtaattgtatggaccaaccctaagtgttacatacaaacatctttgatttgactcaatatcttgttcttcatccgtttttaaattataagaaattataagttctgttttctt

SEQ ID NO: 68703 - DNA, 4012 bp, Zea Mays
ggagccctagccagctcgccgagagcccgaaacagtccaatcccaacacggcgacgacgccagcggaaatcgcatcgccctcttcctctttccctcgctgtgcaatctcccccaaactcccctctcgaaccctcgctctcgtcgccagagcaagcaaagcgcagttgctgaaacccgtgcgctgttgatggatgatgaccgttcccatggatagtgctagcgcagccccgtcctctgcgcgggactttgctgagcgtctccttactaggaataatgaacttgaagatcagcttcgcaagtccgcacaatccaaagtcccatcagatcccagcatatggcttcagatgcgtgacaactttgagaagattattctcatagatcatgacctatctgaacagaaagaggtagagtatctcctatggaagttgcattacaaaagaattgaggacttcaggaggagcattagtgctgcaagctcagctgcatctcagagtgggaagagcaacgctaatccagatcgagtcaagagaattaaattaaccttcaaaagcttcctttcagaagcaactggcttctatcacgacttgatgttaaagatcaaatcaaatttgggccttccactcagttactttccagagggcatcgacaatgcaaacaactctgcgcgagatgacaagacaacagtgcagttgaagaaaggtttgatttcatgccatcgctgcctgatatatttgggagatcttgctcgttacaagagctcgcaaggtgatggtgattctgctagccgtgaatacgcagcggcatctagttactacatggaggctgcttctatctatccttccagtggcaaccctcatcatcagcttgctatactagcatcttactcaggcaacgaggtggtagctgtttatagaatcgccaaagctatagacagctgccagacaacaacaaagttcccagcgctaaggcattacccccacggctatctgggaggggacaaggacggggagaagtaaagtttcagccaaaagatgttaacgcagaagcagctgaaagggaacaggagtgcaatgttcgtgatacattgaaggccttctatatacgatttgtcaggctcactggaattcttttcacgaggaccagtttggaaacatttggggagctgttttcttcagttagcaatgatttgcagattcttctttcttccggtcttgaggaggaccttaatttcggttctgatgctgcagaaaatgcattagctgctgttaggcttactatcatccttatattcacagtgcacaatgtaaataaagaacctgatagccagtcatattctgaacttgtgcaacgcagagtactgctccaaagtgcgtttacggctgcttttgattttgttggacgaattctcagaaggtgttcagaacttggtgatatcacatcaagcttctatctgccagccattctggtctacatcgaatggctggcgtcccatccagagttggctattgactcagagatggaggaacagcatgcaaatgccagatctttcttctggaaccaatgtatctcatttatgaataagttgatccttaccaaccttgcttctatggaggacaatgacgatgaggcttgcttttctaatatgagcatttatgaggagggtgaaactgggaacaggcttgccatttgggaagatcttgaattgagaggttttttgcccttggttcctgcacataccattttggatttctcaagcaaacacacatttggaaatgttggaagcaccaaggagaagaaagcacgggttcaacgaatttttgctgcaggaaagtcactgctgaactttgttcagattgatcagttgaggatatattttgatccatctttgaaaaagtttgtcttggccaagaactctcctgtttctagaactaacacccctcttcatgaatctcctgatgcacttaaaacaaatgggactgaaatggatcacaaggctgctagaagatttgattcagtttcttctaatgtgggctcactgcagtctaaagtgcagttttgtcctgatggtgatgatgaagaagaaattgttttcaagccaacagcttatgagaagttttcaaaagtttcttcagatctgtcagttaatggatacgtccatcctgtaccagtgtctgctgctggtgggccaaccaatgctagtttagtgcctgttcagaacactgcatcaatgtctgcaactcgtttaccatccaatccacatgcaactggtttgccatccaatggtgggtcacttccaagtactgcatctctatcagctgctggtaattacaacactgatcagtcgcttcccaggtcgtctgttggttggactgattgggctgtcaatagtgagcaaaatgttactcctagcattgctccaagatttgaactcatgcagtctgttgaggagcctgtttccagctggacaagcagtggggcacagcatgttggtcctcagcacaagcacacaggtttaactttcccagatgttgtctctgaaccatgtgtatctgcatcaatggttcaatgttttagtagctccgattattcgaaatttctcagagaacaagaaatattcttaatgaatggactgaagactgtcaacataactggaaatggctatctagagcagagattgcagcctggattgagtggtttacagtctatgggttattcatctcagatacctattcaacctggtggtaccactgcaaacctgatgcataatcatgtcaaaattactggagagactgtcccctctacacttgattcagttgtaccttcaatagcaccatcaggtggcatgccaatcaaacttacagaagcaccactaactgcttcgaagaagaaccctgttagtcgtccatcaaagcctgttggaccacctccaggatttaatcatgtaaccccaaagcgtcaagatgattctattccggttgaaaaactgcagaacccacaggtcgatgattacagctggctagatagctatcagcaatcgattgatcatgttcacagcttaagaactatttatcctggtgtcagtgatactagcactgcatttgccactccattctctttccctgggaggatacacacacaagggaccaatgaaaagacttggcaagatttccacctttttgagccttcaaaacagaacatgttccaaacttaccaccaaagaaatctgcaaagtggtcaaatggatgaacaagagccagcaaattctatctggtctagcagttaccatgtgtgatttggtaacttttaccaggatgattgctggagtttctggggacagactattggattaagtggcacgacctgatctattgagcttagcccatacctgcagcacttagtgttaaatttcttttgagaatggtagtctttcaagcatgacaatggctgctgttaagtttgggagtgccgccatcttttgggccaaagatggggtagaggatgattgatctgtcggcagtctgatggcgatgaattaatacgaggtcttcaatgctgacagaaagggttaatgaaacaaacttgaatccagtgattataggcactccgcacggaccacatgattcatctctcactggacatattgctaccacaagaagcggacggttgctgccgcaactaaaacatgccgtgtggatgtcagttttcagttggcctatgccatccagagagtaaaaagtgaggatcaacgagcatgttgccgagtagtttctcaagtataaattactgcgtctacttgctccttcgctttgggaacaatgtatcaggttgtaagttgcaattaaatgtttggaacagtttgtcatggtaattgtgtggctcctatatggctatattgttctctgtaattgtatggaccaaccctaagtgttacatacaaacatctttgatttgactcaatatcttgttcttcatccgtttttaaattataagaaattataagttctgttttctt

SEQ ID NO: 68704 - DNA, 4031 bp, Zea Mays
ttatcataaaaaccaacacattatttattttggtacggagaagtaggcgtcggagccctagccagctcgccgagagcccgaaacagtccaatcccaacacggcgacgacgccagcggaaatcgcatcgccctcttcctctttccctcgctgtgcaatctcccccaaactcccctctcgaaccctcgctctcgtcgccagagcaagcaaagcgcagaataatgaacttgaagatcagcttcgcaagtccgcacaatccaaagtcccatcagatcccagcatatggcttcagatgcgtgacaactttgagaagattattctcatagatcatgacctatctgaacagaaagaggtagagtatctcctatggaagttgcattacaaaagaattgaggacttcaggaggagcattagtgctgcaagctcagctgcatctcagagtgggaagagcaacgctaatccagatcgagtcaagagaattaaattaaccttcaaaagcttcctttcagaagcaactggcttctatcacgacttgatgttaaagatcaaatcaaatttgggccttccactcagttactttccagagggcatcgacaatgcaaacaactctgcgcgagatgacaagacaacagtgcagttgaagaaaggtttgatttcatgccatcgctgcctgatatatttgggagatcttgctcgttacaagagctcgcaaggtgatggtgattctgctagccgtgaatacgcagcggcatctagttactacatggaggctgcttctatctatccttccagtggcaaccctcatcatcagcttgctatactagcatcttactcaggcaacgaggtggtagctgtttataggtacttccgaagcttagctgcagatactccttttaccactgcacgtgacaacttgattattctttttgaaaagaatcgccaaagctatagacagctgccagacaacaacaaagttcccagcgctaaggcattacccccacggctatctgggaggggacaaggacggggagaagtaaagtttcagccaaaagatgttaacgcagaagcagctgaaagggaacaggagtgcaatgttcgtgatacattgaaggccttctatatacgatttgtcaggctcactggaattcttttcacgaggaccagtttggaaacatttggggagctgttttcttcagttagcaatgatttgcagattcttctttcttccggtcttgaggaggaccttaatttcggttctgatgctgcagaaaatgcattagctgctgttaggcttactatcatccttatattcacagtgcacaatgtaaataaagaacctgatagccagtcatattctgaacttgtgcaacgcagagtactgctccaaagtgcgtttacggctgcttttgattttgttggacgaattctcagaaggtgttcagaacttggtgatatcacatcaagcttctatctgccagccattctggtctacatcgaatggctggcgtcccatccagagttggctattgactcagagatggaggaacagcatgcaaatgccagatctttcttctggaaccaatgtatctcatttatgaataagttgatccttaccaaccttgcttctatggaggacaatgacgatgaggcttgcttttctaatatgagcatttatgaggagggtgaaactgggaacaggcttgccatttgggaagatcttgaattgagaggttttttgcccttggttcctgcacataccattttggatttctcaagcaaacacacatttggaaatgttggaagcaccaaggagaagaaagcacgggttcaacgaatttttgctgcaggaaagtcactgctgaactttgttcagattgatcagttgaggatatattttgatccatctttgaaaaagtttgtcttggccaagaactctcctgtttctagaactaacacccctcttcatgaatctcctgatgcacttaaaacaaatgggactgaaatggatcacaaggctgctagaagatttgattcagtttcttctaatgtgggctcactgcagtctaaagtgcagttttgtcctgatggtgatgatgaagaagaaattgttttcaagccaacagcttatgagaagttttcaaaagtttcttcagatctgtcagttaatggatacgtccatcctgtaccagtgtctgctgctggtgggccaaccaatgctagtttagtgcctgttcagaacactgcatcaatgtctgcaactcgtttaccatccaatccacatgcaactggtttgccatccaatggtgggtcacttccaagtactgcatctctatcagctgctggtaattacaacactgatcagtcgcttcccaggtcgtctgttggttggactgattgggctgtcaatagtgagcaaaatgttactcctagcattgctccaagatttgaactcatgcagtctgttgaggagcctgtttccagctggacaagcagtggggcacagcatgttggtcctcagcacaagcacacaggtttaactttcccagatgttgtctctgaaccatgtgtatctgcatcaatggttcaatgttttagtagctccgattattcgaaatttctcagagaacaagaaatattcttaatgaatggactgaagactgtcaacataactggaaatggctatctagagcagagattgcagcctggattgagtggtttacagtctatgggttattcatctcagatacctattcaacctggtggtaccactgcaaacctgatgcataatcatgtcaaaattactggagagactgtcccctctacacttgattcagttgtaccttcaatagcaccatcaggtggcatgccaatcaaacttacagaagcaccactaactgcttcgaagaagaaccctgttagtcgtccatcaaagcctgttggaccacctccaggatttaatcatgtaaccccaaagcgtcaagatgattctattccggttgaaaaactgcagaacccacaggtcgatgattacagctggctagatagctatcagcaatcgattgatcatgttcacagcttaagaactatttatcctggtgtcagtgatactagcactgcatttgccactccattctctttccctgggaggatacacacacaagggaccaatgaaaagacttggcaagatttccacctttttgagccttcaaaacagaacatgttccaaacttaccaccaaagaaatctgcaaagtggtcaaatggatgaacaagagccagcaaattctatctggtctagcagttaccatgtgtgatttggtaacttttaccaggatgattgctggagtttctggggacagactattggattaagtggcacgacctgatctattgagcttagcccatacctgcagcacttagtgttaaatttcttttgagaatggtagtctttcaagcatgacaatggctgctgttaagtttgggagtgccgccatcttttgggccaaagatggggtagaggatgattgatctgtcggcagtctgatggcgatgaattaatacgaggtcttcaatgctgacagaaagggttaatgaaacaaacttgaatccagtgattataggcactccgcacggaccacatgattcatctctcactggacatattgctaccacaagaagcggacggttgctgccgcaactaaaacatgccgtgtggatgtcagttttcagttggcctatgccatccagagagtaaaaagtgaggatcaacgagcatgttgccgagtagtttctcaagtataaattactgcgtctacttgctccttcgctttgggaacaatgtatcaggttgtaagttgcaattaaatgtttggaacagtttgtcatggtaattgtgtggctcctatatggctatattgttctctgtaattgtatggaccaaccctaagtgttacatacaaacatctttgatttgactcaatatcttgttcttcatccgtttttaaattataagaaattataagttctgttttctt

SEQ ID NO: 68705 - DNA, 1726 bp, Zea Mays
gctgcaccaaacggcccttaaggaactgatgatgatcttccacaacttccacataggagtatcagaggcagcggacgtgttagtggtaatgggagaactattgttcctgccggttcatatgctagagcaccaactgacatggaagcacaaattcaacaacttgagcaagaagcatattgttcagtccttcgtgcattcaaagcccagtctgatgccattacatgggagaaggaaggtctcatgactgaacttaggaaggaactaagagtatctgacaaagcacacagggagctgttaaataaagtcaacaacgataatattatatgtagcataagggaatggagatcaacaggagggcttcaagcaagcatgtccaataacccacaaccgattcatgaccctgttccaagtcctaccacctctggccgtaagaggcaaaagacatctcaatctgttcctgctttacctgcacctcctgcaatgcattcacaacagctggctacaccaacacagccatcgtcttcaactgctaggaaagcagtacccccagtccctaaaggcaaaaagacgaaaccaggtcagaaggtaccaggtggctctgcagccaagcctatgccatcttcagcaggtcctagtggaagaggaccacacatgaataggaattttccaggtggttctgctcctgaagctcaagctcagaatgtcgatccattggttggtcgtaaagtgatgagccggtggcctgaagataatagtttttatgaagcagtcatatctgattataatgctgaaacgggcctttatgtgctggtttatgacattaatacggcaaatgaaacctgggagtgggttgatcttaaagagatgggacctgaagacataagatggaaagaggatgactctgggatagaccctgtggtgtatctgcgcagccgaggtgccccaagtagtggggtcaggaagccaacaggtcgcggtgggcccatgccaggttctggaagaggaagaggattaccgaagaacatgtctaggaaagattttccacctccacaaaatggtgttggcaagagaagttccgatgacattgatatccttcatactgagagcctaataaaagaggttgaatgtttattattacaatgaactgcagatcttgtgcacttcatttcacttctcttctgctatatctgctcatgtaggtggagaaagtttttagcgttagcaatcctgatccacaggaagtagaaaaggcaaagaaagcactgaaggagcaagaacagtcattgattgacgccatagcaaggcttgctgaggcatcagatggtgaaagtgatgggctcaatcgtgggcgaaggaacttgtatgctggtaaccagcatcaagcaaactatgttgatgacatgcccgttggtgaccaagctgatgccatgtaaacactgcatgaacatgtatacacaacataatataactgtctgttgtacaatccattgcaaatatttgttctggatttaggtctctgtaagctaagtatcgttcgtttcgggaaactaatttttttagaacagtaattcagaatgctgacaagtaaagcttgtagatgtttgtttctttctctagtttttttgttagtgtggtctcatgttctatatgcatgataaaaggaaaaaaatcacctttgtaaagcactaagtttgtcttcgaccatttttgacgcagcaatcattcc

SEQ ID NO: 68706 - DNA, 1880 bp, Zea Mays
agtgtgtcttaagtggtccagcaacgtttgccgcatgcagccgcttcaagtccgacgattttctcctttctctctctctctatttttcactctagaccgaaatcggagcgcccgataccataccaatagcagcagagcagtagcagcacagctccctcccccgtcctctccaaatctcgccggattccgtccaccgccaagccctcgcatctgccgcaggttcgcgtctgtgcccgagcgtgttgcactgccggtggtgttggtggtggttggcggagttgccgccgagggtcggtcatggactacgggccctctgacagcagcggaactgatgatgatcttccacaacttccacataggagtatcagaggcagcggacgtgttagtggtaatgggagaactattgttcctgccggttcatatgctagagcaccaactgacatggaagcacaaattcaacaacttgagcaagaagcatattgttcagtccttcgtgcattcaaagcccagtctgatgccattacatgggagaaggaaggtctcatgactgaacttaggaaggaactaagagtatctgacaaagcacacagggagctgttaaataaagtcaacaacgataatattatatgtagcataagggaatggagatcaacaggagggcttcaagcaagcatgtccaataacccacaaccgattcatgaccctgttccaagtcctaccacctctggccgtaagaggcaaaagacatctcaatctgttcctgctttacctgcacctcctgcaatgcattcacaacagctggctacaccaacacagccatcgtcttcaactgctaggaaagcagtacccccagtccctaaaggcaaaaagacgaaaccaggtcagaaggtaccaggtggctctgcagccaagcctatgccatcttcagcaggtcctagtggaagaggaccacacatgaataggaattttccaggtggttctgctcctgaagctcaagctcagaatgtcgatccattggttggtcgtaaagtgatgagccggtggcctgaagataatagtttttatgaagcagtcatatctgattataatgctgaaacgatgggacctgaagacataagatggaaagaggatgactctgggatagaccctgtggtgtatctgcgcagccgaggtgccccaagtagtggggtcaggaagccaacaggtcgcggtgggcccatgccaggttctggaagaggaagaggattaccgaagaacatgtctaggaaagattttccacctccacaaaatggtgttggcaagagaagttccgatgacattgatatccttcatactgagagcctaataaaagaggtggagaaagtttttagcgttagcaatcctgatccacaggaagtagaaaaggcaaagaaagcactgaaggagcaagaacagtcattgattgacgccatagcaaggcttgctgaggcatcagatggtgaaagtgatgggctcaatcgtgggcgaaggaacttgtatgctggtaaccagcatcaagcaaactatgttgatgacatgcccgttggtgaccaagctgatgccatgtaaacactgcatgaacatgtatacacaacataatataactgtctgttgtacaatccattgcaaatatttgttctggatttaggtctctgtaagctaagtatcgttcgtttcgggaaactaatttttttagaacagtaattcagaatgctgacaagtaaagcttgtagatgtttgtttctttctctagtttttttgttagtgtggtctcatgttctatatgcatgataaaaggaaaaaaatcacctttgtaaagcactaagtttgtcttcgaccatttttgacgcagcaatcattcc

SEQ ID NO: 68707 - DNA, 1809 bp, Zea Mays
agtgtgtcttaagtggtccagcaacgtttgccgcatgcagccgcttcaagtccgacgattttctcctttctctctctctctatttttcactctagaccgaaatcggagcgcccgataccataccaatagcagcagagcagtagcagcacagctccctcccccgtcctctccaaatctcgccggattccgtccaccgccaagccctcgcatctgccgcaggttcgcgtctgtgcccgagcgtgttgcactgccggtggtgttggtggtggttggcggagttgccgccgagggtcggtcatggactacgggccctctgacagcagcggaactgatgatgatcttccacaacttccacataggagtatcagaggcagcggacgtgttagtggagaaggaaggtctcatgactgaacttaggaaggaactaagagtatctgacaaagcacacagggagctgttaaataaagtcaacaacgataatattatatgtagcataagggaatggagatcaacaggagggcttcaagcaagcatgtccaataacccacaaccgattcatgaccctgttccaagtcctaccacctctggccgtaagaggcaaaagacatctcaatctgttcctgctttacctgcacctcctgcaatgcattcacaacagctggctacaccaacacagccatcgtcttcaactgctaggaaagcagtacccccagtccctaaaggcaaaaagacgaaaccaggtcagaaggtaccaggtggctctgcagccaagcctatgccatcttcagcaggtcctagtggaagaggaccacacatgaataggaattttccaggtggttctgctcctgaagctcaagctcagaatgtcgatccattggttggtcgtaaagtgatgagccggtggcctgaagataatagtttttatgaagcagtcatatctgattataatgctgaaacgggcctttatgtgctggtttatgacattaatacggcaaatgaaacctgggagtgggttgatcttaaagagatgggacctgaagacataagatggaaagaggatgactctgggatagaccctgtggtgtatctgcgcagccgaggtgccccaagtagtggggtcaggaagccaacaggtcgcggtgggcccatgccaggttctggaagaggaagaggattaccgaagaacatgtctaggaaagattttccacctccacaaaatggtgttggcaagagaagttccgatgacattgatatccttcatactgagagcctaataaaagaggtggagaaagtttttagcgttagcaatcctgatccacaggaagtagaaaaggcaaagaaagcactgaaggagcaagaacagtcattgattgacgccatagcaaggcttgctgaggcatcagatggtgaaagtgatgggctcaatcgtgggcgaaggaacttgtatgctggtaaccagcatcaagcaaactatgttgatgacatgcccgttggtgaccaagctgatgccatgtaaacactgcatgaacatgtatacacaacataatataactgtctgttgtacaatccattgcaaatatttgttctggatttaggtctctgtaagctaagtatcgttcgtttcgggaaactaatttttttagaacagtaattcagaatgctgacaagtaaagcttgtagatgtttgtttctttctctagtttttttgttagtgtggtctcatgttctatatgcatgataaaaggaaaaaaatcacctttgtaaagcactaagtttgtcttcgaccatttttgacgcagcaatcattcc

SEQ ID NO: 68708 - DNA, 1629 bp, Zea Mays
agtgtgtcttaagtggtccagcaacgtttgccgcatgcagccgcttcaagtccgacgattttctcctttctctctctctctatttttcactctagaccgaaatcggagcgcccgataccataccaatagcagcagagcagtagcagcacagctccctcccccgtcctctccaaatctcgccggattccgtccaccgccaagccctcgcatctgccgcaggttcgcgtctgtgcccgagcgtgttgcactgccggtggtgttggtggtggttggcggagttgccgccgagggtcggtcatggactacgggccctctgacagcagcggaactgatgatgatcttccacaacttccacataggagtatcagaggcagcggacgtgttagtggtaatgggagaactattgttcctgccggttcatatgctagagcaccaactgacatggaagcacaaattcaacaacttgagcaagaagcatattgttcagtccttcgtgcattcaaagcccagtctgatgccattacatgggagaaggaaggtctcatgactgaacttaggaaggaactaagagtatctgacaaagcacacagggagctgttaaataaagtcaacaacgataatattatatgtagcataagggaatggagatcaacaggagggcttcaagcaagcatgtccaataacccacaaccgattcatgaccctgttccaagtcctaccacctctggccgtaagaggcaaaagacatctcaatctgttcctgctttacctgcacctcctgcaatgcattcacaacagctggctacaccaacacagccatcgtcttcaactgctaggaaagcagtacccccagtccctaaaggcaaaaagacgaaaccaggtcagaaggtaccaggtggctctgcagccaagcctatgccatcttcagcaggtcctagtggaagaggaccacacatgaataggaattttccaggtggttctgctcctgaagctcaagctcagaatgtcgatccattggttggtcgtaaagtgatgagccggtggcctgaagataatagtttttatgaagcagtcatatctgattataatgctgaaacgggcctttatgtgctggtttatgacattaatacggcaaatgaaacctgggagtgggttgatcttaaagagatgggacctgaagacataagatggaaagaggatgactctgggatagaccctgtggtgtatctgcgcagccgaggtgccccaagtagtggggtcaggaagccaacaggtcgcggtgggcccatgccaggttctggaagaggaagaggattaccgaagaacatgtctaggaaagattttccacctccacaaaatggtgttggcaagagaagttccgatgacattgatatccttcatactgagagcctaataaaagaggtggagaaagtttttagcgttagcaatcctgatccacaggaagtagaaaaggcaaagaaagcactgaaggagcaagaacagtcattgattgacgccatagcaaggcttgctgaggcatcagatggtgaaagtggtcctgttactgccgtgagttcaacattttacatatgagaatcttgtcgattcctgcgaagcttttgacgtccc

SEQ ID NO: 68709 - DNA, 1640 bp, Zea Mays
agtgtgtcttaagtggtccagcaacgtttgccgcatgcagccgcttcaagtccgacgattttctcctttctctctctctctatttttcactctagaccgaaatcggagcgcccgataccataccaatagcagcagagcagtagcagcacagctccctcccccgtcctctccaaatctcgccggattccgtccaccgccaagccctcgcatctgccgcaggttcgcgtctgtgcccgagcgtgttgcactgccggtggtgttggtggtggttggcggagttgccgccgagggtcggtcatggactacgggccctctgacagcagcggaactgatgatgatcttccacaacttccacataggagtatcagaggcagcggacgtgttagtggtaatgggagaactattgttcctgccggttcatatgctagagcaccaactgacatggaagcacaaattcaacaacttgagcaagaagcatattgttcagtccttcgtgcattcaaagcccagtctgatgccattacatgggagaaggaaggtctcatgactgaacttaggaaggaactaagagtatctgacaaagcacacagggagctgttaaataaagtcaacaacgataatattatatgtagcataagggaatggagatcaacaggagggcttcaagcaagcatgtccaataacccacaaccgattcatgaccctgttccaagtcctaccacctctggccgtaagaggcaaaagacatctcaatctgttcctgctttacctgcacctcctgcaatgcattcacaacagctggctacaccaacacagccatcgtcttcaactgctaggaaagcagtacccccagtccctaaaggcaaaaagacgaaaccaggtcagaaggtaccaggtggctctgcagccaagcctatgccatcttcagcaggtcctagtggaagaggaccacacatgaataggaattttccaggtggttctgctcctgaagctcaagctcagaatgtcgatccattggttggtcgtaaagtgatgagccggtggcctgaagataatagtttttatgaagcagtcatatctgattataatgctgaaacgatgggacctgaagacataagatggaaagaggatgactctgggatagaccctgtggtgtatctgcgcagccgaggtgccccaagtagtggggtcaggaagccaacaggtcgcggtgggcccatgccaggttctggaagaggaagaggattaccgaagaacatgtctaggaaagattttccacctccacaaaatggtgttggcaagagaagttccgatgacattgatatccttcatactgagagcctaataaaagaggttgaatgtttattattacaatgaactgcagatcttgtgcacttcatttcacttctcttctgctatatctgctcatgtaggtggagaaagtttttagcgttagcaatcctgatccacaggaagtagaaaaggcaaagaaagcactgaaggagcaagaacagtcattgattgacgccatagcaaggcttgctgaggcatcagatggtgaaagtggtcctgttactgccgtgagttcaacattttacatatgagaatcttgtcgattcctgcgaagcttttgacgtccc

SEQ ID NO: 68710 - DNA, 238 bp, Zea Mays
attttggctcaagactttatttttgggtaactacccatctgctcaaggaggtgctagtatctctttgacctacatagcttctgaaaggataattcctggctacggtggtggtatgagttcagcaaaagcagctcttgagagtgatacaagagttcttgcatatgaagcaggtcgaaaaggcaaaatcagagtgaacaccatatcagcaggtccactttaggaaatctgccgagcagaa

SEQ ID NO: 68711 - DNA, 1177 bp, Zea Mays
ctcacttgggtcctggcagtcaccagcccactggccactgcccaccacgttactcggtggcccagccagccaaaacccttctcggctctcgcccagcctgaccggaacgaaacgctgaggcagcatcttccccgccgtcctccgccgcctcccattttcaccttggctgcagcctgcaacacaatcctacgcttccgacttcaacgcgcgcccctcccattttcacctagccctactcctttgtacataaaggaagatgggagcatatgcaacgactggtatgcagatgatagcaacacgcccttccatcccggcctacaggcaaatacttgggtcgacatcagcactatctgcatttggaaggtcaatctgttccagaactggctttgccatctcttctaaagccacatcagcaggaccactggtttcttcgaattgcaagagggttgttgtgagggcaatgtcgcagagaggtgcccaaggacttcccattgatctcacaggtaaaagagcatttatagctggagttgctgatgataatggttatggttgggcaattgctaaggctcttgctgctgctggtgctgagattcttgttggtacatgggtgcctgcgttgaacatatttgagacaagcttgagacgtggaaagtttgatgaatcacggaagctacctgatggatctcttatggagattgctaaagtatatccactggacgcagtttatgacacccctgaggatgttcctgaagatgttaaagcaaacaaaagatatgctggagcttcaaactggactgttaaggaagttgttgagactgtaaagaatgactttggtagcattgatatccttgtacactctctcgccaacggtcctgaggtaacaaagtcactgcttgagacatcaaggagaggataccttgctgcaatttcagcatctagttattcttatgtttctttacttcaacacttccttcccataatgaatccaggtgctagtatctctttgacctacatagcttctgaaaggataattcctggctacggtggtggtatgagttcagcaaaagcagctcttgagagtgatacaagagttcttgcatatgaagcaggtcgaaaaggcaaaatcagagtgaacaccatatcagcaggtccactttaggaaatctgccgagcagaa

SEQ ID NO: 68712 - DNA, 4494 bp, Zea Mays
agacaatacaaccgaaccgaggaatgttcgaatcggcctcacgaccgatggcttcacaccttttggtcaaaaggcatcatcatactcatgttggccagtctttgttattccataaaaccatcctagaatttttattccatactccagtctttggctagtctttgtatgaaatatgaatttatatttctttgcttaatcatacctggctcgaaccatcctagaaagaaactcaatgtcatgttaaatcccttgattgaagagttgaaggagttttggaaaggagtccaagcatacaatgtttttaaaaaacaaatattcaaacttcgagctgcgtatttgtggtcggtgcatgacttcatggcgtatgctatttttgtcggttggagtatacatggtagattggcatgtccatattgtggttcagatacatattgcttccgtcttgctcatggtggaaagatcacttacttcgattgctatcgacgttggttgcccaggaaacacccctttaggagcgataagaaaaactttataaagaacaccatggtcaccaaaggaccacctaaacgtatgagcataatagaaatatatgctcagctgaacaaccttgtcctaaatgaaaagagggacaagtaccaaggattcagagtggaccacaactagacacatatatgtggtctgtgggagctcccttatatgtcgtcattgattcttgtgcacaacattgatgtcatgcaccaagaaagtaatgttgctgaagccctcatacacacctgcatgcattttgaaaaaacaaaggaaaatctaaaagctcgaagagatctagcaatgctttgtgaccgatcaaccaaagtgctcaatgacaacggcaagccgccacatgccttgttctgtcttacctccaaggacaagagcgaggtaatgagatggatgaaaaaaattaaattttcccgatggttatgctgcgggcttgaaagagcagtgaatttcaaaatggggaaaactaactgggttaaagagccatgacttccatatattaatggggaggattatccctgtcatgtttcatggttacatgctcaatgccatgtggcaagcaatagctgagcaaagctatttctacaggcaaatctgtgctaaagaaataagtaaaaatatgatggacaagttggtgaaagaaataccagtgttgctatgcaagcaagaaaaaaatattcccacctagattcttcaatccgatggatcatctacttattcacattccatatgaggaaaaggttggtggacttgtacaatataggtggatgtatcacattgaacatgcactcaaaaacctacgagccatggttcgaaataaggctacagtagaaggatgaatcactgaagcttttttgctaaaggagatttcatacttcaagagtgtgtatttcgtagaggaacaaaatgtctatgctgctacgatgcgatacaatgtcgatgaggaacctcctgtcagtgatctcaaaattttccaatggagaggcacaagtactagtaagggcacgttctaccaccttatagcatggatgaaagaatgtccgcattgctatacatgtactcgaatatgaaagagatgcaaccatatttcatgtaagtctttattttgccccataatttctttgccatgcagccatatttaattacttatttgtcgtatagtaagttcaacgaagaaaattggacttattcccatgagcctacaagcaaacaactagatacgatgcgacgacatgggaggcaaggaagacctaattttgttaactgatttcgggagcatgtaaactatttatattccttactttgatgtcatttagccttttacggcaagtagtcattttaactatatattatttgcagtgcacaaagactcctaacatacacaatgacttgagacaactatcttatgagacggtgacttgcagaacctttggtcgatacgatgtgaatggcttacatttttgtttagaccaatttgaaaagtcatgtcctcatgtagccacacgtaatactagatttgtgactagggcactcaatgcactcaaaagagaaactaattattatggcatcattcaaaacatcctagagtttaattttgcagggaacaaaactttgaaagtagtattctttctatgtgcttggtttgacagcaataatgggattagacaaagtcaatatggcataactgaagtaaagcacaaggaacgacttcgaggccgtgataattttatccttgcacaccagtgcgagcatgtctactatatgtcgtacccaaatctaaagtttaaagcatggtgggtagttcacaaggtgaaccctagggaacgttaacatactccttgcactactggttatcaattcgaagatgaccaggccaatgaggtttatcaagaagaagaatttccaaccacttttactgtcgatgagggtgttgcactcaactcactagttggagaccgtgacgatatcactactgatgagggtgttgcaccgaaacgaaaacgaaaatgaaatctaaggaacaaaagaaccgcattgcgagctttggatcgaagaagactccttgatcgtgatttcgatgaattttgatgtgtaatgaataatttaattttatgtgatgcattatttgttttttattaattatatttaatttaatggagctaatacctttattgttttctattgaacatgatgagtggtaggaaaacaaagcacactgtgagggggtttctttatgcggctagcaggatagtcctcggtgcacattcccttttccaagggagttcttctagccagagcagacaggaggcgttgctgagacacgcccggctagaactgcgtgaaagacatatcactctacaaaggagtaccgatgaagaggacgatgaggaggaggaggtgcagcaccacgaggaacaggttgcagccacagatgccggggtgcagggccatgaggaggaggaggtcacgggcgtagatgctgaagcggatgatgataccatcggggctcctgcctttcgacggaggggcactcggaagggccactttgtcctacctccgtcagtgcctgcacaatcagaagctcggatactgatcatctcggttggtgatagccaatgggatgacacgtctttcgacgaccgaggtcaccatagacaggttaatcaagtcttaggtaacctatgtcatctacataatcctggaattgtgaccgactcaaaaggtgtggtggttccttgcactagttggtcgcacttcgcactagctccacatgctacatatggaacagctcagggcgtcgtcaagcacgacttttggagacgctattgtgtggaacctgaggctcaggagcatgcagaccgagtattagagaaaaatgcgaagaaggtgtgcaaggatgcattttccaatcctcgtctacaggttgtgaacgcgtacatgaagcaccaagggcattctatcaacaacttttgacaatattcagatgtctacttgactgtggaccaatacatggaggtaaaaatctaattcagcaactcattcaaatgtgaatgtaattttgtgctaacgcttcgttgcaggtaactcttccatggatggaacaccggccacatgattacaaggttttgtgtgagatatgagcttcaccagagtggattaagaagtccaacaggaatcggcataggcagcgccatcagccggactgggacgatgatgaggtcgtagtcaaccatatctatggggctgatggacacattcggttggagaagcgaatggtgagtatgtagtattatattttactcagaaatggaatcgatttaaactcatatattcttaaactcatatattcgcaggaggctcaaagtggagttgtcctgagccaaatcaatgtttataggcgagggcatagagcgaaaaacagtgaaatctccgatgagctatgtagtcaagcggccattgagcgtatggagacttacgggcaggtgatggttaggaagtatggataagagtatgattggcgaggagcgcgtaccatcgatgctgaagttgtgcattctattggaggaaaagcccatggacgatattaacttgtgattttttttcaataatattgaaagtatgaccgaatagctaattttcttgtttttcaagatattctatgtttaccagtgtgattgattcaacagagttgcagtctcatggcggctcttcgtcgtaggcaggttgtggtagcagccgtagtcggcactcgagcatggatgacgctatgagggagcagcaagaaaggtttcgtgaagagctgcgacaacaacaatgacattcccccaacaacaatcagagtacatggctgcttagaacgaacaagtgcaacaagcaatgaacgtgagtgtcttatttattctcaacacggttgtatatttgtcctataactaatatattgtatttgcaacagttttg

SEQ ID NO: 68713 - DNA, 684 bp, Zea Mays
gtcaaactcgtctcaccggcggttgggcccagcagctcaagtgcgtcaaccacctcgcagatggggcgcgacctggtgtggatctgccggagctcgcagaccggtcgttggtcgagctctaccgtggtatataattcccccctcaagcctcgcctcctcctcaaccacccgcgccgccaccggagaaaccacggagtagagagaaagagagctcgtcatcgcgagaaaagggtgagatagacgccaccgatgcactcgtgtgtgcccaaccattcaggccccactgctggcgctgaacctttctaaggcctccttgggttgttgcgcggtgaccttggacacggaggcgacctaggatctcggggattcctcgccggaattggagaagccgtcgtgctcatgctctgccgtggccagggatagcggcgctgcgattcacggtgaagagcaggtagcctaggaggaggtctactatgaggagtacgagcttgtctaggaggtgtctcccagtcagctttatggcgccaaggaataattattagttcgctttattgttatcatttatttttgtaagacacttccgcaatgtaataatgtttatgacatttatctctatacacttgtcattatttgtgtttttctttggcgcacataagatacgcacccgactttatcccttaaatc

SEQ ID NO: 68714 - DNA, 604 bp, Zea Mays
gtcaaactcgtctcaccggcggttgggcccagcagctcaagtgcgtcaaccacctcgcagatggggcgcgacctggtgtggatctgccggagctcgcagaccggtcgttggtcgagctctaccgtggtatataattcccccctcaagcctcgcctcctcctcaaccacccgcgccgccaccggagaaaccacggagtagagagaaagagagctcgtcatcgcgagaaaagggtgagatagacgccaccgatgcactcgtgtgtgcccaaccattcaggccccactgctggcgctgaacctttctaaggcctccttgggttgttgcgcggtgaccttggacacggaggcgacctaggatctcggggattcctcgccggaattggagaagccgtcgtgctcatgctctgccgtggccagggatagcggcgctgcgattcacgacgggcaagcaactaaggacccaggtgctcagcagttggaaaatactgagcaggagcttgttgaaggcaagttatgcccttgacgacttttatttacctaataatattctctataatcactttgccatgcttaggcttaattttgatgggacccaataagtcac

SEQ ID NO: 68715 - DNA, 1906 bp, Zea Mays
gcttctgctaggctagtttcaaggttcccactgctcctcaagtgcggcctcctgcagcgcctctgctccgacaccgacgacggcgatgaggagccggtgcccgtggcgctgcacgacatccctggcggcgagcaggcctttgagctgtgcgccaagttctgctacggcatctccatcagcatcagcgccgggaacctggtgcccgcgatgctggcggcgcgcttcctccggatgacggaggccgtcgccaagggcaacctggtggccaagctcgagaccttcttcgactcctgcgtcctgcagggctggaaggactcggtcgccgcgctgcaggccgcgtggcggatctccggctggaacgagagccgcatcgtacagccctgcatcgactccatcgtcgagaagatcctcctgccaccgtccaaggtcacgtggtcctacacgtacacgaggccagggtacaacagcacgaggaaaccccaccagtccgtccccaaggactggtggacggaggacatctccgacctggacatcgaggtcttccgctccgtcatctccaccgtgcgcgcgtcgcggctgctcccaccgccgctcatcggcgaggcgctgcacgtctacgcgtgcaagcacctcgtcgacccgctccacgttgccagcgacgcaggactgaccgccaacggcgtcctccaccagccgccgcagagctcagacgacggcgaggagaagctggtggccatgcagcgccgcgtgctcgagtccatcgtcaccatggtcccgggcgagccggggtcggtcaccggccgcttcctactaaggctgctgcgggtggccaactacgtcagcgcgtcgtcgtccacgcgcgcgcagctgatccggcaggccggctcccagctcgacgaggccagggcggcggacctgctcatcccgctgccatcggacccgcacgcgtacgacgtcggcacggcggaggccgtgctcgagcacttcctggcccagttccagcggcccgcgccgaccgacgagcggcgtcggatgagcgccgccatggagaaggtcgccaggatcttcgacgagtacctgcggaccatcgcgctggaccgcagcttccctgtcggcaagttcgttgacctcgtcgaatgcttgccggacatcgcccgcagtgaccacgacggcctctactacgccatcgacatctatctcaaggagcacccggagctgagcaaggcggataagaagcggttgtgccggctgatagactgcaggaagctgtcgccagacgtgcgggcgcaggcgatagccaacgaccggatgccactgcgcaccattgtacagcttctcttcgtcgagcaggagcggaccatcggtgcagccgccggcagccatgctgcttccggtggcgccgcagatcgggcctccgtcggtgttatctcccagctcgcggcgggaaccaaagatgaagaaccagcctcgtctgctggccacaagtcagacgtgcacagaccacgccgggaccatgcccgggtagccgatggagcctctgccatggcgaggtcgctgtcggcgtcaaccaagactccaccggcagcgaggaaggagaggacgccggaggagacggggagcaggatgaggaacaagcagtgaagcccagtgcacaatttgttcatacttgtgattcttgattatattttttttatttcagtgcatcccatttttggtgggagatgtaagaggtagatttttgtaattaaaatggataaggagttaataagtggctacgtgcagtcatgctcatataatctagggtagctcaccgatgaacaaaggttcgtgttcatcacattcttcctccggcagaacttatgtttgcccatgcatcggcagcctacgaaaaatcagccaatttaac

SEQ ID NO: 68716 - DNA, 3255 bp, Zea Mays
cacatctctgtcacctcacaattttccatgggattgattgaggtccagctttttagctggcaggtcttaaggtttcagagtttttcctttcaatttatcaaggactaggccaacaatacatcgcaatgaagtacatgaagctcggttcaaaacctgatacgttctataccgaagaagcagtcaggtcagtcgtatcagacatacccgccgatctcattatccatgtaaataacaccaagtatcagctacacaaggtacatagtgatgtttttcttccatttaaatgcaaaaaaaaggtgatcatcgtcttctttcacgaaacactctcatacattctctcgtgtagtgctaatcaattacttcatggtttcgagacagatatgcatttttcttcttaccggtgaccaaaaagtagcttttaggatcttgtaagtcaactgaaatacccatatatcaatccgatgctctacgctgaaagcacaaagttgattgagaaaaacatattcctgtcaatcaacagcagttgcagccacttgtaaaggcttagagatttaactttacaaaaaacaactccagataattatctaatagttcatcgcttcacatgttaccaatttctttccatgcgcattgtcacggatctcatgatgctatgaacagaggcacctttactactaagtcgccgctcgcaatgattagcgcgtatcaaagcctaatgatggcatcagactatataattctatctttgtttatgctagtaactaataaaaatggtcaatgaagaaggaatctgggtttggttcataggcctaaggatctgctttggcaggattgtcatagttcacatgctgaaccagacacgcagccggctttttcagatacacgcttcaaaagcttgttctgaataataacatggcaacaacctagcgagtcggaattgattgtgcagctctttaatagcttttcatcaggtggttagtttattggcaaatttgtaaagtgatcaagtggtgaaatctatgcatggtgtgcttctgctaggctagtttcaagggttggtatttttttatattttttctactaagcaaagagttctggtgaactcgatttgaaactattttgacagatctgcttatgtatcacttttacatttgaaatggcggttaacctgtgtcaagagttatgaagttgttttcattttgttggttctacattatttgcagctgaaattctctgtctctgacgacattatttacaaacaaagtatatgcgaacgttacttcgtcctagtatagtagggtggtgacgacaaagaagcgagttttccatttccaatgtccagcctcttgatttcaggtgttgtttacctgtagttcccactgctcctcaagtgcggcctcctgcagcgcctctgctccgacaccgacgacggcgatgaggagccggtgcccgtggcgctgcacgacatccctggcggcgagcaggcctttgagctgtgcgccaagttctgctacggcatctccatcagcatcagcgccgggaacctggtgcccgcgatgctggcggcgcgcttcctccggatgacggaggccgtcgccaagggcaacctggtggccaagctcgagaccttcttcgactcctgcgtcctgcagggctggaaggactcggtcgccgcgctgcaggccgcgtggcggatctccggctggaacgagagccgcatcgtacagccctgcatcgactccatcgtcgagaagatcctcctgccaccgtccaaggtcacgtggtcctacacgtacacgaggccagggtacaacagcacgaggaaaccccaccagtccgtccccaaggactggtggacggaggacatctccgacctggacatcgaggtcttccgctccgtcatctccaccgtgcgcgcgtcgcggctgctcccaccgccgctcatcggcgaggcgctgcacgtctacgcgtgcaagcacctcgtcgacccgctccacgttgccagcgacgcaggactgaccgccaacggcgtcctccaccagccgccgcagagctcagacgacggcgaggagaagctggtggccatgcagcgccgcgtgctcgagtccatcgtcaccatggtcccgggcgagccggggtcggtcaccggccgcttcctactaaggctgctgcgggtggccaactacgtcagcgcgtcgtcgtccacgcgcgcgcagctgatccggcaggccggctcccagctcgacgaggccagggcggcggacctgctcatcccgctgccatcggacccgcacgcgtacgacgtcggcacggcggaggccgtgctcgagcacttcctggcccagttccagcggcccgcgccgaccgacgagcggcgtcggatgagcgccgccatggagaaggtcgccaggatcttcgacgagtacctgcggaccatcgcgctggaccgcagcttccctgtcggcaagttcgttgacctcgtcgaatgcttgccggacatcgcccgcagtgaccacgacggcctctactacgccatcgacatctatctcaaggagcacccggagctgagcaaggcggataagaagcggttgtgccggctgatagactgcaggaagctgtcgccagacgtgcgggcgcaggcgatagccaacgaccggatgccactgcgcaccattgtacagcttctcttcgtcgagcaggagcggaccatcggtgcagccgccggcagccatgctgcttccggtggcgccgcagatcgggcctccgtcggtgttatctcccagctcgcggcgggaaccaaagatgaagaaccagcctcgtctgctggccacaagtcagacgtgcacagaccacgccgggaccatgcccgggtagccgatggagcctctgccatggcgaggtcgctgtcggcgtcaaccaagactccaccggcagcgaggaaggagaggacgccggaggagacggggagcaggatgaggaacaagcagtgaagcccagtgcacaatttgttcatacttgtgattcttgattatattttttttatttcagtgcatcccatttttggtgggagatgtaagaggtagatttttgtaattaaaatggataaggagttaataagtggctacgtgcagtcatgctcatataatctagggtagctcaccgatgaacaaaggttcgtgttcatcacattcttcctccggcagaacttatgtttgcccatgcatcggcagcctacgaaaaatcagccaatttaac

SEQ ID NO: 68717 - DNA, 2202 bp, Zea Mays
ctcctctcttcctagagtatatatattggaagtggccgatgagaaggtccacatctctgtcacctcacaattttccatgggattgattgaggtccagctttttagctggcaggtcttaaggtttcagagtttttcctttcaatttatcaaggactaggccaacaatacatcgcaatgaagtacatgaagctcggttcaaaacctgatacgttctataccgaagaagcagtcaggtcagtcgtatcagacatacccgccgatctcattatccatgtaaataacaccaagtatcagctacacaaggtgttgtttacctgtagttcccactgctcctcaagtgcggcctcctgcagcgcctctgctccgacaccgacgacggcgatgaggagccggtgcccgtggcgctgcacgacatccctggcggcgagcaggcctttgagctgtgcgccaagttctgctacggcatctccatcagcatcagcgccgggaacctggtgcccgcgatgctggcggcgcgcttcctccggatgacggaggccgtcgccaagggcaacctggtggccaagctcgagaccttcttcgactcctgcgtcctgcagggctggaaggactcggtcgccgcgctgcaggccgcgtggcggatctccggctggaacgagagccgcatcgtacagccctgcatcgactccatcgtcgagaagatcctcctgccaccgtccaaggtcacgtggtcctacacgtacacgaggccagggtacaacagcacgaggaaaccccaccagtccgtccccaaggactggtggacggaggacatctccgacctggacatcgaggtcttccgctccgtcatctccaccgtgcgcgcgtcgcggctgctcccaccgccgctcatcggcgaggcgctgcacgtctacgcgtgcaagcacctcgtcgacccgctccacgttgccagcgacgcaggactgaccgccaacggcgtcctccaccagccgccgcagagctcagacgacggcgaggagaagctggtggccatgcagcgccgcgtgctcgagtccatcgtcaccatggtcccgggcgagccggggtcggtcaccggccgcttcctactaaggctgctgcgggtggccaactacgtcagcgcgtcgtcgtccacgcgcgcgcagctgatccggcaggccggctcccagctcgacgaggccagggcggcggacctgctcatcccgctgccatcggacccgcacgcgtacgacgtcggcacggcggaggccgtgctcgagcacttcctggcccagttccagcggcccgcgccgaccgacgagcggcgtcggatgagcgccgccatggagaaggtcgccaggatcttcgacgagtacctgcggaccatcgcgctggaccgcagcttccctgtcggcaagttcgttgacctcgtcgaatgcttgccggacatcgcccgcagtgaccacgacggcctctactacgccatcgacatctatctcaaggagcacccggagctgagcaaggcggataagaagcggttgtgccggctgatagactgcaggaagctgtcgccagacgtgcgggcgcaggcgatagccaacgaccggatgccactgcgcaccattgtacagcttctcttcgtcgagcaggagcggaccatcggtgcagccgccggcagccatgctgcttccggtggcgccgcagatcgggcctccgtcggtgttatctcccagctcgcggcgggaaccaaagatgaagaaccagcctcgtctgctggccacaagtcagacgtgcacagaccacgccgggaccatgcccgggtagccgatggagcctctgccatggcgaggtcgctgtcggcgtcaaccaagactccaccggcagcgaggaaggagaggacgccggaggagacggggagcaggatgaggaacaagcagtgaagcccagtgcacaatttgttcatacttgtgattcttgattatattttttttatttcagtgcatcccatttttggtgggagatgtaagaggtagatttttgtaattaaaatggataaggagttaataagtggctacgtgcagtcatgctcatataatctagggtagctcaccgatgaacaaaggttcgtgttcatcacattcttcctccggcagaacttatgtttgcccatgcatcggcagcctacgaaaaatcagccaatttaac

SEQ ID NO: 68718 - DNA, 3184 bp, Zea Mays
gtctgggcgcaggtcacatcatcagcacaaggactaggccaacaatacatcgcaatgaagtacatgaagctcggttcaaaacctgatacgttctataccgaagaagcagtcaggtcagtcgtatcagacatacccgccgatctcattatccatgtaaataacaccaagtatcagctacacaaggtacatagtgatgtttttcttccatttaaatgcaaaaaaaaggtgatcatcgtcttctttcacgaaacactctcatacattctctcgtgtagtgctaatcaattacttcatggtttcgagacagatatgcatttttcttcttaccggtgaccaaaaagtagcttttaggatcttgtaagtcaactgaaatacccatatatcaatccgatgctctacgctgaaagcacaaagttgattgagaaaaacatattcctgtcaatcaacagcagttgcagccacttgtaaaggcttagagatttaactttacaaaaaacaactccagataattatctaatagttcatcgcttcacatgttaccaatttctttccatgcgcattgtcacggatctcatgatgctatgaacagaggcacctttactactaagtcgccgctcgcaatgattagcgcgtatcaaagcctaatgatggcatcagactatataattctatctttgtttatgctagtaactaataaaaatggtcaatgaagaaggaatctgggtttggttcataggcctaaggatctgctttggcaggattgtcatagttcacatgctgaaccagacacgcagccggctttttcagatacacgcttcaaaagcttgttctgaataataacatggcaacaacctagcgagtcggaattgattgtgcagctctttaatagcttttcatcaggtggttagtttattggcaaatttgtaaagtgatcaagtggtgaaatctatgcatggtgtgcttctgctaggctagtttcaagggttggtatttttttatattttttctactaagcaaagagttctggtgaactcgatttgaaactattttgacagatctgcttatgtatcacttttacatttgaaatggcggttaacctgtgtcaagagttatgaagttgttttcattttgttggttctacattatttgcagctgaaattctctgtctctgacgacattatttacaaacaaagtatatgcgaacgttacttcgtcctagtatagtagggtggtgacgacaaagaagcgagttttccatttccaatgtccagcctcttgatttcaggtgttgtttacctgtagttcccactgctcctcaagtgcggcctcctgcagcgcctctgctccgacaccgacgacggcgatgaggagccggtgcccgtggcgctgcacgacatccctggcggcgagcaggcctttgagctgtgcgccaagttctgctacggcatctccatcagcatcagcgccgggaacctggtgcccgcgatgctggcggcgcgcttcctccggatgacggaggccgtcgccaagggcaacctggtggccaagctcgagaccttcttcgactcctgcgtcctgcagggctggaaggactcggtcgccgcgctgcaggccgcgtggcggatctccggctggaacgagagccgcatcgtacagccctgcatcgactccatcgtcgagaagatcctcctgccaccgtccaaggtcacgtggtcctacacgtacacgaggccagggtacaacagcacgaggaaaccccaccagtccgtccccaaggactggtggacggaggacatctccgacctggacatcgaggtcttccgctccgtcatctccaccgtgcgcgcgtcgcggctgctcccaccgccgctcatcggcgaggcgctgcacgtctacgcgtgcaagcacctcgtcgacccgctccacgttgccagcgacgcaggactgaccgccaacggcgtcctccaccagccgccgcagagctcagacgacggcgaggagaagctggtggccatgcagcgccgcgtgctcgagtccatcgtcaccatggtcccgggcgagccggggtcggtcaccggccgcttcctactaaggctgctgcgggtggccaactacgtcagcgcgtcgtcgtccacgcgcgcgcagctgatccggcaggccggctcccagctcgacgaggccagggcggcggacctgctcatcccgctgccatcggacccgcacgcgtacgacgtcggcacggcggaggccgtgctcgagcacttcctggcccagttccagcggcccgcgccgaccgacgagcggcgtcggatgagcgccgccatggagaaggtcgccaggatcttcgacgagtacctgcggaccatcgcgctggaccgcagcttccctgtcggcaagttcgttgacctcgtcgaatgcttgccggacatcgcccgcagtgaccacgacggcctctactacgccatcgacatctatctcaaggagcacccggagctgagcaaggcggataagaagcggttgtgccggctgatagactgcaggaagctgtcgccagacgtgcgggcgcaggcgatagccaacgaccggatgccactgcgcaccattgtacagcttctcttcgtcgagcaggagcggaccatcggtgcagccgccggcagccatgctgcttccggtggcgccgcagatcgggcctccgtcggtgttatctcccagctcgcggcgggaaccaaagatgaagaaccagcctcgtctgctggccacaagtcagacgtgcacagaccacgccgggaccatgcccgggtagccgatggagcctctgccatggcgaggtcgctgtcggcgtcaaccaagactccaccggcagcgaggaaggagaggacgccggaggagacggggagcaggatgaggaacaagcagtgaagcccagtgcacaatttgttcatacttgtgattcttgattatattttttttatttcagtgcatcccatttttggtgggagatgtaagaggtagatttttgtaattaaaatggataaggagttaataagtggctacgtgcagtcatgctcatataatctagggtagctcaccgatgaacaaaggttcgtgttcatcacattcttcctccggcagaacttatgtttgcccatgcatcggcagcctacgaaaaatcagccaatttaac

SEQ ID NO: 68719 - DNA, 2138 bp, Zea Mays
ggagccttgtgggctgtgaggcctgctgcttgaggactaggccaacaatacatcgcaatgaagtacatgaagctcggttcaaaacctgatacgttctataccgaagaagcagtcaggtcagtcgtatcagacatacccgccgatctcattatccatgtaaataacaccaagtatcagctacacaagttcccactgctcctcaagtgcggcctcctgcagcgcctctgctccgacaccgacgacggcgatgaggagccggtgcccgtggcgctgcacgacatccctggcggcgagcaggcctttgagctgtgcgccaagttctgctacggcatctccatcagcatcagcgccgggaacctggtgcccgcgatgctggcggcgcgcttcctccggatgacggaggccgtcgccaagggcaacctggtggccaagctcgagaccttcttcgactcctgcgtcctgcagggctggaaggactcggtcgccgcgctgcaggccgcgtggcggatctccggctggaacgagagccgcatcgtacagccctgcatcgactccatcgtcgagaagatcctcctgccaccgtccaaggtcacgtggtcctacacgtacacgaggccagggtacaacagcacgaggaaaccccaccagtccgtccccaaggactggtggacggaggacatctccgacctggacatcgaggtcttccgctccgtcatctccaccgtgcgcgcgtcgcggctgctcccaccgccgctcatcggcgaggcgctgcacgtctacgcgtgcaagcacctcgtcgacccgctccacgttgccagcgacgcaggactgaccgccaacggcgtcctccaccagccgccgcagagctcagacgacggcgaggagaagctggtggccatgcagcgccgcgtgctcgagtccatcgtcaccatggtcccgggcgagccggggtcggtcaccggccgcttcctactaaggctgctgcgggtggccaactacgtcagcgcgtcgtcgtccacgcgcgcgcagctgatccggcaggccggctcccagctcgacgaggccagggcggcggacctgctcatcccgctgccatcggacccgcacgcgtacgacgtcggcacggcggaggccgtgctcgagcacttcctggcccagttccagcggcccgcgccgaccgacgagcggcgtcggatgagcgccgccatggagaaggtcgccaggatcttcgacgagtacctgcggaccatcgcgctggaccgcagcttccctgtcggcaagttcgttgacctcgtcgaatgcttgccggacatcgcccgcagtgaccacgacggcctctactacgccatcgacatctatctcaaggtcagaaagctccaagatcggaacatctgtcatggatttgagttgatggatatattacgatggcgagcaggagcacccggagctgagcaaggcggataagaagcggttgtgccggctgatagactgcaggaagctgtcgccagacgtgcgggcgcaggcgatagccaacgaccggatgccactgcgcaccattgtacagcttctcttcgtcgagcaggagcggaccatcggtgcagccgccggcagccatgctgcttccggtggcgccgcagatcgggcctccgtcggtgttatctcccagctcgcggcgggaaccaaagatgaagaaccagcctcgtctgctggccacaagtcagacgtgcacagaccacgccgggaccatgcccgggtagccgatggagcctctgccatggcgaggtcgctgtcggcgtcaaccaagactccaccggcagcgaggaaggagaggacgccggaggagacggggagcaggatgaggaacaagcagtgaagcccagtgcacaatttgttcatacttgtgattcttgattatattttttttatttcagtgcatcccatttttggtgggagatgtaagaggtagatttttgtaattaaaatggataaggagttaataagtggctacgtgcagtcatgctcatataatctagggtagctcaccgatgaacaaaggttcgtgttcatcacattcttcctccggcagaacttatgtttgcccatgcatcggcagcctacgaaaaatcagccaatttaac

SEQ ID NO: 68720 - DNA, 2144 bp, Zea Mays
ctgcaagaaccctctctctctctctctctctctctctctctctctctctctctctctctctctctctctctctctctctctctctcatctttctctctcaagacacacaaaaggaagaagggagcctccaagcagacccctgctgtatagctgctgcagcatgcgcgaatcctaactgaggactaggccaacaatacatcgcaatgaagtacatgaagctcggttcaaaacctgatacgttctataccgaagaagcagtcagttcccactgctcctcaagtgcggcctcctgcagcgcctctgctccgacaccgacgacggcgatgaggagccggtgcccgtggcgctgcacgacatccctggcggcgagcaggcctttgagctgtgcgccaagttctgctacggcatctccatcagcatcagcgccgggaacctggtgcccgcgatgctggcggcgcgcttcctccggatgacggaggccgtcgccaagggcaacctggtggccaagctcgagaccttcttcgactcctgcgtcctgcagggctggaaggactcggtcgccgcgctgcaggccgcgtggcggatctccggctggaacgagagccgcatcgtacagccctgcatcgactccatcgtcgagaagatcctcctgccaccgtccaaggtcacgtggtcctacacgtacacgaggccagggtacaacagcacgaggaaaccccaccagtccgtccccaaggactggtggacggaggacatctccgacctggacatcgaggtcttccgctccgtcatctccaccgtgcgcgcgtcgcggctgctcccaccgccgctcatcggcgaggcgctgcacgtctacgcgtgcaagcacctcgtcgacccgctccacgttgccagcgacgcaggactgaccgccaacggcgtcctccaccagccgccgcagagctcagacgacggcgaggagaagctggtggccatgcagcgccgcgtgctcgagtccatcgtcaccatggtcccgggcgagccggggtcggtcaccggccgcttcctactaaggctgctgcgggtggccaactacgtcagcgcgtcgtcgtccacgcgcgcgcagctgatccggcaggccggctcccagctcgacgaggccagggcggcggacctgctcatcccgctgccatcggacccgcacgcgtacgacgtcggcacggcggaggccgtgctcgagcacttcctggcccagttccagcggcccgcgccgaccgacgagcggcgtcggatgagcgccgccatggagaaggtcgccaggatcttcgacgagtacctgcggaccatcgcgctggaccgcagcttccctgtcggcaagttcgttgacctcgtcgaatgcttgccggacatcgcccgcagtgaccacgacggcctctactacgccatcgacatctatctcaaggagcacccggagctgagcaaggcggataagaagcggttgtgccggctgatagactgcaggaagctgtcgccagacgtgcgggcgcaggcgatagccaacgaccggatgccactgcgcaccattgtacagcttctcttcgtcgagcaggagcggaccatcggtgcagccgccggcagccatgctgcttccggtggcgccgcagatcgggcctccgtcggtgttatctcccagctcgcggcgggaaccaaagatgaagaaccagcctcgtctgctggccacaagtcagacgtgcacagaccacgccgggaccatgcccgggtagccgatggagcctctgccatggcgaggtcgctgtcggcgtcaaccaagactccaccggcagcgaggaaggagaggacgccggaggagacggggagcaggatgaggaacaagcagtgaagcccagtgcacaatttgttcatacttgtgattcttgattatattttttttatttcagtgcatcccatttttggtgggagatgtaagaggtagatttttgtaattaaaatggataaggagttaataagtggctacgtgcagtcatgctcatataatctagggtagctcaccgatgaacaaaggttcgtgttcatcacattcttcctccggcagaacttatgtttgcccatgcatcggcagcctacgaaaaatcagccaatttaac

SEQ ID NO: 68721 - DNA, 2231 bp, Zea Mays
ctgcaagaaccctctctctctctctctctctctctctctctctctctctctctctctctctctctctctctctctctctctctctcatctttctctctcaagacacacaaaaggaagaagggagcctccaagcagacccctgctgtatagctgctgcagcatgcgcgaatcctaactgaggactaggccaacaatacatcgcaatgaagtacatgaagctcggttcaaaacctgatacgttctataccgaagaagcagtcaggtcagtcgtatcagacatacccgccgatctcattatccatgtaaataacaccaagtatcagctacacaaggtgttgtttacctgtagttcccactgctcctcaagtgcggcctcctgcagcgcctctgctccgacaccgacgacggcgatgaggagccggtgcccgtggcgctgcacgacatccctggcggcgagcaggcctttgagctgtgcgccaagttctgctacggcatctccatcagcatcagcgccgggaacctggtgcccgcgatgctggcggcgcgcttcctccggatgacggaggccgtcgccaagggcaacctggtggccaagctcgagaccttcttcgactcctgcgtcctgcagggctggaaggactcggtcgccgcgctgcaggccgcgtggcggatctccggctggaacgagagccgcatcgtacagccctgcatcgactccatcgtcgagaagatcctcctgccaccgtccaaggtcacgtggtcctacacgtacacgaggccagggtacaacagcacgaggaaaccccaccagtccgtccccaaggactggtggacggaggacatctccgacctggacatcgaggtcttccgctccgtcatctccaccgtgcgcgcgtcgcggctgctcccaccgccgctcatcggcgaggcgctgcacgtctacgcgtgcaagcacctcgtcgacccgctccacgttgccagcgacgcaggactgaccgccaacggcgtcctccaccagccgccgcagagctcagacgacggcgaggagaagctggtggccatgcagcgccgcgtgctcgagtccatcgtcaccatggtcccgggcgagccggggtcggtcaccggccgcttcctactaaggctgctgcgggtggccaactacgtcagcgcgtcgtcgtccacgcgcgcgcagctgatccggcaggccggctcccagctcgacgaggccagggcggcggacctgctcatcccgctgccatcggacccgcacgcgtacgacgtcggcacggcggaggccgtgctcgagcacttcctggcccagttccagcggcccgcgccgaccgacgagcggcgtcggatgagcgccgccatggagaaggtcgccaggatcttcgacgagtacctgcggaccatcgcgctggaccgcagcttccctgtcggcaagttcgttgacctcgtcgaatgcttgccggacatcgcccgcagtgaccacgacggcctctactacgccatcgacatctatctcaaggagcacccggagctgagcaaggcggataagaagcggttgtgccggctgatagactgcaggaagctgtcgccagacgtgcgggcgcaggcgatagccaacgaccggatgccactgcgcaccattgtacagcttctcttcgtcgagcaggagcggaccatcggtgcagccgccggcagccatgctgcttccggtggcgccgcagatcgggcctccgtcggtgttatctcccagctcgcggcgggaaccaaagatgaagaaccagcctcgtctgctggccacaagtcagacgtgcacagaccacgccgggaccatgcccgggtagccgatggagcctctgccatggcgaggtcgctgtcggcgtcaaccaagactccaccggcagcgaggaaggagaggacgccggaggagacggggagcaggatgaggaacaagcagtgaagcccagtgcacaatttgttcatacttgtgattcttgattatattttttttatttcagtgcatcccatttttggtgggagatgtaagaggtagatttttgtaattaaaatggataaggagttaataagtggctacgtgcagtcatgctcatataatctagggtagctcaccgatgaacaaaggttcgtgttcatcacattcttcctccggcagaacttatgtttgcccatgcatcggcagcctacgaaaaatcagccaatttaac

SEQ ID NO: 68722 - DNA, 2371 bp, Zea Mays
tcctggccttctctctttctcatgatacatttcgcccaacaacatgtgagagcgagcgagaggtattattttgagggagggagttccctttctctgctctggcctccatgcatataacttgctcagcaggcctagttctcgcagtcggatcctcatactgcaagaaccctctctctctctctctctctctctctctctctctctctctctctctctctctctctctctctctctctctctctcatctttctctctcaagacacacaaaaggaagaagggagcctccaagcagacccctgctgtatagctgctgcagcatgcgcgaatcctaactgaggactaggccaacaatacatcgcaatgaagtacatgaagctcggttcaaaacctgatacgttctataccgaagaagcagtcaggtcagtcgtatcagacatacccgccgatctcattatccatgtaaataacaccaagtatcagctacacaagttcccactgctcctcaagtgcggcctcctgcagcgcctctgctccgacaccgacgacggcgatgaggagccggtgcccgtggcgctgcacgacatccctggcggcgagcaggcctttgagctgtgcgccaagttctgctacggcatctccatcagcatcagcgccgggaacctggtgcccgcgatgctggcggcgcgcttcctccggatgacggaggccgtcgccaagggcaacctggtggccaagctcgagaccttcttcgactcctgcgtcctgcagggctggaaggactcggtcgccgcgctgcaggccgcgtggcggatctccggctggaacgagagccgcatcgtacagccctgcatcgactccatcgtcgagaagatcctcctgccaccgtccaaggtcacgtggtcctacacgtacacgaggccagggtacaacagcacgaggaaaccccaccagtccgtccccaaggactggtggacggaggacatctccgacctggacatcgaggtcttccgctccgtcatctccaccgtgcgcgcgtcgcggctgctcccaccgccgctcatcggcgaggcgctgcacgtctacgcgtgcaagcacctcgtcgacccgctccacgttgccagcgacgcaggactgaccgccaacggcgtcctccaccagccgccgcagagctcagacgacggcgaggagaagctggtggccatgcagcgccgcgtgctcgagtccatcgtcaccatggtcccgggcgagccggggtcggtcaccggccgcttcctactaaggctgctgcgggtggccaactacgtcagcgcgtcgtcgtccacgcgcgcgcagctgatccggcaggccggctcccagctcgacgaggccagggcggcggacctgctcatcccgctgccatcggacccgcacgcgtacgacgtcggcacggcggaggccgtgctcgagcacttcctggcccagttccagcggcccgcgccgaccgacgagcggcgtcggatgagcgccgccatggagaaggtcgccaggatcttcgacgagtacctgcggaccatcgcgctggaccgcagcttccctgtcggcaagttcgttgacctcgtcgaatgcttgccggacatcgcccgcagtgaccacgacggcctctactacgccatcgacatctatctcaaggagcacccggagctgagcaaggcggataagaagcggttgtgccggctgatagactgcaggaagctgtcgccagacgtgcgggcgcaggcgatagccaacgaccggatgccactgcgcaccattgtacagcttctcttcgtcgagcaggagcggaccatcggtgcagccgccggcagccatgctgcttccggtggcgccgcagatcgggcctccgtcggtgttatctcccagctcgcggcgggaaccaaagatgaagaaccagcctcgtctgctggccacaagtcagacgtgcacagaccacgccgggaccatgcccgggtagccgatggagcctctgccatggcgaggtcgctgtcggcgtcaaccaagactccaccggcagcgaggaaggagaggacgccggaggagacggggagcaggatgaggaacaagcagtgaagcccagtgcacaatttgttcatacttgtgattcttgattatattttttttatttcagtgcatcccatttttggtgggagatgtaagaggtagatttttgtaattaaaatggataaggagttaataagtggctacgtgcagtcatgctcatataatctagggtagctcaccgatgaacaaaggttcgtgttcatcacattcttcctccggcagaacttatgtttgcccatgcatcggcagcctacgaaaaatcagccaatttaac

SEQ ID NO: 68723 - DNA, 1995 bp, Zea Mays
cgcgctcgtgagatagtacgtagccatcaagaatttatctatctccgatgtcccttgattgtagaagaagctctcacagtgggacaaccaaccaacaggatctcccttgccgtcgaaggtgggaaaaggaaggttatggtggtgcgggttgtgagggtgttgctgtggggggtatgcgctatggtggggttcggaaaagcctgggattggtgacggggagtgtggaaagggtatctgatggatgggtatggatatggtcgatgtgggtgacagcaaggcggaggttggcgatggaagagtggtggtggtagatgggagctgagcgacagtggtggtgattgggtgtgatggtatggatggcgcggtgtgggttggaagggcaggtatgccactatagcctggcatgccatatgggaaagaagtgttggtgacggtgggtgctgggagcggtggtggtgttggcgacctgctggacatgcggtcaatggtggcggagagggcggcaaactggtggagcatcatctgttggaaagccatgaaatcagcctgggagacagtagcggatgttgctgcgacagatgtgttgacagcggaggtggtgggtggagttgatcccggtggcacttcttcgaaacctgacatcaccgataccagattgttgggattagggttacgaaggtcgtacgagtgggctgctaggctgctggtcataacaaagatactcctgaccaatcccgctggaagttcacaaaagccaattcctactcagtaagtcgccatatgcttcctttttccataggaaccatcaaattctatccctggcaaagaatttggaagaattcggctggtctaaaatgcaaattgttcatttgattagccatcaacaaccagtgttggacagctgacagtctggccaaacgcggtttacctcatccgtcggcttgccccttctgcgatcaaggagtcaattaatcatatcatgttttcctgtgtatttagtctggtcctgaataggctaggtctcctgtccattgctcctctacctgatgtgacatatttttccaaatggaggtgccaagcaattaacgagtttggtacaaagatgaggaaagggttgaattatttatggggtgtttggttcccctgactaaagtttagtccatgtgaccgtgtctcattcgatcagatgtttgaatgtcaattacctggggaaatgtgttctttgcgatcagcagctggagacaattcaacacatcttgatttcatgtgtcttctccaggaatatatggtggcagatcttaagtagagtggtgatgcagcttgtgtcaccagggctggaggtatctatattccaggattggtggagtgtggatgaaggtcttgtgccagttttgcacagaaatggtttcaacacattagttattcttgtggcttggtggatctggaagcacagaaatgcttgtgtttttttatggtgtttctccaaacacgagttcagttctacagcatatccatgaggatgccatgccaggctttgggaattggcaggtgctaaggcactgagaaggttgtggccttgatttggggtttgtcttagttatttctctttttttgtatagtccttgtacgtggtcttctttagacctttctctctacttaatataatgatgcgcaattctcttgcgtgtttgagaaaaaaaaggaaaaaaatgtcaattacaagtattaaatatagtctagttacaaaactaattagacagatgagaactaaaccgcaaggcgagcctattaagcctaattagcccatgattcgcccatgtgatgctacaataaatatttgctaccatggattaattaggcttaataaatttgtctagtcgtttaatcttcatgtgtaattagttgtcattagactatatttaacacttataattgccattcaaacatctgatgtgacacggactaaactttagttaggggaaccaaatgttagag

SEQ ID NO: 68724 - DNA, 1099 bp, Zea Mays
gttccagcccagcgacgccgagttccttgcagtctcgccatgctcagcgccatgcacgacctcctccttgtctgtgtacgtggtgcatgagtcaaggaccgagagatgttgatcgtgcgaagtgaagtggtgctaaccacaagatgaagtcgatggacaacccgaaggacggacgaaacaaaggccaagatagaagatgctcgccaagcgagtgtcatctagcgaacactaactagtgttggattttaggcaagcaccggttttatgcataaccgttatatatgctattttattgcaattattgtttgtaggtttgtattgtgcacctaagtgtagtaattgcttgaaccctagttgcatgaactcaggattccttttgagatggatactagtatgctaggtcgggtagctgctatgctaattaaggatcttggtagaagtccagtgatttttctaacactcgcgcgaggtcaagaattggttcaatccatttttgataacggaattatgaaggtctgtggacactgatccatggggatgcgttgtctacgagacgaaactggaataaggattaatgtgtggtaccgtgtgtcaaacgtttgaacgtactaaacacatgccgagaaatatggtaatcggtaagcctagtacctgattgaacctttcgacagactttatccttcattggtcctgagacgaagtctcccattctagatatggtgggtacaagtgcggtcattgcacggcggtggccggggtcagtggagcattgtatgccaaggtcgtgagccctgctctgttgccagggaattgacagagacgattgacgtgtgtggggacagagtgcccctatttgtcttgtgtttaggtttaccttgcaaggttaaaactcaattcgaatcgtctgcttccgtagctaatgagactgcttgatccatgctgctacatcgagtaagaagtgaaatgagatttcttgagataaagtgttgattgcattaattgtttgttaccatgcgtgcttagaaggaagcaaacttagttgaagaataccatagaacttgaaaaggtaaaattttgttaagactcaactagtgctttt

SEQ ID NO: 68725 - DNA, 3411 bp, Zea Mays
atgccatccgcccctcccacgcctgatcgatcggacccgaaaactcgtttcattttggctctgagtggtcctggcatcctgcacgccgtctctctcgtcggctcgcctcgcacctgcgctcccatccacttccctccgcatgctccatcgcctcgccttctccccctctccctcgggagccgctgctgctccgacgatgtcaccctcatgcatcgctcggatctctccgataagcttctccacctttctcatgccttgctctgttcctccctcgcgcgctcataacggaggttgcggcaatggtgaagacgacgtgggagaccggggaggacactgtcgtggcaggggtgggggctgaggcggcgggaagcacctccaatctctttgccccgcacggacctgagctgccatcgtcgccttgccgtcgggatcgctcaggagaacaaccatggtgcttatgtgcgtgcctcgacccttgtttggatgtctctcatctcgtggatctagggttctttggtgattttgtcttgggggtagggcttaggagttgtgttccttggtggctcacgcttgagatcagtttcctgtgcccaacattctcattcccagagtcgccctctcgattccccctcgatccagccggagcagtcccctttccctcctccacacaagggcaccgtcatctcctccttgtgttgctcaatcgcccagtacaacatggattactcgcaggagttcagttaggactttggagaaatagtgtggtatgttttcttcagtgatctgagagactggagttgtttttcttctagcctgacagactggcatgtatatatatatatatttttctgcgagacaatcttcttagataagttcagggatctgagaggtcctgttatatgaagtaatcactccgttcaaattttaatctattcttctgtgagtcggtcttcttagagaactatagcgatctgagagacagctcctgttatatgcagtaatcactccgttcagattttaattattctgtctttttttcatgttcttctgtgggtcagtcttcttagagaacttcgtgatctgagagacagctcctgttgtatgcagtactccgttcaaatttcaatttattctgtcttttttccctagatacatagtttttactacgggcagttctttcgcaacatggtgtatgaccagtttttctttttctggatacacaatttattctgacatatagttttgcgtcgattcgttgaagaactttatacgggtagtctggtctctggtcatgttcacgtatgacgtattcagccaagtgccgcgatgcttacgatctgaaacatatgcactatatgtaacaagaatcggtgtattttcaatcacatgatgaacatgcatgaatccttttgtttggtaccggagggaaaaagcgtcacgagatgaacatgcatgaatccttttgtttcacaacgaatgcaagaagcgtgtgctttactataaaattctatgccacaaagatcagtcatgcttcttcaggtattatggcggtcactgcaagaatctcacatgagtaactactaggcatatccagcatataaaatcgattgttaacagagccaccgagggtagctaaactgtgcatatcatatacacaagtgactgtagggacttaaaaacttctttgcggaaagctaagcgaaaccaatcagcaccgaacaactttctcttctattctggaccatcagtttactaatagaacaccgagcacttactctggcaacactggcatgtgatgccgagagcgatcatcccatggaccaataatatggaggtatggtagtgggtgtttaatgttttgacctacgagtacttctaattttacttcattattgttagtcatctaatatatacatgttcctacttcattattaggcgtgggtgtttattctgtgttaataagcaattataaattatggggtgttaaagtagtagcacgtctttgttacaagattatagccgatcaatcatacttcgtttactacttggataacacaccaagcagaaatagctgaacaaatatccctacaaacagctcggacatcattgtttcagttcatgtccgtactctgctttgatcaaatacagtttccagtatccagtccatacattttagttttcagtttttcgtttggataacattaagtccatactttttcatattttcagttagcacatacatttcatttcatccaagacatgctgaaaactgaatgtgattcatacaacaggctaggaatcctgttcaaatctaaaaacttagatcgtcagtttggatcacatcatgtttttagattttcagcttataagctgaaatttgatgcccattttccagatttcagattttcattttttttagttttttatttaaacattttggatcacattcatgtttcaactttcgatttgcaaataatatgcacgtagttttcatattaacatatattatatggtggtctgaatcttgaaaatttgcttgcttgttgagtgaagaactccttgccatggttgttgcagcctaaatctgtttatattacttgtagatattcagttgttattttgtgccttgctgctaccaaaattaagaaatgataacactataattaagaaatgataacactatagcccacctagcattgttctgacatttcaaaatagaataattggatttataccattaaaagattctaacttcctgcgcaggtctatcgttggaaatgaagggacatgtcatttttctgtccaacaagaataacacttgtcttctgctaatattgccgctagacaaacgaactctgtgcttttgtgtgcaagcaatactcgctaatagtctgttcggatgtctaatgaaccatgtgtgtatgctgcttttggatcagttatattttgaactgccaacgataatgttttggcaggcatgaatcacagacgcttaatgtaacgtgtggctaaacagaatcattaatggctgcattgtggtccaactaatattgttgctactttattgtatatgtatatatctatgttgtggcttaatatgtctgtaattatactcgaaaataccattatctgttcagtgtgagttatatatataacttttgctactttgccatataattagacattgtacatggtatcgataggacattattttcgatcagttccctgttgtatcaggcctgattattatactatgttgcacctctatgtatggtagcttgtgcacaaacaagaaacagttgtaactctaatgtaaattatgacatgtctctgattgttgctctggctatctcactaacatttttgtggagatttaatcttgaagcattgattgtgctaaatagtttatca

SEQ ID NO: 68726 - DNA, 1207 bp, Zea Mays
cacgcgtgccggcgcgcacgcgtggccgcactctcccgcggcacgaagcgtgtgcggttcggacccgaaaacttactccatttcgcctctgaacgatcccatgccatccgcccctcccacgcctgatcgatcggacccgaaaactcgtttcattttggctctgagtggtcctggcatcctgcacgccgtctctctcgtcggctcgcctcgcacctgcgctcccatccacttccctccgcatgctccatcgcctcgccttctccccctctccctcgggagccgctgctgctccgacgatgtcaccctcatgcatcgctcggatctctccgataagcttctccacctttctcatgccttgctctgttcctccctcgcgcgctcataacggaggttgcggcaatggtgaagacgacgtgggagaccggggaggacactgtcgtggcaggggtgggggctgaggcggcgggaagcacctccaatctctttgccccgcacggacctgagctgccatcgtcgccttgccgtcgggatcgctcaggagaacaaccatggtgcttatgtctatcgttggaaatgaagggacatgtcatttttctgtccaacaagaataacacttgtcttctgctaatattgccgctagacaaacgaactctgtgcttttgtgtgcaagcaatactcgctaatagtctgttcggatgtctaatgaaccatgtgtgtatgctgcttttggatcagttatattttgaactgccaacgataatgttttggcaggcatgaatcacagacgcttaatgtaacgtgtggctaaacagaatcattaatggctgcattgtggtccaactaatattgttgctactttattgtatatgtatatatctatgttgtggcttaatatgtctgtaattatactcgaaaataccattatctgttcagtgtgagttatatatataacttttgctactttgccatataattagacattgtacatggtatcgataggacattattttcgatcagttccctgttgtatcaggcctgattattatactatgttgcacctctatgtatggtagcttgtgcacaaacaagaaacagttgtaactctaatgtaaattatgacatgtctctgattgttgctctggctatctcactaacatttttgtggagatttaatcttgaagcattgattgtgctaaatagtttatca

SEQ ID NO: 68727 - DNA, 753 bp, Zea Mays
ctgacgtggtcaaccacgtcgtcgactccatagccgcgcgaggtttcgaggatctgaagaatcatcctagtacatggaatctcaagtgccaggtaagttgtgcccttgatcactttcatttacccaatgttctttattatcacttatcaatgcataggtttaattttgatgggacctaataggtcaccctagactggttatcctttttaccttgtttatccctaaatcaattgggtagctatgttattgctttatatggttttgggttaatatttcattatatccatgttcctattattttgttatgttatttatgttcatgataagatcattatgttaatgggaactgttgggaccatgcttcgtcgccgaaggtcctacaaaaagaaacagcttcagctgaagctgcttgaacatgatgccgaagacaccgttcacgaagcttcggaactacagcatatccgaagacgaagggtcgaaccgacttaaagataaaatgaccttttagccttcaaaggtctgattcattgttgtaaacttttatgaggggcataattgtaattcctcatgagctgtgtcctgtgcctataaatagtgaacagtattcctttactgttcacacattcctgtaattgctaacgcatcactcgggaattattgtttgtcaaggcaaatgtataaatgtacttaaacgttgtattcaaatatcttaaattcatataataatatatgtgaatgaggtcatttgttttc

SEQ ID NO: 68728 - DNA, 1917 bp, Zea Mays
acacgacaaaatcaccaaccagtccagtcaccactgggtgctaaggagaaatggccacttccgcgcctgcggccaacgccgacggcgctgctcccggaggtgtagatggtcgcagcggcttctgtgaggtgaccaggacgttccgcagcctgcgcccgccggtgccgctgccgccgacggactcaccgctctcgtttccggagtttgcgttctcgctcctggcgtcgtccccgacccccgcgcacccggctctcctcgacgccgccaccggcgaggccgtgtcgttcccggcgttcctgtcccaggtacgcgcgctcgcgggggcgctgcgctccgtggtccggctcggccgcggcgacgtcgcgttcgtcctcgctccgacacggctggacgtgccggtgctctacttcgcgctgctctcattcggcgccgtggtgtcgccggtaaaccctgcgctgaccgcggacgaggtcgcgcgcctcgtggcactgtcaggcgcgtccgtcgccttcgccgtgtcgtcgaccgccgcaaagctgccggctggcctccccgccgtgctcctcgattcggaccacttccgctcctttctgcagaagcagagcgacggccgtggggaggagggacttgcggcggacacggcggtggtgcggcagtcggatacggcggcgatccagtactcgtcggggacaaccgggagggtgaaggccgcggcgctgccgcaccggagcttcatcgcgatggcggcgggatcccatgctctgctggggaaaccgaggcgcggtcgcgagaggtcgctgctgggcgcgcccatgttccactcgatggggttctactacacgctgaagggggtggcgctggggcacacgacggtgatgctgaccgacgcggtggcgcggcgcggcgtgaagggggtgatcgaggcggcggggaggtgggccgtcagtgagatgacggcgtcgccaccggtggtggtggccatggtcaaggagcggtgccacctagaggcgctggagcgcgtggtatgtggcggcgcgccgctgccgaggacggcagccgagagtttccgacgacggttccccaacgtggatctctgcatgggctacggttcaactgaggctggtggcatatcgctgatgatccagcgggaggagtgcggccgcatctgctccgccggccgtgtctcggagaacgtggaggtgaagatcgtggaccacgtgaccggcgaagctctgtccgtgggccagaaaggggagcttctggtgagagggcctgccgtcatggccgggtatgttggcgacgaggaggccaacgctagcagctttgattctgaaggctggctgaggactggggacctttgctacatcgaccaggacgggttcctgttcgtggtggacaggctgaaagagctcatcaagtacaagggctatcaggttccacctgcagagctggagcttgtcctgcagtcgttgccggaagttatcgatgccgcagtcatgccgtatcctcatgaggaggcagggcagatcccagtagcgcttgtggtcaggcagcctggtagcaaggtcacggaggctcaagtcatggaccacgtcgcccagagggtggcgccttacaagaagatccgcaaggtgctctttgtcgactccattcccaagtctccggctggcaagatactgaggaggcagctgaccaaccatgtgcaggctggcgctgtttctagaatgtaattcttctttatttacttgattgtgtgatgcgtgcaagagacacagaatgacgcgacgatgggttagaacgcgatcgactttttaaacaaataatagtggcatgctgtggaactctatctatgtatgtaaggtccgtttgcatccttggaattaaattttattctaataatagtaatttagttggata

SEQ ID NO: 68729 - DNA, 1538 bp, Zea Mays
ccaaaattagggtgagcagctgcgccaaaagcctaggccccggtggtgttcacttggccgccactgccggccacggcggcggcggcccatccctccctttcccctcttctcccctctctctcttccccgccccctctgtctcgacatcggtgccgtcatcttctcggcctcccgccggttggatccatcgggcgctggtcggatctgcctttcggtcgccgttgcccctccgccacgcctcgcgccagccggtcctgctgagcgccggcctgatccgcctccctctagtcggatctgcttggcgtcggcctctcgccgctactgctccgcatcctgggcttcctcaccgatgcacgatcctggcaccacgccacgccggtgtgctaccggctccttgcggcggagcggaccacatggtctgtgctcacgctgagcagggacccacgatcgctcgcgttcctcatcattaggccgactttctacttctcgacgctggagcagcttgacctctcactggtgtcgtcgtcgcctctcgccggccggtcgcgtctcgcggtgccaggcgagcggccctgttgccattggctgggtaccgttgacatggccgcccccgctggctcgcatcgccgtggctggcacacgtgacgacaggggcggccggcggtggtggctaggccctagccgctgctgcatgcggtaggcttcggcttcaatggattcggctccccttgggccctcgtcgcctcgccttcagggtcgtgcactcgtgccgccaccgtcagcccccatcgccgtctctgggcccctgagaggagcatgacccgagcctccacccttgtcgccaggagaacggggctactccgccacctcggcttccttaagggccgacctagcacccccgccccctcgtcgcctccacatcttcaaggttgtgccgccaaagctggcctccatagcctgcactggacccctgattggagcacgacctaagcctccatcctcgacactgggagtttagggctactcctgtcaccccggctatccttggctgctgttgtgttcgttgtggcattgccgctagcatgagcagggtttttggggtctcatacgaaagccatgccaggtgtagtctgcacagacaacagcaatgccctcgacgccgatgacctccttggattgttgtaaggttctcttgtgtcgttgtgcttggcactggcgttccagcctttgtcgtggtcggtgaatatccgcctctcctgccattcacccatgaggatttctcctcaagcggcgttggatggtggcattagagcccggatgcgccatcgggtgtttctgttttctcgaaaggagatcgtcgttttcggcgtaaagccgagcggtcggagtggaaatttgcaccacgcttcgtcctcccaatcatctgctcggccgctggctgctcgtcatctccggcgcgcaggagcttcaacccgtacgcctctgccttctagagcatgttgttcgctagcccagctgacgagtggccgtgggtcccc

SEQ ID NO: 68730 - DNA, 1580 bp, Zea Mays
ccaaaattagggtgagcagctgcgccaaaagcctaggccccggtggtgttcacttggccgccactgccggccacggcggcggcggcccatccctccctttcccctcttctcccctctctctcttccccgccccctctgtctcgacatcggtgccgtcatcttctcggcctcccgccggttggatccatcgggcgctggtcggatctgcctttcggtcgccgttgcccctccgccacgcctcgcgccagccggtcctgctgagcgccggcctgatccgcctccctctagtcggatctgcttggcgtcggcctctcgccgctactgctccgcatcctgggcttcctcaccgatgcacgatcctggcaccacgccacgccggtgtgctaccggctccttgcggcggagcggaccacatggtctgtgctcacgctgagcagggacccacgatcgctcgcgttcctcatcattaggccgactttctacttctcgacgctggagcagcttgacctctcactggtgtcgtcgtcgcctctcgccggccggtcgcgtctcgcggtgccaggcgagcggccctgttgccattggctgggtaccgttgacatggccgcccccgctggctcgcatcgccgtggctggcacacgtgacgacaggggcggccggcggtggtggctaggccctagccgctgctgcatgcggtaggcttcggcttcaatggattcggctccccttgggccctcgtcgcctcgccttcagggtcgtgcactcgtgccgccaccgtcagcccccatcgccgtctctgggcccctgagaggagcatgacccgagcctccacccttgtcgccaggagaacggggctactccgccacctcggcttccttaagggccgacctagcacccccgccccctcgtcgcctccacatcttcaaggttgtgccgccaaagctggcctccatagcctgcactggacccctgattggagcacgacctaagcctccatcctcgacactgggagtttagggctactcctgtcaccccggctatccttggctgctgttgtgttcgttgtggcattgccgctagcatgagcagggtttttggggtctcatacgaaagccatgccaggtgtagtctgcacagacaacagcaatgccctcgacgccgatgacctccttggattgttgtaagcctttgtcgtggtgcgacgagtgccttcctttggtgcgtctgctccgtcagcactctccttgttaacagaagcatattaatcttatgctaggtcggtgaatatccgcctctcctgccattcacccatgaggatttctcctcaagcggcgttggatggtggcattagagcccggatgcgccatcgggtgtttctgttttctcgaaaggagatcgtcgttttcggcgtaaagccgagcggtcggagtggaaatttgcaccacgcttcgtcctcccaatcatctgctcggccgctggctgctcgtcatctccggcgcgcaggagcttcaacccgtacgcctctgccttctagagcatgttgttcgctagcccagctgacgagtggccgtgggtcccc

SEQ ID NO: 68731 - DNA, 1837 bp, Zea Mays
ccaaaattagggtgagcagctgcgccaaaagcctaggccccggtggtgttcacttggccgccactgccggccacggcggcggcggcccatccctccctttcccctcttctcccctctctctcttccccgccccctctgtctcgacatcggtgccgtcatcttctcggcctcccgccggttggatccatcgggcgctggtcggatctgcctttcggtcgccgttgcccctccgccacgcctcgcgccagccggtcctgctgagcgccggcctgatccgcctccctctagtcggatctgcttggcgtcggcctctcgccgctactgctccgcatcctgggcttcctcaccgatgcacgatcctggcaccacgccacgccggtgtgctaccggctccttgcggcggagcggaccacatggtctgtgctcacgctgagcagggacccacgatcgctcgcgttcctcatcattaggccgactttctacttctcgacgctggagcagcttgacctctcactggtgtcgtcgtcgcctctcgccggccggtcgcgtctcgcggtgccaggcgagcggccctgttgccattggctgggtaccgttgacatggccgcccccgctggctcgcatcgccgtggctggcacacgtgacgacaggggcggccggcggtggtggctaggccctagccgctgctgcatgcggtaggcttcggcttcaatggattcggctccccttgggccctcgtcgcctcgccttcagggtcgtgcactcgtgccgccaccgtcagcccccatcgccgtctctgggcccctgagaggagcatgacccgagcctccacccttgtcgccaggagaacggggctactccgccacctcggcttccttaagggccgacctagcacccccgccccctcgtcgcctccacatcttcaaggttgtgccgccaaagctggcctccatagcctgcactggacccctgattggagcacgacctaagcctccatcctcgacactgggagtttagggctactcctgtcaccccggctatccttggctgctgttgtgttcgttgtggcattgccgctagcatgagcagggtttttggggtctcatacgaaagccatgccaggtgtagtctgcacagacaacagcaatgccctcgacgccgatgacctccttggattgttgtaaggttctcttgtgtcgttgtgcttggcactggcgttccagcctttgtcgtggtgcgacgagtgccttcctttggcactcataccgaattcattgttggccccaagcatgtttgaagcgaaattaatagtctccctcactgtcatttcgggatgatggaggtcattctggctgacgtacgcacagaggtgctgcgatgtagatgacattgtttccccattacacttgtatttgacatctccatggatctattgacaagaaatcagaaaattaatgatgttcgtttttctatcacaaaagtacgtactaacttcttaggaataaccactaatcaatacatgctgcttctgtgacatggttttgatttatttacactaattttgaggactggactggactagtactaccttcaaagaagaatctagttttcctgccagtgcttttaacagggtcgtctttcctgatccgggtgctccaagaagaagtgtcattctggccacacaagaaaagcacctgattgattacaggctgaccaggttattaattagactgaacaagtcattgaaacatttttagagaaactgccatttttcactgtggtgtgctgtttaataccgaatggtcatgggactgtacctggatgatcttattgtcc

SEQ ID NO: 68732 - DNA, 244 bp, Zea Mays
cggcggcttgccgagtcagccggtgtcgtcttccaccgtcctatcctcgccgcaagccgcatacggcgttgcctcctgatctccccagtcgagtcggtacacctgcggccgcgtttctagaggtacaataaatgataaggtggagagtttacatgaggcatatcaacaaaatagttgatttgactgaagacaatggacaaaggatagaatggaaggtggacttgatcaattggggaaacctgac

SEQ ID NO: 68733 - DNA, 451 bp, Zea Mays
ccttgttgcggcggcggcttgccgagtcagccggtgtcgtcttccaccgtcctatcctcgccgcaagccgcatacggcgttgcctcctgatctccccagtcgagtcggtacacctgcggccgcgtttctagaggttagtgccattgctcaatcctcaagttgggggtcctaagggtgtgtcgaggtgttcgccgaaccacggggaaaccgtacgcgcgctcggaccgtagagactagcactcgaacggcgggaattgctcgtcggccgtcatcctccgccgtgtagccgccccgctccgtggcactgatcatcgttgctccttcctcaggtacaataaatgataaggtggagagtttacatgaggcatatcaacaaaatagttgatttgactgaagacaatggacaaaggatagaatggaaggtggacttgatcaattggggaaacctgac

SEQ ID NO: 68734 - DNA, 2373 bp, Zea Mays
cgagctcgacgcccctcccctcgacgccctgcctctgtcttcctcctcgcgtcttcttccctcgcttccatttcttttcaaaccctaagaacccgattccctgctcaaaaccctaaccctagcccccgcctcctctactccgcgtcacccactgctccgcggcatccctcgcggttcccgccgtccggggcgccaggccctgccactcggcccttgcggacctagggtttctcccgagcttctcgttgcgttcactgccttgggcgagccggtgcgggcggatggttaggcgaggaggtggtgggcggagatgagatgaggttgcagcggcgttgggggttgtgggaactatgagtaggctctcgttcagaccgcggccgctagacatccacaagaagctccccatcctcaagtctgtgcgtgagttcgaggatgaggagccagggatcgcaccactgtcctctgcgagggctggggtgctgctgcgtcactcaggagctgacttcaccgcgtctggggccaacaatgccacagaaggcgagggaaatcaagcactcagtaagaaaaatgcccaggaaatacctacaccacaatttgatggtgttgacacatatgaaagggactatactcgtacctttgcacaaccgacatcttatatacgtggaagaggagccagggctgagatcggtgaatttgtcgagtatgaccttgacaatgaagacgaggactggcttgaagaattcaatagcgagcggaagaatataaaccctgaaaagttggaggccctcctattcaagttggaagttttggaccacagagctcgtgaaagagcaggagccataacaccaactttcataggaccagtgccagtcctcttacagctagatgctgctatggaggctttgcagtacttatctgttcgaaatgccgttttccaagctgtatacaactactggaaatcaaagagggagcgatggcaaaagcctattcttcggcgtttgcagccgcctccaccagtgaatgatacaaatccatacaatgtcttcagaccaagagaaaaggctcatcgtcttcatacaagaaggatgcaaagaagggaaaacaatatccaatcattcgaaaaactccgcttggtgcgacgcaacttggagcaagcaaaagcactaatggatgctttgattaagagggaggagacaaagcgggaggccatggagtgccaagttaacctgcagcgtgttcagatgaaatataagcatgaggcccagcttgttgaggatgggactaccttgtctggcttccagcaaacttcgagcagatttgaatcgagcgatgatgatgtggattcagatgatactgcaactgaacagacatacatacgtccagcagttttccatccaaggttttctgctaataagctatctgtgatccctccacttcgcataaagcgtgaacgagagctaaaaaggagacctcagcagaatggctgtgtatttaaaagggatcctgaggagccagtattcttattcacaagaccgcttgatccggagaagttggttgcagcaggtatcaagccaccaccagatcctcctattgagaatggtgccacatcaccaccatttcggtgtcgaggtaggattggacgaggcggccgcatcatctttgatcgatggaatcctcttctccggacaccaattgaccaggagacttattatgtgccatacggtcacaggcccccctcacctgaaggtgccaaattggcccttggagagtccattgtgagttgagcccagtggttcattctgatggaaggcagagaaagctccttgataagcagcagcctcagtggaagttcgagagcatatgggatctcgtggggctagcatttcttgctcagatgtggcttggtcatcttttttcacagctgttgtaaaattattgcagtgtaggtgaaagagtagatctttttgtctaatctttgcatttagggtcagtattcatatcatgctctctcatttgattattcatttggaggagaggaaatccttctcattgctaagttcagcttttctgtataattcttcaacaccttgttgcatgcattcaactaatgcacgtgtgtatatactgaaacccaatgtgcattgcccttttgtggcagatgtcattagtcagtaggttaggcagaaaatgggaatggaaaggggccaacaatgttattgaatctgttgctgaatgttgggttggcgcgcagcttcctcttgtaaccgtgtacagattcaggtttttgttgtgtaacaccgccaacaaatagctggttattgtcaggactgccatatgttctgattcttgctgatgacactgggctactttagg

SEQ ID NO: 68735 - DNA, 2529 bp, Zea Mays
cgagctcgacgcccctcccctcgacgccctgcctctgtcttcctcctcgcgtcttcttccctcgcttccatttcttttcaaaccctaagaacccgattccctgctcaaaaccctaaccctagcccccgcctcctctactccgcgtcacccactgctccgcggcatccctcgcggttcccgccgtccggggcgccaggccctgccactcggcccttgcggacctagggtttctcccgagcttctcgttgcgttcactgccttgggcgagccggtgcgggcggatggttaggcgaggaggtggtgggcggagatgagatgaggttgcagcggcgttgggggttgtgggaactatgagtaggctctcgttcagaccgcggccgctagacatccacaagaagctccccatcctcaagtctgtgcgtgagttcgaggatgaggagccagggatcgcaccactgtcctctgcgagggctggggtgctgctgcgtcactcaggagctgacttcaccgcgtctggggccaacaatgccacagaaggcgagggaaatcaagcactcagtaagaaaaatgcccaggaaatacctacaccacaatttgatggtgttgacacatatgaaagggactatactcgtacctttgcacaaccgacatcttatatacgtggaagaggagccagggctgagatcggtgaatttgtcgagtatgaccttgacaatgaagacgaggactggcttgaagaattcaatagcgagcggaagaatataaaccctgaaaaacttatcaacaatgggatcaacattgtcttctctgccttcttccccaccaaaagcttcatcaacatcactcacatctatgtcatctggtttggtctgcctagcttgcgttggaaggttgcgccctcgaagttggaggccctcctattcaagttggaagttttggaccacagagctcgtgaaagagcaggagccataacaccaactttcataggaccagtgccagtcctcttacagctagatgctgctatggaggctttgcagtacttatctgttcgaaatgccgttttccaagctgtatacaactactggaaatcaaagagggagcgatggcaaaagcctattcttcggcgtttgcagccgcctccaccagtgaatgatacaaatccatacaatgtcttcagaccaagagaaaaggctcatcgtcttcatacaagaaggatgcaaagaagggaaaacaatatccaatcattcgaaaaactccgcttggtgcgacgcaacttggagcaagcaaaagcactaatggatgctttgattaagagggaggagacaaagcgggaggccatggagtgccaagttaacctgcagcgtgttcagatgaaatataagcatgaggcccagcttgttgaggatgggactaccttgtctggcttccagcaaacttcgagcagatttgaatcgagcgatgatgatgtggattcagatgatactgcaactgaacagacatacatacgtccagcagttttccatccaaggttttctgctaataagctatctgtgatccctccacttcgcataaagcgtgaacgagagctaaaaaggagacctcagcagaatggctgtgtatttaaaagggtatcaagccaccaccagatcctcctattgagaatggtgccacatcaccaccatttcggtgtcgaggtaggattggacgaggcggccgcatcatctttgatcgatggaatcctcttctccggacaccaattgaccaggagacttattatgtgccatacggtcacaggcccccctcacctgaaggttgaagcggtttttcatatgcacatagtgcttaatggcactggcacagctatggaatttgtgaagcctctgagcaattgtttttccataggtgccaaattggcccttggagagtccattgtgagttgagcccagtggttcattctgatggaaggcagagaaagctccttgataagcagcagcctcagtggaagttcgagagcatatgggatctcgtggggctagcatttcttgctcagatgtggcttggtcatcttttttcacagctgttgtaaaattattgcagtgtaggtgaaagagtagatctttttgtctaatctttgcatttagggtcagtattcatatcatgctctctcatttgattattcatttggaggagaggaaatccttctcattgctaagttcagcttttctgtataattcttcaacaccttgttgcatgcattcaactaatgcacgtgtgtatatactgaaacccaatgtgcattgcccttttgtggcagatgtcattagtcagtaggttaggcagaaaatgggaatggaaaggggccaacaatgttattgaatctgttgctgaatgttgggttggcgcgcagcttcctcttgtaaccgtgtacagattcaggtttttgttgtgtaacaccgccaacaaatagctggttattgtcaggactgccatatgttctgattcttgctgatgacactgggctactttagg

SEQ ID NO: 68736 - DNA, 2460 bp, Zea Mays
cgagctcgacgcccctcccctcgacgccctgcctctgtcttcctcctcgcgtcttcttccctcgcttccatttcttttcaaaccctaagaacccgattccctgctcaaaaccctaaccctagcccccgcctcctctactccgcgtcacccactgctccgcggcatccctcgcggttcccgccgtccggggcgccaggccctgccactcggcccttgcggacctagggtttctcccgagcttctcgttgcgttcactgccttgggcgagccggtgcgggcggatggttaggcgaggaggtggtgggcggagatgagatgaggttgcagcggcgttgggggttgtgggaactatgagtaggctctcgttcagaccgcggccgctagacatccacaagaagctccccatcctcaagtctgtgcgtgagttcgaggatgaggagccagggatcgcaccactgtcctctgcgagggctggggtgctgctgcgtcactcaggagctgacttcaccgcgtctggggccaacaatgccacagaaggcgagggaaatcaagcactcagtaagaaaaatgcccaggaaatacctacaccacaatttgatggtgttgacacatatgaaagggactatactcgtacctttgcacaaccgacatcttatatacgtggaagaggagggctgagatcggtgaatttgtcgagtatgaccttgacaatgaagacgaggactggcttgaagaattcaatagcgagcggaagaatataaaccctgaaaagttggaggccctcctattcaagttggaagttttggaccacagagctcgtgaaagagcaggagccataacaccaactttcataggaccagtgccagtcctcttacagctagatgctgctatggaggctttgcagtacttatctgttcgaaatgccgttttccaagctgtatacaactactggaaatcaaagagggagcgatggcaaaagcctattcttcggcgtttgcagccgcctccaccagtgaatgatacaaatccatacaatgtcttcagaccaagagaaaaggctcatcgtcttcatacaagaaggatgcaaagaagggaaaacaatatccaatcattcgaaaaactccgcttggtgcgacgcaacttggagcaagcaaaagcactaatggatgctttgattaagagggaggagacaaagcgggaggccatggagtgccaagttaacctgcagcgtgttcagatgaaatataagcatgaggcccagcttgttgaggatgggactaccttgtctggcttccagcaaacttcgagcagatttgaatcgagcgatgatgatgtggattcagatgatactgcaactgaacagacatacatacgtccagcagttttccatccaaggttttctgctaataagctatctgtgatccctccacttcgcataaagcgtgaacgagagctaaaaaggagacctcagcagaatggctgtgtatttaaaagggatcctgaggagccagtattcttattcacaagaccgcttgatccggagaagttggttgcagcaggtatcaagccaccaccagatcctcctattgagaatggtgccacatcaccaccatttcggtgtcgaggtaggattggacgaggcggccgcatcatctttgatcgatggaatcctcttctccggacaccaattgaccaggagacttattatgtgccatacggtcacaggcccccctcacctgaaggttgaagcggtttttcatatgcacatagtgcttaatggcactggcacagctatggaatttgtgaagcctctgagcaattgtttttccataggtgccaaattggcccttggagagtccattgtgagttgagcccagtggttcattctgatggaaggcagagaaagctccttgataagcagcagcctcagtggaagttcgagagcatatgggatctcgtggggctagcatttcttgctcagatgtggcttggtcatcttttttcacagctgttgtaaaattattgcagtgtaggtgaaagagtagatctttttgtctaatctttgcatttagggtcagtattcatatcatgctctctcatttgattattcatttggaggagaggaaatccttctcattgctaagttcagcttttctgtataattcttcaacaccttgttgcatgcattcaactaatgcacgtgtgtatatactgaaacccaatgtgcattgcccttttgtggcagatgtcattagtcagtaggttaggcagaaaatgggaatggaaaggggccaacaatgttattgaatctgttgctgaatgttgggttggcgcgcagcttcctcttgtaaccgtgtacagattcaggtttttgttgtgtaacaccgccaacaaatagctggttattgtcaggactgccatatgttctgattcttgctgatgacactgggctactttagg

SEQ ID NO: 68737 - DNA, 2545 bp, Zea Mays
cgagctcgacgcccctcccctcgacgccctgcctctgtcttcctcctcgcgtcttcttccctcgcttccatttcttttcaaaccctaagaacccgattccctgctcaaaaccctaaccctagcccccgcctcctctactccgcgtcacccactgctccgcggcatccctcgcggttcccgccgtccggggcgccaggccctgccactcggcccttgcggacctagggtttctcccgagcttctcgttgcgttcactgccttgggcgagccggtgcgggcggatggttaggcgaggaggtggtgggcggagatgagatgaggttgcagcggcgttgggggttgtgggaactatgagtaggctctcgttcagaccgcggccgctagacatccacaagaagctccccatcctcaagtctgtgcgtgagttcgaggatgaggagccagggatcgcaccactgtcctctgcgagggctggggtgctgctgcgtcactcaggagctgacttcaccgcgtctggggccaacaatgccacagaaggcgagggaaatcaagcactcagtaagaaaaatgcccaggaaatacctacaccacaatttgatggtgttgacacatatgaaagggactatactcgtacctttgcacaaccgacatcttatatacgtggaagaggagccagggctgagatcggtgaatttgtcgagtatgaccttgacaatgaagacgaggactggcttgaagaattcaatagcgagcggaagaatataaaccctgaaaaacttatcaacaatgggatcaacattgtcttctctgccttcttccccaccaaaagcttcatcaacatcactcacatctatgtcatctggtggatcaggctcaatgtttggtctgcctagcttgcgttggaaggttgcgccctcgaagttggaggccctcctattcaagttggaagttttggaccacagagctcgtgaaagagcaggagccataacaccaactttcataggaccagtgccagtcctcttacagctagatgctgctatggaggctttgcagtacttatctgttcgaaatgccgttttccaagctgtatacaactactggaaatcaaagagggagcgatggcaaaagcctattcttcggcgtttgcagccgcctccaccagtgaatgatacaaatccatacaatgtcttcagaccaagagaaaaggctcatcgtcttcatacaagaaggatgcaaagaagggaaaacaatatccaatcattcgaaaaactccgcttggtgcgacgcaacttggagcaagcaaaagcactaatggatgctttgattaagagggaggagacaaagcgggaggccatggagtgccaagttaacctgcagcgtgttcagatgaaatataagcatgaggcccagcttgttgaggatgggactaccttgtctggcttccagcaaacttcgagcagatttgaatcgagcgatgatgatgtggattcagatgatactgcaactgaacagacatacatacgtccagcagttttccatccaaggttttctgctaataagctatctgtgatccctccacttcgcataaagcgtgaacgagagctaaaaaggagacctcagcagaatggctgtgtatttaaaagggtatcaagccaccaccagatcctcctattgagaatggtgccacatcaccaccatttcggtgtcgaggtaggattggacgaggcggccgcatcatctttgatcgatggaatcctcttctccggacaccaattgaccaggagacttattatgtgccatacggtcacaggcccccctcacctgaaggttgaagcggtttttcatatgcacatagtgcttaatggcactggcacagctatggaatttgtgaagcctctgagcaattgtttttccataggtgccaaattggcccttggagagtccattgtgagttgagcccagtggttcattctgatggaaggcagagaaagctccttgataagcagcagcctcagtggaagttcgagagcatatgggatctcgtggggctagcatttcttgctcagatgtggcttggtcatcttttttcacagctgttgtaaaattattgcagtgtaggtgaaagagtagatctttttgtctaatctttgcatttagggtcagtattcatatcatgctctctcatttgattattcatttggaggagaggaaatccttctcattgctaagttcagcttttctgtataattcttcaacaccttgttgcatgcattcaactaatgcacgtgtgtatatactgaaacccaatgtgcattgcccttttgtggcagatgtcattagtcagtaggttaggcagaaaatgggaatggaaaggggccaacaatgttattgaatctgttgctgaatgttgggttggcgcgcagcttcctcttgtaaccgtgtacagattcaggtttttgttgtgtaacaccgccaacaaatagctggttattgtcaggactgccatatgttctgattcttgctgatgacactgggctactttagg

SEQ ID NO: 68738 - DNA, 2925 bp, Zea Mays
cgagctcgacgcccctcccctcgacgccctgcctctgtcttcctcctcgcgtcttcttccctcgcttccatttcttttcaaaccctaagaacccgattccctgctcaaaaccctaaccctagcccccgcctcctctactccgcgtcacccactgctccgcggcatccctcgcggttcccgccgtccggggcgccaggccctgccactcggcccttgcggacctagggtttctcccgagcttctcgttgcgttcactgccttgggcgagccggtgcgggcggatggttaggcgaggaggtggtgggcggagatgagatgaggttgcagcggcgttgggggttgtgggaactatgagtaggctctcgttcagaccgcggccgctagacatccacaagaagctccccatcctcaagtctgtgcgtgagttcgaggatgaggagccagggatcgcaccactgtcctctgcgagggctggggtgctgctgcgtcactcaggagctgacttcaccgcgtctggggccaacaatgccacagaaggcgagggaaatcaagcactcagtaagaaaaatgcccaggaaatacctacaccacaatttgatggtgttgacacatatgaaagggactatactcgtacctttgcacaaccgacatcttatatacgtggaagaggagccagggctgagatcggtgaatttgtcgagtatgaccttgacaatgaagacgaggactggcttgaagaattcaatagcgagcggaagaatataaaccctgaaaagttggaggccctcctattcaagttggaagttttggaccacagagctcgtgaaagagcaggagccataacaccaactttcataggaccagtgccagtcctcttacagctagatgctgctatggaggctttgcagtacttatctgttcgaaatgccgttttccaagctgtatacaactactggaaatcaaagagggagcgatggcaaaagcctattcttcggcgtttgcagccgcctccaccagtgaatgatacaaatccatacaatgtcttcagaccaagagaaaaggctcatcgtcttcatacaagaaggatgcaaagaagggaaaacaatatccaatcattcgaaaaactccgcttggtgcgacgcaacttggagcaagcaaaagcactaatggatgctttgattaagagggaggagacaaagcgggaggccatggagtgccaagttaacctgcagcgtgttcagatgaaatataagcatgaggcccagcttgttgaggatgggactaccttgtctggcttccagcaaacttcgagcagatttgaatcgagcgatgatgatgtggattcagatgatactgcaactgaacagacatacatacgtccagcagttttccatccaaggttttctgctaataagctatctgtgatccctccacttcgcataaagcgtgaacgagagctaaaaaggagacctcagcagaatggctgtgtatttaaaagggtagggtgtctcagtctcctccttttatccttttcatatcgttcactatccaaaaaaagagaggaaaaaacggtgttaaacacatgtttcatgctaaccccactagcctaatgattttagctggcataattaagaaagctataaagttctgtttgaatttgtttttattttgttccagaaagttatggaacttgagcaaacacaaaatataaaatagaaaaaacctgactggaatccagtgagaaactggacagatagcggatgctctagtggacatccagatttttctttttgcaaaataatattttgttgccctctaagacattgagcatttgaattaagggcaccactgtcatttagtgttcaattgtgaattggaatggaatttggtgtagatcggaaaagactccagttgctttagttcccttgtcaagttcatttaccagcttcttcagatacaggatcctgaggagccagtattcttattcacaagaccgcttgatccggagaagttggttgcagcaggtatcaagccaccaccagatcctcctattgagaatggtgccacatcaccaccatttcggtgtcgaggtaggattggacgaggcggccgcatcatctttgatcgatggaatcctcttctccggacaccaattgaccaggagacttattatgtgccatacggtcacaggcccccctcacctgaaggttgaagcggtttttcatatgcacatagtgcttaatggcactggcacagctatggaatttgtgaagcctctgagcaattgtttttccataggtgccaaattggcccttggagagtccattgtgagttgagcccagtggttcattctgatggaaggcagagaaagctccttgataagcagcagcctcagtggaagttcgagagcatatgggatctcgtggggctagcatttcttgctcagatgtggcttggtcatcttttttcacagctgttgtaaaattattgcagtgtaggtgaaagagtagatctttttgtctaatctttgcatttagggtcagtattcatatcatgctctctcatttgattattcatttggaggagaggaaatccttctcattgctaagttcagcttttctgtataattcttcaacaccttgttgcatgcattcaactaatgcacgtgtgtatatactgaaacccaatgtgcattgcccttttgtggcagatgtcattagtcagtaggttaggcagaaaatgggaatggaaaggggccaacaatgttattgaatctgttgctgaatgttgggttggcgcgcagcttcctcttgtaaccgtgtacagattcaggtttttgttgtgtaacaccgccaacaaatagctggttattgtcaggactgccatatgttctgattcttgctgatgacactgggctactttagg

SEQ ID NO: 68739 - DNA, 2379 bp, Zea Mays
cgagctcgacgcccctcccctcgacgccctgcctctgtcttcctcctcgcgtcttcttccctcgcttccatttcttttcaaaccctaagaacccgattccctgctcaaaaccctaaccctagcccccgcctcctctactccgcgtcacccactgctccgcggcatccctcgcggttcccgccgtccggggcgccaggccctgccactcggcccttgcggacctagggtttctcccgagcttctcgttgcgttcactgccttgggcgagccggtgcgggcggatggttaggcgaggaggtggtgggcggagatgagatgaggttgcagcggcgttgggggttgtgggaactatgagtaggctctcgttcagaccgcggccgctagacatccacaagaagctccccatcctcaagtctgtgcgtgagttcgaggatgaggagccagggatcgcaccactgtcctctgcgagggctggggtgctgctgcgtcactcaggagctgacttcaccgcgtctggggccaacaatgccacagaaggcgagggaaatcaagcactcagtaagaaaaatgcccaggaaatacctacaccacaatttgatggtgttgacacatatgaaagggactatactcgtacctttgcacaaccgacatcttatatacgtggaagaggagccagggctgagatcggtgaatttgtcgagtatgaccttgacaatgaagacgaggactggcttgaagaattcaatagcgagcggaagaatataaaccctgaaaagttggaggccctcctattcaagttggaagttttggaccacagagctcgtgaaagagcaggagccataacaccaactttcataggaccagtgccagtcctcttacagctagatgctgctatggaggctttgcagtacttatctgttcgaaatgccgttttccaagctgtatacaactactggaaatcaaagagggagcgatggcaaaagcctattcttcggcgtttgcagccgcctccaccagtgaatgatacaaatccatacaatgtcttcagaccaagagaaaaggctcatcgtcttcatacaagaaggatgcaaagaagggaaaacaatatccaatcattcgaaaaactccgcttggtgcgacgcaacttggagcaagcaaaagcactaatggatgctttgattaagagggaggagacaaagcgggaggccatggagtgccaagttaacctgcagcgtgttcagatgaaatataagcatgaggcccagcttgttgaggatgggactaccttgtctggcttccagcaaacttcgagcagatttgaatcgagcgatgatgatgtggattcagatgatactgcaactgaacagacatacatacgtccagcagttttccatccaaggttttctgctaataagctatctgtgatccctccacttcgcataaagcgtgaacgagagctaaaaaggagacctcagcagaatggctgtgtatttaaaaggatacaggatcctgaggagccagtattcttattcacaagaccgcttgatccggagaagttggttgcagcaggtatcaagccaccaccagatcctcctattgagaatggtgccacatcaccaccatttcggtgtcgaggtaggattggacgaggcggccgcatcatctttgatcgatggaatcctcttctccggacaccaattgaccaggagacttattatgtgccatacggtcacaggcccccctcacctgaaggtgccaaattggcccttggagagtccattgtgagttgagcccagtggttcattctgatggaaggcagagaaagctccttgataagcagcagcctcagtggaagttcgagagcatatgggatctcgtggggctagcatttcttgctcagatgtggcttggtcatcttttttcacagctgttgtaaaattattgcagtgtaggtgaaagagtagatctttttgtctaatctttgcatttagggtcagtattcatatcatgctctctcatttgattattcatttggaggagaggaaatccttctcattgctaagttcagcttttctgtataattcttcaacaccttgttgcatgcattcaactaatgcacgtgtgtatatactgaaacccaatgtgcattgcccttttgtggcagatgtcattagtcagtaggttaggcagaaaatgggaatggaaaggggccaacaatgttattgaatctgttgctgaatgttgggttggcgcgcagcttcctcttgtaaccgtgtacagattcaggtttttgttgtgtaacaccgccaacaaatagctggttattgtcaggactgccatatgttctgattcttgctgatgacactgggctactttagg

SEQ ID NO: 68740 - DNA, 2400 bp, Zea Mays
cgagctcgacgcccctcccctcgacgccctgcctctgtcttcctcctcgcgtcttcttccctcgcttccatttcttttcaaaccctaagaacccgattccctgctcaaaaccctaaccctagcccccgcctcctctactccgcgtcacccactgctccgcggcatccctcgcggttcccgccgtccggggcgccaggccctgccactcggcccttgcggacctagggtttctcccgagcttctcgttgcgttcactgccttgggcgagccggtgcgggcggatggttaggcgaggaggtggtgggcggagatgagatgaggttgcagcggcgttgggggttgtgggaactatgagtaggctctcgttcagaccgcggccgctagacatccacaagaagctccccatcctcaagtctgtgcgtgagttcgaggatgaggagccagggatcgcaccactgtcctctgcgagggctggggtgctgctgcgtcactcaggagctgacttcaccgcgtctggggccaacaatgccacagaaggcgagggaaatcaagcactcagtaagaaaaatgcccaggaaatacctacaccacaatttgatggtgttgacacatatgaaagggactatactcgtacctttgcacaaccgacatcttatatacgtggaagaggagccagggctgagatcggtgaatttgtcgagtatgaccttgacaatgaagacgaggactggcttgaagaattcaatagcgagcggaagaatataaaccctgaaaagttggaggccctcctattcaagttggaagttttggaccacagagctcgtgaaagagcaggagccataacaccaactttcataggaccagtgccagtcctcttacagctagatgctgctatggaggctttgcagtacttatctgttcgaaatgccgttttccaagctgtatacaactactggaaatcaaagagggagcgatggcaaaagcctattcttcggcgtttgcagccgcctccaccagtgaatgatacaaatccatacaatgtcttcagaccaagagaaaaggctcatcgtcttcatacaagaaggatgcaaagaagggaaaacaatatccaatcattcgaaaaactccgcttggtgcgacgcaacttggagcaagcaaaagcactaatggatgctttgattaagagggaggagacaaagcgggaggccatggagtgccaagttaacctgcagcgtgttcagatgaaatataagcatgaggcccagcttgttgaggatgggactaccttgtctggcttccagcaaacttcgagcagatttgaatcgagcgatgatgatgtggattcagatgatactgcaactgaacagacatacatacgtccagcagttttccatccaaggttttctgctaataagctatctgtgatccctccacttcgcataaagcgtgaacgagagctaaaaaggagacctcagcagaatggctgtgtatttaaaagggtatcaagccaccaccagatcctcctattgagaatggtgccacatcaccaccatttcggtgtcgaggtaggattggacgaggcggccgcatcatctttgatcgatggaatcctcttctccggacaccaattgaccaggagacttattatgtgccatacggtcacaggcccccctcacctgaaggttgaagcggtttttcatatgcacatagtgcttaatggcactggcacagctatggaatttgtgaagcctctgagcaattgtttttccataggtgccaaattggcccttggagagtccattgtgagttgagcccagtggttcattctgatggaaggcagagaaagctccttgataagcagcagcctcagtggaagttcgagagcatatgggatctcgtggggctagcatttcttgctcagatgtggcttggtcatcttttttcacagctgttgtaaaattattgcagtgtaggtgaaagagtagatctttttgtctaatctttgcatttagggtcagtattcatatcatgctctctcatttgattattcatttggaggagaggaaatccttctcattgctaagttcagcttttctgtataattcttcaacaccttgttgcatgcattcaactaatgcacgtgtgtatatactgaaacccaatgtgcattgcccttttgtggcagatgtcattagtcagtaggttaggcagaaaatgggaatggaaaggggccaacaatgttattgaatctgttgctgaatgttgggttggcgcgcagcttcctcttgtaaccgtgtacagattcaggtttttgttgtgtaacaccgccaacaaatagctggttattgtcaggactgccatatgttctgattcttgctgatgacactgggctactttagg

SEQ ID NO: 68741 - DNA, 978 bp, Zea Mays
tccaagccgtggttcttccctgcgccctccccttgcttctctcttccagctcgctcagtcagcgaggtccctcccatggctgtctgctcgcagtgcctttggttccggccgcagttcggtgctcggagctccatccctggcgagcgccctgctccctgcgcactgctctgctcggagctccctgtccgtcctctctgccgagcgattttccagcgcgcgcgcagccccagctcagtctcttcctctgcgctcggccgcccgcgtctctgctcttctacgccgctgttccctgcgttctctgttcggcgttctgcgtccatcttccccggctcctttcagctcggatccctgcgcgcggagcttttcccctagccaagatcgtccttgcgcgctgccgtcgcctagttcgcgtctcgctcttgctccagctatggtgcttcatcgccgcatttccctgtcctctgcgcgcagccgcgctcctcggttctggccggatctcgcccagctcggaccgagccgtctccgcctgtccgcgcctgctgctcgcccctgttgcgcgtgtcagctcgtctgttgtgcgcgcgaattttccctgctcgctggcgctttcgcgcgtcttcctgttcgctgtcgcgactgccatcaaatcatcggagttgctcaactcatcaatcgtattttggtcggtcatcaatttcatattcgtcatggtcctcacgtcagccgtccctatccgaacttgccagctcgccgactgaccgtcgtgttccttgaaatcccttgtcggccgacctcgcgacttagttcgtcgcgtcgtgtgtgcagctctatatatgccaccctcctatatcatcgtcgaagctgtcatcccctgttcgatccccacctcaccagctcgctccaaacacaatctcttcatcgtttcgtgtgtcatcaagaaatctcaagcgtcggatgaagacgtagccagcagcgcga

SEQ ID NO: 68742 - DNA, 1549 bp, Zea Mays
ctttcatttgtgggaggaatttatttccaatatgttatttttttttttgctttgctgacaaacaggctgcaaatgtcttttcttgtgcatacttggttaacatgtctcggccagaacatcgccgtatacctgtaaaacatcaaaaagcactttggttcagtggtcttagaggggccatggcttttgcacttgctctccaatctgtgcatgaacttcctgaaggacatggaaaaacgatattcaccaccaccactgccattgttgttttgacggtacttctcattggagggtcgacaggaactatgcttgaatctttggatgttgttggagatgaaaacacatcaagagaaaattacgaggacaacaatggttacatgcctccaagttatgaagaaggaacatcctctggaggaggattgagaatgaaactcaaacagtttcacaaaagcacaacatcattcactgcccttgacaagaactatctcactccattttttaccagtcagacagatgatgataacgatgacgacttcagtgagtaacttatttgtttaacagatatgcagtaaatgatgtcaccgaactatgaaattgatagtttgtgtgctacttataattaagtatagcataattatcttcatcctctatctagtccactaagtcttgtcaatccacttagcaaattcatggtgaacaattagtcctatcttcaaacatttgattctcccacttatttctgaaattgtttgttgctctctaattcactatgtcaggtcagcaaccccaaaaccgaaggctagctttttatgatcaatagcggaatttgatactctacatatcaagctaaatacacggagcagaactgacgtgcatgactgtctatgtgtgatttggtcgaacaaaatatagcaggagcatacttagttgagtagcatatggcagagcatatctgtataccgtaggacaaaaatcataagggttcgaatcagttgttcccatgggggacgaggatgatgatagccaggcagcatgtatatatttctaggcttccttaagaacttagtggggctccagatgaaaagcagtgtgttgttggaattttatagaccctaccttgtgttaggttaaattttaataaacccgaccgtttgtccgctaagtcggctattatgctcttgttgtaattgacgcgttgcaccagttgccccactggctggttgcaccagtgggaaattgacgcgtaccatatataatgttgccatggctgattataaaaattctgcaaagcactgaaagcaaatatcatcccaggtcagggaagtatgctgatgtttattattttaacgttaacatttactcctattctaacaaagtagttcagttttgaaatggttggccggtttaagctggaactagaatttattgcaagtaccatgtagggattgagctggaaagttgttctccagttctgctactgcaagcaagcaaagtgaaggaggtacacaggcataagttatttcttaaacctaagttctgcatgccacatttg

SEQ ID NO: 68743 - DNA, 1858 bp, Zea Mays
gttacagacggaactgggttctgatgttaacttgtatgctttggtgtttggagaatctgttttgaatgatgcggacaatgtcatcagtcagaagtcatgcagcaggcggcgagaacttttttatgatgattctccaatttctcgaaacctttgttggttcaatgtcatcaggtgtgggagttggatttatctctgctcttctattcaaatatgctggattggacgttgataatctgcagaacttggagtgctgcctttttgttctctttccttacttttcgtacatgttagcagaaggacttggcttgtcagggattgtttctatattattcacagggatggttatgaagcattacacatattccaatctttcagacaactcacagcgctttgtttctgccttttttcatttactatcatctttagctgaaacatttgtgtaagcatcaggagcacttgtagtgtgtaatggcctaattggaaaatataaccgtgcactttcttattttcttttaggttcatctatatgggtttcgatattgccatggaagagcatagctggtcacatgttggcttcatcttcttctcaattatattcatagttgttgcaagggctgcaaatgtcttttcttgtgcatacttggttaacatgtctcggccagaacatcgccgtatacctgtaaaacatcaaaaagcactttggttcagtggtcttagaggggccatggcttttgcacttgctctccaatctgtgcatgaacttcctgaaggacatggaaaaacgatattcaccaccaccactgccattgttgttttgacggtacttctcattggagggtcgacaggaactatgcttgaatctttggatgttgttggagatgaaaacacatcaagagaaaattacgaggacaacaatggttacatgcctccaagttatgaagaaggaacatcctctggaggaggattgagaatgaaactcaaacagtttcacaaaagcacaacatcattcactgcccttgacaagaactatctcactccattttttaccagtcagacagatgatgataacgatgacgacttcagtcagcaaccccaaaaccgaaggctagctttttatgatcaatagcggaatttgatactctacatatcaagctaaatacacggagcagaactgacgtgcatgactgtctatgtgtgatttggtcgaacaaaatatagcaggagcatacttagttgagtagcatatggcagagcatatctgtataccgtaggacaaaaatcataagggttcgaatcagttgttcccatgggggacgaggatgatgatagccaggcagcatgtatatatttctaggcttccttaagaacttagtggggctccagatgaaaagcagtgtgttgttggaattttatagaccctaccttgtgttaggttaaattttaataaacccgaccgtttgtccgctaagtcggctattatgctcttgttgtaattgacgcgttgcaccagttgccccactggctggttgcaccagtgggaaattgacgcgtaccatatataatgttgccatggctgattataaaaattctgcaaagcactgaaagcaaatatcatcccaggtcagggaagtatgctgatgtttattattttaacgttaacatttactcctattctaacaaagtagttcagttttgaaatggttggccggtttaagctggaactagaatttattgcaagtaccatgtagggattgagctggaaagttgttctccagttctgctactgcaagcaagcaaagtgaaggaggtacacaggcataagttatttcttaaacctaagttctgcatgccacatttg

SEQ ID NO: 68744 - DNA, 1809 bp, Zea Mays
accatccagttacagacggaactgggttctgatgttaacttgtatgctttggtgtttggagaatctgttttgaatgatgcgatggcaatttctctttacaggacaatgtcatcagtcagaagtcatgcagcaggcggcgagaacttttttatgatgattctccaatttctcgaaacctttgttggttcaatgtcatcaggtgtgggagttggatttatctctgctcttctattcaaatatgctggattggacgttgataatctgcagaacttggagtgctgcctttttgttctctttccttacttttcgtacatgttagcagaaggacttggcttgtcagggattgtttctatattattcacagggatggttatgaagcattacacatattccaatctttcagacaactcacagcgctttgtttctgccttttttcatttactatcatctttagctgaaacatttgtgttcatctatatgggtttcgatattgccatggaagagcatagctggtcacatgttggcttcatcttcttctcaattatattcatagttgttgcaagggctgcaaatgtcttttcttgtgcatacttggttaacatgtctcggccagaacatcgccgtatacctgtaaaacatcaaaaagcactttggttcagtggtcttagaggggccatggcttttgcacttgctctccaatctgtgcatgaacttcctgaaggacatggaaaaacgatattcaccaccaccactgccattgttgttttgacggtacttctcattggagggtcgacaggaactatgcttgaatctttggatgttgttggagatgaaaacacatcaagagaaaattacgaggacaacaatggttacatgcctccaagttatgaagaaggaacatcctctggaggaggattgagaatgaaactcaaacagtttcacaaaagcacaacatcattcactgcccttgacaagaactatctcactccattttttaccagtcagacagatgatgataacgatgacgacttcagtcagcaaccccaaaaccgaaggctagctttttatgatcaatagcggaatttgatactctacatatcaagctaaatacacggagcagaactgacgtgcatgactgtctatgtgtgatttggtcgaacaaaatatagcaggagcatacttagttgagtagcatatggcagagcatatctgtataccgtaggacaaaaatcataagggttcgaatcagttgttcccatgggggacgaggatgatgatagccaggcagcatgtatatatttctaggcttccttaagaacttagtggggctccagatgaaaagcagtgtgttgttggaattttatagaccctaccttgtgttaggttaaattttaataaacccgaccgtttgtccgctaagtcggctattatgctcttgttgtaattgacgcgttgcaccagttgccccactggctggttgcaccagtgggaaattgacgcgtaccatatataatgttgccatggctgattataaaaattctgcaaagcactgaaagcaaatatcatcccaggtcagggaagtatgctgatgtttattattttaacgttaacatttactcctattctaacaaagtagttcagttttgaaatggttggccggtttaagctggaactagaatttattgcaagtaccatgtagggattgagctggaaagttgttctccagttctgctactgcaagcaagcaaagtgaaggaggtacacaggcataagttatttcttaaacctaagttctgcatgccacatttg

SEQ ID NO: 68745 - DNA, 2667 bp, Zea Mays
gttcttctggaccgatgactttttctggttggttccaagttccaacatgacaggcacgaaggcaagtcgagcagacagcaacatctagcacgaagcaccggccttgtacgcatcctcccttcgcatcgaggaatcgcgggcccaccgcggcaccaaggccccccgcattccgtcccgccgcggcgtcgctcccttgttctctcccgagccgtccgcgaaccaacccgtgctacctccgattcttcgcctcgtcgttctttctagaacctccgctccgcctaatcccgaacgagactagggaggttccagcgccgccggtgggggagatggcgctggagctgagcctggcctcggcttcgccgccggcgggcggcggcttggcgcagccgccgcccctcgccccacccgggaaggagcagcaagtggccggcgtggggattctactgcagatctccatgctcgtgctctcgttcgtcctcggccacgtcctgcgccgccaccgcttctactacctccccgaggccagcgcctcgcttctaattggcttagttgttggtggcctcgctaatatttcaaatacagagaccaacacaaggacgtggttcaacttccatgaagagttcttcttcttgttcttattacctccgataatattccagtcgggtttcagcttatctccgaaaccattctttgcaaactttggggctatcgtaacttttgcaattcttgggacattcattgcttctgttgtaacaggagttcttgtctatcttggtgggctgacatttctaatgtacaaacttccactggttgaatgccttatgtttggtgctcttatatctgcaactgatcctgtcacagtgctatcaatattccagtttactagtcagcacttgtacttatgactaacttgcatgtatccctgtttggaaaggacagatggcaatttctctttacaggacaatgtcatcagtcagaagtcatgcagcaggcggcgagaacttttttatgatgattctccaatttctcgaaacctttgttggttcaatgtcatcaggtgtgggagttggatttatctctgctcttctattcaaatatgctggattggacgttgataatctgcagaacttggagtgctgcctttttgttctctttccttacttttcgtacatgttagcagaaggacttggcttgtcagggattgtttctatattattcacagggatggttatgaagcattacacatattccaatctttcagacaactcacagcgctttgtttctgccttttttcatttactatcatctttagctgaaacatttgtgttcatctatatgggtttcgatattgccatggaagagcatagctggtcacatgttggcttcatcttcttctcaattatattcatagttgttgcaagggctgcaaatgtcttttcttgtgcatacttggttaacatgtctcggccagaacatcgccgtatacctgtaaaacatcaaaaagcactttggttcagtggtcttagaggggccatggcttttgcacttgctctccaatctgtgcatgaacttcctgaaggacatggaaaaacgatattcaccaccaccactgccattgttgttttgacggtacttctcattggagggtcgacaggaactatgcttgaatctttggatgttgttggagatgaaaacacatcaagagaaaattacgaggacaacaatggttacatgcctccaagttatgaagaaggaacatcctctggaggaggattgagaatgaaactcaaacagtttcacaaaagcacaacatcattcactgcccttgacaagaactatctcactccattttttaccagtcagacagatgatgataacgatgacgacttcagtcagcaaccccaaaaccgaaggctagctttttatgatcaatagcggaatttgatactctacatatcaagctaaatacacggagcagaactgacgtgcatgactgtctatgtgtgatttggtcgaacaaaatatagcaggagcatacttagttgagtagcatatggcagagcatatctgtataccgtaggacaaaaatcataagggttcgaatcagttgttcccatgggggacgaggatgatgatagccaggcagcatgtatatatttctaggcttccttaagaacttagtggggctccagatgaaaagcagtgtgttgttggaattttatagaccctaccttgtgttaggttaaattttaataaacccgaccgtttgtccgctaagtcggctattatgctcttgttgtaattgacgcgttgcaccagttgccccactggctggttgcaccagtgggaaattgacgcgtaccatatataatgttgccatggctgattataaaaattctgcaaagcactgaaagcaaatatcatcccaggtcagggaagtatgctgatgtttattattttaacgttaacatttactcctattctaacaaagtagttcagttttgaaatggttggccggtttaagctggaactagaatttattgcaagtaccatgtagggattgagctggaaagttgttctccagttctgctactgcaagcaagcaaagtgaaggaggtacacaggcataagttatttcttaaacctaagttctgcatgccacatttg

SEQ ID NO: 68746 - DNA, 1268 bp, Zea Mays
gagcaacgtcacctatcctttctgcctccctcactttcccatgtcagcaacccaacccacatccaccggaagatgagagctccagctccagctgctcctattcccgcgctgctctcccgctgctcctcgcctccctcctcggccccgcgccgcctcctctcctcctcccgcacgccagccgcctgctgcccgcctccggcagtcgtccgctctgtctccgtcgatttgctggcggtcgccggggagccggctgtcgcaggcgccccctccgcaacgccgtgccgtcgcctcatcctcctccgtcacggggacagcgccaccgggggccgcttcaccagagatcatgacagacctctaagcaaggctgggagagctgacgcaatcagcgtctctaataaactccaacagatgggatgggtacccgagcttattctctgcagtgatgcaatgcgcacaaaggagactcttaagattctgcaagagcatgtccatggattgtctgaagcagtagtgcactttatcccaagtttctactcaattgcggcaatggatggccaaactgcagagcatttgcaaaaggcgatttgtgaatattcgagtgatgagatcttaactgtgataataactactcaggtgcatgggtcataataaaggatgggaagaagccgcctctatgttttctggcgattcagttttgcttgagacatgtaacgctgcgttgctagaagctgcaggcaaatcatgggttgaggccttttttgtggctggtctgggaggatggaagctccatggaattgtaaagccatgaattattgtaactaaaagctagatgtaattttttagctgtttcttaattattattattaacctttgtgtagtggtttttacatgccactgaagctttcggtctgaaggtatcaacatggttagatagatgagatgagatgaatgaattcttccacggtccatgagttatatcggttctgcttttgcactaagcaaaactgaagacctcgcatttcactcccttcacccagaaacctaaagtgtctgctatttatgtttaaatatagagtataaaatacaaagatatatgtgttttgttggttagatgggtgtgaacgtgagtttagagccattaaaccgggtttgacctgtatgattttagtttttttatcatttaaatgtgaggaaacagtgatggagccacatggtatgttgtagatgccccgacatacctatgcagttcgacagcgtgcattcgtttg

SEQ ID NO: 68747 - DNA, 1173 bp, Zea Mays
gagcaacgtcacctatcctttctgcctccctcactttcccatgtcagcaacccaacccacatccaccggaagatgagagctccagctccagctgctcctattcccgcgctgctctcccgctgctcctcgcctccctcctcggccccgcgccgcctcctctcctcctcccgcacgccagccgcctgctgcccgcctccggcagtcgtccgctctgtctccgtcgatttgctggcggtcgccggggagccggctgtcgcaggcgccccctccgcaacgccgtgccgtcgcctcatcctcctccgtcacggggacagcgccaccgggggccgcttcaccagagatcatgacagacctctaagcaaggctgggagagctgacgcaatcagcgtctctaataaactccaacagatgggatgggtacccgagcttattctctgcagtgatgcaatgcgcacaaaggagactcttaagattctgcaagagcatgtccatggattgtctgaagcagtagtgcactttatcccaagtttctactcaattgcggcaatggatggccaaactgcagagcatttgcaaaaggcgatttgtgaatattcgagtgatgagatcttaactgtgatgtgcatgggtcataataaaggatgggaagaagccgcctctatgttttctggcgattcagttttgcttgagacatgtaacgctgcgttgctagaagctgcaggcaaatcatgggttgaggccttttttgtggctggtctgggaggatggaagctccatggaatttggtttttacatgccactgaagctttcggtctgaaggtatcaacatggttagatagatgagatgagatgaatgaattcttccacggtccatgagttatatcggttctgcttttgcactaagcaaaactgaagacctcgcatttcactcccttcacccagaaacctaaagtgtctgctatttatgtttaaatatagagtataaaatacaaagatatatgtgttttgttggttagatgggtgtgaacgtgagtttagagccattaaaccgggtttgacctgtatgattttagtttttttatcatttaaatgtgaggaaacagtgatggagccacatggtatgttgtagatgccccgacatacctatgcagttcgacagcgtgcattcgtttg

SEQ ID NO: 68748 - DNA, 1155 bp, Zea Mays
gagcaacgtcacctatcctttctgcctccctcactttcccatgtcagcaacccaacccacatccaccggaagatgagagctccagctccagctgctcctattcccgcgctgctctcccgctgctcctcgcctccctcctcggccccgcgccgcctcctctcctcctcccgcacgccagccgcctgctgcccgcctccggcagtcgtccgctctgtctccgtcgatttgctggcggtcgccggggagccggctgtcgcaggcgccccctccgcaacgccgtgccgtcgcctcatcctcctccgtcacggggacagcgccaccgggggccgcttcaccagagtgatgcaatgcgcacaaaggagactcttaagattctgcaagagcatgtccatggattgtctgaagcagtagtgcactttatcccaagtttctactcaattgcggcaatggatggccaaactgcagagcatttgcaaaaggcgatttgtgaatattcgagtgatgagatcttaactgtgatgtgcatgggtcataataaaggatgggaagaagccgcctctatgttttctggcgattcagttttgcttgagacatgtaacgctgcgttgctagaagctgcaggcaaatcatgggttgaggccttttttgtggctggtctgggaggatggaagctccatggaattgtaaagccatgaattattgtaactaaaagctagatgtaattttttagctgtttcttaattattattattaacctttgtgtagtggtttttacatgccactgaagctttcggtctgaaggtatcaacatggttagatagatgagatgagatgaatgaattcttccacggtccatgagttatatcggttctgcttttgcactaagcaaaactgaagacctcgcatttcactcccttcacccagaaacctaaagtgtctgctatttatgtttaaatatagagtataaaatacaaagatatatgtgttttgttggttagatgggtgtgaacgtgagtttagagccattaaaccgggtttgacctgtatgattttagtttttttatcatttaaatgtgaggaaacagtgatggagccacatggtatgttgtagatgccccgacatacctatgcagttcgacagcgtgcattcgtttg

SEQ ID NO: 68749 - DNA, 1349 bp, Zea Mays
atttttttttctcatttagcaacataccatactgaattgtgatatgtagagtgcacgagccaattcagttcaaaataaaagagaaaattagcataatctagggcgagcaacgtcacctatcctttctgcctccctcactttcccatgtcagcaacccaacccacatccaccggaagatgagagctccagctccagctgctcctattcccgcgctgctctcccgctgctcctcgcctccctcctcggccccgcgccgcctcctctcctcctcccgcacgccagccgcctgctgcccgcctccggcagtcgtccgctctgtctccgtcgatttgctggcggtcgccggggagccggctgtcgcaggcgccccctccgcaacgccgtgccgtcgcctcatcctcctccgtcacggggacagcgccaccgggggccgcttcaccagagacctctaagcaaggctgggagagctgacgcaatcagcgtctctaataaactccaacagatgggatgggtacccgagcttattctctgcagtgatgcaatgcgcacaaaggagactcttaagattctgcaagagcatgtccatggattgtctgaagcagtagtgcactttatcccaagtttctactcaattgcggcaatggatggccaaactgcagagcatttgcaaaaggcgatttgtgaatattcgagtgatgagatcttaactgtgatgtgcatgggtcataataaaggatgggaagaagccgcctctatgttttctggcgattcagttttgcttgagacatgtaacgctgcgttgctagaagctgcaggcaaatcatgggttgaggccttttttgtggctggtctgggaggatggaagctccatggaattgtaaagccatgaattattgtaactaaaagctagatgtaattttttagctgtttcttaattattattattaacctttgtgtagtggtttttacatgccactgaagctttcggtctgaaggtatcaacatggttagatagatgagatgagatgaatgaattcttccacggtccatgagttatatcggttctgcttttgcactaagcaaaactgaagacctcgcatttcactcccttcacccagaaacctaaagtgtctgctatttatgtttaaatatagagtataaaatacaaagatatatgtgttttgttggttagatgggtgtgaacgtgagtttagagccattaaaccgggtttgacctgtatgattttagtttttttatcatttaaatgtgaggaaacagtgatggagccacatggtatgttgtagatgccccgacatacctatgcagttcgacagcgtgcattcgtttg

SEQ ID NO: 68750 - DNA, 1927 bp, Zea Mays
gctgaagctccatcgcgtcgcttctcccagcttccctgcgctagcgagcgtcttcctccctgctacagctcggcctccagctcgcccgtggtggcgcgcgctctctcccctgcctgctcgagttcctctgcctagtccccagctcggccgctcgctccttctctggtgctcgcccctgcgcgctccactgctcccatggctaagcgtcgtggctctccctacgcgcagtcgcgcttcctgccgagcgcctccagctcccgcaccgcagccctggtttctgctcgcccggatgagcgccggccgccaggtcttcttcctcctccatgtgcgcgctctgctcccttccccacggtgctcgacaaaaggttcgaacgagtcgtactgccatcgtcttcgtcgaatgaaaaatcgtcacgcttgcatgtcgatgtcgttgatcaccatcctcgtctacgccaagccccaagtcgtgaggacgctcttgtgatggccacgcgtcaccgtctcgacaaaaaggaatccatgggtatttggtcaagaatagaaactatgtgctttgctcgccagacgtgtgtgatcaaagacgtcaaccggaaaccgtcatcgtgcttccgactatcacgtcgaattagttagggtaagcaaatttgaaattcgtgttagtgaactgatgaatagtctgactaggtatattaatcgtgatgactctgtagtgagtcggattgctaattcggttattagtttgataaagggaactgtaggtatactaattatatcagtcctattgcctttagtatatgtgtgacatggggtacgtatactatttattaggatgcccaagtcgtctacagtgatttggtcgatgtcatgtgaagaaagaggtcgcaataggtcccagtgcttgcgggactgtacgtgttaaaaatataatgttttattaatatgtgtaatacacatgttagccggaaaattagtttagaaagttaataaaagttctttgatgaattttataaacattaggtgtcccagaatcgtgaagccaaaattgtaagtcaattagtgtgctctctaaactaggcatgaatatgtgttggttgatttcatgatttgaatggatgttgattgctacttcgaatatttaggatcaagtaacatcgatatatttgtttcaaccaaaatataggatctgcctgataagtaatgcgtataaacactttaggtcttttagttctaaagttgtaattggtatattgtataaaatatgcttggttataagtgtttcatcctttttagtgtagattatctatcttgtactatttatactcgtgctcatacatgtgcatcgtgcatcccatgaggtacattaattgatcgcgtgatgcggaagacgagccaagttgacctcaagatggtgctaggagtggacctctgccgcaagacgacgtcgtcagtcggacgaacctgaagatggataatctgacgaatgtcaagacaaaagatggtcgtcaagcggacgtcgtctaacaacactaacctagtgttatccaagcaagccccggtgcatttgccacctccttctgttttaaaaagttttatcaccttgaatgatgcattaggtgataggagttgtgtgatcaaacagttgatgcatttccttctttgattaaacaaccctaatacctattttatgaaaatttagtgatgcttagccctgcttattaatttaggatggtttttaaaagatgatgtgtaacacgggatatgggagtttgtgaaataaaaggacttatgatgatgaacccattgcgaccgcaatgatttcatcattcaagtaggatacctctcttaggtatcaagttttgggaaaataatatgtaatgtagactagacgtggagcaggaaagttcgcccgtctatgtcgattaag

SEQ ID NO: 68751 - DNA, 2130 bp, Zea Mays
attttgtttgcattttattatttatttttggtggccgattttaattagacgccgaaattaatgattaatactgtatttattgtttgattagacattttttattatgtatggttagttagttgttatttgattagaccgttcaaatattgtttgattctattaactaatataacgtttaacttaaatttcatattaacatgagttattctttagtttgattccattaacagcacatttaatttggttttagagtttagagatgttttaatttaatttcatagtaacatgctttattatttaggttgataagtgtgttatattattattttagtcatttccttattagcatgtgttatagtattgtttttatagcgaaacttatgtgtcactcgtttcagataggttcgtctcacgtgcttgacatatgtgagacgtatccatatgaaattgtccctattatggatagcctcggagtgaccgacatgacgctgatttatgacaagtcagtaggacctgaagaaaatttcggtggcataacctcactgttctccactgcaccatacttggcgtgcagctagagaacaacgaggttatgctatcgaaattttcttcagatcatgttggcttgtcataaatacgtgttctgtcggtcactgttggatgggttcaggacctatccttgcctatagatgtaggatcgaagcccttgtgaaagttgaataaagtttttatgatatggtccgctttaatagcctcaggcatgtcagaaggtcgtgaatgaatgtacaatggttggagtagtaatagatgtcattctgatgagtgggtaaccaaggccaaacattttgtagaccgtacgttctccttgtcattaaccggcactgtcagatcaccttgtaggcgacatgaaaatagtacattccttaataaggaaataattatcctagatctctatcagtttggatttatgcccgaatatgaggtgtgggaaaatcatggtgaggtagtacccagcccgaatgtagaagaggagaacaatgattaggctagcggtgatgcgatgcatgaaatgctagattcgttatgtccatagttgaacctcagctctaaggatcttcccacaccaaaggttttgaggtttttaagctactaaaaactctgaagagtcattgcatgaacacacatatgtgagtatactcgattttgtgacccgactcatggatggtatgaacttgtgaattttttcaataagaatcaaactatgaccgaatagctaattttcttgtttttcaaggtattctatatttaccgttgtgatcgattcgatggagttgcggtctcgtgggggctcttcgtcgcaggcgggttgtggtagcaaccatagtcgacgctcgagcatggaggaggctgtgagggagcagcaagaaaggtttcgtgaagagatgcggtgacaacaagtagcacttatccgacaacaatcagagtacatggatgcttacaacgcacatgcgcaacaagcaatgaacattcttggtttctagagcaggcacaacaacaaccattcgttttccctcaatttcagccgctgatgcctcaatggggattacatgctccgacacctcctccagattagatccgtcgttaagtatctctattcgaatgtattatgaacaagaacttactatgaaataactccggaattggggattataggcaacaacatgacaccactgatgataccagcacaaggaggagcttctggaggggagggggctaccacagagaagactctaaaccagatagacgacttcgtaaacaacttcttcgcttctggatttagtggttacaactcaaacgaccactatatgtgatgatataactcttgtcctgaatttggccgatgcgatggatttgatataactcttgtggtgaatttgatatgaaatgtgatggcttctgatatatttgtgagtttgtgttggattgtaatggatttgtgtggtgctttgctggactgtgatgtatttgtgaggaattgtggtgaattatgatatttatggtgaatttgtgtaattctgaaaatttatgttgctgctataatattatgttgtgatgtgatgtatattgtta

SEQ ID NO: 68752 - DNA, 1159 bp, Zea Mays
ctcgacacctgccatatcacgccgtgttgcccccacccgcggtcgccaccgccgcatagcgccgcctccagccggccccgtccgcgccctcctcgccggaagcccatggtcgtgcgccaccgccacgccgcactctcctcgtcgagaatccacgctggctcgccgcactggccccgccctgaccgctagtgccttgctgggccctcctcgctgtgccgcagcgccgcctccagtgcaagccacacttgcctcaccacgcagccctcgtcctcgactgtgactccgtctgttcaccatcaccatcgtgacaccggctgcaagaggtattctatatttaccgttgtgatcgattcgatggagttgcggtctcgtgggggctcttcgtcgcaggcgggttgtggtagcaaccatagtcgacgctcgagcatggaggaggctgtgagggagcagcaagaaaggtttcgtgaagagatgcggtgacaacaagtagcacttatccgacaacaatcagagtacatggatgcttacaacgcacatgcgcaacaagcaatgaacattcttggtttctagagcaggcacaacaacaaccattcgttttccctcaatttcagccgctgatgcctcaatggggattacatgctccgacacctcctccagattagatccgtcgttaagtatctctattcgaatgtattatgaacaagaacttactatgaaataactccggaattggggattataggcaacaacatgacaccactgatgataccagcacaaggaggagcttctggaggggagggggctaccacagagaagactctaaaccagatagacgacttcgtaaacaacttcttcgcttctggatttagtggttacaactcaaacgaccactatatgtgatgatataactcttgtcctgaatttggccgatgcgatggatttgatataactcttgtggtgaatttgatatgaaatgtgatggcttctgatatatttgtgagtttgtgttggattgtaatggatttgtgtggtgctttgctggactgtgatgtatttgtgaggaattgtggtgaattatgatatttatggtgaatttgtgtaattctgaaaatttatgttgctgctataatattatgttgtgatgtgatgtatattgtta

SEQ ID NO: 68753 - DNA, 1556 bp, Zea Mays
gggtgcaccctgtcccagaacgcgtgctggtcgcggttgctgcacaccgtggcgttgggcaggcagtccgcctcggcgccgaacctcccgcccccgcagcacgcgtcggcgacgtccgtgtaccccgacgcccccgggtcgtcgaaggtggccatcgacaggccgtagtagtcggcgagcgagtaggtgaagcccggcaggcgggaggcgaggctggcgagcaggaccgcgagggcgtcgtccaggcccgacgcgagctcgttcaggccgtccaagcacgcgcccgtcttcgtcccgccggacagccgcgccacggggacgcagccgagcagccccacgttgatgatggcgaacttcctcgcgcccatgacgcctgcgcggtggcgaagacgaataggtcgttgctgccgacgctgaagaggaagacggacctggagagcaggaggtgggtcgcacgggagcccagcttcgtgaccaactgtgccttggtggacttgaagtactgcacctgcttcgacaatgggatgttgttgcccgcgttctgcatttcagtggagtcgaggatcccagctcctccggaagcatagctgacaccgctgccacgagctgtgaggaccagacggccggtgctaggtgccaacgacaggtattctatatttaccgttgtgatcgattcgatggagttgcggtctcgtgggggctcttcgtcgcaggcgggttgtggtagcaaccatagtcgacgctcgagcatggaggaggctgtgagggagcagcaagaaaggtttcgtgaagagatgcggtgacaacaagtagcacttatccgacaacaatcagagtacatggatgcttacaacgcacatgcgcaacaagcaatgaacattcttggtttctagagcaggcacaacaacaaccattcgttttccctcaatttcagccgctgatgcctcaatggggattacatgctccgacacctcctccagattagatccgtcgttaagtatctctattcgaatgtattatgaacaagaacttactatgaaataactccggaattggggattataggcaacaacatgacaccactgatgataccagcacaaggaggagcttctggaggggagggggctaccacagagaaggttagtttgacaaacaattcgtttgaatagtggtcaacttaatattgtagttatcaatatcttctttcttttagactctaaaccagatagacgacttcgtaaacaacttcttcgcttctggatttagtggttacaactcaaacgaccactatatgtgatgatataactcttgtcctgaatttggccgatgcgatggatttgatataactcttgtggtgaatttgatatgaaatgtgatggcttctgatatatttgtgagtttgtgttggattgtaatggatttgtgtggtgctttgctggactgtgatgtatttgtgaggaattgtggtgaattatgatatttatggtgaatttgtgtaattctgaaaatttatgttgctgctataatattatgttgtgatgtgatgtatattgtta

SEQ ID NO: 68754 - DNA, 808 bp, Zea Mays
gggtgcaccctgtcccagaacgcgtgctggtcgcggttgctgcacaccgtggcgttgggcaggcagtccgcctcggcgccgaacctcccgcccccgcagcacgcgtcggcgacgtccgtgtaccccgacgcccccgggtcgtcgaaggtggccatcgacaggccgtagtagtcggcgagcgagtaggtgaagcccggcaggcgggaggcgaggctggcgagcaggaccgcgagggcgtcgtccaggcccgacgcgagctcgttcaggccgtccaagcacgcgcccgtcttcgtcccgccggacagccgcgccacggggacgcagccgagcagccccacgttgatgatggcgaacttcctcgcgcccatggtgtgcagctcctgcagtgcatgaatgatggatgtaatacgcctgcgcggtggcgaagacgaataggtcgttgctgccgacgctgaagaggaagacggacctggagagcaggaggtgggtcgcacgggagcccagcttcgtgaccaactgtgccttggtggacttgaagtactgcacctgcttcgacaatgggatgttgttgcccgcgttctgcatttcagtggagtcgaggatcccagctcctccggaagcatagctgacaccgctgccacgagctgtgaggaccagacggccggtgctaggtgccaacgacaggtatggcggaggactagacgcgaaccccatgctctttgctgcacatccatgcaagcatgtatgtagcgcgtatacaaaaaaataaaaacatgcaggaaatgtattgttttgttaccgaggtagt

SEQ ID NO: 68755 - DNA, 763 bp, Zea Mays
ctcctacgtttttttcgagaaaaaaagtcattatccttgcaagggaatcaggtttgaggcttgaactttctgatattcctgtgaagagccttgtgccagaaacacttgcagcatgctcgtcagcagatgaattcatgcagaagctaccatcctttgacgaggactgggccaggcaacgcagtgatgctgatgctgcagacgaagtcctgcgttacgttggagtggtggatacggtgaacaagaggggacaggtggagctacgtaggtacaagagggaccacccgttcgcgcagctctccggctccgacaacatcatcgcattcaccacctcgaggtacaaggagcagccgctaatcgtgcggggcccaggcgcgggcgcggaggtgactgcgggtggcgtcttctgcgacatcctgcggctggcgtcttaccttggcgctccttcttagagcttccacttacagttgtcaatttgaagaggcagatggacagtgccctgcatgatgcctccgtgtttaggcttattatggacttgctcaaagttgttctgaataagtgccaggaaataaggcctctatctatttaggcctctatcttcggggtagctgactaagtgttgttattgctacggaatccagaattctgtgaattgaaatgaattgtaccgatgaagactgtttgcttgtgtctactggctactgttatgtgtcggtgttttaaccagagggtcccaaccaacaagtgaatttgtgcaagagaagac

SEQ ID NO: 68756 - DNA, 2723 bp, Zea Mays
gtgcattccgttcctctcctctctcggctctcggcgagcgagatgcagagcctaaccgtagcaagagcgcttcctcccgccgtggccacagctcggcggcggccgcgcgcgtcctcttctagcagggaagcggttttacaatgttggaagtacgaattaagtcaagaccaatatctgggaggatccctaaggataggttcgtctcaaggaagtttggacatacatcgctcaacaaatttgctcagaccagctgctgcatctgtttcagttgaacaagatgaagtcaatacttatcttccaaaaggtgatatgtggtctgtgcacaagtttggtggaacctgtatgggaacatcccaaagaatccagagtgttgcaaatatagttcttggtgattcttctgagaggaagctgatcattgtttctgcaatgtctaaagtaaccgacatgatgtacaaccttgtacagaaggctcagtcaagggatgattcatatacaatagcattggaagaagtttttgagaagcatatggttgctgcaaaggatcttattgatggagaagatcttgcaagattcttgtctcagttgcactcagacgtcagcaacttgcgagccatgctccgtgctatttatatagctgggcatgcgacagagtctttctctgactttgttgttggacatggagagttgtggtctgcgcaaatgctatcttatgcaataaagaagtcatactttggggcaaatgttttgcatccgcgcaccattatacctgtgatgaaagacaacattcccattgttattaggaacatgttcaatctctctgcctctggaacaatgatttgcaagcagccggccaatgaaaatggtgatttagatgcatgtgtcaaatcatttgctactatcgataatttagcacttgttaatgttgaaggaactggaatggctggcgttccaggtacagcaagtgctatatttagtactgttaaagatgttggagctaatgttatcatgatatctcaggctagcagtgaacattcagtatgctttgctgttccagaaaaggaagttgctgcagtttctgctaggttacatgataggtttcatgaggcattagcagcagggaggttgtctaaggttgaagttattaatggttgcagcattcttgctgctgttggtctgaggatggccagcactcctggagttagtgcaatactttttgatgcattagcaaaggcaaacattaatgttcgagcaatagctcaaggttgcagtgaatacaatatcactgttgtattgaagcaagaagattgtgtaagggctctgagagctgctcactcaaggttcttcctctccaaaacgacacttgcagttggcatcattggacctggtttaattggtagaacactccttaaccagctcaaggatcaggttgctgctctcaaggaaaatatgaacattgatctgcgtgtcattggaataactggctcaagtacaatgcttttgagcgacacgggaatagacttaacccagtggaaacaacttctaaaaaaggaagcagaaccagctgatattgatagttttgttcatcatttatccgataatcacgtatttccaaacaaagttttggtggactgcacagcagatacaagtgttgcatcccactattataattggttaaagaagggtattcatgtcatcacaccaaataagaaagcaaattctgggccacttgatcagtacctgaaattgcggactctgcaacgtgcctcgtacactcattacttttatgaagcaactgttggtgctggcctcccaatcattagtaccttgcgaggtcttctggagacgggtgacaagatactgcgtattgagggcattttcagtggaactttgagttatatatttaataatttcgaaggaacaagggcattcagtgatgtcgttgctgaagcaaaagaggcgggatacactgaacctgacccaagagatgatctatctggaactgatgttgcccgaaaggtcattatccttgcaagggaatcaggtttgaggcttgaactttctgatattcctgtgaagagccttgtgccagaaacacttgcaaagctaccatcctttgacgaggactgggccaggcaacgcagtgatgctgatgctgcagacgaagtcctgcgttacgttggagtggtggatacggtgaacaagaggggacaggtggagctacgtaggtacaagagggaccacccgttcgcgcagctctccggctccgacaacatcatcgcattcaccacctcgaggtacaaggagcagccgctaatcgtgcggggcccaggcgcgggcgcggaggtgactgcgggtggcgtcttctgcgacatcctgcggctggcgtcttaccttggcgctccttcttagagcttccacttacagttgtcaatttgaagaggcagatggacagtgccctgcatgatgcctccgtgtttaggcttattatggacttgctcaaagttgttctgaataagtgccaggaaataaggcctctatctatttaggcctctatcttcggggtagctgactaagtgttgttattgctacggaatccagaattctgtgaattgaaatgaattgtaccgatgaagactgtttgcttgtgtctactggctactgttatgtgtcggtgttttaaccagagggtcccaaccaacaagtgaatttgtgcaagagaagac

SEQ ID NO: 68757 - DNA, 2762 bp, Zea Mays
cttgcgttgcgaccgtgcattccgttcctctcctctctcggctctcggcgagcgagatgcagagcctaaccgtagcaagagcgcttcctcccgccgtggccacagctcggcggcggccgcgcgcgtcctcttctagcagggaagcggttttacaatgttggaagtacgaattaagtcaagaccaatatctgggaggatccctaaggttcgtctcaaggaagtttggacatacatcgctcaacaaatttgctcagaccagctgctgcatctgtttcagttgaacaagatgaagtcaatacttatcttccaaaaggtgatatgtggtctgtgcacaagtttggtggaacctgtatgggaacatcccaaagaatccagagtgttgcaaatatagttcttggtgattcttctgagaggaagctgatcattgtttctgcaatgtctaaagtaaccgacatgatgtacaaccttgtacagaaggctcagtcaagggatgattcatatacaatagcattggaagaagtttttgagaagcatatggttgctgcaaaggatcttattgatggagaagatcttgcaagattcttgtctcagttgcactcagacgtcagcaacttgcgagccatgctccgtgctatttatatagctgggcatgcgacagagtctttctctgactttgttgttggacatggagagttgtggtctgcgcaaatgctatcttatgcaataaagaagtcatactttggggcaaatgttttgcatccgcgcaccattatacctgtgatgaaagacaacattcccattgttattaggaacatgttcaatctctctgcctctggaacaatgatttgcaagcagccggccaatgaaaatggtgatttagatgcatgtgtcaaatcatttgctactatcgataatttagcacttgttaatgttgaaggaactggaatggctggcgttccaggtacagcaagtgctatatttagtactgttaaagatgttggagctaatgttatcatgatatctcaggctagcagtgaacattcagtatgctttgctgttccagaaaaggaagttgctgcagtttctgctaggttacatgataggtttcatgaggcattagcagcagggaggttgtctaaggttgaagttattaatggttgcagcattcttgctgctgttggtctgaggatggccagcactcctggagttagtgcaatactttttgatgcattagcaaaggcaaacattaatgttcgagcaatagctcaaggttgcagtgaatacaatatcactgttgtattgaagcaagaagattgtgtaagggctctgagagctgctcactcaaggttcttcctctccaaaacgacacttgcagttggcatcattggacctggtttaattggtagaacactccttaaccagctcaaggatcaggttgctgctctcaaggaaaatatgaacattgatctgcgtgtcattggaataactggctcaagtacaatgcttttgagcgacacgggaatagacttaacccagtggaaacaacttctaaaaaaggaagcagaaccagctgatattgatagttttgttcatcatttatccgataatcacgtatttccaaacaaagttttggtggactgcacagcagatacaagtgttgcatcccactattataattggttaaagaagggtattcatgtcatcacaccaaataagaaagcaaattctgggccacttgatcagtacctgaaattgcggactctgcaacgtgcctcgtacactcattacttttatgaagcaactgttggtgctggcctcccaatcattagtaccttgcgaggtcttctggagacgggtgacaagatactgcgtattgagggcattttcagtggaactttgagttatatatttaataatttcgaaggaacaagggcattcagtgatgtcgttgctgaagcaaaagaggcgggatacactgaacctgacccaagagatgatctatctggaactgatgttgcccgaaaggtcattatccttgcaagggaatcaggtttgaggcttgaactttctgatattcctgtgaagagccttgtgccagaaacacttgcagcatgctcgtcagcagatgaattcatgcagaagctaccatcctttgacgaggactgggccaggcaacgcagtgatgctgatgctgcagacgaagtcctgcgttacgttggagtggtggatacggtgaacaagaggggacaggtggagctacgtaggtacaagagggaccacccgttcgcgcagctctccggctccgacaacatcatcgcattcaccacctcgaggtacaaggagcagccgctaatcgtgcggggcccaggcgcgggcgcggaggtgactgcgggtggcgtcttctgcgacatcctgcggctggcgtcttaccttggcgctccttcttagagcttccacttacagttgtcaatttgaagaggcagatggacagtgccctgcatgatgcctccgtgtttaggcttattatggacttgctcaaagttgttctgaataagtgccaggaaataaggcctctatctatttaggcctctatcttcggggtagctgactaagtgttgttattgctacggaatccagaattctgtgaattgaaatgaattgtaccgatgaagactgtttgcttgtgtctactggctactgttatgtgtcggtgttttaaccagagggtcccaaccaacaagtgaatttgtgcaagagaagac

SEQ ID NO: 68758 - DNA, 2807 bp, Zea Mays
gacgtcaaaagctgggcgcactgccgcagcaggcagcggccctgtgggggttaaagaagggtttttggcatctagccgtccctttctgctgcgaacttgcgttgcgaccgtgcattccgttcctctcctctctcggctctcggcgagcgagatgcagagcctaaccgtagcaagagcgcttcctcccgccgtggccacagctcggcggcggccgcgcgcgtcctcttctagcagggaagcggttttacaatgttggaagtacgaattaagtcaagaccaatatctgggaggatccctaaggataggttcgtctcaaggaagtttggacatacatcgctcaacaaatttgctcagaccagctgctgcatctgtttcagttgaacaagatgaagtcaatacttatcttccaaaaggtgatatgtggtctgtgcacaagtttggtggaacctgtatgggaacatcccaaagaatccagagtgttgcaaatatagttcttggtgattcttctgagaggaagctgatcattgtttctgcaatgtctaaagtaaccgacatgatgtacaaccttgtacagaaggctcagtcaagggatgattcatatacaatagcattggaagaagtttttgagaagcatatggttgctgcaaaggatcttattgatggagaagatcttgcaagattcttgtctcagttgcactcagacgtcagcaacttgcgagccatgctccgtgctatttatatagctgggcatgcgacagagtctttctctgactttgttgttggacatggagagttgtggtctgcgcaaatgctatcttatgcaataaagaagtcatactttggggcaaatgttttgcatccgcgcaccattatacctgtgatgaaagacaacattcccattgttattaggaacatgttcaatctctctgcctctggaacaatgatttgcaagcagccggccaatgaaaatggtgatttagatgcatgtgtcaaatcatttgctactatcgataatttagcacttgttaatgttgaaggaactggaatggctggcgttccaggtacagcaagtgctatatttagtactgttaaagatgttggagctaatgttatcatgatatctcaggctagcagtgaacattcagtatgctttgctgttccagaaaaggaagttgctgcagtttctgctaggttacatgataggtttcatgaggcattagcagcagggaggttgtctaaggttgaagttattaatggttgcagcattcttgctgctgttggtctgaggatggccagcactcctggagttagtgcaatactttttgatgcattagcaaaggcaaacattaatgttcgagcaatagctcaaggttgcagtgaatacaatatcactgttgtattgaagcaagaagattgtgtaagggctctgagagctgctcactcaaggttcttcctctccaaaacgacacttgcagttggcatcattggacctggtttaattggtagaacactccttaaccagctcaaggatcaggttgctgctctcaaggaaaatatgaacattgatctgcgtgtcattggaataactggctcaagtacaatgcttttgagcgacacgggaatagacttaacccagtggaaacaacttctaaaaaaggaagcagaaccagctgatattgatagttttgttcatcatttatccgataatcacgtatttccaaacaaagttttggtggactgcacagcagatacaagtgttgcatcccactattataattggttaaagaagggtattcatgtcatcacaccaaataagaaagcaaattctgggccacttgatcagcaactgttggtgctggcctcccaatcattagtaccttgcgaggtcttctggagacgggtgacaagatactgcgtattgagggcattttcagtggaactttgagttatatatttaataatttcgaaggaacaagggcattcagtgatgtcgttgctgaagcaaaagaggcgggatacactgaacctgacccaagagatgatctatctggaactgatgttgcccgaaaggtcattatccttgcaagggaatcaggtttgaggcttgaactttctgatattcctgtgaagagccttgtgccagaaacacttgcagcatgctcgtcagcagatgaattcatgcagaagctaccatcctttgacgaggactgggccaggcaacgcagtgatgctgatgctgcagacgaagtcctgcgttacgttggagtggtggatacggtgaacaagaggggacaggtggagctacgtaggtacaagagggaccacccgttcgcgcagctctccggctccgacaacatcatcgcattcaccacctcgaggtacaaggagcagccgctaatcgtgcggggcccaggcgcgggcgcggaggtgactgcgggtggcgtcttctgcgacatcctgcggctggcgtcttaccttggcgctccttcttagagcttccacttacagttgtcaatttgaagaggcagatggacagtgccctgcatgatgcctccgtgtttaggcttattatggacttgctcaaagttgttctgaataagtgccaggaaataaggcctctatctatttaggcctctatcttcggggtagctgactaagtgttgttattgctacggaatccagaattctgtgaattgaaatgaattgtaccgatgaagactgtttgcttgtgtctactggctactgttatgtgtcggtgttttaaccagagggtcccaaccaacaagtgaatttgtgcaagagaagac

SEQ ID NO: 68759 - DNA, 2122 bp, Zea Mays
tccgttcctctcctctctcggctctcggcgagcgagatgcagagcctaaccgtagcaagagcgcttcctcccgccgtggccacagctcggcggcggccgcgcgcgtcctcttctagcagggaagcggttttacaatgttggaagtacgaattaagtcaagaccaatatctgggaggatccctaaggttcgtctcaaggaagtttggacatacatcgctcaacaaatttgctcagaccagctgctgcatctgtttcagttgaacaagatgaagtcaatacttatcttccaaaaggtgatatgtggtctgtgcacaagtttggtggaacctgtatgggaacatcccaaagaatccagagtgttgcaaatatagttcttggtgattcttctgagaggaagctgatcattgtttctgcaatgtctaaagtaaccgacatgatgtacaaccttgtacagaaggctcagtcaagggatgattcatatacaatagcattggaagaagtttttgagaagcatatggttgctgcaaaggatcttattgatggagaagatcttgcaagattcttgtctcagttgcactcagacgtcagcaacttgcgagccatgctccgtgctatttatatagctgggcatgcgacagagtctttctctgactttgttgttggacatggagagttgtggtctgcgcaaatgctatcttatgcaataaagaagtcatactttggggcaaatgttttgcatccgcgcaccattatacctgtgatgaaagacaacattcccattgttattaggaacatgttcaatctctctgcctctggaacaatgatttgcaagcagccggccaatgaaaatggtgatttagatgcatgtgtcaaatcatttgctactatcgataatttagcacttgttaatgttgaaggaactggaatggctggcgttccaggtacagcaagtgctatatttagtactgttaaagatgttggagctaatgttatcatgatatctcaggctagcagtgaacattcagtatgctttgctgttccagaaaaggaagttgctgcagtttctgctaggttacatgataggtttcatgaggcattagcagcagggaggttgtctaaggttgaagttattaatggttgcagcattcttgctgctgttggtctgaggatggccagcactcctggagttagtgcaatactttttgatgcattagcaaaggcaaacattaatgttcgagcaatagctcaaggttgcagtgaatacaatatcactgttgtattgaagcaagaagattgtgtaagggctctgagagctgctcactcaaggttcttcctctccaaaacgacacttgcagttggcatcattggacctggtttaattggtagaacactccttaaccagctcaaggatcaggttgctgctctcaaggaaaatatgaacattgatctgcgtgtcattggaataactggctcaagtacaatgcttttgagcgacacgggaatagacttaacccagtggaaacaacttctaaaaaaggaagcagaaccagctgatattgatagttttgttcatcatttatccgataatcacgtatttccaaacaaagttttggtggactgcacagcagatacaagtgttgcatcccactattataattggttaaagaagggtattcatgtcatcacaccaaataagaaagcaaattctgggccacttgatcagtacctgaaattgcggactctgcaacgtgcctcgtacactcattacttttatgaagcaactgttggtgctggcctcccaatcattagtaccttgcgaggtcttctggagacgggtgacaagatactgcgtattgagggcattttcagtggaactttgagttatatatttaataatttcgaaggaacaagggcattcagtgatgtcgttgctgaagcaaaagaggcgggatacactgaacctgacccaagagatgatctatctggaactgatgttgcccgaaagcaagagtccttacagaacatataaaactaaaaggttgaggatatgaccagagataatggggaaagtgtgttttggacactgaagagtatggctttgctgggaaattgctggagccaa

SEQ ID NO: 68760 - DNA, 2192 bp, Zea Mays
ttaaagaagggtttttggcatctagccgtccctttctgctgcgaacttgcgttgcgaccgtgcattccgttcctctcctctctcggctctcggcgagcgagatgcagagcctaaccgtagcaagagcgcttcctcccgccgtggccacagctcggcggcggccgcgcgcgtcctcttctagcagggaagcggttttacaatgttggaagtacgaattaagtcaagaccaatatctgggaggatccctaaggataggttcgtctcaaggaagtttggacatacatcgctcaacaaatttgctcagaccagctgctgcatctgtttcagttgaacaagatgaagtcaatacttatcttccaaaaggtgatatgtggtctgtgcacaagtttggtggaacctgtatgggaacatcccaaagaatccagagtgttgcaaatatagttcttggtgattcttctgagaggaagctgatcattgtttctgcaatgtctaaagtaaccgacatgatgtacaaccttgtacagaaggctcagtcaagggatgattcatatacaatagcattggaagaagtttttgagaagcatatggttgctgcaaaggatcttattgatggagaagatcttgcaagattcttgtctcagttgcactcagacgtcagcaacttgcgagccatgctccgtgctatttatatagctgggcatgcgacagagtctttctctgactttgttgttggacatggagagttgtggtctgcgcaaatgctatcttatgcaataaagaagtcatactttggggcaaatgttttgcatccgcgcaccattatacctgtgatgaaagacaacattcccattgttattaggaacatgttcaatctctctgcctctggaacaatgatttgcaagcagccggccaatgaaaatggtgatttagatgcatgtgtcaaatcatttgctactatcgataatttagcacttgttaatgttgaaggaactggaatggctggcgttccaggtacagcaagtgctatatttagtactgttaaagatgttggagctaatgttatcatgatatctcaggctagcagtgaacattcagtatgctttgctgttccagaaaaggaagttgctgcagtttctgctaggttacatgataggtttcatgaggcattagcagcagggaggttgtctaaggttgaagttattaatggttgcagcattcttgctgctgttggtctgaggatggccagcactcctggagttagtgcaatactttttgatgcattagcaaaggcaaacattaatgttcgagcaatagctcaaggttgcagtgaatacaatatcactgttgtattgaagcaagaagattgtgtaagggctctgagagctgctcactcaaggttcttcctctccaaaacgacacttgcagttggcatcattggacctggtttaattggtagaacactccttaaccagctcaaggatcaggttgctgctctcaaggaaaatatgaacattgatctgcgtgtcattggaataactggctcaagtacaatgcttttgagcgacacgggaatagacttaacccagtggaaacaacttctaaaaaaggaagcagaaccagctgatattgatagttttgttcatcatttatccgataatcacgtatttccaaacaaagttttggtggactgcacagcagatacaagtgttgcatcccactattataattggttaaagaagggtattcatgtcatcacaccaaataagaaagcaaattctgggccacttgatcagtacctgaaattgcggactctgcaacgtgcctcgtacactcattacttttatgaagcaactgttggtgctggcctcccaatcattagtaccttgcgaggtcttctggagacgggtgacaagatactgcgtattgagggcattttcagtggaactttgagttatatatttaataatttcgaaggaacaagggcattcagtgatgtcgttgctgaagcaaaagaggcgggatacactgaacctgacccaagagatgatctatctggaactgatgttgcccgaaagcaagagtccttacagaacatataaaactaaaaggttgaggatatgaccagagataatggggaaagtgtgttttggacactgaagagtatggctttgctgggaaattgctggagccaa

SEQ ID NO: 68761 - DNA, 1959 bp, Zea Mays
gtttttggcatctagccgtccctttctgctgcgaacttgcgttgcgaccgtgcattccgttcctctcctctctcggctctcggcgagcgagatgcagagcctaaccgtagcaagagcgcttcctcccgccgtggccacagctcggcggcggccgcgcgcgtcctcttctagcagggaagcggttttacaatgttggaagtacgaattaagtcaagaccaatatctgggaggatccctaaggataggttcgtctcaaggaagtttggacatacatcgctcaacaaatttgctcagaccagctgctgcatctgtttcagttgaacaagatgaagtcaatacttatcttccaaaaggtgatatgtggtctgtgcacaagtttggtggaacctgtatgggaacatcccaaagaatccagagtgttgcaaatatagttcttggtgattcttctgagaggaagctgatcattgtttctgcaatgtctaaagtaaccgacatgatgtacaaccttgtacagaaggctcagtcaagggatgattcatatacaatagcattggaagaagtttttgagaagcatatggttgctgcaaaggatcttattgatggagaagatcttgcaagattcttgtctcagttgcactcagacgtcagcaacttgcgagccatgctccgtgctatttatatagctgggcatgcgacagagtctttctctgactttgttgttggacatggagagttgtggtctgcgcaaatgctatcttatgcaataaagaagtcatactttggggcaaatgttttgcatccgcgcaccattatacctgtgatgaaagacaacattcccattgttattaggaacatgttcaatctctctgcctctggaacaatgatttgcaagcagccggccaatgaaaatggtgatttagatgcatgtgtcaaatcatttgctactatcgataatttagcacttgttaatgttgaaggaactggaatggctggcgttccaggtacagcaagtgctatatttagtactgttaaagatgttggagctaatgttatcatgatatctcaggctagcagtgaacattcagtatgctttgctgttccagaaaaggaagttgctgcagtttctgctaggttacatgataggtttcatgaggcattagcagcagggaggttgtctaaggttgaagttattaatggttgcagcattcttgctgctgttggtctgaggatggccagcactcctggagttagtgcaatactttttgatgcattagcaaaggcaaacattaatgttcgagcaatagctcaaggttgcagtgaatacaatatcactgttgtattgaagcaagaagattgtgtaagggctctgagagctgctcactcaaggttcttcctctccaaaacgacacttgcagttggcatcattggacctggtttaattggtagaacactccttaaccagctcaaggatcaggttgctgctctcaaggaaaatatgaacattgatctgcgtgtcattggaataactggctcaagtacaatgcttttgagcgacacgggaatagacttaacccagtggaaacaacttctaaaaaaggaagcagaaccagctgatattgatagttttgttcatcatttatccgataatcacgtatttccaaacaaagttttggtggactgcacagcagatacaagtgttgcatcccactattataattggttaaagaagggtattcatgtcatcacaccaaataagaaagcaaattctgggccacttgatcagtacctgaaattgcggactctgcaacgtgcctcgtacactcattacttttatgaagcaactgttggtgctggcctcccaatcattagtaccttgcgaggtcttctggagacgggtgacaagatactgcgtattgagggcattttcagctttagtgccttgtcccatacggctagact

SEQ ID NO: 68762 - DNA, 778 bp, Zea Mays
attttcttgggtaaccaaagcaatcaactaattgatttgttagtttcaatttttaataggaatctctcgacaacattaatctattttcgataattacagtcatgtcattcttcctgttggccccggtaaccttacttacagaaggtgttaaagttagtccagcagttttgcagtctgctggtttgaacttgaaacagatatacacaaggtcattgattgctgcatgctgcttccatgcataccaacaggtgtcatacatgatcctcgccagggtatccccagtcacacattcagtgggcaattgcgtcaagcgtgtggtggtcattgtgacctcggttctgttcttcaggacccctgtttctcccatcaactcactcggtaccgggatcgctcttgctggagttttcctatactcgcaattgaagaggcttaagcccaagcccaaggctgcttgatcatagacctttgcaggtccatccaatagaacttttgaagttatgctatgccattggaatgattagtgagtgccgtagttagaatgatgtttaaagaagagctaccacttcagcagataatttgtgacttgcttgcattttttggacggatttgttcgtgtattaataattttgcagtgacgatacttctgttgtgctgtttataatcttctgaaactgaactgagttgttgcattggactatcttcaatcgtgacactaatttaatagagtagacacgaaaaaaaatactttggtggaaaggtaatatttggaattatgttt

SEQ ID NO: 68763 - DNA, 1208 bp, Zea Mays
gttgcattcctgatgcgcgagcaacccaattgctggcctcacctctggttctgaaggttctgccataccctataaacatcaccacagtgcagtttgccgttggaagtgccattgctttgtttatgtggatcaccggtatccttaaaaggccaaagatttctggtgcccagctttttgctatccttcctctagctatcgttcataccatgggcaatcttttcacaaacatgagccttggaaaggttgcggtgtcatttacacatactatcaaggccatggaacctttcttctcagttctcctttcagcaattttccttgttgcctacgccttgggttgtgttgtctcttcttccgatcgttggtggtgtggcattggcatcccttactgaggcctcctttaactgggctggattttggagtgcaatggcttcaaatgtaaccttccagtcaaggaatgtgctaagcaagaaacttatggtgaagaaagaggaatctctcgacaacattaatctattttcgataattacagtcatgtcattcttcctgttggccccggtaaccttacttacagaaggtgttaaagttagtccagcagttttgcagtctgctggtttgaacttgaaacagatatacacaaggtcattgattgctgcatgctgcttccatgcataccaacaggtgtcatacatgatcctcgccagggtatccccagtcacacattcagtgggcaattgcgtcaagcgtgtggtggtcattgtgacctcggttctgttcttcaggacccctgtttctcccatcaactcactcggtaccgggatcgctcttgctggagttttcctatactcgcaattgaagaggcttaagcccaagcccaaggctgcttgatcatagacctttgcaggtccatccaatagaacttttgaagttatgctatgccattggaatgattagtgagtgccgtagttagaatgatgtttaaagaagagctaccacttcagcagataatttgtgacttgcttgcattttttggacggatttgttcgtgtattaataattttgcagtgacgatacttctgttgtgctgtttataatcttctgaaactgaactgagttgttgcattggactatcttcaatcgtgacactaatttaatagagtagacacgaaaaaaaatactttggtggaaaggtaatatttggaattatgttt

SEQ ID NO: 68764 - DNA, 1250 bp, Zea Mays
atcactggcgtctccctgtccctgtgttgtgcgacgcgttgcattcctgatgcgcgagcaacccaattgctggcctcacctctggttctgaaggttctgccataccctataaacatcaccacagtgcagtttgccgttggaagtgccattgctttgtttatgtggatcaccggtatccttaaaaggccaaagatttctggtgcccagctttttgctatccttcctctagctatcgttcataccatgggcaatcttttcacaaacatgagccttggaaaggttgcggtgtcatttacacatactatcaaggccatggaacctttcttctcagttctcctttcagcaattttccttggtgagttgcctacgccttgggttgtgttgtctcttcttccgatcgttggtggtgtggcattggcatcccttactgaggcctcctttaactgggctggattttggagtgcaatggcttcaaatgtaaccttccagtcaaggaatgtgctaagcaagaaacttatggtgaagaaagaggaatctctcgacaacattaatctattttcgataattacagtcatgtcattcttcctgttggccccggtaaccttacttacagaaggtgttaaagttagtccagcagttttgcagtctgctggtttgaacttgaaacagatatacacaaggtcattgattgctgcatgctgcttccatgcataccaacaggtgtcatacatgatcctcgccagggtatccccagtcacacattcagtgggcaattgcgtcaagcgtgtggtggtcattgtgacctcggttctgttcttcaggacccctgtttctcccatcaactcactcggtaccgggatcgctcttgctggagttttcctatactcgcaattgaagaggcttaagcccaagcccaaggctgcttgatcatagacctttgcaggtccatccaatagaacttttgaagttatgctatgccattggaatgattagtgagtgccgtagttagaatgatgtttaaagaagagctaccacttcagcagataatttgtgacttgcttgcattttttggacggatttgttcgtgtattaataattttgcagtgacgatacttctgttgtgctgtttataatcttctgaaactgaactgagttgttgcattggactatcttcaatcgtgacactaatttaatagagtagacacgaaaaaaaatactttggtggaaaggtaatatttggaattatgttt

SEQ ID NO: 68765 - DNA, 1950 bp, Zea Mays
caacaattgctttattgttctgtcaccatctctatcgatgtctgtgaagaggattcaagtctggttagatttagacgctatggaagtaggtctcaggctaaatgatgatcaagtgaagaaagaaatatcaaggatttttctccagatgaggaccttattgttttaaattgattaatctatgtgcaatatgtttggaactcctcagcacgagcatcagcagcgatgttgacagtggtgaggcggcagcaatctacacagcgcagtgctcccactcattccacttcctatgcatcgcctccaacatccggcatggcaacgtcagctgccctatctgccgtgcacaatggtctgagctaccacgtgacctgaaggttccaccattgctgcacaaccagtcagacccaatccttcgcatcctggacgacaacattgcgtcatcccgtgtgaaccgaaggtcctccatccgtgctgctcgctacaacgatgatgacccggtagagcctttcaccttggctgagcatgtggatccatgtctccgctttgtcctcatcccggcaccggtgtcagctcaccatcacgtcctcgggcattacccctgtggacgcatgttgccactgcaacagccatgccagtacagcggctcctccatgctttcaccaccgcagattgcttcgccaagtggtcaaaggcgagcctacctctctgtcagtcttgctccacagccagccatggacctggtcctggttgccagccctaacggaccacatctgaggctcttgaagcaggcaatggcgcttgttgtcttctccatgagggcaattgaccggttagccatcgtcacgaatgccaccactgcaacccgtgctttccccttgcgccggatgacgtcccatgcaaaaagaatggcgctgcaggttatcgaacacctttgctgtgttggtgggactgatccagtaggggctctgcacaagggcctcaagatattggaggaccgggcgcatcggaacccgagcaactgcatccttcacttgtctgatcatccagtccgcaactgtgttggtggtgtggacatgaaccactccagcatcccagtccaccagttccatgtcgggctcgggttcggtgtgcggagtggatttatcatgcatgagtttgaggagctcctcgcgcggttgcttggcggcgtgataggcgacacccagctgaggataggggagcatggcggaatggtcaggcttggagagctgaggggtggtgaggagcggaggataccgctcgaccttgcggcagattgtggcttcatactcgttggttacagttacctggagggtggaagagaggagcagctgaggacaggtgagatcgccgtcgggttcgaagagaaaggtgacaacgggtactgtggaatgagagagatggggctgagcattggcggcgagaggaggagctgctgcgccgagaggcgggactaccatgacccgttcatggcacggcgatgggcgaagcatttcaacgtgtacagggcctgagtagaagagcttgatcgtcagctgctgcgaaatatgagtcttgttggtttcttttctctctttttttccccattcctgcaagcatctaggtttggtgtctgctttttggcttcttttgttgtggatctgaatccctgtaagatctctctctctttctctttttgcatgaaatgtgtgggttctgtctgacaaaatctgcttgtgttgtgtgaatctgaacgtgaacagatcatactggagaaaaaaaagcagcaaaactagaaatattatttgattgagcttgcaaatttggaagccagggagttaaagaattattctttcgaagttgtaatgctactgtgcttgcatagttgagtttagcatgtgttctctccagttgtgctcattaaactttgaaaggaacgtggatctaggattcata

SEQ ID NO: 68766 - DNA, 1837 bp, Zea Mays
agcagagcaccacaagatgcattcatcggtgacagcctgcagcggagccatcacataaaaaatctatgtgcaatatgtttggaactcctcagcacgagcatcagcagcgatgttgacagtggtgaggcggcagcaatctacacagcgcagtgctcccactcattccacttcctatgcatcgcctccaacatccggcatggcaacgtcagctgccctatctgccgtgcacaatggtctgagctaccacgtgacctgaaggttccaccattgctgcacaaccagtcagacccaatccttcgcatcctggacgacaacattgcgtcatcccgtgtgaaccgaaggtcctccatccgtgctgctcgctacaacgatgatgacccggtagagcctttcaccttggctgagcatgtggatccatgtctccgctttgtcctcatcccggcaccggtgtcagctcaccatcacgtcctcgggcattacccctgtggacgcatgttgccactgcaacagccatgccagtacagcggctcctccatgctttcaccaccgcagattgcttcgccaagtggtcaaaggcgagcctacctctctgtcagtcttgctccacagccagccatggacctggtcctggttgccagccctaacggaccacatctgaggctcttgaagcaggcaatggcgcttgttgtcttctccatgagggcaattgaccggttagccatcgtcacgaatgccaccactgcaacccgtgctttccccttgcgccggatgacgtcccatgcaaaaagaatggcgctgcaggttatcgaacacctttgctgtgttggtgggactgatccagtaggggctctgcacaagggcctcaagatattggaggaccgggcgcatcggaacccgagcaactgcatccttcacttgtctgatcatccagtccgcaactgtgttggtggtgtggacatgaaccactccagcatcccagtccaccagttccatgtcgggctcgggttcggtgtgcggagtggatttatcatgcatgagtttgaggagctcctcgcgcggttgcttggcggcgtgataggcgacacccagctgaggataggggagcatggcggaatggtcaggcttggagagctgaggggtggtgaggagcggaggataccgctcgaccttgcggcagattgtggcttcatactcgttggttacagttacctggagggtggaagagaggagcagctgaggacaggtgagatcgccgtcgggttcgaagagaaaggtgacaacgggtactgtggaatgagagagatggggctgagcattggcggcgagaggaggagctgctgcgccgagaggcgggactaccatgacccgttcatggcacggcgatgggcgaagcatttcaacgtgtacagggcctgagtagaagagcttgatcgtcagctgctgcgaaatatgagtcttgttggtttcttttctctctttttttccccattcctgcaagcatctaggtttggtgtctgctttttggcttcttttgttgtggatctgaatccctgtaagatctctctctctttctctttttgcatgaaatgtgtgggttctgtctgacaaaatctgcttgtgttgtgtgaatctgaacgtgaacagatcatactggagaaaaaaaagcagcaaaactagaaatattatttgattgagcttgcaaatttggaagccagggagttaaagaattattctttcgaagttgtaatgctactgtgcttgcatagttgagtttagcatgtgttctctccagttgtgctcattaaactttgaaaggaacgtggatctaggattcata

SEQ ID NO: 68767 - DNA, 1928 bp, Zea Mays
cgaaagcacaagttccttcgcctccttgcttcttttacatttcatctcatccaaatgccctacttcctggatctcccactccgcactgaatgcgcctgatggagagcagcaaaagatggaggaacccaccagcaccagagtggctgacaagaatctatgtgcaatatgtttggaactcctcagcacgagcatcagcagcgatgttgacagtggtgaggcggcagcaatctacacagcgcagtgctcccactcattccacttcctatgcatcgcctccaacatccggcatggcaacgtcagctgccctatctgccgtgcacaatggtctgagctaccacgtgacctgaaggttccaccattgctgcacaaccagtcagacccaatccttcgcatcctggacgacaacattgcgtcatcccgtgtgaaccgaaggtcctccatccgtgctgctcgctacaacgatgatgacccggtagagcctttcaccttggctgagcatgtggatccatgtctccgctttgtcctcatcccggcaccggtgtcagctcaccatcacgtcctcgggcattacccctgtggacgcatgttgccactgcaacagccatgccagtacagcggctcctccatgctttcaccaccgcagattgcttcgccaagtggtcaaaggcgagcctacctctctgtcagtcttgctccacagccagccatggacctggtcctggttgccagccctaacggaccacatctgaggctcttgaagcaggcaatggcgcttgttgtcttctccatgagggcaattgaccggttagccatcgtcacgaatgccaccactgcaacccgtgctttccccttgcgccggatgacgtcccatgcaaaaagaatggcgctgcaggttatcgaacacctttgctgtgttggtgggactgatccagtaggggctctgcacaagggcctcaagatattggaggaccgggcgcatcggaacccgagcaactgcatccttcacttgtctgatcatccagtccgcaactgtgttggtggtgtggacatgaaccactccagcatcccagtccaccagttccatgtcgggctcgggttcggtgtgcggagtggatttatcatgcatgagtttgaggagctcctcgcgcggttgcttggcggcgtgataggcgacacccagctgaggataggggagcatggcggaatggtcaggcttggagagctgaggggtggtgaggagcggaggataccgctcgaccttgcggcagattgtggcttcatactcgttggttacagttacctggagggtggaagagaggagcagctgaggacaggtgagatcgccgtcgggttcgaagagaaaggtgacaacgggtactgtggaatgagagagatggggctgagcattggcggcgagaggaggagctgctgcgccgagaggcgggactaccatgacccgttcatggcacggcgatgggcgaagcatttcaacgtgtacagggcctgagtagaagagcttgatcgtcagctgctgcgaaatatgagtcttgttggtttcttttctctctttttttccccattcctgcaagcatctaggtttggtgtctgctttttggcttcttttgttgtggatctgaatccctgtaagatctctctctctttctctttttgcatgaaatgtgtgggttctgtctgacaaaatctgcttgtgttgtgtgaatctgaacgtgaacagatcatactggagaaaaaaaagcagcaaaactagaaatattatttgattgagcttgcaaatttggaagccagggagttaaagaattattctttcgaagttgtaatgctactgtgcttgcatagttgagtttagcatgtgttctctccagttgtgctcattaaactttgaaaggaacgtggatctaggattcata

SEQ ID NO: 68768 - DNA, 4311 bp, Zea Mays
aaaaaaattaaagagaaaaaccattctcggcttcctcatccgtcccatcgaaccgcaaaccctaacctttcgattgccgccgcggcccgggtggacgggggaggttcggcggcggcccgctgggcgacgagcggccagtccgtcacggcgtccgcgtcgaggagaacccgtacttcccattaccgcgtcgggcgtcgggctggggagtggcaccgccgtcgcggcacctgtgggtgggtggcctggcgcccagcgtcacggcgtccgacctgtcggagctgttcctccggtgcggcgacgtcgagggtgttgcccgcgaacccggccggaacttcgcgttcgtgagcttcctgcgggagggggacgctgtggccgcggtgcgggagctccagggggctcgcctggctggggcgcctgttaggatcgagttttccaagggggataaggcttcaggtagctcaatggatgacagatatatgcaacgtgctgatgagcggcattctattgaacgtgggagaaaacggcaaccgagtcctgaaaacacaatagataagcataaaagaaataggtcgacagatcctagcgatgtgttatggataggctttcctcctggtttaaaggtagatgagactcttctgtgggaagccttttctccttttgggaaggttctcagggtaacaacattcccaggccgaacatatgcatttgtccagtacactagtattgcagcagcctgcagagcaaaagaagcacttcagggaaaacttttcaataatccacgagtaagcatatgcttttctcgaaatgaaggtgctgtgccagaacttgggaaacaatcatttgttgcccaatatcatccccaacctagtgcccgacctgtcgtcggagaccaagattatgaagactttcctagggctaggccttttgatagtcctccaagaaattttcgcatgtcaccaccacattttgttcctaatagtttgccaagagatgctgatgatgtgggcttcagcaagggtaattattttgaacaggaaactggaatagagcttggccgtgtgtctaatattgagccttttagaacgcgggagctgggtcaagaaagaaggcttcctgaggagcatgagccccatagacaaagccctactgctaggagtgatgcaccatggaagccatggaacaacattccttttgacagaccttggagacccttaccattcgaagattcttgggacgttgaagacaagtcatatcttatttcaaagaagctgaagggtgctcaagtgcatgatactgaacttcctgaatatcttttctccggatttgatcgaggaaaagtttaccctgagtaccaaaggaggccccatcatgatctttcagaagatggtttacagtctagaacctcttcgtctacggatttgcatggtagacatcatgtgcatcctttaaagaatataactccacttacaaataaacatgaaccatggcgtgctcaagagagttttgataggcgtttagggaaaatggatagatctactcctgactataatgaacctgctcttaaggatgaatggaaatggaatggtacaatagcaaagggaggcacaccgatctgccgagctcgatgcttccctgttggaaaggtccttaacttcatgctgcctgagtttctggattgcactgctaggacaagtctagatatgctttctaagcactactatcaagctactggcagctgggtcgtattttttgtcccagaaaatgatgcggacatgacagcttataatgatttcatgagttatctaggtgataagcagcgtgcagcagtctgtaagcttggagagagcagcaccttgtttcttgttccaccttcagatttctcagagcaagtactgagagtgcctggaaatgtcagcatatctggagtcattctgaggtttcagcagtcaaatccagattacagctcaccaaatcgcaaaccattggatagagctcacccatcttctgcaagtaattttaacactgatgtaagaaattgtgaagatctgcatgcactgagaaggctcaatccttcagatatcagcacattccctcagggtccagattatgtctgctcatcaggtggaagctataccccagcaaatgcagattttattccgccctataagccagagagtgctcctccatatgtcgtccctcaatcaccgcaagaaaggccgccagcggagctccctatgggtattgcacaaggccaacaccagcaactcccaaacaggctgccctcaggatggtccaataacctggataatccaaatccaaatccaggttctggtaacttcagtttggcacagggtgcaatctctaacaggacacaggatccgtacacatttgctcctggagtagtatcaactgggacagcttcagggtatgcatcaggtgaagcatccaacagcatgtcctgggcttccatgcaatacaactcacagcaggtagctagatctgatcaacctactattccagtatcactgccacctgatcaacttgcacagctagctgcccttcttgcacgacaaaaccaacctagaaaagttggtttgcctgtggacagctcaaacaatctgtctggattcatacagagtcccaatcctcatggacatgctacaatgatgccaggcaactctggctccatccctatccagaactcactgccacctgttccatctatgcaacaattacatgccaatgtgccagtgtcaccaataggctcgctacctgcaaatccattcaatgtgccgaccagtgctcctgtactttgtaacagcacttcgcctatgctgcccagtcatgctttggtcaacccagctcattcttccatgccaatgagaccgttcattcctccacttcctgaaggtcctccaccctttcagcagcaaacatcaagtgctgtcacagtgcagcctttaggtccttctagccagcagtctagccaacaactactggctcaggaccttgatggagatcctcaaaagcgccttcaagcaacactgcaactggcagcaaccctgcttaagcagatacaaaatcaatcaaatcctggtggccagaaataaatataaggttttctgagtggatagctgattggaccagctgtgtggcagccgaagcccagctgcatatccctagctgaagtccacactcaacagtaacatgtttgtggagttgctttggaagttgtatagaatgttttcttatgccttttagcatttggtctgtatacctaattgtattggtaaatgtctagctgcaaggatcatcatatggtgccatcctgaggagctttaaacttactgttgtggttttataccatcacctcctgtgatttgaatgtttatgatgagttctaagacgctttggctttcttatgtacatggttttttgctatgcatccagatatacattggctagaaaacgttgaaaggtcttttaagttggaatggagggagttagctgttgcctgcatttgtttgtttgcctggcttgttccaagagggtatgatggtatggataacttatgatggctggcgtttattggtacgtgcaaggctagagaggcttatgagcgccccccctgacgtgccatctgtgtaccagacggtaaataaggcgtcttactcagatgtttgcttggactcgtccgacagttgtacaatttgttacatgcattgggggcgaagctgttgacattgttttagcattgctagcaaggggttaaagagcgtgactcgtgatgcgtaatctttggtcattcgaaactggctgccgcccgccatggagcatcttttagactgtcctgggatgctgaggtgcttcaagattcagaacagctcctcttttttttttcttctctctttcagtttttaatcctcgctgatctttcagcctttctcctttgtgtgggtgtagtgcatgattgcggcacttgtttcagtgcatcagctttatgctgctctctgccatggatgaccggcctgtctgctaaagagcatgcctgtgccatgccaaggcggctgttgttactccctagtcactgcttgctaaatgctactcctactactagaaagttggcattgcatggagatctgggtatgtatcatgatggcactgcactgcgttttaaaatgcagcagatttattcccctggtctacctcgcagtcgtggatgaagaatgatggcctttttcctgtgctacgtattacctggtgcttatttagttccttgtttaatacggaccaagatttgcatctctcttt

SEQ ID NO: 68769 - DNA, 2925 bp, Zea Mays
aaaaaaattaaagagaaaaaccattctcggcttcctcatccgtcccatcgaaccgcaaaccctaacctttcgattgccgccgcggcccgggtggacgggggaggttcggcggcggcccgctgggcgacgagcggccagtccgtcacggcgtccgcgtcgaggagaacccgtacttcccattaccgcgtcgggcgtcgggctggggagtggcaccgccgtcgcggcacctgtgggtgggtggcctggcgcccagcgtcacggcgtccgacctgtcggagctgttcctccggtgcggcgacgtcgagggtgttgcccgcgaacccggccggaacttcgcgttcgtgagcttcctgcgggagggggacgctgtggccgcggtgcgggagctccagggggctcgcctggctggggcgcctgttaggatcgagttttccaagggggcctgagtttctggattgcactgctaggacaagtctagatatgctttctaagcactactatcaagctactggcagctgggtcgtattttttgtcccagaaaatgatgcggacatgacagcttataatgatttcatgagttatctaggtgataagcagcgtgcagcagtctgtaagcttggagagagcagcaccttgtttcttgttccaccttcagatttctcagagcaagtactgagagtgcctggaaatgtcagcatatctggagtcattctgaggtttcagcagtcaaatccagattacagctcaccaaatcgcaaaccattggatagagctcacccatcttctgcaagtaattttaacactgatgtaagaaattgtgaagatctgcatgcactgagaaggctcaatccttcagatatcagcacattccctcagggtccagattatgtctgctcatcaggtggaagctataccccagcaaatgcagattttattccgccctataagccagagagtgctcctccatatgtcgtccctcaatcaccgcaagaaaggccgccagcggagctccctatgggtattgcacaaggccaacaccagcaactcccaaacaggctgccctcaggatggtccaataacctggataatccaaatccaaatccaggttctggtaacttcagtttggcacagggtgcaatctctaacaggacacaggatccgtacacatttgctcctggagtagtatcaactgggacagcttcagggtatgcatcaggtgaagcatccaacagcatgtcctgggcttccatgcaatacaactcacagcaggtagctagatctgatcaacctactattccagtatcactgccacctgatcaacttgcacagctagctgcccttcttgcacgacaaaaccaacctagaaaagttggtttgcctgtggacagctcaaacaatctgtctggattcatacagagtcccaatcctcatggacatgctacaatgatgccaggcaactctggctccatccctatccagaactcactgccacctgttccatctatgcaacaattacatgccaatgtgccagtgtcaccaataggctcgctacctgcaaatccattcaatgtgccgaccagtgctcctgtactttgtaacagcacttcgcctatgctgcccagtcatgctttggtcaacccagctcattcttccatgccaatgagaccgttcattcctccacttcctgaaggtcctccaccctttcagcagcaaacatcaagtgctgtcacagtgcagcctttaggtccttctagccagcagtctagccaacaactactggctcaggaccttgatggagatcctcaaaagcgccttcaagcaacactgcaactggcagcaaccctgcttaagcagatacaaaatcaatcaaatcctggtggccagaaataaatataaggtattggtaaatgtctagctgcaaggatcatcatatggtgccatcctgaggagctttaaacttactgttgtggttttataccatcacctcctgtgatttgaatgtttatgatgagttctaagacgctttggctttcttatgtacatggttttttgctatgcatccagatatacattggctagaaaacgttgaaaggtcttttaagttggaatggagggagttagctgttgcctgcatttgtttgtttgcctggcttgttccaagagggtatgatggtatggataacttatgatggctggcgtttattggtacgtgcaaggctagagaggcttatgagcgccccccctgacgtgccatctgtgtaccagacggtaaataaggcgtcttactcagatgtttgcttggactcgtccgacagttgtacaatttgttacatgcattgggggcgaagctgttgacattgttttagcattgctagcaaggggttaaagagcgtgactcgtgatgcgtaatctttggtcattcgaaactggctgccgcccgccatggagcatcttttagactgtcctgggatgctgaggtgcttcaagattcagaacagctcctcttttttttttcttctctctttcagtttttaatcctcgctgatctttcagcctttctcctttgtgtgggtgtagtgcatgattgcggcacttgtttcagtgcatcagctttatgctgctctctgccatggatgaccggcctgtctgctaaagagcatgcctgtgccatgccaaggcggctgttgttactccctagtcactgcttgctaaatgctactcctactactagaaagttggcattgcatggagatctgggtatgtatcatgatggcactgcactgcgttttaaaatgcagcagatttattcccctggtctacctcgcagtcgtggatgaagaatgatggcctttttcctgtgctacgtattacctggtgcttatttagttccttgtttaatacggaccaagatttgcatctctcttt

SEQ ID NO: 68770 - DNA, 4102 bp, Zea Mays
aaaaaaattaaagagaaaaaccattctcggcttcctcatccgtcccatcgaaccgcaaaccctaacctttcgattgccgccgcccgccgctcgctgctgcccgccgctcgccgcggccaatgatggcgaggggccgccgcggcccgggtggacgggggaggttcggcggcggcccgctgggcgacgagcggccagtccgtcacggcgtccgcgtcgaggagaacccgtacttcccattaccgcgtcgggcgtcgggctggggagtggcaccgccgtcgcggcacctgtgggtgggtggcctggcgcccagcgtcacggcgtccgacctgtcggagctgttcctccggtgcggcgacgtcgagggtgttgcccgcgaacccggccggaacttcgcgttcgtgagcttcctgcgggagggggacgctgtggccgcggtgcgggagctccagggggctcgcctggctggggcgcctgttaggatcgagttttccaagggggataaggcttcaggtagctcaatggatgacagatatatgcaacgtgctgatgagcggcattctattgaacgtgggagaaaacggcaaccgagtcctgaaaacacaatagataagcataaaagaaataggtcgacagatcctagcgatgtgttatggataggctttcctcctggtttaaaggtagatgagactcttctgtgggaagccttttctccttttgggaaggttctcagggtaacaacattcccaggccgaacatatgcatttgtccagtacactagtattgcagcagcctgcagagcaaaagaagcacttcagggaaaacttttcaataatccacgagtaagcatatgcttttctcgaaatgaaggtgctgtgccagaacttgggaaacaatcatttgttgcccaatatcatccccaacctagtgcccgacctgtcgtcggagaccaagattatgaagactttcctagggctaggccttttgatagtcctccaagaaattttcgcatgtcaccaccacattttgttcctaatagtttgccaagagatgctgatgatgtgggcttcagcaagggtaattattttgaacaggaaactggaatagagcttggccgtgtgtctaatattgagccttttagaacgcgggagctgggtcaagaaagaaggcttcctgaggagcatgagccccatagacaaagccctactgctaggagtgatgcaccatggaagccatggaacaacattccttttgacagaccttggagacccttaccattcgaagattcttgggacgttgaagacaagtcatatcttatttcaaagaagctgaagggtgctcaagtgcatgatactgaacttcctgaatatcttttctccggatttgatcgaggaaaagtttaccctgagtaccaaaggaggccccatcatgatctttcagaagatggtttacagtctagaacctcttcgtctacggatttgcatggtagacatcatgtgcatcctttaaagaatataactccacttacaaataaacatgaaccatggcgtgctcaagagagttttgataggcgtttagggaaaatggatagatctactcctgactataatgaacctgctcttaaggatgaatggaaatggaatggtacaatagcaaagggaggcacaccgatctgccgagctcgatgcttccctgttggaaaggtccttaacttcatgctgcctgagtttctggattgcactgctaggacaagtctagatatgctttctaagcactactatcaagctactggcagctgggtcgtattttttgtcccagaaaatgatgcggacatgacagcttataatgatttcatgagttatctaggtgataagcagcgtgcagcagtctgtaagcttggagagagcagcaccttgtttcttgttccaccttcagatttctcagagcaagtactgagagtgcctggaaatgtcagcatatctggagtcattctgaggtttcagcagtcaaatccagattacagctcaccaaatcgcaaaccattggatagagctcacccatcttctgcaagtaattttaacactgatgtaagaaattgtgaagatctgcatgcactgagaaggctcaatccttcagatatcagcacattccctcagggtccagattatgtctgctcatcaggtggaagctataccccagcaaatgcagattttattccgccctataagccagagagtgctcctccatatgtcgtccctcaatcaccgcaagaaaggccgccagcggagctccctatgggtattgcacaaggccaacaccagcaactcccaaacaggctgccctcaggatggtccaataacctggataatccaaatccaaatccaggttctggtaacttcagtttggcacagggtgcaatctctaacaggacacaggatccgtacacatttgctcctggagtagtatcaactgggacagcttcagggtatgcatcaggtgaagcatccaacagcatgtcctgggcttccatgcaatacaactcacagcaggtagctagatctgatcaacctactattccagtatcactgccacctgatcaacttgcacagctagctgcccttcttgcacgacaaaaccaacctagaaaagttggtttgcctgtggacagctcaaacaatctgtctggattcatacagagtcccaatcctcatggacatgctacaatgatgccaggcaactctggctccatccctatccagaactcactgccacctgttccatctatgcaacaattacatgccaatgtgccagtgtcaccaataggctcgctacctgcaaatccattcaatgtgccgaccagtgctcctgtactttgtaacagcacttcgcctatgctgcccagtcatgctttggtcaacccagctcattcttccatgccaatgagaccgttcattcctccacttcctgaaggtcctccaccctttcagcagcaaacatcaagtgctgtcacagtgcagcctttaggtccttctagccagcagtctagccaacaactactggctcaggaccttgatggagatcctcaaaagcgccttcaagcaacactgcaactggcagcaaccctgcttaagcagatacaaaatcaatcaaatcctggtggccagaaataaatataaggtattggtaaatgtctagctgcaaggatcatcatatggtgccatcctgaggagctttaaacttactgttgtggttttataccatcacctcctgtgatttgaatgtttatgatgagttctaagacgctttggctttcttatgtacatggttttttgctatgcatccagatatacattggctagaaaacgttgaaaggtcttttaagttggaatggagggagttagctgttgcctgcatttgtttgtttgcctggcttgttccaagagggtatgatggtatggataacttatgatggctggcgtttattggtacgtgcaaggctagagaggcttatgagcgccccccctgacgtgccatctgtgtaccagacggtaaataaggcgtcttactcagatgtttgcttggactcgtccgacagttgtacaatttgttacatgcattgggggcgaagctgttgacattgttttagcattgctagcaaggggttaaagagcgtgactcgtgatgcgtaatctttggtcattcgaaactggctgccgcccgccatggagcatcttttagactgtcctgggatgctgagtgcatgattgcggcacttgtttcagtgcatcagctttatgctgctctctgccatggatgaccggcctgtctgctaaagagcatgcctgtgccatgccaaggcggctgttgttactccctagtcactgcttgctaaatgctactcctactactagaaagttggcattgcatggagatctgggtatgtatcatgatggcactgcactgcgttttaaaatgcagcagatttattcccctggtctacctcgcagtcgtggatgaagaatgatggcctttttcctgtgctacgtattacctggtgcttatttagttccttgtttaatacggaccaagatttgcatctctcttt

SEQ ID NO: 68771 - DNA, 4093 bp, Zea Mays
aaaaattccaaatttctcgatacatcagggtccgtgattgaaatcgacaaaaaaattaaagagaaaaaccattctcggcttcctcatccgtcccatcgaaccgcaaaccctaacctttcgattgccgccgcggcccgggtggacgggggaggttcggcggcggcccgctgggcgacgagcggccagtccgtcacggcgtccgcgtcgaggagaacccgtacttcccattaccgcgtcgggcgtcgggctggggagtggcaccgccgtcgcggcacctgtgggtgggtggcctggcgcccagcgtcacggcgtccgacctgtcggagctgttcctccggtgcggcgacgtcgagggtgttgcccgcgaacccggccggaacttcgcgttcgtgagcttcctgcgggagggggacgctgtggccgcggtgcgggagctccagggggctcgcctggctggggcgcctgttaggatcgagttttccaagggggataaggcttcaggtagctcaatggatgacagatatatgcaacgtgctgatgagcggcattctattgaacgtgggagaaaacggcaaccgagtcctgaaaacacaatagataagcataaaagaaataggtcgacagatcctagcgatgtgttatggataggctttcctcctggtttaaaggtagatgagactcttctgtgggaagccttttctccttttgggaaggttctcagggtaacaacattcccaggccgaacatatgcatttgtccagtacactagtattgcagcagcctgcagagcaaaagaagcacttcagggaaaacttttcaataatccacgagtaagcatatgcttttctcgaaatgaaggtgctgtgccagaacttgggaaacaatcatttgttgcccaatatcatccccaacctagtgcccgacctgtcgtcggagaccaagattatgaagactttcctagggctaggccttttgatagtcctccaagaaattttcgcatgtcaccaccacattttgttcctaatagtttgccaagagatgctgatgatgtgggcttcagcaagggtaattattttgaacaggaaactggaatagagcttggccgtgtgtctaatattgagccttttagaacgcgggagctgggtcaagaaagaaggcttcctgaggagcatgagccccatagacaaagccctactgctaggagtgatgcaccatggaagccatggaacaacattccttttgacagaccttggagacccttaccattcgaagattcttgggacgttgaagacaagtcatatcttatttcaaagaagctgaagggtgctcaagtgcatgatactgaacttcctgaatatcttttctccggatttgatcgaggaaaagtttaccctgagtaccaaaggaggccccatcatgatctttcagaagatggtttacagtctagaacctcttcgtctacggatttgcatggtagacatcatgtgcatcctttaaagaatataactccacttacaaataaacatgaaccatggcgtgctcaagagagttttgataggcgtttagggaaaatggatagatctactcctgactataatgaacctgctcttaaggatgaatggaaatggaatggtacaatagcaaagggaggcacaccgatctgccgagctcgatgcttccctgttggaaaggtccttaacttcatgctgcctgagtttctggattgcactgctaggacaagtctagatatgctttctaagcactactatcaagctactggcagctgggtcgtattttttgtcccagaaaatgatgcggacatgacagcttataatgatttcatgagttatctaggtgataagcagcgtgcagcagtctgtaagcttggagagagcagcaccttgtttcttgttccaccttcagatttctcagagcaagtactgagagtgcctggaaatgtcagcatatctggagtcattctgaggtttcagcagtcaaatccagattacagctcaccaaatcgcaaaccattggatagagctcacccatcttctgcaagtaattttaacactgatgtaagaaattgtgaagatctgcatgcactgagaaggctcaatccttcagatatcagcacattccctcagggtccagattatgtctgctcatcaggtggaagctataccccagcaaatgcagattttattccgccctataagccagagagtgctcctccatatgtcgtccctcaatcaccgcaagaaaggccgccagcggagctccctatgggtattgcacaaggccaacaccagcaactcccaaacaggctgccctcaggatggtccaataacctggataatccaaatccaaatccaggttctggtaacttcagtttggcacagggtgcaatctctaacaggacacaggatccgtacacatttgctcctggagtagtatcaactgggacagcttcagggtatgcatcaggtgaagcatccaacagcatgtcctgggcttccatgcaatacaactcacagcaggtagctagatctgatcaacctactattccagtatcactgccacctgatcaacttgcacagctagctgcccttcttgcacgacaaaaccaacctagaaaagttggtttgcctgtggacagctcaaacaatctgtctggattcatacagagtcccaatcctcatggacatgctacaatgatgccaggcaactctggctccatccctatccagaactcactgccacctgttccatctatgcaacaattacatgccaatgtgccagtgtcaccaataggctcgctacctgcaaatccattcaatgtgccgaccagtgctcctgtactttgtaacagcacttcgcctatgctgcccagtcatgctttggtcaacccagctcattcttccatgccaatgagaccgttcattcctccacttcctgaaggtcctccaccctttcagcagcaaacatcaagtgctgtcacagtgcagcctttaggtccttctagccagcagtctagccaacaactactggctcaggaccttgatggagatcctcaaaagcgccttcaagcaacactgcaactggcagcaaccctgcttaagcagatacaaaatcaatcaaatcctggtggccagaaataaatataaggtattggtaaatgtctagctgcaaggatcatcatatggtgccatcctgaggagctttaaacttactgttgtggttttataccatcacctcctgtgatttgaatgtttatgatgagttctaagacgctttggctttcttatgtacatggttttttgctatgcatccagatatacattggctagaaaacgttgaaaggtcttttaagttggaatggagggagttagctgttgcctgcatttgtttgtttgcctggcttgttccaagagggtatgatggtatggataacttatgatggctggcgtttattggtacgtgcaaggctagagaggcttatgagcgccccccctgacgtgccatctgtgtaccagacggtaaataaggcgtcttactcagatgtttgcttggactcgtccgacagttgtacaatttgttacatgcattgggggcgaagctgttgacattgttttagcattgctagcaaggggttaaagagcgtgactcgtgatgcgtaatctttggtcattcgaaactggctgccgcccgccatggagcatcttttagactgtcctgggatgctgagtgcatgattgcggcacttgtttcagtgcatcagctttatgctgctctctgccatggatgaccggcctgtctgctaaagagcatgcctgtgccatgccaaggcggctgttgttactccctagtcactgcttgctaaatgctactcctactactagaaagttggcattgcatggagatctgggtatgtatcatgatggcactgcactgcgttttaaaatgcagcagatttattcccctggtctacctcgcagtcgtggatgaagaatgatggcctttttcctgtgctacgtattacctggtgcttatttagttccttgtttaatacggaccaagatttgcatctctcttt

SEQ ID NO: 68772 - DNA, 1904 bp, Zea Mays
aaaaaaattaaagagaaaaaccattctcggcttcctcatccgtcccatcgaaccgcaaaccctaacctttcgattgccgccgcggcccgggtggacgggggaggttcggcggcggcccgctgggcgacgagcggccagtccgtcacggcgtccgcgtcgaggagaacccgtacttcccattaccgcgtcgggcgtcgggctggggagtggcaccgccgtcgcggcacctgtgggtgggtggcctggcgcccagcgtcacggcgtccgacctgtcggagctgttcctccggtgcggcgacgtcgagggtgttgcccgcgaacccggccggaacttcgcgttcgtgagcttcctgcgggagggggacgctgtggccgcggtgcgggagctccagggggctcgcctggctggggcgcctgttaggatcgagttttccaagggggcctgagtttctggattgcactgctaggacaagtctagatatgctttctaagcactactatcaagctactggcagctgggtcgtattttttgtcccagaaaatgatgcggacatgacagcttataatgatttcatgagttatctaggtgataagcagcgtgcagcagtctgtaagcttggagagagcagcaccttgtttcttgttccaccttcagatttctcagagcaagtactgagagtgcctggaaatgtcagcatatctggagtcattctgaggtttcagcagtcaaatccagattacagctcaccaaatcgcaaaccattggatagagctcacccatcttctgcaagtaattttaacactgatgtaagaaattgtgaagatctgcatgcactgagaaggctcaatccttcagatatcagcacattccctcagggtccagattatgtctgctcatcaggtggaagctataccccagcaaatgcagattttattccgccctataagccagagagtgctcctccatatgtcgtccctcaatcaccgcaagaaaggccgccagcggagctccctatgggtattgcacaaggccaacaccagcaactcccaaacaggctgccctcaggatggtccaataacctggataatccaaatccaaatccaggttctggtaacttcagtttggcacagggtgcaatctctaacaggacacaggatccgtacacatttgctcctggagtagtatcaactgggacagcttcagggtatgcatcaggtgaagcatccaacagcatgtcctgggcttccatgcaatacaactcacagcaggtagctagatctgatcaacctactattccagtatcactgccacctgatcaacttgcacagctagctgcccttcttgcacgacaaaaccaacctagaaaagttggtttgcctgtggacagctcaaacaatctgtctggattcatacagagtcccaatcctcatggacatgctacaatgatgccaggcaactctggctccatccctatccagaactcactgccacctgttccatctatgcaacaattacatgccaatgtgccagtgtcaccaataggctcgctacctgcaaatccattcaatgtgccgaccagtgctcctgtactttgtaacagcacttcgcctatgctgcccagtcatgctttggtcaacccagctcattcttccatgccaatgagaccgttcattcctccacttcctgaaggtcctccaccctttcagcagcaaacatcaagtgctgtcacagtgcagcctttaggtccttctagccagcagtctagccaacaactactggctcaggaccttgatggagatcctcaaaagcgccttcaagcaacactgcaactggcagcaaccctgcttaagcagatacaaaatcaatcaaatcctggtggccagaaataaatataaggttttct

SEQ ID NO: 68773 - DNA, 3437 bp, Zea Mays
cctgcttccgccattgctagctttggccgaccatgtcacctcatcatcggcattttacgtcccagttttcttcttcttattatgcccccgtgcgaccccaaagaaggagagaactgaagctgcttccactgcctgattattccccaaccagttgttaccattcaggtcatctccgactagtctcacctgcagtgccctacgagcgagcactgtcagcacttgttggtcgccattcctatcccaccagcagccatggcggccgtgacgacaacgccatcgtcgaaaccaaggaaagtaggagaagaccaaggaaggggaagaaaacagcgcccaaccaaggcgtgcgtgcaccatcgtcgtcggagttgtcgactaggacggcgcagagcggcgacccccttgggcgaaaggagctggggcaacacgtggtgcactggctgaagcagggcatgcgccagatggcctctgaattcgcttcctcagaccagccagagacacaaggtaacaaggcattcctgtggtctgatggtgggcacgcggcccacgcggggtttgtagcgcaggcacaggcacacctttctgccactcccatgcccaagggacaggacgctctgtgccgcacggcctccgctcactaccccacgctgttcgacaacttccagagagagctccgcgatgtcctgctgcggcggtaacaagagggccttcttgttgatgatgactggcgctctacacgctcgtgggcgcttctgaaagagatggctagatcggcggagcatcggacggccgcacgccggtctactgctcctgttctgcacaccacgcttggcgtcagcttggagaagacgaggctgatgcaggctagaatcgatggctttgttcagcaaatgaccggccttcttcggctagaacgagatgcggagctggaactggcccaggatcatgaggtgagtgccgccggtacagtgatggatggaatgccgaaaaagccagtggtagctcatggtcaggcccaagaggatggtgacaccatttgcaatttgagagtcatcagcagctcaaccggattaactggtcaacatctagtcttattcagagccgagggaagccacagacttcctgcaaccagactctcccctggagacacggtttgcgtgagagcatgcgacagccagggcgaggttgccgcttcaactccttgcttgcaagcctccgtccataatctcggtgaggatggacgcagcattacggttgcattcagatcacgccgcggcggtgaacctgccttctccaggttcccagggaaatttgcgcgtattgatcgcatacaggctctagcagatgcagttacatacgagcgcaactgcgaagcactgatggctcttcagaagagagggttacagaaaagaaacgcatccatcggggtagtggccactctgttcggagacaaggaagacgcgacgaagccggagagaaacagtctgacggatcgtcgtggaccagaagcacctgacggcggttcgctggagacgcacagccacagcttcgacacctcccagtcgagggctctcgcactggccctggacaaggagaggccagtcctggtgatccaggggcctcctggaacaggcaagacccgtctgctcagctacctcgtcgcgcgcgtggtgcgccggggtgaacgcgtgctcgtgacggctccaagcaacgcggcggtcgacaacatggcggagagcttgtcagcgagtgggctgaagaacattgtgcgagtcgggaacccttccaggatatctccgtctgtggctcccatgtccctggggcagatcgtggccacgaggctcgagaagctcacccgagagttcgagacgaggagatctgccctgagaaaggacttgaagcgtcgcgtacaggacggcggcgacggttcttcagttcgtcagcaactgaaaaggctcggtaaggactacaggaaggagaagaaggaagcagtcagggaggttctggcaaacgccgaggtggtgctgtcgactaacactggcgcggctgacccacttgtgagggggactggaggttgctttgacctggtgattatagacgaagctggacaggcgattgagccatcatgttggatccctatgttgcaggggaagcgttgcattcttgccggtgaccaccggcagcttgcacccgtagtgctttcaagagaggccatggaaggtgggctgggcatgtctctgttagaaagggcttcgtcgctgcacgacggactgctcgctacgacgttgacgacacagtaccggatgcacgagtctatagctagctgggcgtcgaaggagatgtatgacggattgcttcggtcattcccgtccgttgcttctcgactcctcgtcaattatccatctgtcaaggtcacttggatgactcagtgtgcgttacttttacttgatacccggagggcgtatggaagcctaaatattgattgtgaggagagtttagacccagccggtactggttcattttacaacaatggtgaggcagatatagttgcacatcatgtcctcaatcttgtacaatgtgtccccttacatcgcgcaagtgcaactgttacaagatagactacaagaatatccgatggcttttgatgttgaggtttcaacaatagatagcttccagggtcgggaagcagatgcagtcgtcatatccatggttcgatcaaactccatgggagaagtcggattccttgccgatagaagacgcatgaatgtagctattacaagggcaaagtcacatgtcgcagtggtttgtgacacttctactatttgtaacaatgctttcctggctaggctcctcctccatatccggcaacatggtcaggttcagcatgtggatcccagttccttggatgggggctttcacctgcaagccttaccctctttaggctagcgatcttgccatgaaatgtgacatgcagtaaatgtcgagttccataatatggttgaaaattattccttctatgccatgaaacctacaacaatacattctgtaccatcaaaagttgtgtgctttcttcatggctatccatttttttcaaggtgtcatttagatggatgttgtccataacaggaatcctaaagattcctgtcggctaaaataattctcgttggtctttgaccaggccgacgggaataaggtaatctccgtcggccgtcaaatagccgacgggaattaatttaattcccgtcggctaacgtactagcccaccgaaattaatttaattctcgtcggctatcttatggccgatggggattagcttaactcccgtcgactttggactctggacgatggggattacctaactcccgtcggctagtattcctagccgacgggaattacgtttttaagagccacgacctattccccacacgggctcattttca

SEQ ID NO: 68774 - DNA, 842 bp, Zea Mays
gttgctcatattaggctgatgcagaatgccagatatttcaattattattcgccacggcgtgtcaaccccagtattaagtaatctgtaaaacatatgcatagggcaatacaaatggcatggcagctattgtttttgccaggctgtacggacgtcttctagattttctggaaatcagaatttgttgtttacaagctcaaggagatggggaagattactgaaaaagatatcatgatgatatgtgatcaattccagaggctggacacagggagctgcgggaagatcacactttcagatcttctggagagccatcacttggtttcagaacccagggataagaaaaaggggaagaaatcttaaacatgtgtcatagtatgcacaagaattgaagggcagtgctaaaattttgggactagaaagcacgccaaatgagcaagggtgcgacaggaggcattctcctacacggaatggaaaagacggaatccgctgaaggtaggatagctccgtagaagttgtaggtgcgctccagatatgattctaccctagaaatggtggaaggataataactgttttaggaggcggctgtaaatatgaacataattatacaggatggtctattcagattctttatgtggattattcctactcatttttaagaatatatttttctggccacacagttgacgcgcatggaatgagctcagttgtggtccattgtcacggccgtttagagtgacgaaaccgaatgcacagtatgtgtgtcagaatctgtttttcacaattgtaatattgtatgttcatatcacaattgtaatacatcgaaagacaatattcgaaacgtaaat

SEQ ID NO: 68775 - DNA, 991 bp, Zea Mays
agaaaagttaggcaatgtgtggcaagttaggcagggaaccaaacatgccttaaatattcaaaacactcaagttccagcaatcatatatcactagcattggttgttcactaggtctgtcattattggtctcaaggttcattattcacttatttggttgcaactgatctataagattcgatggagattccgtgaatcctaatgtgtgaggcagcaatacaaggggtctttgcttcctaaatcaattcattgatatacaagattacatcataatggagtttcacaaaagaatatgaccaatctatgccttttgctgctagaaatcagaatttgttgtttacaagctcaaggagatggggaagattactgaaaaagatatcatgatgatatgtgatcaattccagaggctggacacagggagctgcgggaagatcacactttcagatcttctggagagccatcacttggtttcagaacccagggataagaaaaaggggaagaaatcttaaacatgtgtcatagtatgcacaagaattgaagggcagtgctaaaattttgggactagaaagcacgccaaatgagcaagggtgcgacaggaggcattctcctacacggaatggaaaagacggaatccgctgaaggtaggatagctccgtagaagttgtaggtgcgctccagatatgattctaccctagaaatggtggaaggataataactgttttaggaggcggctgtaaatatgaacataattatacaggatggtctattcagattctttatgtggattattcctactcatttttaagaatatatttttctggccacacagttgacgcgcatggaatgagctcagttgtggtccattgtcacggccgtttagagtgacgaaaccgaatgcacagtatgtgtgtcagaatctgtttttcacaattgtaatattgtatgttcatatcacaattgtaatacatcgaaagacaatattcgaaacgtaaat

SEQ ID NO: 68776 - DNA, 827 bp, Zea Mays
ccttggttcacatttctttgctttcattcactagttagcatgattatgtccaaatgatttcttatttttatgctgaggaaacattattcatccattgatatgctatgcaaacgggtggcttcaagctgattatcctccagagagcctttttggaaatcagaatttgttgtttacaagctcaaggagatggggaagattactgaaaaagatatcatgatgatatgtgatcaattccagaggctggacacagggagctgcgggaagatcacactttcagatcttctggagagccatcacttggtttcagaacccagggataagaaaaaggggaagaaatcttaaacatgtgtcatagtatgcacaagaattgaagggcagtgctaaaattttgggactagaaagcacgccaaatgagcaagggtgcgacaggaggcattctcctacacggaatggaaaagacggaatccgctgaaggtaggatagctccgtagaagttgtaggtgcgctccagatatgattctaccctagaaatggtggaaggataataactgttttaggaggcggctgtaaatatgaacataattatacaggatggtctattcagattctttatgtggattattcctactcatttttaagaatatatttttctggccacacagttgacgcgcatggaatgagctcagttgtggtccattgtcacggccgtttagagtgacgaaaccgaatgcacagtatgtgtgtcagaatctgtttttcacaattgtaatattgtatgttcatatcacaattgtaatacatcgaaagacaatattcgaaacgtaaat

SEQ ID NO: 68777 - DNA, 791 bp, Zea Mays
atttgcttgcaggcaggcatggatggccaactcttgatcctgtcaggcaggcgcgcggcgcggcgcacggtcctctaatcatggcgagctgcttgctcctcagcacccatcaagggtccattccatttgatatccatccatccatcatcatgttgcgatgcagtttcatccctatcaaaggcacacatgagtgttgactgcatgtgagcggtgggtgcggtggcatcaagatcctgccggccggccccttgtctatataaacaagagatgcatctctcctccggtccccatcacctagctagaaaggagagcaccgagcactgcaccactactgctgatatgagcacctgaaccttctgggcaaccacatccggtccctgcccctgatcatccgcagcagccatggcgcagcagcaggagaagaagcagcagcagagggggaagctgcagagggtgctaagggagcagaaggctcggctctacatcatccgccgatgcgtcgtcatgctcctctgctggagtgactgatccatctcaagcatgcatgataaacctgtgctctttttttttccttctgttttttcccctctttttcccatccttttcaccttgccactttggtgggcggatgacatggtatatgaatgctccttgtttgcttgcctcttgcgtaaggcaagggcgcaaggctactgacttctccttgtaaagatcacgcggatgttaatagaaactactaacgtgtttttttcgccatactttggagtgcctaacttgaatagatgataatt

SEQ ID NO: 68778 - DNA, 787 bp, Zea Mays
tttaaaaaaaactaacggcagagacgcgtacacggcgttcgatgaatggatggacgcccgccgcccagcaagcattgccattctagcttctctaccctggtaaatatctataactttggtcctacttgtcagctgtcagcgagtcagcgtatcccatgttgtaggctcattccattagctttttatccactcccacagtccaatccacacgaccgccaccaactcacgcagcgtgcttcccttcagaaactcgatggcctgccacctcgccatcgccggcgccaccgccgccgccgcccgcgctcctcgtatctccgtgctcgccgccgcctctgcttcctccgcaggggaacccgcgcgccgcatcatccgccgccgcgcgccgccgggtcagcagggctctgccacagcggcccccgcgcctcccgcccagccgtccgtggcggaggtgcgccgcgccatcggcgtctccgacgacgctgcgtcggccgccgcatccatggagaagaagaacaccgcgttcatggacctcatctctaccacgcccatcggccagccggagagcgagcccgagcgccgcctccgcgaggccgccgagtgggtagtcgacaccactgagacgcgcgcttgcgaaggacagaagtctttcttagtgctatgcatgatgacatttcctgcttggttcttgctcctgtttcttgcccttggactctttaagttaccatttgatattccggttctggataatctcctaatgtatatgtctatgtgttgccacgaggcgagg

SEQ ID NO: 68779 - DNA, 844 bp, Zea Mays
tttaaaaaaaactaacggcagagacgcgtacacggcgttcgatgaatggatggacgcccgccgcccagcaagcattgccattctagcttctctaccctggtaaatatctataactttggtcctacttgtcagctgtcagcgagtcagcgtatcccatgttgtaggctcattccattagctttttatccactcccacagtccaatccacacgaccgccaccaactcacgcagcgtgcttcccttcagaaactcgatggcctgccacctcgccatcgccggcgccaccgccgccgccgcccgcgctcctcgtatctccgtgctcgccgccgcctctgcttcctccgcaggggaacccgcgcgccgcatcatccgccgccgcgcgccgccgggtcagcagggctctgccacagcggcccccgcgcctcccgcccagccgtccgtggcggaggtgcgccgcgccatcggcgtctccgacgacgctgcgtcggccgccgcatccatggagaagaagaacaccgcgttcatggacctcatctctaccacgcccatcggccagccggagagcgagcccgagcgccgcctccgcgaggccgccgagtgggtagtcgacaccactgagacgcgcgcttgcgaaggacagaagtctttcttagtgctatgcatgatgacatttcctgcttggttcttgctcctgtttcttgcccttggactctttaagttaccatttgatattccggttctggataatctcctaatggtcaactgtatggaataatggaggtggaggagcgaaaccctgtgcggcgtcaaggctctacatgtactggaacatctctgccatcct

SEQ ID NO: 68780 - DNA, 1982 bp, Zea Mays
tttaaaaaaaactaacggcagagacgcgtacacggcgttcgatgaatggatggacgcccgccgcccagcaagcattgccattctagcttctctaccctggtaaatatctataactttggtcctacttgtcagctgtcagcgagtcagcgtatcccatgttgtaggctcattccattagctttttatccactcccacagtccaatccacacgaccgccaccaactcacgcagcgtgcttcccttcagaaactcgatggcctgccacctcgccatcgccggcgccaccgccgccgccgcccgcgctcctcgtatctccgtgctcgccgccgcctctgcttcctccgcaggggaacccgcgcgccgcatcatccgccgccgcgcgccgccgggtcagcagggctctgccacagcggcccccgcgcctcccgcccagccgtccgtggcggaggtgcgccgcgccatcggcgtctccgacgacgctgcgtcggccgccgcatccatggagaagaagaacaccgcgttcatggacctcatctctaccacgcccatcggccagccggagagcgagcccgagcgccgcctccgcgaggccgccgagtgggtagtcgacaccactgagacgcgcgcttgcgaaggacagaagtctttcttagtgctatgcatgatgacatttcctgcttggttcttgctcctgtttcttgcccttggactctttaagttaccatttgatattccggttctggataatctcctaatgtaaggtgttagctattatcatttttcccttttattttccaaatatacgagcttcacacactgaatatgaaaagaaatatatgccactactgaagtcacttcctcccctttttccaaattatagttcactttggctttatgctaactcaaacatctttaagttcgactgactttatataaaaagccaccaacatctataaggtcaaattggtttcattaaattattatgtactatgttttggtaaattcagttgttactgtattttttctgaaaaaattggtcaaaattacagaaacttgacttcgaacaaacctaaagtgaactatattttggaatggagagagcatattgttagttatacaattggaattgctacagtctgttttctgtatgtgtttatacaactggaattgctacagtctgtagactgtagtcgtgtttcctgtatgtgtttatgcaactggaattgttgtttcttcttaggtaataaagtaaatttttttgctagagatgttatttatgtagtgggcagaacaacttgctatcttgaatagtttggtattatttggctatggccagtggatcgtatatatagacgtgcaaaacattgtttttctctttagactgtactgtttatagagtgaagctttaatagtagatgaagatgaggaagttgctgcagatagcctttgcatgtttgtcacgctgtcattgccttttgtcttgcttggttttgcctttttcacagcatccacagttacatgctctctattatgtattctaaaccaaactcttcagatgaggcattcacgaatcataatagtttggtataatatatcttgcttcctcatcaagcaacttaactaataatcctaatagtgcttctctgttatctccatctccacttcattaacctgaatcattgtagcatgtaccactcactgaggttgaatgtagttgcttcccaccttctccttctacctcctatgtttaatccgtacctaattcaactgtcagggcaccaaccactgtcagtagccatattcgttagctgctaatcctattctctccatatttcttaaccatgttctgttgcttgcaccattcagcatttatggcagcttttgttatctgtctcctcttctatctagctgagcttggtcactagtagcagggagagtgtttcgatatatagattttgattcgccgaacaatacaaattaat

SEQ ID NO: 68781 - DNA, 1146 bp, Zea Mays
gtctcatatgtgcgccaaagaaaacaacacaaataatgaccaagtgtatagagataaatgtcaccacattattacatagcagaagtgtcttacaaaaataaatgataataataaagtgaactaataattattcctcgacgccatcaagctgattgagagacgccacctagacttccttgtactcctcgtagtagtcctcctcctgggctacctgttcttctcttgtgggggttatatatcataagggtaagctcacaaaagatcatagctcaacaagttgtggggaataatgtgcatcaacgcaccaaaggtgggagctcatgtgaagtgtaaggctgatcaacaaataatggttaaagctgagcactgcttttaataagttggtcaaattttattagcagttactaagtataagtaaataccaaccccaaaaaataagagatcgcaattaataaataaaccacaatgcgatgcaaatgaccaattaaatttaattctataagttactcatgtgagggtccgagccgctcatgaccatgagcacggctgatataccagttttacactctataaaggttgcacatctttacccacaagtcatgttacccatctgccacggagttgtacgggccccatacacctccaccaatgaagcaaaacagggtaacactacgaggcatttacaaagttccactaacttctgaaaatccgctacggtttctgaggagcgcaatacaggaatcctccgtctgaaaagccatctcagcaaaatcaacctgagaacctccctatactgacaactccaataccgcccttgcccttttcatgtaaggtagtcctccactagctttcttaattagtcagccaagggtgtcccataccacccttgtggtagcactgttttcccgggtggtcgctccacgttccaattaacataatgatcttgcacattggtaataaaagcatgatcatgaataatgtgtatcttaacacccaaaaccacataaagcaatagcaggtactacccaaaagttcagtggtaaacaaggtataaagataaccaaactagggtgacctattgggtcccataaaattaacctatacagatcataatgactaacaggaacattattgggtaaatagaag

SEQ ID NO: 68782 - DNA, 1357 bp, Zea Mays
atctcgcttcttcttttttttcgaaaacgcaggagagctgcgtatcaatatattaagaagaaagggtgaggcaaggaaacctcgtacaactccacacgaacccacaaacactaggttatagggagaaggagaaaattaacatcaacaacaacaaaagacatctagtcccatgaccatggagactcaaattaaggattacccactgaaattactggagcataaggatgttagataaatccctggctccagccctataccagagatgagcctcctccttgacccaattaatgaccatgctttgactaggctgcacaccattaaaaacacagctattgcggtgattccagatggcccaagcacttcttcactatcatatactttataatcatcagagatcatacatcttttggctctgagatcttaaaattatatcactttcatcattctgagggttctagggttgttccagtggcggatcattaaggataagtttattttctatttttgaaggctcttgttcaactagtgccagaggctcagacaccataggggctaatgcaacttgctcattgattgtcgtgctcgatgaatcaacatttgtagctagggtttcatttacagttggagaaactagtggtgaaaccttggtgggtatcgagaaatatggttcttataccatcggaatacgccctcttttcctcatggtttatttctcaaggtagtatgctctacttgatcatctcattctctaagaatactgtatgtcttgtttctacaaacttagtatatttgctttggcagtaaaatctaaattctttcgatttctcatggtagccaataaaatggcaacttgtccttttatctaattttctctgtttaggattaaagatgctagcctcagttggacaaccccaaatatgcagatagttcaacgtgggctttctctcattccatatctcatatgtatttttagcactgatttactataaatctgttaagtatatggataacgaatttgaagacctctatccacaactccaatggtaaactagagtaactcaacataatacgcaccatgtccattaaagtgtggtttgtttttggaccaaattctatggtagccaggggcttacctagactaccccttagggtgccttgattatgaggctcttgatgatcatcaatcactttttgtttgatctttcacatttgatcatttcaatgccatattatatcactttgtgcttgtaccgaggcacaccctctttgggttctataggtttatcattttggagtgcaaagtcaagctcacagagcgaacaacatgtctatttttaggtgatttcctcgatttagt

SEQ ID NO: 68783 - DNA, 177 bp, Zea Mays
gaatttttagttaagacatgtgaaaaggtttcattgcaatctattccttttctctaagtgaatcctttagctacaagcctagctttatatctttctagtttctacgttctctttagagtcacgcttgcttttgttggtccacttgcagcctattgttttggctcgtttagaaatgac

SEQ ID NO: 68784 - DNA, 293 bp, Zea Mays
gagctcccggcggctgcagcggctgcaggagaaaaaaccctaaacctaggctgataccatgtcggaatgagaacccataaccctaaacagggttgggagtagtattaataggcttagtagatgggccaggcccattacagagggtgagacggtaattacaaggggaacaccccaaaccctagacgggtagtctaacaattatctttcttgtttccttcaaaaccgtattttttatagtctcatcaaacttaaggtataactaactagaagcttgcttcaacccataaatggac

SEQ ID NO: 68785 - DNA, 2022 bp, Zea Mays
cggggtttcactcaacgacctgacagagaaatgtggtcatggattggttgctgaggatgaaataaagaaaggagaatttgttattgagtatgttggagaagttattgatgacagaacatgtgagaataggctatggacaatgaaaaggctggatgacactgacttctacctttgtgaggtcagcagtaatatggtcattgatgcaacaaacaagggaaacctgtcccgatttataaaccatagttgtgaaccaaacacagcgatgcagaaatggactgttgatggagagaccagggttggaatttttgcacttcgtgacataaagataggggaggagctgacatatgactataaatttgtccagtttggagcagctcaggtttgtcattgtggatcttcaaagtgcagaaaaatgctaggcacaacaaagtattcaggaagctcacagaatcatcgtaccaagaagaaaaagaggaaaacaagttgtgagaattgcatacagcagtttcttcgtctgtggcatccacgacaaaaaatgtatgttggatgttggatagttgacttcgatcaaggaactaaaatgcatactctccagttcattgatcaccatactgaaaagtttgatttgaaagaagaagaatggcacttcttggaggttctaaggtgtcaaaggaaaatgaataaatggatgatgctcaatgaacaaggttttaacttcaacccattttacttcaattattctattgtgctgtactatacagtattactctcttatttcttttctgttcttttgtgagattactagacactgtttccaaaggcataagcatggtacagttgtagcctatacatgattctgcagctactattactataaatgttgcttgtgccctagagccaaatacatgcttaagctttacgaaatattcagttagtggaaattaagggcatgaatgctggttcttttttttctcaaatacgcaggtgagctgtgcagtgtgcactaatatattaaaaagagagaaaaaaaaccaaagggaaaaagatccccggtacagcagagctcacacaccccacctaggattacataaaataaaacaacgacctagagctctgttacacaaacagttctccaacctggtgggaggacagagcttttgctcctgccaaggaccaatacaaagcctcctcccttgccacccgtagggcgacagctaaactaggactgcacccataaaaaacacacttattcctatgcttctatacaacccaggcacctaagatcaccaatgagttaaaacatttttccatctgatcaggcattctagagctgctgctcctccaccaagattcaaaagagagatcatccttcagcggacagaactcctgcaaaccaccatctttgagaaactcaaaccagaattgcttggtgaaaacacaagcaaccaatagatgattaatattttcaggtttctgatcacacagcgggcagcgttccggatgtgatagcccacgctttgcaagcctatcagctgtccaacatctgtcatgctccacaagccaaataaaaaacttgcattttcctggtgcccaggttttccagaccctttttgttggctcaaagcctactgatccttggaagagggctttataagccgagctagccgtatattcacccgaagtgctgaatttcgaaatatgctgatcctgaataccatgctgcaaaaactgctcctcaagaacctaataaaaatcaaggatttcagcaattaaatgccttggactaggaagccatcaattatctaccatcttcctttcaatccttccctacttttgcttcctatctttaacttccaaccaagtccataatgtaactgatccagcaaacatacaattttattttcttgggactgcttgtgctctttctgccttttcttactagaaaactagataagcataaaattatatctttcttttgttcttgagtgcccataaaaaaatgcatgtggaatttatctgcta

SEQ ID NO: 68786 - DNA, 1520 bp, Zea Mays
ctttgctcgtcttgacgcttcgcttgtctaatctctggaactgcagcttccctcgctgacttgccgttggcaagccccgctccaagcatctccgcgcctgcttctgccgaatcgcagagcccctctcccgcttcccccctctcccctcttctctcatcattgattcgattttcctcgcccctggagcttcaaattcaagtgaaggagccagttaaggcttgccaaaactagcggcggcatcggcaatgctctagttggcctttccttccctcccagctcgagcagcgcagcgcggccctctttatctctctcggcagtggaggcagcgtcacccttcgcctaaatcaccaccaccagctctggagcgccgcgtcgccgctcctctaccatttcctggtatattggaccggaacggactaacggagtggagttctgctattgatcattgtgagttcatccccactccaatccatctgtccatggtccgtatgagctcatcttcctcggcgtctggggtcaatctgacagagcaaatcgagaatgtttttgaccaactgatcagcaaaattgaacaagcggatccagattttgacccgcggccctttttgaaacaattgaatgtgttaggccgctatgaaccaatcaagcggaatgtatatttcactaagagatacattgaagattatggcatttcttgtcactgtaagccttctcctggttcatcagttgtgtgtggcagagactgctattgtagcatgcttttctcttgctgttcatcacaatgtgaatgtgatattgcgtgcaccaataaatcattccagcacagacctcttacgaaaaccaaattgattaagacagagaaatgtggtcatggattggttgctgaggatgaaataaagaaaggagaatttgttattgagtatgttggagaagttattgatgacagaacatgtgagaataggctatggacaatgaaaaggctggatgacactgacttctacctttgtgaggtcagcagtaatatggtcattgatgcaacaaacaagggaaacctgtcccgatttataaaccatagttgtgaaccaaacacagcgatgcagaaatggactgttgatggagagaccagggttggaatttttgcacttcgtgacataaagataggggaggagctgacatatgactataaatttgtccagtttggagcagctcaggtttgtcattgtggatcttcaaagtgcagaaaaatgctaggcacaacaaagtattcaggaagctcacagaatcatcgtaccaagaagaaaaagaggaaaacaagttgtgagaattgcatacagcagtttcttcgtctgtggcatccacgacaaaaaatgtatgttggatgttggatagttgacttcgatcaaggaactaaaatgcatactctccagttcattgatcaccatactgaaaagtttgatttgaaagaagaagaatggcacttcttggaggtactaggtacaaacttctgattgcactaatgt

SEQ ID NO: 68787 - DNA, 1411 bp, Zea Mays
ctttgctcgtcttgacgcttcgcttgtctaatctctggaactgcagcttccctcgctgacttgccgttggcaagccccgctccaagcatctccgcgcctgcttctgccgaatcgcagagcccctctcccgcttcccccctctcccctcttctctcatcattgattcgattttcctcgcccctggagcttcaaattcaagtgaaggagccagttaaggcttgccaaaactagcggcggcatcggcaatgctctagttggcctttccttccctcccagctcgagcagcgcagcgcggccctctttatctctctcggcagtggaggcagcgtcacccttcgcctaaatcaccaccaccagctctggagcgccgcgtcgccgctcctctaccatttcctggtatattggaccggaacggactaacggagtggagttctgctattgcaaatcgagaatgtttttgaccaactgatcagcaaaattgaacaagcggatccagattttgacccgcggccctttttgaaacaattgaatgtgttaggccgctatgaaccaatcaagcggaatgtatatttcactaagagatacattgaagattatggcatttcttgtcactgtaagccttctcctggttcatcagttgtgtgtggcagagactgctattgtagcatgcttttctcttgctgttcatcacaatgtgaatgtgatattgcgtgcaccaataaatcattccagcacagacctcttacgaaaaccaaattgattaagacagagaaatgtggtcatggattggttgctgaggatgaaataaagaaaggagaatttgttattgagtatgttggagaagttattgatgacagaacatgtgagaataggctatggacaatgaaaaggctggatgacactgacttctacctttgtgaggtcagcagtaatatggtcattgatgcaacaaacaagggaaacctgtcccgatttataaaccatagttgtgaaccaaacacagcgatgcagaaatggactgttgatggagagaccagggttggaatttttgcacttcgtgacataaagataggggaggagctgacatatgactataaatttgtccagtttggagcagctcaggtttgtcattgtggatcttcaaagtgcagaaaaatgctaggcacaacaaagtattcaggaagctcacagaatcatcgtaccaagaagaaaaagaggaaaacaagttgtgagaattgcatacagcagtttcttcgtctgtggcatccacgacaaaaaatgtatgttggatgttggatagttgacttcgatcaaggaactaaaatgcatactctccagttcattgatcaccatactgaaaagtttgatttgaaagaagaagaatggcacttcttggaggtatgacagtcat

SEQ ID NO: 68788 - DNA, 1663 bp, Zea Mays
ttttcgggttatttcttttcatgcgcgctagctgttgatttatgtcgcctgctctgctgccgctccatggttctgagctcacgtcgtcagcatcctcttcttgctcctttctccagcctgggcaggggggcgccagagactgcgggtttcgcttcaggatctcaggatttggatttggggtgaagtactctgggtttctacatttaggccctcgcttcctactttgccgcacctgagatagtaaaagagttcaagaatcccccccaaatcacagtcagtcttgggtctggtttgggtggatttcattacgtttcctccaagttcaaacagccagcaggatttccgagttgagtctgaagatcttcgcttttccggtttccatcagaagttagagagaacccctattctgatttgccagattccatctgtgctgcagttcttgcgcagttcaagagactgccccaactttatccaaaaagtttcctccgtctcatttgtggtcaatctggaagcggtgtgtcaagatgcggccctcggtgcagaaggtccgcattttctgttctgatcctgatgctactgactcatctgatgatgaagatggccagatcatcgcagtgaagaaaatggttatggagatactagtcccagtgacaaactcgaagacatctaatagtctgaagacccttgtgccgtgtggagcaaaggacctggaggtttcagagaagaagggtaaatcaagcaggttccgtggcgtgcgcaggcgacgctggggtcgatgggcagccgagattcgtgatcctgtgagaaaaaccaggaagtggattggctcgtatgactctgaggaggctgctgctgcggcatatcaggcgtatgcaaaacagatccgtgaagagttgctagccatcaagaaccaacggtctgtatcagaacgtgcagctctatcaagttcatcctcggtttcttgcgtatcttcgtctcccccatgtgagcagacagggcatgaaccgcagactagagtgctcgtggagaaagatcctgagcctgtagatgaagtctttctgaacttctctctcacacccaaggggatttcaatggacgatttgttaggacggatagatgagattcctgtttgtgacgaccctgtcagcccaactgatgagcttccacttgacaatttcacgagcctggaagatgcattcccgatcagcgatttcatcggttcaagagatgagcatctgtatgagcactatattggcctggctgacattagccacctgcctcttccaatggatgatccagctttcaatctggatgcagagcttgattggagtgggtttgacttcgctgcgattgaaggtgaacttgatgtcctttgaggctgcaatcagtgatgtgttatactgaaacctgcacttgcttatgttgtattcagctgaaagctcctctctatgttttttatatttgtcagaatacaacaatgaatacggattcaggtttcagtccatctatgtcagaatacatgagcacagtttctttcattttgttcttagaaaaactgatgacatatgggtgcagtctatctctaacaaggagttcgcatttttaatacattttcagtagattttgtcttgcttccttgcagtctgcagcggcgtgggcaaat

SEQ ID NO: 68789 - DNA, 2252 bp, Zea Mays
ctgcgatctagtgtttttcgggttatttcttttcatgcgcgctagctgttgatttatgtcgcctgctctgctgccgctccatggttctgagctcacgtcgtcagcatcctcttcttgctcctttctccagcctgggcaggggggcgccagagactgcgggtttcgcttcaggatctcagggtaatataactcgctgttcgattggctggttgtttcacaccaaggattcaatctgctctgctactctcttccatccagtcaccagtttatatacatagagattagagagtggctatggtatctgttgtctctctgtccgacattaataatagggttaattgtatacatgccactcaaacccttaatagtaatgtatggcagcgcagccccttgctaatttgttcaatgttgtcagcatgatttttcttatccgcgctccttaaaaatgtttggtcatcttacagctgtaaatataatactaatatggaagttgccatgactcaactgatcaatttcttaccatgtacagtaattgcgttctctactattcacgttaattcccacatttggcaataaccagctcacaatgcgtcgaaacgttttcataactgaatctcccgtttcctatgatatgatatgaccatcaaaatgccaccttttggtttggcatgcaaagatggaggtttacataagtaaatattgttccgtttatttgaatttggaaagtttcctctagtaatgcacaatggtttcagatttggatttggggtgaagtactctgggtttctacatttaggccctcgcttcctactttgccgcacctgagatagtaaaagagttcaagaatcccccccaaatcacagtcagtcttgggtctggtttgggtggatttcattacgtttcctccaagttcaaacagccagcaggatttccgagttgagtctgaagatcttcgcttttccggtttccatcagaagttagagagaacccctattctgatttgccagattccatctgtgctgcagttcttgcgcagttcaagagactgccccaactttatccaaaaagtttcctccgtctcatttgtggtcaatctggaagcggtgtgtcaagatgcggccctcggtgcagaaggtccgcattttctgttctgatcctgatgctactgactcatctgatgatgaagatggccagatcatcgcagtgaagaaaatggttatggagatactagtcccagtgacaaactcgaagacatctaatagtctgaagacccttgtgccgtgtggagcaaaggacctggaggtttcagagaagaagggtaaatcaagcaggttccgtggcgtgcgcaggcgacgctggggtcgatgggcagccgagattcgtgatcctgtgagaaaaaccaggaagtggattggctcgtatgactctgaggaggctgctgctgcggcatatcaggcgtatgcaaaacagatccgtgaagagttgctagccatcaagaaccaacggtctgtatcagaacgtgcagctctatcaagttcatcctcggtttcttgcgtatcttcgtctcccccatgtgagcagacagggcatgaaccgcagactagagtgctcgtggagaaagatcctgagcctgtagatgaagtctttctgaacttctctctcacacccaaggggatttcaatggacgatttgttaggacggatagatgagattcctgtttgtgacgaccctgtcagcccaactgatgagcttccacttgacaatttcacgagcctggaagatgcattcccgatcagcgatttcatcggttcaagagatgagcatctgtatgagcactatattggcctggctgacattagccacctgcctcttccaatggatgatccagctttcaatctggatgcagagcttgattggagtgggtttgacttcgctgcgattgaaggtgaacttgatgtcctttgaggctgcaatcagtgatgtgttatactgaaacctgcacttgcttatgttgtattcagctgaaagctcctctctatgttttttatatttgtcagaatacaacaatgaatacggattcaggtttcagtccatctatgtcagaatacatgagcacagtttctttcattttgttcttagaaaaactgatgacatatgggtgcagtctatctctaacaaggagttcgcatttttaatacattttcagtagattttgtcttgcttccttgcagtctgcagcggcgtgggcaaat

SEQ ID NO: 68790 - DNA, 1665 bp, Zea Mays
agtgctgtgctctcttctctacccgcgcgctagctgttgatttatgtcgcctgctctgctgccgctccatggttctgagctcacgtcgtcagcatcctcttcttgctcctttctccagcctgggcaggggggcgccagagactgcgggtttcgcttcaggatctcaggatttggatttggggtgaagtactctgggtttctacatttaggccctcgcttcctactttgccgcacctgagatagtaaaagagttcaagaatcccccccaaatcacagtcagtcttgggtctggtttgggtggatttcattacgtttcctccaagttcaaacagccagcaggatttccgagttgagtctgaagatcttcgcttttccggtttccatcagaagttagagagaacccctattctgatttgccagattccatctgtgctgcagttcttgcgcagttcaagagactgccccaactttatccaaaaagtttcctccgtctcatttgtggtcaatctggaagcggtgtgtcaagatgcggccctcggtgcagaaggtccgcattttctgttctgatcctgatgctactgactcatctgatgatgaagatggccagatcatcgcagtgaagaaaatggttatggagatactagtcccagtgacaaactcgaagacatctaatagtctgaagacccttgtgccgtgtggagcaaaggacctggaggtttcagagaagaagggtaaatcaagcaggttccgtggcgtgcgcaggcgacgctggggtcgatgggcagccgagattcgtgatcctgtgagaaaaaccaggaagtggattggctcgtatgactctgaggaggctgctgctgcggcatatcaggcgtatgcaaaacagatccgtgaagagttgctagccatcaagaaccaacggtctgtatcagaacgtgcagctctatcaagttcatcctcggtttcttgcgtatcttcgtctcccccatgtgagcagacagggcatgaaccgcagactagagtgctcgtggagaaagatcctgagcctgtagatgaagtctttctgaacttctctctcacacccaaggggatttcaatggacgatttgttaggacggatagatgagattcctgtttgtgacgaccctgtcagcccaactgatgagcttccacttgacaatttcacgagcctggaagatgcattcccgatcagcgatttcatcggttcaagagatgagcatctgtatgagcactatattggcctggctgacattagccacctgcctcttccaatggatgatccagctttcaatctggatgcagagcttgattggagtgggtttgacttcgctgcgattgaaggtgaacttgatgtcctttgaggctgcaatcagtgatgtgttatactgaaacctgcacttgcttatgttgtattcagctgaaagctcctctctatgttttttatatttgtcagaatacaacaatgaatacggattcaggtttcagtccatctatgtcagaatacatgagcacagtttctttcattttgttcttagaaaaactgatgacatatgggtgcagtctatctctaacaaggagttcgcatttttaatacattttcagtagattttgtcttgcttccttgcagtctgcagcggcgtgggcaaat

SEQ ID NO: 68791 - DNA, 1891 bp, Zea Mays
cacgtttcgtctccctgcaccgctcctcctcatcgtcgtctccccacctgacctgacccgaccgaaccgacccgaccactcctcccctgctcttccgccccaagcaagacccattaaaccccctcgccctctcctttcggggctcatctcgcctctcccccgtcccctgcctggaccctcccgatccgcctctcctcggattccgggtggttcccattccatcgacgtaccccctagtattcactgcttcggtgttgtgggctccgtagatcgacgtggcaccagaactatccgcgctagctgttgatttatgtcgcctgctctgctgccgctccatggttctgagctcacgtcgtcagcatcctcttcttgctcctttctccagcctgggcaggggggcgccagagactgcgggtttcgcttcaggatctcagggccctcgcttcctactttgccgcacctgagatagtaaaagagttcaagaatcccccccaaatcacagtcagtcttgggtctggtttgggtggatttcattacgtttcctccaagttcaaacagccagcaggatttccgagttgagtctgaagatcttcgcttttccggtttccatcagaagttagagagaacccctattctgatttgccagattccatctgtgctgcagttcttgcgcagttcaagagactgccccaactttatccaaaaagtttcctccgtctcatttgtggtcaatctggaagcggtgtgtcaagatgcggccctcggtgcagaaggtccgcattttctgttctgatcctgatgctactgactcatctgatgatgaagatggccagatcatcgcagtgaagaaaatggttatggagatactagtcccagtgacaaactcgaagacatctaatagtctgaagacccttgtgccgtgtggagcaaaggacctggaggtttcagagaagaagggtaaatcaagcaggttccgtggcgtgcgcaggcgacgctggggtcgatgggcagccgagattcgtgatcctgtgagaaaaaccaggaagtggattggctcgtatgactctgaggaggctgctgctgcggcatatcaggcgtatgcaaaacagatccgtgaagagttgctagccatcaagaaccaacggtctgtatcagaacgtgcagctctatcaagttcatcctcggtttcttgcgtatcttcgtctcccccatgtgagcagacagggcatgaaccgcagactagagtgctcgtggagaaagatcctgagcctgtagatgaagtctttctgaacttctctctcacacccaaggggatttcaatggacgatttgttaggacggatagatgagattcctgtttgtgacgaccctgtcagcccaactgatgagcttccacttgacaatttcacgagcctggaagatgcattcccgatcagcgatttcatcggttcaagagatgagcatctgtatgagcactatattggcctggctgacattagccacctgcctcttccaatggatgatccagctttcaatctggatgcagagcttgattggagtgggtttgacttcgctgcgattgaaggtgaacttgatgtcctttgaggctgcaatcagtgatgtgttatactgaaacctgcacttgcttatgttgtattcagctgaaagctcctctctatgttttttatatttgtcagaatacaacaatgaatacggattcaggtttcagtccatctatgtcagaatacatgagcacagtttctttcattttgttcttagaaaaactgatgacatatgggtgcagtctatctctaacaaggagttcgcatttttaatacattttcagtagattttgtcttgcttccttgcagtctgcagcggcgtgggcaaat

SEQ ID NO: 68792 - DNA, 1839 bp, Zea Mays
cacgtttcgtctccctgcaccgctcctcctcatcgtcgtctccccacctgacctgacccgaccgaaccgacccgaccactcctcccctgctcttccgccccaagcaagacccattaaaccccctcgccctctcctttcggggctcatctcgcctctcccccgtcccctgcctggaccctcccgatccgcctctcctcggattccgggtggttcccattccatcgacgtaccccctagtattcactgcttcggtgttgtgggctccgtagatcgacgtggcaccagaactatccctgggcaggggggcgccagagactgcgggtttcgcttcaggatctcaggatttggatttggggtgaagtactctgggtttctacatttaggccctcgcttcctactttgccgcacctgagatagtaaaagagttcaagaatcccccccaaatcacagtcagtcttgggtctggtttgggtggatttcattacgtttcctccaagttcaaacagccagcaggatttccgagttgagtctgaagatcttcgcttttccggtttccatcagaagttagagagaacccctattctgatttgccagattccatctgtgctgcagttcttgcgcagttcaagagactgccccaactttatccaaaaagtttcctccgtctcatttgtggtcaatctggaagcggtgtgtcaagatgcggccctcggtgcagaaggtccgcattttctgttctgatcctgatgctactgactcatctgatgatgaagatggccagatcatcgcagtgaagaaaatggttatggagatactagtcccagtgacaaactcgaagacatctaatagtctgaagacccttgtgccgtgtggagcaaaggacctggaggtttcagagaagaagggtaaatcaagcaggttccgtggcgtgcgcaggcgacgctggggtcgatgggcagccgagattcgtgatcctgtgagaaaaaccaggaagtggattggctcgtatgactctgaggaggctgctgctgcggcatatcaggcgtatgcaaaacagatccgtgaagagttgctagccatcaagaaccaacggtctgtatcagaacgtgcagctctatcaagttcatcctcggtttcttgcgtatcttcgtctcccccatgtgagcagacagggcatgaaccgcagactagagtgctcgtggagaaagatcctgagcctgtagatgaagtctttctgaacttctctctcacacccaaggggatttcaatggacgatttgttaggacggatagatgagattcctgtttgtgacgaccctgtcagcccaactgatgagcttccacttgacaatttcacgagcctggaagatgcattcccgatcagcgatttcatcggttcaagagatgagcatctgtatgagcactatattggcctggctgacattagccacctgcctcttccaatggatgatccagctttcaatctggatgcagagcttgattggagtgggtttgacttcgctgcgattgaaggtgaacttgatgtcctttgaggctgcaatcagtgatgtgttatactgaaacctgcacttgcttatgttgtattcagctgaaagctcctctctatgttttttatatttgtcagaatacaacaatgaatacggattcaggtttcagtccatctatgtcagaatacatgagcacagtttctttcattttgttcttagaaaaactgatgacatatgggtgcagtctatctctaacaaggagttcgcatttttaatacattttcagtagattttgtcttgcttccttgcagtctgcagcggcgtgggcaaat

SEQ ID NO: 68793 - DNA, 1931 bp, Zea Mays
cacgtttcgtctccctgcaccgctcctcctcatcgtcgtctccccacctgacctgacccgaccgaaccgacccgaccactcctcccctgctcttccgccccaagcaagacccattaaaccccctcgccctctcctttcggggctcatctcgcctctcccccgtcccctgcctggaccctcccgatccgcctctcctcggattccgggtggttcccattccatcgacgtaccccctagtattcactgcttcggtgttgtgggctccgtagatcgacgtggcaccagaactatccgcgctagctgttgatttatgtcgcctgctctgctgccgctccatggttctgagctcacgtcgtcagcatcctcttcttgctcctttctccagcctgggcaggggggcgccagagactgcgggtttcgcttcaggatctcagatttggatttggggtgaagtactctgggtttctacatttaggccctcgcttcctactttgccgcacctgagatagtaaaagagttcaagaatcccccccaaatcacagtcagtcttgggtctggtttgggtggatttcattacgtttcctccaagttcaaacagccagcaggatttccgagttgagtctgaagatcttcgcttttccggtttccatcagaagttagagagaacccctattctgatttgccagattccatctgtgctgcagttcttgcgcagttcaagagactgccccaactttatccaaaaagtttcctccgtctcatttgtggtcaatctggaagcggtgtgtcaagatgcggccctcggtgcagaaggtccgcattttctgttctgatcctgatgctactgactcatctgatgatgaagatggccagatcatcgcagtgaagaaaatggttatggagatactagtcccagtgacaaactcgaagacatctaatagtctgaagacccttgtgccgtgtggagcaaaggacctggaggtttcagagaagaagggtaaatcaagcaggttccgtggcgtgcgcaggcgacgctggggtcgatgggcagccgagattcgtgatcctgtgagaaaaaccaggaagtggattggctcgtatgactctgaggaggctgctgctgcggcatatcaggcgtatgcaaaacagatccgtgaagagttgctagccatcaagaaccaacggtctgtatcagaacgtgcagctctatcaagttcatcctcggtttcttgcgtatcttcgtctcccccatgtgagcagacagggcatgaaccgcagactagagtgctcgtggagaaagatcctgagcctgtagatgaagtctttctgaacttctctctcacacccaaggggatttcaatggacgatttgttaggacggatagatgagattcctgtttgtgacgaccctgtcagcccaactgatgagcttccacttgacaatttcacgagcctggaagatgcattcccgatcagcgatttcatcggttcaagagatgagcatctgtatgagcactatattggcctggctgacattagccacctgcctcttccaatggatgatccagctttcaatctggatgcagagcttgattggagtgggtttgacttcgctgcgattgaaggtgaacttgatgtcctttgaggctgcaatcagtgatgtgttatactgaaacctgcacttgcttatgttgtattcagctgaaagctcctctctatgttttttatatttgtcagaatacaacaatgaatacggattcaggtttcagtccatctatgtcagaatacatgagcacagtttctttcattttgttcttagaaaaactgatgacatatgggtgcagtctatctctaacaaggagttcgcatttttaatacattttcagtagattttgtcttgcttccttgcagtctgcagcggcgtgggcaaat

SEQ ID NO: 68794 - DNA, 2414 bp, Zea Mays
cacgtttcgtctccctgcaccgctcctcctcatcgtcgtctccccacctgacctgacccgaccgaaccgacccgaccactcctcccctgctcttccgccccaagcaagacccattaaaccccctcgccctctcctttcggggctcatctcgcctctcccccgtcccctgcctggaccctcccgatccgcctctcctcggattccgggtggttcccattccatcgacgtaccccctagtattcactgcttcggtgttgtgggctccgtagatcgacgtggcaccagaactatccctgggcaggggggcgccagagactgcgggtttcgcttcaggatctcagggtaatataactcgctgttcgattggctggttgtttcacaccaaggattcaatctgctctgctactctcttccatccagtcaccagtttatatacatagagattagagagtggctatggtatctgttgtctctctgtccgacattaataatagggttaattgtatacatgccactcaaacccttaatagtaatgtatggcagcgcagccccttgctaatttgttcaatgttgtcagcatgatttttcttatccgcgctccttaaaaatgtttggtcatcttacagctgtaaatataatactaatatggaagttgccatgactcaactgatcaatttcttaccatgtacagtaattgcgttctctactattcacgttaattcccacatttggcaataaccagctcacaatgcgtcgaaacgttttcataactgaatctcccgtttcctatgatatgatatgaccatcaaaatgccaccttttggtttggcatgcaaagatggaggtttacataagtaaatattgttccgtttatttgaatttggaaagtttcctctagtaatgcacaatggtttcagatttggatttggggtgaagtactctgggtttctacatttaggccctcgcttcctactttgccgcacctgagatagtaaaagagttcaagaatcccccccaaatcacagtcagtcttgggtctggtttgggtggatttcattacgtttcctccaagttcaaacagccagcaggatttccgagttgagtctgaagatcttcgcttttccggtttccatcagaagttagagagaacccctattctgatttgccagattccatctgtgctgcagttcttgcgcagttcaagagactgccccaactttatccaaaaagtttcctccgtctcatttgtggtcaatctggaagcggtgtgtcaagatgcggccctcggtgcagaaggtccgcattttctgttctgatcctgatgctactgactcatctgatgatgaagatggccagatcatcgcagtgaagaaaatggttatggagatactagtcccagtgacaaactcgaagacatctaatagtctgaagacccttgtgccgtgtggagcaaaggacctggaggtttcagagaagaagggtaaatcaagcaggttccgtggcgtgcgcaggcgacgctggggtcgatgggcagccgagattcgtgatcctgtgagaaaaaccaggaagtggattggctcgtatgactctgaggaggctgctgctgcggcatatcaggcgtatgcaaaacagatccgtgaagagttgctagccatcaagaaccaacggtctgtatcagaacgtgcagctctatcaagttcatcctcggtttcttgcgtatcttcgtctcccccatgtgagcagacagggcatgaaccgcagactagagtgctcgtggagaaagatcctgagcctgtagatgaagtctttctgaacttctctctcacacccaaggggatttcaatggacgatttgttaggacggatagatgagattcctgtttgtgacgaccctgtcagcccaactgatgagcttccacttgacaatttcacgagcctggaagatgcattcccgatcagcgatttcatcggttcaagagatgagcatctgtatgagcactatattggcctggctgacattagccacctgcctcttccaatggatgatccagctttcaatctggatgcagagcttgattggagtgggtttgacttcgctgcgattgaaggtgaacttgatgtcctttgaggctgcaatcagtgatgtgttatactgaaacctgcacttgcttatgttgtattcagctgaaagctcctctctatgttttttatatttgtcagaatacaacaatgaatacggattcaggtttcagtccatctatgtcagaatacatgagcacagtttctttcattttgttcttagaaaaactgatgacatatgggtgcagtctatctctaacaaggagttcgcatttttaatacattttcagtagattttgtcttgcttccttgcagtctgcagcggcgtgggcaaat

SEQ ID NO: 68795 - DNA, 2417 bp, Zea Mays
cacgtttcgtctccctgcaccgctcctcctcatcgtcgtctccccacctgacctgacccgaccgaaccgacccgaccactcctcccctgctcttccgccccaagcaagacccattaaaccccctcgccctctcctttcggggctcatctcgcctctcccccgtcccctgcctggaccctcccgatccgcctctcctcggattccgggtggttcccattccatcgacgtaccccctagtattcactgcttcggtgttgtgggctccgtagatcgacgtggcaccagaactatccgcgctagctgttgatttatgtcgcctgctctgctgccgctccatggttctgagctcacgtcgtcagcatcctcttcttgctcctttctccagcctgggcaggggggcgccagagactgcgggtttcgcttcaggatctcagggtaatataactcgctgttcgattggctggttgtttcacaccaaggattcaatctgctctgctactctcttccatccagtcaccagtttatatacatagagattagagagtggctatggtatctgttgtctctctgtccgacattaataatagggttaattgtatacatgccactcaaacccttaatagtaatgtatggcagcgcagccccttgctaatttgttcaatgttgtcagcatgatttttcttatccgcgctccttaaaaatgtttggtcatcttacagctgtaaatataatactaatatggaagttgccatgactcaactgatcaatttcttaccatgtacagtaattgcgttctctactattcacgttaattcccacatttggcaataaccagctcacaatgcgtcgaaacgttttcataactgaatctcccgtttcctatgatatgatatgaccatcaaaatgccaccttttggtttggcatgcaaagatggaggtttacataagtaaatattgttccgtttatttgaatttggaaagtttcctctagtaatgcacaatggtttcagatttggatttggggtgaagtactctgggtttctacatttaggccctcgcttcctactttgccgcacctgagatagtaaaagagttcaagaatcccccccaaatcacagtcagtcttgggtctggtttgggtggatttcattacgtttcctccaagttcaaacagccagcaggatttccgattcttgcgcagttcaagagactgccccaactttatccaaaaagtttcctccgtctcatttgtggtcaatctggaagcggtgtgtcaagatgcggccctcggtgcagaaggtccgcattttctgttctgatcctgatgctactgactcatctgatgatgaagatggccagatcatcgcagtgaagaaaatggttatggagatactagtcccagtgacaaactcgaagacatctaatagtctgaagacccttgtgccgtgtggagcaaaggacctggaggtttcagagaagaagggtaaatcaagcaggttccgtggcgtgcgcaggcgacgctggggtcgatgggcagccgagattcgtgatcctgtgagaaaaaccaggaagtggattggctcgtatgactctgaggaggctgctgctgcggcatatcaggcgtatgcaaaacagatccgtgaagagttgctagccatcaagaaccaacggtctgtatcagaacgtgcagctctatcaagttcatcctcggtttcttgcgtatcttcgtctcccccatgtgagcagacagggcatgaaccgcagactagagtgctcgtggagaaagatcctgagcctgtagatgaagtctttctgaacttctctctcacacccaaggggatttcaatggacgatttgttaggacggatagatgagattcctgtttgtgacgaccctgtcagcccaactgatgagcttccacttgacaatttcacgagcctggaagatgcattcccgatcagcgatttcatcggttcaagagatgagcatctgtatgagcactatattggcctggctgacattagccacctgcctcttccaatggatgatccagctttcaatctggatgcagagcttgattggagtgggtttgacttcgctgcgattgaaggtgaacttgatgtcctttgaggctgcaatcagtgatgtgttatactgaaacctgcacttgcttatgttgtattcagctgaaagctcctctctatgttttttatatttgtcagaatacaacaatgaatacggattcaggtttcagtccatctatgtcagaatacatgagcacagtttctttcattttgttcttagaaaaactgatgacatatgggtgcagtctatctctaacaaggagttcgcatttttaatacattttcagtagattttgtcttgcttccttgcagtctgcagcggcgtgggcaaat

SEQ ID NO: 68796 - DNA, 1915 bp, Zea Mays
cacacgtttcgtctccctgcaccgctcctcctcatcgtcgtctccccacctgacctgacccgaccgaaccgacccgaccactcctcccctgctcttccgccccaagcaagacccattaaaccccctcgccctctcctttcggggctcatctcgcctctcccccgtcccctgcctggaccctcccgatccgcctctcctcggattccgggtggttcccattccatcgacgtaccccctagtattcactgcttcggtgttgtgggctccgtagatcgacgtggcaccagaactatccgcgctagctgttgatttatgtcgcctgctctgctgccgctccatggttctgagctcacgtcgtcagcatcctcttcttgctcctttctccagcctgggcaggggggcgccagagactgcgggtttcgcttcaggatctcaggtactctgggtttctacatttaggccctcgcttcctactttgccgcacctgagatagtaaaagagttcaagaatcccccccaaatcacagtcagtcttgggtctggtttgggtggatttcattacgtttcctccaagttcaaacagccagcaggatttccgagttgagtctgaagatcttcgcttttccggtttccatcagaagttagagagaacccctattctgatttgccagattccatctgtgctgcagttcttgcgcagttcaagagactgccccaactttatccaaaaagtttcctccgtctcatttgtggtcaatctggaagcggtgtgtcaagatgcggccctcggtgcagaaggtccgcattttctgttctgatcctgatgctactgactcatctgatgatgaagatggccagatcatcgcagtgaagaaaatggttatggagatactagtcccagtgacaaactcgaagacatctaatagtctgaagacccttgtgccgtgtggagcaaaggacctggaggtttcagagaagaagggtaaatcaagcaggttccgtggcgtgcgcaggcgacgctggggtcgatgggcagccgagattcgtgatcctgtgagaaaaaccaggaagtggattggctcgtatgactctgaggaggctgctgctgcggcatatcaggcgtatgcaaaacagatccgtgaagagttgctagccatcaagaaccaacggtctgtatcagaacgtgcagctctatcaagttcatcctcggtttcttgcgtatcttcgtctcccccatgtgagcagacagggcatgaaccgcagactagagtgctcgtggagaaagatcctgagcctgtagatgaagtctttctgaacttctctctcacacccaaggggatttcaatggacgatttgttaggacggatagatgagattcctgtttgtgacgaccctgtcagcccaactgatgagcttccacttgacaatttcacgagcctggaagatgcattcccgatcagcgatttcatcggttcaagagatgagcatctgtatgagcactatattggcctggctgacattagccacctgcctcttccaatggatgatccagctttcaatctggatgcagagcttgattggagtgggtttgacttcgctgcgattgaaggtgaacttgatgtcctttgaggctgcaatcagtgatgtgttatactgaaacctgcacttgcttatgttgtattcagctgaaagctcctctctatgttttttatatttgtcagaatacaacaatgaatacggattcaggtttcagtccatctatgtcagaatacatgagcacagtttctttcattttgttcttagaaaaactgatgacatatgggtgcagtctatctctaacaaggagttcgcatttttaatacattttcagtagattttgtcttgcttccttgcagtctgcagcggcgtgggcaaat

SEQ ID NO: 68797 - DNA, 1215 bp, Zea Mays
ctcagcctggacagtgggcaacacaatcctctgcattggactggtaatccggaagtgcgggttcgtttttctggatttggggcagaggaggatgaatggatcaatgttcgcaaatgtgtgcgacaacgttctcttccatgcgaggccacagaatgcgttgctgtgcttcctggggacctcattctttgttttcaggaagataaagagcaggctctctattttgatgctcgtgtccttgatgctcaaaggagaaggcatgatgttagaggttgccgttgtagatttcttgttcgctatgatcatgactcttctgaggaaattgttccactgaggaaggtgtgccgccgaccagaaactgactacaggcttcagattctgcatgctgctagagcggcagccgccagtgcagatattcacactccacccagagaggctaaagtggagttggcatccaatgctaagagcccatatgagcaaaaaccccagaagcagtacaagatgatggacgtgaacactgatgaggaggtgaccatggtctccaccttggaacaggatgagacacaaggcaagactgtagcccccgtaccgtcagcaactgcagaaacccgcaattcaagttcagacgcggtgatgaaggatgcggaggcttcgtccgtggctcaagacgatgatgaagtgcaggtggttgacaagatgaaagaggggtagctttttttcgcactttttgtgtttggaggacttgatgttgtcgtacagagttttctaatttagtttgtagtatatgtttttctaattaagtactccttccattcttttttatttgttatggtttagtttagaaatgaactaacgctcgttcttttttatttgtcacgttagtttaaaaatgaactagcggacgacaagtattgagaacggaggtaatacagtacttgtcgtaattaccgtgtggcatcttaatggatggttacgtgtgtctgacgcgtcgctgctctcggccgcaagcgaacgagtattgcgacttgtgagcgtgtaaagaaccctcactgcttgtgtcacacacgagcagctcctgggactggagttgcgtgtgagaatggccatgactttcagaaaagagagtgtggtcccggccgtcagcgagagcgaaaggagagggaggaatcggccagcacgacgaggggaaggggaatggcggatcgggctaagccgagg

SEQ ID NO: 68798 - DNA, 1713 bp, Zea Mays
ctcaagtggtgttcacgtataaaccaatcagctcccgtccccgtcccacaccacacacagagaaagagaaagagccacgcattgcacttggcttgcacaagcccggaggagccccaaacgcggcggcggacggaatgcggctgcgcctgcctcagtcaagaattggcctgaaatcttgcatcctgttgaccattccaacttctccgcgttgttgatgtgaacattctgctgtgatggcgaaggagtactacactacgagcagccttgtggttgggtacgcgctgtgctcgagcctgctctcgatcatcaacaagtacgccgtgacaaagttcggtttcccaggcctcctgaccgctctacagtactcgacatccgctgctggtgtctggatcctcggaaagctaggcttcctcacacatgaccccttcaacctggagaccgcaaagaagttcgcgccggcggctctcgtcttctacctagccatattcaccaacacgaacctcctctgccacgccaacgtcgacaccttcatagtcttcagatccctgaccccgctcctggtcgccatcgccgacacgacgttccggaagcagccatgcccttccaagttcacgttcctgtccctcgtggtcatcctgggcggagcggtcggctacgtgacgacggattcggcgttcagcctcacggcgtactcgtgggcgctcgcgtacctggtgaccataacgactgagatggtgtacatcaagcacatcgtcaccagcctggggctcaacacctggggcttcgtgctctacaacaacttcctctccttgatgctggcccccgtgttctggttccttacaggcgagcacaggtcggtcttcgcagcgatggagtccaggggcgaaggctggtttcaactggacgccgtcgtggcggtggcgctgtcgtgcgtcttcgggctgctcatcagtttctttggcttcgcagccaggagagctgtatcggcgaccgcgttcaccgtgaccggggtcgtgaacaagttcctcaccgtggccatcaatgtcatgatctgggacaagcatgccagtgcgtatggttcggtctgcttgctgttcaccatcctcggtggggtgctctaccagcaatcggttacggtgaaaggaaacggtgcagttgtggcacagcgtgagctggtgcccgagcaacctgaggaggttgacgaggagaaacaaagcttagtttcttcagctaaataatacggtgcaacggatcacttgcaatgataggatccgtttgcaggtttattctttggcctttgaatgggctcgtttatgtgtctgcgaaacaaacatgagggaatactatactagtggaagtagcacttccgtcaatggaagccctgctattgtttgaatttgcatcaagattgcaacgttttgttcactgcgaatgtgtactttagctgataaaggtggttcttgatattgcatatttttttcctttacaaaaaaatatttttatgtgtctaatgcctcagtttatctagcgcaaatgtccgcctttcaaatttactttgtaaaattacttaagctacctccagcaacttatttatcctcgtaccaatattcaaactcaattatacaaacaatgtcatatataaacaaaatagtgtttttgtgatcatatggatgaactgttggacacggtcttagcgaggagtaatttacagta

SEQ ID NO: 68799 - DNA, 1915 bp, Zea Mays
gttagaatgggaaaccctaaccctaacttagggtagggagatgtattaatagactcaggttgttgggcttgacccattacataggggtataagactatccgcaacggttccctttaaatttctccccctatatcactttttttttgtgtcacatcattaatagtttgttccctactttttcatctcccgcagcggtttcccctataccccactacaaccataaaatatcatttcctatacttttcatctactatcaatttttcatccactaacaattactcttggacccactactacaagaatgaacagtgatggagaggatgaacagtgaaccgctatatacggagggagagagaagagggccgacgcgtagggggccgaccaggggtcagcgctgcgggtctaggggcgctccctgtagccgcatgcaagaggcgggggctggcacgcggagaccgctgtggccagcctaactgtaattacaatgggctaaccctaaaaccctaaacgggtactctaacaccgtgggccgggtcaaaggggccactgtgcctacatatctgggagggagcaccggcgccatggacgaagacgaagggcacaacgcagatcgaagaagggcgttgttgctattagtggagacaaagggaacattgacgtctgcagctcttggaggggggaggcggcgactgcagcacttggttgtggcggcggtgtctacctctcgttgggggcagagctcggggaaaaatggtgcgagaaagaaaagaaacggctgcaggagaaatattgcacgtggaactgatagattgagatggcagttcttcgactggaattagagaactgtgccgatttttggtgttgccaaaatattgggctacgagttggatactgttggagcagtgattttttcgccttatttgccaaaactagttttgggggacatttattaggagctcttggagatgctctaatagtcagtgcaccggactggatggaaacacaagaaaatctctcataacctaaaatttcttgtatggtcacaattgtcaattatctttatggtaattgcgacatgcacgagtcatgcatttttattagcacaagaggttcacttgctgacttatgtgcagtgatggtggactgtactgtacagctttattagacaaaaagaaaggctgtcctgttgtagtgaatggcttttcatgcactctaaaaaggcccatactgttgggttgattgcaacaccagatgtccattcctttgaacttactaagaaagaccatttcatcattctagggtgcgatggcttatggggagtatttggaccaggtgatgctgtcgaatttgttcagaatcagttgaaggagacctcatcagccacacttgcggtgcgccgcctcgtgaaggaagctgttcgcgagaggcgatgcaaggataactgcactgctgttttgatcgtcttcaggcactagcgatcggcctaattcccttttgctttcgtcaggctggaaagaattagctgataaagaacaatgtttgaagtgtagcgagttgaacttggaactcttgctttgtctgttttgatttgatgtgacctattaatacaccatccatattcatttggaaattactctatccgtccaaaagacattgtttaagttttgtcgcgagtcaatccattttaaaatattgatagcaacagataaatatattgtagaaatatgtcgcatgccgaatctaatggttcttatttgctagtataaatattagtattctgctgtataaatttggtcgaattttagataatttggtatagggcaaaactaaaccatcaatttttttggtacagttgatatcatattatctgggtcagtaccagatcagtaatttgatggtaatatcggaaaacaac

SEQ ID NO: 68800 - DNA, 1795 bp, Zea Mays
ctttctgcttctcccgtattgccgtgccctcctccctctccctgctcgctctctccctctcgtcgctttctttcctggtcgcgccgcccttcatcaggtctcctccgccttagccggtgaagagcgaccaggcccaataaataatcaccatggctcatcaaaagcgtgaaggcagctacgccgatgatgatagtacatccaagcgcatcaaaggcaccgacactgcttctgaaacgggggacagtgtagagtctagtgtttcacagcaaatggatgctgaagctaggaggacctgccaaaaggaaagcgaagcaccatcggacaaatgcgtttcagatggggaatgcgctgcaaactctaaggttttgggtgagcagaagatggtattgactgttgtcgaggctgatgcggcggacgacaagggttgcaggcacactatggaggacgcctgggtggtgctccccaatgctggtgcagaatccccaggaagcttgaggtgcgtacattttgcgatttatgacgggcatggtggtcgcttggcggcagattatgcacagaagcatttgcatcagaatgtcatcgctgcaggattaccacatggatattaaagctgcaaagaaggctgtaattgaaggtttccgtagaactgatgaatctttactgcaagaaagtactaagggaaattggcaagatggtgcaacagctgtatgcgtttggatcctgggacagacggttgtagttgcgaatgttggagatgctaaagcagtattggctcgttctatttcaactgagggtgaaggtgtggttgatgagaccaaaagtcaactaaaggctattgttttgacaagagaacataaagccatcttttcacaggagcgctcccgaatccagaaggctggaggttctgttggctctaatggaagattacaaggtcgtattgaagtatcaagagctttcggtgatcgccagtttaagaaggtttgctgatataagtatatttggtcgctacttaagtctgctcttttgtatctgtttatttggaaaaggtatggtgtttgattacctagttgaatatttcagcatcaataataaatggaggcattattttatgctgaaaataaagtacattttgagtgcaatgtacagaaacgattacaaagtctatttcctttggctatgcattctgttgatctagaccaaccagtgaagcgtccgatgacctttgctttgtatgctaaaaatgggggttttcctgattttgtgattgtatctactgttaagggcagtcctggtgcagtggtgagaactgtttcactgagtcaccaggtcgcggattcgaagcagcttttctgcacttgtggaaggcttgcctctgtttatccttttccagaccccactcatgtgcgagcctctcacactgggtctgccccctttatctactattaagaaataatataactgctgcttgaaacctttatagtcgataatgaggaactttgttagcttagttgtgttagaaagtaaacggcgacacgtagtgtccatgacgtgcgtctgtgtaccgcgctgtggtggtgtcgtgtgcatgtctgcatgcaagtgagctagctcgggctgattggtgttgggttagaaagagtccaggttgattggtgctagtcaagaaagagtccaggctgatttggagtggtttgcatggcgctgattcacatggtggaagccacatcgtccagatgaggaagtgggtcacggtgattgctgcacgagtcccgtggatcatggcacgaaggccggc

SEQ ID NO: 68801 - DNA, 1806 bp, Zea Mays
ccactttctgcttctcccgtattgccgtgccctcctccctctccctgctcgctctctccctctcgtcgctttctttcctggtcgcgccgcccttcatcaggtctcctccgccttagccggtgaagagcgaccaggcccaataaataatcaccatggctcatcaaaagcgtgaaggcagctacgccgatgatgatagtacatccaagcgcatcaaaggcaccgacactgcttctgaaacgggggacagtgtagagtctagtgtttcacagcaaatggatgctgaagctaggaggacctgccaaaaggaaagcgaagcaccatcggacaaatgcgtttcagatggggaatgcgctgcaaactctaaggttttgggtgagcagaagatggtattgactgttgtcgaggctgatgcggcggacgacaagggttgcaggcacactatggaggacgcctgggtggtgctccccaatgctggtgcagaatccccaggaagcttgaggtgcgtacattttgcgatttatgacgggcatggtggtcgcttggcggcagattatgcacagaagcatttgcatcagaatgtcatcgctgcaggattaccacgtgagttgatggatattaaagctgcaaagaaggctgtaattgaaggtttccgtagaactgatgaatctttactgcaagaaagtactaagggaaattggcaagatggtgcaacagctgtatgcgtttggatcctgggacagacggttgtagttgcgaatgttggagatgctaaagcagtattggctcgttctatttcaactgagggtgaaggtgtggttgatgagaccaaaagtcaactaaaggctattgttttgacaagagaacataaagccatcttttcacaggagcgctcccgaatccagaaggctggaggttctgttggctctaatggaagattacaaggtcgtattgaagtatcaagagctttcggtgatcgccagtttaagaaggtttgctgatataagtatatttggtcgctacttaagtctgctcttttgtatctgtttatttggaaaaggtatggtgtttgattacctagttgaatatttcagcatcaataataaatggaggcattattttatgctgaaaataaagtacattttgagtgcaatgtacagaaacgattacaaagtctatttcctttggctatgcattctgttgatctagaccaaccagtgaagcgtccgatgacctttgctttgtatgctaaaaatgggggttttcctgattttgtgattgtatctactgttaagggcagtcctggtgcagtggtgagaactgtttcactgagtcaccaggtcgcggattcgaagcagcttttctgcacttgtggaaggcttgcctctgtttatccttttccagaccccactcatgtgcgagcctctcacactgggtctgccccctttatctactattaagaaataatataactgctgcttgaaacctttatagtcgataatgaggaactttgttagcttagttgtgttagaaagtaaacggcgacacgtagtgtccatgacgtgcgtctgtgtaccgcgctgtggtggtgtcgtgtgcatgtctgcatgcaagtgagctagctcgggctgattggtgttgggttagaaagagtccaggttgattggtgctagtcaagaaagagtccaggctgatttggagtggtttgcatggcgctgattcacatggtggaagccacatcgtccagatgaggaagtgggtcacggtgattgctgcacgagtcccgtggatcatggcacgaaggccggc

SEQ ID NO: 68802 - DNA, 1493 bp, Zea Mays
atttggaaaacatttgcatgaacattagaaacttacagagtacaagttgaagaagcaaatacaatggctttggaagcataaggatcaaatgaggatccttcgagtttagttaagatcaaaagctgtcagataagtcatgtctcttatctaaaaaaacaacaatgcctagagcaacccatcttgtgatctcccagtttttcttcagaaagtcatacatagcatcgaagctatgccactggaattacctgcaaaagaagtcaatggataagtacatgtactcaagaaaatgatgagacaagttacactatagtagtttaattcccaagacaaacaccaaacataatactcacatctttccagctatggtcaaagaaaatgcatgcagtaatagctacaaaaacaaacaggaaaaaaagaagggtaaaccaatcgcttctatgtccgagcagtgccaccaatcactatgttcgatgtgaacatagagaacgatccttcgtgcgcctctagctggaggccctgcagcttaaatgcttaataaacacttctttagggaccaaaaacatgcaaacgagcaaacaactataaaatctcagggaagaaagaggaaccaattagggaagtatcatcagatcaaccacaacctcagtgtttactgttcccacagaaacagaagcaattcaacttctaccacgattttgtagttgtttgctataaaatcaatcgctttgcgtctgcatgcatccaggaagagcgacatctgtcagcaaggagtctaacacagttcaatatggcatatcagctaaggtatattttcaatgatcaggtaaggtatattttcgaatactgcagtgtgaaattactacccaagctgacagtgacaatttctgaaggacagcgttccagtagaaattcagttcaaaaaatgtgcaatccatcaaagcagatatataatggctataccaggggcgacaatggaaactactgattgcaaatctgatcgaaaaaaaactcttactgcagttactattaggaagttcaaaaaggattacatgaaggcaccagagacatagttcgacgaattccacaaatcagctcgcatccacctaatcgttaatccatccgatcctactcaaatctagaacataaacaagtagctagtgctcacactgaacaaatcagatctccaagtttagtgctgctcatgttgccatagaaacagagcagaagtcgcccactgaaacaaattttgatagatctacaagcatctgaagcgtcgacatcaatgtgaaactccgcagcaaatgattataagtaaaactccgcatcatcgatcattagtggaaaatcccgcagcatggaatcaaacaaccttagtgctagactgctaattgggcattctaagttcagtgaaatgaaagaaaacaaaagtgaagaggatatcatctgacacgtaccaaatacggtgttggtggggttcatggcgacctggttct

SEQ ID NO: 68803 - DNA, 2217 bp, Zea Mays
caaccttcttaattttctgaagcttgggcgggatctcggctcgcctccgtccatctctatggcgccacggggccaccacctggcggaggtggccctcctcgcctctgcttcggcggacctcgcagccgcaggcgccggcgagagggaggggtggttggacgaccccgccatcctcccctcgctcgggccccgcgcgcgatctctcgccgtggccagcgcggcgcactccgtgctcgtgatcgtcgcggtggcgggaggtggaggcggcggggtcacggtggagcctgcgctggggcccgacgagggccgaatctccgccgttgagtgggtcccgttcgccggggaggacgatgcagagggggaggagggggtgtccgtggtgatcggcacggacgctgggtggctactgttctactcgctcgcaggcgatctattgcacaagcaggtcgttcagtatatatcctgcaaagatactgaaactcaactttcgtgagaggaaggagaacgcttgggaagattcaggctcagatgaactttctgtagtgtttcctggtgttatcgcgcgctttgatggtgctgaccttcagaacgttcttaaaaaagcatttcaagatgtaaaatcacgcctgtggaaagataagtttgaagagcaagatgctgaggatgaggaaacttttggacgaataccctttcagatttggaatgtaaacaagttcagttcatgcgctgatgctgcaattgttggtctgatgccacctcccttgttagaacttcagctgcttttatattgctgggcagtcaagtcagcgccactactgtgccatcacagttggagaggatgctgtagtttcagcatataggttatcagaagatagaaccaggtcaattgttggagcaattttgtcaagaggtgtagctgcaacattttcgacaatatcatctttgtccaaaatactatggcggagtgagccgtcaccacctaaaaagtcacggccaaagccccaatcctttgcaaaaacatcacccctcacctgcttgaaagactccccaaggaaaggagaacggcttacactctctccgagtggtacgctggctgctataactgattcacttgggcggatactactgctggacacccatgcgcttgtggctgtacggttatggaagggctatcgtgatgcttcatgtctatttgtggaaatgcttctgaacaaagacaaggcttcgtcagggtcgatgcacatagagtatacgaagagtgactattgtttgtgtttagcaatccatgccccgcgaaaaggcataatagaggtttggaagatgcgcaccgggtcacgcctcctaaccatcccatgccccaaaggaagcaggatcttacaaccctcagcgaggctctctacgtcgtcgttctcaccttcgtattccccgctggaggtttacctgttcaatggagactctgggcaattgtcagttttgaataggcacatcggatgaatcatttgttcctttgttgtgttattaaattgttactgccaagtgttgtagagaattacttgtttcagtgtttacagttttgttaatcaagaaaaaaaagtgcgtgggtcaggattgaacaaacagagatgaaattgggcggatggataaaccagaagcagacatgaatgcgggaggggagtggcaaaaaaaaaaaaggagagtaatcttggcaatagatacaggtttccttttacctctcttatttccagcccgtggaaactaccaaaatataccctaccccttatggcctcatctctttattaccatgaatgggaacacaactgaagacctaccagagtctggagactttctcacgttcgtctctccctcgcttggccttgagcatcgccgggggaagatgtaggcgaccggaacaggggaatccctcctgggtaaggttgctgtcagcagtccctgatccttctctttagaatgtgttttgtacagctgtgagttttgaaacaaagctgatgtgatctgtctgctatgaaaaagttgttgagtgttgtaaaagagctaaaaattatttggttcaaacggctgagtgaattgtctataaataaattgtatatcgtttatatacaattttgttcaactatctcttaattaatgtatcgaataaaaaccaaattcacatttgtattcatgatatttctacaaataaactagactccacttgct

SEQ ID NO: 68804 - DNA, 2267 bp, Zea Mays
acccacacgcgtatgtcgtcttgccttcctcgtcgaatcgcgcgcatctccgctccacaaccttcttaattttctgaagcttgggcgggatctcggctcgcctccgtccatctctatggcgccacggggccaccacctggcggaggtggccctcctcgcctctgcttcggcggacctcgcagccgcaggcgccggcgagagggaggggtggttggacgaccccgccatcctcccctcgctcgggccccgcgcgcgatctctcgccgtggccagcgcggcgcactccgtgctcgtgatcgtcgcggtggcgggaggtggaggcggcggggtcacggtggagcctgcgctggggcccgacgagggccgaatctccgccgttgagtgggtcccgttcgccggggaggacgatgcagagggggaggagggggtgtccgtggtgatcggcacggacgctgggtggctactgttctactcgctcgcaggcgatctattgcacaagcagagtatatatcctgcaaagatactgaaactcaactttcgtgagaggaaggagaacgcttgggaagattcaggctcagatgaactttctgtagtgtttcctggtgttatcgcgcgctttgatggtgctgaccttcagaacgttcttaaaaaagcatttcaagatgtaaaatcacgcctgtggaaagataagtttgaagagcaagatgctgaggatgaggaaacttttggacgaataccctttcagatttggaatgtaaacaagttcagttcatgcgctgatgctgcaattgttggtctgatgccacctcccttgttagaacttcagctgcttttatattgctgggcagtcaagtcagcgccactactgtgccatcacagttggagaggatgctgtagtttcagcatataggttatcagaagatagaaccaggtcaattgttggagcaattttgtcaagaggtgtagctgcaacattttcgacaatatcatctttgtccaaaatactatggcggagtgagccgtcaccacctaaaaagtcacggccaaagccccaatcctttgcaaaaacatcacccctcacctgcttgaaagactccccaaggaaaggagaacggcttacactctctccgagtggtacgctggctgctataactgattcacttgggcggatactactgctggacacccatgcgcttgtggctgtacggttatggaagggctatcgtgatgcttcatgtctatttgtggaaatgcttctgaacaaagacaaggcttcgtcagggtcgatgcacatagagtatacgaagagtgactattgtttgtgtttagcaatccatgccccgcgaaaaggcataatagaggtttggaagatgcgcaccgggtcacgcctcctaaccatcccatgccccaaaggaagcaggatcttacaaccctcagcgaggctctctacgtcgtcgttctcaccttcgtattccccgctggaggtttacctgttcaatggagactctgggcaattgtcagttttgaataggcacatcggatgaatcatttgttcctttgttgtgttattaaattgttactgccaagtgttgtagagaattacttgtttcagtgtttacagttttgttaatcaagaaaaaaaagtgcgtgggtcaggattgaacaaacagagatgaaattgggcggatggataaaccagaagcagacatgaatgcgggaggggagtggcaaaaaaaaaaaaggagagtaatcttggcaatagatacaggtttccttttacctctcttatttccagcccgtggaaactaccaaaatataccctaccccttatggcctcatctctttattaccatgaatgggaacacaactgaagacctaccagagtctggagactttctcacgttcgtctctccctcgcttggccttgagcatcgccgggggaagatgtaggcgaccggaacaggggaatccctcctgggtaaggttgctgtcagcagtccctgatccttctctttagaatgtgttttgtacagctgtgagttttgaaacaaagctgatgtgatctgtctgctatgaaaaagttgttgagtgttgtaaaagagctaaaaattatttggttcaaacggctgagtgaattgtctataaataaattgtatatcgtttatatacaattttgttcaactatctcttaattaatgtatcgaataaaaaccaaattcacatttgtattcatgatatttctacaaataaactagactccacttgct

SEQ ID NO: 68805 - DNA, 2701 bp, Zea Mays
taaaaacccacacgcgtatgtcgtcttgccttcctcgtcgaatcgcgcgcatctccgctccacaaccttcttaattttctgaagcttgggcgggatctcggctcgcctccgtccatctctatggcgccacggggccaccacctggcggaggtggccctcctcgcctctgcttcggcggacctcgcagccgcaggcgccggcgagagggaggggtggttggacgaccccgccatcctcccctcgctcgggccccgcgcgcgatctctcgccgtggccagcgcggcgcactccgtgctcgtgatcgtcgcggtggcgggaggtggaggcggcggggtcacggtggagcctgcgctggggcccgacgagggccgaatctccgccgttgagtgggtcccgttcgccggggaggacgatgcagagggggaggagggggtgtccgtggtgatcggcacggacgctgggtggctactgttctactcgctcgcaggcgatctattgcacaagcaggtcgttcgtaagatcctatccatctggatctccgtagatacagcgttctgagaattatttctcattattggtgctatttgtcataattctcataatttttaagaatatcaggctgttttttgcccggttttgctatatcatgctcgagtgagaaaagctcaaaaacttgttcacatgacaaaatacttttagtaggatcacgtaagttccaaatataatcttcaaatgtgtgagttctagcagtacagtccgaatgtagtttcagtataaggtggttgttttaaatagaagatgttctgcttagatgccttctacttttatggactatgctgtctatctctaagcgttagcaaatatgcatatttgtttttgttacttcatgccttcatggtaaatggtaatagtgcagtccttgaattgttatttcagagtatatatcctgcaaagatactgaaactcaactttcgtgagaggaaggagaacgcttgggaagattcaggctcagatgaactttctgtagtgtttcctggtgttatcgcgcgctttgatggtgctgaccttcagaacgttcttaaaaaagcatttcaagatgtaaaatcacgcctgtggaaagataagtttgaagagcaagatgctgaggatgaggaaacttttggacgaataccctttcagatttggaatgtaaacaagttcagttcatgcgctgatgctgcaattgttggtctgatgccacctcccttgttagaacttcagctgcttttatattgctgggcagtcaagtcagcgccactactgtgccatcacagttggagaggatgctgtagtttcagcatataggttatcagaagatagaaccaggtcaattgttggagcaattttgtcaagaggtgtagctgcaacattttcgacaatatcatctttgtccaaaatactatggcggagtgagccgtcaccacctaaaaagtcacggccaaagccccaatcctttgcaaaaacatcacccctcacctgcttgaaagactccccaaggaaaggagaacggcttacactctctccgagtggtacgctggctgctataactgattcacttgggcggatactactgctggacacccatgcgcttgtggctgtacggttatggaagggctatcgtgatgcttcatgtctatttgtggaaatgcttctgaacaaagacaaggcttcgtcagggtcgatgcacatagagtatacgaagagtgactattgtttgtgtttagcaatccatgccccgcgaaaaggcataatagaggtttggaagatgcgcaccgggtcacgcctcctaaccatcccatgccccaaaggaagcaggatcttacaaccctcagcgaggctctctacgtcgtcgttctcaccttcgtattccccgctggaggtttacctgttcaatggagactctgggcaattgtcagttttgaataggcacatcggatgaatcatttgttcctttgttgtgttattaaattgttactgccaagtgttgtagagaattacttgtttcagtgtttacagttttgttaatcaagaaaaaaaagtgcgtgggtcaggattgaacaaacagagatgaaattgggcggatggataaaccagaagcagacatgaatgcgggaggggagtggcaaaaaaaaaaaaggagagtaatcttggcaatagatacaggtttccttttacctctcttatttccagcccgtggaaactaccaaaatataccctaccccttatggcctcatctctttattaccatgaatgggaacacaactgaagacctaccagagtctggagactttctcacgttcgtctctccctcgcttggccttgagcatcgccgggggaagatgtaggcgaccggaacaggggaatccctcctgggtaaggttgctgtcagcagtccctgatccttctctttagaatgtgttttgtacagctgtgagttttgaaacaaagctgatgtgatctgtctgctatgaaaaagttgttgagtgttgtaaaagagctaaaaattatttggttcaaacggctgagtgaattgtctataaataaattgtatatcgtttatatacaattttgttcaactatctcttaattaatgtatcgaataaaaaccaaattcacatttgtattcatgatatttctacaaataaactagactccacttgct

SEQ ID NO: 68806 - DNA, 1585 bp, Zea Mays
cctggactcgttgtcgcgcgccagggcaaagaattctgctgccacggacgacgacatggctaaccatcagttggtctcctaccacgagctcgctcgtgctaccgaaaacttcagtgatgctaacctgctggggtctggaagctttgggaaggtttttaagggccagctgagcaatggcctggtggttgccgtaaaggtcatacacatgcatatggagcaagctgctgcaaggtttgacgcaaagtgttgtgtgcttcgaatggctcggcatcgcaacctgataaggatactgaacacctgttccaacctgcacttcagagcgctggtgctccagtacatgcccaacgggagcttagaggagctcttgcgctccgtcaacggaggaatgcgactagggttcgttgagaggctggacatcgtgctagatgtgtccatggcaatggagtatctgcaccacgagcactgcgaggtggtcctacactgcgacttgaagcctagcaaactaaggcatgagacattgaagcagcagctgtgccgaaagctaataaatggtgtatcagtgcataaccatgttcctgggcagagttctgttatacctccagagacaaattccatctccatgcatgacttaaaggcagaaatagagttaaacccttgtttgcttgggattaatgcatcactgctacacgaaaagatcaattcatatgactagtaggatggagctagttgtattcatctcgtcacaagatcctatgatcttgatggtctgtcttgtttcatggctgttgtaatcaagccataagtttactgatgggtggcggtgaaggcaagcgcattctgtgcagtaccctgattgttttgcatgtcatctctagtgcaatcttccaaaatgaacaaaaaactgtgtatctgctgggtgcagtactaaaataattcatttcatccacctaaggagtaaggactacgatgggcgaaagtgctccagagataactatgttgctggactccagacaaattgaggaaccatatcaaagatttgatctccaaatgaaagcctgtatgagcagaagcccgaagaaacagctcctgtcctgccatatcttgtttctctgcacttggttgcggcctgtggtactggtcgactatggcggcacaatgcctcagctacaagaaaatctttgtggactgctatatcttgcccgacagttcaagctctgcaaggtgaggtctgtttagtttggccagaaaggcatcccctacctgaacacctacgacggccgcaccatccgctaccccgatcctctcatcaaggccaacgacaccatcaagattgatctggagaccaacaatatcatggacttcatcaagttgtatttgcccatggacttcatcaagttatatacttagttaggctcaatgttagcacaaacagttgatgagcaagtttaaatttagagtacacttatgtatgagttatttgacaatgcttatttatgagatattgaatgttatttatctatattatattaattatagtgttattaaatatatgtgtatgtatttttctcttttaaattattataat

SEQ ID NO: 68807 - DNA, 2435 bp, Zea Mays
cctggactcgttgtcgcgcgccagggcaaagtgagacctctagtccttgttcctcgttggattatttgcttactgtcatgcttctggttttcattttgggggaattttttggggactatttgataaacttggagggtggagattaggaattctgctgccacggacgacgacatggctaaccatcagttggtctcctaccacgagctcgctcgtgctaccgaaaacttcagtgatgctaacctgctggggtctggaagctttgggaaggtttttaagggccagctgagcaatggcctggtggttgccgtaaaggtcatacacatgcatatggagcaagctgctgcaaggtttgacgcaaagtgttgtgtgcttcgaatggctcggcatcgcaacctgataaggatactgaacacctgttccaacctgcacttcagagcgctggtgctccagtacatgcccaacgggagcttagaggagctcttgcgctccgtcaacggaggaatgcgactagggttcgttgagaggctggacatcgtgctagatgtgtccatggcaatggagtatctgcaccacgagcactgcgaggtggtcctacactgcgacttgaagcctagcaaactaaggcatgagacattgaagcagcagctgtgccgaaagctaataaatggtgtatcagtgcataaccatgttcctgggcagagttctgttatacctccagagacaaattccatctccatgcatgacttaaaggcagaaatagagttaaacccttgtttgcttgggattaatgcatcactgctacacgaaaagatcaattcatatgactagtaggatggagctagttgtattcatctcgtcacaagatcctatgatcttgatggtctgtcttgtttcatggctgttgtaatcaagccataagtttactgatgggtggcggtgaaggcaagcgcattctgtgcagtaccctgattgttttgcatgtcatctctagtgcaatcttccaaaatgaacaaaaaactgtgtatctgctgggtgcagtactaaaataattcatttcatccacctaaggagtaaggactacgatgggcgaaagtgctccagagataactatgttgctggactccagacaaattgaggaaccatatcaaagatttgatctgtaagtttatcataactaatatgtgcttgtgcatttcaacttttacatttgtagcatagatacaactgtttctagttatttatttgcactcagttttgtttcaatgtcacaataaatagaaactttttataagacatgtcgggaacacttgtagcgttgatgtgtgagtatattttcatcaaaactgatggtaacaaagactaaactgacactagtcatgtccaactattaagacaacaattgtttcacaaagatgaacagtggaaacacccttttgtaatatagtagattctgttgagctcttggccccaattatgtcaataacactctgtttatattgtggtacttggcagttggcacacgattttcttataatcatctgttgttgctgagacaaagcagttctatggtatcaagtacactttcttctttcacttgagttttatattttatcttactttcttctttcaccaacaagttccgattttggtcccggtaatttggttgtctttggtcattgattaattatatgcccaccactataatttggtcctgtttctctacttatagttgtcatttatgaagtaacaatatctgttctcctattttgtactgtgagaaaaggaagttcactttataactctctaattttatttcttcccgctaatctaaaaaaattgtttaattgtctgttcaagtaaagtgaaatttcctgtccaacttctgcattgtagccaaatgaaagcctgtatgagcagaagcccgaagaaacagctcctgtcctgccatatcttgtttctctgcacttggttgcggcctgtggtactggtcgactatggcggcacaatgcctcagctacaagaaaatctttgtggactgctatatcttgcccgacagttcaagctctgcaaggtgaggtctgtttagtttggccagaaaggcatcccctacctgaacacctacgacggccgcaccatccgctaccccgatcctctcatcaaggccaacgacaccatcaagattgatctggagaccaacaatatcatggacttcatcaagttgtatttgcccatggacttcatcaagttatatacttagttaggctcaatgttagcacaaacagttgatgagcaagtttaaatttagagtacacttatgtatgagttatttgacaatgcttatttatgagatattgaatgttatttatctatattatattaattatagtgttattaaatatatgtgtatgtatttttctcttttaaattattataat

SEQ ID NO: 68808 - DNA, 1568 bp, Zea Mays
gccggatcctggactcgttgtcgcgcgccagggcaaagaattctgctgccacggacgacgacatggctaaccatcagttggtctcctaccacgagctcgctcgtgctaccgaaaacttcagtgatgctaacctgctggggtctggaagctttgggaaggtttttaagggccagctgagcaatggcctggtggttgccgtaaaggtcatacacatgcatatggagcaagctgctgcaagagcgctggtgctccagtacatgcccaacgggagcttagaggagctcttgcgctccgtcaacggaggaatgcgactagggttcgttgagaggctggacatcgtgctagatgtgtccatggcaatggagtatctgcaccacgagcactgcgaggtggtcctacactgcgacttgaagcctagcaaactaaggcatgagacattgaagcagcagctgtgccgaaagctaataaatggtgtatcagtgcataaccatgttcctgggcagagttctgttatacctccagagacaaattccatctccatgcatgacttaaaggcagaaatagagttaaacccttgtttgcttgggattaatgcatcactgctacacgaaaagatcaattcatatgactagtaggatggagctagttgtattcatctcgtcacaagatcctatgatcttgatggtctgtcttgtttcatggctgttgtaatcaagccataagtttactgatgggtggcggtgaaggcaagcgcattctgtgcagtaccctgattgttttgcatgtcatctctagtgcaatcttccaaaatgaacaaaaaactgtgtatctgctgggtgcagtactaaaataattcatttcatccacctaaggagtaaggactacgatgggcgaaagtgctccagagataactatgttgctggactccagacaaattgaggaaccatatcaaagatttgatctttggcacacgattttcttataatcatctgttgttgctgagacaaagcagttctatggtatcaaccaaatgaaagcctgtatgagcagaagcccgaagaaacagctcctgtcctgccatatcttgtttctctgcacttggttgcggcctgtggtactggtcgactatggcggcacaatgcctcagctacaagaaaatctttgtggactgctatatcttgcccgacagttcaagctctgcaaggtgaggtctgtttagtttggccagaaaggcatcccctacctgaacacctacgacggccgcaccatccgctaccccgatcctctcatcaaggccaacgacaccatcaagattgatctggagaccaacaatatcatggacttcatcaagttgtatttgcccatggacttcatcaagttatatacttagttaggctcaatgttagcacaaacagttgatgagcaagtttaaatttagagtacacttatgtatgagttatttgacaatgcttatttatgagatattgaatgttatttatctatattatattaattatagtgttattaaatatatgtgtatgtatttttctcttttaaattattataat

SEQ ID NO: 68809 - DNA, 579 bp, Zea Mays
gccggatcctggactcgttgtcgcgcgccagggcaaaccaaatgaaagcctgtatgagcagaagcccgaagaaacagctcctgtcctgccatatcttgtttctctgcacttggttgcggcctgtggtactggtcgactatggcggcacaatgcctcagctacaagaaaatctttgtggactgctatatcttgcccgacagttcaagctctgcaaggtgaggtctgtttagtttggccagaaaggcatcccctacctgaacacctacgacggccgcaccatccgctaccccgatcctctcatcaaggccaacgacaccatcaagattgatctggagaccaacaatatcatggacttcatcaagttgtatttgcccatggacttcatcaagttatatacttagttaggctcaatgttagcacaaacagttgatgagcaagtttaaatttagagtacacttatgtatgagttatttgacaatgcttatttatgagatattgaatgttatttatctatattatattaattatagtgttattaaatatatgtgtatgtatttttctcttttaaattattataat

SEQ ID NO: 68810 - DNA, 781 bp, Zea Mays
ccgaggagggccacgacggccggatcctggactcgttgtcgcgcgccagggcaaatactaaaataattcatttcatccacctaaggagtaaggactacgatgggcgaaagtgctccagagataactatgttgctggactccagacaaattgaggaaccatatcaaagatttgatctttggcacacgattttcttataatcatctgttgttgctgagacaaagcagttctatggtatcaaccaaatgaaagcctgtatgagcagaagcccgaagaaacagctcctgtcctgccatatcttgtttctctgcacttggttgcggcctgtggtactggtcgactatggcggcacaatgcctcagctacaagaaaatctttgtggactgctatatcttgcccgacagttcaagctctgcaaggtgaggtctgtttagtttggccagaaaggcatcccctacctgaacacctacgacggccgcaccatccgctaccccgatcctctcatcaaggccaacgacaccatcaagattgatctggagaccaacaatatcatggacttcatcaagttgtatttgcccatggacttcatcaagttatatacttagttaggctcaatgttagcacaaacagttgatgagcaagtttaaatttagagtacacttatgtatgagttatttgacaatgcttatttatgagatattgaatgttatttatctatattatattaattatagtgttattaaatatatgtgtatgtatttttctcttttaaattattataat

SEQ ID NO: 68811 - DNA, 1917 bp, Zea Mays
cgcccccgctccgaggagggccacgacggccggatcctggactcgttgtcgcgcgccagggcaaaggtggagattaggaattctgctgccacggacgacgacatggctaaccatcagttggtctcctaccacgagctcgctcgtgctaccgaaaacttcagtgatgctaacctgctggggtctggaagctttgggaaggtttttaagggccagctgagcaatggcctggtggttgccgtaaaggtcatacacatgcatatggagcaagctgctgcaaggtttgacgcaaagtgttgtgtgcttcgaatggctcggcatcgcaacctgataaggatactgaacacctgttccaacctgcacttcagagcgctggtgctccagtacatgcccaacgggagcttagaggagctcttgcgctccgtcaacggaggaatgcgactagggttcgttgagaggctggacatcgtgctagatgtgtccatggcaatggagtatctgcaccacgagcactgcgaggtggtcctacactgcgacttgaagcctagcaaactaaggcatgagacattgaagcagcagctgtgccgaaagctaataaatggtgtatcagtgcataaccatgttcctgggcagagttctgttatacctccagagacaaattccatctccatgcatgacttaaaggcagaaatagagttaaacccttgtttgcttgggattaatgcatcactgctacacgaaaagatcaattcatatgactagtaggatggagctagttgtattcatctcgtcacaagatcctatgatcttgatggtctgtcttgtttcatggctgttgtaatcaagccataagtttactgatgggtggcggtgaagtactaaaataattcatttcatccacctaaggagtaaggactacgatgggcgaaagtgctccagagataactatgttgctggactccagacaaattgaggaaccatatcaaagatttgatctttggcacacgattttcttataatcatctgttgttgctgagacaaagcagttctatggtatcaagtacactttcttctttcacttgagttttatattttatcttactttcttctttcaccaacaagttccgattttggtcccggtaatttggttgtctttggtcattgattaattatatgcccaccactataatttggtcctgtttctctacttatagttgtcatttatgaagtaacaatatctgttctcctattttgtactgtgagaaaaggaagttcactttataactctctaattttatttcttcccgctaatctaaaaaaattgtttaattgtctgttcaagtaaagtgaaatttcctgtccaacttctgcattgtagccaaatgaaagcctgtatgagcagaagcccgaagaaacagctcctgtcctgccatatcttgtttctctgcacttggttgcggcctgtggtactggtcgactatggcggcacaatgcctcagctacaagaaaatctttgtggactgctatatcttgcccgacagttcaagctctgcaaggtgaggtctgtttagtttggccagaaaggcatcccctacctgaacacctacgacggccgcaccatccgctaccccgatcctctcatcaaggccaacgacaccatcaagattgatctggagaccaacaatatcatggacttcatcaagttgtatttgcccatggacttcatcaagttatatacttagttaggctcaatgttagcacaaacagttgatgagcaagtttaaatttagagtacacttatgtatgagttatttgacaatgcttatttatgagatattgaatgttatttatctatattatattaattatagtgttattaaatatatgtgtatgtatttttctcttttaaattattataat

SEQ ID NO: 68812 - DNA, 1584 bp, Zea Mays
ccaccgcccccgctccgaggagggccacgacggccggatcctggactcgttgtcgcgcgccagggcaaagaattctgctgccacggacgacgacatggctaaccatcagttggtctcctaccacgagctcgctcgtgctaccgaaaacttcagtgatgctaacctgctggggtctggaagctttgggaaggtttttaagggccagctgagcaatggcctggtggttgccgtaaaggtcatacacatgcatatggagcaagctgctgcaaggtttgacgcaaagtgttgtgtgcttcgaatggctcggcatcgcaacctgataaggatactgaacacctgttccaacctgcacttcagagcgctggtgctccagtacatgcccaacgggagcttagaggagctcttgcgctccgtcaacggaggaatgcgactagggttcgttgagaggctggacatcgtgctagatgtgtccatggcaatggagtatctgcaccacgagcactgcgaggtggtcctacactgcgacttgaagcctagcaaactaaggcatgagacattgaagcagcagctgtgccgaaagctaataaatggtgtatcagtgcataaccatgttcctgggcagagttctgttatacctccagagacaaattccatctccatgcatgacttaaaggcagaaatagagttaaacccttgtttgcttgggattaatgcatcactgctacacgaaaagatcaattcatatgactagtaggatggagctagttgtattcatctcgtcacaagatcctatgatcttgatggtctgtcttgtttcatggctgttgtaatcaagccataagtttactgatgggtggcggtgaagtactaaaataattcatttcatccacctaaggagtaaggactacgatgggcgaaagtgctccagagataactatgttgctggactccagacaaattgaggaaccatatcaaagatttgatctttggcacacgattttcttataatcatctgttgttgctgagacaaagcagttctatgccaaatgaaagcctgtatgagcagaagcccgaagaaacagctcctgtcctgccatatcttgtttctctgcacttggttgcggcctgtggtactggtcgactatggcggcacaatgcctcagctacaagaaaatctttgtggactgctatatcttgcccgacagttcaagctctgcaaggtgaggtctgtttagtttggccagaaaggcatcccctacctgaacacctacgacggccgcaccatccgctaccccgatcctctcatcaaggccaacgacaccatcaagattgatctggagaccaacaatatcatggacttcatcaagttgtatttgcccatggacttcatcaagttatatacttagttaggctcaatgttagcacaaacagttgatgagcaagtttaaatttagagtacacttatgtatgagttatttgacaatgcttatttatgagatattgaatgttatttatctatattatattaattatagtgttattaaatatatgtgtatgtatttttctcttttaaattattataat

SEQ ID NO: 68813 - DNA, 868 bp, Zea Mays
cgccgccggttccccattgctgcctccatcgcccccactcctcgccggttccccattgctgcctccaccgcccccgctcctcgccggttacccattgctgcctccaccgcccccgctccgaggagggccacgacggccggatcctggactcgttgtcgcgcgccagggcaaagagtaaggactacgatgggcgaaagtgctccagagataactatgttgctggactccagacaaattgaggaaccatatcaaagatttgatctttggcacacgattttcttataatcatctgttgttgctgagacaaagcagttctatggtatcaaccaaatgaaagcctgtatgagcagaagcccgaagaaacagctcctgtcctgccatatcttgtttctctgcacttggttgcggcctgtggtactggtcgactatggcggcacaatgcctcagctacaagaaaatctttgtggactgctatatcttgcccgacagttcaagctctgcaaggtgaggtctgtttagtttggccagaaaggcatcccctacctgaacacctacgacggccgcaccatccgctaccccgatcctctcatcaaggccaacgacaccatcaagattgatctggagaccaacaatatcatggacttcatcaagttgtatttgcccatggacttcatcaagttatatacttagttaggctcaatgttagcacaaacagttgatgagcaagtttaaatttagagtacacttatgtatgagttatttgacaatgcttatttatgagatattgaatgttatttatctatattatattaattatagtgttattaaatatatgtgtatgtatttttctcttttaaattattataat

SEQ ID NO: 68814 - DNA, 1192 bp, Zea Mays
atcctccgccgccggttccccattgctgcctccatcgcccccactcctcgccggttccccattgctgcctccaccgcccccgctcctcgccggttacccattgctgcctccaccgcccccgctccgaggagggccacgacggccggatcctggactcgttgtcgcgcgccagggcaaagagtaaggactacgatgggcgaaagtgctccagagataactatgttgctggactccagacaaattgaggaaccatatcaaagatttgatctttggcacacgattttcttataatcatctgttgttgctgagacaaagcagttctatggtatcaagtacactttcttctttcacttgagttttatattttatcttactttcttctttcaccaacaagttccgattttggtcccggtaatttggttgtctttggtcattgattaattatatgcccaccactataatttggtcctgtttctctacttatagttgtcatttatgaagtaacaatatctgttctcctattttgtactgtgagaaaaggaagttcactttataactctctaattttatttcttcccgctaatctaaaaaaattgtttaattgtctgttcaagtaaagtgaaatttcctgtccaacttctgcattgtagccaaatgaaagcctgtatgagcagaagcccgaagaaacagctcctgtcctgccatatcttgtttctctgcacttggttgcggcctgtggtactggtcgactatggcggcacaatgcctcagctacaagaaaatctttgtggactgctatatcttgcccgacagttcaagctctgcaaggtgaggtctgtttagtttggccagaaaggcatcccctacctgaacacctacgacggccgcaccatccgctaccccgatcctctcatcaaggccaacgacaccatcaagattgatctggagaccaacaatatcatggacttcatcaagttgtatttgcccatggacttcatcaagttatatacttagttaggctcaatgttagcacaaacagttgatgagcaagtttaaatttagagtacacttatgtatgagttatttgacaatgcttatttatgagatattgaatgttatttatctatattatattaattatagtgttattaaatatatgtgtatgtatttttctcttttaaattattataat

SEQ ID NO: 68815 - DNA, 871 bp, Zea Mays
ctggatcctccgccgccggttccccattgctgcctccatcgcccccactcctcgccggttccccattgctgcctccaccgcccccgctcctcgccggttacccattgctgcctccaccgcccccgctccgaggagggccacgacggccggatcctggactcgttgtcgcgcgccagggcaaagagtaaggactacgatgggcgaaagtgctccagagataactatgttgctggactccagacaaattgaggaaccatatcaaagatttgatctttggcacacgattttcttataatcatctgttgttgctgagacaaagcagttctatgccaaatgaaagcctgtatgagcagaagcccgaagaaacagctcctgtcctgccatatcttgtttctctgcacttggttgcggcctgtggtactggtcgactatggcggcacaatgcctcagctacaagaaaatctttgtggactgctatatcttgcccgacagttcaagctctgcaaggtgaggtctgtttagtttggccagaaaggcatcccctacctgaacacctacgacggccgcaccatccgctaccccgatcctctcatcaaggccaacgacaccatcaagattgatctggagaccaacaatatcatggacttcatcaagttgtatttgcccatggacttcatcaagttatatacttagttaggctcaatgttagcacaaacagttgatgagcaagtttaaatttagagtacacttatgtatgagttatttgacaatgcttatttatgagatattgaatgttatttatctatattatattaattatagtgttattaaatatatgtgtatgtatttttctcttttaaattattataat

SEQ ID NO: 68816 - DNA, 865 bp, Zea Mays
gtaaggccaccatccccttctctctcccttctttcatctcccctccccatctggatcctccgccgccggttccccattgctgcctccatcgcccccactcctcgccggttccccattgctgcctccaccgcccccgctcctcgccggttacccattgctgcctccaccgcccccgctccgaggagggccacgacggccggatcctggactcgttgtcgcgcgccagggcaaagagtaaggactacgatgggcgaaagtgctccagagataactatgttgctggactccagacaaattgaggaaccatatcaaagatttgatctccaaatgaaagcctgtatgagcagaagcccgaagaaacagctcctgtcctgccatatcttgtttctctgcacttggttgcggcctgtggtactggtcgactatggcggcacaatgcctcagctacaagaaaatctttgtggactgctatatcttgcccgacagttcaagctctgcaaggtgaggtctgtttagtttggccagaaaggcatcccctacctgaacacctacgacggccgcaccatccgctaccccgatcctctcatcaaggccaacgacaccatcaagattgatctggagaccaacaatatcatggacttcatcaagttgtatttgcccatggacttcatcaagttatatacttagttaggctcaatgttagcacaaacagttgatgagcaagtttaaatttagagtacacttatgtatgagttatttgacaatgcttatttatgagatattgaatgttatttatctatattatattaattatagtgttattaaatatatgtgtatgtatttttctcttttaaattattataat

SEQ ID NO: 68817 - DNA, 556 bp, Zea Mays
aactgtgggtccgagctcgcggcgttgtgggggataagaccctctgggacctccgcaaacccccgctcgccccgtattgctctgctccgccatcgggaggatccaccaccgcagcgcaacccgcaccatcgccatcggcgccgcgtccacgatttagtactcgggtgcctcgccgtgcttcggggataggaccggggcctcgctacgggagaagggcggccggtgacctcggatttcgtcgaccctggcggcggcgattgctcaccgtcgcggtgttgtcgccgcggaagcactgcgcgcgggagcagcttcaccaaccttcctaacgccgacgagcaagtcactgtggaaactgaggttcagcaagtagagatagctgagcaggagctcattacaggcaagttgtgcccttgatcacttacttttcccagccatgttcttattaattataatgatctgcataggataattttgatgggagcctttatgtaccccagttttgattacctctataccttgttcacccctggaatatttttgggtagtactcgctatt

SEQ ID NO: 68818 - DNA, 1420 bp, Zea Mays
acagtgacagtatacgccatcgtgctgttggtctggtgattatttcggcctgctgttggttgatatccgtgacaaagatggattggaaaaggtttttgcttcaacaagatttgatgctgttattcattttgctggactgaaagctgttggagaaagtgtacaaaagcctttgctttattatgaccataatgttgttggcacaataaatcttctggaagtaatggcagctcatggatgtaagaagttagtgttctcatcatcagctgcagtttatgggtcacctaagaactcaccctgcactgaagattttcctctcactccacataacccatatggcagaaccaaacttatggcagaggagatatgccgtgatatctaccattcagatcctgaatggaatatcattttgcttaggtactttaatccagttggggctcaccccagtggataccttggtgaagacccatgtggaactcctaacaaccttatgcccttcgttcagcaaattgcagttggcaggaggccatcgctaacaatatttggaaataactacgcaacaaaggatgggacaggggttcgtgattatattcatgtggttgaccttgctgaaggacatcttttcgcattaaagaagctttttgaaagctcatctaacataggatgtgaagcatacaaccttggaaccggaaaaggaacatcagtgttggagatagtcaatgcatttgagaaggcttctggaaagaaaatccctttgatcatgggccaacggcgtcctggtgatgctgagattctcttttcatcgccggcaaaagcagagagagagctccactggaaagcgaaatatggcatcacagaaatgtgcggagacctgtggaactgggctagcaagagcccttatggatacgcggcatctgagtctccgaagctgaatggtagttcacgctgagcaacgccgattggcccgtgtggactcacttgtacatgagactgtagtgccagccaaccaggataaatgtagatctagtcggtcggtcatacagagagaagttctataggcctaggaaagaaatgttatcctgttcctcagcataagctcccatagtggttcttccatatgcgtatagtctatgaaatttgttctaggaccattgctatagtcaaccagctaattcaattctatttcttgagttgcgttgcctaaaatagagcatgatatagatatcagcatcacaaaaagttgcagttcatacaaattttcttttgtaattgtattgtttctttgagacaatttctgtattattagtatttcttttgaaataaatatgtaatattggttagtgagaccacagtaatacttccatttcaacttcattggtgtgataaatcacacttcactgggggtgtcaaaaaaattgtttac

SEQ ID NO: 68819 - DNA, 1671 bp, Zea Mays
ccatttcctcgcctccccctgaccccctctcgtccacgcctcctcccctaccattcgcagttttggacacttggttgtcgtttcgtcccgcagatccgcaagcaccgggccagtagagagagagagagagaggagggagggtcgcggcctcgcggggggtggaggagatgtctgtggcgaaggaggcggggccgagcagcagggcggtgcttgtgacgggcggggcgggatacatcggcagccacgccgtgctgcagctgctcaccgcgggcttccgggtcgtcgtcgtcgacagcctcgccaactcctccgagctcgtgatccgccgcctgcgctcgctcgcggtggaacacgccaaaaacctcgcgttccacaaggttgatatccgtgacaaagatggattggaaaaggtttttgcttcaacaagatttgatgctgttattcattttgctggactgaaagctgttggagaaagtgtacaaaagcctttgctttattatgaccataatgttgttggcacaataaatcttctggaagtaatggcagctcatggatgtaagaagttagtgttctcatcatcagctgcagtttatgggtcacctaagaactcaccctgcactgaagattttcctctcactccacataacccatatggcagaaccaaagtactttaatccagttggggctcaccccagtggataccttggtgaagacccatgtggaactcctaacaaccttatgcccttcgttcagcaaattgcagttggcaggaggccatcgctaacaatatttggaaataactacgcaacaaaggatgggacaggggttcgtgattatattcatgtggttgaccttgctgaaggacatcttttcgcattaaagaagctttttgaaagctcatctaacataggatgtgaagcatacaaccttggaaccggaaaaggaacatcagtgttggagatagtcaatgcatttgagaaggcttctggaaagaaaatccctttgatcatgggccaacggcgtcctggtgatgctgagattctcttttcatcgccggcaaaagcagagagagagctccactggaaagcgaaatatggcatcacagaaatgtgcggagacctgtggaactgggctagcaagagcccttatggatacgcggcatctgagtctccgaagctgaatggtagttcacgctgagcaacgccgattggcccgtgtggactcacttgtacatgagactgtagtgccagccaaccaggataaatgtagatctagtcggtcggtcatacagagagaagttctataggcctaggaaagaaatgttatcctgttcctcagcataagctcccatagtggttcttccatatgcgtatagtctatgaaatttgttctaggaccattgctatagtcaaccagctaattcaattctatttcttgagttgcgttgcctaaaatagagcatgatatagatatcagcatcacaaaaagttgcagttcatacaaattttcttttgtaattgtattgtttctttgagacaatttctgtattattagtatttcttttgaaataaatatgtaatattggttagtgagaccacagtaatacttccatttcaacttcattggtgtgataaatcacacttcactgggggtgtcaaaaaaattgtttac

SEQ ID NO: 68820 - DNA, 1445 bp, Zea Mays
cctcgactctctctctccttcctctcctctcctttcccatttcctcgcctccccctgaccccctctcgtccacgcctcctcccctaccattcgcagttttggacacttggttgtcgtttcgtcccgcagatccgcaagcaccgggccagtagagagagagagagagaggagggagggtcgcggcctcgcggggggtggaggagatgtctgtggcgaaggaggcggggccgagcagcagggcggtgcttgtgacgggcggggcgggatacatcggcagccacgccgtgctgcagctgctcaccgcgggcttccgggtcgtcgtcgtcgacagcctcgccaactcctccgagctcgtgatccgccgcctgcgctcgctcgcggtggaacacgccaaaaacctcgcgttccacaaggttgatatccgtgacaaagatggattggaaaaggtttttgcttcaacaagatttgatgctgttattcattttgctggactgaaagctgttggagaaagtgtacaaaagcctttgctttattatgaccataatgttgttggcacaataaatcttctggaagtaatggcagctcatggatgtaagaaggttcgtgattatattcatgtggttgaccttgctgaaggacatcttttcgcattaaagaagctttttgaaagctcatctaacataggatgtgaagcatacaaccttggaaccggaaaaggaacatcagtgttggagatagtcaatgcatttgagaaggcttctggaaagaaaatccctttgatcatgggccaacggcgtcctggtgatgctgagattctcttttcatcgccggcaaaagcagagagagagctccactggaaagcgaaatatggcatcacagaaatgtgcggagacctgtggaactgggctagcaagagcccttatggatacgcggcatctgagtctccgaagctgaatggtagttcacgctgagcaacgccgattggcccgtgtggactcacttgtacatgagactgtagtgccagccaaccaggataaatgtagatctagtcggtcggtcatacagagagaagttctataggcctaggaaagaaatgttatcctgttcctcagcataagctcccatagtggttcttccatatgcgtatagtctatgaaatttgttctaggaccattgctatagtcaaccagctaattcaattctatttcttgagttgcgttgcctaaaatagagcatgatatagatatcagcatcacaaaaagttgcagttcatacaaattttcttttgtaattgtattgtttctttgagacaatttctgtattattagtatttcttttgaaataaatatgtaatattggttagtgagaccacagtaatacttccatttcaacttcattggtgtgataaatcacacttcactgggggtgtcaaaaaaattgtttac

SEQ ID NO: 68821 - DNA, 1704 bp, Zea Mays
gctgattcgaatttcttcctcgactctctctctccttcctctcctctcctttcccatttcctcgcctccccctgaccccctctcgtccacgcctcctcccctaccattcgcagttttggacacttggttgtcgtttcgtcccgcagatccgcaagcaccgggccagtagagagagagagagagaggagggagggtcgcggcctcgcggggggtggaggagatgtctgtggcgaaggaggcggggccgagcagcagggcggtgcttgtgacgggcggggcgggatacatcggcagccacgccgtgctgcagctgctcaccgcgggcttccgggtcgtcgtcgtcgacagcctcgccaactcctccgagctcgtgatccgccgcctgcgctcgctcgcggtggaacacgccaaaaacctcgcgttccacaaggttgatatccgtgacaaagatggattggaaaaggtttttgcttcaacaagatttgatgctgttattcattttgctggactgaaagctgttggagaaagtgtacaaaagcctttgctttattatgaccataatgttgttggcacaataaatcttctggaagtaatggcagctcatggatgtaagaagttagtgttctcatcatcagctgcagtttatgggtcacctaagaactcaccctgcactgaagattttcctctcactccacataacccatatggcagaaccaaacttatggcagaggagatatgccgtgatatctaccattcagatcctgaatggaatatcattttgcttagcaaattgcagttggcaggaggccatcgctaacaatatttggaaataactacgcaacaaaggatgggacaggggttcgtgattatattcatgtggttgaccttgctgaaggacatcttttcgcattaaagaagctttttgaaagctcatctaacataggatgtgaagcatacaaccttggaaccggaaaaggaacatcagtgttggagatagtcaatgcatttgagaaggcttctggaaagaaaatccctttgatcatgggccaacggcgtcctggtgatgctgagattctcttttcatcgccggcaaaagcagagagagagctccactggaaagcgaaatatggcatcacagaaatgtgcggagacctgtggaactgggctagcaagagcccttatggatacgcggcatctgagtctccgaagctgaatggtagttcacgctgagcaacgccgattggcccgtgtggactcacttgtacatgagactgtagtgccagccaaccaggataaatgtagatctagtcggtcggtcatacagagagaagttctataggcctaggaaagaaatgttatcctgttcctcagcataagctcccatagtggttcttccatatgcgtatagtctatgaaatttgttctaggaccattgctatagtcaaccagctaattcaattctatttcttgagttgcgttgcctaaaatagagcatgatatagatatcagcatcacaaaaagttgcagttcatacaaattttcttttgtaattgtattgtttctttgagacaatttctgtattattagtatttcttttgaaataaatatgtaatattggttagtgagaccacagtaatacttccatttcaacttcattggtgtgataaatcacacttcactgggggtgtcaaaaaaattgtttac

SEQ ID NO: 68822 - DNA, 1452 bp, Zea Mays
tagacatgttctcaagtgatgcaaggatacttactattattctcaaatctcaatataaaacataaatagttttcttaagtgctctaagtgaatgttttttttgagtaataccatttaccataatcgtggttggttgggttcatgactcaggattgcaattcactacctactttcaagaggtaggctgccaggctgttaagccgaccaatccagccacatacatcacctgtaatatagctacctgtcaagctattgagtctctggactcccaactccacccactagagtgttgccgccaccagatactctggtcatgaccctcttccttgccatctgtgcttctctgctccagcagcagcaaaagctattcttgtgctcctctgccctgctcttagtgctccgtgtgctgcagcttttcctcttgtcctgagttctcctgatagcattcaagacaactgtggggaaaacactgatgctgtaactgctttggagctccttgggtaaaacctccatcttctcacattttgttccatttgagtttgctccagcagtccagctccatgtaccaacttgcgttttggtggaatccagtttatcacaaactgtgaatcagttcatgaattctggtgacagtgtgctgcatctgtcttacgaagtatggagatgatgatgagcttcgtgagcttccttgcacacacttctttcatgttcaatgtgtagataaatggcttaagataaatgcggtgtgcccactctgcaaaacagagattgggggtgtggttcgatctttctttggcttgccatttggccgccgccgtgtcgataggatagcggcaagaggtgtagctagctcaagattcagtgtatagaacaatgctgtttttccgcataaagagctctgctctgttgcaatggtttgattgattgtcaaggaaagcgctgtgtgcatgacttgaagacaatgacacctggtgggagacctgatgcttgtaggggcaaatttctaagaaatgtaacggactgaaggtgctgctatactctgatgaacattttttttccaagtatgtaaataaggaacacgaagttcgcttgccaggtataatgcaactttgcaagcaacttcacaggtgctctagcatcggccttggtgttctttccttccttctggttctgtgattctcttcataacggcaatgcactgcatgcattgtaaggctgtcttcagtagcttactcattctagtttctatcatcatatattctattttaaacttcaccttgtaaacagtgtaatttataatataaaatagttatttataatataaaatggtgttttatgcgatcatatgcatgatttgttggagattgtctaaattgtgaaataaaaggcaatgacctatttatggaacccaatgcctcctcgaagcccatacattaccattttctatcgttt

SEQ ID NO: 68823 - DNA, 1686 bp, Zea Mays
ctccgtgccaaaacgaaagggaccgctgctctgctctgcctgcctccccttcatcctccacttcttcctcttggtctggttcgggcagagcatccgcacctgctcggccgattaccccggcgttttctgttccctttcaccccgcgtgcgggcgctatccttcccgtggcgacgtctgggtgaccgctgccgcagccctacactaggttcctaggtattcgccgggcccttccccggcgacgagcacccaccatgttgtagctgctattgtcatcctcatcttttcaagacatgaacatccccatgctcctttgttcgcatggataattggatatacacttggctgcattgctagtcttcctcttatttattggcggtatgttcatcgaaacagacatttggatcaagaacctcagcagccacctacaacatatcctactttgactccttctcagtcatcagaaggacgcaaccatcgtaccagtggtattgttttgcatcttggatgtatctcaatttcttgcccaagtatttcatcagatgctcaggacgctcccaatatgtacaggttgtgtttggcattccttgcgcttagttgtgttggatatgccattccttttataatgtgtgcagcaatatgctgctgctttccatgcttgatttctgttttgcgtcttcaagaagatttgggtcaaaatagaggagctactcaagagctaatagatgcattgccaacctacaaattcaaaccaaaacgtgtcaaaaactgggggattgaccatgcttcaagctcagagcatcttgatgagggtggcattcttggcccaggaactaagaaggaaagagttgtttcagctgaagatgctgtgtgctgcatctgtcttacgaagtatggagatgatgatgagcttcgtgagcttccttgcacacacttctttcatgttcaatgtgtagataaatggcttaagataaatgcggtgtgcccactctgcaaaacagagattgggggtgtggttcgatctttctttggcttgccatttggccgccgccgtgtcgataggatagcggcaagaggtgtagctagctcaagattcagtgtatagaacaatgctgtttttccgcataaagagctctgctctgttgcaatggtttgattgattgtcaaggaaagcgctgtgtgcatgacttgaagacaatgacacctggtgggagacctgatgcttgtaggggcaaatttctaagaaatgtaacggactgaaggtgctgctatactctgatgaacattttttttccaagtatgtaaataaggaacacgaagttcgcttgccaggtataatgcaactttgcaagcaacttcacaggtgctctagcatcggccttggtgttctttccttccttctggttctgtgattctcttcataacggcaatgcactgcatgcattgtaaggctgtcttcagtagcttactcattctagtttctatcatcatatattctattttaaacttcaccttgtaaacagtgtaatttataatataaaatagttatttataatataaaatggtgttttatgcgatcatatgcatgatttgttggagattgtctaaattgtgaaataaaaggcaatgacctatttatggaacccaatgcctcctcgaagcccatacattaccattttctatcgttt

SEQ ID NO: 68824 - DNA, 1710 bp, Zea Mays
ctcgtccctccgtgccaaaacgaaagggaccgctgctctgctctgcctgcctccccttcatcctccacttcttcctcttggtctggttcgggcagagcatccgcacctgctcggccgattaccccggcgttttctgttccctttcaccccgcgtgcgggcgctatccttcccgtggcgacgtctgggtgaccgctgccgcagccctacactaggttcctaggtattcgccgggcccttccccggcgacgagcacccaccatgttgtagctgctattgtcatcctcatcttttcaagacatgaacatccccatgctcctttgttcgcatggataattggatatacacttggctgcattgctagtcttcctcttatttattggcgtcatcagaaggacgcaaccatcgtaccagtggtattgttttgcatcttggatgtatctcaatttcttgcccaaggcttagtgtgctggcttatcacttcaagacaggtgttgactgtttctttgctgtatggtttgttgttggcaatgtgtggatttttggtgggcgcagtatttcatcagatgctcaggacgctcccaatatgtacaggttgtgtttggcattccttgcgcttagttgtgttggatatgccattccttttataatgtgtgcagcaatatgctgctgctttccatgcttgatttctgttttgcgtcttcaagaagatttgggtcaaaatagaggagctactcaagagctaatagatgcattgccaacctacaaattcaaaccaaaacgtgtcaaaaactgggggattgaccatgcttcaagctcagagcatcttgatgagggtggcattcttggcccaggaactaagaaggaaagagttgtttcagctgaagatgctgtgtgctgcatctgtcttacgaagtatggagatgatgatgagcttcgtgagcttccttgcacacacttctttcatgttcaatgtgtagataaatggcttaagataaatgcggtgtgcccactctgcaaaacagagattgggggtgtggttcgatctttctttggcttgccatttggccgccgccgtgtcgataggatagcggcaagaggtgtagctagctcaagattcagtgtatagaacaatgctgtttttccgcataaagagctctgctctgttgcaatggtttgattgattgtcaaggaaagcgctgtgtgcatgacttgaagacaatgacacctggtgggagacctgatgcttgtaggggcaaatttctaagaaatgtaacggactgaaggtgctgctatactctgatgaacattttttttccaagtatgtaaataaggaacacgaagttcgcttgccaggtataatgcaactttgcaagcaacttcacaggtgctctagcatcggccttggtgttctttccttccttctggttctgtgattctcttcataacggcaatgcactgcatgcattgtaaggctgtcttcagtagcttactcattctagtttctatcatcatatattctattttaaacttcaccttgtaaacagtgtaatttataatataaaatagttatttataatataaaatggtgttttatgcgatcatatgcatgatttgttggagattgtctaaattgtgaaataaaaggcaatgacctatttatggaacccaatgcctcctcgaagcccatacattaccattttctatcgttt

SEQ ID NO: 68825 - DNA, 1692 bp, Zea Mays
cacgcatacgccaggtccatgggaccactctcactcatactccctcgtccctccgtgccaaaacgaaagggaccgctgctctgctctgcctgcctccccttcatcctccacttcttcctcttggtctggttcgggcagagcatccgcacctgctcggccgattaccccggcgttttctgttccctttcaccccgcgtgcgggcgctatccttcccgtggcgacgtctgggtgaccgctgccgcagccctacactaggttcctaggtattcgccgggcccttccccggcgacgagcacccaccatacatttggatcaagaacctcagcagccacctacaacatatcctactttgactccttctcagtcatcagaaggacgcaaccatcgtaccagtggtattgttttgcatcttggatgtatctcaatttcttgcccaaggcttagtgtgctggcttatcacttcaagacaggtgttgactgtttctttgctgtatggtttgttgttggcaatgtgtggatttttggtgggcgcagtatttcatcagatgctcaggacgctcccaatatgtacaggttgtgtttggcattccttgcgcttagttgtgttggatatgccattccttttataatgtgtgcagcaatatgctgctgctttccatgcttgatttctgttttgcgtcttcaagaagatttgggtcaaaatagaggagctactcaagagctaatagatgcattgccaacctacaaattcaaaccaaaacgtgtcaaaaactgggggattgaccatgcttcaagctcagagcatcttgatgagggtggcattcttggcccaggaactaagaaggaaagagttgtttcagctgaagatgctgtgtgctgcatctgtcttacgaagtatggagatgatgatgagcttcgtgagcttccttgcacacacttctttcatgttcaatgtgtagataaatggcttaagataaatgcggtgtgcccactctgcaaaacagagattgggggtgtggttcgatctttctttggcttgccatttggccgccgccgtgtcgataggatagcggcaagaggtgtagctagctcaagattcagtgtatagaacaatgctgtttttccgcataaagagctctgctctgttgcaatggtttgattgattgtcaaggaaagcgctgtgtgcatgacttgaagacaatgacacctggtgggagacctgatgcttgtaggggcaaatttctaagaaatgtaacggactgaaggtgctgctatactctgatgaacattttttttccaagtatgtaaataaggaacacgaagttcgcttgccaggtataatgcaactttgcaagcaacttcacaggtgctctagcatcggccttggtgttctttccttccttctggttctgtgattctcttcataacggcaatgcactgcatgcattgtaaggctgtcttcagtagcttactcattctagtttctatcatcatatattctattttaaacttcaccttgtaaacagtgtaatttataatataaaatagttatttataatataaaatggtgttttatgcgatcatatgcatgatttgttggagattgtctaaattgtgaaataaaaggcaatgacctatttatggaacccaatgcctcctcgaagcccatacattaccattttctatcgttt

SEQ ID NO: 68826 - DNA, 2261 bp, Zea Mays
cacgcatacgccaggtccatgggaccactctcactcatactccctcgtccctccgtgccaaaacgaaagggaccgctgctctgctctgcctgcctccccttcatcctccacttcttcctcttggtctggttcgggcagagcatccgcacctgctcggccgattaccccggcgttttctgttccctttcaccccgcgtgcgggcgctatccttcccgtggcgacgtctgggtgaccgctgccgcagccctacactaggttcctaggtattcgccgggcccttccccggcgacgagcacccaccatgctacctctgtggggatcttctgtgaagcaagagaagttacctagcacacaactcaaagttcagtagattattgaggatcaacatttcagccatctgtatgttagttaatatgatggccgatggtaacatctggttagaaagatagaaactcattattgcgctacatatggtagtgcccattcgacataagaactaagctggacattggtagatccaagttattaatggcgcacacttcctgtgatggtgtacatcatgttataagtgtagcacatggggaaactgcatcaacatcaaccagtcatcaagatatgtgcagtgactcggatgaaccacatcaggaagataggctatcaacaagcacacaaaccctgtcatcagagtcttcgccatcaatatcaccaactgcttatagcaccagaaatttatcttttcctagaagagatagtatatatggtcatggaagaagtccatggaattctggtttatggatctcgtttgaaattgtcatgtacattgctcaggttgtagctgctattgtcatcctcatcttttcaagacatgaacatccccatgctcctttgttcgcatggataattggatatacacttggctgcattgctagtcttcctcttatttattggcggtatgttcatcgaaacagacatttggatcaagaacctcagcagccacctacaacatatcctactttgactccttctcagtcatcagaaggacgcaaccatcgtaccagtggtattgttttgcatcttggatgtatctcaatttcttgcccaagtatttcatcagatgctcaggacgctcccaatatgtacaggttgtgtttggcattccttgcgcttagttgtgttggatatgccattccttttataatgtgtgcagcaatatgctgctgctttccatgcttgatttctgttttgcgtcttcaagaagatttgggtcaaaatagaggagctactcaagagctaatagatgcattgccaacctacaaattcaaaccaaaacgtgtcaaaaactgggggattgaccatgcttcaagctcagagcatcttgatgagggtggcattcttggcccaggaactaagaaggaaagagttgtttcagctgaagatgctgtgtgctgcatctgtcttacgaagtatggagatgatgatgagcttcgtgagcttccttgcacacacttctttcatgttcaatgtgtagataaatggcttaagataaatgcggtgtgcccactctgcaaaacagagattgggggtgtggttcgatctttctttggcttgccatttggccgccgccgtgtcgataggatagcggcaagaggtgtagctagctcaagattcagtgtatagaacaatgctgtttttccgcataaagagctctgctctgttgcaatggtttgattgattgtcaaggaaagcgctgtgtgcatgacttgaagacaatgacacctggtgggagacctgatgcttgtaggggcaaatttctaagaaatgtaacggactgaaggtgctgctatactctgatgaacattttttttccaagtatgtaaataaggaacacgaagttcgcttgccaggtataatgcaactttgcaagcaacttcacaggtgctctagcatcggccttggtgttctttccttccttctggttctgtgattctcttcataacggcaatgcactgcatgcattgtaaggctgtcttcagtagcttactcattctagtttctatcatcatatattctattttaaacttcaccttgtaaacagtgtaatttataatataaaatagttatttataatataaaatggtgttttatgcgatcatatgcatgatttgttggagattgtctaaattgtgaaataaaaggcaatgacctatttatggaacccaatgcctcctcgaagcccatacattaccattttctatcgttt

SEQ ID NO: 68827 - DNA, 2265 bp, Zea Mays
gtcagccacgccctcctaacacgcatacgccaggtccatgggaccactctcactcatactccctcgtccctccgtgccaaaacgaaagggaccgctgctctgctctgcctgcctccccttcatcctccacttcttcctcttggtctggttcgggcagagcatccgcacctgctcggccgattaccccggcgttttctgttccctttcaccccgcgtgcgggcgctatccttcccgtggcgacgtctgggtgaccgctgccgcagccctacactaggttcctaggtattcgccgggcccttccccggcgacgagcacccaccatcttaggctacctctgtggggatcttctgtgaagcaagagaagttacctagcacacaactcaaagttcagtagattattgaggatcaacatttcagccatctgtatgttagttaatatgatggccgatggtaacatctggttagaaagatagaaactcattattgcgctacatatggtagtgcccattcgacataagaactaagctggacattggtagatccaagttattaatggcgcacacttcctgtgatggtgtacatcatgttataagtgtagcacatggggaaactgcatcaacatcaaccagtcatcaagatatgtgcagtgactcggatgaaccacatcaggaagataggctatcaacaagcacacaaaccctgtcatcagagtcttcgccatcaatatcaccaactgcttatagcaccagaaatttatcttttcctagaagagatagtatatatggtcatggaagaagtccatggaattctggtttatggatctcgtttgaaattgtcatgtacattgctcaggttgtagctgctattgtcatcctcatcttttcaagacatgaacatccccatgctcctttgttcgcatggataattggatatacacttggctgcattgctagtcttcctcttatttattggcggtatgttcatcgaaacagacatttggatcaagaacctcagcagccacctacaacatatcctactttgactccttctcagtcatcagaaggacgcaaccatcgtaccagtggtattgttttgcatcttggatgtatctcaatttcttgcccaaggcttagtgtgctggcttatcacttcaagacaggtgttgactgtttctttgctgtatggtttgttgttggcaatgtgtggatttttggtgggcgcagtatttcatcagatgctcaggacgctcccaatatgtacagatttgggtcaaaatagaggagctactcaagagctaatagatgcattgccaacctacaaattcaaaccaaaacgtgtcaaaaactgggggattgaccatgcttcaagctcagagcatcttgatgagggtggcattcttggcccaggaactaagaaggaaagagttgtttcagctgaagatgctgtgtgctgcatctgtcttacgaagtatggagatgatgatgagcttcgtgagcttccttgcacacacttctttcatgttcaatgtgtagataaatggcttaagataaatgcggtgtgcccactctgcaaaacagagattgggggtgtggttcgatctttctttggcttgccatttggccgccgccgtgtcgataggatagcggcaagaggtgtagctagctcaagattcagtgtatagaacaatgctgtttttccgcataaagagctctgctctgttgcaatggtttgattgattgtcaaggaaagcgctgtgtgcatgacttgaagacaatgacacctggtgggagacctgatgcttgtaggggcaaatttctaagaaatgtaacggactgaaggtgctgctatactctgatgaacattttttttccaagtatgtaaataaggaacacgaagttcgcttgccaggtataatgcaactttgcaagcaacttcacaggtgctctagcatcggccttggtgttctttccttccttctggttctgtgattctcttcataacggcaatgcactgcatgcattgtaaggctgtcttcagtagcttactcattctagtttctatcatcatatattctattttaaacttcaccttgtaaacagtgtaatttataatataaaatagttatttataatataaaatggtgttttatgcgatcatatgcatgatttgttggagattgtctaaattgtgaaataaaaggcaatgacctatttatggaacccaatgcctcctcgaagcccatacattaccattttctatcgttt

SEQ ID NO: 68828 - DNA, 2298 bp, Zea Mays
ctagaagcgaggtgtcagccacgccctcctaacacgcatacgccaggtccatgggaccactctcactcatactccctcgtccctccgtgccaaaacgaaagggaccgctgctctgctctgcctgcctccccttcatcctccacttcttcctcttggtctggttcgggcagagcatccgcacctgctcggccgattaccccggcgttttctgttccctttcaccccgcgtgcgggcgctatccttcccgtggcgacgtctgggtgaccgctgccgcagccctacactaggttcctaggtattcgccgggcccttccccggcgacgagcacccaccatcttaggctacctctgtggggatcttctgtgaagcaagagaagttacctagcacacaactcaaagttcagtagattattgaggatcaacatttcagccatctgtatgttagttaatatgatggccgatggtaacatctggttagaaagatagaaactcattattgcgctacatatggtagtgcccattcgacataagaactaagctggacattggtagatccaagttattaatggcgcacacttcctgtgatggtgtacatcatgttataagtgtagcacatggggaaactgcatcaacatcaaccagtcatcaagatatgtgcagtgactcggatgaaccacatcaggaagataggctatcaacaagcacacaaaccctgtcatcagagtcttcgccatcaatatcaccaactgcttatagcaccagaaatttatcttttcctagaagagatagtatatatggtcatggaagaagtccatggaattctggtttatggatctcgtttgaaattgtcatgtacattgctcaggttgtagctgctattgtcatcctcatcttttcaagacatgaacatccccatgctcctttgttcgcatggataattggatatacacttggctgcattgctagtcttcctcttatttattggcggtatgttcatcgaaacagacatttggatcaagaacctcagcagccacctacaacatatcctactttgactccttctcagtcatcagaaggacgcaaccatcgtaccagtggtattgttttgcatcttggatgtatctcaatttcttgcccaagtatttcatcagatgctcaggacgctcccaatatgtacaggttgtgtttggcattccttgcgcttagttgtgttggatatgccattccttttataatgtgtgcagcaatatgctgctgctttccatgcttgatttctgttttgcgtcttcaagaagatttgggtcaaaatagaggagctactcaagagctaatagatgcattgccaacctacaaattcaaaccaaaacgtgtcaaaaactgggggattgaccatgcttcaagctcagagcatcttgatgagggtggcattcttggcccaggaactaagaaggaaagagttgtttcagctgaagatgctgtgtgctgcatctgtcttacgaagtatggagatgatgatgagcttcgtgagcttccttgcacacacttctttcatgttcaatgtgtagataaatggcttaagataaatgcggtgtgcccactctgcaaaacagagattgggggtgtggttcgatctttctttggcttgccatttggccgccgccgtgtcgataggatagcggcaagaggtgtagctagctcaagattcagtgtatagaacaatgctgtttttccgcataaagagctctgctctgttgcaatggtttgattgattgtcaaggaaagcgctgtgtgcatgacttgaagacaatgacacctggtgggagacctgatgcttgtaggggcaaatttctaagaaatgtaacggactgaaggtgctgctatactctgatgaacattttttttccaagtatgtaaataaggaacacgaagttcgcttgccaggtataatgcaactttgcaagcaacttcacaggtgctctagcatcggccttggtgttctttccttccttctggttctgtgattctcttcataacggcaatgcactgcatgcattgtaaggctgtcttcagtagcttactcattctagtttctatcatcatatattctattttaaacttcaccttgtaaacagtgtaatttataatataaaatagttatttataatataaaatggtgttttatgcgatcatatgcatgatttgttggagattgtctaaattgtgaaataaaaggcaatgacctatttatggaacccaatgcctcctcgaagcccatacattaccattttctatcgttt

SEQ ID NO: 68829 - DNA, 751 bp, Zea Mays
ctacatctcgtgagatgcgtgtccttgtcgatatatagcgtggtagtgagcaccactagcgtcttcgaccacttgccactaccccttcgcgctacctttcgcatcgcatccttgtcgactaaaggagtggtgcgttcaagatttagagaagctttcctaaatttaaatcctctctatggaagaatgagccgacggatcttgagatcgacgaaatcactaaaccacgcggaggaggaggacgattatatatatggacataaattgggtctccttgctgcgtaaatgcttcaagaggctgctgatccaaaagaatgaagccatccatggtctgactgcaaatatcgacaacatgttttggacaagacatttagcgatataggtcgtcattagttttaacatttacaaaagaacaatatttgttttcaattgaagtttaaacttgcagactgtatagttgtgattacaacaagtattgcggatcctgtcactttaaaccattgtttagttgccttaatcaaagtgagggtcagaattgtatggtgttctttgatattgcagtagatgctccactaagttcaatgaaaagttcatgttggtctttacgaaacaaaaatgactgtatggtgtctatgtatgtggcttgatacacatgatgtggcagtggcagacgctgttggagtagtatcattgtttttggatttaaagttttaaggatgtcccaatatttatgtattggaagaaatagtttttg

SEQ ID NO: 68830 - DNA, 3193 bp, Zea Mays
ccttccaattctgtgacaaaaaggcaacccccaccctcaaaaactcccccacactccccgcgcgctctctccactcgcccaccacttccagtcatggatgccacccgctacatcctggagttcctggtgctgctgcttctgctcctcctcccgaccattgcgggcgcatcctccgacaccaagcacctcatcgccgtccggtccgccctccgcgaccccaccggcgcgctcgccggctgggacgctgccaacagacgtagctcgccatgccgctgggcgcacgtgtcgtgcgccaacaactccgcgcccgcggcggccgtcgctgggatcgacctgtacaatctcaccctcgccggcgccttcccaaccgcgctctgctccttgcggtccctggagcacctcgacctctccgcgaacctactcgagggcccgctgccggcctgcgtcgcggcgctcccggcgctcaggcacctcaacctcgccgggaacaacttctccggccatgtcccgcgctcgtggggcgccgggttccggtcccttgccgtgctgaaccttgtccagaacgcgctgtcaggcgagtttccggcgttcttggccaacctcaccggcctccgggagctccaactcgcctacaaccccttcgccccgtcgccattaccggcggacatgctcgtcaacctggccaacctccgcgtgctgttcgtcgccaactgctccctcaccggtaccatcccctcttccatcgggaagctgaagaatctcgtcaatctggacctttcggtgaacagcttgtctggtgagataccaccaagcattgggaacctgacttctttggagcagatcgagctcttctcgaaccagctctcgggtgctattcccgtggggctgggaggcctcaagaagctccattcactggacatctccatgaacctgctcaccggggagataccggaggacatgttcgcggcgccggggcttctttcagggccgctgccggcggagcttgggaagaactgcccgctctcattcctggacacgtcggacaaccggctgtcgggtccaattccggcgacgctttgtgcgtccgggaaactggaggagctcatgttgctggacaacgagtttgagggccccattccggttgaactcggggaatgccggacactcgtgagggtgcggctgcagagcaacaggttgtctggcccagtgccaccaagattttggggattgcccaacgtgggcctgcttgagattcgcgagaatgcgctctcagggtcggttgatcctgccatttctggtgccaagagcctatccaagctgcttctacaggacaaccggttcacaggcactctacctgccgagcttgggaccttggaaaacctgcaagagttcaaggcttccaacaatggtttcaccggacccatacctcggtcgattgtcaacctttcgatactctacaatcttgatctgagcaacaattctctatctggagagatcccagaggactttggcaggctgaagaaactgacacagttggacctttcagataaccatctcagtgggaacattcctgaggagcttggggagatcgtcgagataaacacgcttgatctgtcacacaatgagctttccggtcagttgcccgtgcagttggggaatctcagactggctcgtttcaacatatcctataacaagctctcagggcctatacccagtttcttcaatggcttggagtaccgagacagcttcttgggcaaccctggcctgtgctatgggttctgccgtagcaatggcaattctgatggcagacagagcaagattatcaagatggtggtcaccatcataggtgtcagtgggatcatcctactcactggcatcgcttggttcggatacaagtacaggatgtacaagatcagtgctgctgaattggatgatggaaaatctagttgggtgctgacatccttccacaaggtggattttagcgagagggccattgtcaataaccttgatgagagcaacgtgattggccagggtggcgcaggcaaggtgtacaaggtggttgttgggccacagggtgaggccatggctgtcaagaagctctggcctagcggtgcggcgagcaaaagcatagactcgtttaaggctgaggttgccatgctaagcaaagttcggcacaggaacattgtaaagcttgcgtgcagcatcacaaacaacggcagcaggttgcttgtctacgagtacatggcaaatggtagcctgggggatgtgctccacagtgagaaacgccacatcttggattggcccatgaggtataagattgctgttaacgctgctgaaggactctcatacctgcaccatgactgtaagcccgtgatcgtccatcgagatgtgaagtcgaacaacatcttgctcgacgcggagtatggtgccaagattgcagattttggtgttgcaaggactattggggatggcccggctaccatgtccatgattgcagggtcttgtggatacattgctcctgagtatgcctacactctccatgtcactgaaaagagtgacatatatagctttggtgtggtgatccttgagctcgttaccggaaagaagccgctggcagcagagattggcgagatggacctggtggcgtgggtgactgccaaagttgagcagtacgggctagagtctgtgcttgaccagaacctcgacgagcagttcaaggacgagatgtgcatggttctgaaaatcgggctgctctgtgtctcaaaccttccaaccaaacgcccgtcaatgaggtccgtggtgatgctgctgctggaggtcaaggaagagaacaagccaaagctgaaggcggtggcaactctgcccatctgacctggaggaggcgaccccatctgatcaataataacaaataaaagtagtgtctgttcttcttgggatagtgtactaaaaaaactatttgcattatatctgatcttgagaagttcattcagggcagcagctagctagctaggtctgagaacattttcagcatagtgtttgctaaagcttatgactgtggtatccttttgctctaaatgagaaagtgctggttgctgtcaattttatccctggcaatctttttgttcatgattggctggccccatcaagggtgagtctacttccattcttttttgtgcctatttctgatcctgaa

SEQ ID NO: 68831 - DNA, 986 bp, Zea Mays
ttcgaccacttgccactaccccttcgcgctacctttcgcatcgcatccttgtcgactaaaggagtggtgcgttcaagatttagagaagctttcctaaagtatgttccctaacttatagcctcgcttggatctagagagtgtgggattcgatcctgacatatgctccatgtatggatgaatttttaaatcctctctatggaagaatgagccgacggatcttgagatcgacgaaatcactaaaccacgcggaggaggaggacgattatatatatggacataaattgggtctccttgctgcgtaaatgcttcaagagagtatgcctacactctccatgtcactgaaaagagtgacatatatagctttggtgtggtgatccttgagctcgttaccggaaagaagccgctggcagcagagattggcgagatggacctggtggcgtgggtgactgccaaagttgagcagtacgggctagagtctgtgcttgaccagaacctcgacgagcagttcaaggacgagatgtgcatggttctgaaaatcgggctgctctgtgtctcaaaccttccaaccaaacgcccgtcaatgaggtccgtggtgatgctgctgctggaggtcaaggaagagaacaagccaaagctgaaggcggtggcaactctgcccatctgacctggaggaggcgaccccatctgatcaataataacaaataaaagtagtgtctgttcttcttgggatagtgtactaaaaaaactatttgcattatatctgatcttgagaagttcattcagggcagcagctagctagctaggtctgagaacattttcagcatagtgtttgctaaagcttatgactgtggtatccttttgctctaaatgagaaagtgctggttgctgtcaattttatccctggcaatctttttgttcatgattggctggccccatcaagggtgagtctacttccattcttttttgtgcctatttctgatcctgaa

SEQ ID NO: 68832 - DNA, 1016 bp, Zea Mays
ttcgaccacttgccactaccccttcgcgctacctttcgcatcgcatccttgtcgactaaaggagtggtgcgttcaagatttagagaagctttcctaaagtatgttccctaacttatagcctcgcttggatctagagagtgtgggattcgatcctgacatatgctccatgtatggatgaattgttggtatcaagttcctcaacatttttgtgtttaaatcctctctatggaagaatgagccgacggatcttgagatcgacgaaatcactaaaccacgcggaggaggaggacgattatatatatggacataaattgggtctccttgctgcgtaaatgcttcaagagagtatgcctacactctccatgtcactgaaaagagtgacatatatagctttggtgtggtgatccttgagctcgttaccggaaagaagccgctggcagcagagattggcgagatggacctggtggcgtgggtgactgccaaagttgagcagtacgggctagagtctgtgcttgaccagaacctcgacgagcagttcaaggacgagatgtgcatggttctgaaaatcgggctgctctgtgtctcaaaccttccaaccaaacgcccgtcaatgaggtccgtggtgatgctgctgctggaggtcaaggaagagaacaagccaaagctgaaggcggtggcaactctgcccatctgacctggaggaggcgaccccatctgatcaataataacaaataaaagtagtgtctgttcttcttgggatagtgtactaaaaaaactatttgcattatatctgatcttgagaagttcattcagggcagcagctagctagctaggtctgagaacattttcagcatagtgtttgctaaagcttatgactgtggtatccttttgctctaaatgagaaagtgctggttgctgtcaattttatccctggcaatctttttgttcatgattggctggccccatcaagggtgagtctacttccattcttttttgtgcctatttctgatcctgaa

SEQ ID NO: 68833 - DNA, 1139 bp, Zea Mays
ccacagtcatcgtcaacctctcccctctgtaagatcgtagcgttagcacgagctatatgctagttattttaaaaagataagcgaagtaagaaaatattttagactaattgtataccataaagaaaatgtgaacgttttcgtgactgcgcatgggccattcatcactaccaaacctacatctcgtgagatgcgtgtccttgtcgatatatagcgtggtagtgagcaccactagcgtcttcgaccacttgccactaccccttcgcgctacctttcgcatcgcatccttgtcgactaaaggagtggtgcgttcaagatttagagaagctttcctaaatttaaatcctctctatggaagaatgagccgacggatcttgagatcgacgaaatcactaaaccacgcggaggaggaggacgattatatatatggacataaattgggtctccttgctgcgtaaatgcttcaagagagtatgcctacactctccatgtcactgaaaagagtgacatatatagctttggtgtggtgatccttgagctcgttaccggaaagaagccgctggcagcagagattggcgagatggacctggtggcgtgggtgactgccaaagttgagcagtacgggctagagtctgtgcttgaccagaacctcgacgagcagttcaaggacgagatgtgcatggttctgaaaatcgggctgctctgtgtctcaaaccttccaaccaaacgcccgtcaatgaggtccgtggtgatgctgctgctggaggtcaaggaagagaacaagccaaagctgaaggcggtggcaactctgcccatctgacctggaggaggcgaccccatctgatcaataataacaaataaaagtagtgtctgttcttcttgggatagtgtactaaaaaaactatttgcattatatctgatcttgagaagttcattcagggcagcagctagctagctaggtctgagaacattttcagcatagtgtttgctaaagcttatgactgtggtatccttttgctctaaatgagaaagtgctggttgctgtcaattttatccctggcaatctttttgttcatgattggctggccccatcaagggtgagtctacttccattcttttttgtgcctatttctgatcctgaa

SEQ ID NO: 68834 - DNA, 1441 bp, Zea Mays
ctgaatatgtgatggttaccctcggccggcgtcctatgccgggtcggccgcatgtgcagatcagaacgagatgacaccaaggccgccgaacggcaacctgacacaggcggccagggccagggaggcagcttcggcgcggcgcaggccgcagcgcgcttgctatttttccgccggccccttggccctcgccttgctcctcttctttattatacgcgccaccacacgcatcgcgaaccgcggttcaggaaggaagggaagggcggaggacgactacgactacctcttcaaggtcgttctcatcggcgactctggcgtcggcaaatccaacctgctctccaggttcacgcgcaacgagttcagcctagagtccaagtccaccatcggggtcgagtttgctaccaggagcatcagggtcgacgacaaggtcgtcaaggcccagatctgggacactgctggccaggagaggtatcgggcaattacaagtgcgtactatagaggggctgttggagcacttgtcgtgtatgatgtgacacgccatgtgacctttgagaatgtggagaggtggttaaaggagctccgggatcacactgatgcaaacattgtcatcatgcttgttggcaacaaagctgatctgcgacaccttagagctgtatccgtggaggatgccaagggcttcgccgagagggaaagcacattcttcatggaaacatccgcactggagtccatgaatgtcgagagcgctttcaccgaggtcctaactcagatctatcgtgtggtcagcaagaaggcccttgacattggcgatgaccccgctgctccaccaagagggcaaaccatcaacgttggtggcaaggatgatgtctctgctgtgaagaagtcagggtgctgttcatcctaaatcacttatgaccatgaaaaggaaccatatactctccgatcatatgattggtaactgaaaataggactctcttgtgcttcctaacctgttggttatgagattatgttggtgctccagagaaatgattagatgttaagaatttgattccaagctgggacaagaacgttctttccgtggtgtcattgatattcatggtttctttctatggtttatagtgttccacactaattgacattagaatcctccccacacctcacagcttaacataccttgctaaacatgttgtaattggagctactgatgtttccttactgggagcaaagagtgtaactttttctttttatgtcacgagggattatgttccactcggtaaatgcccatctatcgttggtaggcagcaagtgttttagagtgttatatcatgtaattctcacagatgtacaaaatttgggttggaagtttatgttctgcaacagcttatttatcgacatgttcagacatatgcagacgtttatatttgctgttcatgatggtgaagctaat

SEQ ID NO: 68835 - DNA, 3441 bp, Zea Mays
atggcgacgattcttggcgcagatggcgggcgagagagacagcagagaggagagcagggtcggacctttcctggatgtgttgattctccttccatgatggcgagcgagagatcagaggctgagataggacagcgggggcgagtctgttggcgagacagcgtgagagaggagagcgggcgacggcacaagccagaaccacagttcggaaaaccacccatgcttccttcccgccatctccgcgccgccgcgcggcagcgaagccacaggcggccgcccgcccctgccgacgcttgcattacgggcaagcctgatatggaggtcatccggcgcaacagagccatcacggcgcacatgcgtgcgggccgcgttccagacgccgagcgcctattcgccgcgatgccccgccgttccacctccacctacaacaccatgctcgccgggtacgccgccaacggacgcctcccgcaggcgctctccttcttccgttccattccgcgccccgattccttctcctacaacacgctcctgcatgcgctgggggtgtcgtcatcgctcgccgacgtgcgtgctctgttcgacgaaatgcccgtgaaggattccgtgtcctacaacgtcatgatctcatctcacgctaaccatggtctggtctcgctcgcacggcactactttgatctcgccccagagaaggatgctgtctcgtggaatggcatgcttgctgcctatgtccggaacggacggatccaagaggcaagggagctgttcgattcaaggacagagtgggatgcaatttcttggaatgctttgatggctgggtatgtgcagcgcagtcagatagaagaagcgcagaaaatgtttaataaaatgccacagagagatgttgtttcctggaatactatggtgtccggttatgcgaggagaggagatatggctgaggcaagaaggttgtttgatgtggccccaattagagatgtgttcacctggacagctattgtctctggatacgcacaaaatgggatgctcgaagaggccaagagggtgtttgatgccatgccagataagaatgctgtgtcgtggaatgcaatgatggcagcatatgtccagcggaggatgatggaggaggcaaaggagttgtttgatgctatgccctgtaggaatgtggcttcgtggaacacaatgttgacagggtatgctcaggctgggatgctggacgaggcgagagcaatttttggcatgatgccccagaaggatgcagtctcatgggctgcaatgctggctgcgtattcacaaattggtttcagtgaggaaacactgcagttgttcaaagagatgggacgttgtggtgagtgggtgaataggtcagcatttgcttgtgttttgagcacatgtgctgacattgctgcacttgagtgtggaatgcagctgcatagtaggttgattaaggctggttatggggtgggctgctttgttggaaatgcacttctagctatgtacttcaaatgcggaagcatggaggaagctcacagtgcatttgaagagatggaggagagggatgttgtttcgtggaatactatgattgcaggctatgcacgtcatggttttggcaaggaagcacttgaggtttttgataccatgaggaagacatctaccaagccagacgatattactttggttggagtacttgcagcatgtagtcattctggcttggttgagaaagggatttcatacttctattcaatgcaccgggattttggtgtggcaacaaaacctgaacactacacttgtatgatagatcttcttggccgtgctgggcgattggatgaagcagttaatcttatgaaggacatgccttttgagcctgactctaccatgtggggtgcattacttggtgccagtaggatccaccgcaactctgaacttggcaggaatgcagctgagaaaatatttgagttggaacctgaaaatgcaggcatgtatgtcttgctttcaaatatatatgcatcatctggcaaatggcgtgatgtggacaagatgagacatataatgcatgagcgtggtgtgaagaaggttccaggattcagttggattgaggtgcagaacaaagtccacactttctcagtgggtgattctgtgcatcctgaaagagaggacatatatgctttcctggaagatcttgacatcaggatgaaaaaggctggatatgtatcagctacagatatggttttgcatgatgttgaggaggaagagaaagagcacatgctaaagtatcatagcgagaagcttgctgttgcttatggtattctaaaaattcctcctgggaggcccatccgggtgataaagaacctgagagtatgcagagactgtcacactgctttcaagtgtatctctgcgattgagggaagactgatcatactgcgggattccaaccggtttcaccattttagagatggttcttgttcatgtggtgattactggtgattatgactagatatttcatgcaaagaaattctgaatgaactgcactggacttcgaaatcatgataatgcaatgcatactaaggaccaaaaaagtaggcattctgatgtatggatctagccctgttagccactacccactagaccacctactttgctactggttcaaaaagaaattagcctggtgatctgccacattaaatggctttcagttcattgcttatgtacaagttaacaaatttcaattaaaatgaccatgccaggtagagggcgcactccatttagagatatatccaacaacaggatcatcacaaattcaacaattttgcaagcatcaatcacgagacaaggaaaatgttgatagggctgacccggaccccacattatataggctacaggacgggccttagtagttcccttttggagtgtatactgtgtccagtgatgcagaatgtacaagatctgaaatctctccaagtgaaaggaactgcaaccccatagagcaatgaatgaactaatgagatagttaactcaatcactattaaagactaccctgataaacttctttgtgtcgatctgtttctgagcacacgtgtgactatctgacattcgtcaagctaatggacacaggcattcacaaagagtgcgtccactggtattgaagagaaggtgctgaagttggttgagatagactttccagaggatatgatgagcagtgccctgaagtgcgtgtctataatgtataaatttacaatgttgtgaaaattctgaatacagtgaagcagtcagaaacgttcagagttctgttttaacttttaagtgcagagctctgaatgttctgaaactccggatgttctgttttaacattcagagaattccaaacctttctagcttatggaggcaccgttttcgttttaagcgttgctgataattaatttgcccctaaagtaataattagcgaagtgattg

SEQ ID NO: 68836 - DNA, 3549 bp, Zea Mays
atggcgacgattcttggcgcagatggcgggcgagagagacagcagagaggagagcagggtcggacctttcctggatgtgttgattctccttccatgatggcgagcgagagatcagaggctgagataggacagcgggggcgagtctgttggcgagacagcgtgagagaggagagcgggcgacggcacaagccagaaccacagttcggaaaaccacccatgcttccttcccgccatctccgcgccgccgcgcggcagcgaagccacaggcggccgcccgcccctgccgacgcttgcattacgggcaagcctgatatggaggtcatccggcgcaacagagccatcacggcgcacatgcgtgcgggccgcgttccagacgccgagcgcctattcgccgcgatgccccgccgttccacctccacctacaacaccatgctcgccgggtacgccgccaacggacgcctcccgcaggcgctctccttcttccgttccattccgcgccccgattccttctcctacaacacgctcctgcatgcgctgggggtgtcgtcatcgctcgccgacgtgcgtgctctgttcgacgaaatgcccgtgaaggattccgtgtcctacaacgtcatgatctcatctcacgctaaccatggtctggtctcgctcgcacggcactactttgatctcgccccagagaaggatgctgtctcgtggaatggcatgcttgctgcctatgtccggaacggacggatccaagaggcaagggagctgttcgattcaaggacagagtgggatgcaatttcttggaatgctttgatggctgggtatgtgcagcgcagtcagatagaagaagcgcagaaaatgtttaataaaatgccacagagagatgttgtttcctggaatactatggtgtccggttatgcgaggagaggagatatggctgaggcaagaaggttgtttgatgtggccccaattagagatgtgttcacctggacagctattgtctctggatacgcacaaaatgggatgctcgaagaggccaagagggtgtttgatgccatgccagataagaatgctgtgtcgtggaatgcaatgatggcagcatatgtccagcggaggatgatggaggaggcaaaggagttgtttgatgctatgccctgtaggaatgtggcttcgtggaacacaatgttgacagggtatgctcaggctgggatgctggacgaggcgagagcaatttttggcatgatgccccagaaggatgcagtctcatgggctgcaatgctggctgcgtattcacaaattggtttcagtgaggaaacactgcagttgttcaaagagatgggacgttgtggtgagtgggtgaataggtcagcatttgcttgtgttttgagcacatgtgctgacattgctgcacttgagtgtggaatgcagctgcatagtaggttgattaaggctggttatggggtgggctgctttgttggaaatgcacttctagctatgtacttcaaatgcggaagcatggaggaagctcacagtgcatttgaagagatggaggagagggatgttgtttcgtggaatactatgattgcaggctatgcacgtcatggttttggcaaggaagcacttgaggtttttgataccatgaggaagacatctaccaagccagacgatattactttggttggagtacttgcagcatgtagtcattctggcttggttgagaaagggatttcatacttctattcaatgcaccgggattttggtgtggcaacaaaacctgaacactacacttgtatgatagatcttcttggccgtgctgggcgattggatgaagcagttaatcttatgaaggacatgccttttgagcctgactctaccatgtggggtgcattacttggtgccagtaggatccaccgcaactctgaacttggcaggaatgcagctgagaaaatatttgagttggaacctgaaaatgcaggcatgtatgtcttgctttcaaatatatatgcatcatctggcaaatggcgtgatgtggacaagatgagacatataatgcatgagcgtggtgtgaagaaggttccaggattcagttggattgaggtgcagaacaaagtccacactttctcagtgggtgattctgtgcatcctgaaagagaggacatatatgctttcctggaagatcttgacatcaggatgaaaaaggctggatatgtatcagctacagatatggttttgcatgatgttgaggaggaagagaaagagcacatgctaaagtatcatagcgagaagcttgctgttgcttatggtattctaaaaattcctcctgggaggcccatccgggtgataaagaacctgagagtatgcagagactgtcacactgctttcaagtgtatctctgcgattgagggaagactgatcatactgcgggattccaaccggtttcaccattttagagatggttcttgttcatgtggtgattactggtgattatgactagatatttcatgcaaagaaattctgaatgaactgcactggacttcgaaatcatgataatgcaatgcatactaaggaccaaaaaagtaggcattctgatgtatggatctagccctgttagccactacccactagaccacctactttgctactggttcaaaaagaaattagcctggtgatctgccacattaaatggctttcagttcattggtgagtactgagatccatccatctagaaggaaaagacattgattgagttggtttatttatgatttccctcatcattgcttcctggcttactgccccatgcagcttttgcttatgtacaagttaacaaatttcaattaaaatgaccatgccaggtagagggcgcactccatttagagatatatccaacaacaggatcatcacaaattcaacaattttgcaagcatcaatcacgagacaaggaaaatgttgatagggctgacccggaccccacattatataggctacaggacgggccttagtagttcccttttggagtgtatactgtgtccagtgatgcagaatgtacaagatctgaaatctctccaagtgaaaggaactgcaaccccatagagcaatgaatgaactaatgagatagttaactcaatcactattaaagactaccctgataaacttctttgtgtcgatctgtttctgagcacacgtgtgactatctgacattcgtcaagctaatggacacaggcattcacaaagagtgcgtccactggtattgaagagaaggtgctgaagttggttgagatagactttccagaggatatgatgagcagtgccctgaagtgcgtgtctataatgtataaatttacaatgttgtgaaaattctgaatacagtgaagcagtcagaaacgttcagagttctgttttaacttttaagtgcagagctctgaatgttctgaaactccggatgttctgttttaacattcagagaattccaaacctttctagcttatggaggcaccgttttcgttttaagcgttgctgataattaatttgcccctaaagtaataattagcgaagtgattg

SEQ ID NO: 68837 - DNA, 3506 bp, Zea Mays
atggcgacgattcttggcgcagatggcgggcgagagagacagcagagaggagagcagggtcggacctttcctggatgtgttgattctccttccatgatggcgagcgagagatcagaggctgagataggacagcgggggcgagtctgttggcgagacagcgtgagagaggagagcgggcgacggcacaagccagaaccacagttcggaaaaccacccatgcttccttcccgccatctccgcgccgccgcgcggcagcgaagccacaggcggccgcccgcccctgccgacgcttgcattacgggcaagcctgatatggaggtcatccggcgcaacagagccatcacggcgcacatgcgtgcgggccgcgttccagacgccgagcgcctattcgccgcgatgccccgccgttccacctccacctacaacaccatgctcgccgggtacgccgccaacggacgcctcccgcaggcgctctccttcttccgttccattccgcgccccgattccttctcctacaacacgctcctgcatgcgctgggggtgtcgtcatcgctcgccgacgtgcgtgctctgttcgacgaaatgcccgtgaaggattccgtgtcctacaacgtcatgatctcatctcacgctaaccatggtctggtctcgctcgcacggcactactttgatctcgccccagagaaggatgctgtctcgtggaatggcatgcttgctgcctatgtccggaacggacggatccaagaggcaagggagctgttcgattcaaggacagagtgggatgcaatttcttggaatgctttgatggctgggtatgtgcagcgcagtcagatagaagaagcgcagaaaatgtttaataaaatgccacagagagatgttgtttcctggaatactatggtgtccggttatgcgaggagaggagatatggctgaggcaagaaggttgtttgatgtggccccaattagagatgtgttcacctggacagctattgtctctggatacgcacaaaatgggatgctcgaagaggccaagagggtgtttgatgccatgccagataagaatgctgtgtcgtggaatgcaatgatggcagcatatgtccagcggaggatgatggaggaggcaaaggagttgtttgatgctatgccctgtaggaatgtggcttcgtggaacacaatgttgacagggtatgctcaggctgggatgctggacgaggcgagagcaatttttggcatgatgccccagaaggatgcagtctcatgggctgcaatgctggctgcgtattcacaaattggtttcagtgaggaaacactgcagttgttcaaagagatgggacgttgtggtgagtgggtgaataggtcagcatttgcttgtgttttgagcacatgtgctgacattgctgcacttgagtgtggaatgcagctgcatagtaggttgattaaggctggttatggggtgggctgctttgttggaaatgcacttctagctatgtacttcaaatgcggaagcatggaggaagctcacagtgcatttgaagagatggaggagagggatgttgtttcgtggaatactatgattgcaggctatgcacgtcatggttttggcaaggaagcacttgaggtttttgataccatgaggaagacatctaccaagccagacgatattactttggttggagtacttgcagcatgtagtcattctggcttggttgagaaagggatttcatacttctattcaatgcaccgggattttggtgtggcaacaaaacctgaacactacacttgtatgatagatcttcttggccgtgctgggcgattggatgaagcagttaatcttatgaaggacatgccttttgagcctgactctaccatgtggggtgcattacttggtgccagtaggatccaccgcaactctgaacttggcaggaatgcagctgagaaaatatttgagttggaacctgaaaatgcaggcatgtatgtcttgctttcaaatatatatgcatcatctggcaaatggcgtgatgtggacaagatgagacatataatgcatgagcgtggtgtgaagaaggttccaggattcagttggattgaggtgcagaacaaagtccacactttctcagtgggtgattctgtgcatcctgaaagagaggacatatatgctttcctggaagatcttgacatcaggatgaaaaaggctggatatgtatcagctacagatatggttttgcatgatgttgaggaggaagagaaagagcacatgctaaagtatcatagcgagaagcttgctgttgcttatggtattctaaaaattcctcctgggaggcccatccgggtgataaagaacctgagagtatgcagagactgtcacactgctttcaagtgtatctctgcgattgagggaagactgatcatactgcgggattccaaccggtttcaccattttagagatggttcttgttcatgtggtgattactggtgattatgactagatatttcatgcaaagaaattctgaatgaactgcactggacttcgaaatcatgataatgcaatgcatactaaggaccaaaaaagtaggcattctgatgtatggatctagccctgttagccactacccactagaccacctactttgctactggttcaaaaagaaattagcctggtgatctgccacattaaatggctttcagttcattgcttatgtacaagttaacaaatttcaattaaaatgaccatgccaggtagagggcgcactccatttagagatatatccaacaacaggatcatcacaaggagcaattgctggatcatctgtactggccccacctactcttgagtcttgatatgtttgtttaggattcaacaattttgcaagcatcaatcacgagacaaggaaaatgttgatagggctgacccggaccccacattatataggctacaggacgggccttagtagttcccttttggagtgtatactgtgtccagtgatgcagaatgtacaagatctgaaatctctccaagtgaaaggaactgcaaccccatagagcaatgaatgaactaatgagatagttaactcaatcactattaaagactaccctgataaacttctttgtgtcgatctgtttctgagcacacgtgtgactatctgacattcgtcaagctaatggacacaggcattcacaaagagtgcgtccactggtattgaagagaaggtgctgaagttggttgagatagactttccagaggatatgatgagcagtgccctgaagtgcgtgtctataatgtataaatttacaatgttgtgaaaattctgaatacagtgaagcagtcagaaacgttcagagttctgttttaacttttaagtgcagagctctgaatgttctgaaactccggatgttctgttttaacattcagagaattccaaacctttctagcttatggaggcaccgttttcgttttaagcgttgctgataattaatttgcccctaaagtaataattagcgaagtgattg

SEQ ID NO: 68838 - DNA, 3652 bp, Zea Mays
atggcgacgattcttggcgcagatggcgggcgagagagacagcagagaggagagcagggtcggacctttcctggatgtgttgattctccttccatgatggcgagcgagagatcagaggctgagataggacagcgggggcgagtctgttggcgagacagcgtgagagaggagagcgggcgacggcacaagccagaaccacagttcggaaaaccacccatgcttccttcccgccatctccgcgccgccgcgcggcagcgaagccacaggcggccgcccgcccctgccgacgcttgcattacgggcaagcctgatatggaggtcatccggcgcaacagagccatcacggcgcacatgcgtgcgggccgcgttccagacgccgagcgcctattcgccgcgatgccccgccgttccacctccacctacaacaccatgctcgccgggtacgccgccaacggacgcctcccgcaggcgctctccttcttccgttccattccgcgccccgattccttctcctacaacacgctcctgcatgcgctgggggtgtcgtcatcgctcgccgacgtgcgtgctctgttcgacgaaatgcccgtgaaggattccgtgtcctacaacgtcatgatctcatctcacgctaaccatggtctggtctcgctcgcacggcactactttgatctcgccccagagaaggatgctgtctcgtggaatggcatgcttgctgcctatgtccggaacggacggatccaagaggcaagggagctgttcgattcaaggacagagtgggatgcaatttcttggaatgctttgatggctgggtatgtgcagcgcagtcagatagaagaagcgcagaaaatgtttaataaaatgccacagagagatgttgtttcctggaatactatggtgtccggttatgcgaggagaggagatatggctgaggcaagaaggttgtttgatgtggccccaattagagatgtgttcacctggacagctattgtctctggatacgcacaaaatgggatgctcgaagaggccaagagggtgtttgatgccatgccagataagaatgctgtgtcgtggaatgcaatgatggcagcatatgtccagcggaggatgatggaggaggcaaaggagttgtttgatgctatgccctgtaggaatgtggcttcgtggaacacaatgttgacagggtatgctcaggctgggatgctggacgaggcgagagcaatttttggcatgatgccccagaaggatgcagtctcatgggctgcaatgctggctgcgtattcacaaattggtttcagtgaggaaacactgcagttgttcaaagagatgggacgttgtggtgagtgggtgaataggtcagcatttgcttgtgttttgagcacatgtgctgacattgctgcacttgagtgtggaatgcagctgcatagtaggttgattaaggctggttatggggtgggctgctttgttggaaatgcacttctagctatgtacttcaaatgcggaagcatggaggaagctcacagtgcatttgaagagatggaggagagggatgttgtttcgtggaatactatgattgcaggctatgcacgtcatggttttggcaaggaagcacttgaggtttttgataccatgaggaagacatctaccaagccagacgatattactttggttggagtacttgcagcatgtagtcattctggcttggttgagaaagggatttcatacttctattcaatgcaccgggattttggtgtggcaacaaaacctgaacactacacttgtatgatagatcttcttggccgtgctgggcgattggatgaagcagttaatcttatgaaggacatgccttttgagcctgactctaccatgtggggtgcattacttggtgccagtaggatccaccgcaactctgaacttggcaggaatgcagctgagaaaatatttgagttggaacctgaaaatgcaggcatgtatgtcttgctttcaaatatatatgcatcatctggcaaatggcgtgatgtggacaagatgagacatataatgcatgagcgtggtgtgaagaaggttccaggattcagttggattgaggtgcagaacaaagtccacactttctcagtgggtgattctgtgcatcctgaaagagaggacatatatgctttcctggaagatcttgacatcaggatgaaaaaggctggatatgtatcagctacagatatggttttgcatgatgttgaggaggaagagaaagagcacatgctaaagtatcatagcgagaagcttgctgttgcttatggtattctaaaaattcctcctgggaggcccatccgggtgataaagaacctgagagtatgcagagactgtcacactgctttcaagtgtatctctgcgattgagggaagactgatcatactgcgggattccaaccggtttcaccattttagagatggttcttgttcatgtggtgattactggtgattatgactagatatttcatgcaaagaaattctgaatgaactgcactggacttcgaaatcatgataatgcaatgcatactaaggaccaaaaaagtaggcattctgatgtatggatctagccctgttagccactacccactagaccacctactttgctactggttcaaaaagaaattagcctggtgatctgccacattaaatggctttcagttcattgcttatgtacaagttaacaaatttcaattaaaatgaccatgccaggtagagggcgcactccatttagagatatatccaacaacaggatcatcacaaccgtaactgttgcccttgtgaacgtaaaatgcaatgggataagggtcgtctggtgctgaaatgactgaggaacagagggaagaaaggaatataaagcaacatatgaataccaagcaaagggtaaggctgaaacagaaaaatttcagggagcaattgctggatcatctgtactggccccacctactcttgagtcttgatatgtttgtttaggattcaacaattttgcaagcatcaatcacgagacaaggaaaatgttgatagggctgacccggaccccacattatataggctacaggacgggccttagtagttcccttttggagtgtatactgtgtccagtgatgcagaatgtacaagatctgaaatctctccaagtgaaaggaactgcaaccccatagagcaatgaatgaactaatgagatagttaactcaatcactattaaagactaccctgataaacttctttgtgtcgatctgtttctgagcacacgtgtgactatctgacattcgtcaagctaatggacacaggcattcacaaagagtgcgtccactggtattgaagagaaggtgctgaagttggttgagatagactttccagaggatatgatgagcagtgccctgaagtgcgtgtctataatgtataaatttacaatgttgtgaaaattctgaatacagtgaagcagtcagaaacgttcagagttctgttttaacttttaagtgcagagctctgaatgttctgaaactccggatgttctgttttaacattcagagaattccaaacctttctagcttatggaggcaccgttttcgttttaagcgttgctgataattaatttgcccctaaagtaataattagcgaagtgattg

SEQ ID NO: 68839 - DNA, 3614 bp, Zea Mays
atggcgacgattcttggcgcagatggcgggcgagagagacagcagagaggagagcagggtcggacctttcctggatgtgttgattctccttccatgatggcgagcgagagatcagaggctgagataggacagcgggggcgagtctgttggcgagacagcgtgagagaggagagcgggcgacggcacaagccagaaccacagttcggaaaaccacccatgcttccttcccgccatctccgcgccgccgcgcggcagcgaagccacaggcggccgcccgcccctgccgacgcttgcattacgggcaagcctgatatggaggtcatccggcgcaacagagccatcacggcgcacatgcgtgcgggccgcgttccagacgccgagcgcctattcgccgcgatgccccgccgttccacctccacctacaacaccatgctcgccgggtacgccgccaacggacgcctcccgcaggcgctctccttcttccgttccattccgcgccccgattccttctcctacaacacgctcctgcatgcgctgggggtgtcgtcatcgctcgccgacgtgcgtgctctgttcgacgaaatgcccgtgaaggattccgtgtcctacaacgtcatgatctcatctcacgctaaccatggtctggtctcgctcgcacggcactactttgatctcgccccagagaaggatgctgtctcgtggaatggcatgcttgctgcctatgtccggaacggacggatccaagaggcaagggagctgttcgattcaaggacagagtgggatgcaatttcttggaatgctttgatggctgggtatgtgcagcgcagtcagatagaagaagcgcagaaaatgtttaataaaatgccacagagagatgttgtttcctggaatactatggtgtccggttatgcgaggagaggagatatggctgaggcaagaaggttgtttgatgtggccccaattagagatgtgttcacctggacagctattgtctctggatacgcacaaaatgggatgctcgaagaggccaagagggtgtttgatgccatgccagataagaatgctgtgtcgtggaatgcaatgatggcagcatatgtccagcggaggatgatggaggaggcaaaggagttgtttgatgctatgccctgtaggaatgtggcttcgtggaacacaatgttgacagggtatgctcaggctgggatgctggacgaggcgagagcaatttttggcatgatgccccagaaggatgcagtctcatgggctgcaatgctggctgcgtattcacaaattggtttcagtgaggaaacactgcagttgttcaaagagatgggacgttgtggtgagtgggtgaataggtcagcatttgcttgtgttttgagcacatgtgctgacattgctgcacttgagtgtggaatgcagctgcatagtaggttgattaaggctggttatggggtgggctgctttgttggaaatgcacttctagctatgtacttcaaatgcggaagcatggaggaagctcacagtgcatttgaagagatggaggagagggatgttgtttcgtggaatactatgattgcaggctatgcacgtcatggttttggcaaggaagcacttgaggtttttgataccatgaggaagacatctaccaagccagacgatattactttggttggagtacttgcagcatgtagtcattctggcttggttgagaaagggatttcatacttctattcaatgcaccgggattttggtgtggcaacaaaacctgaacactacacttgtatgatagatcttcttggccgtgctgggcgattggatgaagcagttaatcttatgaaggacatgccttttgagcctgactctaccatgtggggtgcattacttggtgccagtaggatccaccgcaactctgaacttggcaggaatgcagctgagaaaatatttgagttggaacctgaaaatgcaggcatgtatgtcttgctttcaaatatatatgcatcatctggcaaatggcgtgatgtggacaagatgagacatataatgcatgagcgtggtgtgaagaaggttccaggattcagttggattgaggtgcagaacaaagtccacactttctcagtgggtgattctgtgcatcctgaaagagaggacatatatgctttcctggaagatcttgacatcaggatgaaaaaggctggatatgtatcagctacagatatggttttgcatgatgttgaggaggaagagaaagagcacatgctaaagtatcatagcgagaagcttgctgttgcttatggtattctaaaaattcctcctgggaggcccatccgggtgataaagaacctgagagtatgcagagactgtcacactgctttcaagtgtatctctgcgattgagggaagactgatcatactgcgggattccaaccggtttcaccattttagagatggttcttgttcatgtggtgattactggtgattatgactagatatttcatgcaaagaaattctgaatgaactgcactggacttcgaaatcatgataatgcaatgcatactaaggaccaaaaaagtaggcattctgatgtatggatctagccctgttagccactacccactagaccacctactttgctactggttcaaaaagaaattagcctggtgatctgccacattaaatggctttcagttcattggtgagtactgagatccatccatctagaaggaaaagacattgattgagttggtttatttatgatttccctcatcattgcttcctggcttactgccccatgcagcttttgcttatgtacaagttaacaaatttcaattaaaatgaccatgccaggtagagggcgcactccatttagagatatatccaacaacaggatcatcacaaggagcaattgctggatcatctgtactggccccacctactcttgagtcttgatatgtttgtttaggattcaacaattttgcaagcatcaatcacgagacaaggaaaatgttgatagggctgacccggaccccacattatataggctacaggacgggccttagtagttcccttttggagtgtatactgtgtccagtgatgcagaatgtacaagatctgaaatctctccaagtgaaaggaactgcaaccccatagagcaatgaatgaactaatgagatagttaactcaatcactattaaagactaccctgataaacttctttgtgtcgatctgtttctgagcacacgtgtgactatctgacattcgtcaagctaatggacacaggcattcacaaagagtgcgtccactggtattgaagagaaggtgctgaagttggttgagatagactttccagaggatatgatgagcagtgccctgaagtgcgtgtctataatgtataaatttacaatgttgtgaaaattctgaatacagtgaagcagtcagaaacgttcagagttctgttttaacttttaagtgcagagctctgaatgttctgaaactccggatgttctgttttaacattcagagaattccaaacctttctagcttatggaggcaccgttttcgttttaagcgttgctgataattaatttgcccctaaagtaataattagcgaagtgattg

SEQ ID NO: 68840 - DNA, 1094 bp, Zea Mays
ggtgcacacataaaacatcacagcacgcatcactatagctcagaagatccggtccattttccagctctaaaactaaggcatagcggtaaacaccaccgaagtctcagcttctccgaggaaggggagcaattgttgaagcagccacttcaccttggggccatacagaaatggcggcttcttgcgcctccacactccctccactttccttcgtttcctcctccagttcaccccgccgattcaggcgctctggtgtggtggccatggccagcgttgggcagaaggtgtatgcgcccggtgtggcggtgtcggagggcaatggcgggctgccgaaaatcgacctcaaatccccgcacgggagcgaggctgagatttatctgtttggagcgtgtgttacttctttcaaagtccctaatggcaaggacctgctctttgttcgaccagatgctgtgtttaatggacagaaacccatcagcggtggaattccacattgtttcccccagtttggcccaggtcccatgcagcagcatgggtttgcacggaatgtgaattggtctatcacagattcagaagtcacagaaggagatccagctgtaactttggaactgaaagatgacacttatagccgttctatgtgggatttcagcttccatgcactgtacaaggtttccctgcactctaaaagcttgtcaacaactctagcaataataaatacagatgacaagtctttctcattcaactcagccctccacacttatttcagtgcttccataactggcgtttctgtgaaaggtctaaaaggttgcaagactctcaataaggaccctgacccgaaaaatcctttggagggcaaagaagagagggaagaggtgacttttccaggattcgtcgactgcgtctaccttggtgcaccaagtgaactcatcctggacaatggattgggtgacaaaattgccattgcaaattcaaattggtcagatgcagtcttgtggaatcctcacttgcagatggaggcctgctacaaagattttgtctgtgtggaaaacgccaagaaagagaggaaaaagcaagaaatcgtttctaacatggaagcggtg

SEQ ID NO: 68841 - DNA, 1125 bp, Zea Mays
ggtgcacacataaaacatcacagcacgcatcactatagctcagaagatccggtccattttccagctctaaaactaaggcatagcggtaaacaccaccgaagtctcagcttctccgaggaaggggagcaattgttgaagcagccacttcaccttggggccatacagaaatggcggcttcttgcgcctccacactccctccactttccttcgtttcctcctccagttcaccccgccgattcaggcgctctggtgtggtggccatggccagcgttgggcagaaggtgtatgcgcccggtgtggcggtgtcggagggcaatggcgggctgccgaaaatcgacctcaaatccccgcacgggagcgaggctgagatttatctgtttggagcgtgtgttacttctttcaaagtccctaatggcaaggacctgctctttgttcgaccagatgctgtgtttaatggacagaaacccatcagcggtggaattccacattgtttcccccagtttggcccaggtcccatgcagcagattcagaagtcacagaaggagatccagctgtaactttggaactgaaagatgacacttatagccgttctatgtgggatttcagcttccatgcactgtacaagggaagaggtgacttttccaggattcgtcgactgcgtctaccttggtgcaccaagtgaactcatcctggacaatggattgggtgacaaaattgccattgcaaattcaaattggtcagatgcagtcttgtggaatcctcacttgcagatggaggcctgctacaaagattttgtctgtgtggaaaacgccaagattgaaatggtacaactggagccaaaacaatcttgggtggcagaacagaaaattgaactagtctgatgataatgtcttgcagcaactgcatcaagtagagtgagacgcaaatggcgctcccccagtgtcattcttcatggcacatgtcatcacaataactatacatgtgatgttttctgttaaaaagaataaatgatgcaaatcatgaatttttttctagcagtctgatgtgtactgaattgcaaatgtacaatttgaactgcatggatctgttgaaataaagggagtgcccatttgatctttgacatat

SEQ ID NO: 68842 - DNA, 1410 bp, Zea Mays
ggtgcacacataaaacatcacagcacgcatcactatagctcagaagatccggtccattttccagctctaaaactaaggcatagcggtaaacaccaccgaagtctcagcttctccgaggaaggggagcaattgttgaagcagccacttcaccttggggccatacagaaatggcggcttcttgcgcctccacactccctccactttccttcgtttcctcctccagttcaccccgccgattcaggcgctctggtgtggtggccatggccagcgttgggcagaaggtgtatgcgcccggtgtggcggtgtcggagggcaatggcgggctgccgaaaatcgacctcaaatccccgcacgggagcgaggctgagatttatctgtttggagcgtgtgttacttctttcaaagtccctaatggcaaggacctgctctttgttcgaccagatgctgtgtttaatggacagaaacccatcagcggtggaattccacattgtttcccccagtttggcccaggtcccatgcagcagattcagaagtcacagaaggagatccagctgtaactttggaactgaaagatgacacttatagccgttctatgtgggatttcagcttccatgcactgtacaaggtttccctgcactctaaaagcttgtcaacaactctagcaataataaatacagatgacaagtctttctcattcaactcagccctccacacttatttcagtgcttccataactggcgtttctgtgaaaggtctaaaaggttgcaagactctcaataaggaccctgacccgaaaaatcctttggagggcaaagaagagagtatttaggttccctgcgttgcatcaatttcactgtatgtgactgggagcagaaagcaatatttgcaattagtgccacttttgtctaagggaagaggtgacttttccaggattcgtcgactgcgtctaccttggtgcaccaagtgaactcatcctggacaatggattgggtgacaaaattgccattgcaaattcaaattggtcagatgcagtcttgtggaatcctcacttgcagatggaggcctgctacaaagattttgtctgtgtggaaaacgccaagattgaaatggtacaactggagccaaaacaatcttgggtggcagaacagaaaattgaactagtctgatgataatgtcttgcagcaactgcatcaagtagagtgagacgcaaatggcgctcccccagtgtcattcttcatggcacatgtcatcacaataactatacatgtgatgttttctgttaaaaagaataaatgatgcaaatcatgaatttttttctagcagtctgatgtgtactgaattgcaaatgtacaatttgaactgcatggatctgttgaaataaagggagtgcccatttgatctttgacatat

SEQ ID NO: 68843 - DNA, 1381 bp, Zea Mays
ggtgcacacataaaacatcacagcacgcatcactatagctcagaagatccggtccattttccagctctaaaactaaggcatagcggtaaacaccaccgaagtctcagcttctccgaggaaggggagcaattgttgaagcagccacttcaccttggggccatacagaaatggcggcttcttgcgcctccacactccctccactttccttcgtttcctcctccagttcaccccgccgattcaggcgctctggtgtggtggccatggccagcgttgggcagaaggtgtatgcgcccggtgtggcggtgtcggagggcaatggcgggctgccgaaaatcgacctcaaatccccgcacgggagcgaggctgagatttatctgtttggagcgtgtgttacttctttcaaagtccctaatggcaaggacctgctctttgttcgaccagatgctgtgtttaatggacagaaacccatcagcggtggaattccacattgtttcccccagtttggcccaggtcccatgcagcagattcagaagtcacagaaggagatccagctgtaactttggaactgaaagatgacacttatagccgttctatgtgggatttcagcttccatgcactgtacaagaagtggtatccttgtgctctgcagcatacgggtttgagtgtatttaaaaatatgtgcaggtttccctgcactctaaaagcttgtcaacaactctagcaataataaatacagatgacaagtctttctcattcaactcagccctccacacttatttcagtgcttccataactggcgtttctgtgaaaggtctaaaaggttgcaagactctcaataaggaccctgacccgaaaaatcctttggagggcaaagaagagagggaagaggtgacttttccaggattcgtcgactgcgtctaccttggtgcaccaagtgaactcatcctggacaatggattgggtgacaaaattgccattgcaaattcaaattggtcagatgcagtcttgtggaatcctcacttgcagatggaggcctgctacaaagattttgtctgtgtggaaaacgccaagattgaaatggtacaactggagccaaaacaatcttgggtggcagaacagaaaattgaactagtctgatgataatgtcttgcagcaactgcatcaagtagagtgagacgcaaatggcgctcccccagtgtcattcttcatggcacatgtcatcacaataactatacatgtgatgttttctgttaaaaagaataaatgatgcaaatcatgaatttttttctagcagtctgatgtgtactgaattgcaaatgtacaatttgaactgcatggatctgttgaaataaagggagtgcccatttgatctttgacatat

SEQ ID NO: 68844 - DNA, 1322 bp, Zea Mays
ggtgcacacataaaacatcacagcacgcatcactatagctcagaagatccggtccattttccagctctaaaactaaggcatagcggtaaacaccaccgaagtctcagcttctccgaggaaggggagcaattgttgaagcagccacttcaccttggggccatacagaaatggcggcttcttgcgcctccacactccctccactttccttcgtttcctcctccagttcaccccgccgattcaggcgctctggtgtggtggccatggccagcgttgggcagaaggtgtatgcgcccggtgtggcggtgtcggagggcaatggcgggctgccgaaaatcgacctcaaatccccgcacgggagcgaggctgagatttatctgtttggagcgtgtgttacttctttcaaagtccctaatggcaaggacctgctctttgttcgaccagatgctgtgtttaatggacagaaacccatcagcggtggaattccacattgtttcccccagtttggcccaggtcccatgcagcagattcagaagtcacagaaggagatccagctgtaactttggaactgaaagatgacacttatagccgttctatgtgggatttcagcttccatgcactgtacaaggtttccctgcactctaaaagcttgtcaacaactctagcaataataaatacagatgacaagtctttctcattcaactcagccctccacacttatttcagtgcttccataactggcgtttctgtgaaaggtctaaaaggttgcaagactctcaataaggaccctgacccgaaaaatcctttggagggcaaagaagagagggaagaggtgacttttccaggattcgtcgactgcgtctaccttggtgcaccaagtgaactcatcctggacaatggattgggtgacaaaattgccattgcaaattcaaattggtcagatgcagtcttgtggaatcctcacttgcagatggaggcctgctacaaagattttgtctgtgtggaaaacgccaagattgaaatggtacaactggagccaaaacaatcttgggtggcagaacagaaaattgaactagtctgatgataatgtcttgcagcaactgcatcaagtagagtgagacgcaaatggcgctcccccagtgtcattcttcatggcacatgtcatcacaataactatacatgtgatgttttctgttaaaaagaataaatgatgcaaatcatgaatttttttctagcagtctgatgtgtactgaattgcaaatgtacaatttgaactgcatggatctgttgaaataaagggagtgcccatttgatctttgacatat

SEQ ID NO: 68845 - DNA, 1447 bp, Zea Mays
ggtgcacacataaaacatcacagcacgcatcactatagctcagaagatccggtccattttccagctctaaaactaaggcatagcggtaaacaccaccgaagtctcagcttctccgaggaaggggagcaattgttgaagcagccacttcaccttggggccatacagaaatggcggcttcttgcgcctccacactccctccactttccttcgtttcctcctccagttcaccccgccgattcaggcgctctggtgtggtggccatggccagcgttgggcagaaggtgtatgcgcccggtgtggcggtgtcggagggcaatggcgggctgccgaaaatcgacctcaaatccccgcacgggagcgaggctgagatttatctgtttggagcgtgtgttacttctttcaaagtccctaatggcaaggacctgctctttgttcgaccagatgctgtgtttaatggacagaaacccatcagcggtggaattccacattgtttcccccagtttggcccaggtcccatgcagcagcatgggtttgcacggaatgtgaattggtctatcacagattcagaagtcacagaaggagatccagctgtaactttggaactgaaagatgacacttatagccgttctatgtgggatttcagcttccatgcactgtacaaggtttccctgcactctaaaagcttgtcaacaactctagcaataataaatacagatgacaagtctttctcattcaactcagccctccacacttatttcagtgcttccataactggcgtttctgtgaaaggtctaaaaggttgcaagactctcaataaggaccctgacccgaaaaatcctttggagggcaaagaagagagtatttaggttccctgcgttgcatcaatttcactgtatgtgactgggagcagaaagcaatatttgcaattagtgccacttttgtctaagggaagaggtgacttttccaggattcgtcgactgcgtctaccttggtgcaccaagtgaactcatcctggacaatggattgggtgacaaaattgccattgcaaattcaaattggtcagatgcagtcttgtggaatcctcacttgcagatggaggcctgctacaaagattttgtctgtgtggaaaacgccaagattgaaatggtacaactggagccaaaacaatcttgggtggcagaacagaaaattgaactagtctgatgataatgtcttgcagcaactgcatcaagtagagtgagacgcaaatggcgctcccccagtgtcattcttcatggcacatgtcatcacaataactatacatgtgatgttttctgttaaaaagaataaatgatgcaaatcatgaatttttttctagcagtctgatgtgtactgaattgcaaatgtacaatttgaactgcatggatctgttgaaataaagggagtgcccatttgatctttgacatat

SEQ ID NO: 68846 - DNA, 833 bp, Zea Mays
atggctgacggccaggaatcaaggaccgcatcgcggaaggtaagaggaggtttggccttctggagcctgctccttccagaatccggcgagggtgatgaggtcagactggagtccttccaccgctcaaaatggaagcggccacaagaaccaaaggggccaggctcagagaacaaaggggaggtggaaaccaacgtcgagagaaaagggggccaccgcaaaaggcaatcaaacaggacctcagacagagtcaacgcatacggtggtctaagacgagacgatgcgggtaaccaaacatatggtttgtgattcagtccagactcaccgctgaatagagggagtggtaacccaatgggtgacggatctagaatttgactatagggtgatactatctaccatggctagtgcatcacttcttcagtcccgtagtgaatagtgattgagtagaggctggtggactcagttaaatccctcttatgcttttggtgaactgagatggttatcaaactagctatatttggacttatcttgttgtaagactttttaaatatgttgtttatctatcggatttggaacatgtaatatactagctacttatgaacctgaacttataaaataaatgtaatatactagctgtacatgtgaatctgaacttataaaataaattgtgttggatgtatgttgacgtttaattatgtatgatcttggttatgatgttgattatttgagatctttcgtgatacatgatggactactaaatttatacgagactaagtgcaaacgagcatatgtctcaatagtagccgttatatctgtgttcgtgttattgaacagtt

SEQ ID NO: 68847 - DNA, 3303 bp, Zea Mays
ggacgacatccagtccagccatggtcggccccgagatgctcgtcgccgcgacggtgaaccaggtcgttcggaagatcaacgagatcatcggcgtcgcgcagggcgagacgaagctgtgctgcagcttcagcgacgacctcgagggcatcaaggacaccctggtataccttgaaggcctcctcaagaacgcggagagcaactcctttgggagcgatagggcgaacctgcggcactggctgggccagatcaagtctctggcttacgatatcgaagacattgttgatggctactactcctccaaggagcaatatgagggaagcaactatgctcagaagggatctttactctgctctttatccaatcccatgctttcgaagataaatttgaaagagcttaccattatttccatagttgggcctgtgggccttgggaagacaacccttgcacaacttattttcaatgatgcaagagctgagacattcagattcagaatatgggttcatgtctccatgggcaatgtcagcctccaaaaaattgggagagatatagttttgcaaactacagaaaaaattgagggaaacatgcagatgcagtcaatcaagaatgttgttcaagacatacttaataagtatagttgcttaatagtgttagatagcttgtggggaaaagatgaagaagtgaatgagctgaagcagatgttgcttacaggtagaaagactgaaagcaaggtcatagtgaccactcacagcagtaaagtagcagagctgatatccactgtgccaccatacaaactgtctttgttgtcagaagatgattgttcagctatattctgtcaaagggcaattgcaggtcagtctatcagtgacccacttttcagggaatatggagaagaaattgttaggagatgtgaaggcatgcccttggtagccaattttcttggatctgtggtgaatgctcaaagacagaggcgtgagatatggaaagctgcaagggataaagacatgtggaagatagaggaagactaccctgaaaacaaaattgtgccaatgtttccatctttcaagatagtatactacagtatgccccatgagctaaggttatgctttgtctactgttcaatctttcctaaaggatatgtcatagataagaaaaaacttattcagcaatggattgcacttgacatgattgaatccaaacatggaaccttgccgcttgatgttactgctgagaaatacattgatgaacttaaagatatttatctccttcaagttttagagaggcatcagattgatgcagaaatatccaatacttctgaagaaaagctctacatgaataatttggcacatgatcttgctaggtcagttgctggtgaagatatccttgtgatcttagatgctgagaatgtacgctgcaatagaaattatgattaccgttatgcacaagtgtcaacttctagcttacaatcaatagatagcaaggcttggccttccaaggcaaggtcactagttttcaagtcaagtgcagaattgcagcatgtcagcgaagttctttcagtgaacaaatatttgcgtgttttggatatcagtgggtgttctgtgaaggagatgcccgctccaatttttcagatgaaacaactgagatatcttgatgcttcaacattgtccattgcagatctgcctccccaaattagtggctttcctaagctacagacactggatctgtctgatactgaagtaactgagctaccagccttcattgccaacttaaagagactgaattatttgaatctccaaggttgcaagaaacttaagcagttgaataacctagatttgctgcatgagttacattacctaaacttgtcacgttgcctggaagttagaagttttcccgcatctctgaaaaatcttaggaaacttcgttttctgaacctttcgcaatgttctaagcttccaacattacctgatgaattattgcaatcattctctagtttttcttccattgtggatttaaacttaagtggatttgagttccaaatgctacctgacttttttggcaacatttgttcacttcagtttttgagtctgtcaaaatgctcaaaacttgagctactcccccaatcatttggtcagcttgcatatttgaaaggtctggacctttcattttgttctgatcttaaactcccagagtcctttaagtacctttcttctcttcagtttctaaatctatcacactgccataatgtagaatatctgccatcttttgacaaacttagtaatttggagtatcttaatttatcacaatgtgctggactcaaagcattacctaagtcactttcaaaccaaaaaaatctccaaattgaggtttttgggtgccaggattgcatagtgcagtcatgttatttaagcccacagtcccatacatgctcacaagaagtcaaggaagttggatcaagtagtgatatctcagataccattctaaaggagtctgcaaacagagatgtggcattaggaataagttttccagaaattgatgaagttggttatccacataataatctgaaacaaaaattgacattatcttatcatatggatggacataaaagtgaagagcctaatttcattaccaagaactcaactacagagacggtacaactaacccccaggcaccagttcccatcatctacatgtcgtatttcttcgattgcatcaagttctagtgcactatttgcatctggctcctcttcagatgtctcgataacttacaatccagtgtccaatgacaaagcaggcaatcaaacaggacctcagacagagtcaacgcatacggtggtctaagacgagacgatgcgggtgatactatctaccatggctagtgcatcacttcttcagtcccgtagtgaatagtgattgagtagaggctggtggactcagttaaatccctcttatgcttttggtgaactgagatggttatcaaactagctatatttggacttatcttgttgtaagactttttaaatatgttgtttatctatcggatttggaacatgtaatatactagctacttatgaacctgaacttataaaataaatgtaatatactagctgtacatgtgaatctgaacttataaaataaattgtgttggatgtatgttgacgtttaattatgtatgatcttggttatgatgttgattatttgagatctttcgtgatacatgatggactactaaatttatacgagactaagtgcaaacgagcatatgtctcaatagtagccgttatatctgtgttcgtgttattgaacagtt

SEQ ID NO: 68848 - DNA, 3386 bp, Zea Mays
cccacctctgcccacggtccacgggacgacatccagtccagccatggtcggccccgagatgctcgtcgccgcgacggtgaaccaggtcgttcggaagatcaacgagatcatcggcgtcgcgcagggcgagacgaagctgtgctgcagcttcagcgacgacctcgagggcatcaaggacaccctggtataccttgaaggcctcctcaagaacgcggagagcaactcctttgggagcgatagggcgaacctgcggcactggctgggccagatcaagtctctggcttacgatatcgaagacattgttgatggctactactcctccaaggagcaatatgagggaagcaactatgctcagaagggatctttactctgctctttatccaatcccatgctttcgaaggttagcatggttcataagatgaaatccaagagggagttgttacagacaaggcaaaatttaccgacccagtatcatttcatctcacatattaactcagtggtaaattatgatgagaagcagacaacatcatacagaaattgtgacatcagaattgttgggaggggtccagacttggagcatcttatgtacatgttaatgcagataaatttgaaagagcttaccattatttccatagttgggcctgtgggccttgggaagacaacccttgcacaacttattttcaatgatgcaagagctgagacattcagattcagaatatgggttcatgtctccatgggcaatgtcagcctccaaaaaattgggagagatatagttttgcaaactacagaaaaaattgagggaaacatgcagatgcagtcaatcaagaatgttgttcaagacatacttaataagtatagttgcttaatagtgttagatagcttgtggggaaaagatgaagaagtgaatgagctgaagcagatgttgcttacaggtagaaagactgaaagcaaggtcatagtgaccactcacagcagtaaagtagcagagctgatatccactgtgccaccatacaaactgtctttgttgtcagaagatgattgttcagctatattctgtcaaagggcaattgcaggtcagtctatcagtgacccacttttcagggaatatggagaagaaattgttaggagatgtgaaggcatgcccttggtagccaattttcttggatctgtggtgaatgctcaaagacagaggcgtgagatatggaaagctgcaagggataaagacatgtggaagatagaggaagactaccctgaaaacaaaattgtgccaatgtttccatctttcaagatagtatactacagtatgccccatgagctaaggttatgctttgtctactgttcaatctttcctaaaggatatgtcatagataagaaaaaacttattcagcaatggattgcacttgacatgattgaatccaaacatggaaccttgccgcttgatgttactgctgagaaatacattgatgaacttaaagatatttatctccttcaagttttagagaggcatcagattgatgcagaaatatccaatacttctgaagaaaagctctacatgaataatttggcacatgatcttgctaggtcagttgctggtgaagatatccttgtgatcttagatgctgagaatgtacgctgcaatagaaattatgattaccatctgcctccccaaattagtggctttcctaagctacagacactggatctgtctgatactgaagtaactgagctaccagccttcattgccaacttaaagagactgaattatttgaatctccaaggttgcaagaaacttaagcagttgaataacctagatttgctgcatgagttacattacctaaacttgtcacgttgcctggaagttagaagttttcccgcatctctgaaaaatcttaggaaacttcgttttctgaacctttcgcaatgttctaagcttccaacattacctgatgaattattgcaatcattctctagtttttcttccattgtggatttaaacttaagtggatttgagttccaaatgctacctgacttttttggcaacatttgttcacttcagtttttgagtctgtcaaaatgctcaaaacttgagctactcccccaatcatttggtcagcttgcatatttgaaaggtctggacctttcattttgttctgatcttaaactcccagagtcctttaagtacctttcttctcttcagtttctaaatctatcacactgccataatgtagaatatctgccatcttttgacaaacttagtaatttggagtatcttaatttatcacaatgtgctggactcaaagcattacctaagtcactttcaaaccaaaaaaatctccaaattgaggtttttgggtgccaggattgcatagtgcagtcatgttatttaagcccacagtcccatacatgctcacaagaagtcaaggaagttggatcaagtagtgatatctcagataccattctaaaggagtctgcaaacagagatgtggcattaggaataagttttccagaaattgatgaagttggttatccacataataatctgaaacaaaaattgacattatcttatcatatggatggacataaaagtgaagagcctaatttcattaccaagcagaactcaactacagagacggtacaactaacccccaggcaccagttcccatcatctacatgtcgtatttcttcgattgcatcaagttctagtgcactatttgcatctggctcctcttcagatgtctcgataacttacaatccagtgtccaatgacaaagcaggcaatcaaacaggacctcagacagagtcaacgcatacggtggtctaagacgagacgatgcgggtaaccaaacatatggtttgtgattcagtccagactcaccgctgaatagagggagtggtaacccaatgggtgacggatctagaatttgactatagggtgatactatctaccatggctagtgcatcacttcttcagtcccgtagtgaatagtgattgagtagaggctggtggactcagttaaatccctcttatgcttttggtgaactgagatggttatcaaactagctatatttggacttatcttgttgtaagactttttaaatatgttgtttatctatcggatttggaacatgtaatatactagctacttatgaacctgaacttataaaataaatgtaatatactagctgtacatgtgaatctgaacttataaaataaattgtgttggatgtatgttgacgtttaattatgtatgatcttggttatgatgttgattatttgagatctttcgtgatacatgatggactactaaatttatacgagactaagtgcaaacgagcatatgtctcaatagtagccgttatatctgtgttcgtgttattgaacagtt

SEQ ID NO: 68849 - DNA, 3196 bp, Zea Mays
ctccctgtcctcccacctctgcccacggtccacgggacgacatccagtccagccatggtcggccccgagatgctcgtcgccgcgacggtgaaccaggtcgttcggaagatcaacgagatcatcggcgtcgcgcagggcgagacgaagctgtgctgcagcttcagcgacgacctcgagggcatcaaggacaccctggtataccttgaaggcctcctcaagaacgcggagagcaactcctttgggagcgatagggcgaacctgcggcactggctgggccagatcaagtctctggcttacgatatcgaagacattgttgatggctactactcctccaaggagcaatatgagggaagcaactatgctcagaagggatctttactctgctctttatccaatcccatgctttcgaagataaatttgaaagagcttaccattatttccatagttgggcctgtgggccttgggaagacaacccttgcacaacttattttcaatgatgcaagagctgagacattcagattcagaatatgggttcatgtctccatgggcaatgtcagcctccaaaaaattgggagagatatagttttgcaaactacagaaaaaattgagggaaacatgcagatgcagtcaatcaagaatgttgttcaagacatacttaataagtatagttgcttaatagtgttagatagcttgtggggaaaagatgaagaagtgaatgagctgaagcagatgttgcttacaggtagaaagactgaaagcaaggtcatagtgaccactcacagcagtaaagtagcagagctgatatccactgtgccaccatacaaactgtctttgttgtcagaagatgattgttcagctatattctgtcaaagggcaattgcaggtcagtctatcagtgacccacttttcagggaatatggagaagaaattgttaggagatgtgaaggcatgcccttggtagccaattttcttggatctgtggtgaatgctcaaagacagaggcgtgagatatggaaagctgcaagggataaagacatgtggaagatagaggaagactaccctgaaaacaaaattgtgccaatgtttccatctttcaagatagtatactacagtatgccccatgagctaaggttatgctttgtctactgttcaatctttcctaaaggatatgtcatagataagaaaaaacttattcagcaatggattgcacttgacatgattgaatccaaacatggaaccttgccgcttgatgttactgctgagaaatacattgatgaacttaaagatatttatctccttcaagttttagagaggcatcagattgatgcagaaatatccaatacttctgaagaaaagctctacatgaataatttggcacatgatcttgctaggtcagttgctggtgaagatatccttgtgatcttagatgctgagaatgtacgctgcaatagaaattatgattaccatctgcctccccaaattagtggctttcctaagctacagacactggatctgtctgatactgaagtaactgagctaccagccttcattgccaacttaaagagactgaattatttgaatctccaaggttgcaagaaacttaagcagttgaataacctagatttgctgcatgagttacattacctaaacttgtcacgttgcctggaagttagaagttttcccgcatctctgaaaaatcttaggaaacttcgttttctgaacctttcgcaatgttctaagcttccaacattacctgatgaattattgcaatcattctctagtttttcttccattgtggatttaaacttaagtggatttgagttccaaatgctacctgacttttttggcaacatttgttcacttcagtttttgagtctgtcaaaatgctcaaaacttgagctactcccccaatcatttggtcagcttgcatatttgaaaggtctggacctttcattttgttctgatcttaaactcccagagtcctttaagtacctttcttctcttcagtttctaaatctatcacactgccataatgtagaatatctgccatcttttgacaaacttagtaatttggagtatcttaatttatcacaatgtgctggactcaaagcattacctaagtcactttcaaaccaaaaaaatctccaaattgaggtttttgggtgccaggattgcatagtgcagtcatgttatttaagcccacagtcccatacatgctcacaagaagtcaaggaagttggatcaagtagtgatatctcagataccattctaaaggagtctgcaaacagagatgtggcattaggaataagttttccagaaattgatgaagttggttatccacataataatctgaaacaaaaattgacattatcttatcatatggatggacataaaagtgaagagcctaatttcattaccaagcagaactcaactacagagacggtacaactaacccccaggcaccagttcccatcatctacatgtcgtatttcttcgattgcatcaagttctagtgcactatttgcatctggctcctcttcagatgtctcgataacttacaatccagtgtccaatgacaaagcaggcaatcaaacaggacctcagacagagtcaacgcatacggtggtctaagacgagacgatgcgggtaaccaaacatatggtttgtgattcagtccagactcaccgctgaatagagggagtggtaacccaatgggtgacggatctagaatttgactatagggtgatactatctaccatggctagtgcatcacttcttcagtcccgtagtgaatagtgattgagtagaggctggtggactcagttaaatccctcttatgcttttggtgaactgagatggttatcaaactagctatatttggacttatcttgttgtaagactttttaaatatgttgtttatctatcggatttggaacatgtaatatactagctacttatgaacctgaacttataaaataaatgtaatatactagctgtacatgtgaatctgaacttataaaataaattgtgttggatgtatgttgacgtttaattatgtatgatcttggttatgatgttgattatttgagatctttcgtgatacatgatggactactaaatttatacgagactaagtgcaaacgagcatatgtctcaatagtagccgttatatctgtgttcgtgttattgaacagtt

SEQ ID NO: 68850 - DNA, 3482 bp, Zea Mays
cgtctccctgtcctcccacctctgcccacggtccacgggacgacatccagtccagccatggtcggccccgagatgctcgtcgccgcgacggtgaaccaggtcgttcggaagatcaacgagatcatcggcgtcgcgcagggcgagacgaagctgtgctgcagcttcagcgacgacctcgagggcatcaaggacaccctggtataccttgaaggcctcctcaagaacgcggagagcaactcctttgggagcgatagggcgaacctgcggcactggctgggccagatcaagtctctggcttacgatatcgaagacattgttgatggctactactcctccaaggagcaatatgagggaagcaactatgctcagaagggatctttactctgctctttatccaatcccatgctttcgaaggttagcatggttcataagatgaaatccaagagggagttgttacagacaaggcaaaatttaccgacccagtatcatttcatctcacatattaactcagtggtaaattatgatgagaagcagacaacatcatacagaaattgtgacatcagaattgttgggaggggtccagacttggagcatcttatgtacatgttaatgcagataaatttgaaagagcttaccattatttccatagttgggcctgtgggccttgggaagacaacccttgcacaacttattttcaatgatgcaagagctgagacattcagattcagaatatgggttcatgtctccatgggcaatgtcagcctccaaaaaattgggagagatatagttttgcaaactacagaaaaaattgagggaaacatgcagatgcagtcaatcaagaatgttgttcaagacatacttaataagtatagttgcttaatagtgttagatagcttgtggggaaaagatgaagaagtgaatgagctgaagcagatgttgcttacaggtagaaagactgaaagcaaggtcatagtgaccactcacagcagtaaagtagcagagctgatatccactgtgccaccatacaaactgtctttgttgtcagaagatgattgttcagctatattctgtcaaagggcaattgcaggtcagtctatcagtgacccacttttcagggaatatggagaagaaattgttaggagatgtgaaggcatgcccttggtagccaattttcttggatctgtggtgaatgctcaaagacagaggcgtgagatatggaaagctgcaagggataaagacatgtggaagatagaggaagactaccctgaaaacaaaattgtgccaatgtttccatctttcaagatagtatactacagtatgccccatgagctaaggttatgctttgtctactgttcaatctttcctaaaggatatgtcatagataagaaaaaacttattcagcaatggattgcacttgacatgattgaatccaaacatggaaccttgccgcttgatgttactgctgagaaatacattgatgaacttaaagatatttatctccttcaagttttagagaggcatcagattgatgcagaaatatccaatacttctgaagaaaagctctacatgaataatttggcacatgatcttgctaggtcagttgctggtgaagatatccttgtgatcttagatgctgagaatgtacgctgcaatagaaattatgattaccgttatgcacaagtgtcaacttctagcttacaatcaatagatagcaaggcttggccttccaaggcaaggtcactagttttcaagtcaagtgcagaattgcagcatgtcagcgaagttctttcagtgaacaaatatttgcgtgttttggatatcagtgggtgttctgtgaaggagatgcccgctccaatttttcagatgaaacaactgagatatcttgatgcttcaacattgtccattgcagatctgcctccccaaattagtggctttcctaagctacagacactggatctgtctgatactgaagtaactgagctaccagccttcattgccaacttaaagagactgaattatttgaatctccaaggttgcaagaaacttaagcagttgaataacctagatttgctgcatgagttacattacctaaacttgtcacgttgcctggaagttagaagttttcccgcatctctgaaaaatcttaggaaacttcgttttctgaacctttcgcaatgttctaagcttccaacattacctgatgaattattgcaatcattctctagtttttcttccattgtggatttaaacttaagtggatttgagttccaaatgctacctgacttttttggcaacatttgttcacttcagtttttgagtctgtcaaaatgctcaaaacttgagctactcccccaatcatttggtcagcttgcatatttgaaaggtctggacctttcattttgttctgatcttaaactcccagagtcctttaagtacctttcttctcttcagtttctaaatctatcacactgccataatgtagaatatctgccatcttttgacaaacttagtaatttggagtatcttaatttatcacaatgtgctggactcaaagcattacctaagtcactttcaaaccaaaaaaatctccaaattgaggtttttgggtgccaggattgcatagtgcagtcatgttatttaagcccacagtcccatacatgctcacaagaagtcaaggaagttggatcaagtagtgatatctcagataccattctaaaggagtctgcaaacagagatgtggcattaggaataagttttccagaaattgatgaagttggttatccacataataatctgaaacaaaaattgacattatcttatcatatggatggacataaaagtgaagagcctaatttcattaccaagcagaactcaactacagagacggtacaactaacccccaggcaccagttcccatcatctacatgtcgtatttcttcgattgcatcaagttctagtgcactatttgcatctggctcctcttcagatgtctcgataacttacaatccagtgtccaatgacaaagcaggtgatactatctaccatggctagtgcatcacttcttcagtcccgtagtgaatagtgattgagtagaggctggtggactcagttaaatccctcttatgcttttggtgaactgagatggttatcaaactagctatatttggacttatcttgttgtaagactttttaaatatgttgtttatctatcggatttggaacatgtaatatactagctacttatgaacctgaacttataaaataaatgtaatatactagctgtacatgtgaatctgaacttataaaataaattgtgttggatgtatgttgacgtttaattatgtatgatcttggttatgatgttgattatttgagatctttcgtgatacatgatggactactaaatttatacgagactaagtgcaaacgagcatatgtctcaatagtagccgttatatctgtgttcgtgttattgaacagtt

SEQ ID NO: 68851 - DNA, 3438 bp, Zea Mays
gtcgtctccctgtcctcccacctctgcccacggtccacgggacgacatccagtccagccatggtcggccccgagatgctcgtcgccgcgacggtgaaccaggtcgttcggaagatcaacgagatcatcggcgtcgcgcagggcgagacgaagctgtgctgcagcttcagcgacgacctcgagggcatcaaggacaccctggtataccttgaaggcctcctcaagaacgcggagagcaactcctttgggagcgatagggcgaacctgcggcactggctgggccagatcaagtctctggcttacgatatcgaagacattgttgatggctactactcctccaaggagcaatatgagggaagcaactatgctcagaagggatctttactctgctctttatccaatcccatgctttcgaagataaatttgaaagagcttaccattatttccatagttgggcctgtgggccttgggaagacaacccttgcacaacttattttcaatgatgcaagagctgagacattcagattcagaatatgggttcatgtctccatgggcaatgtcagcctccaaaaaattgggagagatatagttttgcaaactacagaaaaaattgagggaaacatgcagatgcagtcaatcaagaatgttgttcaagacatacttaataagtatagttgcttaatagtgttagatagcttgtggggaaaagatgaagaagtgaatgagctgaagcagatgttgcttacaggtagaaagactgaaagcaaggtcatagtgaccactcacagcagtaaagtagcagagctgatatccactgtgccaccatacaaactgtctttgttgtcagaagatgattgttcagctatattctgtcaaagggcaattgcaggtcagtctatcagtgacccacttttcagggaatatggagaagaaattgttaggagatgtgaaggcatgcccttggtagccaattttcttggatctgtggtgaatgctcaaagacagaggcgtgagatatggaaagctgcaagggataaagacatgtggaagatagaggaagactaccctgaaaacaaaattgtgccaatgtttccatctttcaagatagtatactacagtatgccccatgagctaaggttatgctttgtctactgttcaatctttcctaaaggatatgtcatagataagaaaaaacttattcagcaatggattgcacttgacatgattgaatccaaacatggaaccttgccgcttgatgttactgctgagaaatacattgatgaacttaaagatatttatctccttcaagttttagagaggcatcagattgatgcagaaatatccaatacttctgaagaaaagctctacatgaataatttggcacatgatcttgctaggtcagttgctggtgaagatatccttgtgatcttagatgctgagaatgtacgctgcaatagaaattatgattaccgttatgcacaagtgtcaacttctagcttacaatcaatagatagcaaggcttggccttccaaggcaaggtcactagttttcaagtcaagtgcagaattgcagcatgtcagcgaagttctttcagtgaacaaatatttgcgtgttttggatatcagtgggtgttctgtgaaggagatgcccgctccaatttttcagatgaaacaactgagatatcttgatgcttcaacattgtccattgcagatctgcctccccaaattagtggctttcctaagctacagacactggatctgtctgatactgaagtaactgagctaccagccttcattgccaacttaaagagactgaattatttgaatctccaaggttgcaagaaacttaagcagttgaataacctagatttgctgcatgagttacattacctaaacttgtcacgttgcctggaagttagaagttttcccgcatctctgaaaaatcttaggaaacttcgttttctgaacctttcgcaatgttctaagcttccaacattacctgatgaattattgcaatcattctctagtttttcttccattgtggatttaaacttaagtggatttgagttccaaatgctacctgacttttttggcaacatttgttcacttcagtttttgagtctgtcaaaatgctcaaaacttgagctactcccccaatcatttggtcagcttgcatatttgaaaggtctggacctttcattttgttctgatcttaaactcccagagtcctttaagtacctttcttctcttcagtttctaaatctatcacactgccataatgtagaatatctgccatcttttgacaaacttagtaatttggagtatcttaatttatcacaatgtgctggactcaaagcattacctaagtcactttcaaaccaaaaaaatctccaaattgaggtttttgggtgccaggattgcatagtgcagtcatgttatttaagcccacagtcccatacatgctcacaagaagtcaaggaagttggatcaagtagtgatatctcagataccattctaaaggagtctgcaaacagagatgtggcattaggaataagttttccagaaattgatgaagttggttatccacataataatctgaaacaaaaattgacattatcttatcatatggatggacataaaagtgaagagcctaatttcattaccaagaactcaactacagagacggtacaactaacccccaggcaccagttcccatcatctacatgtcgtatttcttcgattgcatcaagttctagtgcactatttgcatctggctcctcttcagatgtctcgataacttacaatccagtgtccaatgacaaagcaggcaatcaaacaggacctcagacagagtcaacgcatacggtggtctaagacgagacgatgcgggtaaccaaacatatggtttgtgattcagtccagactcaccgctgaatagagggagtggtaacccaatgggtgacggatctagaatttgactatagggtgatactatctaccatggctagtgcatcacttcttcagtcccgtagtgaatagtgattgagtagaggctggtggactcagttaaatccctcttatgcttttggtgaactgagatggttatcaaactagctatatttggacttatcttgttgtaagactttttaaatatgttgtttatctatcggatttggaacatgtaatatactagctacttatgaacctgaacttataaaataaatgtaatatactagctgtacatgtgaatctgaacttataaaataaattgtgttggatgtatgttgacgtttaattatgtatgatcttggttatgatgttgattatttgagatctttcgtgatacatgatggactactaaatttatacgagactaagtgcaaacgagcatatgtctcaatagtagccgttatatctgtgttcgtgttattgaacagtt

SEQ ID NO: 68852 - DNA, 3706 bp, Zea Mays
caccgctactgctaggatcatagtcgtctccctgtcctcccacctctgcccacggtccacgggacgacatccagtccagccatggtcggccccgagatgctcgtcgccgcgacggtgaaccaggtcgttcggaagatcaacgagatcatcggcgtcgcgcagggcgagacgaagctgtgctgcagcttcagcgacgacctcgagggcatcaaggacaccctggtataccttgaaggcctcctcaagaacgcggagagcaactcctttgggagcgatagggcgaacctgcggcactggctgggccagatcaagtctctggcttacgatatcgaagacattgttgatggctactactcctccaaggagcaatatgagggaagcaactatgctcagaagtgaatgcaaacttacagagtaaatgtggttgcaaattttcagggatctttactctgctctttatccaatcccatgctttcgaaggttagcatggttcataagatgaaatccaagagggagttgttacagacaaggcaaaatttaccgacccagtatcatttcatctcacatattaactcagtggtaaattatgatgagaagcagacaacatcatacagaaattgtgacatcagaattgttgggaggggtccagacttggagcatcttatgtacatgttaatgcagataaatttgaaagagcttaccattatttccatagttgggcctgtgggccttgggaagacaacccttgcacaacttattttcaatgatgcaagagctgagacattcagattcagaatatgggttcatgtctccatgggcaatgtcagcctccaaaaaattgggagagatatagttttgcaaactacagaaaaaattgagggaaacatgcagatgcagtcaatcaagaatgttgttcaagacatacttaataagtatagttgcttaatagtgttagatagcttgtggggaaaagatgaagaagtgaatgagctgaagcagatgttgcttacaggtagaaagactgaaagcaaggtcatagtgaccactcacagcagtaaagtagcagagctgatatccactgtgccaccatacaaactgtctttgttgtcagaagatgattgttcagctatattctgtcaaagggcaattgcaggtcagtctatcagtgacccacttttcagggaatatggagaagaaattgttaggagatgtgaaggcatgcccttggtagccaattttcttggatctgtggtgaatgctcaaagacagaggcgtgagatatggaaagctgcaagggataaagacatgtggaagatagaggaagactaccctgaaaacaaaattgtgccaatgtttccatctttcaagatagtatactacagtatgccccatgagctaaggttatgctttgtctactgttcaatctttcctaaaggatatgtcatagataagaaaaaacttattcagcaatggattgcacttgacatgattgaatccaaacatggaaccttgccgcttgatgttactgctgagaaatacattgatgaacttaaagatatttatctccttcaagttttagagaggcatcagattgatgcagaaatatccaatacttctgaagaaaagctctacatgaataatttggcacatgatcttgctaggtcagttgctggtgaagatatccttgtgatcttagatgctgagaatgtacgctgcaatagaaattatgattaccgttatgcacaagtgtcaacttctagcttacaatcaatagatagcaaggcttggccttccaaggcaaggtcactagttttcaagtcaagtgcagaattgcagcatgtcagcgaagttctttcagtgaacaaatatttgcgtgttttggatatcagtgggtgttctgtgaaggagatgcccgctccaatttttcagatgaaacaactgagatatcttgatgcttcaacattgtccattgcagatctgcctccccaaattagtggctttcctaagctacagacactggatctgtctgatactgaagtaactgagctaccagccttcattgccaacttaaagagactgaattatttgaatctccaaggttgcaagaaacttaagcagttgaataacctagatttgctgcatgagttacattacctaaacttgtcacgttgcctggaagttagaagttttcccgcatctctgaaaaatcttaggaaacttcgttttctgaacctttcgcaatgttctaagcttccaacattacctgatgaattattgcaatcattctctagtttttcttccattgtggatttaaacttaagtggatttgagttccaaatgctacctgacttttttggcaacatttgttcacttcagtttttgagtctgtcaaaatgctcaaaacttgagctactcccccaatcatttggtcagcttgcatatttgaaaggtctggacctttcattttgttctgatcttaaactcccagagtcctttaagtacctttcttctcttcagtttctaaatctatcacactgccataatgtagaatatctgccatcttttgacaaacttagtaatttggagtatcttaatttatcacaatgtgctggactcaaagcattacctaagtcactttcaaaccaaaaaaatctccaaattgaggtttttgggtgccaggattgcatagtgcagtcatgttatttaagcccacagtcccatacatgctcacaagaagtcaaggaagttggatcaagtagtgatatctcagataccattctaaaggagtctgcaaacagagatgtggcattaggaataagttttccagaaattgatgaagttggttatccacataataatctgaaacaaaaattgacattatcttatcatatggatggacataaaagtgaagagcctaatttcattaccaagcagaactcaactacagagacggtacaactaacccccaggcaccagttcccatcatctacatgtcgtatttcttcgattgcatcaagttctagtgcactatttgcatctggctcctcttcagatgtctcgataacttacaatccagtgtccaatgacaaagcaggcaatcaaacaggacctcagacagagtcaacgcatacggtggtctaagacgagacgatgcgggtaaccaaacatatggtttgtgattcagtccagactcaccgctgaatagagggagtggtaacccaatgggtgacggatctagaatttgactatagggtgatactatctaccatggctagtgcatcacttcttcagtcccgtagtgaatagtgattgagtagaggctggtggactcagttaaatccctcttatgcttttggtgaactgagatggttatcaaactagctatatttggacttatcttgttgtaagactttttaaatatgttgtttatctatcggatttggaacatgtaatatactagctacttatgaacctgaacttataaaataaatgtaatatactagctgtacatgtgaatctgaacttataaaataaattgtgttggatgtatgttgacgtttaattatgtatgatcttggttatgatgttgattatttgagatctttcgtgatacatgatggactactaaatttatacgagactaagtgcaaacgagcatatgtctcaatagtagccgttatatctgtgttcgtgttattgaacagtt

SEQ ID NO: 68853 - DNA, 3570 bp, Zea Mays
ctcaccgctactgctaggatcatagtcgtctccctgtcctcccacctctgcccacggtccacgggacgacatccagtccagccatggtcggccccgagatgctcgtcgccgcgacggtgaaccaggtcgttcggaagatcaacgagatcatcggcgtcgcgcagggcgagacgaagctgtgctgcagcttcagcgacgacctcgagggcatcaaggacaccctggtataccttgaaggcctcctcaagaacgcggagagcaactcctttgggagcgatagggcgaacctgcggcactggctgggccagatcaagtctctggcttacgatatcgaagacattgttgatggctactactcctccaaggagcaatatgagggaagcaactatgctcagaagggatctttactctgctctttatccaatcccatgctttcgaaggttagcatggttcataagatgaaatccaagagggagttgttacagacaaggcaaaatttaccgacccagtatcatttcatctcacatattaactcagtggtaaattatgatgagaagcagacaacatcatacagaaattgtgacatcagaattgttgggaggggtccagacttggagcatcttatgtacatgttaatgcagataaatttgaaagagcttaccattatttccatagttgggcctgtgggccttgggaagacaacccttgcacaacttattttcaatgatgcaagagctgagacattcagattcagaatatgggttcatgtctccatgggcaatgtcagcctccaaaaaattgggagagatatagttttgcaaactacagaaaaaattgagggaaacatgcagatgcagtcaatcaagaatgttgttcaagacatacttaataagtatagttgcttaatagtgttagatagcttgtggggaaaagatgaagaagtgaatgagctgaagcagatgttgcttacaggtagaaagactgaaagcaaggtcatagtgaccactcacagcagtaaagtagcagagctgatatccactgtgccaccatacaaactgtctttgttgtcagaagatgattgttcagctatattctgtcaaagggcaattgcaggtcagtctatcagtgacccacttttcagggaatatggagaagaaattgttaggagatgtgaaggcatgcccttggtagccaattttcttggatctgtggtgaatgctcaaagacagaggcgtgagatatggaaagctgcaagggataaagacatgtggaagatagaggaagactaccctgaaaacaaaattgtgccaatgtttccatctttcaagatagtatactacagtatgccccatgagctaaggttatgctttgtctactgttcaatctttcctaaaggatatgtcatagataagaaaaaacttattcagcaatggattgcacttgacatgattgaatccaaacatggaaccttgccgcttgatgttactgctgagaaatacattgatgaacttaaagatatttatctccttcaagttttagagaggcatcagattgatgcagaaatatccaatacttctgaagaaaagctctacatgaataatttggcacatgatcttgctaggtcagttgctggtgaagatatccttgtgatcttagatgctgagaatgtacgctgcaatagaaattatgattaccgttatgcacaagtgtcaacttctagcttacaatcaatagatagcaaggcttggccttccaaggcaaggtcactagttttcaagtcaagtgcagaattgcagcatgtcagcgaagttctttcagtgaacaaatatttgcgtgttttggatatcagtgggtgttctgtgaaggagatgcccgctccaatttttcagatgaaacaactgagatatcttgatgcttcaacattgtccattgcagatctgcctccccaaattagtggctttcctaagctacagacactggatctgtctgatactgaagtaactgagctaccagccttcattgccaacttaaagagactgaattatttgaatctccaaggttgcaagaaacttaagcagttgaataacctagatttgctgcatgagttacattacctaaacttgtcacgttgcctggaagttagaagttttcccgcatctctgaaaaatcttaggaaacttcgttttctgaacctttcgcaatgttctaagcttccaacattacctgatgaattattgcaatcattctctagtttttcttccattgtggatttaaacttaagtggatttgagttccaaatgctacctgacttttttggcaacatttgttcacttcagtttttgagtctgtcaaaatgctcaaaacttgagctactcccccaatcatttggtcagcttgcatatttgaaaggtctggacctttcattttgttctgatcttaaactcccagagtcctttaagtacctttcttctcttcagtttctaaatctatcacactgccataatgtagaatatctgccatcttttgacaaacttagtaatttggagtatcttaatttatcacaatgtgctggactcaaagcattacctaagtcactttcaaaccaaaaaaatctccaaattgaggtttttgggtgccaggattgcatagtgcagtcatgttatttaagcccacagtcccatacatgctcacaagaagtcaaggaagttggatcaagtagtgatatctcagataccattctaaaggagtctgcaaacagagatgtggcattaggaataagttttccagaaattgatgaagttggttatccacataataatctgaaacaaaaattgacattatcttatcatatggatggacataaaagtgaagagcctaatttcattaccaagcagaactcaactacagagacggtacaactaacccccaggcaccagttcccatcatctacatgtcgtatttcttcgattgcatcaagttctagtgcactatttgcatctggctcctcttcagatgtctcgataacttacaatccagtgtccaatgacaaagcaggcaatcaaacaggacctcagacagagtcaacgcatacggtggtctaagacgagacgatgcgggtgatactatctaccatggctagtgcatcacttcttcagtcccgtagtgaatagtgattgagtagaggctggtggactcagttaaatccctcttatgcttttggtgaactgagatggttatcaaactagctatatttggacttatcttgttgtaagactttttaaatatgttgtttatctatcggatttggaacatgtaatatactagctacttatgaacctgaacttataaaataaatgtaatatactagctgtacatgtgaatctgaacttataaaataaattgtgttggatgtatgttgacgtttaattatgtatgatcttggttatgatgttgattatttgagatctttcgtgatacatgatggactactaaatttatacgagactaagtgcaaacgagcatatgtctcaatagtagccgttatatctgtgttcgtgttattgaacagtt

SEQ ID NO: 68854 - DNA, 3476 bp, Zea Mays
gtggacaccgtctcaccgctactgctaggatcatagtcgtctccctgtcctcccacctctgcccacggtccacgggacgacatccagtccagccatggtcggccccgagatgctcgtcgccgcgacggtgaaccaggtcgttcggaagatcaacgagatcatcggcgtcgcgcagggcgagacgaagctgtgctgcagcttcagcgacgacctcgagggcatcaaggacaccctggtataccttgaaggcctcctcaagaacgcggagagcaactcctttgggagcgatagggcgaacctgcggcactggctgggccagatcaagtctctggcttacgatatcgaagacattgttgatggctactactcctccaaggagcaatatgagggaagcaactatgctcagaagggatctttactctgctctttatccaatcccatgctttcgaagataaatttgaaagagcttaccattatttccatagttgggcctgtgggccttgggaagacaacccttgcacaacttattttcaatgatgcaagagctgagacattcagattcagaatatgggttcatgtctccatgggcaatgtcagcctccaaaaaattgggagagatatagttttgcaaactacagaaaaaattgagggaaacatgcagatgcagtcaatcaagaatgttgttcaagacatacttaataagtatagttgcttaatagtgttagatagcttgtggggaaaagatgaagaagtgaatgagctgaagcagatgttgcttacaggtagaaagactgaaagcaaggtcatagtgaccactcacagcagtaaagtagcagagctgatatccactgtgccaccatacaaactgtctttgttgtcagaagatgattgttcagctatattctgtcaaagggcaattgcaggtcagtctatcagtgacccacttttcagggaatatggagaagaaattgttaggagatgtgaaggcatgcccttggtagccaattttcttggatctgtggtgaatgctcaaagacagaggcgtgagatatggaaagctgcaagggataaagacatgtggaagatagaggaagactaccctgaaaacaaaattgtgccaatgtttccatctttcaagatagtatactacagtatgccccatgagctaaggttatgctttgtctactgttcaatctttcctaaaggatatgtcatagataagaaaaaacttattcagcaatggattgcacttgacatgattgaatccaaacatggaaccttgccgcttgatgttactgctgagaaatacattgatgaacttaaagatatttatctccttcaagttttagagaggcatcagattgatgcagaaatatccaatacttctgaagaaaagctctacatgaataatttggcacatgatcttgctaggtcagttgctggtgaagatatccttgtgatcttagatgctgagaatgtacgctgcaatagaaattatgattaccgttatgcacaagtgtcaacttctagcttacaatcaatagatagcaaggcttggccttccaaggcaaggtcactagttttcaagtcaagtgcagaattgcagcatgtcagcgaagttctttcagtgaacaaatatttgcgtgttttggatatcagtgggtgttctgtgaaggagatgcccgctccaatttttcagatgaaacaactgagatatcttgatgcttcaacattgtccattgcagatctgcctccccaaattagtggctttcctaagctacagacactggatctgtctgatactgaagtaactgagctaccagccttcattgccaacttaaagagactgaattatttgaatctccaaggttgcaagaaacttaagcagttgaataacctagatttgctgcatgagttacattacctaaacttgtcacgttgcctggaagttagaagttttcccgcatctctgaaaaatcttaggaaacttcgttttctgaacctttcgcaatgttctaagcttccaacattacctgatgaattattgcaatcattctctagtttttcttccattgtggatttaaacttaagtggatttgagttccaaatgctacctgacttttttggcaacatttgttcacttcagtttttgagtctgtcaaaatgctcaaaacttgagctactcccccaatcatttggtcagcttgcatatttgaaaggtctggacctttcattttgttctgatcttaaactcccagagtcctttaagtacctttcttctcttcagtttctaaatctatcacactgccataatgtagaatatctgccatcttttgacaaacttagtaatttggagtatcttaatttatcacaatgtgctggactcaaagcattacctaagtcactttcaaaccaaaaaaatctccaaattgaggtttttgggtgccaggattgcatagtgcagtcatgttatttaagcccacagtcccatacatgctcacaagaagtcaaggaagttggatcaagtagtgatatctcagataccattctaaaggagtctgcaaacagagatgtggcattaggaataagttttccagaaattgatgaagttggttatccacataataatctgaaacaaaaattgacattatcttatcatatggatggacataaaagtgaagagcctaatttcattaccaagcagaactcaactacagagacggtacaactaacccccaggcaccagttcccatcatctacatgtcgtatttcttcgattgcatcaagttctagtgcactatttgcatctggctcctcttcagatgtctcgataacttacaatccagtgtccaatgacaaagcaggcaatcaaacaggacctcagacagagtcaacgcatacggtggtctaagacgagacgatgcgggtaaccaaacatatggtttgtgattcagtccagactcaccgctgaatagagggagtggtaacccaatgggtgacggatctagaatttgactatagggtgatactatctaccatggctagtgcatcacttcttcagtcccgtagtgaatagtgattgagtagaggctggtggactcagttaaatccctcttatgcttttggtgaactgagatggttatcaaactagctatatttggacttatcttgttgtaagactttttaaatatgttgtttatctatcggatttggaacatgtaatatactagctacttatgaacctgaacttataaaataaatgtaatatactagctgtacatgtgaatctgaacttataaaataaattgtgttggatgtatgttgacgtttaattatgtatgatcttggttatgatgttgattatttgagatctttcgtgatacatgatggactactaaatttatacgagactaagtgcaaacgagcatatgtctcaatagtagccgttatatctgtgttcgtgttattgaacagtt

SEQ ID NO: 68855 - DNA, 3808 bp, Zea Mays
ataatttagtaattaaatgagacaaatgctcgaactaaaccgtgcgaagtttaagtgaccatactggtgatttagtaattaaataagactaaaatactcgaattaaacggtgcaaagtttaagtgaccatactggtggacaccgtctcaccgctactgctaggatcatagtcgtctccctgtcctcccacctctgcccacggtccacgggacgacatccagtccagccatggtcggccccgagatgctcgtcgccgcgacggtgaaccaggtcgttcggaagatcaacgagatcatcggcgtcgcgcagggcgagacgaagctgtgctgcagcttcagcgacgacctcgagggcatcaaggacaccctggtataccttgaaggcctcctcaagaacgcggagagcaactcctttgggagcgatagggcgaacctgcggcactggctgggccagatcaagtctctggcttacgatatcgaagacattgttgatggctactactcctccaaggagcaatatgagggaagcaactatgctcagaagggatctttactctgctctttatccaatcccatgctttcgaaggttagcatggttcataagatgaaatccaagagggagttgttacagacaaggcaaaatttaccgacccagtatcatttcatctcacatattaactcagtggtaaattatgatgagaagcagacaacatcatacagaaattgtgacatcagaattgttgggaggggtccagacttggagcatcttatgtacatgttaatgcagataaatttgaaagagcttaccattatttccatagttgggcctgtgggccttgggaagacaacccttgcacaacttattttcaatgatgcaagagctgagacattcagattcagaatatgggttcatgtctccatgggcaatgtcagcctccaaaaaattgggagagatatagttttgcaaactacagaaaaaattgagggaaacatgcagatgcagtcaatcaagaatgttgttcaagacatacttaataagtatagttgcttaatagtgttagatagcttgtggggaaaagatgaagaagtgaatgagctgaagcagatgttgcttacaggtagaaagactgaaagcaaggtcatagtgaccactcacagcagtaaagtagcagagctgatatccactgtgccaccatacaaactgtctttgttgtcagaagatgattgttcagctatattctgtcaaagggcaattgcaggtcagtctatcagtgacccacttttcagggaatatggagaagaaattgttaggagatgtgaaggcatgcccttggtagccaattttcttggatctgtggtgaatgctcaaagacagaggcgtgagatatggaaagctgcaagggataaagacatgtggaagatagaggaagactaccctgaaaacaaaattgtgccaatgtttccatctttcaagatagtatactacagtatgccccatgagctaaggttatgctttgtctactgttcaatctttcctaaaggatatgtcatagataagaaaaaacttattcagcaatggattgcacttgacatgattgaatccaaacatggaaccttgccgcttgatgttactgctgagaaatacattgatgaacttaaagatatttatctccttcaagttttagagaggcatcagattgatgcagaaatatccaatacttctgaagaaaagctctacatgaataatttggcacatgatcttgctaggtcagttgctggtgaagatatccttgtgatcttagatgctgagaatgtacgctgcaatagaaattatgattaccgttatgcacaagtgtcaacttctagcttacaatcaatagatagcaaggcttggccttccaaggcaaggtcactagttttcaagtcaagtgcagaattgcagcatgtcagcgaagttctttcagtgaacaaatatttgcgtgttttggatatcagtgggtgttctgtgaaggagatgcccgctccaatttttcagatgaaacaactgagatatcttgatgcttcaacattgtccattgcagatctgcctccccaaattagtggctttcctaagctacagacactggatctgtctgatactgaagtaactgagctaccagccttcattgccaacttaaagagactgaattatttgaatctccaaggttgcaagaaacttaagcagttgaataacctagatttgctgcatgagttacattacctaaacttgtcacgttgcctggaagttagaagttttcccgcatctctgaaaaatcttaggaaacttcgttttctgaacctttcgcaatgttctaagcttccaacattacctgatgaattattgcaatcattctctagtttttcttccattgtggatttaaacttaagtggatttgagttccaaatgctacctgacttttttggcaacatttgttcacttcagtttttgagtctgtcaaaatgctcaaaacttgagctactcccccaatcatttggtcagcttgcatatttgaaaggtctggacctttcattttgttctgatcttaaactcccagagtcctttaagtacctttcttctcttcagtttctaaatctatcacactgccataatgtagaatatctgccatcttttgacaaacttagtaatttggagtatcttaatttatcacaatgtgctggactcaaagcattacctaagtcactttcaaaccaaaaaaatctccaaattgaggtttttgggtgccaggattgcatagtgcagtcatgttatttaagcccacagtcccatacatgctcacaagaagtcaaggaagttggatcaagtagtgatatctcagataccattctaaaggagtctgcaaacagagatgtggcattaggaataagttttccagaaattgatgaagttggttatccacataataatctgaaacaaaaattgacattatcttatcatatggatggacataaaagtgaagagcctaatttcattaccaagaactcaactacagagacggtacaactaacccccaggcaccagttcccatcatctacatgtcgtatttcttcgattgcatcaagttctagtgcactatttgcatctggctcctcttcagatgtctcgataacttacaatccagtgtccaatgacaaagcaggcaatcaaacaggacctcagacagagtcaacgcatacggtggtctaagacgagacgatgcgggtaaccaaacatatggtttgtgattcagtccagactcaccgctgaatagagggagtggtaacccaatgggtgacggatctagaatttgactatagggtgatactatctaccatggctagtgcatcacttcttcagtcccgtagtgaatagtgattgagtagaggctggtggactcagttaaatccctcttatgcttttggtgaactgagatggttatcaaactagctatatttggacttatcttgttgtaagactttttaaatatgttgtttatctatcggatttggaacatgtaatatactagctacttatgaacctgaacttataaaataaatgtaatatactagctgtacatgtgaatctgaacttataaaataaattgtgttggatgtatgttgacgtttaattatgtatgatcttggttatgatgttgattatttgagatctttcgtgatacatgatggactactaaatttatacgagactaagtgcaaacgagcatatgtctcaatagtagccgttatatctgtgttcgtgttattgaacagtt

SEQ ID NO: 68856 - DNA, 3811 bp, Zea Mays
ataatttagtaattaaatgagacaaatgctcgaactaaaccgtgcgaagtttaagtgaccatactggtgatttagtaattaaataagactaaaatactcgaattaaacggtgcaaagtttaagtgaccatactggtggacaccgtctcaccgctactgctaggatcatagtcgtctccctgtcctcccacctctgcccacggtccacgggacgacatccagtccagccatggtcggccccgagatgctcgtcgccgcgacggtgaaccaggtcgttcggaagatcaacgagatcatcggcgtcgcgcagggcgagacgaagctgtgctgcagcttcagcgacgacctcgagggcatcaaggacaccctggtataccttgaaggcctcctcaagaacgcggagagcaactcctttgggagcgatagggcgaacctgcggcactggctgggccagatcaagtctctggcttacgatatcgaagacattgttgatggctactactcctccaaggagcaatatgagggaagcaactatgctcagaagggatctttactctgctctttatccaatcccatgctttcgaaggttagcatggttcataagatgaaatccaagagggagttgttacagacaaggcaaaatttaccgacccagtatcatttcatctcacatattaactcagtggtaaattatgatgagaagcagacaacatcatacagaaattgtgacatcagaattgttgggaggggtccagacttggagcatcttatgtacatgttaatgcagataaatttgaaagagcttaccattatttccatagttgggcctgtgggccttgggaagacaacccttgcacaacttattttcaatgatgcaagagctgagacattcagattcagaatatgggttcatgtctccatgggcaatgtcagcctccaaaaaattgggagagatatagttttgcaaactacagaaaaaattgagggaaacatgcagatgcagtcaatcaagaatgttgttcaagacatacttaataagtatagttgcttaatagtgttagatagcttgtggggaaaagatgaagaagtgaatgagctgaagcagatgttgcttacaggtagaaagactgaaagcaaggtcatagtgaccactcacagcagtaaagtagcagagctgatatccactgtgccaccatacaaactgtctttgttgtcagaagatgattgttcagctatattctgtcaaagggcaattgcaggtcagtctatcagtgacccacttttcagggaatatggagaagaaattgttaggagatgtgaaggcatgcccttggtagccaattttcttggatctgtggtgaatgctcaaagacagaggcgtgagatatggaaagctgcaagggataaagacatgtggaagatagaggaagactaccctgaaaacaaaattgtgccaatgtttccatctttcaagatagtatactacagtatgccccatgagctaaggttatgctttgtctactgttcaatctttcctaaaggatatgtcatagataagaaaaaacttattcagcaatggattgcacttgacatgattgaatccaaacatggaaccttgccgcttgatgttactgctgagaaatacattgatgaacttaaagatatttatctccttcaagttttagagaggcatcagattgatgcagaaatatccaatacttctgaagaaaagctctacatgaataatttggcacatgatcttgctaggtcagttgctggtgaagatatccttgtgatcttagatgctgagaatgtacgctgcaatagaaattatgattaccgttatgcacaagtgtcaacttctagcttacaatcaatagatagcaaggcttggccttccaaggcaaggtcactagttttcaagtcaagtgcagaattgcagcatgtcagcgaagttctttcagtgaacaaatatttgcgtgttttggatatcagtgggtgttctgtgaaggagatgcccgctccaatttttcagatgaaacaactgagatatcttgatgcttcaacattgtccattgcagatctgcctccccaaattagtggctttcctaagctacagacactggatctgtctgatactgaagtaactgagctaccagccttcattgccaacttaaagagactgaattatttgaatctccaaggttgcaagaaacttaagcagttgaataacctagatttgctgcatgagttacattacctaaacttgtcacgttgcctggaagttagaagttttcccgcatctctgaaaaatcttaggaaacttcgttttctgaacctttcgcaatgttctaagcttccaacattacctgatgaattattgcaatcattctctagtttttcttccattgtggatttaaacttaagtggatttgagttccaaatgctacctgacttttttggcaacatttgttcacttcagtttttgagtctgtcaaaatgctcaaaacttgagctactcccccaatcatttggtcagcttgcatatttgaaaggtctggacctttcattttgttctgatcttaaactcccagagtcctttaagtacctttcttctcttcagtttctaaatctatcacactgccataatgtagaatatctgccatcttttgacaaacttagtaatttggagtatcttaatttatcacaatgtgctggactcaaagcattacctaagtcactttcaaaccaaaaaaatctccaaattgaggtttttgggtgccaggattgcatagtgcagtcatgttatttaagcccacagtcccatacatgctcacaagaagtcaaggaagttggatcaagtagtgatatctcagataccattctaaaggagtctgcaaacagagatgtggcattaggaataagttttccagaaattgatgaagttggttatccacataataatctgaaacaaaaattgacattatcttatcatatggatggacataaaagtgaagagcctaatttcattaccaagcagaactcaactacagagacggtacaactaacccccaggcaccagttcccatcatctacatgtcgtatttcttcgattgcatcaagttctagtgcactatttgcatctggctcctcttcagatgtctcgataacttacaatccagtgtccaatgacaaagcaggcaatcaaacaggacctcagacagagtcaacgcatacggtggtctaagacgagacgatgcgggtaaccaaacatatggtttgtgattcagtccagactcaccgctgaatagagggagtggtaacccaatgggtgacggatctagaatttgactatagggtgatactatctaccatggctagtgcatcacttcttcagtcccgtagtgaatagtgattgagtagaggctggtggactcagttaaatccctcttatgcttttggtgaactgagatggttatcaaactagctatatttggacttatcttgttgtaagactttttaaatatgttgtttatctatcggatttggaacatgtaatatactagctacttatgaacctgaacttataaaataaatgtaatatactagctgtacatgtgaatctgaacttataaaataaattgtgttggatgtatgttgacgtttaattatgtatgatcttggttatgatgttgattatttgagatctttcgtgatacatgatggactactaaatttatacgagactaagtgcaaacgagcatatgtctcaatagtagccgttatatctgtgttcgtgttattgaacagtt

SEQ ID NO: 68857 - DNA, 2826 bp, Zea Mays
cgacatccagtccagccatggtcggccccgagatgctcgtcgccgcgacggtgaaccaggtcgttcggaagatcaacgagatcatcggcgtcgcgcagggcgagacgaagctgtgctgcagcttcagcgacgacctcgagggcatcaaggacaccctggtataccttgaaggcctcctcaagaacgcggagagcaactcctttgggagcgatagggcgaacctgcggcactggctgggccagatcaagtctctggcttacgatatcgaagacattgttgatggctactactcctccaaggagcaatatgagggaagcaactatgctcagaagggatctttactctgctctttatccaatcccatgctttcgaaggttagcatggttcataagatgaaatccaagagggagttgttacagacaaggcaaaatttaccgacccagtatcatttcatctcacatattaactcagtggtaaattatgatgagaagcagacaacatcatacagaaattgtgacatcagaattgttgggaggggtccagacttggagcatcttatgtacatgttaatgcagataaatttgaaagagcttaccattatttccatagttgggcctgtgggccttgggaagacaacccttgcacaacttattttcaatgatgcaagagctgagacattcagattcagaatatgggttcatgtctccatgggcaatgtcagcctccaaaaaattgggagagatatagttttgcaaactacagaaaaaattgagggaaacatgcagatgcagtcaatcaagaatgttgttcaagacatacttaataagtatagttgcttaatagtgttagatagcttgtggggaaaagatgaagaagtgaatgagctgaagcagatgttgcttacaggtagaaagactgaaagcaaggtcatagtgaccactcacagcagtaaagtagcagagctgatatccactgtgccaccatacaaactgtctttgttgtcagaagatgattgttcagctatattctgtcaaagggcaattgcaggtcagtctatcagtgacccacttttcagggaatatggagaagaaattgttaggagatgtgaaggcatgcccttggtagccaattttcttggatctgtggtgaatgctcaaagacagaggcgtgagatatggaaagctgcaagggataaagacatgtggaagatagaggaagactaccctgaaaacaaaattgtgccaatgtttccatctttcaagatagtatactacagtatgccccatgagctaaggttatgctttgtctactgttcaatctttcctaaaggatatgtcatagataagaaaaaacttattcagcaatggattgcacttgacatgattgaatccaaacatggaaccttgccgcttgatgttactgctgagaaatacattgatgaacttaaagatatttatctccttcaagttttagagaggcatcagattgatgcagaaatatccaatacttctgaagaaaagctctacatgaataatttggcacatgatcttgctaggtcagttgctggtgaagatatccttgtgatcttagatgctgagaatgtacgctgcaatagaaattatgattaccatctgcctccccaaattagtggctttcctaagctacagacactggatctgtctgatactgaagtaactgagctaccagccttcattgccaacttaaagagactgaattatttgaatctccaaggttgcaagaaacttaagcagttgaataacctagatttgctgcatgagttacattacctaaacttgtcacgttgcctggaagttagaagttttcccgcatctctgaaaaatcttaggaaacttcgttttctgaacctttcgcaatgttctaagcttccaacattacctgatgaattattgcaatcattctctagtttttcttccattgtggatttaaacttaagtggatttgagttccaaatgctacctgacttttttggcaacatttgttcacttcagtttttgagtctgtcaaaatgctcaaaacttgagctactcccccaatcatttggtcagcttgcatatttgaaaggtctggacctttcattttgttctgatcttaaactcccagagtcctttaagtacctttcttctcttcagtttctaaatctatcacactgccataatgtagaatatctgccatcttttgacaaacttagtaatttggagtatcttaatttatcacaatgtgctggactcaaagcattacctaagtcactttcaaaccaaaaaaatctccaaattgaggtttttgggtgccaggattgcatagtgcagtcatgttatttaagcccacagtcccatacatgctcacaagaagtcaaggaagttggatcaagtagtgatatctcagataccattctaaaggagtctgcaaacagagatgtggcattaggaataagttttccagaaattgatgaagttggttatccacataataatctgaaacaaaaattgacattatcttatcatatggatggacataaaagtgaagagcctaatttcattaccaagcagaactcaactacagagacggtacaactaacccccaggcaccagttcccatcatctacatgtcgtatttcttcgattgcatcaagttctagtgcactatttgcatctggctcctcttcagatgtctcgataacttacaatccagtgtccaatgacaaagcagagcaattttgtacgccagcggggacaccgaaggagcactcagctggatagagaaagaaataggagaggtcgattcaat

SEQ ID NO: 68858 - DNA, 2651 bp, Zea Mays
cccacctctgcccacggtccacgggacgacatccagtccagccatggtcggccccgagatgctcgtcgccgcgacggtgaaccaggtcgttcggaagatcaacgagatcatcggcgtcgcgcagggcgagacgaagctgtgctgcagcttcagcgacgacctcgagggcatcaaggacaccctggtataccttgaaggcctcctcaagaacgcggagagcaactcctttgggagcgatagggcgaacctgcggcactggctgggccagatcaagtctctggcttacgatatcgaagacattgttgatggctactactcctccaaggagcaatatgagggaagcaactatgctcagaagggatctttactctgctctttatccaatcccatgctttcgaagataaatttgaaagagcttaccattatttccatagttgggcctgtgggccttgggaagacaacccttgcacaacttattttcaatgatgcaagagctgagacattcagattcagaatatgggttcatgtctccatgggcaatgtcagcctccaaaaaattgggagagatatagttttgcaaactacagaaaaaattgagggaaacatgcagatgcagtcaatcaagaatgttgttcaagacatacttaataagtatagttgcttaatagtgttagatagcttgtggggaaaagatgaagaagtgaatgagctgaagcagatgttgcttacaggtagaaagactgaaagcaaggtcatagtgaccactcacagcagtaaagtagcagagctgatatccactgtgccaccatacaaactgtctttgttgtcagaagatgattgttcagctatattctgtcaaagggcaattgcaggtcagtctatcagtgacccacttttcagggaatatggagaagaaattgttaggagatgtgaaggcatgcccttggtagccaattttcttggatctgtggtgaatgctcaaagacagaggcgtgagatatggaaagctgcaagggataaagacatgtggaagatagaggaagactaccctgaaaacaaaattgtgccaatgtttccatctttcaagatagtatactacagtatgccccatgagctaaggttatgctttgtctactgttcaatctttcctaaaggatatgtcatagataagaaaaaacttattcagcaatggattgcacttgacatgattgaatccaaacatggaaccttgccgcttgatgttactgctgagaaatacattgatgaacttaaagatatttatctccttcaagttttagagaggcatcagattgatgcagaaatatccaatacttctgaagaaaagctctacatgaataatttggcacatgatcttgctaggtcagttgctggtgaagatatccttgtgatcttagatgctgagaatgtacgctgcaatagaaattatgattaccatctgcctccccaaattagtggctttcctaagctacagacactggatctgtctgatactgaagtaactgagctaccagccttcattgccaacttaaagagactgaattatttgaatctccaaggttgcaagaaacttaagcagttgaataacctagatttgctgcatgagttacattacctaaacttgtcacgttgcctggaagttagaagttttcccgcatctctgaaaaatcttaggaaacttcgttttctgaacctttcgcaatgttctaagcttccaacattacctgatgaattattgcaatcattctctagtttttcttccattgtggatttaaacttaagtggatttgagttccaaatgctacctgacttttttggcaacatttgttcacttcagtttttgagtctgtcaaaatgctcaaaacttgagctactcccccaatcatttggtcagcttgcatatttgaaaggtctggacctttcattttgttctgatcttaaactcccagagtcctttaagtacctttcttctcttcagtttctaaatctatcacactgccataatgtagaatatctgccatcttttgacaaacttagtaatttggagtatcttaatttatcacaatgtgctggactcaaagcattacctaagtcactttcaaaccaaaaaaatctccaaattgaggtttttgggtgccaggattgcatagtgcagtcatgttatttaagcccacagtcccatacatgctcacaagaagtcaaggaagttggatcaagtagtgatatctcagataccattctaaaggagtctgcaaacagagatgtggcattaggaataagttttccagaaattgatgaagttggttatccacataataatctgaaacaaaaattgacattatcttatcatatggatggacataaaagtgaagagcctaatttcattaccaagcagaactcaactacagagacggtacaactaacccccaggcaccagttcccatcatctacatgtcgtatttcttcgattgcatcaagttctagtgcactatttgcatctggctcctcttcagatgtctcgataacttacaatccagtgtccaatgacaaagcagagcaattttgtacgccagcggggacaccgaaggagcactcagctggatagagaaagaaataggagaggtcgattcaat

SEQ ID NO: 68859 - DNA, 2891 bp, Zea Mays
cccacctctgcccacggtccacgggacgacatccagtccagccatggtcggccccgagatgctcgtcgccgcgacggtgaaccaggtcgttcggaagatcaacgagatcatcggcgtcgcgcagggcgagacgaagctgtgctgcagcttcagcgacgacctcgagggcatcaaggacaccctggtataccttgaaggcctcctcaagaacgcggagagcaactcctttgggagcgatagggcgaacctgcggcactggctgggccagatcaagtctctggcttacgatatcgaagacattgttgatggctactactcctccaaggagcaatatgagggaagcaactatgctcagaagggatctttactctgctctttatccaatcccatgctttcgaagataaatttgaaagagcttaccattatttccatagttgggcctgtgggccttgggaagacaacccttgcacaacttattttcaatgatgcaagagctgagacattcagattcagaatatgggttcatgtctccatgggcaatgtcagcctccaaaaaattgggagagatatagttttgcaaactacagaaaaaattgagggaaacatgcagatgcagtcaatcaagaatgttgttcaagacatacttaataagtatagttgcttaatagtgttagatagcttgtggggaaaagatgaagaagtgaatgagctgaagcagatgttgcttacaggtagaaagactgaaagcaaggtcatagtgaccactcacagcagtaaagtagcagagctgatatccactgtgccaccatacaaactgtctttgttgtcagaagatgattgttcagctatattctgtcaaagggcaattgcaggtcagtctatcagtgacccacttttcagggaatatggagaagaaattgttaggagatgtgaaggcatgcccttggtagccaattttcttggatctgtggtgaatgctcaaagacagaggcgtgagatatggaaagctgcaagggataaagacatgtggaagatagaggaagactaccctgaaaacaaaattgtgccaatgtttccatctttcaagatagtatactacagtatgccccatgagctaaggttatgctttgtctactgttcaatctttcctaaaggatatgtcatagataagaaaaaacttattcagcaatggattgcacttgacatgattgaatccaaacatggaaccttgccgcttgatgttactgctgagaaatacattgatgaacttaaagatatttatctccttcaagttttagagaggcatcagattgatgcagaaatatccaatacttctgaagaaaagctctacatgaataatttggcacatgatcttgctaggtcagttgctggtgaagatatccttgtgatcttagatgctgagaatgtacgctgcaatagaaattatgattaccgttatgcacaagtgtcaacttctagcttacaatcaatagatagcaaggcttggccttccaaggcaaggtcactagttttcaagtcaagtgcagaattgcagcatgtcagcgaagttctttcagtgaacaaatatttgcgtgttttggatatcagtgggtgttctgtgaaggagatgcccgctccaatttttcagatgaaacaactgagatatcttgatgcttcaacattgtccattgcagatctgcctccccaaattagtggctttcctaagctacagacactggatctgtctgatactgaagtaactgagctaccagccttcattgccaacttaaagagactgaattatttgaatctccaaggttgcaagaaacttaagcagttgaataacctagatttgctgcatgagttacattacctaaacttgtcacgttgcctggaagttagaagttttcccgcatctctgaaaaatcttaggaaacttcgttttctgaacctttcgcaatgttctaagcttccaacattacctgatgaattattgcaatcattctctagtttttcttccattgtggatttaaacttaagtggatttgagttccaaatgctacctgacttttttggcaacatttgttcacttcagtttttgagtctgtcaaaatgctcaaaacttgagctactcccccaatcatttggtcagcttgcatatttgaaaggtctggacctttcattttgttctgatcttaaactcccagagtcctttaagtacctttcttctcttcagtttctaaatctatcacactgccataatgtagaatatctgccatcttttgacaaacttagtaatttggagtatcttaatttatcacaatgtgctggactcaaagcattacctaagtcactttcaaaccaaaaaaatctccaaattgaggtttttgggtgccaggattgcatagtgcagtcatgttatttaagcccacagtcccatacatgctcacaagaagtcaaggaagttggatcaagtagtgatatctcagataccattctaaaggagtctgcaaacagagatgtggcattaggaataagttttccagaaattgatgaagttggttatccacataataatctgaaacaaaaattgacattatcttatcatatggatggacataaaagtgaagagcctaatttcattaccaagcagaactcaactacagagacggtacaactaacccccaggcaccagttcccatcatctacatgtcgtatttcttcgattgcatcaagttctagtgcactatttgcatctggctcctcttcagatgtctcgataacttacaatccagtgtccaatgacaaagcagagcaattttgtacgccagcggggacaccgaaggagcactcagctggatagagaaagaaataggagaggtcgattcaat

SEQ ID NO: 68860 - DNA, 3140 bp, Zea Mays
gtggacaccgtctcaccgctactgctaggatcatagtcgtctccctgtcctcccacctctgcccacggtccacgggacgacatccagtccagccatggtcggccccgagatgctcgtcgccgcgacggtgaaccaggtcgttcggaagatcaacgagatcatcggcgtcgcgcagggcgagacgaagctgtgctgcagcttcagcgacgacctcgagggcatcaaggacaccctggtataccttgaaggcctcctcaagaacgcggagagcaactcctttgggagcgatagggcgaacctgcggcactggctgggccagatcaagtctctggcttacgatatcgaagacattgttgatggctactactcctccaaggagcaatatgagggaagcaactatgctcagaagggatctttactctgctctttatccaatcccatgctttcgaaggttagcatggttcataagatgaaatccaagagggagttgttacagacaaggcaaaatttaccgacccagtatcatttcatctcacatattaactcagtggtaaattatgatgagaagcagacaacatcatacagaaattgtgacatcagaattgttgggaggggtccagacttggagcatcttatgtacatgttaatgcagataaatttgaaagagcttaccattatttccatagttgggcctgtgggccttgggaagacaacccttgcacaacttattttcaatgatgcaagagctgagacattcagattcagaatatgggttcatgtctccatgggcaatgtcagcctccaaaaaattgggagagatatagttttgcaaactacagaaaaaattgagggaaacatgcagatgcagtcaatcaagaatgttgttcaagacatacttaataagtatagttgcttaatagtgttagatagcttgtggggaaaagatgaagaagtgaatgagctgaagcagatgttgcttacaggtagaaagactgaaagcaaggtcatagtgaccactcacagcagtaaagtagcagagctgatatccactgtgccaccatacaaactgtctttgttgtcagaagatgattgttcagctatattctgtcaaagggcaattgcaggtcagtctatcagtgacccacttttcagggaatatggagaagaaattgttaggagatgtgaaggcatgcccttggtagccaattttcttggatctgtggtgaatgctcaaagacagaggcgtgagatatggaaagctgcaagggataaagacatgtggaagatagaggaagactaccctgaaaacaaaattgtgccaatgtttccatctttcaagatagtatactacagtatgccccatgagctaaggttatgctttgtctactgttcaatctttcctaaaggatatgtcatagataagaaaaaacttattcagcaatggattgcacttgacatgattgaatccaaacatggaaccttgccgcttgatgttactgctgagaaatacattgatgaacttaaagatatttatctccttcaagttttagagaggcatcagattgatgcagaaatatccaatacttctgaagaaaagctctacatgaataatttggcacatgatcttgctaggtcagttgctggtgaagatatccttgtgatcttagatgctgagaatgtacgctgcaatagaaattatgattaccgttatgcacaagtgtcaacttctagcttacaatcaatagatagcaaggcttggccttccaaggcaaggtcactagttttcaagtcaagtgcagaattgcagcatgtcagcgaagttctttcagtgaacaaatatttgcgtgttttggatatcagtgggtgttctgtgaaggagatgcccgctccaatttttcagatgaaacaactgagatatcttgatgcttcaacattgtccattgcagatctgcctccccaaattagtggctttcctaagctacagacactggatctgtctgatactgaagtaactgagctaccagccttcattgccaacttaaagagactgaattatttgaatctccaaggttgcaagaaacttaagcagttgaataacctagatttgctgcatgagttacattacctaaacttgtcacgttgcctggaagttagaagttttcccgcatctctgaaaaatcttaggaaacttcgttttctgaacctttcgcaatgttctaagcttccaacattacctgatgaattattgcaatcattctctagtttttcttccattgtggatttaaacttaagtggatttgagttccaaatgctacctgacttttttggcaacatttgttcacttcagtttttgagtctgtcaaaatgctcaaaacttgagctactcccccaatcatttggtcagcttgcatatttgaaaggtctggacctttcattttgttctgatcttaaactcccagagtcctttaagtacctttcttctcttcagtttctaaatctatcacactgccataatgtagaatatctgccatcttttgacaaacttagtaatttggagtatcttaatttatcacaatgtgctggactcaaagcattacctaagtcactttcaaaccaaaaaaatctccaaattgaggtttttgggtgccaggattgcatagtgcagtcatgttatttaagcccacagtcccatacatgctcacaagaagtcaaggaagttggatcaagtagtgatatctcagataccattctaaaggagtctgcaaacagagatgtggcattaggaataagttttccagaaattgatgaagttggttatccacataataatctgaaacaaaaattgacattatcttatcatatggatggacataaaagtgaagagcctaatttcattaccaagaactcaactacagagacggtacaactaacccccaggcaccagttcccatcatctacatgtcgtatttcttcgattgcatcaagttctagtgcactatttgcatctggctcctcttcagatgtctcgataacttacaatccagtgtccaatgacaaagcagagcaattttgtacgccagcggggacaccgaaggagcactcagctggatagagaaagaaataggagaggtcgattcaat

SEQ ID NO: 68861 - DNA, 1910 bp, Zea Mays
gatcatgaatcgttagaaagctgaataccaaatagaaggagaggggaattgacaggtggtccgaactgctctcttcgctccgtctcgagtttctcgccgacgtcgacgacgacaacgccgactcgtccgcatgcttcgttggccttggtgtgctgccaggatagtttgatttctgatattttttttgttaaggatcaattatattaataattcaataatttctgtagttcaagtatattttttctctataaagtattgtaccaatgatgcaaatctattttaaagtgtctactaaactatgcacatagttgggatttgggaggtgacgctaaccttggtaagaactattagtggttcacttgttcttgagccttatcattttgtataatccatacttgttctatatttgatggtattacacgacgctttgcttacatacctgtttaagaaggctttgcttacatttatctaacttgatggtattgcaacaaagccaacgctaggcttgttcatttaagttttctttgttacactcaacgtgaacaatacctcatgttcttgtagccgtagtgaactcagacacataatgatgtctgaacattatgttaaacgcttacagtccttcaatgtcgaagaagtttaggttagtattaaattagtttaacaaattatgtattgtctataggctgttgtaatttgtattttgtgcagtctcgtattgttgttgctgaaaatttacctgaggatcaaaagcatcaaactctgatgaagattttctcagctgttgggaatgtgaaatctatacgtacctgttatccacaagatatttctctagcagcagctaacaaaacatcaaggattgagatgatttttgctaataagcttcattcttttgtggagtattcaactgttggagatgctgaaaaagcagttgctgaattcggtggtgggggaaactggagagaggggattagagttcgttcactgcttggatgtctgaaacatgggttaggtcaaggaagaaaaggtggggatgaggagtatgctgcagatgaagatggccctgacacaactgatcatccacgagactttggaacagatgttactgcccaaatctcagaagcacatttcgatcaccaggctgaagatggcacccatgacaagggtggaatgaggcagcaggggagagggaggggccgtggagggagaggcagaggccgtggtcagcattatggccacaacagccgagatggccaccatccgattggcactcccccgtcggagcatccagctgtgctgaagccgcccctgggcccccgcataacggatggcacaaaagggtttgttttcaagattttggtgctgaatatttttttggtgaatggttcaagtgttactgttgcgggagtcttcaacaggtcactcgccacatgcgccttccagcaggttgtgctcttgtgtctactggttataaacaataaatgctatgatggagctaagggtgatctgtgttcatgtggagtgattttctttgtcctcatggcggggtacctcccatttaaagattcaaacctgatgtcgctttacaagaagatcttcaaagcggatttcagttgccatcctggttctccacaagtgcaaagaagctcatcaagaagatacttgatcctaatgctaacactatgcttagattagtgtatggttgtcgacacatttgtctgccattacaaaattcgaaattgactctttagaaataatttgtgtggtaattataatatttaccacacggattttacatatcatagtgatatttatcgttccgtttctatgtttcatacaaattttgtactcccgtcgcaacgcacgggcactcacctagtaagtactctgattatattgtgacatttatc

SEQ ID NO: 68862 - DNA, 1799 bp, Zea Mays
ctcaaccctctgcacctactgcttcactttgcagactataggaggaaacaaaagatgagctcattgggtggataaaaacaagctccgtagaatcagaaaatgtaagcaaggccctttatgaaactattggcaaactgtcaatccacaaggaggaggcaaggcttattgggcagctgtgcagtggcatgctggccaatctgatcggttgttgccgcgagagagctaagagagggaagcagcattagcctgtgcaaagaaaaatattatgctccactcgaagctatattctctattatgattcacaatattcattccttcatgaagaattacacaaacagttatgacacaaaaatatctatgtaacagaagcaataaataagttgctgatgttctttatggcagcgcactcggtgtgataatgggacaattctagattttaataatgcgacaattgatcatgaatcgttagaaagctgaataccaaatagaaggagaggggaattgacaggtggtccgaactgctctcttcgctccgtctcgagtttctcgccgacgtcgacgacgacaacgccgactcgtccgcatgcttcgttggccttgtctcgtattgttgttgctgaaaatttacctgaggatcaaaagcatcaaactctgatgaagattttctcagctgttgggaatgtgaaatctatacgtacctgttatccacaagatatttctctagcagcagctaacaaaacatcaaggattgagatgatttttgctaataagcttcattcttttgtggagtattcaactgttggagatgctgaaaaagcagttgctgaattcggtggtgggggaaactggagagaggggattagagttcgttcactgcttggatgtctgaaacatgggttaggtcaaggaagaaaaggtggggatgaggagtatgctgcagatgaagatggccctgacacaactgatcatccacgagactttggaacagatgttactgcccaaatctcagaagcacatttcgatcaccaggctgaagatggcacccatgacaagggtggaatgaggcagcaggggagagggaggggccgtggagggagaggcagaggccgtggtcagcattatggccacaacagccgagatggccaccatccgattggcactcccccgtcggagcatccagctgtgctgaagccgcccctgggcccccgcataacggatggcacaaaagggtttgttttcaagattttggtgctgaatatttttttggtgaatggttcaagtgttactgttgcgggagtcttcaacaggtcactcgccacatgcgccttccagcaggttgtgctcttgtgtctactggttataaacaataaatgctatgatggagctaagggtgatctgtgttcatgtggagtgattttctttgtcctcatggcggggtacctcccatttaaagattcaaacctgatgtcgctttacaagaagatcttcaaagcggatttcagttgccatcctggttctccacaagtgcaaagaagctcatcaagaagatacttgatcctaatgctaacactatgcttagattagtgtatggttgtcgacacatttgtctgccattacaaaattcgaaattgactctttagaaataatttgtgtggtaattataatatttaccacacggattttacatatcatagtgatatttatcgttccgtttctatgtttcatacaaattttgtactcccgtcgcaacgcacgggcactcacctagtaagtactctgattatattgtgacatttatc

SEQ ID NO: 68863 - DNA, 2616 bp, Zea Mays
cacacccccacaggagaagaacaggtggttcaagtggagccacaacgaggagttcaattcggtctaggtggcgtctcccagttgactttctgacgccaaggatagattttagatcctgctatatttatcttttattttttaagacttccgctatgtaatctctactactattatgtacatagtgtagacgttcacaatagaatggcgcacggttctgccaaacgcagacgcgtccatcccgccccgactgtcgcggcgcgaatcgcggctgtcgcatcctcccatcaataccgcggccgccgcttcctccgtccacacggtaaacctggtggcctcttcctcgccctgcccgcctgcctcttccccacctcgacgccgcccccgcccctgcatccagcgtgctccccgccccctcccccgcgccaccgagacaacgccgtcctcaccgtcgcacggttcagcgacgagatgagcgagctcgccgcgcccaccgacccacccttcccccaaaatccacgctggaaggaatcgtcgctggaagaaatcctcaccaaaatccacgctggatgggatctgtgtgggcaccgtgggtcgcctaaatcgatgccgcaccattggcaccttccatcctcgacgccttccatccatggatggaaatcgtcctttccatcggcggcacccttcttctccccacacagcgccctacctccccatcattctctgcatcccatctgcggtgcaaccgtacgcgctcacggtagagcaccgacgggggatccgacgcctgctcctgcatccctgcagcgaggcctcctcgtcctcgcccttggcggcaccctcattgggtggataaaaacaagctccgtagaatcagaaaatgtaagcaaggccctttatgaaactattggcaaactgtcaatccacaaggaggaggcaaggcttattgggcagctgtgcagtggcatgctggccaatctgatcggttgttgccgcgagagagatgcaacttccttctaatcttcatctgatgtgaagttgaatctagcagctaagagagggaagcagcattagcctgtgcaaagaaaaatattatgctccactcgaagctatattctctattatgattcacaatattcattccttcatgaagaattacacaaacagttatgacacaaaaatatctatgtaacagaagcaataaataagttgctgatgttctttatggcagcgcactcggtgtgataatgggacaattctagattttaataatgcgacaattgatcatgaatcgttagaaaggtggtccgaactgctctcttcgctccgtctcgagtttctcgccgacgtcgacgacgacaacgccgactcgtccgcatgcttcgttggccttgtctcgtattgttgttgctgaaaatttacctgaggatcaaaagcatcaaactctgatgaagattttctcagctgttgggaatgtgaaatctatacgtacctgttatccacaagatatttctctagcagcagctaacaaaacatcaaggattgagatgatttttgctaataagcttcattcttttgtggagtattcaactgttggagatgctgaaaaagcagttgctgaattcggtggtgggggaaactggagagaggggattagagttcgttcactgcttggatgtctgaaacatgggttaggtcaaggaagaaaaggtggggatgaggagtatgctgcagatgaagatggccctgacacaactgatcatccacgagactttggaacagatgttactgcccaaatctcagaagcacatttcgatcaccaggctgaagatggcacccatgacaagggtggaatgaggcagcaggggagagggaggggccgtggagggagaggcagaggccgtggtcagcattatggccacaacagccgagatggccaccatccgattggcactcccccgtcggagcatccagctgtgctgaagccgcccctgggcccccgcataacggatggcacaaaagggttactgttgcgggagtcttcaacaggtcactcgccacatgcgccttccagcagaaactataatgcagaccaacaatgaagcattgcttgctcgcttctcgacgaccaaggagaccgaaaaaactgctagaaaaagtgctcttgtgtctactggttataaacaataaatgctatgatggagctaagggtgatctgtgttcatgtggagtgattttctttgtcctcatggcggggtacctcccatttaaagattcaaacctgatgtcgctttacaagaagatcttcaaagcggatttcagttgccatcctggttctccacaagtgcaaagaagctcatcaagaagatacttgatcctaatgctaacactatgcttagattagtgtatggttgtcgacacatttgtctgccattacaaaattcgaaattgactctttagaaataatttgtgtggtaattataatatttaccacacggattttacatatcatagtgatatttatcgttccgtttctatgtttcatacaaattttgtactcccgtcgcaacgcacgggcactcacctagtaagtactctgattatattgtgacatttatc

SEQ ID NO: 68864 - DNA, 2889 bp, Zea Mays
attaaaactcaatttgtcatttgcatcgcattgggattattttattattacttttgcttattattactaaggtttggtatttacttatacttagtaattgctaataaaattttgaccaacttataaaagcaatgctcagcttcaacctttatgttgttgatcagccttacacttcacatgaactcccacctttggtgagttcatgcacattattccccacaacttgttgagcgatgaacatgtgtgagctcacccttgctgtctcacacccccacaggagaagaacaggtggttcaagtggagccacaacgaggagttcaattcggtctaggtggcgtctcccagttgactttctgacgccaaggatagattttagatcctgctatatttatcttttattttttaagacttccgctatgtaatctctactactattatgtacatagtgtagacgttcacaatagaatggcgcacggttctgccaaacgcagacgcgtccatcccgccccgactgtcgcggcgcgaatcgcggctgtcgcatcctcccatcaataccgcggccgccgcttcctccgtccacacggtaaacctggtggcctcttcctcgccctgcccgcctgcctcttccccacctcgacgccgcccccgcccctgcatccagcgtgctccccgccccctcccccgcgccaccgagacaacgccgtcctcaccgtcgcacggttcagcgacgagatgagcgagctcgccgcgcccaccgacccacccttcccccaaaatccacgctggaaggaatcgtcgctggaagaaatcctcaccaaaatccacgctggatgggatctgtgtgggcaccgtgggtcgcctaaatcgatgccgcaccattggcaccttccatcctcgacgccttccatccatggatggaaatcgtcctttccatcggcggcacccttcttctccccacacagcgccctacctccccatcattctctgcatcccatctgcggtgcaaccgtacgcgctcacggtagagcaccgacgggggatccgacgcctgctcctgcatccctgcagcgaggcctcctcgtcctcgcccttggcggcaccctcattgggtggataaaaacaagctccgtagaatcagaaaatgtaagcaaggccctttatgaaactattggcaaactgtcaatccacaaggaggaggcaaggcttattgggcagctgtgcagtggcatgctggccaatctgatcggttgttgccgcgagagagatgcaacttccttctaatcttcatctgatgtgaagttgaatctagcagctaagagagggaagcagcattagcctgtgcaaagaaaaatattatgctccactcgaagctatattctctattatgattcacaatattcattccttcatgaagaattacacaaacagttatgacacaaaaatatctatgtaacagaagcaataaataagttgctgatgttctttatggcagcgcactcggtgtgataatgggacaattctagattttaataatgcgacaattgatcatgaatcgttagaaagctgaataccaaatagaaggagaggggaattgacaggtggtccgaactgctctcttcgctccgtctcgagtttctcgccgacgtcgacgacgacaacgccgactcgtccgcatgcttcgttggccttgtctcgtattgttgttgctgaaaatttacctgaggatcaaaagcatcaaactctgatgaagattttctcagctgttgggaatgtgaaatctatacgtacctgttatccacaagatatttctctagcagcagctaacaaaacatcaaggattgagatgatttttgctaataagcttcattcttttgtggagtattcaactgttggagatgctgaaaaagcagttgctgaattcggtggtgggggaaactggagagaggggattagagttcgttcactgcttggatgtctgaaacatgggttaggtcaaggaagaaaaggtggggatgaggagtatgctgcagatgaagatggccctgacacaactgatcatccacgagactttggaacagatgttactgcccaaatctcagaagcacatttcgatcaccaggctgaagatggcacccatgacaagggtggaatgaggcagcaggggagagggaggggccgtggagggagaggcagaggccgtggtcagcattatggccacaacagccgagatggccaccatccgattggcactcccccgtcggagcatccagctgtgctgaagccgcccctgggcccccgcataacggatggcacaaaagggtttgttttcaagattttggtgctgaatatttttttggtgaatggttcaagtgttactgttgcgggagtcttcaacaggtcactcgccacatgcgccttccagcaggttgtgctcttgtgtctactggttataaacaataaatgctatgatggagctaagggtgatctgtgttcatgtggagtgattttctttgtcctcatggcggggtacctcccatttaaagattcaaacctgatgtcgctttacaagaagatcttcaaagcggatttcagttgccatcctggttctccacaagtgcaaagaagctcatcaagaagatacttgatcctaatgctaacactatgcttagattagtgtatggttgtcgacacatttgtctgccattacaaaattcgaaattgactctttagaaataatttgtgtggtaattataatatttaccacacggattttacatatcatagtgatatttatcgttccgtttctatgtttcatacaaattttgtactcccgtcgcaacgcacgggcactcacctagtaagtactctgattatattgtgacatttatc

SEQ ID NO: 68865 - DNA, 2592 bp, Zea Mays
ctcatcgtcattatcaccgtatctgcagcacctagatcaagagtgtagactgctgccatttttcatccacaaccccaagcagacagcagccatgttatcccaaccttatccacagcaacaaggaggtgaaccatcaagtgtaaactctgcttcaattactcaaaaaatatcaaatgctatcaagtcagatgaccctacatgggagcattgctttgtcccggatatgagtaagaagcaagcaatacagtgcaagtactgtgacaaggtgatccatggtggaattactagagttaaatatcatcttgcaaacattggaggtttcaatgttacaaagtgcaagaaagttccagcacatgttaagcaagagatggaggcctttcttacaaagaagactggtgaaaaagaacagagaaagaagaaaaaacaaagagatagggatgaaattgatctagataaatcagatggatccaatgaagaagacaatgggcatgagaatgatgttattgtgctgaaatcaacaagggaaagtaataattgcagcagctctagacccccaacaaatggtggcagtggcactattgacaacttctacaagccacaatctgttgaagagtctgaccacaagaacaaaattcaaacaaagttgtcaacccataaaagagaagagagacgagatagagcttgtgagtatatatgccaatttttttatgaagctggaattgcacataatacaataaccctcccaagctttggccatatgcttgaggcaattggagcttttggtagaggtctgagaggtcctagtgcctatgagatgagtggaccattcttgaagagagcaaagcaaaaggtattggatatattcaagaatcaccatgaatcatggcagctcacaggttgctcggtgatgacaaatgcatggacagataggaagggaaggggagtgatgaacttggttgtccatagtgcacatggggtctatttcttagattcagtggactgctcaacagtaaagaaagatggaaaatatgtgtttgaccttgtggacagatgcatccaagagatacggaaagaaaatgttgtccaagtggtgactgacaatgcaagtgtcaacacagcagcagcaagtctaatggcggcaaagacaccctccatattttggacaggatgtgcagcccattgcttagatctgatgcttgaagatattgggaagcttggacctatggaacaaacaattgctagtgctagacaggtgaccacattcttgtatgctcatacatgagtgttggatctaatgaggaaatttcttgggaatgacctggttcgctctaaggttactcgatttgccacagcatatttgaatctaaaaattttacaggacaacaagaaggatatagcaagactctttagatcggatgaactcaatgaattgggttacttaaagaaggcaaagggaaagaaagcaaacaaagtggtggcattagaaggattttggaaaaatattgatatggctatcaatttctttgagccattggctaatgtgcttaggagaatggacagtgatgtacctgccattggtttcttccatggatgtatgcttgaggcaaagaaagaaattgctacaaggtttgataataatgaaagtaaatacagagttgcttgggacataattgataaaacatgagataacaagttgaagactccattgcacttggatgggtactacttgaacccatacttttattacccaaacaagtctagcattgagcttgatggttcctttagagctgcaataatttcttgcattacaaagatgtttgatgacgaagacactcaagatagcataattgaagagctcagcatataccaagaccaacaaggagcatttgggcatgacattgcagtcagacagaggagaaacaagaccttcaatccagcaaagtggtggatgaaccatggcacaaccacaccacatctgaggatattagcaacacggattctcaatttgacttgtagctcctcaggttgtgagagggcctggtcagtctttaagcagatccacacaaagaagcgaaacaaattactgcatgatagaatgagggatcttgtctttgtgaaatttaattctaaactaagggagaagagagacaaaaagagcaaagatccaatagagaaggaattgaacgatattctttagaatgatggcaatgagggaatggaacagatgttgttctagatgaaaatgttgatcaagatgaagaccatgagggtgcacatgacgaaccatcaccggaaccatcaatctcaaaagcacaactaccagccaaaagaaagaggcatgggcatcctaggaaaaagaaacttaggagcctcaaatctctcttgtcttgtgatttagagcgtgcaacatgtgcttcatcttctgaatccgaagataatgaatctatgcagattgaagcttcaaattcagattctagagatgagtagaactgttgaagacttaccagttaccagtttatgccttggtattttatctagttgcaacttattaaactaatgtcttggaacttagcaactttgcaattccttttg

SEQ ID NO: 68866 - DNA, 2205 bp, Zea Mays
taccatgcgaagaggaggctgaggcaatcagagcacaaggtgtcacagagacccggttggaactactgaagggtataagtggttcgtttaggccaggagtccttactgctcttatgggtgtcagtggtgctggcaagacaacactgatggatgtgttggctgggaggaagaccagtggatacattgtgggcaacattaccatatcaggttacccgaagaaacaagaaacttttgctcgtgtgtcaggatactgtgagcaaaatgatatccactcaccaaatgttaccgtctatgaatcccttgcattctccgcatggctcagattacctgctgatgttgattcctcaacaagaaagatgtttattgatgaggttatggagcttgtggagcttttacccttaaaagatgcattggtaggattgcctggtgtcagtggactatcaacagaacaaaggaaaaggctaaccatagctgttgagcttgttgctaatccttctataattttcatggatgaaccgacatctggacttgatgctcgagcagcagctattgtcatgagggcaataaggaatactgtggacacaggaagaacggttgtttgtaccattcaccaaccaagtatagatatatttgaatcttttgatgagctcttccttatgaaacgtggaggtgaagagatttatgtaggcccactagggatgcattcatgtgaactggtcaaatattttgagggcatcgaaggtgtcaacaagataaaagatggctacaacccctcgacatggatgctggaagtgactagtacaatgcaagagcagataactggtattaacttcagtgaagtatacaagaattcagaactgcacaggaggaataaaactttgataaaggagctaagcacgcctccagaaggttcaagtgacctatcctttccaaccgaatactcacaggctttcctcacacagtgtttggcttgcctgtggaagcaaagcatgtcatattggagaaaccctccatatactggtgtcaaatacttctacacgacagtgattgccctgttgtttggaacaatgttctggggtgtgggcagaaaaagggatagtcaacaggacctgttcaatgccattggttccatgtatgcctcggttattttcatgggagtacagaattctggttcagttcagccagttgtatcggttgagcgaacagtcttttacagggaaagggcggctcatatgtactcgccattgccgtatgccttgggacagcatactacacgttctacgggatgatggtggttggcctgactccgaactacaacgtctcctccgttgcttccacggcgttctatgccatttggaacctcttctcgggattcttaataccaagaactagaattccagtctggtggagatggttctactggatttgccccatcgcatggacgctcaacgggctggtcacttcacagtttggagatgtaaccgagacgttcagtgacggtggggtgcgtatatctgacttcgttgaggactactttgggtaccatcacgacttgctgtgggtggtcgctgtggtggtggtcgcgtttcctgtgctctttgccttgctctttggcctctcgctcaagatattcaacttccaaaagaggtaaataaaatgtgagacagcttgattaatcccaaggcgaaaatagcgcaggcgttgcggaagaaagtggggctgtattgtatgtaaatagcgtattcgttgatcagagcttctcaagctccagacaaattgtgtagctgatagaggatcttgtacctgttggtgtaaaattagccgataatgcccaatttctacgatgtgatgaagttcagcttttgcaaagttttgtacatattggcacacactggctgttcgctgcaacactccaacgatgctctgaaatgatggatgtgtttcctcacagtagaaaatatggcgaccccaatagacctaagctgtgttgatcacgatgataacacatgtagtaattagatgtccatgttgaagtgtataaaaggattggataccttctctcatcaatttaaacttttggtttgaactgatcagtgtatctactctaacatgatatcaaatccagaagcctcgaattcaaatcctaacagatgctttatttgtgttctcacccatttatttccacgtttgcgtctttctctctgg

SEQ ID NO: 68867 - DNA, 2487 bp, Zea Mays
ctacgctctggagctcgactgacaaggaggagaacaggatgaaggagcttggctgccatgacacggaagtcggtcggcgatgggcagcaatatggagaaaggacggcgaggcttcgtggagcaacacttgaagacaaaaattgttatttttctaccatgcgaagaggaggctgaggcaatcagagcacaaggtgtcacagagacccggttggaactactgaagggtataagtggttcgtttaggccaggagtccttactgctcttatgggtgtcagtggtgctggcaagacaacactgatggatgtgttggctgggaggaagaccagtggatacattgtgggcaacattaccatatcaggttacccgaagaaacaagaaacttttgctcgtgtgtcaggatactgtgagcaaaatgatatccactcaccaaatgttaccgtctatgaatcccttgcattctccgcatggctcagattacctgctgatgttgattcctcaacaagaaagatgtttattgatgaggttatggagcttgtggagcttttacccttaaaagatgcattggtaggattgcctggtgtcagtggactatcaacagaacaaaggaaaaggctaaccatagctgttgagcttgttgctaatccttctataattttcatggatgaaccgacatctggacttgatgctcgagcagcagctattgtcatgagggcaataaggaatactgtggacacaggaagaacggttgtttgtaccattcaccaaccaagtatagatatatttgaatcttttgatgagctcttccttatgaaacgtggaggtgaagagatttatgtaggcccactagggatgcattcatgtgaactggtcaaatattttgagggcatcgaaggtgtcaacaagataaaagatggctacaacccctcgacatggatgctggaagtgactagtacaatgcaagagcagataactggtattaacttcagtgaagtatacaagaattcagaactgcacaggaggaataaaactttgataaaggagctaagcacgcctccagaaggttcaagtgacctatcctttccaaccgaatactcacaggctttcctcacacagtgtttggcttgcctgtggaagcaaagcatgtcatattggagaaaccctccatatactggtgtcaaatacttctacacgacagtgattgccctgttgtttggaacaatgttctggggtgtgggcagaaaaagggatagtcaacaggacctgttcaatgccattggttccatgtatgcctcggttattttcatgggagtacagaattctggttcagttcagccagttgtatcggttgagcgaacagtcttttacagggaaagggcggctcatatgtactcgccattgccgtatgccttgggacaggtcgtaatcgaactcccatacatctttgttcagtccttaatatatggcgtgctggtgtatgctatgatcgggtttgaatggacagctgacaagttcttttggtacctcttcttcatgtatttcaccctagcatactacacgttctacgggatgatggtggttggcctgactccgaactacaacgtctcctccgttgcttccacggcgttctatgccatttggaacctcttctcgggattcttaataccaagaactagaattccagtctggtggagatggttctactggatttgccccatcgcatggacgctcaacgggctggtcacttcacagtttggagatgtaaccgagacgttcagtgacggtggggtgcgtatatctgacttcgttgaggactactttgggtaccatcacgacttgctgtgggtggtcgctgtggtggtggtcgcgtttcctgtgctctttgccttgctctttggcctctcgctcaagatattcaacttccaaaagaggtaaataaaatgtgagacagcttgattaatcccaaggcgaaaatagcgcaggcgttgcggaagaaagtggggctgtattgtatgtaaatagcgtattcgttgatcagagcttctcaagctccagacaaattgtgtagctgatagaggatcttgtacctgttggtgtaaaattagccgataatgcccaatttctacgatgtgatgaagttcagcttttgcaaagttttgtacatattggcacacactggctgttcgctgcaacactccaacgatgctctgaaatgatggatgtgtttcctcacagtagaaaatatggcgaccccaatagacctaagctgtgttgatcacgatgataacacatgtagtaattagatgtccatgttgaagtgtataaaaggattggataccttctctcatcaatttaaacttttggtttgaactgatcagtgtatctactctaacatgatatcaaatccagaagcctcgaattcaaatcctaacagatgctttatttgtgttctcacccatttatttccacgtttgcgtctttctctctgg

SEQ ID NO: 68868 - DNA, 4403 bp, Zea Mays
tgggcgctatcacgctcactgtgggcatcgcaaatgctcttcacatcacaccaagtaggaaacagaaaatatcgattcttcataatgtcagcggcattatcaagccgcacagaatgacactgcttttgggtcctcctggcgccgggaaaacctcactgctgctggccttagctggaacactaccttcaagccttaaaggaatataacttacaatgggcacacaatggacgagtttgaggcccggagatcagctgcttatgtcagccaacatgatctacacatgggagaactgactgttcgtgagacagtcaatttctctgcaagatgtcaaggaagtggtcatcgctatgacttgctagttgaattgtcaaggagagaaaaggacgcaggaatcatacctgataaagaaactgatacctacatgaaggctgctgctacaggagaccaaaaggctgatgtggtcacaaatcacattctaaaggtcttggggttggatgtctgtgctgacacaatcgttggaaacaatatgttgagaggcatatctggaggccagaaaaagcgagtaactacagctgagatgcttgtcaccccaggacgagctgttttcatggatgagatatcaactggacttgacagctcaacaaccttccagattgtgaactctatccgggaaaccattcacattgttggcggaacagcagttattgctttgctacaacctgcacctgagacatatgacctgtttgatgatataatcctcctgtcagatagtcaggttgtctacagtggtcctcgtgaatatgtccttgagttctttgagtcagttggcttcaaatgccctcagcggaaaggtgtagccgacttcctgcaggaagttacatcaaagaaagatcagagacaatactggaaacatggtgatgacacctaccgatacgtccccgtgaaggagtttgcagaagcatttcaatcgttccatgttggtgaggctatacgaaatgagttggctgtcccattcgacaagagtacgagccatcctgctgctctgaaaacatcaagatatggcgccagcgtgaaagagctacttaaagcaaatatcgacagagagatattactaataaaaagaaattcctttgtatacatattcaaggcagttcagatggaaggatatacatgggtgccctgttctttggggtcctgatggtcatgttcaatggactggcagaagttggcctaactattgcaaagctcccagttttcttcaagcaaagggatcttctcttctaccctgcatggacatactccttaccatcatggatcattaagactcccctctccttgctcaatgtaacaatttgggttttcataacatactatgttattggatttgatcccaacgtagaaagactttttagacagttcctgctcctcttactaatgaacgaggcatcatcaggattgttccgtttcattgctgggcttgcaaggcatcaggttgttgcaagcacccttggttcattcggcattctgatatgtatgcttttgggtggattcctcctggcaagagagaatgtgaagaaatggtggatttgggggtactggatatcacccctgatgtatgcacaaaacgccatatcagtaaatgaattcctgggtagcagctggaataagcaagtaatccccggttcagcagaaccgcttggaaaactagttctagaatctcgtggactttttcctgaggcaaagtggtactggattggtgttggtgccttgcttggatatgtgctgctattcaatatactctacacaatctgcctcacattcctcaaaccatttgacagcaatcaaccgacaatttctgaggaggcattaaagataaaacacgcaaatctaactggtgaagttttagaagcatcatcgagaggacgggttgccagcactacaacaacaggtactttggacgagagcaatgatgaagcagcttccaaccatgcaacagtaaattctagtccagtcaacaaaggaatggtcctcccttttgtacctctctccatcacttttgatgatataagatacagtgtggacatgccagaggcaatcagagcacaaggtgtcacagagacccggttggaactactgaagggtataagtggttcgtttaggccaggagtccttactgctcttatgggtgtcagtggtgctggcaagacaacactgatggatgtgttggctgggaggaagaccagtggatacattgtgggcaacattaccatatcaggttacccgaagaaacaagaaacttttgctcgtgtgtcaggatactgtgagcaaaatgatatccactcaccaaatgttaccgtctatgaatcccttgcattctccgcatggctcagattacctgctgatgttgattcctcaacaagaaagatgtttattgatgaggttatggagcttgtggagcttttacccttaaaagatgcattggtaggattgcctggtgtcagtggactatcaacagaacaaaggaaaaggctaaccatagctgttgagcttgttgctaatccttctataattttcatggatgaaccgacatctggacttgatgctcgagcagcagctattgtcatgagggcaataaggaatactgtggacacaggaagaacggttgtttgtaccattcaccaaccaagtatagatatatttgaatcttttgatgagctcttccttatgaaacgtggaggtgaagagatttatgtaggcccactagggatgcattcatgtgaactggtcaaatattttgagggcatcgaaggtgtcaacaagataaaagatggctacaacccctcgacatggatgctggaagtgactagtacaatgcaagagcagataactggtattaacttcagtgaagtatacaagaattcagaactgcacaggaggaataaaactttgataaaggagctaagcacgcctccagaaggttcaagtgacctatcctttccaaccgaatactcacaggctttcctcacacagtgtttggcttgcctgtggaagcaaagcatgtcatattggagaaaccctccatatactggtgtcaaatacttctacacgacagtgattgccctgttgtttggaacaatgttctggggtgtgggcagaaaaagggatagtcaacaggacctgttcaatgccattggttccatgtatgcctcggttattttcatgggagtacagaattctggttcagttcagccagttgtatcggttgagcgaacagtcttttacagggaaagggcggctcatatgtactcgccattgccgtatgccttgggacaggtcgtaatcgaactcccatacatctttgttcagtccttaatatatggcgtgctggtgtatgctatgatcgggtttgaatggacagctgacaagttcttttggtacctcttcttcatgtatttcaccctagcatactacacgttctacgggatgatggtggttggcctgactccgaactacaacgtctcctccgttgcttccacggcgttctatgccatttggaacctcttctcgggattcttaataccaagaactagaattccagtctggtggagatggttctactggatttgccccatcgcatggacgctcaacgggctggtcacttcacagtttggagatgtaaccgagacgttcagtgacggtggggtgcgtatatctgacttcgttgaggactactttgggtaccatcacgacttgctgtgggtggtcgctgtggtggtggtcgcgtttcctgtgctctttgccttgctctttggcctctcgctcaagatattcaacttccaaaagaggtaaataaaatgtgagacagcttgattaatcccaaggcgaaaatagcgcaggcgttgcggaagaaagtggggctgtattgtatgtaaatagcgtattcgttgatcagagcttctcaagctccagacaaattgtgtagctgatagaggatcttgtacctgttggtgtaaaattagccgataatgcccaatttctacgatgtgatgaagttcagcttttgcaaagttttgtacatattggcacacactggctgttcgctgcaacactccaacgatgctctgaaatgatggatgtgtttcctcacagtagaaaatatggcgaccccaatagacctaagctgtgttgatcacgatgataacacatgtagtaattagatgtccatgttgaagtgtataaaaggattggataccttctctcatcaatttaaacttttggtttgaactgatcagtgtatctactctaacatgatatcaaatccagaagcctcgaattcaaatcctaacagatgctttatttgtgttctcacccatttatttccacgtttgcgtctttctctctgg

SEQ ID NO: 68869 - DNA, 4657 bp, Zea Mays
ctcgcccagaggcgccctccagtgcagacctcctgtctgcctatcacctccttctcgcccggaagcgccctccagtgcaggcgagagcagggcaatatcgcccgctctcgccgggcgatggcagcagcgcccggcggatcgctctcgcccacctctagcaatgctctcgccttctgctgggcgctatcacgctcactgtgggcatcgcaaatgctcttcacatcacaccaagtaggaaacagaaaatatcgattcttcataatgtcagcggcattatcaagccgcacagaatgacactgcttttgggtcctcctggcgccgggaaaacctcactgctgctggccttagctggaacactaccttcaagccttaaagtaacagggaatataacttacaatgggcacacaatggacgagtttgaggcccggagatcagctgcttatgtcagccaacatgatctacacatgggagaactgactgttcgtgagacagtcaatttctctgcaagatgtcaaggaagtggtcatcgctatgacttgctagttgaattgtcaaggagagaaaaggacgcaggaatcatacctgataaagaaactgatacctacatgaaggctgctgctacaggagaccaaaaggctgatgtggtcacaaatcacattctaaaggtcttggggttggatgtctgtgctgacacaatcgttggaaacaatatgttgagaggcatatctggaggccagaaaaagcgagtaactacagctgagatgcttgtcaccccaggacgagctgttttcatggatgagatatcaactggacttgacagctcaacaaccttccagattgtgaactctatccgggaaaccattcacattgttggcggaacagcagttattgctttgctacaacctgcacctgagacatatgacctgtttgatgatataatcctcctgtcagatagtcaggttgtctacagtggtcctcgtgaatatgtccttgagttctttgagtcagttggcttcaaatgccctcagcggaaaggtgtagccgacttcctgcaggaagttacatcaaagaaagatcagagacaatactggaaacatggtgatgacacctaccgatacgtccccgtgaaggagtttgcagaagcatttcaatcgttccatgttggtgaggctatacgaaatgagttggctgtcccattcgacaagagtacgagccatcctgctgctctgaaaacatcaagatatggcgccagcgtgaaagagctacttaaagcaaatatcgacagagagatattactaataaaaagaaattcctttgtatacatattcaaggcagttcagctaacactcatggcactcattacgatgaccgtctttctccggaccaatatgcatcgtgactcaatatcagatggaaggatatacatgggtgccctgttctttggggtcctgatggtcatgttcaatggactggcagaagttggcctaactattgcaaagctcccagttttcttcaagcaaagggatcttctcttctaccctgcatggacatactccttaccatcatggatcattaagactcccctctccttgctcaatgtaacaatttgggttttcataacatactatgttattggatttgatcccaacgtagaaagactttttagacagttcctgctcctcttactaatgaacgaggcatcatcaggattgttccgtttcattgctgggcttgcaaggcatcaggttgttgcaagcacccttggttcattcggcattctgatatgtatgcttttgggtggattcctcctggcaagagagaatgtgaagaaatggtggatttgggggtactggatatcacccctgatgtatgcacaaaacgccatatcagtaaatgaattcctgggtagcagctggaataagcaagtaatccccggttcagcagaaccgcttggaaaactagttctagaatctcgtggactttttcctgaggcaaagtggtactggattggtgttggtgccttgcttggatatgtgctgctattcaatatactctacacaatctgcctcacattcctcaaaccatttgacagcaatcaaccgacaatttctgaggaggcattaaagataaaacacgcaaatctaactggtgaagttttagaagcatcatcgagaggacgggttgccagcactacaacaacaggtactttggacgagagcaatgatgaagcagcttccaaccatgcaacagtaaattctagtccagtcaacaaaggaatggtcctcccttttgtacctctctccatcacttttgatgatataagatacagtgtggacatgccagaggcaatcagagcacaaggtgtcacagagacccggttggaactactgaagggtataagtggttcgtttaggccaggagtccttactgctcttatgggtgtcagtggtgctggcaagacaacactgatggatgtgttggctgggaggaagaccagtggatacattgtgggcaacattaccatatcaggttacccgaagaaacaagaaacttttgctcgtgtgtcaggatactgtgagcaaaatgatatccactcaccaaatgttaccgtctatgaatcccttgcattctccgcatggctcagattacctgctgatgttgattcctcaacaagaaagatgtttattgatgaggttatggagcttgtggagcttttacccttaaaagatgcattggtaggattgcctggtgtcagtggactatcaacagaacaaaggaaaaggctaaccatagctgttgagcttgttgctaatccttctataattttcatggatgaaccgacatctggacttgatgctcgagcagcagctattgtcatgagggcaataaggaatactgtggacacaggaagaacggttgtttgtaccattcaccaaccaagtatagatatatttgaatcttttgatgagctcttccttatgaaacgtggaggtgaagagatttatgtaggcccactagggatgcattcatgtgaactggtcaaatattttgagggcatcgaaggtgtcaacaagataaaagatggctacaacccctcgacatggatgctggaagtgactagtacaatgcaagagcagataactggtattaacttcagtgaagtatacaagaattcagaactgcacaggaggaataaaactttgataaaggagctaagcacgcctccagaaggttcaagtgacctatcctttccaaccgaatactcacaggctttcctcacacagtgtttggcttgcctgtggaagcaaagcatgtcatattggagaaaccctccatatactggtgtcaaatacttctacacgacagtgattgccctgttgtttggaacaatgttctggggtgtgggcagaaaaagggatagtcaacaggacctgttcaatgccattggttccatgtatgcctcggttattttcatgggagtacagaattctggttcagttcagccagttgtatcggttgagcgaacagtcttttacagggaaagggcggctcatatgtactcgccattgccgtatgccttgggacaggtcgtaatcgaactcccatacatctttgttcagtccttaatatatggcgtgctggtgtatgctatgatcgggtttgaatggacagctgacaagttcttttggtacctcttcttcatgtatttcaccctagcatactacacgttctacgggatgatggtggttggcctgactccgaactacaacgtctcctccgttgcttccacggcgttctatgccatttggaacctcttctcgggattcttaataccaagaactagaattccagtctggtggagatggttctactggatttgccccatcgcatggacgctcaacgggctggtcacttcacagtttggagatgtaaccgagacgttcagtgacggtggggtgcgtatatctgacttcgttgaggactactttgggtaccatcacgacttgctgtgggtggtcgctgtggtggtggtcgcgtttcctgtgctctttgccttgctctttggcctctcgctcaagatattcaacttccaaaagaggtaaataaaatgtgagacagcttgattaatcccaaggcgaaaatagcgcaggcgttgcggaagaaagtggggctgtattgtatgtaaatagcgtattcgttgatcagagcttctcaagctccagacaaattgtgtagctgatagaggatcttgtacctgttggtgtaaaattagccgataatgcccaatttctacgatgtgatgaagttcagcttttgcaaagttttgtacatattggcacacactggctgttcgctgcaacactccaacgatgctctgaaatgatggatgtgtttcctcacagtagaaaatatggcgaccccaatagacctaagctgtgttgatcacgatgataacacatgtagtaattagatgtccatgttgaagtgtataaaaggattggataccttctctcatcaatttaaacttttggtttgaactgatcagtgtatctactctaacatgatatcaaatccagaagcctcgaattcaaatcctaacagatgctttatttgtgttctcacccatttatttccacgtttgcgtctttctctctgg

SEQ ID NO: 68870 - DNA, 4690 bp, Zea Mays
tcaagcctaatctaagccacaaatcaaggtttcagggcatcgcaaatgctcttcacatcacaccaagtaggaaacagaaaatatcgattcttcataatgtcagcggcattatcaagccgcacagaatgacactgcttttgggtcctcctggcgccgggaaaacctcactgctgctggccttagctggaacactaccttcaagccttaaagtaacagggaatataacttacaatgggcacacaatggacgagtttgaggcccggagatcagctgcttatgtcagccaacatgatctacacatgggagaactgactgttcgtgagacagtcaatttctctgcaagatgtcaaggaagtggtcatcgctatgacttgctagttgaattgtcaaggagagaaaaggacgcaggaatcatacctgataaagaaactgatacctacatgaaggctgctgctacaggagaccaaaaggctgatgtggtcacaaatcacattctaaaggtcttggggttggatgtctgtgctgacacaatcgttggaaacaatatgttgagaggcatatctggaggccagaaaaagcgagtaactacagctgagatgcttgtcaccccaggacgagctgttttcatggatgagatatcaactggacttgacagctcaacaaccttccagattgtgaactctatccgggaaaccattcacattgttggcggaacagcagttattgctttgctacaacctgcacctgagacatatgacctgtttgatgatataatcctcctgtcagatagtcaggttgtctacagtggtcctcgtgaatatgtccttgagttctttgagtcagttggcttcaaatgccctcagcggaaaggtgtagccgacttcctgcaggaagttacatcaaagaaagatcagagacaatactggaaacatggtgatgacacctaccgatacgtccccgtgaaggagtttgcagaagcatttcaatcgttccatgttggtgaggctatacgaaatgagttggctgtcccattcgacaagagtacgagccatcctgctgctctgaaaacatcaagatatggcgccagcgtgaaagagctacttaaagcaaatatcgacagagagatattactaataaaaagaaattcctttgtatacatattcaaggcagttcagctaacactcatggcactcattacgatgaccgtctttctccggaccaatatgcatcgtgactcaatatcagatggaaggatatacatgggtgccctgttctttggggtcctgatggtcatgttcaatggactggcagaagttggcctaactattgcaaagctcccagttttcttcaagcaaagggatcttctcttctaccctgcatggacatactccttaccatcatggatcattaagactcccctctccttgctcaatgtaacaatttgggttttcataacatactatgttattggatttgatcccaacgtagaaagactttttagacagttcctgctcctcttactaatgaacgaggcatcatcaggattgttccgtttcattgctgggcttgcaaggcatcaggttgttgcaagcacccttggttcattcggcattctgatatgtatgcttttgggtggattcctcctggcaagagagaatgtgaagaaatggtggatttgggggtactggatatcacccctgatgtatgcacaaaacgccatatcagtaaatgaattcctgggtagcagctggaataagcaagtaatccccggttcagcagaaccgcttggaaaactagttctagaatctcgtggactttttcctgaggcaaagtggtactggattggtgttggtgccttgcttggatatgtgctgctattcaatatactctacacaatctgcctcacattcctcaaaccatttgacagcaatcaaccgacaatttctgaggaggcattaaagataaaacacgcaaatctaactggtgaagttttagaagcatcatcgagaggacgggttgccagcactacaacaacaggtactttggacgagagcaatgatgaagcagcttccaaccatgcaacagtaaattctagtccagtcaacaaaggaatggtcctcccttttgtacctctctccatcacttttgatgatataagatacagtgtggacatgccagagcacgccgtagatgttggagctcgattgcgacagcaagcagcaggtcgccatgggacgagcatcagcgctgaggacctcggctaccgctgcacgccggagctcggctggggaggaagaccagcacagaggagcgaaggccctctactgctactgtggagctacgccggagaggacgaagaccagcaccgacgacctcaggcaatcagagcacaaggtgtcacagagacccggttggaactactgaagggtataagtggttcgtttaggccaggagtccttactgctcttatgggtgtcagtggtgctggcaagacaacactgatggatgtgttggctgggaggaagaccagtggatacattgtgggcaacattaccatatcaggttacccgaagaaacaagaaacttttgctcgtgtgtcaggatactgtgagcaaaatgatatccactcaccaaatgttaccgtctatgaatcccttgcattctccgcatggctcagattacctgctgatgttgattcctcaacaagaaagatgtttattgatgaggttatggagcttgtggagcttttacccttaaaagatgcattggtaggattgcctggtgtcagtggactatcaacagaacaaaggaaaaggctaaccatagctgttgagcttgttgctaatccttctataattttcatggatgaaccgacatctggacttgatgctcgagcagcagctattgtcatgagggcaataaggaatactgtggacacaggaagaacggttgtttgtaccattcaccaaccaagtatagatatatttgaatcttttgatgagctcttccttatgaaacgtggaggtgaagagatttatgtaggcccactagggatgcattcatgtgaactggtcaaatattttgagggcatcgaaggtgtcaacaagataaaagatggctacaacccctcgacatggatgctggaagtgactagtacaatgcaagagcagataactggtattaacttcagtgaagtatacaagaattcagaactgcacaggaggaataaaactttgataaaggagctaagcacgcctccagaaggttcaagtgacctatcctttccaaccgaatactcacaggctttcctcacacagtgtttggcttgcctgtggaagcaaagcatgtcatattggagaaaccctccatatactggtgtcaaatacttctacacgacagtgattgccctgttgtttggaacaatgttctggggtgtgggcagaaaaagggatagtcaacaggacctgttcaatgccattggttccatgtatgcctcggttattttcatgggagtacagaattctggttcagttcagccagttgtatcggttgagcgaacagtcttttacagggaaagggcggctcatatgtactcgccattgccgtatgccttgggacaggtcgtaatcgaactcccatacatctttgttcagtccttaatatatggcgtgctggtgtatgctatgatcgggtttgaatggacagctgacaagttcttttggtacctcttcttcatgtatttcaccctagcatactacacgttctacgggatgatggtggttggcctgactccgaactacaacgtctcctccgttgcttccacggcgttctatgccatttggaacctcttctcgggattcttaataccaagaactagaattccagtctggtggagatggttctactggatttgccccatcgcatggacgctcaacgggctggtcacttcacagtttggagatgtaaccgagacgttcagtgacggtggggtgcgtatatctgacttcgttgaggactactttgggtaccatcacgacttgctgtgggtggtcgctgtggtggtggtcgcgtttcctgtgctctttgccttgctctttggcctctcgctcaagatattcaacttccaaaagaggtaaataaaatgtgagacagcttgattaatcccaaggcgaaaatagcgcaggcgttgcggaagaaagtggggctgtattgtatgtaaatagcgtattcgttgatcagagcttctcaagctccagacaaattgtgtagctgatagaggatcttgtacctgttggtgtaaaattagccgataatgcccaatttctacgatgtgatgaagttcagcttttgcaaagttttgtacatattggcacacactggctgttcgctgcaacactccaacgatgctctgaaatgatggatgtgtttcctcacagtagaaaatatggcgaccccaatagacctaagctgtgttgatcacgatgataacacatgtagtaattagatgtccatgttgaagtgtataaaaggattggataccttctctcatcaatttaaacttttggtttgaactgatcagtgtatctactctaacatgatatcaaatccagaagcctcgaattcaaatcctaacagatgctttatttgtgttctcacccatttatttccacgtttgcgtctttctctctgg

SEQ ID NO: 68871 - DNA, 4290 bp, Zea Mays
atggacgacgccggggagatacacgcgctggggagcctgcggcgggacggatcggtgtggtcggccgcgagcgacaccgtcttctcctcgctgtcgtcgcgcgcggacggcggcgtcgacgacgaggaggccctgcggtgggcggcgcttgagaagctgccgacctacgaccgcgcgaggacggccgtgctcgccatgcccgagggcgacctccgccacgtgaacgtgcagaagctcgacccgcaggagcgccacgcgctgctgcagcgcctcgcctgggtcggcgacgaccaccagcgcttcctctccaagttcaaggaccgcgtcgaccgggtggggattgatctgcccaagatcgaagtgcggtaccagaacctgaacgtcgaggcagaggcgtacgtcggcagtagggggctgcccaccatcctcaacacatacgccaacgtgctcgagggcatcgcaaatgctcttcacatcacaccaagtaggaaacagaaaatatcgattcttcataatgtcagcggcattatcaagccgcacagaatgacactgcttttgggtcctcctggcgccgggaaaacctcactgctgctggccttagctggaacactaccttcaagccttaaagtaacagggaatataacttacaatgggcacacaatggacgagtttgaggcccggagatcagctgcttatgtcagccaacatgatctacacatgggagaactgactgttcgtgagacagtcaatttctctgcaagatgtcaaggaagtggtcatcgctatgacttgctagttgaattgtcaaggagagaaaaggacgcaggaatcatacctgataaagaaactgatacctacatgaaggctgctgctacaggagaccaaaaggctgatgtggtcacaaatcacattctaaaggtcttggggttggatgtctgtgctgacacaatcgttggaaacaatatgttgagaggcatatctggaggccagaaaaagcgagtaactacagctgagatgcttgtcaccccaggacgagctgttttcatggatgagatatcaactggacttgacagctcaacaaccttccagattgtgaactctatccgggaaaccattcacattgttggcggaacagcagttattgctttgctacaacctgcacctgagacatatgacctgtttgatgatataatcctcctgtcagatagtcaggttgtctacagtggtcctcgtgaatatgtccttgagttctttgagtcagttggcttcaaatgccctcagcggaaaggtgtagccgacttcctgcaggaagttacatcaaagaaagatcagagacaatactggaaacatggtgatgacacctaccgatacgtccccgtgaaggagtttgcagaagcatttcaatcgttccatgttggtgaggctatacgaaatgagttggctgtcccattcgacaagagtacgagccatcctgctgctctgaaaacatcaagatatggcgccagcgtgaaagagctacttaaagcaaatatcgacagagagatattactaataaaaagaaattcctttgtatacatattcaaggcagttcagctaacactcatggcactcattacgatgaccgtctttctccggaccaatatgcatcgtgactcaatatcagatggaaggatatacatgggtgccctgttctttggggtcctgatggtcatgttcaatggactggcagaagttggcctaactattgcaaagctcccagttttcttcaagcaaagggatcttctcttctaccctgcatggacatactccttaccatcatggatcattaagactcccctctccttgctcaatgtaacaatttgggttttcataacatactatgttattggatttgatcccaacgtagaaagactttttagacagttcctgctcctcttactaatgaacgaggcatcatcaggattgttccgtttcattgctgggcttgcaaggcatcaggttgttgcaagcacccttggttcattcggcattctgatatgtatgcttttgggtggattcctctgctcttatgggtgtcagtggtgctggcaagacaacactgatggatgtgttggctgggaggaagaccagtggatacattgtgggcaacattaccatatcaggttacccgaagaaacaagaaacttttgctcgtgtgtcaggatactgtgagcaaaatgatatccactcaccaaatgttaccgtctatgaatcccttgcattctccgcatggctcagattacctgctgatgttgattcctcaacaagaaagatgtttattgatgaggttatggagcttgtggagcttttacccttaaaagatgcattggtaggattgcctggtgtcagtggactatcaacagaacaaaggaaaaggctaaccatagctgttgagcttgttgctaatccttctataattttcatggatgaaccgacatctggacttgatgctcgagcagcagctattgtcatgagggcaataaggaatactgtggacacaggaagaacggttgtttgtaccattcaccaaccaagtatagatatatttgaatcttttgatgagctcttccttatgaaacgtggaggtgaagagatttatgtaggcccactagggatgcattcatgtgaactggtcaaatattttgagggcatcgaaggtgtcaacaagataaaagatggctacaacccctcgacatggatgctggaagtgactagtacaatgcaagagcagataactggtattaacttcagtgaagtatacaagaattcagaactgcacaggaggaataaaactttgataaaggagctaagcacgcctccagaaggttcaagtgacctatcctttccaaccgaatactcacaggctttcctcacacagtgtttggcttgcctgtggaagcaaagcatgtcatattggagaaaccctccatatactggtgtcaaatacttctacacgacagtgattgccctgttgtttggaacaatgttctggggtgtgggcagaaaaagggatagtcaacaggacctgttcaatgccattggttccatgtatgcctcggttattttcatgggagtacagaattctggttcagttcagccagttgtatcggttgagcgaacagtcttttacagggaaagggcggctcatatgtactcgccattgccgtatgccttgggacaggtcgtaatcgaactcccatacatctttgttcagtccttaatatatggcgtgctggtgtatgctatgatcgggtttgaatggacagctgacaagttcttttggtacctcttcttcatgtatttcaccctagcatactacacgttctacgggatgatggtggttggcctgactccgaactacaacgtctcctccgttgcttccacggcgttctatgccatttggaacctcttctcgggattcttaataccaagaactagaattccagtctggtggagatggttctactggatttgccccatcgcatggacgctcaacgggctggtcacttcacagtttggagatgtaaccgagacgttcagtgacggtggggtgcgtatatctgacttcgttgaggactactttgggtaccatcacgacttgctgtgggtggtcgctgtggtggtggtcgcgtttcctgtgctctttgccttgctctttggcctctcgctcaagatattcaacttccaaaagaggtaaataaaatgtgagacagcttgattaatcccaaggcgaaaatagcgcaggcgttgcggaagaaagtggggctgtattgtatgtaaatagcgtattcgttgatcagagcttctcaagctccagacaaattgtgtagctgatagaggatcttgtacctgttggtgtaaaattagccgataatgcccaatttctacgatgtgatgaagttcagcttttgcaaagttttgtacatattggcacacactggctgttcgctgcaacactccaacgatgctctgaaatgatggatgtgtttcctcacagtagaaaatatggcgaccccaatagacctaagctgtgttgatcacgatgataacacatgtagtaattagatgtccatgttgaagtgtataaaaggattggataccttctctcatcaatttaaacttttggtttgaactgatcagtgtatctactctaacatgatatcaaatccagaagcctcgaattcaaatcctaacagatgctttatttgtgttctcacccatttatttccacgtttgcgtctttctctctgg

SEQ ID NO: 68872 - DNA, 4893 bp, Zea Mays
ggcgtaatgacctgctactcgtctaccggttccgtagtgtgaggattaaggagggaacctctccaacttcgagccccgtcttcttattgccttcccggcctggcggtggcggcatggacgacgccggggagatacacgcgctggggagcctgcggcgggacggatcggtgtggtcggccgcgagcgacaccgtcttctcctcgctgtcgtcgcgcgcggacggcggcgtcgacgacgaggaggccctgcggtgggcggcgcttgagaagctgccgacctacgaccgcgcgaggacggccgtgctcgccatgcccgagggcgacctccgccacgtgaacgtgcagaagctcgacccgcaggagcgccacgcgctgctgcagcgcctcgcctgggtcggcgacgaccaccagcgcttcctctccaagttcaaggaccgcgtcgaccgggtggggattgatctgcccaagatcgaagtgcggtaccagaacctgaacgtcgaggcagaggcgtacgtcggcagtagggggctgcccaccatcctcaacacatacgccaacgtgctcgagggcatcgcaaatgctcttcacatcacaccaagtaggaaacagaaaatatcgattcttcataatgtcagcggcattatcaagccgcacagaatgacactgcttttgggtcctcctggcgccgggaaaacctcactgctgctggccttagctggaacactaccttcaagccttaaagtaacagggaatataacttacaatgggcacacaatggacgagtttgaggcccggagatcagctgcttatgtcagccaacatgatctacacatgggagaactgactgttcgtgagacagtcaatttctctgcaagatgtcaaggaagtggtcatcgctatgacttgctagttgaattgtcaaggagagaaaaggacgcaggaatcatacctgataaagaaactgatacctacatgaaggctgctgctacaggagaccaaaaggctgatgtggtcacaaatcacattctaaaggtcttggggttggatgtctgtgctgacacaatcgttggaaacaatatgttgagaggcatatctggaggccagaaaaagcgagtaactacagctgagatgcttgtcaccccaggacgagctgttttcatggatgagatatcaactggacttgacagctcaacaaccttccagattgtgaactctatccgggaaaccattcacattgttggcggaacagcagttattgctttgctacaacctgcacctgagacatatgacctgtttgatgatataatcctcctgtcagatagtcaggttgtctacagtggtcctcgtgaatatgtccttgagttctttgagtcagttggcttcaaatgccctcagcggaaaggtgtagccgacttcctgcaggaagttacatcaaagaaagatcagagacaatactggaaacatggtgatgacacctaccgatacgtccccgtgaaggagtttgcagaagcatttcaatcgttccatgttggtgaggctatacgaaatgagttggctgtcccattcgacaagagtacgagccatcctgctgctctgaaaacatcaagatatggcgccagcgtgaaagagctacttaaagcaaatatcgacagagagatattactaataaaaagaaattcctttgtatacatattcaaggcagttcagctaacactcatggcactcattacgatgaccgtctttctccggaccaatatgcatcgtgactcaatatcagatggaaggatatacatgggtgccctgttctttggggtcctgatggtcatgttcaatggactggcagaagttggcctaactattgcaaagctcccagttttcttcaagcaaagggatcttctcttctaccctgcatggacatactccttaccatcatggatcattaagactcccctctccttgctcaatgtaacaatttgggttttcataacatactatgttattggatttgatcccaacgtagaaagactttttagacagttcctgctcctcttactaatgaacgaggcatcatcaggattgttccgtttcattgctgggcttgcaaggcatcaggttgttgcaagcacccttggttcattcggcattctgatatgtatgcttttgggtggattcctcctggcaagagagaatgtgaagaaatggtggatttgggggtactggatatcacccctgatgtatgcacaaaacgccatatcagtaaatgaattcctgggtagcagctggaataagcaagtaatccccggttcagcagaaccgcttggaaaactagttctagaatctcgtggactttttcctgaggcaaagtggtactggattggtgttggtgccttgcttggatatgtgctgctattcaatatactctacacaatctgcctcacattcctcaaaccatttgacagcaatcaaccgacaatttctgaggaggcattaaagataaaacacgcaaatctaactggtgaagttttagaagcatcatcgagaggacgggttgccagcactacaacaacaggtactttggacgagagcaatgatgaagcagcttccaaccatgcaacagtaaattctagtccagtcaacaaaggaatggtcctcccttttgtacctctctccatcacttttgatgatataagatacagtgtggacatgccagaggcaatcagagcacaaggtgtcacagagacccggttggaactactgaagggtataagtggttcgtttaggccaggagtccttactgctcttatgggtgtcagtggtgctggcaagacaacactgatggatgtgttggctgggaggaagaccagtggatacattgtgggcaacattaccatatcaggttacccgaagaaacaagaaacttttgctcgtgtgtcaggatactgtgagcaaaatgatatccactcaccaaatgttaccgtctatgaatcccttgcattctccgcatggctcagattacctgctgatgttgattcctcaacaagaaagatgtttattgatgaggttatggagcttgtggagcttttacccttaaaagatgcattggtaggattgcctggtgtcagtggactatcaacagaacaaaggaaaaggctaaccatagctgttgagcttgttgctaatccttctataattttcatggatgaaccgacatctggacttgatgctcgagcagcagctattgtcatgagggcaataaggaatactgtggacacaggaagaacggttgtttgtaccattcaccaaccaagtatagatatatttgaatcttttgatgagctcttccttatgaaacgtggaggtgaagagatttatgtaggcccactagggatgcattcatgtgaactggtcaaatattttgagggcatcgaaggtgtcaacaagataaaagatggctacaacccctcgacatggatgctggaagtgactagtacaatgcaagagcagataactggtattaacttcagtgaagtatacaagaattcagaactgcacaggaggaataaaactttgataaaggagctaagcacgcctccagaaggttcaagtgacctatcctttccaaccgaatactcacaggctttcctcacacagtgtttggcttgcctgtggaagcaaagcatgtcatattggagaaaccctccatatactggtgtcaaatacttctacacgacagtgattgccctgttgtttggaacaatgttctggggtgtgggcagaaaaagggatagtcaacaggacctgttcaatgccattggttccatgtatgcctcggttattttcatgggagtacagaattctggttcagttcagccagttgtatcggttgagcgaacagtcttttacagggaaagggcggctcatatgtactcgccattgccgtatgccttgggacagcatactacacgttctacgggatgatggtggttggcctgactccgaactacaacgtctcctccgttgcttccacggcgttctatgccatttggaacctcttctcgggattcttaataccaagaactagaattccagtctggtggagatggttctactggatttgccccatcgcatggacgctcaacgggctggtcacttcacagtttggagatgtaaccgagacgttcagtgacggtggggtgcgtatatctgacttcgttgaggactactttgggtaccatcacgacttgctgtgggtggtcgctgtggtggtggtcgcgtttcctgtgctctttgccttgctctttggcctctcgctcaagatattcaacttccaaaagaggtaaataaaatgtgagacagcttgattaatcccaaggcgaaaatagcgcaggcgttgcggaagaaagtggggctgtattgtatgtaaatagcgtattcgttgatcagagcttctcaagctccagacaaattgtgtagctgatagaggatcttgtacctgttggtgtaaaattagccgataatgcccaatttctacgatgtgatgaagttcagcttttgcaaagttttgtacatattggcacacactggctgttcgctgcaacactccaacgatgctctgaaatgatggatgtgtttcctcacagtagaaaatatggcgaccccaatagacctaagctgtgttgatcacgatgataacacatgtagtaattagatgtccatgttgaagtgtataaaaggattggataccttctctcatcaatttaaacttttggtttgaactgatcagtgtatctactctaacatgatatcaaatccagaagcctcgaattcaaatcctaacagatgctttatttgtgttctcacccatttatttccacgtttgcgtctttctctctgg

SEQ ID NO: 68873 - DNA, 5135 bp, Zea Mays
cactcacctctatcgttcttgcacagacaaagttgtgggagtccctttctcctcacggcgccccgccccgctatataatctgatgcgacacgagcgcagcagtccacgacgaggcgtaatgacctgctactcgtctaccggttccgtagtgtgaggattaaggagggaacctctccaacttcgagccccgtcttcttattgccttcccggcctggcggtggcggcatggacgacgccggggagatacacgcgctggggagcctgcggcgggacggatcggtgtggtcggccgcgagcgacaccgtcttctcctcgctgtcgtcgcgcgcggacggcggcgtcgacgacgaggaggccctgcggtgggcggcgcttgagaagctgccgacctacgaccgcgcgaggacggccgtgctcgccatgcccgagggcgacctccgccacgtgaacgtgcagaagctcgacccgcaggagcgccacgcgctgctgcagcgcctcgcctgggtcggcgacgaccaccagcgcttcctctccaagttcaaggaccgcgtcgaccgggtggggattgatctgcccaagatcgaagtgcggtaccagaacctgaacgtcgaggcagaggcgtacgtcggcagtagggggctgcccaccatcctcaacacatacgccaacgtgctcgagggcatcgcaaatgctcttcacatcacaccaagtaggaaacagaaaatatcgattcttcataatgtcagcggcattatcaagccgcacagaatgacactgcttttgggtcctcctggcgccgggaaaacctcactgctgctggccttagctggaacactaccttcaagccttaaagtaacagggaatataacttacaatgggcacacaatggacgagtttgaggcccggagatcagctgcttatgtcagccaacatgatctacacatgggagaactgactgttcgtgagacagtcaatttctctgcaagatgtcaaggaagtggtcatcgctatgacttgctagttgaattgtcaaggagagaaaaggacgcaggaatcatacctgataaagaaactgatacctacatgaaggctgctgctacaggagaccaaaaggctgatgtggtcacaaatcacattctaaaggtcttggggttggatgtctgtgctgacacaatcgttggaaacaatatgttgagaggcatatctggaggccagaaaaagcgagtaactacagctgagatgcttgtcaccccaggacgagctgttttcatggatgagatatcaactggacttgacagctcaacaaccttccagattgtgaactctatccgggaaaccattcacattgttggcggaacagcagttattgctttgctacaacctgcacctgagacatatgacctgtttgatgatataatcctcctgtcagatagtcaggttgtctacagtggtcctcgtgaatatgtccttgagttctttgagtcagttggcttcaaatgccctcagcggaaaggtgtagccgacttcctgcaggaagttacatcaaagaaagatcagagacaatactggaaacatggtgatgacacctaccgatacgtccccgtgaaggagtttgcagaagcatttcaatcgttccatgttggtgaggctatacgaaatgagttggctgtcccattcgacaagagtacgagccatcctgctgctctgaaaacatcaagatatggcgccagcgtgaaagagctacttaaagcaaatatcgacagagagatattactaataaaaagaaattcctttgtatacatattcaaggcagttcagctaacactcatggcactcattacgatgaccgtctttctccggaccaatatgcatcgtgactcaatatcagatggaaggatatacatgggtgccctgttctttggggtcctgatggtcatgttcaatggactggcagaagttggcctaactattgcaaagctcccagttttcttcaagcaaagggatcttctcttctaccctgcatggacatactccttaccatcatggatcattaagactcccctctccttgctcaatgtaacaatttgggttttcataacatactatgttattggatttgatcccaacgtagaaagactttttagacagttcctgctcctcttactaatgaacgaggcatcatcaggattgttccgtttcattgctgggcttgcaaggcatcaggttgttgcaagcacccttggttcattcggcattctgatatgtatgcttttgggtggattcctcctggcaagagagaatgtgaagaaatggtggatttgggggtactggatatcacccctgatgtatgcacaaaacgccatatcagtaaatgaattcctgggtagcagctggaataagcaagtaatccccggttcagcagaaccgcttggaaaactagttctagaatctcgtggactttttcctgaggcaaagtggtactggattggtgttggtgccttgcttggatatgtgctgctattcaatatactctacacaatctgcctcacattcctcaaaccatttgacagcaatcaaccgacaatttctgaggaggcattaaagataaaacacgcaaatctaactggtgaagttttagaagcatcatcgagaggacgggttgccagcactacaacaacaggtactttggacgagagcaatgatgaagcagcttccaaccatgcaacagtaaattctagtccagtcaacaaaggaatggtcctcccttttgtacctctctccatcacttttgatgatataagatacagtgtggacatgccagaggcaatcagagcacaaggtgtcacagagacccggttggaactactgaagggtataagtggttcgtttaggccaggagtccttactgctcttatgggtgtcagtggtgctggcaagacaacactgatggatgtgttggctgggaggaagaccagtggatacattgtgggcaacattaccatatcaggttacccgaagaaacaagaaacttttgctcgtgtgtcaggatactgtgagcaaaatgatatccactcaccaaatgttaccgtctatgaatcccttgcattctccgcatggctcagattacctgctgatgttgattcctcaacaagaaagatgtttattgatgaggttatggagcttgtggagcttttacccttaaaagatgcattggtaggattgcctggtgtcagtggactatcaacagaacaaaggaaaaggctaaccatagctgttgagcttgttgctaatccttctataattttcatggatgaaccgacatctggacttgatgctcgagcagcagctattgtcatgagggcaataaggaatactgtggacacaggaagaacggttgtttgtaccattcaccaaccaagtatagatatatttgaatcttttgatgagctcttccttatgaaacgtggaggtgaagagatttatgtaggcccactagggatgcattcatgtgaactggtcaaatattttgagggcatcgaaggtgtcaacaagataaaagatggctacaacccctcgacatggatgctggaagtgactagtacaatgcaagagcagataactggtattaacttcagtgaagtatacaagaattcagaactgcacaggaggaataaaactttgataaaggagctaagcacgcctccagaaggttcaagtgacctatcctttccaaccgaatactcacaggctttcctcacacagtgtttggcttgcctgtggaagcaaagcatgtcatattggagaaaccctccatatactggtgtcaaatacttctacacgacagtgattgccctgttgtttggaacaatgttctggggtgtgggcagaaaaagggatagtcaacaggacctgttcaatgccattggttccatgtatgcctcggttattttcatgggagtacagaattctggttcagttcagccagttgtatcggttgagcgaacagtcttttacagggaaagggcggctcatatgtactcgccattgccgtatgccttgggacaggtcgtaatcgaactcccatacatctttgttcagtccttaatatatggcgtgctggtgtatgctatgatcgggtttgaatggacagctgacaagttcttttggtacctcttcttcatgtatttcaccctagcatactacacgttctacgggatgatggtggttggcctgactccgaactacaacgtctcctccgttgcttccacggcgttctatgccatttggaacctcttctcgggattcttaataccaagaactagaattccagtctggtggagatggttctactggatttgccccatcgcatggacgctcaacgggctggtcacttcacagtttggagatgtaaccgagacgttcagtgacggtggggtgcgtatatctgacttcgttgaggactactttgggtaccatcacgacttgctgtgggtggtcgctgtggtggtggtcgcgtttcctgtgctctttgccttgctctttggcctctcgctcaagatattcaacttccaaaagaggtaaataaaatgtgagacagcttgattaatcccaaggcgaaaatagcgcaggcgttgcggaagaaagtggggctgtattgtatgtaaatagcgtattcgttgatcagagcttctcaagctccagacaaattgtgtagctgatagaggatcttgtacctgttggtgtaaaattagccgataatgcccaatttctacgatgtgatgaagttcagcttttgcaaagttttgtacatattggcacacactggctgttcgctgcaacactccaacgatgctctgaaatgatggatgtgtttcctcacagtagaaaatatggcgaccccaatagacctaagctgtgttgatcacgatgataacacatgtagtaattagatgtccatgttgaagtgtataaaaggattggataccttctctcatcaatttaaacttttggtttgaactgatcagtgtatctactctaacatgatatcaaatccagaagcctcgaattcaaatcctaacagatgctttatttgtgttctcacccatttatttccacgtttgcgtctttctctctgg

SEQ ID NO: 68874 - DNA, 4088 bp, Zea Mays
atggacgacgccggggagatacacgcgctggggagcctgcggcgggacggatcggtgtggtcggccgcgagcgacaccgtcttctcctcgctgtcgtcgcgcgcggacggcggcgtcgacgacgaggaggccctgcggtgggcggcgcttgagaagctgccgacctacgaccgcgcgaggacggccgtgctcgccatgcccgagggcgacctccgccacgtgaacgtgcagaagctcgacccgcaggagcgccacgcgctgctgcagcgcctcgcctgggtcggcgacgaccaccagcgcttcctctccaagttcaaggaccgcgtcgaccgggtggggattgatctgcccaagatcgaagtgcggtaccagaacctgaacgtcgaggcagaggcgtacgtcggcagtagggggctgcccaccatcctcaacacatacgccaacgtgctcgagggcatcgcaaatgctcttcacatcacaccaagtaggaaacagaaaatatcgattcttcataatgtcagcggcattatcaagccgcacagaatgacactgcttttgggtcctcctggcgccgggaaaacctcactgctgctggccttagctggaacactaccttcaagccttaaagtaacagggaatataacttacaatgggcacacaatggacgagtttgaggcccggagatcagctgcttatgtcagccaacatgatctacacatgggagaactgactgttcgtgagacagtcaatttctctgcaagatgtcaaggaagtggtcatcgctatgacttgctagttgaattgtcaaggagagaaaaggacgcaggaatcatacctgataaagaaactgatacctacatgaaggctgctgctacaggagaccaaaaggctgatgtggtcacaaatcacattctaaaggtcttggggttggatgtctgtgctgacacaatcgttggaaacaatatgttgagaggcatatctggaggccagaaaaagcgagtaactacagctgagatgcttgtcaccccaggacgagctgttttcatggatgagatatcaactggacttgacagctcaacaaccttccagattgtgaactctatccgggaaaccattcacattgttggcggaacagcagttattgctttgctacaacctgcacctgagacatatgacctgtttgatgatataatcctcctgtcagatagtcaggttgtctacagtggtcctcgtgaatatgtccttgagttctttgagtcagttggcttcaaatgccctcagcggaaaggtgtagccgacttcctgcaggaagttacatcaaagaaagatcagagacaatactggaaacatggtgatgacacctaccgatacgtccccgtgaaggagtttgcagaagcatttcaatcgttccatgttggtgaggctatacgaaatgagttggctgtcccattcgacaagagtacgagccatcctgctgctctgaaaacatcaagatatggcgccagcgtgaaagagctacttaaagcaaatatcgacagagagatattactaataaaaagaaattcctttgtatacatattcaaggcagttcagctaacactcatggcactcattacgatgaccgtctttctccggaccaatatgcatcgtgactcaatatcagatggaaggatatacatgggtgccctgttctttggggtcctgatggtcatgttcaatggactggcagaagttggcctaactattgcaaagctcccagttttcttcaagcaaagggatcttctcttctaccctgcatggacatactccttaccatcatggatcattaagactcccctctccttgctcaatgtaacaatttgggttttcataacatactatgttattggatttgatcccaacgtagaaagactttttagacagttcctgctcctcttactaatgaacgaggcatcatcaggattgttccgtttcattgctgggcttgcaaggcatcaggttgttgcaagcacccttggttcattcggcattctgatatgtatgcttttgggtggattcctcctggcaagagagaatgtgaagaaatggtggatttgggggtactggatatcacccctgatgtatgcacaaaacgccatatcagtaaatgaattcctgggtagcagctggaataagcaagtaatccccggttcagcagaaccgcttggaaaactagttctagaatctcgtggactttttcctgaggcaaagtggtactggattggtgttggtgccttgcttggatatgtgctgctattcaatatactctacacaatctgcctcacattcctcaaaccatttgacagcaatcaaccgacaatttctgaggaggcattaaagataaaacacgcaaatctaactggtgaagttttagaagcatcatcgagaggacgggttgccagcactacaacaacaggtactttggacgagagcaatgatgaagcagcttccaaccatgcaacagtaaattctagtccagtcaacaaaggaatggtcctcccttttgtacctctctccatcacttttgatgatataagatacagtgtggacatgccagagcacgccgtagatgttggagctcgattgcgacagcaagcagcaggtcgccatgggacgagcatcagcgctgaggacctcggctaccgctgcacgccggagctcggctggggaggaagaccagcacagaggagcgaaggccctctactgctactgtggagctacgccggagaggacgaagaccagcaccgacgacctcaggcaatcagagcacaaggtgtcacagagacccggttggaactactgaagggtataagtggttcgtttaggccaggagtccttactgctcttatgggtgtcagtggtgctggcaagacaacactgatggatgtgttggctgggaggaagaccagtggatacattgtgggcaacattaccatatcaggttacccgaagaaacaagaaacttttgctcgtgtgtcaggatactgtgagcaaaatgatatccactcaccaaatgttaccgtctatgaatcccttgcattctccgcatggctcagattacctgctgatgttgattcctcaacaagaaagatgtttattgatgaggttatggagcttgtggagcttttacccttaaaagatgcattggtaggattgcctggtgtcagtggactatcaacagaacaaaggaaaaggctaaccatagctgttgagcttgttgctaatccttctataattttcatggatgaaccgacatctggacttgatgctcgagcagcagctattgtcatgagggcaataaggaatactgtggacacaggaagaacggttgtttgtaccattcaccaaccaagtatagatatatttgaatcttttgatgagctcttccttatgaaacgtggaggtgaagagatttatgtaggcccactagggatgcattcatgtgaactggtcaaatattttgagggcatcgaaggtgtcaacaagataaaagatggctacaacccctcgacatggatgctggaagtgactagtacaatgcaagagcagataactggtattaacttcagtgaagtatacaagaattcagaactgcacaggaggaataaaactttgataaaggagctaagcacgcctccagaaggttcaagtgacctatcctttccaaccgaatactcacaggctttcctcacacagtgtttggcttgcctgtggaagcaaagcatgtcatattggagaaaccctccatatactggtgtcaaatacttctacacgacagtgattgccctgttgtttggaacaatgttctggggtgtgggcagaaaaagggatagtcaacaggacctgttcaatgccattggttccatgtatgcctcggttattttcatgggagtacagaattctggttcagttcagccagttgtatcggttgagcgaacagtcttttacagggaaagggcggctcatatgtactcgccattgccgtatgccttgggacagacagtaaaatcccgtcaaatcaaagtacaacaagggaagtaggaagggag

SEQ ID NO: 68875 - DNA, 2378 bp, Zea Mays
atttagcatagccgattcggaacggatccattgccatcgctagctcttactactacggtcctcgtcaatcctcatataagcataggctgatgcgtgcagcgtgctagtggaaggctagctgtctaaaattttcagttcaccatgaggtcaccggctgctccggggccttctcacgattccctcgactcatcaccgccggcgcctggttttcgtagttaccagcagacaaaactggcggagcttgatctggattcatccttgtcgccggccaccgcggcgccaggttcgcagcctactccatcggagtcgccgctgccagctccgacaccaacacctgcgcccgcggcgacagggctgctgataccaataccagcgcggccagtgcttgctccatattcccagccggcgtcttcatcgggttcacctgccgacaagtcagtggcgggcattgctgctggctcagctgctgcgggcgcccttctcatcgtgctactggtagcagttggtttgtatgtggcgtcgcctatttggaagaggcgcactgggcgtgaccgcaggggagcaggcagctccggtggcggcggtgcctcacaacatgaatcgcagaaacgccactctgctgttcaaatcgaggtcgaagtgacgccgccgccaacagcgtcatcatcgtcctgggctacttccagagacagccacaagccggacacgcacggcgacggagcgggaccgcgcgtgcaggtgcagcccgtgcctggagctggaggtggcgactacgaggtccggtttagaggcgcgttcacctacgagcagctggccgccgcgacggacggcttctcggagtccagcctcgtcgggcgcggcgggttcggcgacgtgcacgtcggcacggtggacggcgccgcggtggccgtgaagcggctgcgggcagggagccagcagggggaccgggagttccaggcggagctgcggatcatcagccgcgtgcaccaccgcaacctcgtctcgctcgtcggctactgcgttggcgacggcggccagcgcctgctcgtctacgagttcgtgcccaacttgacgctgcaccaccacttgcacgcacaacaggggaggttgaaacagtactcggttggccgactagatggaaaattgctgttggagctgcaaaaggcttggcctaccttcatgaggactgtcagtttgcttttcataacctattttactctaatactgtattgttccaagaactctctctctctctctctctctctctctcttttaaaaaagatactacattgaactagctagagtgcactaaactgtaggtcatcccagaatcatccaccgcgacatcaaggcagccaacattttgcttgaccctgacttcaaccccaaggtttctgattttggtatggcaaaattcgtacctagtagaggggatactcacattgcaacaaggatcgttggaactattggatacctcgcacccgagtacgccacatccggcaggcttagcgagaaatccgacgtgttttcttttggcgtcgtgctgctggagctcgtcaccggcatgagcgccgccctgtcgtcggatcgggaagaaggcactctagtaggctgggcacggccgttgctcaccaaggccatggagctccacgactacgacgagctcgtcgacccactgctgccgagcttcgacgccaagcagatggcgtgtctggtccggtgcgccgcggccgcggtcagcacgtcggcacgccaccgaccgcggatgagccagatcgtcaagcacttggagggcgacgcctctacagagcccttgggtcagactggttccagtcacgggcccggcggggacacttcggcccagtttcatagctacagcaagataagggcgtcgagaagctcggacgcgacgcgagggcattgggtcaccgttctgagcccaatgcatggcacggtccctagtgatttagtacgacacggtcataattcaaatagtgccactgcccataagacacggatctagaattggccgccacacatgtggctcaaaagtgtggcgcggtgtggcggcttaggcgccacaccaaacacgcccctaatgtcgtgattgagccaccaccctggcacgatgagctgacataagtataacacaattaattggccgatacggttaggcatggtttataccaaccggtggtatatagatttgattgtgatatatacatgtaattgtaaattattatttatcataattttaaacataatgaattcactttacaatggtataagtattcaagttttaaaattatatatataatcttaaagatattctatattttttgagcttttaaaatgaataatggctgcgttatcacgag

SEQ ID NO: 68876 - DNA, 2341 bp, Zea Mays
gcttaatacaagtgcttcagaatattagaacctctcgatataaaatcgtacctgtggctatagtggcggacgggtataagtattgtcacaagcggatatttagcatagccgattcggaacggatccattgccatcgctagctcttactactacggtcctcgtcaatcctcatataagcataggctgatgcgtgcagcgtgctagtggaaggctagctgtctaaaattttcagttcaccatgaggtcaccggctgctccggggccttctcacgattccctcgactcatcaccgccggcgcctggttttcgtagttaccagcagacaaaactggcggagcttgatctggattcatccttgtcgccggccaccgcggcgccaggttcgcagcctactccatcggagtcgccgctgccagctccgacaccaacacctgcgcccgcggcgacagggctgctgataccaataccagcgcggccagtgcttgctccatattcccagccggcgtcttcatcgggttcacctgccgacaagtcagtggcgggcattgctgctggctcagctgctgcgggcgcccttctcatcgtgctactggtagcagttggtttgtatgtggcgtcgcctatttggaagaggcgcactgggcgtgaccgcaggggagcaggcagctccggtggcggcggtgcctcacaacatgaatcgcagaaacgccactctgctgttcaaatcgaggtcgaagtgacgccgccgccaacagcgtcatcatcgtcctgggctacttccagagacagccacaagccggacacgcacggcgacggagcgggaccgcgcgtgcaggtgcagcccgtgcctggagctggaggtggcgactacgaggtccggtttagaggcgcgttcacctacgagcagctggccgccgcgacggacggcttctcggagtccagcctcgtcgggcgcggcgggttcggcgacgtgcacgtcggcacggtggacggcgccgcggtggccgtgaagcggctgcgggcagggagccagcagggggaccgggagttccaggcggagctgcggatcatcagccgcgtgcaccaccgcaacctcgtctcgctcgtcggctactgcgttggcgacggcggccagcgcctgctcgtctacgagttcgtgcccaacttgacgctgcaccaccacttgcacgcattcagcacaacaggggaggttgaaacagtactcggttggccgactagatggaaaattgctgttggagctgcaaaaggcttggcctaccttcatgaggactaatcatccaccgcgacatcaaggcagccaacattttgcttgaccctgacttcaaccccaaggtttctgattttggtatggcaaaattcgtacctagtagaggggatactcacattgcaacaaggatcgttggaactattggatacctcgcacccgagtacgccacatccggcaggcttagcgagaaatccgacgtgttttcttttggcgtcgtgctgctggagctcgtcaccggcatgagcgccgccctgtcgtcggatcgggaagaaggcactctagtaggctgggcacggccgttgctcaccaaggccatggagctccacgactacgacgagctcgtcgacccactgctgccgagcttcgacgccaagcagatggcgtgtctggtccggtgcgccgcggccgcggtcagcacgtcggcacgccaccgaccgcggatgagccagatcgtcaagcacttggagggcgacgcctctacagagcccttgggtcagactggttccagtcacgggcccggcggggacacttcggcccagtttcatagctacagcaagataagggcgtcgagaagctcggacgcgacgcgagggcattgggtcaccgttctgagcccaatgcatggcacggtccctagtgatttagtacgacacggtcataattcaaatagtgccactgcccataagacacggatctagaattggccgccacacatgtggctcaaaagtgtggcgcggtgtggcggcttaggcgccacaccaaacacgcccctaatgtcgtgattgagccaccaccctggcacgatgagctgacataagtataacacaattaattggccgatacggttaggcatggtttataccaaccggtggtatatagatttgattgtgatatatacatgtaattgtaaattattatttatcataattttaaacataatgaattcactttacaatggtataagtattcaagttttaaaattatatatataatcttaaagatattctatattttttgagcttttaaaatgaataatggctgcgttatcacgag

SEQ ID NO: 68877 - DNA, 2351 bp, Zea Mays
gcttaatacaagtgcttcagaatattagaacctctcgatataaaatcgtacctgtggctatagtggcggacgggtataagtattgtcacaagcggatatttagcatagccgattcggaacggatccattgccatcgctagctcttactactacggtcctcgtcaatcctcatataagcataggctgatgcgtgcagcgtgctagtggaaggctagctgtctaaaattttcagttcaccatgaggtcaccggctgctccggggccttctcacgattccctcgactcatcaccgccggcgcctggttttcgtagttaccagcagacaaaactggcggagcttgatctggattcatccttgtcgccggccaccgcggcgccaggttcgcagcctactccatcggagtcgccgctgccagctccgacaccaacacctgcgcccgcggcgacagggctgctgataccaataccagcgcggccagtgcttgctccatattcccagccggcgtcttcatcgggttcacctgccgacaagtcagtggcgggcattgctgctggctcagctgctgcgggcgcccttctcatcgtgctactggtagcagttggtttgtatgtggcgtcgcctatttggaagaggcgcactgggcgtgaccgcaggggagcaggcagctccggtggcggcggtgcctcacaacatgaatcgcagaaacgccactctgctgttcaaatcgaggtcgaagtgacgccgccgccaacagcgtcatcatcgtcctgggctacttccagagacagccacaagccggacacgcacggcgacggagcgggaccgcgcgtgcaggtgcagcccgtgcctggagctggaggtggcgactacgaggtccggtttagaggcgcgttcacctacgagcagctggccgccgcgacggacggcttctcggagtccagcctcgtcgggcgcggcgggttcggcgacgtgcacgtcggcacggtggacggcgccgcggtggccgtgaagcggctgcgggcagggagccagcagggggaccgggagttccaggcggagctgcggatcatcagccgcgtgcaccaccgcaacctcgtctcgctcgtcggctactgcgttggcgacggcggccagcgcctgctcgtctacgagttcgtgcccaacttgacgctgcaccaccacttgcacgcattcagcacaacaggggaggttgaaacagtactcggttggccgactagatggaaaattgctgttggagctgcaaaaggcttggcctaccttcatgaggactgtcatcccagaatcatccaccgcgacatcaaggcagccaacattttgcttgaccctgacttcaaccccaaggtttctgattttggtatggcaaaattcgtacctagtagaggggatactcacattgcaacaaggatcgttggaactattggatacctcgcacccgagtacgccacatccggcaggcttagcgagaaatccgacgtgttttcttttggcgtcgtgctgctggagctcgtcaccggcatgagcgccgccctgtcgtcggatcgggaagaaggcactctagtaggctgggcacggccgttgctcaccaaggccatggagctccacgactacgacgagctcgtcgacccactgctgccgagcttcgacgccaagcagatggcgtgtctggtccggtgcgccgcggccgcggtcagcacgtcggcacgccaccgaccgcggatgagccagatcgtcaagcacttggagggcgacgcctctacagagcccttgggtcagactggttccagtcacgggcccggcggggacacttcggcccagtttcatagctacagcaagataagggcgtcgagaagctcggacgcgacgcgagggcattgggtcaccgttctgagcccaatgcatggcacggtccctagtgatttagtacgacacggtcataattcaaatagtgccactgcccataagacacggatctagaattggccgccacacatgtggctcaaaagtgtggcgcggtgtggcggcttaggcgccacaccaaacacgcccctaatgtcgtgattgagccaccaccctggcacgatgagctgacataagtataacacaattaattggccgatacggttaggcatggtttataccaaccggtggtatatagatttgattgtgatatatacatgtaattgtaaattattatttatcataattttaaacataatgaattcactttacaatggtataagtattcaagttttaaaattatatatataatcttaaagatattctatattttttgagcttttaaaatgaataatggctgcgttatcacgag

SEQ ID NO: 68878 - DNA, 1975 bp, Zea Mays
ggcgctcgacgtttagatttcctgcgggtcgcggcttaccttctgccgagtcccgcatctccatggcgtggacgtctgcgtcctcccatcgctgctttccccgacctcgccggcgctcctccctctgcccgttgccatggccgtcgtgagctcgcccccaacgtcgagctcggcttggagctccctccctgctcggctctgccctcaacgccggccatttcctgctccaaccgtcgcgccccaagcttctctaatcgagcgtcgtgtggtcgcctgaccgcgctcctcctcggcctctgcttctcggccgcgcccctgcatcctccctcgccggttacagctcctgcgtgcgcgcgatggccgcgatgaagacgctacgtgcgctggtgtccgaactcaccctggtcatggcgcttggcttctccagccgcgcgtggaacgcgctccctgccagcgtcgttttctgctctgccgttggcataacatcgtttgttgttgctagttgatgcaacgttgccgtccttcgacgccgcgccgtgagcagcgacttcgtcgatccgtcactttgccatggtacttgcgctgctctccggtgtatgtgatgattggaaaaagagtcacagttgataaaggattaaggaacgaaagctctagtacaccgcctgccagctgatcgtcgtacagtctgaaccagggtctcatcattttccttgtgaatttcgagccgattataattttggaaggagatttggtgctgaagtcgaagccagcaatctccttattcttcgtcgtcaatttacgttgcgtccgtgacctgctcgtcgaccccgacgatttatcttccaattgtgcgctagttgcgttgaactcggaagctacctgtcacgctcgatcctggaggtctttgtcccatcgtcgtttcagcgaattcccagctggttttaggtacgataaataatcgcgtgatgcggaaaagagtcaagtcaaccccaagcgcgtgctaatccgcaagatgatattgatgaattaacctgaagatggatggacgaagcaagtattggaacaaagactgatcgtcaagtgatcgacgtctaacaaacactaacctagtgttacccaggcaagccccggtgcatttaccccttccttgtgtttttaaattattttacacactttaagtctagtgaaatgtgcattaggtttataggagttgcttggaaccctttgatgcattgccttccttgaaatccataccttttatagatacttctggtgaagtatcaaaatatgatttacaaaaaaatgcttagccctgcttataggcagatagagtttgtcctttgcacttatgcctagctcaggttgatcctgaggaaggatgacttctacctgcaagaatattttcattgtgagcatggtgggatcttactgcaaagttccctataatgatcttttcatcctaaggaacacaaacaatcctaagggtggaagtacttaaatcgggacttgggctaggaacaggtgatgttccgtccgggtcaattaaggattggatgcgtatgtaggcctgatagatcaaggactatcttaactggccacatgccctggaaatgggacagggtaagcttgaacccggctattccatacgtgaaaagacaaccgcgcactgggcgtgggagatggtgggagtagcgtgtgccctcctggctagaggctggatggaggagtactgtgctcccgggtagcgcggaccggttcacgttgtggaggatctgtgggaacggttgacatatgcaagggttaagtgctacatatgtcgtgtggttagagatcctcagctgagtaaatcgattcggatcgccgttatatccccggagagtggagacttgatcactgacctgcaacctaagtcaggatgtgaacctcatgaataaaaatgatgttgtattgatgagatggtgaaattagaccagat

SEQ ID NO: 68879 - DNA, 2219 bp, Zea Mays
catggcgctcgacgtttagatttcctgcgggtcgcggcttaccttctgccgagtcccgcatctccatggcgtggacgtctgcgtcctcccatcgctgctttccccgacctcgccggcgctcctccctctgcccgttgccatggccgtcgtgagctcgcccccaacgtcgagctcggcttggagctccctccctgctcggctctgccctcaacgccggccatttcctgctccaaccgtcgcgccccaagcttctctaatcgagcgtcgtgtggtcgcctgaccgcgctcctcctcggcctctgcttctcggccgcgcccctgcatcctccctcgccggttacagctcctgcgtgcgcgcgatggccgcgatgaagacgctacgtgcgctggtgtccgaactcaccctggtcatggcgcttggcttctccagccgcgcgtggaacgcgctccctgccagcgtcgttttctgctctgccgttggcataacatcgtttgttgttgctagttgatgcaacgttgccgtccttcgacgccgcgccgtgagcagcgacttcgtcgatccgtcactttgccatgtctgaaccagggtctcatcattttccttgtgaatttcgagccgattataattttggaaggagatttggtgctgaagtcgaagccagcaatctccttattcttcgtcgtcaatttacgttgcgtccgtgacctgctcgtcgaccccgacgatttatcttccaattgtgcgctagttgcgttgaactcggaagctacctgtcacgctcgatcctggaggtctttgtcccatcgtcgtttcagcgaattcccagctggttttaggtaagttgattcgctactccttttattttgttttaataaatgaattgatagatatgtaggtcgcgacaatttttattaatttagcatacatatattgtgatgttcgatttagataaataggtaaatcaagtaattaagatacatagtttaaagagttaatcaaaaaactaggaataaaaaatagattttctagtgtaacatgtcaatttggttaatgaatatagtcgatgccctgctgtgatatccatggtgcttaatgcttgattttaagtgtttcatcctttttagtgtagattatctaaattatactcgtatactcgtgctcatacatgtgcatcgtgcatctcatgaggtacgataaataatcgcgtgatgcggaaaagagtcaagtcaaccccaagcgcgtgctaatccgcaagatgatattgatgaattaacctgaagatggatggacgaagcaagtattggaacaaagactgatcgtcaagtgatcgacgtctaacaaacactaacctagtgttacccaggcaagccccggtgcatttaccccttccttgtgtttttaaattattttacacactttaagtctagtgaaatgtgcattaggtttataggagttgcttggaaccctttgatgcattgccttccttgaaatccataccttttatagatacttctggtgaagtatcaaaatatgatttacaaaaaaatgcttagccctgcttataggcagatagagtttgtcctttgcacttatgcctagctcaggttgatcctgaggaaggatgacttctacctgcaagaatattttcattgtgagcatggtgggatcttactgcaaagttccctataatgatcttttcatcctaaggaacacaaacaatcctaagggtggaagtacttaaatcgggacttgggctaggaacaggtgatgttccgtccgggtcaattaaggattggatgcgtatgtaggcctgatagatcaaggactatcttaactggccacatgccctggaaatgggacagggtaagcttgaacccggctattccatacgtgaaaagacaaccgcgcactgggcgtgggagatggtgggagtagcgtgtgccctcctggctagaggctggatggaggagtactgtgctcccgggtagcgcggaccggttcacgttgtggaggatctgtgggaacggttgacatatgcaagggttaagtgctacatatgtcgtgtggttagagatcctcagctgagtaaatcgattcggatcgccgttatatccccggagagtggagacttgatcactgacctgcaacctaagtcaggatgtgaacctcatgaataaaaatgatgttgtattgatgagatggtgaaattagaccagat

SEQ ID NO: 68880 - DNA, 1848 bp, Zea Mays
cttttgcggtacgcacggatattcgtttttttcacctgcaaatctgcaataaaacgccgccaccgccgcggcgccaccacctcaagatccgatctccctctctctccccaatcctccccgcctccccctaccaaatcagcaccacccaaggcgcatccgagccacggccgcgcaatgccgccctctgtcgatgcaatgccggcccccggcgacgccgcgggcgccggcgacgtgcgcatgatctcctccaaggagctccgcgctcacgcttccgccgacgacctctggatctccatctccggcgacgtgtacgacgtcacgccctggctcccccacccccaaggtccagctcgtcctgatggccgtcctcttctacgccgcgctgtacctcgtcctcgcatgcgccagcgcctgggcgcacctcctcgcggggggtctcattggcttcgtctggatccagtccggctggatgggccacgactcgggccaccaccgcatcaccggccatccggtcctcgaccgcgtcgtgcaggtgctctccgggaactgcctcaccggcctcagcatcgcctggtggaagtgtaaccacaacacgcaccacatcgcctgcaacagcctggaccatgacccggacctccagcacatgccgctctttgccgtctcccccaagctgttcggcaacatatggtcctacttctaccaacggaccctggcgttcgatgccgcctcgaaattcttcatcagctaccagcactggaccttctacccggtaatgtgcatcgccaggataaatcttctcgcgcagtccgccctgttcgttctcacggagaagagggtgccgcagcggttgcttgagatcgcgggggtcgccacattctgggcttggtacccgttgctggtggcttccctgccgaattggtgggagagggtcgcgtttgtgcttttcagcttcaccatctgcgggattcagcacgtccaattctgcctgaaccacttctcgtccgacgtgtatgtcgggccacccaagggcaatgactggtttgagaagcagacggcaggcacgctcgacatcctgtgctctccttggatggattggttccacggtggcctgcagttccagattgagcaccatctgtttccccgcctacctcggtgccaccttcgcaaggttgcaccggccgtccgcgacctttgcaagaagcatgggctcacttattctgcagccacattctggggtgcaaatgtgcttacatggaagacactcagggctgctgcattgcaggccaggaccgctacaagtggtggtgctccgaagaatttggtatgggaggctgtgaacacccatggataaatgggatgaagatacgggctaatggcaacttctggtgttcagcttggtgcccatgtgattgtctggatgcctttcagttatttagagatattgatcattcaacctgcctgagtcaggttggaattttcgtgttgacaagtggctgtctatccagttggagagttcatgcttcaatagtctggttgttcacgggatgttctgttctccctatcacgaacaatctctttgcgcaacagaactttctccaccaccagaaccatacaatcccgaagccgatccaacattaaaaggaatcctcgatgaattcatggtggtgaacgcagcgatagatgaagctgttaatacattgctgaacgaagctgcagagaaagttcttaaggaggactaggactacttgtaggaaacttgttcttggttgtggtcttgagagacttgtaaaaacatttgaatatatgtttgctctgtataaaaacatctatgtgatttgtattctatat

SEQ ID NO: 68881 - DNA, 1802 bp, Zea Mays
cttttgcggtacgcacggatattcgtttttttcacctgcaaatctgcaataaaacgccgccaccgccgcggcgccaccacctcaagatccgatctccctctctctccccaatcctccccgcctccccctaccaaatcagcaccacccaaggcgcatccgagccacggccgcgcaatgccgccctctgtcgatgcaatgccggcccccggcgacgccgcgggcgccggcgacgtgcgcatgatctcctccaaggagctccgcgctcacgcttccgccgacgacctctggatctccatctccggcgacgtgtacgacgtcacgccctggctcccccaccacccgggcggcgacctcccgcttctcaccctggcggggcaggacgccaccgacgccttcgccgcctaccacccgccctcggcgcgcccgctcctccgccgcttcttcgttggccgcctctctgactacgccgtctcccccgcgtccgccgactaccgccgcctcctcgcgcagctatcctccgcgggcctcttcgaacgcgtcggccccacccccaaggtccagctcgtcctgatggccgtcctcttctacgccgcgctgtacctcgtcctcgcatgcgccagcgcctgggcgcacctcctcgcggggggtctcattggcttcgtctggatccagtccggctggatgggccacgactcgggccaccaccgcatcaccggccatccggtcctcgaccgcgtcgtgcaggtgctctccgggaactgcctcaccggcctcagcatcgcctggtggaagtgtaaccacaacacgcaccacatcgcctgcaacagcctggaccatgacccggacctccagcacatgccgctctttgccgtctcccccaagctgttcggcaacatatggtcctacttctaccaacggaccctggcgttcgatgccgcctcgaaattcttcatcagctaccagcactggaccttctacccggtaatgtgcatcgccaggataaatcttctcgcgcagtccgccctgttcgttctcacggagaagagggtgccgcagcggttgcttgagatcgcgggggtcgccacattctgggcttggtacccgttgctggtggcttccctgccgaattggtgggagagggtcgcgtttgtgcttttcagcttcaccatctgcgggattcagcacgtccaattctgcctgaaccacttctcgtccgacgtgtatgtcgggccacccaagggcaatgactggtttgagaagcagacggcaggcacgctcgacatcctgtgctctccttggatggattggttccacggtggcctgcagttccagattgagcaccatctgtttccccgcctacctcggtgccaccttcgcaaggttgcaccggccgtccgcgacctttgcaagaagcatgggctcacttattctgcagccacattctggggtgcaaatgtgcttacatggaagacactcagggctgctgcattgcaggccaggaccgctacaagtggtggtgctccgaagaatttggtatgggaggctgtgaacacccatggataaatgggatgaagatacgggctaatggcaacttctggtgttcagcttggtgcccatgtgattgtctggatgcctttcagttatttagagatattgatcattcaacctgcctgagtcaggttggaattttcgtgttgacaagtggctgtctatccagttggagagttcatgcttcaatagtctggttgttcacgggatgttctgttctccctatcacgtgtctgtaccagcttgcattgcat

SEQ ID NO: 68882 - DNA, 1344 bp, Zea Mays
agggatctccaaccacacgacatatgcttctcttaactcttttgcacatgtctaccactcccacggatcctccaccacatgaacaggtccgcaccacccgagagcacaccaccccttttaggcggtcctttgccaggagggtacgtgccactctcgccatctctccactcccagtgcgcgattgtcttttcatgtatggaatagccgggttcaagcttacccatgacgaggtatgtggccagataaagggtcctagatcagcaggccaacaatcggtacggtccttaatcgacacagacgaagacactacaccgagactcctttctcgtgcaagtcacccgcccggtctcagctttataatttaaacccaaagtttggtacctggcagaggtacatcttttccgatgttgaatccatcatggccatgatggattcaccatcaagttttattttcaaaaacatcccacccacttttgccacatcatcttttataaaaacaaaacattttgtttttcttaagcaaggctaagcatcaaaaatctttttgtaaaacagggatttcaaggaagataatcaaatccaaggaaggtaatgcaggaattgttttagcaatcaactcctatcacctaatgcatcacgcaagtgaaaaagatttttaaaacacaaggaggtggcaaatgcaccggggcttgcctgagtaacactaggttagtgttgttagacgacgtccacttgacgagcatcctttggcttggcactcattcagattatccatcttccgattcgtccatcagcaccatcctgcggagtagcccgcgcttgggatcgacttgggtcgtcttccgcatcacgcgattatttagcgtacctgaatggaatgcattatgcacatgaatgcatatcgacaggaataccacaagcctaaacagtgctacgcgatagcgaattaaatacctagcggcgaggcgttgaataatttcatacgaaggcactaattatcgatgtacgactaagcgcaataattacgcttctctagcctattcaaaggtattttatataccacaaaacaatagtatatatatttattcacgctctactttcttttatgatttattaacagaatcatattactacatatatttttaccaagcatattttaaacaacatatcatcacaccaatcactggataagaaaaccgtcgatcatctcctacttcaacgttatcgatcacaaacctagacgatactaactactagcgcaggacatcgacttcagcctacgtgcattgaacaccattagcattgatagagctatcgacaaaagcataaaatcctgaatttaac

SEQ ID NO: 68883 - DNA, 2494 bp, Zea Mays
cccccgtttaccaggcgttcgctcgctttccctctccatcccccctatctcgtggcgacgctggacaccgcgccgccgccctacgccgtggcgactactggacgtcgccggcgccctacgccaggtcttcgccattccattctctggagacaagcacccaacagataccgatcaggcattcaagaagtaaattcttcttctattgtgctgaatatatctgattctacatggctatggtgccaagtgattcatcacatcatggagctgtggacaatagccctaatggattcacccagggtcggcgtgaggaagctaggaaacttgggccatcatggtatttcagtagaaaggaaatagaagaacattctccatccaggagggatgacattgatttgaagaaagagtgtagccttcgaaagtcgtattgcagttttctacaagatttgggcatgaagcttaaagtgccccaagtgacgattgctacagctacggtattctgtcaccgttttttccttcgtcaatcccatgcaaagaatgatagacgaataattgccacagtttgtatgttcttggctgggaaagttgaagaaacacctagacctttgaaggatgttatcctggtatcttacgagcttattcataagaaggattctacagctggccagagaatcaagcagcagaaggaaatatatgataaacaaaaagaacttattttactcggggagcgaattgtacttgtaacacttgggtttgacctgaatattgaccatgcttacaagcccttggttgaagcaataaggagattcaatgttggtagtaaaagttcgcttcctcagactgcgtacttcgctttgcctgcaattcgagcctcatcatattgcagcaggtgctatctttttggctgctaaatttctcaaagtgaagcttccatctgatggtgataaggtttggtggcaggattttgatgtcacaccacggcagcttgaagaagttagcagtcaaatgatggagctgtatgttcagaaccgtacaccacaggcacaacaatcacagggaagcgaagctgaggggagctctgctggtgtgcgtaatcaacattcatctgtaaaatctgaaggaaactccaaggaaccatctgctcatggatatcatccggcattcaaaccgtcgaatttgcatcattcatccttggcaggtgctccaggtgaccatgacagtgggcattcaaattcagacaagcatgtttctggccacaaaatgcttcaaaatgataatggtaaccatgtcggtagcaaagaaaagaacaagagtggaggtaaatcggatgctggtatggatagattttgtcatgagaaatccccacctggacatcattattccaaggtcagccatgagtctcataatccagtggaagaacaaaaaccacatcaatcacatgataaccccaatgaaagaatagatggcattcttggtggcaacgaagttcctggtgtgtcgacctccaggatcgatgcaatgaataaaattgacaagggtaaggtaaaagcagctttggagaagcgaagaaaaacaaaaggtgatattaccacaaaggtagacgtgatggatgatgatgatctacttgagagagagcttgaacatggtgttgaattggctattgaggatgagaagattaagcaggataagatgcagaacttgtcccatattaaggacaagaagattacgcaggataatatgcagaacttgtcccatattaaggacgagcaggataacatgcagaacttgtccgacattaaggatgagaagattaagcaggatgagaggcagaacatgtcccatgctccagtggatcttcaaaccactgaccaagtaatggagaatggtcaccatgtcgagcctagtgtaccaacaactgtggaagacacggggtttccattggacaacaaagaacatcctccatttgataagcaaaatgatgttcctgagcacgagtcccagcagcttgaacacacattgaagcacgacctccctcagctggtaggggggcctgagcaggatgatggaacagactgtaaaaggcctaagctcgaagagtaggttctggatgatgctcactttattttggacagttttcctggagactggtgaactgcatacaacttggcacggagttggtgagcatggctttgccggtgccttgctgtgctgtgaaatatgccctacggctgattgcagtttacaattcgagggaggtcgtgctagcaaatatttttacgttcaaacgaacattggaatatatggaccaaaacatgctcacgcttctgataacggttgcattcgttccttaaatatgtgttccatgaaagtgaagcaaatgattttcatcccatcagggttgcatgcacctcatctcaatagaaaattaaaaaaacagtatttttataacttttcaacaatattatactacaacttttgtacaaaaaagctgtcgagg

SEQ ID NO: 68884 - DNA, 2519 bp, Zea Mays
cccccgtttaccaggcgttcgctcgctttccctctccatcccccctatctcgtggcgacgctggacaccgcgccgccgccctacgccgtggcgactactggacgtcgccggcgccctacgccaggtcttcgccattccattctctggagacaagcacccaacagataccgatcaggcattcaagaagtaaattcttcttctattgtgctgaatatatctgattctacatggctatggtgccaagtgattcatcacatcatggagctgtggacaatagccctaatggattcacccagggtcggcgtgaggaagctaggaaacttgggccatcatggtatttcagtagaaaggaaatagaagaacattctccatccaggagggatgacattgatttgaagaaagagtgtagccttcgaaagtcgtattgcagttttctacaagatttgggcatgaagcttaaaggccccaagtgacgattgctacagctacggtattctgtcaccgttttttccttcgtcaatcccatgcaaagaatgatagacgaataattgccacagtttgtatgttcttggctgggaaagttgaagaaacacctagacctttgaaggatgttatcctggtatcttacgagcttattcataagaaggattctacagctggccagagaatcaagcagcagaaggaaatatatgataaacaaaaagaacttattttactcggggagcgaattgtacttgtaacacttgggtttgacctgaatattgaccatgcttacaagcccttggttgaagcaataaggagattcaatgttggtagtaaaagttcgcttcctcaggttgcctggaattttgtaaatgatggactgcgtacttcgctttgcctgcaattcgagcctcatcatattgcagcaggtgctatctttttggctgctaaatttctcaaagtgaagcttccatctgatggtgataaggtttggtggcaggattttgatgtcacaccacggcagcttgaagaagttagcagtcaaatgatggagctgtatgttcagaaccgtacaccacaggcacaacaatcacagggaagcgaagctgaggggagctctgctggtgtgcgtaatcaacattcatctgtaaaatctgaaggaaactccaaggaaccatctgctcatggatatcatccggcattcaaaccgtcgaatttgcatcattcatccttggcaggtgctccaggtgaccatgacagtgggcattcaaattcagacaagcatgtttctggccacaaaatgcttcaaaatgataatggtaaccatgtcggtagcaaagaaaagaacaagagtggaggtaaatcggatgctggtatggatagattttgtcatgagaaatccccacctggacatcattattccaaggtcagccatgagtctcataatccagtggaagaacaaaaaccacatcaatcacatgataaccccaatgaaagaatagatggcattcttggtggcaacgaagttcctggtgtgtcgacctccaggatcgatgcaatgaataaaattgacaagggtaaggtaaaagcagctttggagaagcgaagaaaaacaaaaggtgatattaccacaaaggtagacgtgatggatgatgatgatctacttgagagagagcttgaacatggtgttgaattggctattgaggatgagaagattaagcaggataagatgcagaacttgtcccatattaaggacaagaagattacgcaggataatatgcagaacttgtcccatattaaggacgagcaggataacatgcagaacttgtccgacattaaggatgagaagattaagcaggatgagaggcagaacatgtcccatgctccagtggatcttcaaaccactgaccaagtaatggagaatggtcaccatgtcgagcctagtgtaccaacaactgtggaagacacggggtttccattggacaacaaagaacatcctccatttgataagcaaaatgatgttcctgagcacgagtcccagcagcttgaacacacattgaagcacgacctccctcagctggtaggggggcctgagcaggatgatggaacagactgtaaaaggcctaagctcgaagagtaggttctggatgatgctcactttattttggacagttttcctggagactggtgaactgcatacaacttggcacggagttggtgagcatggctttgccggtgccttgctgtgctgtgaaatatgccctacggctgattgcagtttacaattcgagggaggtcgtgctagcaaatatttttacgttcaaacgaacattggaatatatggaccaaaacatgctcacgcttctgataacggttgcattcgttccttaaatatgtgttccatgaaagtgaagcaaatgattttcatcccatcagggttgcatgcacctcatctcaatagaaaattaaaaaaacagtatttttataacttttcaacaatattatactacaacttttgtacaaaaaagctgtcgagg

SEQ ID NO: 68885 - DNA, 2373 bp, Zea Mays
cccccgtttaccaggcgttcgctcgctttccctctccatcccccctatctcgtggcgacgctggacaccgcgccgccgccctacgccgtggcgactactggacgtcgccggcgccctacgccaggtcttcgccattccattctctggagacaagcacccaacagataccgatcaggcattcaagaagtaaattcttcttctattgtgctgaatatatctgattctacatggctatggtgccaagtgattcatcacatcatggagctgtggacaatagccctaatggattcacccagggtcggcgtgaggaagctaggaaacttgggccatcatggtatttcagtagaaaggaaatagaagaacattctccatccaggagggatgacattgatttgaagaaagagtgtagccttcgaaagtcgtattgcagttttctacaagatttgggcatgaagcttaaagtgccccaagtgacgattgctacagctacggtattctgtcaccgttttttccttcgtcaatcccatgcaaagaatgatagacgaataattgccacagtttgtatgttcttggctgggaaagttgaagaaacacctagacctttgaaggatgttatcctggtatcttacgagcttattcataagaaggattctacagctggccagagaatcaagcagcagaaggaaatatatgataaacaaaaagaacttattttactcggggagcgaattgtacttgtaacacttgggtttgacctgaatattgaccatgcttacaagcccttggttgaagcaataaggagattcaatgttggtagtaaaagttcgcttcctcaggattttgatgtcacaccacggcagcttgaagaagttagcagtcaaatgatggagctgtatgttcagaaccgtacaccacaggcacaacaatcacagggaagcgaagctgaggggagctctgctggtgtgcgtaatcaacattcatctgtaaaatctgaaggaaactccaaggaaccatctgctcatggatatcatccggcattcaaaccgtcgaatttgcatcattcatccttggcaggtgctccaggtgaccatgacagtgggcattcaaattcagacaagcatgtttctggccacaaaatgcttcaaaatgataatggtaaccatgtcggtagcaaagaaaagaacaagagtggaggtaaatcggatgctggtatggatagattttgtcatgagaaatccccacctggacatcattattccaaggtcagccatgagtctcataatccagtggaagaacaaaaaccacatcaatcacatgataaccccaatgaaagaatagatggcattcttggtggcaacgaagttcctggtgtgtcgacctccaggatcgatgcaatgaataaaattgacaagggtaaggtaaaagcagctttggagaagcgaagaaaaacaaaaggtgatattaccacaaaggtagacgtgatggatgatgatgatctacttgagagagagcttgaacatggtgttgaattggctattgaggatgagaagattaagcaggataagatgcagaacttgtcccatattaaggacaagaagattacgcaggataatatgcagaacttgtcccatattaaggacgagcaggataacatgcagaacttgtccgacattaaggatgagaagattaagcaggatgagaggcagaacatgtcccatgctccagtggatcttcaaaccactgaccaagtaatggagaatggtcaccatgtcgagcctagtgtaccaacaactgtggaagacacggggtttccattggacaacaaagaacatcctccatttgataagcaaaatgatgttcctgagcacgagtcccagcagcttgaacacacattgaagcacgacctccctcagctggtaggggggcctgagcaggatgatggaacagactgtaaaaggcctaagctcgaagagtaggttctggatgatgctcactttattttggacagttttcctggagactggtgaactgcatacaacttggcacggagttggtgagcatggctttgccggtgccttgctgtgctgtgaaatatgccctacggctgattgcagtttacaattcgagggaggtcgtgctagcaaatatttttacgttcaaacgaacattggaatatatggaccaaaacatgctcacgcttctgataacggttgcattcgttccttaaatatgtgttccatgaaagtgaagcaaatgattttcatcccatcagggttgcatgcacctcatctcaatagaaaattaaaaaaacagtatttttataacttttcaacaatattatactacaacttttgtacaaaaaagctgtcgagg

SEQ ID NO: 68886 - DNA, 2470 bp, Zea Mays
cccccgtttaccaggcgttcgctcgctttccctctccatcccccctatctcgtggcgacgctggacaccgcgccgccgccctacgccgtggcgactactggacgtcgccggcgccctacgccaggtcttcgccattccattctctggagacaagcacccaacagataccgatcaggcattcaagaagtaaattcttcttctattgtgctgaatatatctgattctacatggctatggtgccaagtgattcatcacatcatggagctgtggacaatagccctaatggattcacccagggtcggcgtgaggaagctaggaaacttgggccatcatggtatttcagtagaaaggaaatagaagaacattctccatccaggagggatgacattgatttgaagaaagagtgtagccttcgaaagtcgtattgcagttttctacaagatttgggcatgaagcttaaagtgccccaagtgacgattgctacagctacggtattctgtcaccgttttttccttcgtcaatcccatgcaaagaatgatagacgaataattgccacagtttgtatgttcttggctgggaaagttgaagaaacacctagacctttgaaggatgttatcctggtatcttacgagcttattcataagaaggattctacagctggccagagaatcaagcagcagaaggaaatatatgataaacaaaaagaacttattttactcggggagcgaattgtacttgtaacacttgggtttgacctgaatattgaccatgcttacaagcccttggttgaagcaataaggagattcaatgttggtagtaaaagttcgcttcctcaggttgcctggaattttgtaaatgatgggtgctatctttttggctgctaaatttctcaaagtgaagcttccatctgatggtgataaggtttggtggcaggattttgatgtcacaccacggcagcttgaagaagttagcagtcaaatgatggagctgtatgttcagaaccgtacaccacaggcacaacaatcacagggaagcgaagctgaggggagctctgctggtgtgcgtaatcaacattcatctgtaaaatctgaaggaaactccaaggaaccatctgctcatggatatcatccggcattcaaaccgtcgaatttgcatcattcatccttggcaggtgctccaggtgaccatgacagtgggcattcaaattcagacaagcatgtttctggccacaaaatgcttcaaaatgataatggtaaccatgtcggtagcaaagaaaagaacaagagtggaggtaaatcggatgctggtatggatagattttgtcatgagaaatccccacctggacatcattattccaaggtcagccatgagtctcataatccagtggaagaacaaaaaccacatcaatcacatgataaccccaatgaaagaatagatggcattcttggtggcaacgaagttcctggtgtgtcgacctccaggatcgatgcaatgaataaaattgacaagggtaaggtaaaagcagctttggagaagcgaagaaaaacaaaaggtgatattaccacaaaggtagacgtgatggatgatgatgatctacttgagagagagcttgaacatggtgttgaattggctattgaggatgagaagattaagcaggataagatgcagaacttgtcccatattaaggacaagaagattacgcaggataatatgcagaacttgtcccatattaaggacgagcaggataacatgcagaacttgtccgacattaaggatgagaagattaagcaggatgagaggcagaacatgtcccatgctccagtggatcttcaaaccactgaccaagtaatggagaatggtcaccatgtcgagcctagtgtaccaacaactgtggaagacacggggtttccattggacaacaaagaacatcctccatttgataagcaaaatgatgttcctgagcacgagtcccagcagcttgaacacacattgaagcacgacctccctcagctggtaggggggcctgagcaggatgatggaacagactgtaaaaggcctaagctcgaagagtaggttctggatgatgctcactttattttggacagttttcctggagactggtgaactgcatacaacttggcacggagttggtgagcatggctttgccggtgccttgctgtgctgtgaaatatgccctacggctgattgcagtttacaattcgagggaggtcgtgctagcaaatatttttacgttcaaacgaacattggaatatatggaccaaaacatgctcacgcttctgataacggttgcattcgttccttaaatatgtgttccatgaaagtgaagcaaatgattttcatcccatcagggttgcatgcacctcatctcaatagaaaattaaaaaaacagtatttttataacttttcaacaatattatactacaacttttgtacaaaaaagctgtcgagg

SEQ ID NO: 68887 - DNA, 2522 bp, Zea Mays
cccccgtttaccaggcgttcgctcgctttccctctccatcccccctatctcgtggcgacgctggacaccgcgccgccgccctacgccgtggcgactactggacgtcgccggcgccctacgccaggtcttcgccattccattctctggagacaagcacccaacagataccgatcaggcattcaagaagtaaattcttcttctattgtgctgaatatatctgattctacatggctatggtgccaagtgattcatcacatcatggagctgtggacaatagccctaatggattcacccagggtcggcgtgaggaagctaggaaacttgggccatcatggtatttcagtagaaaggaaatagaagaacattctccatccaggagggatgacattgatttgaagaaagagtgtagccttcgaaagtcgtattgcagttttctacaagatttgggcatgaagcttaaagtataattgccacagtttgtatgttcttggctgggaaagttgaagaaacacctagacctttgaaggatgttatcctggtatcttacgagcttattcataagaaggattctacagctggccagagaatcaagcagcagaaggaaatatatgataaacaaaaagaacttattttactcggggagcgaattgtacttgtaacacttgggtttgacctgaatattgaccatgcttacaagcccttggttgaagcaataaggagattcaatgttggtagtaaaagttcgcttcctcaggttgcctggaattttgtaaatgatgggtatgctagtgctacccttactgtcgtttgaaattgcagttcacagttgtgtatctactacacttaatattgtgcactgtacagactgcgtacttcgctttgcctgcaattcgagcctcatcatattgcagcaggtgctatctttttggctgctaaatttctcaaagtgaagcttccatctgatggtgataaggtttggtggcaggattttgatgtcacaccacggcagcttgaagaagttagcagtcaaatgatggagctgtatgttcagaaccgtacaccacaggcacaacaatcacagggaagcgaagctgaggggagctctgctggtgtgcgtaatcaacattcatctgtaaaatctgaaggaaactccaaggaaccatctgctcatggatatcatccggcattcaaaccgtcgaatttgcatcattcatccttggcaggtgctccaggtgaccatgacagtgggcattcaaattcagacaagcatgtttctggccacaaaatgcttcaaaatgataatggtaaccatgtcggtagcaaagaaaagaacaagagtggaggtaaatcggatgctggtatggatagattttgtcatgagaaatccccacctggacatcattattccaaggtcagccatgagtctcataatccagtggaagaacaaaaaccacatcaatcacatgataaccccaatgaaagaatagatggcattcttggtggcaacgaagttcctggtgtgtcgacctccaggatcgatgcaatgaataaaattgacaagggtaaggtaaaagcagctttggagaagcgaagaaaaacaaaaggtgatattaccacaaaggtagacgtgatggatgatgatgatctacttgagagagagcttgaacatggtgttgaattggctattgaggatgagaagattaagcaggataagatgcagaacttgtcccatattaaggacaagaagattacgcaggataatatgcagaacttgtcccatattaaggacgagcaggataacatgcagaacttgtccgacattaaggatgagaagattaagcaggatgagaggcagaacatgtcccatgctccagtggatcttcaaaccactgaccaagtaatggagaatggtcaccatgtcgagcctagtgtaccaacaactgtggaagacacggggtttccattggacaacaaagaacatcctccatttgataagcaaaatgatgttcctgagcacgagtcccagcagcttgaacacacattgaagcacgacctccctcagctggtaggggggcctgagcaggatgatggaacagactgtaaaaggcctaagctcgaagagtaggttctggatgatgctcactttattttggacagttttcctggagactggtgaactgcatacaacttggcacggagttggtgagcatggctttgccggtgccttgctgtgctgtgaaatatgccctacggctgattgcagtttacaattcgagggaggtcgtgctagcaaatatttttacgttcaaacgaacattggaatatatggaccaaaacatgctcacgcttctgataacggttgcattcgttccttaaatatgtgttccatgaaagtgaagcaaatgattttcatcccatcagggttgcatgcacctcatctcaatagaaaattaaaaaaacagtatttttataacttttcaacaatattatactacaacttttgtacaaaaaagctgtcgagg

SEQ ID NO: 68888 - DNA, 2515 bp, Zea Mays
cccccgtttaccaggcgttcgctcgctttccctctccatcccccctatctcgtggcgacgctggacaccgcgccgccgccctacgccgtggcgactactggacgtcgccggcgccctacgccaggtcttcgccattccattctctggagacaagcacccaacagataccgatcaggcattcaagaagtaaattcttcttctattgtgctgaatatatctgattctacatggctatggtgccaagtgattcatcacatcatggagctgtggacaatagccctaatggattcacccagggtcggcgtgaggaagctaggaaacttgggccatcatggtatttcagtagaaaggaaatagaagaacattctccatccaggagggatgacattgatttgaagaaagagtgtagccttcgaaagtcgtattgcagttttctacaagatttgggcatgaagcttaaagtgccccaagtgacgattgctacagctacggtattctgtcaccgttttttccttcgtcaatcccatgcaaagaatgatagacgaataattgccacagtttgtatgttcttggctgggaaagttgaagaaacacctagacctttgaaggatgttatcctggtatcttacgagcttattcataagaaggattctacagctggccagagaatcaagcagcagaaggaaatatatgataaacaaaaagaacttattttactcggggagcgaattgtacttgtaacacttgggtttgacctgaatattgaccatgcttacaagcccttggttgaagcaataaggagattcaatgttggtagtaaaagttcgcttcctcaggttgcctggaattttgtaaatgatgggtatgctagtgctacccttactgtcgtttgaaattgcagttcacagtgctatctttttggctgctaaatttctcaaagtgaagcttccatctgatggtgataaggtttggtggcaggattttgatgtcacaccacggcagcttgaagaagttagcagtcaaatgatggagctgtatgttcagaaccgtacaccacaggcacaacaatcacagggaagcgaagctgaggggagctctgctggtgtgcgtaatcaacattcatctgtaaaatctgaaggaaactccaaggaaccatctgctcatggatatcatccggcattcaaaccgtcgaatttgcatcattcatccttggcaggtgctccaggtgaccatgacagtgggcattcaaattcagacaagcatgtttctggccacaaaatgcttcaaaatgataatggtaaccatgtcggtagcaaagaaaagaacaagagtggaggtaaatcggatgctggtatggatagattttgtcatgagaaatccccacctggacatcattattccaaggtcagccatgagtctcataatccagtggaagaacaaaaaccacatcaatcacatgataaccccaatgaaagaatagatggcattcttggtggcaacgaagttcctggtgtgtcgacctccaggatcgatgcaatgaataaaattgacaagggtaaggtaaaagcagctttggagaagcgaagaaaaacaaaaggtgatattaccacaaaggtagacgtgatggatgatgatgatctacttgagagagagcttgaacatggtgttgaattggctattgaggatgagaagattaagcaggataagatgcagaacttgtcccatattaaggacaagaagattacgcaggataatatgcagaacttgtcccatattaaggacgagcaggataacatgcagaacttgtccgacattaaggatgagaagattaagcaggatgagaggcagaacatgtcccatgctccagtggatcttcaaaccactgaccaagtaatggagaatggtcaccatgtcgagcctagtgtaccaacaactgtggaagacacggggtttccattggacaacaaagaacatcctccatttgataagcaaaatgatgttcctgagcacgagtcccagcagcttgaacacacattgaagcacgacctccctcagctggtaggggggcctgagcaggatgatggaacagactgtaaaaggcctaagctcgaagagtaggttctggatgatgctcactttattttggacagttttcctggagactggtgaactgcatacaacttggcacggagttggtgagcatggctttgccggtgccttgctgtgctgtgaaatatgccctacggctgattgcagtttacaattcgagggaggtcgtgctagcaaatatttttacgttcaaacgaacattggaatatatggaccaaaacatgctcacgcttctgataacggttgcattcgttccttaaatatgtgttccatgaaagtgaagcaaatgattttcatcccatcagggttgcatgcacctcatctcaatagaaaattaaaaaaacagtatttttataacttttcaacaatattatactacaacttttgtacaaaaaagctgtcgagg

SEQ ID NO: 68889 - DNA, 2493 bp, Zea Mays
caaatttcagcctgtatttccccccgtttaccaggcgttcgctcgctttccctctccatcccccctatctcgtggcgacgctggacaccgcgccgccgccctacgccgtggcgactactggacgtcgccggcgccctacgccaggtcttcgccattccattctctggagacaagcacccaacagataccgatcaggcattcaagaagtaaattcttcttctattgtgctgaatatatctgattctacatggctatggtgccaagtgattcatcacatcatggagctgtggacaatagccctaatggattcacccagggtcggcgtgaggaagctaggaaacttgggccatcatggtatttcagtagaaaggaaatagaagaacattctccatccaggagggatgacattgatttgaagaaagagtgtagccttcgaaagtcgtattgcagttttctacaagatttgggcatgaagcttaaagtgccccaagtgacgattgctacagctacggtattctgtcaccgttttttccttcgtcaatcccatgcaaagaatgatagacgaataattgccacagtttgtatgttcttggctgggaaagttgaagaaacacctagacctttgaaggatgttatcctggtatcttacgagcttattcataagaaggattctacagctggccagagaatcaagcagcagaaggaaatatatgataaacaaaaagaacttattttactcggggagcgaattgtacttgtaacacttgggtttgacctgaatattgaccatgcttacaagcccttggttgaagcaataaggagattcaatgttggtagtaaaagttcgcttcctcaggttgcctggaattttgtaaatgatggcaggtgctatctttttggctgctaaatttctcaaagtgaagcttccatctgatggtgataaggtttggtggcaggattttgatgtcacaccacggcagcttgaagaagttagcagtcaaatgatggagctgtatgttcagaaccgtacaccacaggcacaacaatcacagggaagcgaagctgaggggagctctgctggtgtgcgtaatcaacattcatctgtaaaatctgaaggaaactccaaggaaccatctgctcatggatatcatccggcattcaaaccgtcgaatttgcatcattcatccttggcaggtgctccaggtgaccatgacagtgggcattcaaattcagacaagcatgtttctggccacaaaatgcttcaaaatgataatggtaaccatgtcggtagcaaagaaaagaacaagagtggaggtaaatcggatgctggtatggatagattttgtcatgagaaatccccacctggacatcattattccaaggtcagccatgagtctcataatccagtggaagaacaaaaaccacatcaatcacatgataaccccaatgaaagaatagatggcattcttggtggcaacgaagttcctggtgtgtcgacctccaggatcgatgcaatgaataaaattgacaagggtaaggtaaaagcagctttggagaagcgaagaaaaacaaaaggtgatattaccacaaaggtagacgtgatggatgatgatgatctacttgagagagagcttgaacatggtgttgaattggctattgaggatgagaagattaagcaggataagatgcagaacttgtcccatattaaggacaagaagattacgcaggataatatgcagaacttgtcccatattaaggacgagcaggataacatgcagaacttgtccgacattaaggatgagaagattaagcaggatgagaggcagaacatgtcccatgctccagtggatcttcaaaccactgaccaagtaatggagaatggtcaccatgtcgagcctagtgtaccaacaactgtggaagacacggggtttccattggacaacaaagaacatcctccatttgataagcaaaatgatgttcctgagcacgagtcccagcagcttgaacacacattgaagcacgacctccctcagctggtaggggggcctgagcaggatgatggaacagactgtaaaaggcctaagctcgaagagtaggttctggatgatgctcactttattttggacagttttcctggagactggtgaactgcatacaacttggcacggagttggtgagcatggctttgccggtgccttgctgtgctgtgaaatatgccctacggctgattgcagtttacaattcgagggaggtcgtgctagcaaatatttttacgttcaaacgaacattggaatatatggaccaaaacatgctcacgcttctgataacggttgcattcgttccttaaatatgtgttccatgaaagtgaagcaaatgattttcatcccatcagggttgcatgcacctcatctcaatagaaaattaaaaaaacagtatttttataacttttcaacaatattatactacaacttttgtacaaaaaagctgtcgagg

SEQ ID NO: 68890 - DNA, 2490 bp, Zea Mays
ctggaggcccaccggcccaggcaaatttcagcctgtatttccccccgtttaccaggcgttcgctcgctttccctctccatcccccctatctcgtggcgacgctggacaccgcgccgccgccctacgccgtggcgactactggacgtcgccggcgccctacgccaggtcttcgccattccattctctggagacaagcacccaacagataccgatcaggcattcaagaagtaaattcttcttctattgtgctgaatatatctgattctacatggctatggtgccaagtgattcatcacatcatggagctgtggacaatagccctaatggattcacccagggtcggcgtgaggaagctaggaaacttgggccatcatggtatttcagtagaaaggaaatagaagaacattctccatccaggagggatgacattgatttgaagaaagagtgtagccttcgaaagtcgtattgcagttttctacaagatttgggcatgaagcttaaagtgccccaagtgacgattgctacagctacggtattctgtcaccgttttttccttcgtcaatcccatgcaaagaatgatagacgaataattgccacagtttgtatgttcttggctgggaaagttgaagaaacacctagacctttgaaggatgttatcctggtatcttacgagcttattcataagaaggattctacagctggccagagaatcaagcagcagaaggaaatatatgataaacaaaaagaacttattttactcggggagcgaattgtacttgtaacacttgggtttgacctgaatattgaccatgcttacaagcccttggttgaagcaataaggagattcaatgttggtagtaaaagttcgcttcctcaggttgcctggaattttgtaaatgatggactgcgtacttcgctttgcctgcaattcgagcctcatcatattgcagcaggattttgatgtcacaccacggcagcttgaagaagttagcagtcaaatgatggagctgtatgttcagaaccgtacaccacaggcacaacaatcacagggaagcgaagctgaggggagctctgctggtgtgcgtaatcaacattcatctgtaaaatctgaaggaaactccaaggaaccatctgctcatggatatcatccggcattcaaaccgtcgaatttgcatcattcatccttggcaggtgctccaggtgaccatgacagtgggcattcaaattcagacaagcatgtttctggccacaaaatgcttcaaaatgataatggtaaccatgtcggtagcaaagaaaagaacaagagtggaggtaaatcggatgctggtatggatagattttgtcatgagaaatccccacctggacatcattattccaaggtcagccatgagtctcataatccagtggaagaacaaaaaccacatcaatcacatgataaccccaatgaaagaatagatggcattcttggtggcaacgaagttcctggtgtgtcgacctccaggatcgatgcaatgaataaaattgacaagggtaaggtaaaagcagctttggagaagcgaagaaaaacaaaaggtgatattaccacaaaggtagacgtgatggatgatgatgatctacttgagagagagcttgaacatggtgttgaattggctattgaggatgagaagattaagcaggataagatgcagaacttgtcccatattaaggacaagaagattacgcaggataatatgcagaacttgtcccatattaaggacgagcaggataacatgcagaacttgtccgacattaaggatgagaagattaagcaggatgagaggcagaacatgtcccatgctccagtggatcttcaaaccactgaccaagtaatggagaatggtcaccatgtcgagcctagtgtaccaacaactgtggaagacacggggtttccattggacaacaaagaacatcctccatttgataagcaaaatgatgttcctgagcacgagtcccagcagcttgaacacacattgaagcacgacctccctcagctggtaggggggcctgagcaggatgatggaacagactgtaaaaggcctaagctcgaagagtaggttctggatgatgctcactttattttggacagttttcctggagactggtgaactgcatacaacttggcacggagttggtgagcatggctttgccggtgccttgctgtgctgtgaaatatgccctacggctgattgcagtttacaattcgagggaggtcgtgctagcaaatatttttacgttcaaacgaacattggaatatatggaccaaaacatgctcacgcttctgataacggttgcattcgttccttaaatatgtgttccatgaaagtgaagcaaatgattttcatcccatcagggttgcatgcacctcatctcaatagaaaattaaaaaaacagtatttttataacttttcaacaatattatactacaacttttgtacaaaaaagctgtcgagg

SEQ ID NO: 68891 - DNA, 495 bp, Zea Mays
cgaacgcagaaaatcacgtgggtgccgtagttctcagacgagtcgatataggcgcgggtcttagccctgcatccgggctataagaagaagtcatccgccgcaaaccccctggccatccaagtcacaagcttcatcggcgtcgtctcaattgctcatcggtcttcgtcctgctccaccatgccgcgcatctccgtggtcagaccctccacagcttgatagccgatgaacaagtgatcgaggacccaggtgttcagaaagtggaaattgctgagcaggagcccgttgaaggagaagaactggtggtctaggaggaagtctacaatgaggagtacgagcttatctaggtggcggctcccagtcagcttgatggcgccaaggaataatatttagttcgctttattgttatcatctatttttgtaagatacttccgctatgtaataatgatatttgtgacatttatctatatacattttgtcattatatgtgatgttctt

SEQ ID NO: 68892 - DNA, 765 bp, Zea Mays
gcgagccgtcccccttccctcttcatccgctcgctccgtctcccgcgctcctgccatcccctccggccactccgaccttccgtggagggagattccttgcccggtgggaatctcagggctgatttgaagactgccggcaaagatccatcgaggaggcggcgattccatcccgaatcacgacatccgtcctaagcgaaggagctgaataggcgcgcatcaccctcgtcgtcctagccgtcaccggctccatttgaatgtgccttcagttgctagtccccgaaccctatccctccgccgtcctcaaggtgcaggtccacctgatgcgacacaactcgcctgccgagctcaacgtcccatcgtcggcttcctctctccagggtccaggtgctcaaagtggaccacgattcccatggtgtggatgcacatgagcacattgagaaaatcgaagcaatgatgtgaacaagaaacattcagtagaaaacaaagaggaagtgaatggacctgagcacctgtttcctgggcctggagaaggcgtggtcttcctggcagggaagaatgacgtggagtgggtggcctgtgacttttcctcccttttccttcctactggcggctcctcccttttccttctgctggcagctcctcccttttccttcctgctggcggcttgtgcctgaccccctgcaggtctgggtaacgttggaaccaaagattcttgtgatcctttccttgtattcttttctatttttggtcacatatatatcagat

SEQ ID NO: 68893 - DNA, 1757 bp, Zea Mays
ctcagctccggccgccgctgctccctgcccgcattcggtcctgcagtgcatgcttctcgtggaccgagtccacagcacaccgaccgccatggatcgcgaggcgctccgcatgctgtgctcgccgcagttctggcggatggcagtcctctgggccctctccctcctccactcctacctcctcgtgttccactgcggccgggcggatgcccctcgccgccgccggccgcggccagccgaaggacgttgccccatctgcgttgtcaccggggcgacatcggggctgggcagggcggcggcggcggcgctcgcgcgggagggctaccacgtcgtgcttgctggacgttccacacagttattatatgagacagttcaagaaattcagaggcaacagccagatgcccatctcaaagagtttcaggtcgacttggcatccttcaagtcgattaagaaatttggaagttcactgaagcaatgggttcatgagaaaaatgtggagccttctattcagcttttggtaaataatgctggaatattagcgaagtcgcatcgaattactgaagatggccttgatgagatgatacagacaaactacattggtccatttatgctgaccaacattcttttaccattgctgaagaacagctcggtaccttctcgagtggttaatctaacttctttcacacacaggtgtgtgtcaggtcttgatgtatgtgaggatgcgctgagagggatgaaatttggtcggtgttcgataggggaaagttaccccttagcttctacttatgagtataccaagctttgtatgctgatgttctcatatgagcttcatcgacagctgcacatgtcatctggcgtctctgtaattgctgccgatcccggtgtcgtggagacaaagattatgcgagagctccctgaatgcctctcttggttcgcgttcttggctctgcgctcccttaaactcctgcaagaacctgacacgggggttggtgctgtcctcgatgctgctttggcgctgcctgaagagtctgggaagtatttctttggagggaaagggagaacgatcagatcgtcccgactgtcctatgacgccgaggtagccaagaagctgtgggcagagtcgtcagcagtgttcaaggagctgcagcttagaggaggcgattttggggatagttaaagaaaaacacagacaaatagatgagcctgacacccttgttttatgtatggtcctattttggcccttcgttttagcgtactcgaattttggtcctatatacgggaaaatatcctatgcaatcacttatcctggtgcaagcatgcaatcgagcgatctggtgcatccgatctagatctaatgatgactgttattttatatttaactccttccacctaaaacatagtacttattttacttttaacccctttcatatgaaaccgttggatctagattagatgctctgaatagtttgattgcacgcttgcaccaaaatgagtgattgcacaggatatgtcctccctatatacatgaggcagactggcagagcaagcaaggtcttgttctgtaggcggagccgcctgttaactgaaaaccagcaatgttacgagttacaagcttgtaatgtcacttccacttgtgtcgttgcttgcctccgttgtgaaaggaggcattggatacgggatgaacctaatagtagcgttgagcaaatgcagtatatgcacacaaaaaaaatggtacgcaaatgcaggaggcaatatttgac

SEQ ID NO: 68894 - DNA, 1842 bp, Zea Mays
cccctctttctcagctccggccgccgctgctccctgcccgcattcggtcctgcagtgcatggtataactgaggttgacagcttgatgtggaccgagtcctggtccaagtaagccctgagaacatcctacccgcccgtcacagcttctcgtggaccgagtccacagcacaccgaccgccatggatcgcgaggcgctccgcatgctgtgctcgccgcagttctggcggatggcagtcctctgggccctctccctcctccactcctacctcctcgtgttccactgcggccgggcggatgcccctcgccgccgccggccgcggccagccgaaggacgttgccccatctgcgttgtcaccggggcgacatcggggctgggcagggcggcggcggcggcgctcgcgcgggagggctaccacgtcgtgcttgctggacgttccacacagttattatatgagacagttcaagaaattcagaggcaacagccagatgcccatctcaaagagtttcaggtcgacttggcatccttcaagtcgattaagaaatttggaagttcactgaagcaatgggttcatgagaaaaatgtggagccttctattcagcttttggtaaataatgctggaatattagcgaagtcgcatcgaattactgaagatggccttgatgagatgatacagacaaactacattggtccatttatgctgaccaacattcttttaccattgctgaagaacagctcggtaccttctcgagtggttaatctaacttctttcacacacagtgtcaggtcttgatgtatgtgaggatgcgctgagagggatgaaatttggtcggtgttcgataggggaaagttaccccttagcttctacttatgagtataccaagctttgtatgctgatgttctcatatgagcttcatcgacagctgcacatgtcatctggcgtctctgtaattgctgccgatcccggtgtcgtggagacaaagattatgcgagagctccctgaatgcctctcttggttcgcgttcttggctctgcgctcccttaaactcctgcaagaacctgacacgggggttggtgctgtcctcgatgctgctttggcgctgcctgaagagtctgggaagtatttctttggagggaaagggagaacgatcagatcgtcccgactgtcctatgacgccgaggtagccaagaagctgtgggcagagtcgtcagcagtgttcaaggagctgcagcttagaggaggcgattttggggatagttaaagaaaaacacagacaaatagatgagcctgacacccttgttttatgtatggtcctattttggcccttcgttttagcgtactcgaattttggtcctatatacgggaaaatatcctatgcaatcacttatcctggtgcaagcatgcaatcgagcgatctggtgcatccgatctagatctaatgatgactgttattttatatttaactccttccacctaaaacatagtacttattttacttttaacccctttcatatgaaaccgttggatctagattagatgctctgaatagtttgattgcacgcttgcaccaaaatgagtgattgcacaggatatgtcctccctatatacatgaggcagactggcagagcaagcaaggtcttgttctgtaggcggagccgcctgttaactgaaaaccagcaatgttacgagttacaagcttgtaatgtcacttccacttgtgtcgttgcttgcctccgttgtgaaaggaggcattggatacgggatgaacctaatagtagcgttgagcaaatgcagtatatgcacacaaaaaaaatggtacgcaaatgcaggaggcaatatttgac

SEQ ID NO: 68895 - DNA, 1896 bp, Zea Mays
tcgcattcccaccgccgccaaaccagtgcccctctttctcagctccggccgccgctgctccctgcccgcattcggtcctgcagtgcatggtataactgaggttgacagcttgatgtggaccgagtcctggtccaagtaagccctgagaacatcctacccgcccgtcacagcttctcgtggaccgagtccacagcacaccgaccgccatggatcgcgaggcgctccgcatgctgtgctcgccgcagttctggcggatggcagtcctctgggccctctccctcctccactcctacctcctcgtgttccactgcggccgggcggatgcccctcgccgccgccggccgcggccagccgaaggacgttgccccatctgcgttgtcaccggggcgacatcggggctgggcagggcggcggcggcggcgctcgcgcgggagggctaccacgtcgtgcttgctggacgttccacacagttattatatgagacagttcaagaaattcagaggcaacagccagatgcccatctcaaagagtttcaggtcgacttggcatccttcaagtcgattaagaaatttggaagttcactgaagcaatgggttcatgagaaaaatgtggagccttctattcagcttttggtaaataatgctggaatattagcgaagtcgcatcgaattactgaagatggccttgatgagatgatacagacaaactacattggtccatttatgctgaccaacattcttttaccattgctgaagaacagctcggtaccttctcgagtggttaatctaacttctttcacacacagtgtcaggtcttgatgtatgtgaggatgcgctgagagggatgaaatttggtcggtgttcgataggggaaagttaccccttagcttctacttatgagtataccaagctttgtatgctgatgttctcatatgagcttcatcgacagctgcacatgtcatctggcgtctctgtaatatagtatgatttaacatccgttgtttctagtgctgccgatcccggtgtcgtggagacaaagattatgcgagagctccctgaatgcctctcttggttcgcgttcttggctctgcgctcccttaaactcctgcaagaacctgacacgggggttggtgctgtcctcgatgctgctttggcgctgcctagtctgggaagtatttctttggagggaaagggagaacgatcagatcgtcccgactgtcctatgacgccgaggtagccaagaagctgtgggcagagtcgtcagcagtgttcaaggagctgcagcttagaggaggcgattttggggatagttaaagaaaaacacagacaaatagatgagcctgacacccttgttttatgtatggtcctattttggcccttcgttttagcgtactcgaattttggtcctatatacgggaaaatatcctatgcaatcacttatcctggtgcaagcatgcaatcgagcgatctggtgcatccgatctagatctaatgatgactgttattttatatttaactccttccacctaaaacatagtacttattttacttttaacccctttcatatgaaaccgttggatctagattagatgctctgaatagtttgattgcacgcttgcaccaaaatgagtgattgcacaggatatgtcctccctatatacatgaggcagactggcagagcaagcaaggtcttgttctgtaggcggagccgcctgttaactgaaaaccagcaatgttacgagttacaagcttgtaatgtcacttccacttgtgtcgttgcttgcctccgttgtgaaaggaggcattggatacgggatgaacctaatagtagcgttgagcaaatgcagtatatgcacacaaaaaaaatggtacgcaaatgcaggaggcaatatttgac

SEQ ID NO: 68896 - DNA, 3644 bp, Zea Mays
cgctgtagttgggaagagggctttccctctttctctctcctcgtcatccccagcgacgaaaagcgtctcatcgcctttctctctcctctctccggaccggagcctactctctccactagagagcgcgggacctagcacgagtagagggagaagttgagggggaggtcgtcgccgccgccgccgccgccgccgccgccgccgccgccgcgaggtcaccgtcgtcgccgccgccgctgcgatggctcgcctgttccgcgagtctcgccgcgactcgtcccactcctcctcgtccaacggcttcctccctccggcggcggcttccagcccctcttccgcctccgcgatcccctcgccattcccggacctcggggtcgccctctccgccgcagacctccgggaggccgcctacgaggtgctggtcgcggcctcccgcaccacgggcgggaagcccctcacctatatcccccagtcctcgtcggtggccacggggccgccggtgtccccggcctcctccgcgtcctcggcctcatccgcctcgctccagcgctccctcacctctgccgccgccagcaagatgaagaaggcgctcgggctccggtcctccgcctcctccaagggtgtcggcagccccgggagtggcgggaaggcggcgcccccgcggaggcccgccacggttggggagctcatgcgggtgcagatgcgcatctccgagcccgccgacgccaggatccgcagggggctcctccgcatcgccgccagccagcttggcagacgcgcagaatctatggtcttgcccttggaattcttgcagcaattcaaggcatcagatttccctgatcctcaagagtatgaggcgtggcggagtaggaatctgaagcttcttgaggctggtctacttgttcatccactcattccattgaacaaatcagacagttctggtcaacggttgcggcaaattatacggggtgcatatgataggccacttgaaactgggaaaaactctgagtcaatgcagggcctacgtacttctgtcatgtcccttgctggaagatctcatgatggaacttctgatggatgccactgggcagatggcttccccttgaatctccatctgtaccaagttttggtagaagcttgctttgataatgacgagggcactgtggtcgatgagatcgatgaggtgatggagcttttgaagaaaacctgggttattcttggaattaatgagttactccacaatctttgctttacttgggcattgttcaaccattttgttatgtctggtcaagtagatattgagctgctttctgcggcagagaaccagttagctgaagtagctaaggatgccaagagcacaaaagatccaaattactgtaaagtattgagttcaacattaagctcaataatgggctggacagagaaaagacttctggcatatcatgaaaccttcaatacatgtaatattgagtctatgcaaggcattgtctccattggagtgtcagctgcaagaatccttgttgaagatatatctcaggaataccgccgtagaagaaaagaagagactgatgtagctcgaagcagggtagagacatacataaggtcttcactaaggacagcttttgctcaaagaatggaagaagcagattcaaaacggtcatcaagaaaccctactccagttctttctatccttgcgaaggacattggtgacctagctacaaaggagaaaaatatctacagtccaatactgaagacatggcatccactcgcttcaggtgttgccgttgcaacccttcattcttgttatggaaatgagctgaagcagtttgtagctgggcttacagagctgacccctgatacagttcaagtacttaaatcggcagataaattagagaaggaccttgttaatatcgctgtagaagattctgtggatagtgatgatggaggcaagtcacttatcagagagatgccgccatatgaagctgaaaatgcaattgctaatctggtgaaagtgtggataaaagatagagtagacagactcaagggatgggttgaccggaatttgaagcaagagacctggaatccaggtgccaacagggataattttgctccctcttctgtggagatgcttcgggttattggtgaaacattggatgcatttttccaattgcctataccaatgcatccagctcttcttcctgatctgacagctgggctcgacagaagcctacaactttatgttgctaaagcaaaatctggctgtggaacacggaattcttttatgccccaactacctccactcacacgatgcgaggttggctccaagttattattcaagaaaaaagagaagccacaaaatctgcaggttcgagtatcacaaaatggagcagcaaatggaaatgatcccttgggccttcctcaactctgtgttcgcctgaatacacttcagtacatccgtggtgagcttgagaacatagagaagaagataaaaacaagcttgcgaaatgtcgagtcagctcaggcagatgtcactgatggattggacatcaagttcgagctttgtcaggcagcctgtctagagggcattcagcagatttgtgagacaactgcatataaggtgatgttctatgacttgggccatgttctctgggacaccctttatgttggtgatactgcatcaaacagggtggaggtactgttgagggaacttgaccctgtccttgagacgatatctggtatggtgcacaacaaagtgcggaaccgtgctattactgcactgatgaaagcaacttttgatggtttcttgctggtgcttcttgctggtgggcctttgcgtgctttcacccgccaagactctcagataatagaagatgacttcagggccctcagagatctgtatttagcagacggggatggtttgccagaggaattagttgacaaatctcattgagcgattcagacgcatgatggttgaatctaatcggtctgcgtccaagaacaggttaccattgcctccaacaacggggcattggagtccaaatgagcctaacacagttctgcgagttctgtgctaccggagtgatgagacagctacaaagttcctcaagaaaacttacaacctaccgaagaagatatgacttgtgggatagatcacaaaccacatgtacattttcctgtcagtataaaaaggtttctctatgcctgtcacaatctctggctgaggaccgaggaaatacccactaaactttccacagcaaaggcgcctcctcaagtgattgtcaacaagaaggtttattctgtggtgctggagagatgtgactgggtgttttcggtggttcgtatcatggataggtttacttacagcttgatttgttcattatattatatatgtttgcctaatctagttcttttgctgaccttgcgctcatgtaatttgattcattctagtttgcgacagctatacccagcgtgtgaataagttgtgtactcgcgtgatactgtctggtgcctttgatgtgacaatatgaggagcatttgtatatttttactgcatcgtgcactccccactactttggtagttttctgtcatatccttgattccttgttgggttgaacgttctttggttatgcaactatttcaatttgca

SEQ ID NO: 68897 - DNA, 1586 bp, Zea Mays
ctgaaacccaggatattaaaatgttgacgccatcgtggctatcaaaactgagtatggactcagcagaaactggatgggtgatccatgttttccaatcaaatatgcttgggacggtgtgaaatgcagcaacgcaagtggtaacacatcgaggataacatcactagacctctccaacagctctttgcatggcacaatttctaagaactttacactgctcacagcactcgagaatttggatttatcttacaacaagttgatcggatcaatacctgattccctgccaagtttgccttccctacgagttctaaatgtatctggcaaccagctgagtgacgaatccctatgtaaaaattatactggaccacttattttcagccgtgattttgatggctctgcatgcaacaaaccttcccccagcccgtcaagaaataaagtagctataatagctatttcagtagtggttcctgtgttagtactaattgtactactttttacatatttcatctggtgggcgaaaagaaagtctaatgtgcaaccagtacccacacatggcccaacaagagatccagaacctgataatgtttcaggaagccaaaaaagttatggctacaacatgaataaaactgagaatcgtcagttcacatacaaagagctggagaagttcactaataatttcaagaagttcataggacaaggaggttttgggcctgtctactatggccgcttggaagatgatactgaggttgctgtcaagatgcgttctgaatcatcgtcacatgggcttgatgaatttttagctgaggttcagagcttaacaaaggtgcatcacaggaatctagtgtccttgattggttactgctgggaaaaagatcatttggcactggtttatgagtacatgtctcagggcagtctttttgatcatctgagaggtaaaaatggtgtttcccaagccttgaattggaggaaacgtgtgcaagtagtgcttgaagctgcacaaggcctggattatctgcacaagggttgcagtttgccaatagtccaccgtgatgtgaagaccaacaacattctcctgggtcaaaatctgcaaggccgaggccacgtcattcagcgcgttaaacagaaggttgccaccggcgacgttggctcgatcgctgattcgcgacttggaagcgcttacgacatcagctccatgtggaaggtaatcgacaccgctgtgatgtgcaccgcggattctgctgctcagaggccaacgatggccacagttgtggtacagctgaaggagagcctggcgttggaggaaactcgtgagaagggcagcagcaacagggtgagccgagggagtgatatagaagctatggcgtccacacttggtccattcgcaagatgaagctatgcctgtacctggattcagttcatggttgacgtccctactaaaactgtgtatggtcacctaaaataatattttgcactgtaaaatgtattatttgcagagtgaagttttaatatggatatgagaataggtaaactgccgaagataacataaatgtctgcagtggcttgtatgtgtatggaatttgagaatccgc

SEQ ID NO: 68898 - DNA, 1571 bp, Zea Mays
ctgaaacccaggatattaaaatgttgacgccatcgtggctatcaaaactgagtatggactcagcagaaactggatgggtgatccatgttttccaatcaaatatgcttgggacggtgtgaaatgcagcaacgcaagtggtaacacatcgaggataacatcactctctttgcatggcacaatttctaagaactttacactgctcacagcactcgagaatttggatttatcttacaacaagttgatcggatcaatacctgattccctgccaagtttgccttccctacgagttctaaatgtatctggcaaccagctgagtgacgaatccctatgtaaaaattatactggaccacttattttcagccgtgattttgatggctctgcatgcaacaaaccttcccccagcccgtcaagaaataaagtagctataatagctatttcagtagtggttcctgtgttagtactaattgtactactttttacatatttcatctggtgggcgaaaagaaagtctaatgtgcaaccagtacccacacatggcccaacaagagatccagaacctgataatgtttcaggaagccaaaaaagttatggctacaacatgaataaaactgagaatcgtcagttcacatacaaagagctggagaagttcactaataatttcaagaagttcataggacaaggaggttttgggcctgtctactatggccgcttggaagatgatactgaggttgctgtcaagatgcgttctgaatcatcgtcacatgggcttgatgaatttttagctgaggttcagagcttaacaaaggtgcatcacaggaatctagtgtccttgattggttactgctgggaaaaagatcatttggcactggtttatgagtacatgtctcagggcagtctttttgatcatctgagaggtaaaaatggtgtttcccaagccttgaattggaggaaacgtgtgcaagtagtgcttgaagctgcacaaggcctggattatctgcacaagggttgcagtttgccaatagtccaccgtgatgtgaagaccaacaacattctcctgggtcaaaatctgcaaggccgaggccacgtcattcagcgcgttaaacagaaggttgccaccggcgacgttggctcgatcgctgattcgcgacttggaagcgcttacgacatcagctccatgtggaaggtaatcgacaccgctgtgatgtgcaccgcggattctgctgctcagaggccaacgatggccacagttgtggtacagctgaaggagagcctggcgttggaggaaactcgtgagaagggcagcagcaacagggtgagccgagggagtgatatagaagctatggcgtccacacttggtccattcgcaagatgaagctatgcctgtacctggattcagttcatggttgacgtccctactaaaactgtgtatggtcacctaaaataatattttgcactgtaaaatgtattatttgcagagtgaagttttaatatggatatgagaataggtaaactgccgaagataacataaatgtctgcagtggcttgtatgtgtatggaatttgagaatccgc

SEQ ID NO: 68899 - DNA, 2611 bp, Zea Mays
tacatcgtgtggcgtacaggtttcctgagcatcgactgcggcctggacgccagctacagcgggtacaaggacaaggtcaccggcatcgtctacgtctccgacggttcctacgtggacgccggcgagaaccacaggatagcccccgacctggagggctcgttccagggaagggctcagacgctaaggagcttcccgtccgggcagcggaactgctacttgctccccaccgtggctgggaccaggtacctggcgcgggccaccttcgcgtacggcaattacgacggcaagaacagctcggcgctggagttcgacctgcacctgggcgccaactactggcagacggtctacccgaacgcgcggagcagcgacgtgtacgaggcggtcttcgtcgcgtgggccgggtgggcgccgtggtgcctcgtcaacaccggccacggcacgccgttcgtgtccgtcttggagctcaggccgctcggagccgagctatacccactggtcacacccggcctggtcgtatccatgtttgcacgcataaacatggggggcagcgtttcaatgacgcggtatcctgacgatccgtacgaccgtttctggtgggcgatggacgaagctagcccacggtgggtgaacctgtcgaccacgcggcccattcaaccggacaccagctcctacgccgtgccctctcgcatcctgcagacagccgtcgccgcggcatcggacaacgatacggcggcggcgctcaccgccgtgacctggcagtactaaaccaagtactcgttcatgatattcctgcacttcaccgacttccaggacacccagcttcgacagtttgatatcctcatcaacgagaaccaatctgggccgaagctcacggcgtacaacgacacgtggtacctgactccaacccatgtgcacaccaaatcctacagggctgacgacggcaagtacaacgtcactcttgctgcaaccaaagcctccgtgctgcctccgatgatcaatgcgctggagatctacattcgtgtcccttatgagagtccgacgacactccctcaagactttgacgccatcgtggctatcaaaactgagtatggactcagcagaaactggatgggtgatccatgttttccaatcaaatatgcttgggacggtgtgaaatgcagcaacgcaagtggtaacacatcgaggataacatcactagacctctccaacagctctttgcatggcacaatttctaagaactttacactgctcacagcactcgagaatttggatttatcttacaacaagttgatcggatcaatacctgattccctgccaagtttgccttccctacgagttctaaatgtatctggcaaccagctgagtgacgaatccctatgtaaaaattatactggaccacttattttcagccgtgattttgatggctctgcatgcaacaaaccttcccccagcccgtcaagaaataaagtagctataatagctatttcagtagtggttcctgtgttagtactaattgtactactttttacatatttcatctggtgggcgaaaagaaagtctaatgtacccacacatggcccaacaagagatccagaacctgataatgtttcaggaagccaaaaaagttatggctacaacatgaataaaactgagaatcgtcagttcacatacaaagagctggagaagttcactaataatttcaagaagttcataggacaaggaggttttgggcctgtctactatggccgcttggaagatgatactgaggttgctgtcaagatgcgttctgaatcatcgtcacatgggcttgatgaatttttagctgaggttcagagcttaacaaaggtgcatcacaggaatctagtgtccttgattggttactgctgggaaaaagatcatttggcactggtttatgagtacatgtctcagggcagtctttttgatcatctgagaggtaaaaatggtgtttcccaagccttgaattggaggaaacgtgtgcaagtagtgcttgaagctgcacaaggcctggattatctgcacaagggttgcagtttgccaatagtccaccgtgatgtgaagaccaacaacattctcctgggtcaaaatctgcaaggccgaggccacgtcattcagcgcgttaaacagaaggttgccaccggcgacgttggctcgatcgctgattcgcgacttggaagcgcttacgacatcagctccatgtggaaggtaatcgacaccgctgtgatgtgcaccgcggattctgctgctcagaggccaacgatggccacagttgtggtacagctgaaggagagcctggcgttggaggaaactcgtgagaagggcagcagcaacagggtgagccgagggagtgatatagaagctatggcgtccacacttggtccattcgcaagatgaagctatgcctgtacctggattcagttcatggttgacgtccctactaaaactgtgtatggtcacctaaaataatattttgcactgtaaaatgtattatttgcagagtgaagttttaatatggatatgagaataggtaaactgccgaagataacataaatgtctgcagtggcttgtatgtgtatggaatttgagaatccgc

SEQ ID NO: 68900 - DNA, 2481 bp, Zea Mays
tacatcgtgtggcgtacaggtttcctgagcatcgactgcggcctggacgccagctacagcgggtacaaggacaaggtcaccggcatcgtctacgtctccgacggttcctacgtggacgccggcgagaaccacaggatagcccccgacctggagggctcgttccagggaagggctcagacgctaaggagcttcccgtccgggcagcggaactgctacttgctccccaccgtggctgggaccaggtacctggcgcgggccaccttcgcgtacggcaattacgacggcaagaacagctcggcgctggagttcgacctgcacctgggcgccaactactggcagacggtctacccgaacgcgcggagcagcgacgtgtacgaggcggtcttcgtcgcgtgggccgggtgggcgccgtggtgcctcgtcaacaccggccacggcacgccgttcgtgtccgtcttggagctcaggccgctcggagccgagctatacccactggtcacacccggcctggtcgtatccatgtttgcacgcataaacatggggggcagcgtttcaatgacgcggtatcctgacgatccgtacgaccgtttctggtgggcgatggacgaagctagcccacggtgggtgaacctgtcgaccacgcggcccattcaaccggacaccagctcctacgccgtgccctctcgcatcctgcagacagccgtcgccgcggcatcggacaacgatacggcggcggcgctcaccgccgtgacctggcagtactaaaccaagtactcgttcatgatattcctgcacttcaccgacttccaggacacccagcttcgacagtttgatatcctcatcaacgagaaccaatctgggccgaagctcacggcgtacaacgacacgtggtacctgactccaacccatgtgcacaccaaatcctacagggctgacgacggcaagtacaacgtcactcttgctgcaaccaaagcctccgtgctgcctccgatgatcaatgcgctggagatctacattcgtgtcccttatgagagtccgacgacactccctcaagactagacctctccaacagctctttgcatggcacaatttctaagaactttacactgctcacagcactcgagaatttggatttatcttacaacaagttgatcggatcaatacctgattccctgccaagtttgccttccctacgagttctaaatgtatctggcaaccagctgagtgacgaatccctatgtaaaaattatactggaccacttattttcagccgtgattttgatggctctgcatgcaacaaaccttcccccagcccgtcaagaaataaagtagctataatagctatttcagtagtggttcctgtgttagtactaattgtactactttttacatatttcatctggtgggcgaaaagaaagtctaatgtgcaaccagtacccacacatggcccaacaagagatccagaacctgataatgtttcaggaagccaaaaaagttatggctacaacatgaataaaactgagaatcgtcagttcacatacaaagagctggagaagttcactaataatttcaagaagttcataggacaaggaggttttgggcctgtctactatggccgcttggaagatgatactgaggttgctgtcaagatgcgttctgaatcatcgtcacatgggcttgatgaatttttagctgaggttcagagcttaacaaaggtgcatcacaggaatctagtgtccttgattggttactgctgggaaaaagatcatttggcactggtttatgagtacatgtctcagggcagtctttttgatcatctgagaggtaaaaatggtgtttcccaagccttgaattggaggaaacgtgtgcaagtagtgcttgaagctgcacaaggcctggattatctgcacaagggttgcagtttgccaatagtccaccgtgatgtgaagaccaacaacattctcctgggtcaaaatctgcaaggccgaggccacgtcattcagcgcgttaaacagaaggttgccaccggcgacgttggctcgatcgctgattcgcgacttggaagcgcttacgacatcagctccatgtggaaggtaatcgacaccgctgtgatgtgcaccgcggattctgctgctcagaggccaacgatggccacagttgtggtacagctgaaggagagcctggcgttggaggaaactcgtgagaagggcagcagcaacagggtgagccgagggagtgatatagaagctatggcgtccacacttggtccattcgcaagatgaagctatgcctgtacctggattcagttcatggttgacgtccctactaaaactgtgtatggtcacctaaaataatattttgcactgtaaaatgtattatttgcagagtgaagttttaatatggatatgagaataggtaaactgccgaagataacataaatgtctgcagtggcttgtatgtgtatggaatttgagaatccgc

SEQ ID NO: 68901 - DNA, 2694 bp, Zea Mays
tgatcgtcgttcctcagacgacgaccgtcaatatggtgctcgcgttcctggttctactgctgttatttgctcctgttgccgtcagccaacaaggtttcctgagcatcgactgcggcctggacgccagctacagcgggtacaaggacaaggtcaccggcatcgtctacgtctccgacggttcctacgtggacgccggcgagaaccacaggatagcccccgacctggagggctcgttccagggaagggctcagacgctaaggagcttcccgtccgggcagcggaactgctacttgctccccaccgtggctgggaccaggtacctggcgcgggccaccttcgcgtacggcaattacgacggcaagaacagctcggcgctggagttcgacctgcacctgggcgccaactactggcagacggtctacccgaacgcgcggagcagcgacgtgtacgaggcggtcttcgtcgcgtgggccgggtgggcgccgtggtgcctcgtcaacaccggccacggcacgccgttcgtgtccgtcttggagctcaggccgctcggagccgagctatacccactggtcacacccggcctggtcgtatccatgtttgcacgcataaacatggggggcagcgtttcaatgacgcggtatcctgacgatccgtacgaccgtttctggtgggcgatggacgaagctagcccacggtgggtgaacctgtcgaccacgcggcccattcaaccggacaccagctcctacgccgtgccctctcgcatcctgcagacagccgtcgccgcggcatcggacaacgatacggcggcggcgctcaccgccgtgacctggcagtactaaaccaagtactcgttcatgatattcctgcacttcaccgacttccaggacacccagcttcgacagtttgatatcctcatcaacgagaaccaatctgggccgaagctcacggcgtacaacgacacgtggtacctgactccaacccatgtgcacaccaaatcctacagggctgacgacggcaagtacaacgtcactcttgctgcaaccaaagcctccgtgctgcctccgatgatcaatgcgctggagatctacattcgtgtcccttatgagagtccgacgacactccctcaagactttgacgccatcgtggctatcaaaactgagtatggactcagcagaaactggatgggtgatccatgttttccaatcaaatatgcttgggacggtgtgaaatgcagcaacgcaagtggtaacacatcgaggataacatcactagacctctccaacagctctttgcatggcacaatttctaagaactttacactgctcacagcactcgagaatttggatttatcttacaacaagttgatcggatcaatacctgattccctgccaagtttgccttccctacgagttctaaatgtatctggcaaccagctgagtgacgaatccctatgtaaaaattatactggaccacttattttcagccgtgattttgatggctctgcatgcaacaaaccttcccccagcccgtcaagaaataaagtagctataatagctatttcagtagtggttcctgtgttagtactaattgtactactttttacatatttcatctggtgggcgaaaagaaagtctaatgtgcaaccagtacccacacatggcccaacaagagatccagaacctgataatgtttcaggaagccaaaaaagttatggctacaacatgaataaaactgagaatcgtcagttcacatacaaagagctggagaagttcactaataatttcaagaagttcataggacaaggaggttttgggcctgtctactatggccgcttggaagatgatactgaggttgctgtcaagatgcgttctgaatcatcgtcacatgggcttgatgaatttttagctgaggttcagagcttaacaaaggtgcatcacaggaatctagtgtccttgattggttactgctgggaaaaagatcatttggcactggtttatgagtacatgtctcagggcagtctttttgatcatctgagaggtaaaaatggtgtttcccaagccttgaattggaggaaacgtgtgcaagtagtgcttgaagctgcacaaggcctggattatctgcacaagggttgcagtttgccaatagtccaccgtgatgtgaagaccaacaacattctcctgggtcaaaatctgcaaggccgaggccacgtcattcagcgcgttaaacagaaggttgccaccggcgacgttggctcgatcgctgattcgcgacttggaagcgcttacgacatcagctccatgtggaaggtaatcgacaccgctgtgatgtgcaccgcggattctgctgctcagaggccaacgatggccacagttgtggtacagctgaaggagagcctggcgttggaggaaactcgtgagaagggcagcagcaacagggtgagccgagggagtgatatagaagctatggcgtccacacttggtccattcgcaagatgaagctatgcctgtacctggattcagttcatggttgacgtccctactaaaactgtgtatggtcacctaaaataatattttgcactgtaaaatgtattatttgcagagtgaagttttaatatggatatgagaataggtaaactgccgaagataacataaatgtctgcagtggcttgtatgtgtatggaatttgagaatccgc

SEQ ID NO: 68902 - DNA, 1671 bp, Zea Mays
tgtatggcccgctcgacagttcctcgctcgaaccactctcaccaccatgtggcccacctcatcagatcctcccctcgcaacgaaatcaccggatttggcggcggagcgcgattgccgcgcgagctggtgcgactacggatcagtccacgcctatatctgtggccatgatcctgactccatcccgtccacttcttggtactcctcgcgtccaccggaaggtcattgggtgtgtggctggccagagtgcgcaaatttccccagcatcgatccgccattgccgccaggagtcctcgacgtcgcgtccgtgcatctctctgccttccccgccgacgagcaagccaaagaggatccaggggttcagcaggtggagactgctgagcgggagctcgttgaaggcaagttgtgcctttgatcacttctttttacctagtcatgaacttattaatcataatgatctgcataggttaattttgatgggacccaataggttaccctagttttgctatctttataccttgtttaccactgaatttttgggtagtacctgctattgccttatgtggtttttgggtatggagttacacattattcatgatcatacttttattattagtttgttatttactgttcatgataagatcattatattaattgaaacatggagcgaccacccgagaaaaacagtgctaccacaagggtggtatgggacgcccttggctgactaactaggaaagctagtggaggactacattacccgataggggcaagggcagtaggggagtggttagtgtggggaggcccttgggttgatttttctgcgatggcggtcaggcgagggatccctgcattggagcttcctagaaactgtagcagatttttgaagctagtggaactttgtaaaggcctcatagtgttaccctgtctcgcttccttggtagaggtgtatgggaagtcacgatcccttggaagatgggtacaatgacttgtgggtaaagattcgcaacctctgtagagtgtaaaactggtatactagccgtgctcacggtcatcagcagctcggaccctcacatgattaatttatggaattaaattcaatttgtcatttgtatcgtattaggatttatttatttttttgtatactattacattggattggtattcacttacatttagtaactgctaataaagttttgaccaacttataaaagcaatgctcagctttaacccttatttgttgatcggccttacacttcacatgaactcccacctttggtgagttcttgcacatcattccccacaacttgttgagctatgatcttttgtgagctcactcttgcgatatataaaccccccacatgtgaagagcaggtggtcgaagaggagacgccctacaatgaagcatacaagttgatctaggtggcgtctctgagtcagctttgtggcgctagggaaataatatttagcttgctttattattatcatttatttttgtatgacttccgctatgtaataattatatttatgacatttatctctatacactttgtcattatatgtgatgttcttccttggcgcacatatgagacgcaaccggctttatcctttaaatccgggtgtgacatgatgctcaagtcccaaagaagcacaaaaggtctcaatatgagtatttct

SEQ ID NO: 68903 - DNA, 814 bp, Zea Mays
cctagtatgatgggttccattgacttcatgtattggaaatgacgcgatttcccatctgcttggcacaacaatttactagtagatactcgaagccctccttgatacatgaggaagtagcttcatatgacatgtggatttggcatgcattcttcggaatgccggggagcaataaagacataaatttcttgcaacatccacatatattcgatccattacgtcaaggaactatgtcccctgtgcactacaccatcaacaaccacacgtacgaaactggttactttctagcagacgatatataccctgattgacctacattcgtgaaagctatcagtcatccttgggaggaaaagaaggtttacttcatccaaatgcaggaaagtcgtaggaaagatgttgaacaagccttcggtgtattgcaagcttgttggggagtactacatggacccgcatatggcagggatcgataacgtctgggagagattatgaccacatttatcatctcgcacaacatgatcgtggatgatgaagggttccaagccataaatttggattttgtagatgttggtgaatcggttcgcttctcaaatgatgtaccccaaacacgaagcgaatcggtccaaagccaccttgacattatgggacatgcaggacacacacagttgtagcaatacctcatcgagcacctttgggttaggcatggagcacaaacttgaagacaaccaaccatttctactctaattagtagttgaagtatgtcgagttgctatattgtatccaagttatggtcatgctttaaggtatgaataaaattgtg

SEQ ID NO: 68904 - DNA, 580 bp, Zea Mays
atttctccctcctttggtgttcacaaaacacatttgagtagttttcatcaatatacttcccttcgatcacttgttcaggcacgacttagttatcgtcgatgacaatggttttaaagatttggtggtcatcaatgaagtcacacgccgatcaagaaggtgagcaatcttggcgtcgccgtcgtggagttcctcgcaccgtgattccacgggatcacgctgccgaggaataactaatccttgctcactacttcagcaacaacctggtgtaccctggccacatgttccggaggaggaaagtcgtaggaaagatgttgaacaagccttcggtgtattgcaagcttgttggggagtactacatggacccgcatatggcagggatcgataacgtctgggagagattatgaccacatttatcatctcgcacaacatgatcgtggatgatgaagggttccaagccataaatttggattttgtagatgttggtgaatcggttcgcttctcaaatgatgtaccccaaacacgaagcgaatcggtccaaagccaccttgacattatgggacatgcaggacacacacagttg

SEQ ID NO: 68905 - DNA, 897 bp, Zea Mays
caccatttctccctcctttggtgttcacaaaacacatttgagtagttttcatcaatatacttcccttcgatcacttgttcaggcacgacttagttatcgtcgatgacaatggttttaaagatttggtggtcatcaatgaagtcacacgccgatcaagaaggtgagcaatcttggcgtcgccgtcgtggagttcctcgcaccgtgattccacgggatcacgctgccgaggaataactaatccttgctcactacttcagcaacaacctggtgtaccctggccacatgttccggaggaggtttaggatgcgtcagcacatgtttgaacaaatcctacatactctccaacaagtcgatgtatactttaatagacgcgctgattgcacgagtcttgtgggtcttggacctcatcaaaagtgatgtgtggtttttcgcattcttgcctacaatttacctagtgacgatgttgacgagtacatacaaatacaaataggtgagacgacaattagggaatgcttgatttgcttctatcgtgctgtcattgctgcgtttgggctatgatggccatttggcactaacacgatgggccagcccaggcacgacacgaaaaagcacggtccaggcacgatccggtccggttagtatagtgtcagtgcctggcacgacacgactatagtgccgtgcctgggccactatctcgacccgtagtgctggcacgggcacgacacggttacattttttattttgaaaataatagtttacatatattaagtataagaattcaacatataacacaataaaattgcagctgcattggttagatggatgcctttaagcctcttatgcactaggttgtgagttcgaacccccacaactacacatttttttgctaaattctac

SEQ ID NO: 68906 - DNA, 1872 bp, Zea Mays
ccccttttcttttctctttccaccggtccccgagctgcagcacaagaagcgattccagctgttgtcttgcatctcccttgtgctatctcaccccatgttcgcacaggaaactgaagaagaggggtcagggcacagaccgcttcacgcagcagcccgcccgcggtcgcgcgtgcaaaaggagcgcacttgcgaaatgagctagaagatggcgatttagtggaggcgaaaagctgcgatggggctgggtcgtcgatggagaagtgctggcagcgtgccctagctctgggatttatcttacaacaagttgagcggatcaatacctgattccctgccaactttgccttccctacgagttctacgtgattttgatggctcagtatgcaacaaaccttcacccagcccgtcaagaaataaagtagctatcatagctatttcagtagtggttcctgtgttagtactaattgtactacttcttacatatttcatctggtggcagaaaagaaagcctattgtgcaaccagtacccacacatggctcaacaagagatccagaacctgataatgcttcaggaatcaaaaaaagttatggctacaacctgaatataactgagaatcgtcagttcacatacaaagagctggagaagttcactaataatttcaagaagttcataggacaaggaggttttgggcccgtctactatggccgtttggaagatgacactgaggttgctgtcaagatgcgttctgaatcatcgtcacatgggcttgatgaatttttagctgaggttcagagcttgacaaaggtgcatcacaggaatctagtgtctttgattggttactgctgggaggaagatcatttggcgctggtttatgagtacatgcctcagggcagtctttttgatcatctgagaggtaaaaatggtgtttctgaagccttgaattggaggaaacgtgtacaggtagtgcttgaagctgcacaaggtctggattatctgcacaagggttgcagtttgccaatagtccaccgtgatgtgaagaccaacaacattctcttgggtcaaaatctgcaagctaaaatagcagattttggactttccaagacatatctgagcgacacacaaactcacatatcagtcactccagctggcacagctggttacatggaccctgagtactaccagaccggaaggctcagtgagagcagcgacgtgttcagcttcggagttgttctgcttgaggtagccacaggcgagtccccgacattgccaggccaaggtcacatcaatcagcgcgttaaacagaagattgccactggcaacgttggctcgatcgctgattcgcgacttggaagcgcctacgacatcagctccatgtggaaggtaatcgacaccgctgtgatgtgcacggcggactctactgctcagaggccaacgatggccacagttgtgatacagctgaaggagagcctggcgttggaggaaactcgtgaaaagggaagtagcaacagggtgagccgagggagtgatgtagaagctatggcgtccacacttggtccattcgcaagatgaagctgtgcctgtacctggattcagttcatggttgacgctcgtgaactccttgtcatgtgaagacaactagtagcgtataattgtgggctgttttgaaccagcaattgcttgtgtgtgtatggactttgacaaaggtttggtgtgagcttgcagcttctccagaatccagatgtcatgctctgtatgtatctttgacaaagatttcccgtgtctatatataactgcatggtactaataacataaaggattgactttgtttgaagcgagggatcgagaaattgagcgtgagccgtcccattccaccg

SEQ ID NO: 68907 - DNA, 3609 bp, Zea Mays
atggcgctcgcattcctggttttgctgctgttatttgctcctgtcgccgtcagccagcaaggtttcctgagcatcgactgcggcctggacgccgactccagcgggtacacggacaaggtcaccggcatcgtgtacgtctccgacggctcctacgtcgacgccggcgagaaccacaggatagcgcccgacctggagggcacgttcgaggggagctctcagacgctgaggagcttcccgtccgggcagcggaactgctacgcgctgcccaccgtggctgggaccaggtacctggcgcgggccaccttcgcgtacggcaactacgacggcaagaacagctcggcgctggagttcgacctgcacctgggcgccaactactggcagacggtctacccgaacgcgcggagcagcaacgcgcacgaggcggtcttcgtcgcgtgggccgggtggacgccgtggtgcctcgtcaacaccggccgcggcacgccgttcgtgtccgtcttggagctcaggccgctcggagccgcgctctacccgctggtcacacccggcctggtcgtatccacgtttacacgcataaacatggggggcagcgtttcgactacgcggtatcctgacgatccatacgaccgtttctggtgggcgatggacgaagctagcccacggtgggtgaacctgtcgaccacgcggcccattcagccggacaccagctcctacgccgtgccctctcgtgttctgcagacagccgtcgccgcggcatcgaacaatggcacggcggcggcgctcaccgccatgaactggcagtacgacaccaagtactcgttcatgatattcctgcacttcaccgacttcgtgcacagtcagattcgacagtttgatatcctcatcaacgagaacgaatccggaccgaagttcacggcgtacaacgacacatgctacctgattccaacccatgtgcacactgaatcctacagggctgccggcggcaagtacaatgtcactcttgcagcaaccaaagcctccgtgctgcctccgatgctcaatgcgctggagatctacgttcgcgtcccttatgagagtccgacgactctccctcaagaccttgacgccatcatggctatcaaaaccgagtatggagtcaggaaaaactggatgggcgatccatgttttccaatcaaatatgcttgggatggtgtgaaatgcagcaatgcaagtggtaacacatcgaggataacatcactagacctctccaacagctctttgcatggcacaatatctaatgattttacactgctcacagcactcgagaatttggatttatcttacaacaagttgagcggatcaatacctgattccctgccaactttgccttccctacgagttctctgagtgacgaatccctatgtaaaaattatactggaccacttattttcagacgtgattttgatggctcagtatgcaacaaaccttcacccagcccgtcaagaaataaagtagctatcatagctatttcagtagtggttcctgtgttagtactaattgtactacttcttacatatttcatctggtggcagaaaagaaagcctattgtgcaaccagtacccacacatggctcaacaagagatccagaacctgataatgcttcaggaatcaaaaaaagttatggctacaacctgaatataactgagaatcgtcagttcacatacaaagagctggagaagttcactaataatttcaagaagttcataggacaaggaggttttgggcccgtctactatggccgtttggaagatgacactgaggttgctgtcaagatgcgttctgaatcatcgtcacatgggcttgatgaatttttagctgaggttcagagcttgacaaaggtgcatcacaggaatctagtgtctttgattggttactgctgggaggaagatcatttggcgctggtttatgagtacatgcctcagggcagtctttttgatcatctgagaggtttgtctatggaaagtctattgagtattgatttaggcataaccagttacgttgcctttttcaaattgcttttgaaatgtccatgcatggtttggatctgagaaactatcttgactgactgatatataaattctggcatcttgaaaaaaaggccttttgggggtatctacacatcttcctacttaagtgcctaatccttagtgacagaatggttgagcctaatccttagtgacagaatgattgcgaaatatttgctagcgtcctgattgtatcgtcaatccatcttaacatttgggatggggtgacttgatgctgtgagctacaagtctacaaccctaaaatcccaccacttgcctgcgctttattttcttttacttaatgacttcagctaatgtgtatgttaaaggatctgttttactttggctattaactatatatattgcaattccattatacaagatcataacagaactaggaaaaggaaattttccataaaatttactgaaactgagacgtcaagctgttaaactgttctgttatgctaaaacattgaaggtaaaaatggtgtttctgaagccttgaattggaggaaacgtgtacaggtagtgcttgaagctgcacaaggtatgccgcaataaaaaaatccatgaagaaaactggagctaagtaaatcctccatatgatcatttactgttattctcatgttttggcatttcctgtgatacataaaggtctggattatctgcacaagggttgcagtttgccaatagtccaccgtgatgtgaagaccaacaacattctcttgggtcaaaatctgcaagctaaaatagcagattttggactttccaagacatatctgagcgacacacaaactcacatatcagtcactccagctggcacagctggttacatggaccctgagtactaccagaccggaaggctcagtgagagcagcgacgtgttcagcttcggagttgttctgcttgaggtagccacaggcgagtccccgacattgccaggccaaggtcacatcaatcagcgcgttaaacagaagattgccactggcaacgttggctcgatcgctgattcgcgacttggaagcgcctacgacatcagctccatgtggaaggtaatcgacaccgctgtgatgtgcacggcggactctactgctcagaggccaacgatggccacagttgtgatacagctgaaggagagcctggcgttggaggaaactcgtgaaaagggaagtagcaacagggtgagccgagggagtgatgtagaagctatggcgtccacacttggtccattcgcaagatgaagctgtgcctgtacctggattcagttcatggttgacgctcgtgaactccttgtcatgtgaagacaactagtagcgtataattgtgggctgttttgaaccagcaattgcttgtgtgtgtatggactttgacaaaggtttggtgtgagcttgcagcttctccagaatccagatgtcatgctctgtatgtatctttgacaaagatttcccgtgtctatatataactgcatggtactaataacataaaggattgactttgtttgaagcgagggatcgagaaattgagcgtgagccgtcccattccaccg

SEQ ID NO: 68908 - DNA, 2098 bp, Zea Mays
aggttgtgagcctgtgactgttgtgagctgctgaatccaggatgggcagatatttgcgccaccgtggctataaagcctcttttgaccaaacccttctccctctcacaaaaccctagctttccctcctcccctgttttgcggcgcgccacgaactcgcgacgctctcgagagatccatggatcggcgcaagggcggcaaccgcgacgccaacggcagcctggtcgaggccacggcgtcgcggctgagggtcgaatccgacgaggaggcggaagaggtggggatggaggtggaagagagcttcgacgcgggggtggaagacgagcaggcggcggcggaggtgattggaagcgaaaagaccagcgccgactactacttcgactcctactcccacttcggtattcatgaagaaatgctaaaagatgtcgttcggacaaaaacatatcaaaatgttatcacccagagtagctttcttatcaagaacaaagtagtccttgatgttggtgctggaactggaattctttctcttttctgtgcaaaagcaggagctaaacatgtctatgcgattgaatgttcccagatggcagacatggcacaggaaattgtaaaatcaaatggatattcagatgtcataactgtaataaaagggaaagtggaagaaatagaacttccagtcccaaaagtagatgtcatcatctcagagtggatgggctatttcctcctgttcgagaatatgttgaacactgtcctatatgcacgtgataaatggcttgtaagcgatcctttataaaatcatcagtacaattttcagattctgttcttcactattgatgttacctgtttgattcattgtgtttattctctttttagcatttttttacaaaatacaatttgattgtctatgaatatccttatctgtcgttctgtaaaatatttgaactttctgagggcagcttaggttgtgctacttttctgtaggctgatggtggtgtggtcctgccagacaggacttctttgcgtcttactgcgattgaagacgcagaatataaggaagacaaaattgaattttggaataatgtatatggatttgatatgagctgcataaagaaacaggcgatgatggagccactggtagatacagtggatgcaaatcagattgtcactaactgccagttactgaagacaatggatatctccaaaatgaccccaggtgacgcgtcctttactgtaccattcaagctggtagcagagcggaatgattacattcatgctcttgtcgcatactttgacgtgtcgttcaccaaatgccataagctgatgggcttctcaacaggcccgagatcgaaagccactcactggaagcaaactgttctctacctggaggatgttataactatctgtcagggggaaagcctgagtggttccatgacagtcacacccaataagagtaaccctcgagatatcgacattaagctcaagtactccataaatgggcataggtgtcaggtatcaagaacacagttctacaagatgcggtgacaatggaacaaacaagagttgcttcaaagctcattaaattttgtttaacgagtatcttgtttgacagaaattgtgctatttttattgttcatgtactatgcatcaaatattagattctttggaatctagcaaaagtagggagtagattaaactggtctgctgatatgagattgatgtagtgcaaaactgtcatattgccacaaggccgttggtggttgtatgcatttgaagtcggttgcaaattattgctttacgcattccaccattaatccttgccttaggtttttgtgtgtatgtgctcattgtttcaattgcttggacagtcaaaactttcctttgcgtatggttcttgtgacagcaatacaagttacggacagccttttggacaaaaagactgttgtctgtcctttgtttttgtgaggttccttttctttacagcaaatgctgacataggttatcctggagacatgctaagggctctgcaaaaatgcagctgcctaaaatcatttctgcgccggcgacgctgatgttgccatagctatacagttgtttgaaaatgcat

SEQ ID NO: 68909 - DNA, 558 bp, Zea Mays
cttaaaccctagcattttcgagacagcccttcggaacatcgtgaccgttcgttggaatctgcgagtcaatcgagatcgctcttctctccgtcccctgctacatataaggtacctccggccccaaactgcacgagctctctctagcattacccggcggcggaagcgtaagcgcaaaacgaagcaagcggccgccatggtgaagggacgcacgggacagcgcgtcaggctctacgtccggggcaccatccttggatacaagaggtccaagtcgaaccagtacgagaccacgtctctcgtgcagatcgagggggtgaacaccaaggaggatgtcgcgtggtacgctggcaagcgcatggcgtacatctacaaggccaagaccaagagcaatgagacccgctacaggtgcatctggggcaaggtcacccgtccgcacggaaactcgggcgtcgtccgtgccaagttcatgtccaacctcccgcctgagtccatggggcgcaaggtcagagtgttcatgtacccgagcagcatctaaggggaagtcttgcctctttataattt

SEQ ID NO: 68910 - DNA, 1946 bp, Zea Mays
  misc_feature (1)..(2): n is a, c, g, or t
nntgaacatgatgccttgtcagctgtccttatcaaaaaatgctggaaaaggcatgatgatgcagtcaggcacaggcatcgatgaagaatgtggttacatcgaaccgcagaaaggaactggtgcgaaacttgatgtaactacctcatatataccttttatgtactgcccctctgatggctcatcatatgtgagaacaccttcaactgcagctccagtggcatcatgtggatctctggaccaactatcagcttccaaattgagtaaagagaaaggtggttgtgtagtcaagttggctccagatttacctcctgtgaaccttcccccttctgtccgtgtcttatctcaggtggcatttcatccgaacgcaacacactttcatggcacctcggacaatgcagcaaagaatatgtatcctgtgccaccactggcctttacagagaatgcttatagacagctaaatctgttccccgaagctaattctaggttgcagcagaatgggatcaccaatgataatgctacagaagatggttctgagcaagatttgcagatgcatcctttactgtttcattatcctcgagatgtggtttcgtcatatagtcatccggttcaaaatcttattaatcagtcaagaaaatatgatcttttcccctttgagaaagttcaagttgagagaagtaacaaccagactacaggttccaccaaaaatggtactgtaaatgctaacactatcgacttccatcctctcttgcaaagaacagaagttgatgtgcataatgatgtaccagaatatgatagtaaccttgattaccatcagtctgataataacatgagcaaagttccagtagatgaccagtcaacggctgggcaagcatccacaggcccttctgagagggagacaagtattgacttgaacattcatttatgttctccaacggtcataaaagattcaaatgacttcagaagtagttttagcagatcaaatgttcaagatgaagtttctaggaaggacaaatctagtgttccagggctcgagattgtaaattcctattttcatcattgcattcaagaacctaatgaagaatcaatgcaaggaattgtaatggagcaagaagaattaagtgattctgaggaagatagccagcatgttgagtttgaatgtgaggaaatggatgattctgaagaggagcaagttcagggtccagaagcctctccaattcaaaataagggtatctcagcatcagttgtttgtggggaatttcatgttagcaatgaccagagtcaaatccagcaaggatctgttcaaaaggataaacagggtgcaagctcgatgcagaaaacgcaagttccttctcggtcagtgagggctaagctgaagccagaaactgcaaagcgcacaggatctaggacgtccacttctcgcacagttgaaactagccggagcaaaaccagaagttctaaagtgccacagggacagtcgagtgctgaatggaagtccaatgattcgagaagaactagaaaaattccggccccaagatgaaggccaatttagcattttattcctgtgctgcatgtgccataggcagagtggctaagttcagtctgttgtcactgcgttgttgggttgattatcatcaacgtctattcagcgcatgctggagaaagcaaccaagcgaacgtctgtggtcatttagctcgaattgtcatgtgaaaatagcagtgggagcaatgtaccaaatatatgaatttctccagttagatagatgagacgaattcataatgttgttggtgactgagtaaagcattcccatgaatagatgagacgaattcctcgggagttttgtacgacgtcctcaaaggttatttgtaatgtgccttgtaatttcaaccaccaaccagtggcagtgactttgaatcgaggaaggtctctttcaaacatttgccgacga

SEQ ID NO: 68911 - DNA, 2017 bp, Zea Mays
atggaggatgctgacccttcgtcttccctcgctgggccttggaacgaccgcttaccaggaaaagaggactatacagatgagcctaagaagacaggggggagggaacccagtgtcgccatgggggagggaaggaggggtggttgccggcgtgggcttgtggtgggaagggtgcattggcaagttgatgatgacgtggaggaggatgacatagattttaaccctttccttagggaaggatctccgtctgagacctcatcaagccttacctcagaagcagaatgcgaggaacatagttctgaaaatcaaccaagtaaccatacatatcagcagaatactgtagttaatgaaaatacaagtgacagtgcacttcctcaaaatagattgtcgtctcaagatgctgttaacgaaatgtttccagaagaaacgtctacccaggttaatattgagaatgatggtcacttgaatggattggaaaaagacgttttagcaagcgaagctgcttgctctccaacagtgcaagaccctcatcatctatctctcgaaattagtgaggaagatgcaatttgcaaacggacaagggcaagatactcactagcaaactattcactcgaggaattggagacctttctccaggaatctgatgatgatagtggtctgcaaaatgttgatgaagaagaggaataccgcaagtttcttgctgctgtcctgtctggtgtaggcaatgacacacaaacattccagggggatgaaaatcaagatgaagatgataatgatgcagactttgagctcgagattgaggaggctctagaaagtgatggtgatgaaaatgttgagaactatcacaacacaaatcctagaaaagagaaagatgtccgtaggcctcagactaggcagaggcggccattaactgggatgtctggggctggtagtgatcaccaggaatccaataaaactcatttaagaccaattgtgccatatattccgtctgcattggtgactcctgcgcatgcttttggatggcaatatgctaaccagaatgcctttttcccttcatccttggtttcactaacacgtccacctttagcatgtggatttacttatcagcaactcgggcaattgcatgtgttgatatatgagcatgttcagctccttatccaaacattttccctatgtgttcttgattcatctaaacaagatgtggctaataatgtcaaaaagatgatagttgagttggttggtgctcgtgatcaagcattggccaggagctctcctcaacggcatatcttctttgaaacccaacatctctcatctagttttgtttcttctgataatttggaacgccaatggattccgttaatcaagagtcctattatatccgtccttgatgttgcaccgcttgagttggtcctcgactatttaagtgacgtctttacagctgtcgtgaagtatagaaaaagtcatgtggatggtactgctgacaaaacccgcaggaaagagcccctgtttccttcagcagcgattaacagttgcaaacaagtgaataatgtttctcaagatagatcaaatggtgtgcctacagcatcacctccatctgggcagttgcagcagaagaaatcgttggctgctaccctgcttgagaatattaaaaaggatacaattgctcttgttcctgctgacattgcaagattagcacagagattcttttcacttttcaattttgcactctttcctcataagtcacctccttcacctatggccaatagggttcttttcactgatgcagaggacagattattagctctaggaattctggaatataataatgactgggcagcaatacaaaagcgctttcttccttgtaaatcaaagcatcagatatttgtgagacaaaaaaatcgtagctcctccaaagctcctgataatccagttaagggttcaaaatttaatattatggtcaaggtgtccattgagttgcatagtactgtaacaggttagcagttcatagtaacaaattgta

SEQ ID NO: 68912 - DNA, 2072 bp, Zea Mays
ggcaatccgcacagtagccgccgcagcagattggcggacactgcaatcaccaacaatggaggatgctgacccttcgtcttccctcgctgggccttggaacgaccgcttaccaggaaaagaggactatacagatgagcctaagaagacaggggggagggaacccagtgtcgccatgggggagggaaggaggggtggttgccggcgtgggcttgtggtgggaagggtgcattggcaagttgatgatgacgtggaggaggatgacatagattttaaccctttccttagggaaggatctccgtctgagacctcatcaagccttacctcagaagcagaatgcgaggaacatagttctgaaaatcaaccaagtaaccatacatatcagcagaatactgtagttaatgaaaatacaagtgacagtgcacttcctcaaaatagattgtcgtctcaagatgctgttaacgaaatgtttccagaagaaacgtctacccaggttaatattgagaatgatggtcacttgaatggattggaaaaagacgttttagcaagcgaagctgcttgctctccaacagtgcaagaccctcatcatctatctctcgaaattagtgaggaagatgcaatttgcaaacggacaagggcaagatactcactagcaaactattcactcgaggaattggagacctttctccaggaatctgatgatgatagtggtctgcaaaatgttgatgaagaagaggaataccgcaagtttcttgctgctgtcctgtctggtgtaggcaatgacacacaaacattccagggggatgaaaatcaagatgaagatgataatgatgcagactttgagctcgagattgaggaggctctagaaagtgatggtgatgaaaatgttgagaactatcacaacacaaatcctagaaaagagaaagatgtccgtaggcctcagactaggcagaggcggccattaactgggatgtctggggctggtagtgatcaccaggaatccaataaaactcatttaagaccaattgtgccatatattccgtctgcattggtgactcctgcgcatgcttttggatggcaatatgctaaccagaatgcctttttcccttcatccttggtttcactaacacgtccacctttagcatgtggatttacttatcagcaactcgggcaattgcatgtgttgatatatgagcatgttcagctccttatccaaacattttccctatgtgttcttgattcatctaaacaagatgtggctaataatgtcaaaaagatgatagttgagttggttggtgctcgtgatcaagcattggccaggagctctcctcaacggcatatcttctttgaaacccaacatctctcatctagttttgtttcttctgataatttggaacgccaatggattccgttaatcaagagtcctattatatccgtccttgatgttgcaccgcttgagttggtcctcgactatttaagtgacgtcgcaactgctgtcgtgaagtatagaaaaagtcatgtggatggtactgctgacaaaacccgcaggaaagagcccctgtttccttcagcagcgattaacagttgcaaacaagtgaataatgtttctcaagatagatcaaatggtgtgcctacagcatcacctccatctgggcagttgcagcagaagaaatcgttggctgctaccctgcttgagaatattaaaaaggatacaattgctcttgttcctgctgacattgcaagattagcacagagattcttttcacttttcaattttgcactctttcctcataagtcacctccttcacctatggccaatagggttcttttcactgatgcagaggacagattattagctctaggaattctggaatataataatgactgggcagcaatacaaaagcgctttcttccttgtaaatcaaagcatcagatatttgtgagacaaaaaaatcgtagctcctccaaagctcctgataatccagttaagggttcaaaatttaatattatggtcaaggtgtccattgagttgcatagtactgtaacaggttagcagttcatagtaacaaattgta

SEQ ID NO: 68913 - DNA, 2522 bp, Zea Mays
atcccatcttcatcttcctcctagcgccgggccctctccatcttccgctcccccctactcgcgctcggcacgcaggcggcagcggcggcgctcaggttcggtctctcagcgacggcgtcagcggcttcccctcccgcccctcgatagttgcctcgcgccctcgactccggccctccgcacacctgccggtgaccctgcgtgcccccctctctctcctcccgcctccggtggatcgtcaacggcgcccgcccctgcggctgcgccgcgcctggcctgagggcagcgggagccagcagccgctgttccaccaaggcggtcgcgcctctttgggagcgcttatgccagccgtcctctcagcacttcagcgcgctgaagcgtgcgactgatttcaaccctggatctcgaggatgcgactctagtcactctacactgcaacaggtcacgggcggtgagagctttctcgctcagtcactaagtcttggttctaagccgcctctccgcatttgtgggaaggcttgcctcggtttatcccttcacgagaccccactcatgtggctggcagcctacctacggcagtgggtctgcctttttatgctttatgtcatcatctttgtcctgaacattgaaatggttgtaggaatcctactgttttgattaaatcactaccgcatcatcaaatatggaagttgatgatgacgtggaggaggatgacatagattttaaccctttccttagggaaggatctccgtctgagacctcatcaagccttacctcagaagcagaatgcgaggaacatagttctgaaaatcaaccaagtaaccatacatatcagcagaatactgtagttaatgaaaatacaagtgacagtgcacttcctcaaaatagattgtcgtctcaagatgctgttaacgaaatgtttccagaagaaacgtctacccaggttaatattgagaatgatggtcacttgaatggattggaaaaagacgttttagcaagcgaagctgcttgctctccaacagtgcaagaccctcatcatctatctctcgaaattagtgaggaagatgcaatttgcaaacggacaagggcaagatactcactagcaaactattcactcgaggaattggagacctttctccaggaatctgatgatgatagtggtctgcaaaatgttgatgaagaagaggaataccgcaagtttcttgctgctgtcctgtctggtgtaggcaatgacacacaaacattccagggggatgaaaatcaagatgaagatgataatgatgcagactttgagctcgagattgaggaggctctagaaagtgatggtgatgaaaatgttgagaactatcacaacacaaatcctagaaaagagaaagatgtccgtaggcctcagactaggcagaggcggccattaactgggatgtctggggctggtagtgatcaccaggaatccaataaaactcatttaagaccaattgtgccatatattccgtctgcattggtgactcctgcgcatgcttttggatggcaatatgctaaccagaatgcctttttcccttcatccttggtttcactaacacgtccacctttagcatgtggatttacttatcagcaactcgggcaattgcatgtgttgatatatgagcatgttcagctccttatccaaacattttccctatgtgttcttgattcatctaaacaagatgtggctaataatgtcaaaaagatgatagttgagttggttggtgctcgtgatcaagcattggccaggagctctcctcaacggcatatcttctttgaaacccaacatctctcatctagttttgtttcttctgataatttggaacgccaatggattccgttaatcaagagtcctattatatccgtccttgatgttgcaccgcttgagttggtcctcgactatttaagtgacgtctttacagctgtcgtgaagtatagaaaaagtcatgtggatggtactgctgacaaaacccgcaggaaagagcccctgtttccttcagcagcgattaacagttgcaaacaagtgaataatgtttctcaagatagatcaaatggtgtgcctacagcatcacctccatctgggcagttgcagcagaagaaatcgttggctgctaccctgcttgagaatattaaaaaggatacaattgctcttgttcctgctgacattgcaagattagcacagagattcttttcacttttcaattttgcactctttcctcataagtcacctccttcacctatggccaatagggttcttttcactgatgcagaggacagattattagctctaggaattctggaatataataatgactgggcagcaatacaaaagcgctttcttccttgtaaatcaaagcatcagatatttgtgagacaaaaaaatcgtagctcctccaaagctcctgataatccagttaagggttcaaaatttaatattatggtcaaggtgtccattgagttgcatagtactgtaacaggttagcagttcatagtaacaaattgta

SEQ ID NO: 68914 - DNA, 2330 bp, Zea Mays
atcccatcttcatcttcctcctagcgccgggccctctccatcttccgctcccccctactcgcgctcggcacgcaggcggcagcggcggcgctcaggttcggtctctcagcgacggcgtcagcggcttcccctcccgcccctcgatagttgcctcgcgccctcgactccggccctccgcacacctgccggtgaccctgcgtgcccccctctctctcctcccgcctccggtggatcgtcaacggcgcccgcccctgcggctgcgccgcgcctggcctgagggcagcgggagccagcagccgctgttccaccaaggcggtcgcgcctctttgggagcgcttatgccagccgtcctctcagcacttcagcgcgctgaagcgtgcgactgatttcaaccctggatctcgaggatgcgactctagtcactctacactgcaacaggttgtaggaatcctactgttttgattaaatcactaccgcatcatcaaatatggaagttgatgatgacgtggaggaggatgacatagattttaaccctttccttagggaaggatctccgtctgagacctcatcaagccttacctcagaagcagaatgcgaggaacatagttctgaaaatcaaccaagtaaccatacatatcagcagaatactgtagttaatgaaaatacaagtgacagtgcacttcctcaaaatagattgtcgtctcaagatgctgttaacgaaatgtttccagaagaaacgtctacccaggttaatattgagaatgatggtcacttgaatggattggaaaaagacgttttagcaagcgaagctgcttgctctccaacagtgcaagaccctcatcatctatctctcgaaattagtgaggaagatgcaatttgcaaacggacaagggcaagatactcactagcaaactattcactcgaggaattggagacctttctccaggaatctgatgatgatagtggtctgcaaaatgttgatgaagaagaggaataccgcaagtttcttgctgctgtcctgtctggtgtaggcaatgacacacaaacattccagggggatgaaaatcaagatgaagatgataatgatgcagactttgagctcgagattgaggaggctctagaaagtgatggtgatgaaaatgttgagaactatcacaacacaaatcctagaaaagagaaagatgtccgtaggcctcagactaggcagaggcggccattaactgggatgtctggggctggtagtgatcaccaggaatccaataaaactcatttaagaccaattgtgccatatattccgtctgcattggtgactcctgcgcatgcttttggatggcaatatgctaaccagaatgcctttttcccttcatccttggtttcactaacacgtccacctttagcatgtggatttacttatcagcaactcgggcaattgcatgtgttgatatatgagcatgttcagctccttatccaaacattttccctatgtgttcttgattcatctaaacaagatgtggctaataatgtcaaaaagatgatagttgagttggttggtgctcgtgatcaagcattggccaggagctctcctcaacggcatatcttctttgaaacccaacatctctcatctagttttgtttcttctgataatttggaacgccaatggattccgttaatcaagagtcctattatatccgtccttgatgttgcaccgcttgagttggtcctcgactatttaagtgacgtcgcaactgctgtcgtgaagtatagaaaaagtcatgtggatggtactgctgacaaaacccgcaggaaagagcccctgtttccttcagcagcgattaacagttgcaaacaagtgaataatgtttctcaagatagatcaaatggtgtgcctacagcatcacctccatctgggcagttgcagcagaagaaatcgttggctgctaccctgcttgagaatattaaaaaggatacaattgctcttgttcctgctgacattgcaagattagcacagagattcttttcacttttcaattttgcactctttcctcataagtcacctccttcacctatggccaatagggttcttttcactgatgcagaggacagattattagctctaggaattctggaatataataatgactgggcagcaatacaaaagcgctttcttccttgtaaatcaaagcatcagatatttgtgagacaaaaaaatcgtagctcctccaaagctcctgataatccagttaagggttcaaaatttaatattatggtcaaggtgtccattgagttgcatagtactgtaacaggttagcagttcatagtaacaaattgta

SEQ ID NO: 68915 - DNA, 2330 bp, Zea Mays
atcccatcttcatcttcctcctagcgccgggccctctccatcttccgctcccccctactcgcgctcggcacgcaggcggcagcggcggcgctcaggttcggtctctcagcgacggcgtcagcggcttcccctcccgcccctcgatagttgcctcgcgccctcgactccggccctccgcacacctgccggtgaccctgcgtgcccccctctctctcctcccgcctccggtggatcgtcaacggcgcccgcccctgcggctgcgccgcgcctggcctgagggcagcgggagccagcagccgctgttccaccaaggcggtcgcgcctctttgggagcgcttatgccagccgtcctctcagcacttcagcgcgctgaagcgtgcgactgatttcaaccctggatctcgaggatgcgactctagtcactctacactgcaacaggttgtaggaatcctactgttttgattaaatcactaccgcatcatcaaatatggaagttgatgatgacgtggaggaggatgacatagattttaaccctttccttagggaaggatctccgtctgagacctcatcaagccttacctcagaagcagaatgcgaggaacatagttctgaaaatcaaccaagtaaccatacatatcagcagaatactgtagttaatgaaaatacaagtgacagtgcacttcctcaaaatagattgtcgtctcaagatgctgttaacgaaatgtttccagaagaaacgtctacccaggttaatattgagaatgatggtcacttgaatggattggaaaaagacgttttagcaagcgaagctgcttgctctccaacagtgcaagaccctcatcatctatctctcgaaattagtgaggaagatgcaatttgcaaacggacaagggcaagatactcactagcaaactattcactcgaggaattggagacctttctccaggaatctgatgatgatagtggtctgcaaaatgttgatgaagaagaggaataccgcaagtttcttgctgctgtcctgtctggtgtaggcaatgacacacaaacattccagggggatgaaaatcaagatgaagatgataatgatgcagactttgagctcgagattgaggaggctctagaaagtgatggtgatgaaaatgttgagaactatcacaacacaaatcctagaaaagagaaagatgtccgtaggcctcagactaggcagaggcggccattaactgggatgtctggggctggtagtgatcaccaggaatccaataaaactcatttaagaccaattgtgccatatattccgtctgcattggtgactcctgcgcatgcttttggatggcaatatgctaaccagaatgcctttttcccttcatccttggtttcactaacacgtccacctttagcatgtggatttacttatcagcaactcgggcaattgcatgtgttgatatatgagcatgttcagctccttatccaaacattttccctatgtgttcttgattcatctaaacaagatgtggctaataatgtcaaaaagatgatagttgagttggttggtgctcgtgatcaagcattggccaggagctctcctcaacggcatatcttctttgaaacccaacatctctcatctagttttgtttcttctgataatttggaacgccaatggattccgttaatcaagagtcctattatatccgtccttgatgttgcaccgcttgagttggtcctcgactatttaagtgacgtctttacagctgtcgtgaagtatagaaaaagtcatgtggatggtactgctgacaaaacccgcaggaaagagcccctgtttccttcagcagcgattaacagttgcaaacaagtgaataatgtttctcaagatagatcaaatggtgtgcctacagcatcacctccatctgggcagttgcagcagaagaaatcgttggctgctaccctgcttgagaatattaaaaaggatacaattgctcttgttcctgctgacattgcaagattagcacagagattcttttcacttttcaattttgcactctttcctcataagtcacctccttcacctatggccaatagggttcttttcactgatgcagaggacagattattagctctaggaattctggaatataataatgactgggcagcaatacaaaagcgctttcttccttgtaaatcaaagcatcagatatttgtgagacaaaaaaatcgtagctcctccaaagctcctgataatccagttaagggttcaaaatttaatattatggtcaaggtgtccattgagttgcatagtactgtaacaggttagcagttcatagtaacaaattgta

SEQ ID NO: 68916 - DNA, 2522 bp, Zea Mays
atcccatcttcatcttcctcctagcgccgggccctctccatcttccgctcccccctactcgcgctcggcacgcaggcggcagcggcggcgctcaggttcggtctctcagcgacggcgtcagcggcttcccctcccgcccctcgatagttgcctcgcgccctcgactccggccctccgcacacctgccggtgaccctgcgtgcccccctctctctcctcccgcctccggtggatcgtcaacggcgcccgcccctgcggctgcgccgcgcctggcctgagggcagcgggagccagcagccgctgttccaccaaggcggtcgcgcctctttgggagcgcttatgccagccgtcctctcagcacttcagcgcgctgaagcgtgcgactgatttcaaccctggatctcgaggatgcgactctagtcactctacactgcaacaggtcacgggcggtgagagctttctcgctcagtcactaagtcttggttctaagccgcctctccgcatttgtgggaaggcttgcctcggtttatcccttcacgagaccccactcatgtggctggcagcctacctacggcagtgggtctgcctttttatgctttatgtcatcatctttgtcctgaacattgaaatggttgtaggaatcctactgttttgattaaatcactaccgcatcatcaaatatggaagttgatgatgacgtggaggaggatgacatagattttaaccctttccttagggaaggatctccgtctgagacctcatcaagccttacctcagaagcagaatgcgaggaacatagttctgaaaatcaaccaagtaaccatacatatcagcagaatactgtagttaatgaaaatacaagtgacagtgcacttcctcaaaatagattgtcgtctcaagatgctgttaacgaaatgtttccagaagaaacgtctacccaggttaatattgagaatgatggtcacttgaatggattggaaaaagacgttttagcaagcgaagctgcttgctctccaacagtgcaagaccctcatcatctatctctcgaaattagtgaggaagatgcaatttgcaaacggacaagggcaagatactcactagcaaactattcactcgaggaattggagacctttctccaggaatctgatgatgatagtggtctgcaaaatgttgatgaagaagaggaataccgcaagtttcttgctgctgtcctgtctggtgtaggcaatgacacacaaacattccagggggatgaaaatcaagatgaagatgataatgatgcagactttgagctcgagattgaggaggctctagaaagtgatggtgatgaaaatgttgagaactatcacaacacaaatcctagaaaagagaaagatgtccgtaggcctcagactaggcagaggcggccattaactgggatgtctggggctggtagtgatcaccaggaatccaataaaactcatttaagaccaattgtgccatatattccgtctgcattggtgactcctgcgcatgcttttggatggcaatatgctaaccagaatgcctttttcccttcatccttggtttcactaacacgtccacctttagcatgtggatttacttatcagcaactcgggcaattgcatgtgttgatatatgagcatgttcagctccttatccaaacattttccctatgtgttcttgattcatctaaacaagatgtggctaataatgtcaaaaagatgatagttgagttggttggtgctcgtgatcaagcattggccaggagctctcctcaacggcatatcttctttgaaacccaacatctctcatctagttttgtttcttctgataatttggaacgccaatggattccgttaatcaagagtcctattatatccgtccttgatgttgcaccgcttgagttggtcctcgactatttaagtgacgtcgcaactgctgtcgtgaagtatagaaaaagtcatgtggatggtactgctgacaaaacccgcaggaaagagcccctgtttccttcagcagcgattaacagttgcaaacaagtgaataatgtttctcaagatagatcaaatggtgtgcctacagcatcacctccatctgggcagttgcagcagaagaaatcgttggctgctaccctgcttgagaatattaaaaaggatacaattgctcttgttcctgctgacattgcaagattagcacagagattcttttcacttttcaattttgcactctttcctcataagtcacctccttcacctatggccaatagggttcttttcactgatgcagaggacagattattagctctaggaattctggaatataataatgactgggcagcaatacaaaagcgctttcttccttgtaaatcaaagcatcagatatttgtgagacaaaaaaatcgtagctcctccaaagctcctgataatccagttaagggttcaaaatttaatattatggtcaaggtgtccattgagttgcatagtactgtaacaggttagcagttcatagtaacaaattgta

SEQ ID NO: 68917 - DNA, 2005 bp, Zea Mays
gtcgtttcttcatctccaatcccatcttcatcttcctcctagcgccgggccctctccatcttccgctcccccctactcgcgctcggcacgcaggcggcagcggcggcgctcaggttgtaggaatcctactgttttgattaaatcactaccgcatcatcaaatatggaagttgatgatgacgtggaggaggatgacatagattttaaccctttccttagggaaggatctccgtctgagacctcatcaagccttacctcagaagcagaatgcgaggaacatagttctgaaaatcaaccaagtaaccatacatatcagcagaatactgtagttaatgaaaatacaagtgacagtgcacttcctcaaaatagattgtcgtctcaagatgctgttaacgaaatgtttccagaagaaacgtctacccaggttaatattgagaatgatggtcacttgaatggattggaaaaagacgttttagcaagcgaagctgcttgctctccaacagtgcaagaccctcatcatctatctctcgaaattagtgaggaagatgcaatttgcaaacggacaagggcaagatactcactagcaaactattcactcgaggaattggagacctttctccaggaatctgatgatgatagtggtctgcaaaatgttgatgaagaagaggaataccgcaagtttcttgctgctgtcctgtctggtgtaggcaatgacacacaaacattccagggggatgaaaatcaagatgaagatgataatgatgcagactttgagctcgagattgaggaggctctagaaagtgatggtgatgaaaatgttgagaactatcacaacacaaatcctagaaaagagaaagatgtccgtaggcctcagactaggcagaggcggccattaactgggatgtctggggctggtagtgatcaccaggaatccaataaaactcatttaagaccaattgtgccatatattccgtctgcattggtgactcctgcgcatgcttttggatggcaatatgctaaccagaatgcctttttcccttcatccttggtttcactaacacgtccacctttagcatgtggatttacttatcagcaactcgggcaattgcatgtgttgatatatgagcatgttcagctccttatccaaacattttccctatgtgttcttgattcatctaaacaagatgtggctaataatgtcaaaaagatgatagttgagttggttggtgctcgtgatcaagcattggccaggagctctcctcaacggcatatcttctttgaaacccaacatctctcatctagttttgtttcttctgataatttggaacgccaatggattccgttaatcaagagtcctattatatccgtccttgatgttgcaccgcttgagttggtcctcgactatttaagtgacgtcgcaactgctgtcgtgaagtatagaaaaagtcatgtggatggtactgctgacaaaacccgcaggaaagagcccctgtttccttcagcagcgattaacagttgcaaacaagtgaataatgtttctcaagatagatcaaatggtgtgcctacagcatcacctccatctgggcagttgcagcagaagaaatcgttggctgctaccctgcttgagaatattaaaaaggatacaattgctcttgttcctgctgacattgcaagattagcacagagattcttttcacttttcaattttgcactctttcctcataagtcacctccttcacctatggccaatagggttcttttcactgatgcagaggacagattattagctctaggaattctggaatataataatgactgggcagcaatacaaaagcgctttcttccttgtaaatcaaagcatcagatatttgtgagacaaaaaaatcgtagctcctccaaagctcctgataatccagttaagggttcaaaatttaatattatggtcaaggtgtccattgagttgcatagtactgtaacaggttagcagttcatagtaacaaattgta

SEQ ID NO: 68918 - DNA, 2550 bp, Zea Mays
gaacaaaaagcgccggcatctcaaacccgacggcgctctcttctctatcctctgtcccctccaccaaaaccgacggcgacgtcgctctcctccaccggtgcttggcgctctccctccaccggggcggtccaccgacgctcggcgagctccaccggtgggcgctggtcagatccgcttggcagtcatccacctggcacatcgggtagctcacgcctccgttggcagtcccaccgccgcccggccctcccccagcgcccccggtgatccggaccgcacccgcttgctcggcctaacgaccggctcctgccccgccgcagccgaagctcccagcgtcctcctgcaggccgagctgaaggttcagcgcgccggtggagttcgacgacgaaactccgtcacgtcatacctctccgcctcccgtcttccagacgtctccaatcggggctcccagcgtctcggagaagaggagcagcacgacacggcggctgtggcgaggaatgctcctgtcccatcccaacccagttagcagccgcccaaggaggaggagatccaatcggcgtgcgggcgtccacggtccatccatcgatccaattccaatctgcagactgatttcaaccctggatctcgaggatgcgactctagtcactctacactgcaacaggttgtaggaatcctactgttttgattaaatcactaccgcatcatcaaatatggaagttgatgatgacgtggaggaggatgacatagattttaaccctttccttagggaaggatctccgtctgagacctcatcaagccttacctcagaagcagaatgcgaggaacatagttctgaaaatcaaccaagtaaccatacatatcagcagaatactgtagttaatgaaaatacaagtgacagtgcacttcctcaaaatagattgtcgtctcaagatgctgttaacgaaatgtttccagaagaaacgtctacccaggttaatattgagaatgatggtcacttgaatggattggaaaaagacgttttagcaagcgaagctgcttgctctccaacagtgcaagaccctcatcatctatctctcgaaattagtgaggaagatgcaatttgcaaacggacaagggcaagatactcactagcaaactattcactcgaggaattggagacctttctccaggaatctgatgatgatagtggtctgcaaaatgttgatgaagaagaggaataccgcaagtttcttgctgctgtcctgtctggtgtaggcaatgacacacaaacattccagggggatgaaaatcaagatgaagatgataatgatgcagactttgagctcgagattgaggaggctctagaaagtgatggtgatgaaaatgttgagaactatcacaacacaaatcctagaaaagagaaagatgtccgtaggcctcagactaggcagaggcggccattaactgggatgtctggggctggtagtgatcaccaggaatccaataaaactcatttaagaccaattgtgccatatattccgtctgcattggtgactcctgcgcatgcttttggatggcaatatgctaaccagaatgcctttttcccttcatccttggtttcactaacacgtccacctttagcatgtggatttacttatcagcaactcgggcaattgcatgtgttgatatatgagcatgttcagctccttatccaaacattttccctatgtgttcttgattcatctaaacaagatgtggctaataatgtcaaaaagatgatagttgagttggttggtgctcgtgatcaagcattggccaggagctctcctcaacggcatatcttctttgaaacccaacatctctcatctagttttgtttcttctgataatttggaacgccaatggattccgttaatcaagagtcctattatatccgtccttgatgttgcaccgcttgagttggtcctcgactatttaagtgacgtctttacagctgtcgtgaagtatagaaaaagtcatgtggatggtactgctgacaaaacccgcaggaaagagcccctgtttccttcagcagcgattaacagttgcaaacaagtgaataatgtttctcaagatagatcaaatggtgtgcctacagcatcacctccatctgggcagttgcagcagaagaaatcgttggctgctaccctgcttgagaatattaaaaaggatacaattgctcttgttcctgctgacattgcaagattagcacagagattcttttcacttttcaattttgcactctttcctcataagtcacctccttcacctatggccaatagggttcttttcactgatgcagaggacagattattagctctaggaattctggaatataataatgactgggcagcaatacaaaagcgctttcttccttgtaaatcaaagcatcagatatttgtgagacaaaaaaatcgtagctcctccaaagctcctgataatccagttaagggttcaaaatttaatattatggtcaaggtgtccattgagttgcatagtactgtaacaggttagcagttcatagtaacaaattgta

SEQ ID NO: 68919 - DNA, 2956 bp, Zea Mays
atccttttcaagacaattttataaatataacaacttaatttcaaacgttgaaacacgataatttacctaactctatttagatgagtatatgtatattttgctcaaaatgttatcacttatattacaattttttgcacgcgcgcaatgcgcgcaccagctaccagtagcaaatcgttgatcgtgtttctggaagacgaagtccctgacatgaataactatatgaaaaaatatattagaaaaaaagatagcatgacccatctaaatcaaaagtccattaattcgcgagaaaattggatttataccattatgaaacttagaattcgcttaaatgttattacgagaacacacttcactaagaaatcattatcaaacgttgtcttagagacaaaatgtcatttatagagttatttgaaacttaaccttatttgattatattggcagtgactggacacttttgcccctcgaacaaaaagcgccggcatctcaaacccgacggcgctctcttctctatcctctgtcccctccaccaaaaccgacggcgacgtcgctctcctccaccggtgcttggcgctctccctccaccggggcggtccaccgacgctcggcgagctccaccggtgggcgctggtcagatccgcttggcagtcatccacctggcacatcgggtagctcacgcctccgttggcagtcccaccgccgcccggccctcccccagcgcccccggtgatccggaccgcacccgcttgctcggcctaacgaccggctcctgccccgccgcagccgaagctcccagcgtcctcctgcaggccgagctgaaggttcagcgcgccggtggagttcgacgacgaaactccgtcacgtcatacctctccgcctcccgtcttccagacgtctccaatcggggctcccagcgtctcggagaagaggagcagcacgacacggcggctgtggcgaggaatgctcctgtcccatcccaacccagttagcagccgcccaaggaggaggagatccaatcggcgtgcgggcgtccacggtccatccatcgatccaattccaatctgcaggttgtaggaatcctactgttttgattaaatcactaccgcatcatcaaatatggaagttgatgatgacgtggaggaggatgacatagattttaaccctttccttagggaaggatctccgtctgagacctcatcaagccttacctcagaagcagaatgcgaggaacatagttctgaaaatcaaccaagtaaccatacatatcagcagaatactgtagttaatgaaaatacaagtgacagtgcacttcctcaaaatagattgtcgtctcaagatgctgttaacgaaatgtttccagaagaaacgtctacccaggttaatattgagaatgatggtcacttgaatggattggaaaaagacgttttagcaagcgaagctgcttgctctccaacagtgcaagaccctcatcatctatctctcgaaattagtgaggaagatgcaatttgcaaacggacaagggcaagatactcactagcaaactattcactcgaggaattggagacctttctccaggaatctgatgatgatagtggtctgcaaaatgttgatgaagaagaggaataccgcaagtttcttgctgctgtcctgtctggtgtaggcaatgacacacaaacattccagggggatgaaaatcaagatgaagatgataatgatgcagactttgagctcgagattgaggaggctctagaaagtgatggtgatgaaaatgttgagaactatcacaacacaaatcctagaaaagagaaagatgtccgtaggcctcagactaggcagaggcggccattaactgggatgtctggggctggtagtgatcaccaggaatccaataaaactcatttaagaccaattgtgccatatattccgtctgcattggtgactcctgcgcatgcttttggatggcaatatgctaaccagaatgcctttttcccttcatccttggtttcactaacacgtccacctttagcatgtggatttacttatcagcaactcgggcaattgcatgtgttgatatatgagcatgttcagctccttatccaaacattttccctatgtgttcttgattcatctaaacaagatgtggctaataatgtcaaaaagatgatagttgagttggttggtgctcgtgatcaagcattggccaggagctctcctcaacggcatatcttctttgaaacccaacatctctcatctagttttgtttcttctgataatttggaacgccaatggattccgttaatcaagagtcctattatatccgtccttgatgttgcaccgcttgagttggtcctcgactatttaagtgacgtcgcaactgctgtcgtgaagtatagaaaaagtcatgtggatggtactgctgacaaaacccgcaggaaagagcccctgtttccttcagcagcgattaacagttgcaaacaagtgaataatgtttctcaagatagatcaaatggtgtgcctacagcatcacctccatctgggcagttgcagcagaagaaatcgttggctgctaccctgcttgagaatattaaaaaggatacaattgctcttgttcctgctgacattgcaagattagcacagagattcttttcacttttcaattttgcactctttcctcataagtcacctccttcacctatggccaatagggttcttttcactgatgcagaggacagattattagctctaggaattctggaatataataatgactgggcagcaatacaaaagcgctttcttccttgtaaatcaaagcatcagatatttgtgagacaaaaaaatcgtagctcctccaaagctcctgataatccagttaagggttcaaaatttaatattatggtcaaggtgtccattgagttgcatagtactgtaacaggttagcagttcatagtaacaaattgta

SEQ ID NO: 68920 - DNA, 2142 bp, Zea Mays
ctcccccctactcgcgctcggcacgcaggcggcagcggcggcgctcaggttcggtctctcagcgacggcgtcagcggcttcccctcccgcccctcgatagttgcctcgcgccctcgactccggccctccgcacacctgccggtgaccctgcgtgcccccctctctctcctcccgcctccggtggatcgtcaacggcgcccgcccctgcggctgcgccgcgcctggcctgagggcagcgggagccagcagccgctgttccaccaaggcggtcgcgcctctttgggagcgcttatgccagccgtcctctcagcacttcagcgcgctgaagcgtgcggttgtaggaatcctactgttttgattaaatcactaccgcatcatcaaatatggaagttgatgatgacgtggaggaggatgacatagattttaaccctttccttagggaaggatctccgtctgagacctcatcaagccttacctcagaagcagaatgcgaggaacatagttctgaaaatcaaccaagtaaccatacatatcagcagaatactgtagttaatgaaaatacaagtgacagtgcacttcctcaaaatagattgtcgtctcaagatgctgttaacgaaatgtttccagaagaaacgtctacccaggttaatattgagaatgatggtcacttgaatggattggaaaaagacgttttagcaagcgaagctgcttgctctccaacagtgcaagaccctcatcatctatctctcgaaattagtgaggaagatgcaatttgcaaacggacaagggcaagatactcactagcaaactattcactcgaggaattggagacctttctccaggaatctgatgatgatagtggtctgcaaaatgttgatgaagaagaggaataccgcaagtttcttgctgctgtcctgtctggtgtaggcaatgacacacaaacattccagggggatgaaaatcaagatgaagatgataatgatgcagactttgagctcgagattgaggaggctctagaaagtgatggtgatgaaaatgttgagaactatcacaacacaaatcctagaaaagagaaagatgtccgtaggcctcagactaggcagaggcggccattaactgggatgtctggggctggtagtgatcaccaggaatccaataaaactcatttaagaccaattgtgccatatattccgtctgcattggtgactcctgcgcatgcttttggatggcaatatgctaaccagaatgcctttttcccttcatccttggtttcactaacacgtccacctttagcatgtggatttacttatcagcaactcgggcaattgcatgtgttgatatatgagcatgttcagctccttatccaaacattttccctatgtgttcttgattcatctaaacaagatgtggctaataatgtcaaaaagatgatagttgagttggttggtgctcgtgatcaagcattggccaggagctctcctcaacggcatatcttctttgaaacccaacatctctcatctagttttgtttcttctgataatttggaacgccaatggattccgttaatcaagagtcctattatatccgtccttgatgttgcaccgcttgagttggtcctcgactatttaagtgacgtcgcaactgctgtcgtgaagtatagaaaaagtcatgtggatggtactgctgacaaaacccgcaggaaagagcccctgtttccttcagcagcgattaacagttgcaaacaagtgaataatgtttctcaagatagatcaaatggtgtgcctacagcatcacctccatctgggcagttgcagcagaagaaatcgttggctgctaccctgcttgagaatattaaaaaggatacaattgctcttgttcctgctgacattgcaagattagcacagagattcttttcacttttcaattttgcactctttcctcataagtcacctccttcacctatggccaatagggttcttttcactgatgcagaggacagattattagctctaggaattctggaatataataatgactgggcagcaatacaaaagcgctttcttccttgtaaatcaaagcatcagatatttgtgagacaaaaaaatcgtagctcctccaaagctcctgataatccagttaagg

SEQ ID NO: 68921 - DNA, 2529 bp, Zea Mays
cacacttcactaagaaatcattatcaaacgttgtcttagagacaaaatgtcatttatagagttatttgaaacttaaccttatttgattatattggcagtgactggacacttttgcccctcgaacaaaaagcgccggcatctcaaacccgacggcgctctcttctctatcctctgtcccctccaccaaaaccgacggcgacgtcgctctcctccaccggtgcttggcgctctccctccaccggggcggtccaccgacgctcggcgagctccaccggtgggcgctggtcagatccgcttggcagtcatccacctggcacatcgggtagctcacgcctccgttggcagtcccaccgccgcccggccctcccccagcgcccccggtgatccggaccgcacccgcttgctcggcctaacgaccggctcctgccccgccgcagccgaagctcccagcgtcctcctgcaggccgagctgaaggttcagcgcgccggtggagttcgacgacgaaactccgtcacgtcatacctctccgcctcccgtcttccagacgtctccaatcggggctcccagcgtctcggagaagaggagcagcacgacacggcggctgtggcgaggaatgctcctgtcccatcccaacccagttagcagccgcccaaggaggaggagatccaatcggcgtgcgggcgtccacggtccatccatcgatccaattccaatctgcaggttgtaggaatcctactgttttgattaaatcactaccgcatcatcaaatatggaagttgatgatgacgtggaggaggatgacatagattttaaccctttccttagggaaggatctccgtctgagacctcatcaagccttacctcagaagcagaatgcgaggaacatagttctgaaaatcaaccaagtaaccatacatatcagcagaatactgtagttaatgaaaatacaagtgacagtgcacttcctcaaaatagattgtcgtctcaagatgctgttaacgaaatgtttccagaagaaacgtctacccaggttaatattgagaatgatggtcacttgaatggattggaaaaagacgttttagcaagcgaagctgcttgctctccaacagtgcaagaccctcatcatctatctctcgaaattagtgaggaagatgcaatttgcaaacggacaagggcaagatactcactagcaaactattcactcgaggaattggagacctttctccaggaatctgatgatgatagtggtctgcaaaatgttgatgaagaagaggaataccgcaagtttcttgctgctgtcctgtctggtgtaggcaatgacacacaaacattccagggggatgaaaatcaagatgaagatgataatgatgcagactttgagctcgagattgaggaggctctagaaagtgatggtgatgaaaatgttgagaactatcacaacacaaatcctagaaaagagaaagatgtccgtaggcctcagactaggcagaggcggccattaactgggatgtctggggctggtagtgatcaccaggaatccaataaaactcatttaagaccaattgtgccatatattccgtctgcattggtgactcctgcgcatgcttttggatggcaatatgctaaccagaatgcctttttcccttcatccttggtttcactaacacgtccacctttagcatgtggatttacttatcagcaactcgggcaattgcatgtgttgatatatgagcatgttcagctccttatccaaacattttccctatgtgttcttgattcatctaaacaagatgtggctaataatgtcaaaaagatgatagttgagttggttggtgctcgtgatcaagcattggccaggagctctcctcaacggcatatcttctttgaaacccaacatctctcatctagttttgtttcttctgataatttggaacgccaatggattccgttaatcaagagtcctattatatccgtccttgatgttgcaccgcttgagttggtcctcgactatttaagtgacgtctttacagctgtcgtgaagtatagaaaaagtcatgtggatggtactgctgacaaaacccgcaggaaagagcccctgtttccttcagcagcgattaacagttgcaaacaagtgaataatgtttctcaagatagatcaaatggtgtgcctacagcatcacctccatctgggcagttgcagcagaagaaatcgttggctgctaccctgcttgagaatattaaaaaggatacaattgctcttgttcctgctgacattgcaagattagcacagagattcttttcacttttcaattttgcactctttcctcataagtcacctccttcacctatggccaatagggttcttttcactgatgcagaggacagattattagctctaggaattctggaatataataatgactgggcagcaatacaaaagcgctttcttccttgtaaatcaaagcatcagatatttgtgagacaaaaaaatcgtagctcctccaaagctcctgataatccagttaagg

SEQ ID NO: 68922 - DNA, 2496 bp, Zea Mays
cacacttcactaagaaatcattatcaaacgttgtcttagagacaaaatgtcatttatagagttatttgaaacttaaccttatttgattatattggcagtgactggacacttttgcccctcgaacaaaaagcgccggcatctcaaacccgacggcgctctcttctctatcctctgtcccctccaccaaaaccgacggcgacgtcgctctcctccaccggtgcttggcgctctccctccaccggggcggtccaccgacgctcggcgagctccaccggtgggcgctggtcagatccgcttggcagtcatccacctggcacatcgggtagctcacgcctccgttggcagtcccaccgccgcccggccctcccccagcgcccccggtgatccggaccgcacccgcttgctcggcctaacgaccggctcctgccccgccgcagccgaagctcccagcgtcctcctgcaggccgagctgaaggttcagcgcgccggtggagttcgacgacgaaactccgtcacgtcatacctctccgcctcccgtcttccagacgtctccaatcggggctcccagcgtctcggagaagaggagcagcacgacacggcggctgtggcgaggaatgctcctgtcccatcccaacccagttagcagccgcccaaggaggaggagatccaatcggcgtgcgggcgtccacggtccatccatcgatccaattccaatctgcaggttgtaggaatcctactgttttgattaaatcactaccgcatcatcaaatatggaagttgatgatgacgtggaggaggatgacatagattttaaccctttccttagggaaggatctccgtctgagacctcatcaagccttacctcagaagcagaatgcgaggaacatagttctgaaaatcaaccaagtaaccatacatatcagcagaatactgtagttaatgaaaatacaagtgacagtgcacttcctcaaaatagattgtcgtctcaagatgctgttaacgaaatgtttccagaagaaacgtctacccaggttaatattgagaatgatggtcacttgaatggattggaaaaagacgttttagcaagcgaagctgcttgctctccaacagtgcaagaccctcatcatctatctctcgaaattagtgaggaagatgcaatttgcaaacggacaagggcaagatactcactagcaaactattcactcgaggaattggagacctttctccaggaatctgatgatgatagtggtctgcaaaatgttgatgaagaagaggaataccgcaagtttcttgctgctgtcctgtctggtgtaggcaatgacacacaaacattccagggggatgaaaatcaagatgaagatgataatgatgcagactttgagctcgagattgaggaggctctagaaagtgatggtgatgaaaatgttgagaactatcacaacacaaatcctagaaaagagaaagatgtccgtaggcctcagactaggcagaggcggccattaactgggatgtctggggctggtagtgatcaccaggaatccaataaaactcatttaagaccaattgtgccatatattccgtctgcattggtgactcctgcgcatgcttttggatggcaatatgctaaccagaatgcctttttcccttcatccttggtttcactaacacgtccacctttagcatgtggatttacttatcagcaactcgggcaattgcatgtgttgatatatgagcatgttcagctccttatccaaacattttccctatgtgttcttgattcatctaaacaagatgtggctaataatgtcaaaaagatgatagttgagttggttggtgctcgtgatcaagcattggccaggagctctcctcaacggcatatcttctttgaaacccaacatctctcatctagttttgtttcttctgataatttggaacgccaatggattccgttaatcaagagtcctattatatccgtccttgatgttgcaccgcttgagttggtcctcgactatttaagtgacgtctttacagctgtcgtgaagtatagaaaaagtcatgtggatggtactgctgacaaaacccgcaggaaagagcccctgtttccttcagcagcgattaacagttgcaaacaagtgaataatgtttctcaagatagatcaaatggtgtgcctacagcatcacctccatctgggcagttgcagcagaagaaatcgttggctgctaccctgcttgagaatattaaaaaggatacaattgctcttgttcctgctgacattgcaagattagcacagagattcttttcacttttcaattttgcactctttcctcataagtcacctccttcacctatggccaatagggttcttttcactgatgcagaggacagattattagctctaggaattctggaatataataatgactgggcagcaatacaaaagcgctttcttccttgtaaatcaaagcatcagaaattttttgagagtaatgaaagac

SEQ ID NO: 68923 - DNA, 2220 bp, Zea Mays
ccgcctccacctcatgggccaccgggtccaccctcgatgtccagcttggcgacatcattgaccatggtgtcgacgagctccgcctcctgcaccccctccgcctcctcgccccttctgctgaggtccgcgtcggcgcattcctgccatagtcggcaaccaataggagcataaaactggagctagggattgcagatgttgcaggtacatgtcatacatgaatggacatgaacaggcactcccactgagggcgcttcttggcttcgtctgcagaggcttgctgatacttggcataggatattgttaattccagtgactggtggagtagttgtgggtatgatgcatgaattatttgagatctttgagtagataaagcaaccattatcatctcaaagggagggtttgatttcatggctgtgattcccccctccctccctgtcaaagccatctaagccacaattactttagggacagggtgttcactagggctagaaagattctgtttttattgcacgacacacagcaacatgtccaagtagtccttaacttgattgatttagctggtagtgagcgtcttgctaaatgtggctccacaagtgaacttaggtgagtgtttggttaccatgtatttccagatcaatgacatactaaaattgttctttgcacatataaatacaaaaaaggtacatgtcttccctgtcgagccccgaaaagaaatgacatgcaacccaataaatcttttttgtatttttataagaaatgacagaaaaatcccgactttaaaataagtgaaagattctaacaaccaataattatcttccaaaaaatcaattattatttatgcaccaagttgtaacaatactaaaaccatattcctttcatctcattttatcagtttaacacaataattttaataagttcaataccacactaaaaagagtgaaccaatgatttgtcatagactacagacattagctctgtttttatactaaatccatattcctttcatcctttgatctcatttgatttgtttaatacattgattttagtacgttcaacatctacaagcatggttatttttctaaagatgcataccattttttatcgatcaggccacttctcaaaattgttccacaacacaatatttaccaatctatacatccatacatcattcaggaatgctagatcttgatagcgagacaacgttcttcggcgtttttatggtcatggaggtaatcacaatatgtgctttttatgttccgttgaattagactgcctacgaggaataccattatgccaagtatttatagaacctatctttaacatttcacaacctcataccattgctttacttaggaagagtagctgtcaaattctatacagaatacccgcataatcaagttctcaaaagtgaagcctattaagttggtgacctaggtcctactgtcataataaagcttaaatatttattatatgtatacaacaaacacaaagttgattgtgtaaatgttctgttgatagtggctttctaattgaacatatatccctataactgcatatatgtattgagtatgataatgctatctgcatttaaatggatctgtggataagactcatatgaatgaacagtcgtacagatgtcattttgtatttacattaaagatatccgaatctaatgaggtagaatggaacattcacaattatcataccaagatctaccaaaatataatgttccttatgctctctttcagactggcgataatccctttttagataaatattttgcatgctaagtaactaatcctgagaaaatatagttcccatttttttggttgaagaaaacaggccaacctggcaaaagagtcattaacttgattgattttgctgcagcgagcgtcttgctaaaagtagttacacaggtgatcgtttgaaggaaactcaagtgagtgtttggttaccataaattttcaaatttctttgtgattctggttatcatacaacttttttttatttgaggaaacacaagtttagacggagttttactgctttactttgaagaaagtgacttttgttctcagtgggtctaaagagaataccttgtttaaggcattacgccttgcctagctgctatttctgattagtaatctcactacagtgtatgtcgaacagacgcttcatgtccaatgtgcataccatactatttccagcctaatgctctaattc

SEQ ID NO: 68924 - DNA, 423 bp, Zea Mays
atgcgagtgagtatccaggtgacaggagagaaagagacgtctacccccgtgcgtgctggcgctgctggtggaggtgtcgaccttggacctctgcggcggcggagggcatgtcccgacgggccagaggcggatgcagcagccggtgtcgaccgcggtgtcgtcgtcggtgcccttgggggccgcgcggcgcctgctgctgccgcggcggctgcggcggcaccagccccaacgctcccgctcccgctcctcctccccggagctctcccacccgtcgaactggcccagctccggcggcgcgagccccatgagacgagggacttacctcctccgcctcctactaagcagaacccggcagtgggcccagcaccacctctccgggcggcgagagcaccagatcggctaacctccggcctcccgcgctga

SEQ ID NO: 68925 - DNA, 1811 bp, Zea Mays
cacccacgttgccaagaacgtttgcttgcttgcttcgaaaggcagggatcgaagcatttctcttcatcagaccaccgaacacgagcaactgcgaccatcaagattcatgaggcgcccgcacactgcaaggccaaggaaaatcacctaagcctaccatacttgtttggggcaaaaaaaatatatagcaacggtgcatccgcattcattcagttaaaacctcagagcaaacatccgccaagcaaactccgatacctacaccaccctttttcgcctatatccttttactttgtgcacatgtcaatctacagcacacacatcaatgcaatgcaatgcaaatgcacggcccgaaccagtcacccccaacaaaccaggtttcatccaggggccgtgccttccagccggcagaaaaccgcgcctccaccactccgctcacttcacgttaggcttcggcgagtagcggaacggagacgcgcggggcccgtcagagaggctcctcacgggaggcggctgcccatgccgcccaaacgggctctgcgtcttgaagccgccgttcatgctgctcctcccgttcatgctgctcgagtgcgccatccgctcggcctgcatcgtctggaagaagtaggaggcgctcgccatgtccttgaggttctgcagcggcttcaggacctccaccacctggctcatcaggggccgcgccttggggtcccggctcaggcacacgcgcgctagctgcgccgccttctgcgcgcccttcaccgagaagttgccctccaggcgagggtcgattagcttgtagaaccgctgcctctcgcctaggagggggcgcgcccattccaccaggttgtgctccccgttcgggcggttcttgtccatcgacctgcgccctgacatcatctcaagaagcaccaccccgaagctgtagacatcactctttgatgtcagatgacctgaaaagtggaacagaaagacaaaagtgcatgtcaagcaaagaccagatgtgtaaacagtagagtaaaagggtgtttgaatcttaagagagcaaggtagtcaaattattctttcaatattatggatttgaagccaatccaaacctaggtaagcactaagcacttcaccccaaacaaattctatgtaaacataaatgattttatcttgggatatgtgattgctggggtcaactcactgagaatacctacattctacatgaactacccatgcccatttccacagttaatttagctgataaaccttttcaatttgcccctgccagtgtgttttaagcttccactacataaaggtcttgtagcacaaagacacatgtaaagttgcaagtgtggtaactacgtgttccgcgtattcctgtgtatattaggattgtatggttctgaacaaacccctctgcccgccttagacagatatggtaaacatcattacctcggtacaaacataccactaatggaaacttatcatattatccaaacaagtatggcatgtaacgtaaagcattacaacgtctcccaacaagcatagcttccaaccttaaatgtcttcaatgaagcatcaaataatggagaactgattatatcccagcatacttaaacatcgatttggatacgcaacaagcagataaagctgaatctagtgaatggttcgttgctcactggtagcactggcagtggccagacttgctcaccaccagagttcgatggacacagtcatggcaaatatgacaagatacttaccagtcatgacatattctggtgctgcatatccataggttcccattactcgagtagaaacatgagttttat

SEQ ID NO: 68926 - DNA, 140 bp, Zea Mays
aaacaaatgcaggtaacaattttcttttcactgctattcttttgtggtgatatatctcaaagacctctttccttgttctacaaagaaataagcctattttctttttcttggatgaaataaatgtggtaacctcaccagtc

SEQ ID NO: 68927 - DNA, 424 bp, Zea Mays
aacctgctcatcgttctgtggatcaccaggcaatggtaccgtgactccgcggagctgagagaggactggaggatggagtacctggacgcttggaaccagttcgggttgtcggtgacgcgcgagccgcagccgctgtgcgctacttgcgcgatcagaagcctgcgtagcctgtgcccttgaccttggcttggcaccttgctgctctctgcatccatgcgcctgtaattttgatcaggcaggttgttggtgcgctcatgagctgcttgtgtcgagctcgtcgttgtgtaattgcaatttgtagctacattggtgcatacttgtgggtgtccagttgcaagtgtaagtacatgtttgttgggtgatgggttgtatacctgacttatataaggaaacttgtattagaattgacttaccaaaagcttgg

SEQ ID NO: 68928 - DNA, 826 bp, Zea Mays
ataaaaactaccgctctacttggcctttccgcgatggctgagactagggtttcagtggcgacggttgcacgacatgagggagcgcagcgaagccagcacaaccgcggtggacaagcgtccccatagacgagatccatggcggagcgctggaagagcgtcttctccgtgccgaaggccgagaacgcgcggccgacgggacgatggccggcggcgaagcccaaggcgtcggacctgctcgcccgcagccttgactgcagcctcgaccgcaaggactccatcctcgccgccatccacctcttccgccgctctatggccttcgactccacgacatctctctcgtcgtcggacccagccgctccagacctctacgcgtcctctgacaccgacatcgtctcctctggtagcaactcggtagccagtgatccgccgcgtcagggcatcagcgtgccggcgaggttctggcagaaaaccaatagccgcatgctacatgcaagctcaagaattgcaataaggtctgattttggaagcaggagtcgttacatcacattggatgcacctggctcatcgtcgttactcttcacctggcacagtggcacctaacacgtgtgcattatgttgagtcttcaagaagaacgtcatcagcaccgaggtggatgtcctgcaagtgcagtgcaacatggcgctctggactattcaagattcaagtcaaattaggctaagatgtttacaatgccgagacgattggaagctgcaatttgtgaatttttggtccataacttctatagttgtttacaagcacaaaagagcaaataattaacgaatctct

SEQ ID NO: 68929 - DNA, 1790 bp, Zea Mays
ccgatgcccgatgccgagcccaaacccgcgagtcagcgtgcggcagcgctccaatccgacttcatccctgctcggctggccgctacattgctgctgaaccctagccgccgcgccgctacctgctaccatcgctccacccgccgtccgccgcgacgccgcccatcgcgtcaccatcgtccggaaactgggcaataggggttgcggccgcccgttgccaccaggtcctctgcgcctgctgctacgggctgtccgcggcaccgcgcgtcacagtcgtcggaggcgcgttgggcggccgcctggttggccagccggcgactgcgtgtctctgtgctccgtggtccctttccttctgcgagaattgcagagcaattggggtacacagcacaggcacatgaatacaacacaacagtttgctctctgattcgatcgatccaactagcctccaagcatggtgttcggccggagcaaatcaacttcgtcgacgacgccatccgcgccctcaaaggcggcggctgcgtgctccgagctgcgcaccgcgtaccacgactgcttcaaccggtggtacgcggagaaattcgctaaggggcagtggcagagggacgactgcgccgaccactggcacaagtaccgcgcctgcctcgaggaacatctggaagacaagcatctgaggcaaatcctactggatgcagaaacttctgcattttatgccatgcctgaggccaaccctcccacaggacaaggaactacaaaatgacaatccacctgattggttacccgcacggccgcaccatctcatcttggatcaccgacggcggcagcctgcgcatggacgcgcagccatccaatcaggctgatatctccttcaccatatgccatatcggacttcattcaatcaggatatatagaaccttggtagatgaattagaaactccttggatcttgacaattgttaggcccctggatcatgtaacacttaacaagcaaaatttgcgtgtgtcagaatggtgtgtgccctgctatctggaaaccttgcaacagttgagaatagaatcagctgtagagctgtacatgttgaagaacgttgtgtttcaactgtggcttagcttttagcagagtttgttgagtaatatgtttcggacatggtattggtttcaatacattagtttctgatgttgttaaggtttcatgaatcctgacagtgacgtggtcactcaccctgtggcgggtgctctgtgcttggaggagcagcaggcagcagctaaggcgagtgctctgctatctggacttcttgtcgatccttgtaataactcttctgaagtttggtgagtgttccaattttttttatttgggtcttgtttcatgtttttttgcatattttaagtgtgaaaaactttgcgctgggtaatccaacttccagactacacgacatgttcaggtgctatgataactgtttttgcttgtcggatttcatgcctagctttgtcttgttttggagctcatgtacagacttgtgaaacaccaaattccgtaatgaatgtaatatattgctttttttcagactccgtatgtgatagtattgtcaatgacttctatcgggtaccataattagggatatctagattacatctctaaatgtaccaacactctcgagtaccagggaagcatagaaacaacgcgctccctgacccaaggtcacataggaccaaatcacgattcgcctgaggctccacgtaccaaatgcacaaatacgcttcgcccaagcccaaccttgaatgaacgctatatctgtg

SEQ ID NO: 68930 - DNA, 1544 bp, Zea Mays
atgaacaatcgatgtgttaataagttttagaatttttaaatgaccaaaatatagttcccaccgcatattttccaatatttggcctaacctgaggtaaccctggctgtgggccaaattcttactgacaaccttgaggaggaagacatccgatgcccgatgccgagcccaaacccgcgagtcagcgtgcggcagcgctccaatccgacttcatccctgctcggctggccgctacattgctgctgaaccctagccgccgcgccgctacctgctaccatcgctccacccgccgtccgccgcgacgccgcccatcgcgtcaccatcgtccggaaactgggcaataggggttgcggccgcccgttgccaccaggtcctctgcgcctgctgctacgggctgtccgcggcaccgcgcgtcacagtcgtcggaggcgcgttgggcggccgcctggttggccagccggcgactgcgtgtctctgtgctccgtggtccctttccttctgcgagaattgcagagcaattggggtacacagcacaggcacatgaatacaacacaacagtttgctctctgattcgatcgatccaactagcctccaagcatggtgttcggccggagcaaatcaacttcgtcgacgacgccatccgcgccctcaaaggcggcggctgcgtgctccgagctgcgcaccgcgtaccacgactgcttcaaccggtggtacgcggagaaattcgctaaggggcagtggcagagggacgactgcgccgaccactggcacaagtaccgcgcctgcctcgaggaacatctggaagacaagcatctgaggcaaatcctactggatgcagaaacttctgcattttatgccatgcctgaggccaaccctcccacaggacaaggaactacaaaatgacaatccacctgattggttacccgcacggccgcaccatctcatcttggatcacctgacgtggtcactcaccctgtggcgggtgctctgtgcttggaggagcagcaggcagcagctaaggcgagtgctctgctatctggacttcttgtcgatccttgtaataactcttctgaagtttggtgagtgttccaattttttttatttgggtcttgtttcatgtttttttgcatattttaagtgtgaaaaactttgcgctgggtaatccaacttccagactacacgacatgttcaggtgctatgataactgtttttgcttgtcggatttcatgcctagctttgtcttgttttggagctcatgtacagacttgtgaaacaccaaattccgtaatgaatgtaatatattgctttttttcagactccgtatgtgatagtattgtcaatgacttctatcgggtaccataattagggatatctagattacatctctaaatgtaccaacactctcgagtaccagggaagcatagaaacaacgcgctccctgacccaaggtcacataggaccaaatcacgattcgcctgaggctccacgtaccaaatgcacaaatacgcttcgcccaagcccaaccttgaatgaacgctatatctgtg

SEQ ID NO: 68931 - DNA, 3381 bp, Zea Mays
cacgcccccgcctgcctctcctcgccccactctgtctcccgcaatcctcgccttctcgccccaaattgtcggggctctcggtcctcgcccacgctctctatggaaggagatcgcctccgctgcaccccagcactcttgccccggatcgtggtcgggagaggaggcgacatccgaaacacggttcttagcttggaatcaactgctggattagaatcagtgagatgcatgtcacgaactgatctcaaacttgatggatcatttgctgacatgattcttattcctgatactggggttcttgataaaagcagaattctgcaccttttgttttgacaaatcctggatagctgaatttttatgacggtggctctctattttctgtgcaaaactcaaaagagggaaatcctcttcctgaagcacagaaatttcaagtcgcaattcctacccttgatcccaacataacggtcactggtctttattcgctaaccaaaagtgaatttccaaatatttcactgaaggtgcattctgctcaaatttggatattttactctatctagacatcatcattacttatgtaagaccatatcgctgtggattttctgtagaaattttgtgctaggaaaaatgttgggcatttcatatcagagaacatgaaatgacctttgactggtggggttccaaatgagatgtcactgaacgaagatcatgctgttgaaagaatataaattgcaggctaccaagatggttctgtgagtatatgggatgcaacatttcctgttctaatgccaatgtttgtcttggatggttgctgatgttaatttggatggagctaatgcttctgtatgatctctagccttttgttcattaagcatgactttagctgttgggacaacaagtggtctggttagatcttgtcagtcttacgaattggtcgaagggtggtcatttgtatcattttagaatatgtttttataccattttttgtagttgtgcatctataaactccgagaacacattggggattcaagcttccattttgtgagtgaatttaagcaagaaggtaaatatttcatacggaacctgattatatatgcctaaagcttcacctgctgcctattccccaacaatgttgtcatctttgttaagacagttttatgccaatttcacttcttctcaccagcacgtacaagatgtctgtcgtgactggtcatctaacaagcagaatccataacatgcttctttggtaaagagagacagtaaattggtactgtcacttacgtgaatgtttattattgaaatgaaaatacatttgattatgatcggacacttataaaaacttgacttgcggggctaagacaacctccgagcattgtgtgatagagaagacctctcatacatgccaaaacaaccttgcccacgtgagcgaccgcgacctggtccgggtcatagtcacaaagtttgtggatcgatagggttgaggaacatcgtacgctacgtgtgagagatttttacatggtgggaacaaaaatgaccttgcgtacccgggtcgagggtcgctaccactgtacccatttcttgtgactatggttttggtcttcgacccgtgctttggtgtggtggcaggcgaggggattttttaaccccagtctgaaataatgtgtttgtttttatgtaatctttgtgctctaatatactgctccgattgatatgttggcctgctaaagctattattttcagtttgcttgcatggaactcattatttttactagctctgttttatttaaacttatagtagcacatgtgtccattattgatattgattaatctagctcctatcattatgttcactatattgaattagttttgacaaaaaccctggtaagctggaatcacattgttttgtagatatttttcttcaatataaatgcttaaacttaacctgataaattcatctacatgctctttcaaatggcaagcccactattgttgagttttatgcaaattggtgtgaagtctgcagggaacaagctccatatatctacaaagttgaacaacaatacaaagactgtggaattgtgaggtctgtccatgctgcctgctagaaatgggaaaatatgttagcagtagcaacaagtgtttttggcctttgatcttctggaggtcatgtggttgcagttctaccgatacttgttctacttgggcaaaattaggacaattcagttggagtacactgatgctaaagaaagcctcctgcaagttgctcgtaaggcaccaacaacagcccatggttttcggatccagtgcaacaaatgggttatcatagagaggctgctgcttggttggaacagaacaagacattgtgattttctttgactgttttgtaaggaatcagtgaaggaggctgaattgtggaatactattgtgatgaacatagtgaagcaggctgagttgttgcgtgcttctggttctggtctcagggagttacttggaaggggtttgtctctccgactctgctactgctttttaggcactgcttttttttgaagcacacattgttgtagctgaaacctccataatttcttcaccggttttatttaatctcttgttgcaattataggtgtacacaaaaactaatttttcatttgcttgtattactaaacttaatttcacaatcagccttgtagcactttgagattctgttgtttatttcttgtattagatattcttctgagtactggaataaagtcaatttatcatttttcatcagtaacatcttgagaggctgcttcttacatacaaacctaaagaaccagaggaaattcttgagcctgctcctcttgaagaggaaatggcaccagttgaagatcatgttcttgtaccacctgttaatgaagttgtttcacctcctcccaagactgaggtgtcccgatactggtgacttactggttgggaaaattataatatggtctaaatcttatgtgcttgattctaaaatctgaagttgtgttcctggtgtggaaatagagttgttgggctatttgtgtggggtgtgggttggcatgttcggagctgttcctggttggaaccagtgattttgctactcttttgacggataatttgagtttggagtcgtcgaattttgaaacagaggagtgggtttacatgtaatgttggcaaacgggatctgaattattaataaagcaacactgtttcgctgatatttttagttccaatctctacttctaattatatatatttgtgagatagaattatgcattgtgtactcacataatatttttcattgcatttgtgtggccaggacgtttggaaactttagaccacacggttttttagttcaatcatactcatagtgcgacaagtgat

SEQ ID NO: 68932 - DNA, 4133 bp, Zea Mays
caaattctggtgaagcacgccacgcccccgcctgcctctcctcgccccactctgtctcccgcaatcctcgccttctcgccccaaattgtcggggctctcggtcctcgcccacgctctctatggaaggagatcgcctccgctgcaccccagcactcttgccccggatcgtggtcgggagaggaggcgacatccgaaacacggtgagtggagaggatcccgtttggcccctgggtaggtcggcttccttgtgccccgaatctcggtcctcgcccaccctctccatggaaggggattccgtgtatcgcgagcggatcatggtcgggagaggaggtggcatccaaagcgcagcgagtggagaggatctagtttggcccctgagtaggttggcttccatgtgccccggatcccggtcctcgcccaccctgtgccctggatctcgatcctcgcccaccctctccatagaaggggatcccgtgtatcgcaagcagaccgtggtcgggagaggaggcggtatccgaagcatgacgaggactcctgtttctgtcagaggctatggggatttacgcatgaagggtcaaatcaatggtgctcagggggattctggtgcagatcaactaaatactactattgatgacagtgaagaagtaagagaaatttgctttctttgttgggcttcaagagatggctcaattgttgcggtgggctatataacaggtgacacacttctatgggatatgactacaaaatcctccagacaagagaagcaaagtgatgtttcatctaatgttgttaagctacaactagtctcagggagtagtaggctgcctgttattgtcttgcattggtctgctgggtcagcagtacattctaataaaggagggcatctttttgtttatggcggcgatgatatgggatctgaagaagttctcatggttcttagcttggaatcaactgctggattagaatcagtgagatgcatgtcacgaactgatctcaaacttgatggatcatttgctgacatgattcttattcctgatactggggttcttgataaaagcagaattctgcaccttttgttttgacaaatcctggatagctgaatttttatgacggtggctctctattttctgtgcaaaactcaaaagagggaaatcctcttcctgaagcacagaaatttcaagtcgcaattcctacccttgatcccaacataacggtcactggtctttattcgctaaccaaaagtgaatttccaaatatttcactgaaggtgcattctgctcaaatttggatattttactctatctagacatcatcattacttatgtaagaccatatcgctgtggattttctgtagaaattttgtgctaggaaaaatgttgggcatttcatatcagagaacatgaaatgacctttgactggtggggttccaaatgagatgtcactgaacgaagatcatgctgttgaaagaatataaattgcaggctaccaagatggttctgtgagtatatgggatgcaacatttcctgttctaatgccaatgtttgtcttggatggttgctgatgttaatttggatggagctaatgcttctgtatgatctctagccttttgttcattaagcatgactttagctgttgggacaacaagtggtctggttagatcttgtcagtcttacgaattggtcgaagggtggtcatttgtatcattttagaatatgtttttataccattttttgtagttgtgcatctataaactccgagaacacattggggattcaagcttccattttgtgagtgaatttaagcaagaaggtaaatatttcatacggaacctgattatatatgcctaaagcttcacctgctgcctattccccaacaatgttgtcatctttgttaagacagttttatgccaatttcacttcttctcaccagcacgtacaagatgtctgtcgtgactggtcatctaacaagcagaatccataacatgcttctttggtaaagagagacagtaaattggtactgtcacttacgtgaatgtttattattgaaatgaaaatacatttgattatgatcggacacttataaaaacttgacttgcggggctaagacaacctccgagcattgtgtgatagagaagacctctcatacatgccaaaacaaccttgcccacgtgagcgaccgcgacctggtccgggtcatagtcacaaagtttgtggatcgatagggttgaggaacatcgtacgctacgtgtgagagatttttacatggtgggaacaaaaatgaccttgcgtacccgggtcgagggtcgctaccactgtacccatttcttgtgactatggttttggtcttcgacccgtgctttggtgtggtggcaggcgaggggattttttaaccccagtctgaaataatgtgtttgtttttatgtaatctttgtgctctaatatactgctccgattgatatgttggcctgctaaagctattattttcagtttgcttgcatggaactcattatttttactagctctgttttatttaaacttatagtagcacatgtgtccattattgatattgattaatctagctcctatcattatgttcactatattgaattagttttgacaaaaaccctggtaagctggaatcacattgttttgtagatatttttcttcaatataaatgcttaaacttaacctgataaattcatctacatgctctttcaaatggcaagcccactattgttgagttttatgcaaattggtgtgaagtctgcagggaacaagctccatatatctacaaagttgaacaacaatacaaagactgtggaattgtgaggtctgtccatgctgcctgctagaaatgggaaaatatgttagcagtagcaacaagtgtttttggcctttgatcttctggaggtcatgtggttgcagttctaccgatacttgttctacttgggcaaaattaggacaattcagttggagtacactgatgctaaagaaagcctcctgcaagttgctcgtaaggcaccaacaacagcccatggttttcggatccagtgcaacaaatgggttatcatagagaggctgctgcttggttggaacagaacaagacattgtgattttctttgactgttttgtaaggaatcagtgaaggaggctgaattgtggaatactattgtgatgaacatagtgaagcaggctgagttgttgcgtgcttctggttctggtctcagggagttacttggaaggggtttgtctctccgactctgctactgctttttaggcactgcttttttttgaagcacacattgttgtagctgaaacctccataatttcttcaccggttttatttaatctcttgttgcaattataggtgtacacaaaaactaatttttcatttgcttgtattactaaacttaatttcacaatcagccttgtagcactttgagattctgttgtttatttcttgtattagatattcttctgagtactggaataaagtcaatttatcatttttcatcagtaacatcttgagaggctgcttcttacatacaaacctaaagaaccagaggaaattcttgagcctgctcctcttgaagaggaaatggcaccagttgaagatcatgttcttgtaccacctgttaatgaagttgtttcacctcctcccaagactgaggtgtcccgatactggtgacttactggttgggaaaattataatatggtctaaatcttatgtgcttgattctaaaatctgaagttgtgttcctggtgtggaaatagagttgttgggctatttgtgtggggtgtgggttggcatgttcggagctgttcctggttggaaccagtgattttgctactcttttgacggataatttgagtttggagtcgtcgaattttgaaacagaggagtgggtttacatgtaatgttggcaaacgggatctgaattattaataaagcaacactgtttcgctgatatttttagttccaatctctacttctaattatatatatttgtgagatagaattatgcattgtgtactcacataatatttttcattgcatttgtgtggccaggacgtttggaaactttagaccacacggttttttagttcaatcatactcatagtgcgacaagtgat

SEQ ID NO: 68933 - DNA, 4299 bp, Zea Mays
caaattctggtgaagcacgccacgcccccgcctgcctctcctcgccccactctgtctcccgcaatcctcgccttctcgccccaaattgtcggggctctcggtcctcgcccacgctctctatggaaggagatcgcctccgctgcaccccagcactcttgccccggatcgtggtcgggagaggaggcgacatccgaaacacggtgagtggagaggatcccgtttggcccctgggtaggtcggcttccttgtgccccgaatctcggtcctcgcccaccctctccatggaaggggattccgtgtatcgcgagcggatcatggtcgggagaggaggtggcatccaaagcgcagcgagtggagaggatctagtttggcccctgagtaggttggcttccatgtgccccggatcccggtcctcgcccaccctgtgccctggatctcgatcctcgcccaccctctccatagaaggggatcccgtgtatcgcaagcagaccgtggtcgggagaggaggcggtatccgaagcatgacgaggactcctgtttctgtcagaggctatggggatttacgcatgaagggtcaaatcaatggtgctcagggggattctggtgcagatcaactaaatactactattgatgacagtgaagaagtgacacacttctatgggatatgactacaaaatcctccagacaagagaagcaaagtgatgtttcatctaatgttgttaagctacaactagtctcagggagtagtaggctgcctgttattgtcttgcattggtctgctgggtcagcagtacattctaataaaggagggcatctttttgtttatggcggcgatgatatgggatctgaagaagttctcatggtttgcctattttttcttactcattattacaatttcttttgcttgccatcttaaaggctgctgtgcacacaatatgccttcttaggtttgctgctttacaaatttggtaaagtgaattcctagcttcctgaactgaaatcatggtcacctggctgtgagcctatgacatgtgtttagtgtagagacacagtactagcttgacatggcgatagggcaacccgggtttgcatgaaacatgatcaaccatgagagtttcctgcaagtataagaattgtttcctcaggcagaacccatgttgtcgacccaaacaattctgaagatatttttagttcaggtctcagcatccaaataatgtatacatacctatcataatcacttccctaaacatggaagaagataattgtttccgaaatattgcactgcagaaaactcagcctccatcaatgacaaaatttcgcattctcttgcaggttcttagcttggaatcaactgctggattagaatcagtgagatgcatgtcacgaactgatctcaaacttgatggatcatttgctgacatgattcttattcctgatactggggttcttgataaaagcagaattctgcaccttttgttttgacaaatcctggatagctgaatttttatgacggtggctctctattttctgtgcaaaactcaaaagagggaaatcctcttcctgaagcacagaaatttcaagtcgcaattcctacccttgatcccaacataacggtcactggtctttattcgctaaccaaaagtgaatttccaaatatttcactgaagaaattttgtgctaggaaaaatgttgggcatttcatatcagagaacatgaaatgacctttgactggtggggttccaaatgagatgtcactgaacgaagatcatgctgttgaaagaatataaattgcaggctaccaagatggttctgtgagtatatgggatgcaacatttcctgttctaatgccaatgtttgtcttggatggttgctgatgttaatttggatggagctaatgcttctttgtgcatctataaactccgagaacacattggggattcaagcttccattttgtgagtgaatttaagcaagaaggtaaatatttcatacggaacctgattatatatgcctaaagcttcacctgctgcctattccccaacaatgttgtcatctttgttaagacagttttatgccaatttcacttcttctcaccagcacgtacaagatgtctgtcgtgactggtcatctaacaagcagaatccataacatgcttctttggtaaagagagacagtaaattggtactgtcacttacgtgaatgtttattattgaaatgaaaatacatttgattatgatcggacacttataaaaacttgacttgcggggctaagacaacctccgagcattgtgtgatagagaagacctctcatacatgccaaaacaaccttgcccacgtgagcgaccgcgacctggtccgggtcatagtcacaaagtttgtggatcgatagggttgaggaacatcgtacgctacgtgtgagagatttttacatggtgggaacaaaaatgaccttgcgtacccgggtcgagggtcgctaccactgtacccatttcttgtgactatggttttggtcttcgacccgtgctttggtgtggtggcaggcgaggggattttttaaccccagtctgaaataatgtgtttgtttttatgtaatctttgtgctctaatatactgctccgattgatatgttggcctgctaaagctattattttcagtttgcttgcatggaactcattatttttactagctctgttttatttaaacttatagtagcacatgtgtccattattgatattgattaatctagctcctatcattatgttcactatattgaattagttttgacaaaaaccctggtaagctggaatcacattgttttgtagatatttttcttcaatataaatgcttaaacttaacctgataaattcatctacatgctctttcaaatggcaagcccactattgttgagttttatgcaaattggtgtgaagtctgcagggaacaagctccatatatctacaaagttgaacaacaatacaaagactgtggaattgtgaggtctgtccatgctgcctgctagaaatgggaaaatatgttagcagtagcaacaagtgtttttggcctttgatcttctggaggtcatgtggttgcagttctaccgatacttgttctacttgggcaaaattaggacaattcagttggagtacactgatgctaaagaaagcctcctgcaagttgctcgtaaggcaccaacaacagcccatggttttcggatccagtgcaacaaatgggttatcatagagaggctgctgcttggttggaacagaacaagacattgtgattttctttgactgttttgtaaggaatcagtgaaggaggctgaattgtggaatactattgtgatgaacatagtgaagcaggctgagttgttgcgtgcttctggttctggtctcagggagttacttggaaggggtttgtctctccgactctgctactgctttttaggcactgcttttttttgaagcacacattgttgtagctgaaacctccataatttcttcaccggttttatttaatctcttgttgcaattataggtgtacacaaaaactaatttttcatttgcttgtattactaaacttaatttcacaatcagccttgtagcactttgagattctgttgtttatttcttgtattagatattcttctgagtactggaataaagtcaatttatcatttttcatcagtaacatcttgagaggctgcttcttacatacaaacctaaagaaccagaggaaattcttgagcctgctcctcttgaagaggaaatggcaccagttgaagatcatgttcttgtaccacctgttaatgaagttgtttcacctcctcccaagactgaggtgtcccgatactggtgacttactggttgggaaaattataatatggtctaaatcttatgtgcttgattctaaaatctgaagttgtgttcctggtgtggaaatagagttgttgggctatttgtgtggggtgtgggttggcatgttcggagctgttcctggttggaaccagtgattttgctactcttttgacggataatttgagtttggagtcgtcgaattttgaaacagaggagtgggtttacatgtaatgttggcaaacgggatctgaattattaataaagcaacactgtttcgctgatatttttagttccaatctctacttctaattatatatatttgtgagatagaattatgcattgtgtactcacataatatttttcattgcatttgtgtggccaggacgtttggaaactttagaccacacggttttttagttcaatcatactcatagtgcgacaagtgat

SEQ ID NO: 68934 - DNA, 3559 bp, Zea Mays
caaattctggtgaagcacgccacgcccccgcctgcctctcctcgccccactctgtctcccgcaatcctcgccttctcgccccaaattgtcggggctctcggtcctcgcccacgctctctatggaaggagatcgcctccgctgcaccccagcactcttgccccggatcgtggtcgggagaggaggtggcatccaaagcgcagcgagtggagaggatctagtttggcccctgagtaggttggcttccatgtgccccggatcccggtcctcgcccaccctgtgccctggatctcgatcctcgcccaccctctccatagaaggggatcccgtgtatcgcaagcagaccgtggtcgggagaggaggcggtatccgaagcatgacgaggactcctgtttctgtcagaggctatggggatttacgcatgaagggtcaaatcaatggtgctcagggggattctggtgcagatcaactaaatactactattgatgacagtgaagaagtgacacacttctatgggatatgactacaaaatcctccagacaagagaagcaaagtgatgtttcatctaatgttgttaagctacaactagtctcagggagtagtaggctgcctgttattgtcttgcattggtctgctgggtcagcagtacattctaataaaggagggcatctttttgtttatggcggcgatgatatgggatctgaagaagttctcatggttcttagcttggaatcaactgctggattagaatcagtgagatgcatgtcacgaactgatctcaaacttgatggatcatttgctgacatgattcttattcctgatactggggttcttgataaaagcagaattctgcaccttttgttttgacaaatcctggatagctgaatttttatgacggtggctctctattttctgtgcaaaactcaaaagagggaaatcctcttcctgaagcacagaaatttcaagtcgcaattcctacccttgatcccaacataacggtcactggtctttattcgctaaccaaaagtgaatttccaaatatttcactgaaggtgcattctgctcaaatttggatattttactctatctagacatcatcattacttatgtaagaccatatcgctgtggattttctgtagaaattttgtgctaggaaaaatgttgggcatttcatatcagagaacatgaaatgacctttgactggtggggttccaaatgagatgtcactgaacgaagatcatgctgttgaaagaatataaattgcaggctaccaagatggttctgtgagtatatgggatgcaacatttcctgttctaatgccaatgtttgtcttggatggttgctgatgttaatttggatggagctaatgcttctgtatgatctctagccttttgttcattaagcatgactttagctgttgggacaacaagtggtctgttgtgcatctataaactccgagaacacattggggattcaagcttccattttgtgagtgaatttaagcaagaaggtaaatatttcatacggaacctgattatatatgcctaaagcttcacctgctgcctattccccaacaatgttgtcatctttgttaagacagttttatgccaatttcacttcttctcaccagcacgtacaagatgtctgtcgtgactggtcatctaacaagcagaatccataacatgcttctttggtaaagagagacagtaaattggtactgtcacttacgtgaatgtttattattgaaatgaaaatacatttgattatgatcggacacttataaaaacttgacttgcggggctaagacaacctccgagcattgtgtgatagagaagacctctcatacatgccaaaacaaccttgcccacgtgagcgaccgcgacctggtccgggtcatagtcacaaagtttgtggatcgatagggttgaggaacatcgtacgctacgtgtgagagatttttacatggtgggaacaaaaatgaccttgcgtacccgggtcgagggtcgctaccactgtacccatttcttgtgactatggttttggtcttcgacccgtgctttggtgtggtggcaggcgaggggattttttaaccccagtctgaaataatgtgtttgtttttatgtaatctttgtgctctaatatactgctccgattgatatgttggcctgctaaagctattattttcagtttgcttgcatggaactcattatttttactagctctgttttatttaaacttatagtagcacatgtgtccattattgatattgattaatctagctcctatcattatgttcactatattgaattagttttgacaaaaaccctggtaagctggaatcacattgttttgtagatatttttcttcaatataaatgcttaaacttaacctgataaattcatctacatgctctttcaaatggcaagcccactattgttgagttttatgcaaattggtgtgaagtctgcagggaacaagctccatatatctacaaagttgaacaacaatacaaagactgtggaattgtgaggtctgtccatgctgcctgctagaaatgggaaaatatgttagcagtagcaacaagtgtttttggcctttgatcttctggaggtcatgtggttgcagttctaccgatacttgttctacttgggcaaaattaggacaattcagttggagtacactgatgctaaagaaagcctcctgcaagttgctcgtaaggcaccaacaacagcccatggttttcggatccagtgcaacaaatgggttatcatagagaggctgctgcttggttggaacagaacaagacattgtgattttctttgactgttttgtaaggaatcagtgaaggaggctgaattgtggaatactattgtgatgaacatagtgaagcaggctgagttgttgcgtgcttctggttctggtctcagggagttacttggaagggtaacatcttgagaggctgcttcttacatacaaacctaaagaaccagaggaaattcttgagcctgctcctcttgaagaggaaatggcaccagttgaagatcatgttcttgtaccacctgttaatgaagttgtttcacctcctcccaagactgaggtgtcccgatactggtgacttactggttgggaaaattataatatggtctaaatcttatgtgcttgattctaaaatctgaagttgtgttcctggtgtggaaatagagttgttgggctatttgtgtggggtgtgggttggcatgttcggagctgttcctggttggaaccagtgattttgctactcttttgacggataatttgagtttggagtcgtcgaattttgaaacagaggagtgggtttacatgtaatgttggcaaacgggatctgaattattaataaagcaacactgtttcgctgatatttttagttccaatctctacttctaattatatatatttgtgagatagaattatgcattgtgtactcacataatatttttcattgcatttgtgtggccaggacgtttggaaactttagaccacacggttttttagttcaatcatactcatagtgcgacaagtgat

SEQ ID NO: 68935 - DNA, 4176 bp, Zea Mays
caaattctggtgaagcacgccacgcccccgcctgcctctcctcgccccactctgtctcccgcaatcctcgccttctcgccccaaattgtcggggctctcggtcctcgcccacgctctctatggaaggagatcgcctccgctgcaccccagcactcttgccccggatcgtggtcgggagaggaggcgacatccgaaacacggtgagtggagaggatcccgtttggcccctgggtaggtcggcttccttgtgccccgaatctcggtcctcgcccaccctctccatggaaggggattccgtgtatcgcgagcggatcatggtcgggagaggaggtggcatccaaagcgcagcgagtggagaggatctagtttggcccctgagtaggttggcttccatgtgccccggatcccggtcctcgcccaccctgtgccctggatctcgatcctcgcccaccctctccatagaaggggatcccgtgtatcgcaagcagaccgtggtcgggagaggaggcggtatccgaagcatgacgaggactcctgtttctgtcagaggctatggggatttacgcatgaagggtcaaatcaatggtgctcagggggattctggtgcagatcaactaaatactactattgatgacagtgaagaagtgacacacttctatgggatatgactacaaaatcctccagacaagagaagcaaagtgatgtttcatctaatgttgttaagctacaactagtctcagggagtagtaggctgcctgttattgtcttgcattggtctgctgggtcagcagtacattctaataaaggagggcatctttttgtttatggcggcgatgatatgggatctgaagaagttctcatggtttgcctattttttcttactcattattacaatttcttttgcttgccatcttaaaggctgctgtgcacacaatatgccttcttaggtttgctgctttacaaatttggtaaagtgaattcctagcttcctgaactgaaatcatggtcacctggctgtgagcctatgacatgtgtttagtgtagagacacagtactagcttgacatggcgatagggcaacccgggtttgcatgaaacatgatcaaccatgagagtttcctgcaagtataagaattgtttcctcaggcagaacccatgttgtcgacccaaacaattctgaagatatttttagttcaggtctcagcatccaaataatgtatacatacctatcataatcacttccctaaacatggaagaagataattgtttccgaaatattgcactgcagaaaactcagcctccatcaatgacaaaatttcgcattctcttgcaggttcttagcttggaatcaactgctggattagaatcagtgagatgcatgtcacgaactgatctcaaacttgatggatcatttgctgacatgattcttattcctgatactggggttcttgataaaagcagaattctgcaccttttgttttgacaaatcctggatagctgaatttttatgacggtggctctctattttctgtgcaaaactcaaaagagggaaatcctcttcctgaagcacagaaatttcaagtcgcaattcctacccttgatcccaacataacggtcactggtctttattcgctaaccaaaagtgaatttccaaatatttcactgaaggtgcattctgctcaaatttggatattttactctatctagacatcatcattacttatgtaagaccatatcgctgtggattttctgtagaaattttgtgctaggaaaaatgttgggcatttcatatcagagaacatgaaatgacctttgactggtggggttccaaatgagatgtcactgaacgaagatcatgctgttgaaagaatataaattgcaggctaccaagatggttctgtgagtatatgggatgcaacatttcctgttctaatgccaatgtttgtcttggatggttgctgatgttaatttggatggagctaatgcttctgtatgatctctagccttttgttcattaagcatgactttagctgttgggacaacaagtggtctgttgtgcatctataaactccgagaacacattggggattcaagcttccattttgtgagtgaatttaagcaagaaggtaaatatttcatacggaacctgattatatatgcctaaagcttcacctgctgcctattccccaacaatgttgtcatctttgttaagacagttttatgccaatttcacttcttctcaccagcacgtacaagatgtctgtcgtgactggtcatctaacaagcagaatccataacatgcttctttggtaaagagagacagtaaattggtactgtcacttacgtgaatgtttattattgaaatgaaaatacatttgattatgatcggacacttataaaaacttgacttgcggggctaagacaacctccgagcattgtgtgatagagaagacctctcatacatgccaaaacaaccttgcccacgtgagcgaccgcgacctggtccgggtcatagtcacaaagtttgtggatcgatagggttgaggaacatcgtacgctacgtgtgagagatttttacatggtgggaacaaaaatgaccttgcgtacccgggtcgagggtcgctaccactgtacccatttcttgtgactatggttttggtcttcgacccgtgctttggtgtggtggcaggcgaggggattttttaaccccagtctgaaataatgtgtttgtttttatgtaatctttgtgctctaatatactgctccgattgatatgttggcctgctaaagctattattttcagtttgcttgcatggaactcattatttttactagctctgttttatttaaacttatagtagcacatgtgtccattattgatattgattaatctagctcctatcattatgttcactatattgaattagttttgacaaaaaccctggtaagctggaatcacattgttttgtagatatttttcttcaatataaatgcttaaacttaacctgataaattcatctacatgctctttcaaatggcaagcccactattgttgagttttatgcaaattggtgtgaagtctgcagggaacaagctccatatatctacaaagttgaacaacaatacaaagactgtggaattgtgaggtctgtccatgctgcctgctagaaatgggaaaatatgttagcagtagcaacaagtgtttttggcctttgatcttctggaggtcatgtggttgcagttctaccgatacttgttctacttgggcaaaattaggacaattcagttggagtacactgatgctaaagaaagcctcctgcaagttgctcgtaaggcaccaacaacagcccatggttttcggatccagtgcaacaaatgggttatcatagagaggctgctgcttggttggaacagaacaagacattgtgattttctttgactgttttgtaaggaatcagtgaaggaggctgaattgtggaatactattgtgatgaacatagtgaagcaggctgagttgttgcgtgcttctggttctggtctcagggagttacttggaagggtaacatcttgagaggctgcttcttacatacaaacctaaagaaccagaggaaattcttgagcctgctcctcttgaagaggaaatggcaccagttgaagatcatgttcttgtaccacctgttaatgaagttgtttcacctcctcccaagactgaggtgtcccgatactggtgacttactggttgggaaaattataatatggtctaaatcttatgtgcttgattctaaaatctgaagttgtgttcctggtgtggaaatagagttgttgggctatttgtgtggggtgtgggttggcatgttcggagctgttcctggttggaaccagtgattttgctactcttttgacggataatttgagtttggagtcgtcgaattttgaaacagaggagtgggtttacatgtaatgttggcaaacgggatctgaattattaataaagcaacactgtttcgctgatatttttagttccaatctctacttctaattatatatatttgtgagatagaattatgcattgtgtactcacataatatttttcattgcatttgtgtggccaggacgtttggaaactttagaccacacggttttttagttcaatcatactcatagtgcgacaagtgat

SEQ ID NO: 68936 - DNA, 3674 bp, Zea Mays
caaattctggtgaagcacgccacgcccccgcctgcctctcctcgccccactctgtctcccgcaatcctcgccttctcgccccaaattgtcggggctctcggtcctcgcccacgctctctatggaaggagatcgcctccgctgcaccccagcactcttgccccggatcgtggtcgggagaggaggcgacatccgaaacacggtgagtggagaggatcccgtttggcccctgggtaggtcggcttccttgtgccccgaatctcggtcctcgcccaccctctccatggaaggggattccgtgtatcgcgagcggatcatggtcgggagaggaggtggcatccaaagcgcagcgagtggagaggatctagtttggcccctgagtaggttggcttccatgtgccccggatcccggtcctcgcccaccctgtgccctggatctcgatcctcgcccaccctctccatagaaggggatcccgtgtatcgcaagcagaccgtggtcgggagaggaggcggtatccgaagcatgacgaggactcctgtttctgtcagaggctatggggatttacgcatgaagggtcaaatcaatggtgctcagggggattctggtgcagatcaactaaatactactattgatgacagtgaagaagttcttagcttggaatcaactgctggattagaatcagtgagatgcatgtcacgaactgatctcaaacttgatggatcatttgctgacatgattcttattcctgatactggggttcttgataaaagcagaattctgcaccttttgttttgacaaatcctggatagctgaatttttatgacggtggctctctattttctgtgcaaaactcaaaagagggaaatcctcttcctgaagcacagaaatttcaagtcgcaattcctacccttgatcccaacataacggtcactggtctttattcgctaaccaaaagtgaatttccaaatatttcactgaagaaattttgtgctaggaaaaatgttgggcatttcatatcagagaacatgaaatgacctttgactggtggggttccaaatgagatgtcactgaacgaagatcatgctgttgaaagaatataaattgcaggctaccaagatggttctgtgagtatatgggatgcaacatttcctgttctaatgccaatgtttgtcttggatggttgctgatgttaatttggatggagctaatgcttctgtatgatctctagccttttgttcattaagcatgactttagctgttgggacaacaagtggtctgttgtgcatctataaactccgagaacacattggggattcaagcttccattttgtgagtgaatttaagcaagaaggtaaatatttcatacggaacctgattatatatgcctaaagcttcacctgctgcctattccccaacaatgttgtcatctttgttaagacagttttatgccaatttcacttcttctcaccagcacgtacaagatgtctgtcgtgactggtcatctaacaagcagaatccataacatgcttctttggtaaagagagacagtaaattggtactgtcacttacgtgaatgtttattattgaaatgaaaatacatttgattatgatcggacacttataaaaacttgacttgcggggctaagacaacctccgagcattgtgtgatagagaagacctctcatacatgccaaaacaaccttgcccacgtgagcgaccgcgacctggtccgggtcatagtcacaaagtttgtggatcgatagggttgaggaacatcgtacgctacgtgtgagagatttttacatggtgggaacaaaaatgaccttgcgtacccgggtcgagggtcgctaccactgtacccatttcttgtgactatggttttggtcttcgacccgtgctttggtgtggtggcaggcgaggggattttttaaccccagtctgaaataatgtgtttgtttttatgtaatctttgtgctctaatatactgctccgattgatatgttggcctgctaaagctattattttcagtttgcttgcatggaactcattatttttactagctctgttttatttaaacttatagtagcacatgtgtccattattgatattgattaatctagctcctatcattatgttcactatattgaattagttttgacaaaaaccctggtaagctggaatcacattgttttgtagatatttttcttcaatataaatgcttaaacttaacctgataaattcatctacatgctctttcaaatggcaagcccactattgttgagttttatgcaaattggtgtgaagtctgcagggaacaagctccatatatctacaaagttgaacaacaatacaaagactgtggaattgtgaggtctgtccatgctgcctgctagaaatgggaaaatatgttagcagtagcaacaagtgtttttggcctttgatcttctggaggtcatgtggttgcagttctaccgatacttgttctacttgggcaaaattaggacaattcagttggagtacactgatgctaaagaaagcctcctgcaagttgctcgtaaggcaccaacaacagcccatggttttcggatccagtgcaacaaatgggttatcatagagaggctgctgcttggttggaacagaacaagacattgtgattttctttgactgttttgtaaggaatcagtgaaggaggctgaattgtggaatactattgtgatgaacatagtgaagcaggctgagttgttgcgtgcttctggttctggtctcagggagttacttggaaggggtttgtctctccgactctgctactgctttttaggcactgcttttttttgaagcacacattgttgtagctgaaacctccataatttcttcaccggttttatttaatctcttgttgcaattataggtgtacacaaaaactaatttttcatttgcttgtattactaaacttaatttcacaatcagccttgtagcactttgagattctgttgtttatttcttgtattagatattcttctgagtactggaataaagtcaatttatcatttttcatcagtaacatcttgagaggctgcttcttacatacaaacctaaagaaccagaggaaattcttgagcctgctcctcttgaagaggaaatggcaccagttgaagatcatgttcttgtaccacctgttaatgaagttgtttcacctcctcccaagactgaggtgtcccgatactggtgacttactggttgggaaaattataatatggtctaaatcttatgtgcttgattctaaaatctgaagttgtgttcctggtgtggaaatagagttgttgggctatttgtgtggggtgtgggttggcatgttcggagctgttcctggttggaaccagtgattttgctactcttttgacggataatttgagtttggagtcgtcgaattttgaaacagaggagtgggtttacatgtaatgttggcaaacgggatctgaattattaataaagcaacactgtttcgctgatatttttagttccaatctctacttctaattatatatatttgtgagatagaattatgcattgtgtactcacataatatttttcattgcatttgtgtggccaggacgtttggaaactttagaccacacggttttttagttcaatcatactcatagtgcgacaagtgat

SEQ ID NO: 68937 - DNA, 399 bp, Zea Mays
atggggaggacctcggctgcgacggccagggaatccagggcgctgggcgtgcgcgcgatgaaccaggcgagccagggatgcgcgcgagtcagccaagcgagcagagcgagcaggagccggagcgtcgccctgagggaggagggcgcgcagaagcttgaacccaagcacagaggaacgaccatggctgagaggggctcgagcgcgctggctgtgcagaagctcgggaggatagaggagggccgcagggctaggcaccggcaggggaaagctgccgcgcgaagactgggcgagcgcagaggcgcggcttcacgcgagcgaacagagggaggagcagagagctcggccggcgagtcaagagctgcgcggctggatgttgctgccggcgagcagggagattag

SEQ ID NO: 68938 - DNA, 241 bp, Zea Mays
gggattcgaaactatgagtacacagttgaaatgaacccttaatcaatgtacattgcatctatgtgaacctgttataaatttgcagattaggttaccatggtcgcatacaaaattaatgttgagtaatttgaatctggacagaaccgaatcatcggggacgaacaaccccccaaacccgaaatggatcccccaaaaccggtctaaatttaagcatccggatacaacaataagccattgatgc

SEQ ID NO: 68939 - DNA, 1137 bp, Zea Mays
aagcccagcccaacccgctgtcgctttcacttttctgtcgggaactcggaattgtccccgtcttccctgatcccttcgctccccgaagcaaaagcgcagagcgcatcagcgcagagtaggacagccatggcgacggcggcggcgcagtcccatccggcatcgatggacgcgcgccggtgggacgagtcatcgtaccgccgcggcatcctccgtgcccgcgacctctcgtcccgcaccctcttccgtgccgtcttctttgaccacagcgacgacccggataccgacatcctactcgccgccgcctccagcgacggctccctcgcttccttctccctttcatcctgcatctccgcatgttccgctacctcccaggtggagaccgccgccactctggtagatcctgtctgcatcgtgcaagcgcacagcggacctgcctacgacgtcaggttttaccccgatcaacagcagccgctgctcttcagctgcggggacgatggccgcatcaagggttggaggtggcacgagatgcagagctgccttgtcccgctctccctgcaaggggatcatctggaaccagcacttgacttggtcaaccctcagcacgagggtccttggggtgctcgatctccagtacctgaaaacaatgccattgcaattaataaacaggatggatccattttggcagcagcgggtgatgcatgtgcttactgctgggatgtggtatgtattttcttaaggagaccagtaaatgtaaaatcacattcaaggggcatgctgattatttgcacagcattgcagttcgtgagtcaaaccgccaggttgtaacaggatcagaggatgggacagctcgtatctgggattgcagaagtgggaagtgcactcgggttatacagccaggaaagagcaaggcatttgaaagctcatgggtcagctgtgttgctattgatccaagtgaaagttggctgattttagcagttggcgctgaacctctgctctcccgtctcacaataaacgggacagtcctttcacaagtaaaatgtgcccctcagtcggcgttttctgtctccatccactcaactggggtatgtgcctatcttgctgctctgctcatttcttggctgtgttctcccctgtttc

SEQ ID NO: 68940 - DNA, 1295 bp, Zea Mays
gaaaagtttaaagatgggccagaagccggcggaattctagttgaaagaagcccagcccaacccgctgtcgctttcacttttctgtcgggaactcggaattgtccccgtcttccctgatcccttcgctccccgaagcaaaagcgcagagcgcatcagcgcagagtaggacagccatggcgacggcggcggcgcagtcccatccggcatcgatggacgcgcgccggtgggacgagtcatcgtaccgccgcggcatcctccgtgcccgcgacctctcgtcccgcaccctcttccgtgccgtcttctttgaccacagcgacgacccggataccgacatcctactcgccgccgcctccagcgacggctccctcgcttccttctccctttcatcctgcatctccgcatgttccgctacctcccaggtggagaccgccgccactctggtagatcctgtctgcatcgtgcaagcgcacagcggacctgcctacgacgtcaggttttaccccgatcaacagcagccgctgctcttcagctgcggggacgatggccgcatcaagggttggaggtggcacgagatgcagagctgccttgtcccgctctccctgcaaggggatcatctggaaccagcacttgacttggtcaaccctcagcacgagggtccttggggtgctcgatctccagtacctgaaaacaatgccattgcaattaataaacaggatggatccattttggcagcagcgggtgatgcatgtgcttactgctgggatgtggtatgtattttcttaaggagaccagtaaatgtaaaatcacattcaaggggcatgctgattatttgcacagcattgcagttcgtgagtcaaaccgccaggttgtaacaggatcagaggatgggacagctcgtatctgggattgcagaagtgggaagtgcactcgggttatacagccaggaaagagcaaggcatttgaaagctcatgggtcagctgtgttgctattgatccaagtgaaagttggctggcttgtggcacgtctagcggtatatcagtttggagtcttctctcaaatgagtgcatctttaatttggactgtcatgctcctgttcaagatttattgtttgacaagaatcatattttagcagttggcgctgaacctctgctctcccgtctcacaataaacgggacagtcctttcacaagtaaaatgtgcccctcagtcggcgttttctgtctccatccactcaactggggtatgtgcctatcttgctgctctgctcatttcttggctgtgttctcccctgtttc

SEQ ID NO: 68941 - DNA, 3720 bp, Zea Mays
gaccataccgaaacaggcaatcaactttatccaggaggccggctgggatgaagacctggtgaacaaatcatacccttgggtagaggacaagattgtccagtggcctaagatcgcgccttggcaggcggcgctacgggatgggctgctacaagcaggtgtagcccccttcaatgggtacacctacgatcatgtctctggaacaaaggtgggtggcaccatctttgacgagactgggtaccgccacacagctgccgacttactagcagctggagatgctagcaacctgaaggtgctgctccacgctagtgtgcacaagatagtgtttggctcgcgacaaggacgactgaaggcaagagccatcggagtcgaattcactgatgaggatgggagacaccaccaggcattcttgaacagcaacagagacagtgaagtaattgtatctgctggtgcgatcggcaccccccagctgctgctgctcagtgggatcgggcccaagaacgacctcaagaatcataacattccagtggttctccataacagatatgtgggtaaagggatggctgacaaccccatgaactccatattcataccaacaagaagccctcctcggcagtctctcattgaaactgttggaataactgaagaaggcgtgttcattgaggccagcagcgggtttggtcagtcgtcggagagtgtccactgccaccatggaatcatgtctgctgagattggacagctgtctaccattcctccgaagcaaagaaccctggaagcagcccagaaatacgcccataacaaacttaatctgcccaaagaggtattccacggcggttttatacttgaaaagattgatggtccgatgtccacaggccatctggtcctcacagacactgatgtccggaacaatccagcagttaccttcaactacttcagtcatccacaggatctcaatcgctgtatctatggtatcaagaccattgaaaggatactcaagacaaaccgtttctctgaactctctgctgatggtgctgggttatcgatggaaagggtgctcaatatgagcgtgcaggctaatgtgaacctgataccgaagcatacaaatgacacagaatccctggagcagttttgcaaggacactgtgatcaccatctggcattatcatggtgggtgccatgtagggaaggtggttgaccagcattaccgggtgcttggagtttcaggtctccgggtggttgacggctcaatattttctaaatcgccagggaccaaccctcaagctacagttatgatgatgggcagatatatgggagtgaagatcctaagggaaaggctgggacgagcagctggagtgtagtcgattcctggacattagctttttattatgtgtggcctaggaaagaaattactaattttttgtgggatccagaatgaatcgctgaagaaaaacaagccatgtgtttcatctgtacccagtaatcatttgtctaatatgatatcgcagactaaatggttgactgagcccctctttcttctttttttcttgtttattaagtggatttcaagaaacaaactcccatgaactgctccctcattaaaggaagattgagattgtttaacaatatcacaccaaagtaccagacgaaataaaatccatggaagagtgttgtatatcaacaaaagagaagaaaatccattcacaaaatcaaataatctgactttattacgtcagaaagtatttggtataactctgctacataagtttcctctctgagggggaaagaatgaaaagtaaaatcgcactgcatcgagagctcatcagattacatttacatctggtcatcattttactcagttcgaactaaagagactctgaaatcatcaattagcagcacccaatacataaatattttttccaaaaaataataataattctagagccttacaggtatcctgagaccgtcatagctaagctggatgtcaagaccgtctgttccaatcagcctggcaagatcactgtttactttctcatggtccatcaaatgcatcattcctgaagataccattcaatacaactcaatcattggcaagaccagacaaactgtataaacaatgaaatatgggacattagcctagtaatgaaatcgggtcaaataattataagcatcaatgtctataaacaagaaaagatatcgcttgatcttcgaatgctttaatgatggggaaaaggggggaatcattgaatgctaacaacagtaagctctcaatgagtcaatggtaatggtcatggatggacatctagtcttatctttcattagcattgggaaataatatcaaataagggtaaaagtttccgataacctcagagttaaattataaagttacaaatatccccatattcttgctgtggcagtcacaaagggattgtggttcaacgcacccaagcaaaggcaaacacattttcatgttgccgactttataaaataatcatgcaagcttctttctagcaaactaagcagtccatgaaagagtgggctttgtacttgtacaaccattggggaacaaaatgcaagagttaacaaattttaaaacaaaagcatgtgtacgagtggtcagtgagttctgagttcctaccagtaaacagtgttttctttggtttgattttcctaacttcctcaagagcctgcacggtggatacatcaaaaggattacagtgaacaagttaagggatgttatagtagagctgtaggactaacccttggtagtccgaagtgtgttgatgaagaacgatcaggtcttagagcatcctgtacaaagttatccaccaaacttagatgcaatcagacattaatagttgagaaagatgcacaaaaaataataagaaacgctttagtgctgttgtaaatccaataactttatgatgtaacagttagaagcaaataattattatatatgataccattataagaagttcacagttttccagaagcttgtatgtttcttcgggtatatcactgacatcactgcatccaacataggaattcagacaagaggccttacagcaacacagttcattgtagtaaaattaaccttgcactgaacttggtctaccttatatagcatacatcaccaaaacgaaaaccaagagagcggtaaccctgaccgtgccaaacaggtaaaggaatcacctgagatgaagaagctgtagcttcagaaagtaataagaagtgcttctatcttttatatgattgttgaaatacggttagtatgcgccgatatagaaggaaaagcaaatgaatgggcactcacttaaagaacaaatgatagttccgtgataggtactaaaattcacatgctggcaagtattgcaagtttgcttctagcagtcattctaacccaacactgaaaataggagttcaaactgctcatttactaaagggaaatgcttcaatacaacccattcaaacagttcccttacagataggtattttatttataattgaacaagtacccaagtttttgaaccgtatgatcagtttgtttgtgccaataagttctattacttaaatattctcaattaattataactgaacctatcacgtgataattcaccaaaataaggctataagcacaagtttataactgtgaatcccgaacccatacagcatccaccgagtcaaggagggtgctttgcgattataaaacacaatgacacgggtaggg

SEQ ID NO: 68942 - DNA, 5158 bp, Zea Mays
ctacaacttgttcgatgtggctttaatccagctatagttagtttctatagtattttgtctttacggaatgcagttgcagcagtccgaatatcttactatgatacatcctaccgactataacctaataaaatacaccatacgaagttgtttccactctaccaacagcttctagaagtcctatagcttgcatggaactgaaatatatacatatcactatatcagatgacgaagcacacgacgacctgtgtaagcaaacttccaggggatttttcccgcgcacctttcttccctcctgagaatggtgctctcttctctgatgtcagggacacgttttctacacccggtgctgaatgaaaacagcaccacacgtttcctgctacatactagtactactggcattcatgctctctcttctcatgggatggcactggcagtgccatcagacaaacagagcaagccaggtaaaaataaaaaacataaaaaaatacaatattaacccgttggcccaaccaattggcgaagccacaggtacggaaaccaataaagaaatgtcagactcgcagagagggagagagagagagatgcctgtcattcttgtaaatgagggaggagggggcgccaccatcgccgcagctttgtgagggctggttggttggttgatgaagaagtccataaatcccggttgtaccagggcagtgcttgctctgctccctcagcgagcattcaatggcccttactgcagctggtgagctccacttcaatgccggctcgggctcagccagcactctcatctgatgtggcctgcaagcttgcaatccctccaacgacacacgccggccggccggctacatataaaccagctccaatacaacgccactagccgggtcgagaggtggggagcagagggttcaagggaggggacaggtcgagcagctcacctttctctgctcgagaacgagaggagctcccgtcttttgcttgctgtgccgggcgctgctgaaggttcagctcagtccgatggcgttgagcggcagagctctgctcttgttcaagctgctgctgctgctgctggcgtgcctgctcttcctcttggagctgtcccgaggcaaggaagaagcattcagcctgaggaacctcccgcccttccacaaggccagcagctaccccgcggggtgcccgacgacgtacgactacatcatcgtcggcggcggcaccgcggggtgcccgctggcggcgacgctgtcgcacaggtacagggtgctgctgctggagcgcggaggctccccgtacggcgaccgcaacgtctcctacatgcagaacttccacatcgggctcatgaacatggcgccggactcgccgtcgcaggccttcatctccaccgacggcgtcatcaatgcccgggcgagggtgttgggcggtgggacctgcatcaatgccggcttctacagccgggccagcccaactttatccaggaggccggctgggatgaagacctggtgaacaaatcatacccttgggtagaggacaagattgtccagtggcctaagatcgcgccttggcaggcggcgctacgggatgggctgctacaagcaggtgtagcccccttcaatgggtacacctacgatcatgtctctggaacaaaggtgggtggcaccatctttgacgagactgggtaccgccacacagctgccgacttactagcagctggagatgctagcaacctgaaggtgctgctccacgctagtgtgcacaagatagtgtttggctcgcgacaaggacgactgaaggcaagagccatcggagtcgaattcactgatgaggatgggagacaccaccaggcattcttgaacagcaacagagacagtgaagtaattgtatctgctggtgcgatcggcaccccccagctgctgctgctcagtgggatcgggcccaagaacgacctcaagaatcataacattccagtggttctccataacagatatgtgggtaaagggatggctgacaaccccatgaactccatattcataccaacaagaagccctcctcggcagtctctcattgaaactgttggaataactgaagaaggcgtgttcattgaggccagcagcgggtttggtcagtcgtcggagagtgtccactgccaccatggaatcatgtctgctgagattggacagctgtctaccattcctccgaagcaaagaaccctggaagcagcccagaaatacgcccataacaaacttaatctgcccaaagaggtattccacggcggttttatacttgaaaagattgatggtccgatgtccacaggccatctggtcctcacagacactgatgtccggaacaatccagcagttaccttcaactacttcagtcatccacaggatctcaatcgctgtatctatggtatcaagaccattgaaaggatactcaagacaaaccgtttctctgaactctctgctgatggtgctgggttatcgatggaaagggtgctcaatatgagcgtgcaggctaatgtgaacctgataccgaagcatacaaatgacacagaatccctggagcagttttgcaaggacactgtgatcaccatctggcattatcatggtgggtgccatgtagggaaggtggttgaccagcattaccgggtgcttggagtttcaggtctccgggtggttgacggctcaatattttctaaatcgccagggaccaaccctcaagctacagttatgatgatgggcagatatatgggagtgaagatcctaagggaaaggctgggacgagcagctggagtgtagtcgattcctggacattagctttttattatgtgtggcctaggaaagaaattactaattttttgtgggatccagaatgaatcgctgaagaaaaacaagccatgtgtttcatctgtacccagtaatcatttgtctaatatgatatcgcagactaaatggttgactgagcccctctttcttctttttttcttgtttattaagtggatttcaagaaacaaactcccatgaactgctccctcattaaaggaagattgagattgtttaacaatatcacaccaaagtaccagacgaaataaaatccatggaagagtgttgtatatcaacaaaagagaagaaaatccattcacaaaatcaaataatctgactttattacgtcagaaagtatttggtataactctgctacataagtttcctctctgagggggaaagaatgaaaagtaaaatcgcactgcatcgagagctcatcagattacatttacatctggtcatcattttactcagttcgaactaaagagactctgaaatcatcaattagcagcacccaatacataaatattttttccaaaaaataataataattctagagccttacaggtatcctgagaccgtcatagctaagctggatgtcaagaccgtctgttccaatcagcctggcaagatcactgtttactttctcatggtccatcaaatgcatcattcctgaagataccattcaatacaactcaatcattggcaagaccagacaaactgtataaacaatgaaatatgggacattagcctagtaatgaaatcgggtcaaataattataagcatcaatgtctataaacaagaaaagatatcgcttgatcttcgaatgctttaatgatggggaaaaggggggaatcattgaatgctaacaacagtaagctctcaatgagtcaatggtaatggtcatggatggacatctagtcttatctttcattagcattgggaaataatatcaaataagggtaaaagtttccgataacctcagagttaaattataaagttacaaatatccccatattcttgctgtggcagtcacaaagggattgtggttcaacgcacccaagcaaaggcaaacacattttcatgttgccgactttataaaataatcatgcaagcttctttctagcaaactaagcagtccatgaaagagtgggctttgtacttgtacaaccattggggaacaaaatgcaagagttaacaaattttaaaacaaaagcatgtgtacgagtggtcagtgagttctgagttcctaccagtaaacagtgttttctttggtttgattttcctaacttcctcaagagcctgcacggtggatacatcaaaaggattacagtgaacaagttaagggatgttatagtagagctgtaggactaacccttggtagtccgaagtgtgttgatgaagaacgatcaggtcttagagcatcctgtacaaagttatccaccaaacttagatgcaatcagacattaatagttgagaaagatgcacaaaaaataataagaaacgctttagtgctgttgtaaatccaataactttatgatgtaacagttagaagcaaataattattatatatgataccattataagaagttcacagttttccagaagcttgtatgtttcttcgggtatatcactgacatcactgcatccaacataggaattcagacaagaggccttacagcaacacagttcattgtagtaaaattaaccttgcactgaacttggtctaccttatatagcatacatcaccaaaacgaaaaccaagagagcggtaaccctgaccgtgccaaacaggtaaaggaatcacctgagatgaagaagctgtagcttcagaaagtaataagaagtgcttctatcttttatatgattgttgaaatacggttagtatgcgccgatatagaaggaaaagcaaatgaatgggcactcacttaaagaacaaatgatagttccgtgataggtactaaaattcacatgctggcaagtattgcaagtttgcttctagcagtcattctaacccaacactgaaaataggagttcaaactgctcatttactaaagggaaatgcttcaatacaacccattcaaacagttcccttacagataggtattttatttataattgaacaagtacccaagtttttgaaccgtatgatcagtttgtttgtgccaataagttctattacttaaatattctcaattaattataactgaacctatcacgtgataattcaccaaaataaggctataagcacaagtttataactgtgaatcccgaacccatacagcatccaccgagtcaaggagggtgctttgcgattataaaacacaatgacacgggtaggg

SEQ ID NO: 68943 - DNA, 1064 bp, Zea Mays
ctcgttctcctcctcgcaactctctcgtccatacgtcgtagccgccgcctgtctctcaccgtcgacatcccgacaactctcagcccagatcgagcttcccccttcccaaatcgggttctacttgggctcccgccaccgcctccctacaccaggtgccaaggccttcgccgacctcttcgccggcgaagagcgcccagcaggtatgtggcctatattgcgacggtggaatggatacagacaagtggtgtgattcccaggtgcctctgcatcgggtgtcaactatgcccgtgagctatgggagaacaggaggaaacctttcactgctgaattcatcgagttggatccttctgatgatggttttgaagctcaagtgcaggaaaagggcatccaagtagatatagtttgctgtatgtagcacttgcaggacaaaatatcaaaagaatgttgatgcttcacataataagggtttgaagactgttccaaatagcattcgctcagagaacaataccattacctttgaagtcgaggaagagaagtttcccttttttggaaatttgcgacgcaaatttgagttgatattatgatgtaaattcatcactcgtcaccacctatacctacatctccatctaccgaacatcaggtatgcaaattcatcatcatttacttgttgttagttatattatgatgtaacttagcaaatgtcatttatacatgtatattaaacccctccagctaccttgccgacgcatgaacaagaagacgggttaaactttgtcgaaaccctcttcactagtggaggtatcgaccatcactcgtcactgtaacccgatggtgatcagcgaccgtgagcttaaatgttattgcgttctattacttgagacttttattatgactatgtatgagatattgtctcttattagtactggatgatgagatgtgtcttattatgactatggatgagacttttgtgatgtaattaatgagactatggatgagacttttgtgatgtaattgatgagaccatgcatttaaatattgttatgtgattgtgtgtgagatgtttt

SEQ ID NO: 68944 - DNA, 1379 bp, Zea Mays
ctcgttctcctcctcgcaactctctcgtccatacgtcgtagccgccgcctgtctctcaccgtcgacatcccgacaactctcagcccagatcgagcttcccccttcccaaatcgggttctacttgggctcccgccaccgcctccctacaccaggtgccaaggccttcgccgacctcttcgccggcgaagagcgcccagcagagatgaatgtagcggtgccaccacaatctccacatcttcatctatatgattttgccaagagtgccatcataaatttttttgcctttccttatgctacggtatgtggcctatattgcgacggtggaatggatacagacaagtggtgtgattcccaggttggccactacataggcatcagtgcctctgcatcgggtgtcaactatgcccgtgagctatgggagaacaggaggaaacctttcactgctgaattcatcgagttggatccttctgatgatggttttgaagctcaagtgcaggaaaagggcatccaagtagatatagtttgctgtatgtagcacttgcaggggtgctgcggataagtggctacagcggcagcatccacaccagtaaccaacagtggttgcaaccaagcgtagcacgaaggacagacggttgcactttttgcttgcgctgcatggtctgctgaacagctcggctttacagctgcagaccaggtagcagcttaaatctttctaagttggttgttttttattctgtaggacaaaatatcaaaagaatgttgatgcttcacataataagggtttgaagactgttccaaatagcattcgctcagagaacaataccattacctttgaagtcgaggaagagaagtttcccttttttggaaatttgcgacgcaaatttgagttgatattatgatgtaaattcatcactcgtcaccacctatacctacatctccatctaccgaacatcaggtatgcaaattcatcatcatttacttgttgttagttatattatgatgtaacttagcaaatgtcatttatacatgtatattaaacccctccagctaccttgccgacgcatgaacaagaagacgggttaaactttgtcgaaaccctcttcactagtggaggtatcgaccatcactcgtcactgtaacccgatggtgatcagcgaccgtgagcttaaatgttattgcgttctattacttgagacttttattatgactatgtatgagatattgtctcttattagtactggatgatgagatgtgtcttattatgactatggatgagacttttgtgatgtaattaatgagactatggatgagacttttgtgatgtaattgatgagaccatgcatttaaatattgttatgtgattgtgtgtgagatgtttt

SEQ ID NO: 68945 - DNA, 1595 bp, Zea Mays
cgccgcccccgacctcgttctcctcctcgcaactctctcgtccatacgtcgtagccgccgcctgtctctcaccgtcgacatcccgacaactctcagcccagatcgagcttcccccttcccaaatcgggttctacttgggctcccgccaccgcctccctacaccaggtgccaaggccttcgccgacctcttcgccggcgaagagcgcccagcagagatgaatgtagcggtgccaccacaatctccacatcttcatctatatgattttgccaagagtgccatcataaatttttttgcctttccttatgctacggtatgtggcctatattgcgacggtggaatggatacagacaagtggtgtgattcccaggttggccactacataggcatcagtgcctctgcatcgggtgtcaactatgcccgtgagctatgggagaacaggaggaaacctttcactgctgaattcatcgagttggatccttctgatgatggttttgaagctcaagtgcaggaaaagggcatccaagtagatatagtttgctgtatgtagcacttgcaggcgagttggttgttctctagaactgtagaatatgatatcttgtgagctttgctaatctttatattttatacttttcgaaagatagttatgctttgagaatttcgttcttatgtcctaacgtcttctctttttctcctccaaaagaaattatcttctaagcttttgtggccatccgccaaccaagtaaattatataggctagcatttattcttcattgcaagtaaactttaatttcttcagtacaaatttagtgtgcaatgtgcttgaccaaacaatgttctttaggggtgctgcggataagtggctacagcggcagcatccacaccagtaaccaacagtggttgcaaccaagcgtagcacgaaggacagacggttgcactttttgcttgcgctgcatggacaaaatatcaaaagaatgttgatgcttcacataataagggtttgaagactgttccaaatagcattcgctcagagaacaataccattacctttgaagtcgaggaagagaagtttcccttttttggaaatttgcgacgcaaatttgagttgatattatgatgtaaattcatcactcgtcaccacctatacctacatctccatctaccgaacatcaggtatgcaaattcatcatcatttacttgttgttagttatattatgatgtaacttagcaaatgtcatttatacatgtatattaaacccctccagctaccttgccgacgcatgaacaagaagacgggttaaactttgtcgaaaccctcttcactagtggaggtatcgaccatcactcgtcactgtaacccgatggtgatcagcgaccgtgagcttaaatgttattgcgttctattacttgagacttttattatgactatgtatgagatattgtctcttattagtactggatgatgagatgtgtcttattatgactatggatgagacttttgtgatgtaattaatgagactatggatgagacttttgtgatgtaattgatgagaccatgcatttaaatattgttatgtgattgtgtgtgagatgtttt

SEQ ID NO: 68946 - DNA, 1864 bp, Zea Mays
accaatcatttctttgcaatctgcagcctctgcaaactgatcgcgttgctggttgctggtaatcatcggaccagtccacagatatcggaagctctcttgctactgatggcgaagcccagcgtggcggtgccggaggttggcgtaccagcggcgcaggcgtcgtgcacctgcccggggacgctgctcgcgtacccgccgccgcgtggcgccggggtcgcggccgccgtgcggcgcaagtgcctgcaggtggagctcggcgcgggggcgggcctgctgggcggcgccggcgcctggggcgtggagtccatgcgggcgtcgtcgcccacgcacgccagggccgcggccgcgctcgccgccggcggcggcgtcgatgtcgacgtcgacgaggagcgcgccgccagctggatggcgcggcacccgtcggcgctgggcaggttcgagcggatcgtggcggcggccgagggcaagcggatcgtcatgttcctggactacgacggcacgctgtcgcccatcgtggacgaccccgacgccgccttcatgagcgagacgatgcggatggccgtgcgtagcgtcgccaagcatttcccgacggcgatcgtgagcggccggtgccgcgacaagcatgcaggtgttcgagttcgtgaagctggcagagctctactacgccggcagccacggcatggacatcaagggtccggcggccgccaaggcctcctcttcttctcggcacgccgcaaaggcaaaaggagtagtgttccagccggccagcgagttcctgcccatgatagaggaggtgcacgagcgcctggtacagacgacgcgctgcataccgggggccaaggtggagaacaacaggttctgcgtctccgtccacttcagacgcgtcgacgaaaagatgtggggcgagctgtcagagtcggtgaggggcgtgctgcgggggtacccgaagctgcggctgacgcacgggcggatggtgctggaggtgcggcccagcatcaagtgggacaagggcaaggccctggagttcctgctcgagtcgctcggcttcgcggactgcagcagcgtgctgcccgtgtacatcggcgacgaccgcaccgacgaggacgccttcaaggtcctgcggcgccgcggccaggaccagggcgtcggcatcctcgtgtccaagcaccccaaggagacgagcgcctcctactcgctccaaggccccgcagaggtgatggagttcttgctgcggcttgtcgagtggaagcgcctctccagggccaggctcaggctgcaatgagatgagacggcgcaactgccgtacgtggacacgtacgacgatgcaacggattaagctaactgccaagtgccagttaattaagttaagatcctgcctgctacgtggaatcgtgaacggcactgtctctctactgtccccccgtagtgatcagcatgcatgtacatcgttgtctcatacagtactagctagttagtactaagcatgcctgttacatatatatagcttcatgtgaatgtgttgtactgatgtgtgatcttaaaagtatgctgatgaacggtgtgatatttttttaatccacactacttgctgatttggttcaaagccggacctgtcgtcgtcgaagtgatccagctttgcaacgccattggccaccaccacatcgatcgaaagccacaccaataatgagcaaggcgacgatggaatcttggataacgcatgccacacgggagcgcgcacacgatctttaccatttgatgaagataatgatctacctgtggacgtacgccgcgtgatgacgaagcgcggttggactccactcggaagatcgatggagacgcgcgctctctggccattatattcccc

SEQ ID NO: 68947 - DNA, 1868 bp, Zea Mays
cacacagtcgcaccaatcatttctttgcaatctgcagcctctgcaaactgatcgcgttgctggttgctggtaatcatcggaccagtccacagatatcggaagctctcttgctactgatggcgaagcccagcgtggcggtgccggaggttggcgtaccagcggcgcaggcgtcgtgcacctgcccggggacgctgctcgcgtacccgccgccgcgtggcgccggggtcgcggccgccgtgcggcgcaagtgcctgcaggtggagctcggcgcgggggcgggcctgctgggcggcgccggcgcctggggcgtggagtccatgcgggcgtcgtcgcccacgcacgccagggccgcggccgcgctcgccgccggcggcggcgtcgatgtcgacgtcgacgaggagcgcgccgccagctggatggcgcggcacccgtcggcgctgggcaggttcgagcggatcgtggcggcggccgagggcaagcggatcgtcatgttcctggactacgacggcacgctgtcgcccatcgtggacgaccccgacgccgccttcatgagcgagacgatgcggatggccgtgcgtagcgtcgccaagcatttcccgacggcgatcgtgagcggccggtgccgcgacaaggtgttcgagttcgtgaagctggcagagctctactacgccggcagccacggcatggacatcaagggtccggcggccgccaaggcctcctcttcttctcggcacgccgcaaaggcaaaaggagtagtgttccagccggccagcgagttcctgcccatgatagaggaggtgcacgagcgcctggtacagacgacgcgctgcataccgggggccaaggtggagaacaacaggttctgcgtctccgtccacttcagacgcgtcgacgaaaagatgtggggcgagctgtcagagtcggtgaggggcgtgctgcgggggtacccgaagctgcggctgacgcacgggcggatggtgctggaggtgcggcccagcatcaagtgggacaagggcaaggccctggagttcctgctcgagtcgctcggcttcgcggactgcagcagcgtgctgcccgtgtacatcggcgacgaccgcaccgacgaggacgccttcaaggtcctgcggcgccgcggccaggaccagggcgtcggcatcctcgtgtccaagcaccccaaggagacgagcgcctcctactcgctccaaggccccgcagaggtgatggagttcttgctgcggcttgtcgagtggaagcgcctctccagggccaggctcaggctgcaatgagatgagacggcgcaactgccgtacgtggacacgtacgacgatgcaacggattaagctaactgccaagtgccagttaattaagttaagatcctgcctgctacgtggaatcgtgaacggcactgtctctctactgtccccccgtagtgatcagcatgcatgtacatcgttgtctcatacagtactagctagttagtactaagcatgcctgttacatatatatagcttcatgtgaatgtgttgtactgatgtgtgatcttaaaagtatgctgatgaacggtgtgatatttttttaatccacactacttgctgatttggttcaaagccggacctgtcgtcgtcgaagtgatccagctttgcaacgccattggccaccaccacatcgatcgaaagccacaccaataatgagcaaggcgacgatggaatcttggataacgcatgccacacgggagcgcgcacacgatctttaccatttgatgaagataatgatctacctgtggacgtacgccgcgtgatgacgaagcgcggttggactccactcggaagatcgatggagacgcgcgctctctggccattatattcccc

SEQ ID NO: 68948 - DNA, 1634 bp, Zea Mays
attatggcctattatggcccaagccataccaaaaaataaaaacaggtccgccgagcgccggtccagcttccatatcccgcattcgcgctggcagcctggcgctaaccctaaccctcaccgcctggccctcacgaacacagccgccgcccgctgtgcccagccttccgccgtccgccgagccatcgaggggagaccgagccttccgccgctgcccgctgtgcccagccttccgcccttccagccacgcgctgacgccgtccgcggtccgccgctgtgcccactgcccactgcccagcggccccagctgtacggccttctgtgccgagccggcgagtcgccgttcgctgctcggctgctgtgcccaggcggccaggcgcccagccctccagccacgcgcccaggcgggccatgccacgcctgtgccttccgcggtcctcctctgtgtgcctgtgccttccgagctgtaacaagttgatatatttggaggattgttcaaagggcttgatcttcaaaatattaagaaggcatttcaaaagaaggataggcaaatacaattgcctaggtctccaagacatatatagcaaaatcagagttgtgtagagccatacctaaatttttatccgtcctccgccactgctgctgggctttgtggaagcggagaaataggctaatcttctatggcggcatcgcatgaaaattgaagagcgttgggtagttgatgtctggtgtgcaaaactaatagtggcaatgtaaggcctcgtgtgctcttgtttttttttttttactaaaacacttgtaaacattatgatgtgggccactaaaggcaatgaaaaattcaggtgagggttcctctcccccgttgacagtaaaaaaaaacatctgtgacctactctgtgtcagctactttggaaaaattacagtagtctataattggcttgcgatgaataaattttctggattcatctgtgcgctatcaatttatgaccttcataattgtttgtggtgcttgattttttttactagagtcaaagtatggcatgaagattacaccactttttatcacaattgatcctcaacgtgattcaccttctcagcttaaggcatactttagtgagtttgagtcaagaatagtaggactaacaggccccatcagcgcagtaagacagattgctcagggcttccaaactagtcctaaaagagtagagaaagttggtcatgactatcttgtagaaagctctcacaacatgtacttgttagatccatatttggagacagtaaggtgctttggaactgagtatgagaggcatcagaccttgctgaggcgataacaatagaggcccagaaagcatctgcttcatcaacaaactagtttagcggggtatttccacttggtgtactttctaattttttgttaatttaactttgtgatacgtatcaaaactagcctgtttatacttcatcaacaaactagttttttacatctgtttttacctgaaagtaaaacattagttgcattgtttatacttggccgtagtttccagcccattattttcttattagaaacctttgaagtgaaagtgttatttcctatgatagtgagttattgatacgaaagccacatggttgtatcgttc

SEQ ID NO: 68949 - DNA, 1846 bp, Zea Mays
tttttttttagaaaaatactgtagaagccgcagccgcagccggattgcagccgcagcaagccgcagcgaacagcctccaaacaccagagatccctggaggctggcagcagcgaggaatcgaggattatagtagttaatcgtacatgtgctgcaaagtctttactgcccttgaaaggttcctcggtctcggtctcactcttctcccccgtcgccgttgactacaaggcacggcgctggaggtggtggcagcagcacgcaaatggcggagcagcagggctggaggcagcggcgctcgcggaggacgacgctgcttttggcgttcgcggcgctggccatggagcgcgccgacgcggcgctgctcccggcggtgtaccgggagatcggcaccgcgctgcaggcatcgcccacggcgctcggctccatcgcgctgtcacgctccgtcgtgcagaccgcctgttatccgttagcggcgtacctggcggcgcgccacgatcgcgtcaccgtcatcgcgctcggcgcgttcgtgtgggcggtggcgaccttcctcattggcttctccaccaccttcccacagatggcggtgacggcggctttgaacggtgtcgggctggcgctgcagatccccgcgatctacgccttcgttgccgattccgtggacggcgccagcaggggcatggcattcgggtggctcgccgtggctggcaaggccggcaccgtggctggcacctccctcggcctgctcatggcgccgacctcattcctggggctaccgggctggcggctcgccttcctcttgcttggcgtcttgggggccgcggtcggcgtgtccattcgcgcgttcgccgcgagcgacggcgcagcaagaggccgcgtggtggtgagcccggccacttccaagccagtgaggcaggaagtgcaggagttcgtcagggaggccaaggccgtgatgcggatcccgtcgttccaggtcatcatcgcgcagggcctaaccgggtcgttcccctggtcggcgctgttgttcacggcgatgtggctggagctggtggggttttcccacggcgagacggcagcgctcatgacgctgttcaaggtcgccacgtcgctgggagctctcttcggtggcaaggtgggggacgtcctcgcccggcggttcaagaactcgggccgcatcgtcctctcgcagatcagctctgcttccgcgattcccctctccggcatcctcctcctcgcgctccccaacgacccgtcctccacgctcaagcatggtgccgcgctgttcattttggggatcatggcctcctggaacggcacagctacaaacagcccgatactcgcggagatcgtcccgccgagggcaatgacgaccgtgttcgcgctggaccggacgtttgaggcagtgctggcctcgttcgcgcccccggtggtcggcctcctcgcggagcgcctttacggttacaagctagcccgatctgcaagtggcggcggcgtagacgagcgcacggctatcgacttccagatggagcggcacaacgcgacgtccctcgccagggcgatatacacctccattgccatccccatggcaatgtgctgcgccatctactcgttcttgtactgcacctaccccagggacagggagatggcgcgggctgaggcggcgcgaaatagaggggattatggcgatgaaggatttggatccgaggacgaagacaatggcgagaggaagctgctgccgcagtgagtccctatggtcactggtcaggttcgaagagaccggcgtccgttggggagaagaatagacgtgagacgtttcatctaaaaaagacttctaatccgtggcttagttcag

SEQ ID NO: 68950 - DNA, 1421 bp, Zea Mays
caccgatatgccgttgactttcagtatcttttggattaaggttgcaatttcaaggggcttgaacggcattggtctagctctcgtcataccagcagtccagtcgctggtagccgactccactgacgacgacaaccgcggcacagcattcggatggctgcaactgaccagcagcatcggctccgtattcgggggattctttgccttactgctggcccagactacagtcttggggatcgaaggatggcgtattgccttccacctcgtcgcgatcgtcagcgtcatcgtcggcaccctcgtgtggttcttcgccgtggatccccatttccccacaaacgatgccgcaccaccatccagcaaaaagtccgcgcttgatgaagcaagggaactgatcatggaggccaggtccatagtccagatcccgacgttccaggtcttcgttgcccagggcgtcagcggctcgttcccgtggtcagcgctgtcgttcttgtccatgtggctggagctcgtcgggttcagccacgaggacaccgccgtcctcacgaccaccttcgctgtcgccacctccgtcggcggccttcttggcgggaagatgggggattcgctcgctcggcggtatccgaacgctgggaggatcgtgctgtctcagataagcgccggctctgctgttcctttggccgctgttcttctgctgggcttgcctgataatccgtccacgtccagtggtgttgcccatggacttgttctgttcgtcatgggactcatcatctcttggaacggagctgctacaaactgcccgatttttgcggagatcgtgcccgagaagcaaaggacgagcatctacgctctggacagaaccttcgagtccattctggcgtcgtttgcgcctccggtcgttggcctgttgtcgcagcaagtctacggcttcaaacaggacgacggcagagggagcagccctgggcaagaccgggagaacgcggcgtcgctggccaaggcgctgtacacggccatctccataccgatggtcatctgcacctccatatacacgttcatgtaccgcacctaccctcgagacagggagcgtgcgcgcatgcagtcggtgattcagtcagagttggaccagattgagctgctgggcggtccgagtttaggaggcggcggcgacggcgacggtgataaacctgacgaggttgatggcagttatggttctgaaagatctgctgaggccgatgccggcactgaaaaactactaggaaggaaaccatgagttgtgacgaacagaagaacctactaggaggaccattcatgttgaagaggatgatagatgttcctgccgattttaggaacttgtaattgtaacacgacgatcaatatgattcactaaagtgaccgttcttttttcttccatgtctatgttatgctgc

SEQ ID NO: 68951 - DNA, 2258 bp, Zea Mays
ggagttgctctaatatatttattcagttatattgtagagacacatttgctagtagaaaaataaagtcaccaccaaccaaacactccaaaataaactgcttgcccacctaggcccatccacgcagcccaaaccagtttagagttcgaactccgttgggttcgtctcgttttggtcccacgttctcgcagctgacgccgccccgttcgcctccgtcgccgccgccatcgccaccgccgaaccatggagaccacggagccgtcgcgtggcaccaagcgccctctcaccgccactgcaggcgatgacgacgatgctggcctggagcgcaagccgcggttccctaaggggaagaaggccaagtaccgcgacgtcggtgcggagggaggcccctctggcaacgctgtggacctcgacagcatgctgaatccggagcttgcggcggagcggcgggcgcggcagcgccacgtccagctcaaggagggagacgacgcgaagggaggtgccgctgaggtgaagggcttcgaagtccgctacaacgacagtgttaactttgttgacgatggtatacggatagagccgtttaacttggagcgagaaagggaagaagggtatttcgatgagaatgggaactttgtggagtatgcaagaggcaatgagattaaggatgcttggttggacagtgtggaagttgacccaacatatgctgcaaaggttcagaacaaaggcaaagagaaagtagacgagtttgaggacctctcttccgatgacattgggaggctaaaaaggcagatagcaaacttgcttgagccaggagaaacgatgtttactcagatgatcgtgagacctttgaacgcgaggctgctgggtatgaacgtttggcacgtgctcgacttggtttgccagaagttgatggtgtctctgaagaccaaaaatataatcagacaccatcatctgcactggaaattgaccaaccatcatctgtactggaaatggaacttggtccctcgactgccaatgtatatacagccactgctgcaatcaatgatgatgacagtaacctggacatgtttggtgatgatgacaacgatgataccaaacatagttctgatgccaatactgtaggttcaggtttgaaacctggaacctcagatgtgaagaaagccgataatggaagtgtggactcagactatgtatacgatccttcttcaggttactactatagcagcagcacaggctattactatgaccctaactctggatattatggttctgcatctacgggaacctggtattcatacgatgagcaaactggaacatacaaagaaattcaggatgaacaaactggcacggttaaagaagagctgggagatgccatcaaggagtaaccgagttgctacggcccttctcgttcttgattgctgatgcaactgaggtagttcagaccgcccagtgttctttaaagcgaggcagcgagctgtagcttcagtttctcggtaggcgctttgggccacgactcgctaaactgccttgatagatgttttatgaagaaattaagaggaaaccagtcagatcatactataggttgtaaaccagaaagtgatcgactgcaactgtacaattgcaatattaccgttctcggcagaggcttgttttattagctactattcctgctatttctgtagaaatatgcaataacacccaattcctatgtgaagatgtgtttgaacttaacagatgagaacgttatgtttggtgtgattatgtctaaggctcgagagcgttcagattggtaaactaaatcgggcaacctgtgatcgttggagtctaagaccggcgcggggacagtcaggcagagaaaaggttcggaggttggagacgcttcagggttgttcaatcttactgtactctacaacctcttcccgaaaaggtgggaacaatattttagaccgacaacgtcttctcgggaacacggttaggccctgtttacctgtttcgacgccaaattctctcccctgtaaaaactacacttatttctgtaaatttcctgtaatatttttttttgtgaaatttctgtctcaaacaagcctatggatagttttttagctatacattggcgaagtatttgtttttatgttccaacatgtattcttttctttcttttgggaatgggctgcggccctgtattccggagctcagtaccacagaccacacacaataacacgagccagcttcagtaatcgtagattacttggatgactgcc

SEQ ID NO: 68952 - DNA, 2426 bp, Zea Mays
ggagttgctctaatatatttattcagttatattgtagagacacatttgctagtagaaaaataaagtcaccaccaaccaaacactccaaaataaactgcttgcccacctaggcccatccacgcagcccaaaccagtttagagttcgaactccgttgggttcgtctcgttttggtcccacgttctcgcagctgacgccgccccgttcgcctccgtcgccgccgccatcgccaccgccgaaccatggagaccacggagccgtcgcgtggcaccaagcgccctctcaccgccactgcaggcgatgacgacgatgctggcctggctcacgttgattttgtgtctgtcgccgcgctcgcagggagcgcaagccgcggttccctaaggggaagaaggccaagtaccgcgacgtcggtgcggagggaggcccctctggcaacgctgtggacctcgacagcatgctgaatccggagcttgcggcggagcggcgggcgcggcagcgccacgtccagctcaaggagggagacgacgcgaagggaggtgccgctgaggtgaagggcttcgaagtccgctacaacgacagtgttaactttgttgacgatggtatacggatagagccgtttaacttggagcgagaaagggaagaagggtatttcgatgagaatgggaactttgtggagtatgcaagaggcaatgagattaaggatgcttggttggacagtgtggaagttgacccaacatatgctgcaaaggttcagaacaaaggcaaagagaaagtagacgagtttgaggacctctcttccgatgacattgggaggctaaaaaggcagatagcaaacttgcttgagccaggagaaacgataatgcaagccttgaaaaggttgaagggtacatccacggataaacgtggaaagatggctgaggggactaaacgtatatttgatgaattgactgaagctgccatgaagctaatggagaacggcgattataatgtttactcagatgatcgtgagacctttgaacgcgaggctgctgggtatgaacgtttggcacgtgctcgacttggtttgccagaagttgatggtgtctctgaagaccaaaaatataatcagacaccatcatctgcactggaaattgaccaaccatcatctgtactggaaatggaacttggtccctcgactgccaatgtatatacagccactgctgcaatcaatgatgatgacagtaacctggacatgtttggtgatgatgacaacgatgataccaaacatagttctgatgccaatactgtaggttcaggtttgaaacctggaacctcagatgtgaagaaagccgataatggaagtgtggactcagactatgtatacgatccttcttcaggttactactatagcagcagcacaggctattactatgaccctaactctggatattatggttctgcatctacgggaacctggtattcatacgatgagcaaactggaacatacaaagaaattcaggatgaacaaactggcacggttaaagaagagctgggagatgccatcaaggagtaaccgagttgctacggcccttctcgttcttgattgctgatgcaactgaggtagttcagaccgcccagtgttctttaaagcgaggcagcgagctgtagcttcagtttctcggtaggcgctttgggccacgactcgctaaactgccttgatagatgttttatgaagaaattaagaggaaaccagtcagatcatactataggttgtaaaccagaaagtgatcgactgcaactgtacaattgcaatattaccgttctcggcagaggcttgttttattagctactattcctgctatttctgtagaaatatgcaataacacccaattcctatgtgaagatgtgtttgaacttaacagatgagaacgttatgtttggtgtgattatgtctaaggctcgagagcgttcagattggtaaactaaatcgggcaacctgtgatcgttggagtctaagaccggcgcggggacagtcaggcagagaaaaggttcggaggttggagacgcttcagggttgttcaatcttactgtactctacaacctcttcccgaaaaggtgggaacaatattttagaccgacaacgtcttctcgggaacacggttaggccctgtttacctgtttcgacgccaaattctctcccctgtaaaaactacacttatttctgtaaatttcctgtaatatttttttttgtgaaatttctgtctcaaacaagcctatggatagttttttagctatacattggcgaagtatttgtttttatgttccaacatgtattcttttctttcttttgggaatgggctgcggccctgtattccggagctcagtaccacagaccacacacaataacacgagccagcttcagtaatcgtagattacttggatgactgcc

SEQ ID NO: 68953 - DNA, 2216 bp, Zea Mays
ggagttgctctaatatatttattcagttatattgtagagacacatttgctagtagaaaaataaagtcaccaccaaccaaacactccaaaataaactgcttgcccacctaggcccatccacgcagcccaaaccagtttagagttcgaactccgttgggttcgtctcgttttggtcccacgttctcgcagctgacgccgccccgttcgcctccgtcgccgccgccatcgccaccgccgaaccatggagaccacggagccgtcgcgtggcaccaagcgccctctcaccgccactgcaggcgatgacgacgatgctggcctggagcgcaagccgcggttccctaaggggaagaaggccaagtaccgcgacgtcggtgcggagggaggcccctctggcaacgctgtggacctcgacagcatgctgaatccggagcttgcggcggagcggcgggcgcggcagcgccacgtccagctcaaggagggagacgacgcgaagggaggtgccgctgaggtgaagggcttcgaagtccgctacaacgacagtgttaactttgttgacgatggtatacggatagagccgtttaacttggagcgagaaagggaagaagggtatttcgatgagaatgggaactttgtggagtatgcaagaggcaatgagattaaggatgcttggttggacagtgtggaagttgacccaacatatgctgcaaaggttcagaacaaaggcaaagagaaagtagacgagtttgaggacctctcttccgatgacattgggaggctaaaaaggcagatagcaaacttgcttgagccaggagaaacgctgggtatgaacgtttggcacgtgctcgacttggtttgccagaagttgatggtgtctctgaagaccaaaaatataatcagacaccatcatctgcactggaaattgaccaaccatcatctgtactggaaatggaacttggtccctcgactgccaatgtatatacagccactgctgcaatcaatgatgatgacagtaacctggacatgtttggtgatgatgacaacgatgataccaaacatagttctgatgccaatactgtaggttcaggtttgaaacctggaacctcagatgtgaagaaagccgataatggaagtgtggactcagactatgtatacgatccttcttcaggttactactatagcagcagcacaggctattactatgaccctaactctggatattatggttctgcatctacgggaacctggtattcatacgatgagcaaactggaacatacaaagaaattcaggatgaacaaactggcacggttaaagaagagctgggagatgccatcaaggagtaaccgagttgctacggcccttctcgttcttgattgctgatgcaactgaggtagttcagaccgcccagtgttctttaaagcgaggcagcgagctgtagcttcagtttctcggtaggcgctttgggccacgactcgctaaactgccttgatagatgttttatgaagaaattaagaggaaaccagtcagatcatactataggttgtaaaccagaaagtgatcgactgcaactgtacaattgcaatattaccgttctcggcagaggcttgttttattagctactattcctgctatttctgtagaaatatgcaataacacccaattcctatgtgaagatgtgtttgaacttaacagatgagaacgttatgtttggtgtgattatgtctaaggctcgagagcgttcagattggtaaactaaatcgggcaacctgtgatcgttggagtctaagaccggcgcggggacagtcaggcagagaaaaggttcggaggttggagacgcttcagggttgttcaatcttactgtactctacaacctcttcccgaaaaggtgggaacaatattttagaccgacaacgtcttctcgggaacacggttaggccctgtttacctgtttcgacgccaaattctctcccctgtaaaaactacacttatttctgtaaatttcctgtaatatttttttttgtgaaatttctgtctcaaacaagcctatggatagttttttagctatacattggcgaagtatttgtttttatgttccaacatgtattcttttctttcttttgggaatgggctgcggccctgtattccggagctcagtaccacagaccacacacaataacacgagccagcttcagtaatcgtagattacttggatgactgcc

SEQ ID NO: 68954 - DNA, 2205 bp, Zea Mays
ggagttgctctaatatatttattcagttatattgtagagacacatttgctagtagaaaaataaagtcaccaccaaccaaacactccaaaataaactgcttgcccacctaggcccatccacgcagcccaaaccagtttagagttcgaactccgttgggttcgtctcgttttggtcccacgttctcgcagctgacgccgccccgttcgcctccgtcgccgccgccatcgccaccgccgaaccatggagaccacggagccgtcgcgtggcaccaagcgccctctcaccgccactgcaggcgatgacgacgatgctggcctggagcgcaagccgcggttccctaaggggaagaaggccaagtaccgcgacgtcggtgcggagggaggcccctctggcaacgctgtggacctcgacagcatgctgaatccggagcttgcggcggagcggcgggcgcggcagcgccacgtccagctcaaggagggagacgacgcgaagggaggtgccgctgaggtgaagggcttcgaagtccgctacaacgtatgcgctgcttctctgcttgcctcttttcccctgtttattaacattgacagcaaatgaatgctaggtgagctgtgttttggctctcaacaggacagtgttaactttgttgacgatggtatacggatagagccgtttaacttggagcgagaaagggaagaagggtatttcgatgagaatgggaactttgtggagtatgcaagaggcaatgagattaaggatgcttggttggacagtgtggaagttgacccaacatatgctgcaaaggttcagaacaaaggcaaagagaaagtagacgagtttgaggacctctcttccgatgacattgggaggctaaaaaggcagatagcaaacttgcttgagccaggagaaacgataatgcaagccttgaaaaggttgaagggtacatccacggataaacgtggaaagatggctgaggggactaaacgtatatttgatgaattgactgaagctgccatgaagctaatggagaacggcgattataatgtttactcagatgatcgtgagacctttgaacgcgaggctgctgggtatgaacgtttggcacgtgctcgacttggtttgccagaagttgatggtgtctctgaagaccaaaaatataatcagacaccatcatctgcactggaaattgaccaaccatcatctgtactggaaatggaacttggtccctcgactgccaatgtatatacagccactgctgcaatcaatgatgatgacagtaacctggacatgtttggtgatgatgacaacgatgataccaaacatagttctgatgccaatactgtaggttcaggtttgaaacctggaacctcagatgtgaagaaagccgataatggaagtgtggactcagactatgtatacgatccttcttcaggttactactatagcagcagcacaggctattactatgaccctaactctggatattatggttctgcatctacgggaacctggtattcatacgatgagcaaactggaacatacaaagaaattcaggatgaacaaactggcacggttaaagaagagctgggagatgccatcaaggagtaaccgagttgctacggcccttctcgttcttgattgctgatgcaactgaggtagttcagaccgcccagtgttctttaaagcgaggcagcgagctgtagcttcagtttctcggctcgagagcgttcagattggtaaactaaatcgggcaacctgtgatcgttggagtctaagaccggcgcggggacagtcaggcagagaaaaggttcggaggttggagacgcttcagggttgttcaatcttactgtactctacaacctcttcccgaaaaggtgggaacaatattttagaccgacaacgtcttctcgggaacacggttaggccctgtttacctgtttcgacgccaaattctctcccctgtaaaaactacacttatttctgtaaatttcctgtaatatttttttttgtgaaatttctgtctcaaacaagcctatggatagttttttagctatacattggcgaagtatttgtttttatgttccaacatgtattcttttctttcttttgggaatgggctgcggccctgtattccggagctcagtaccacagaccacacacaataacacgagccagcttcagtaatcgtagattacttggatgactgcc

SEQ ID NO: 68955 - DNA, 1259 bp, Zea Mays
ctctgctcatcaactactagagtctagactcctgtataagcgcaaaagacagttgtggggggtttctggtgggtggggttcatggtcatggcgcagccgccggaggagcatcatgagcaggagaagcaagccagcaagggggagtacgacccgccgaacgataagctgattgagatgatggccagatgaagtagttcatataatcagttcctgtgaaactcggagatcaatgcagcttcttggagatgccatgctgcaatggatgtcacataatcagatgaggtaccttctgtcggattcgaaaagattaaaagtgctgcaggctttcataatgagctctcctccggatattgctcagttcattctcaaagctgttgctcaaaattgtacaagacttgcatatcaaccagatggactgagcctactgcaaaattgcctagagcgtgtcagccggaagcaaaaggatgatatttttacccaactctcttatcagagtcttttccttgctcaaaattccagaggaaactggatcgttcaggacgttctgcggaagggagatccttctcacgttgaaataattgcttcctgccttagaaatcattatgtgacactcgcgaaaaataagtatagcagcaatgtcgttgagtggtgtttaagggtattccacgaaggagagagatcagttattatatgtgaattcattaactatcctcacttcagagatctggtgacagatgagtttgctaattttgcactctctactgctcttcagacatgtgagattcctctccgaaacgttctggcaaatgccatcctttcccaaaatatcaccgtacggaatcaacactgtatgaagatctttagcacattagccaaatatgggtttatgtaacagaatcttttgaggggattttgaagtagcacattgcaattgagcagatgattttctactactctggtccttttcttttgggcgtctgcagatgttgtgaagacgtgaagtaggtaccaggtgtacgttcgaaccattttgtgcttgtggattttgtggattgtggcatgtgttatctttgtggttagctacatgttgttaagtgtcatatgtgtaagtgaatattcagttatgttgctagttgtgattatcttaatgctttattttaagagattgatgcctcgagatcttgttagaaatttctgtcgctgatgcaatcaagaacatttcattaatttaacttttaattgctgaatatagtttttat

SEQ ID NO: 68956 - DNA, 1116 bp, Zea Mays
taggagaaaaagagagaactgttgaagggttcaaaatgccagatgaagtagttcatataatcagttcctgtgaaactcggagatcaatgcagcttcttggagatgccatgctgcaatggatgtcacataatcagatgaggtaccttctgtcggattcgaaaagattaaaagtgctgcaggctttcataatgagctctcctccggatattgctcagttcattctcaaagctgttgctcaaaattgtacaagacttgcatatcaaccagatggactgagcctactgcaaaattgcctagagcgtgtcagccggaagcaaaaggatgatatttttacccaactctcttatcagagtcttttccttgctcaaaattccagaggaaactggatcgttcaggacgttctgcggaagggagatccttctcacgttgaaataattgcttcctgccttagaaatcattatgtgacactcgcgaaaaataagtatagcagcaatgtcgttgagtggtgtttaagggtattccacgaaggagagagatcagttattatatgtgaattcattaactatcctcacttcagagatctggtgacagatgagtttgctaattttgcactctctactgctcttcagacatgtgagattcctctccgaaacgttctggcaaatgccatcctttcccaaaatatcaccgtacggaatcaacactgtatgaagatctttagcacattagccaaatatgggtttatgtaacagaatcttttgaggggattttgaagtagcacattgcaattgagcagatgattttctactactctggtccttttcttttgggcgtctgcagatgttgtgaagacgtgaagtaggtaccaggtgtacgttcgaaccattttgtgcttgtggattttgtggattgtggcatgtgttatctttgtggttagctacatgttgttaagtgtcatatgtgtaagtgaatattcagttatgttgctagttgtgattatcttaatgctttattttaagagattgatgcctcgagatcttgttagaaatttctgtcgctgatgcaatcaagaacatttcattaatttaacttttaattgctgaatatagtttttat

SEQ ID NO: 68957 - DNA, 2369 bp, Zea Mays
cacaaacaaacccaagccctaagttatccagcttgaaggactaaaaagcccaatcgagcccagcagcaaggccttcgttccccttccggtcttcttgttcctcgcttccgtccactcgccattttcctcgcactcgcacacatcgacgtggtctccgcgccgccgcacccccatcacagccaaccagcacctccgatccatcctccaaaccctattaccaccgctcccgccgcccccgactcgcgctcggatggcagggcaaccccgcgagcgtggtagccgctcgtcccggaagggccggtccgcccgcgcggggcttgcacaggcgcccccgccggcctccgatcccgatctgaccgtcggagaggatgccgcgccgtggctccgcgccacggcggacgagcttgaggagcgcctgctgaagaggctggatgaggcgtacgcggcggccctggcccgcctcgccgacctcggccacggcgaggaggcatccctcgaggccgttctccactcgggccactgttacggcaagctcaacgatcccgtttccaacatcgtggccaacgcccgcgcctacctctccgatcctggccacgccagcgcggccggcggcttcgccgacctccgacgcctcgaggaatactccctcgcggggcttgtctgcctcctccagagcagccgccctaccctcacccgcgccgaggccttgtggtgccttctctccagtgacctccgtattgaagaggcgatcgccataagcagctctttcaatggtgaaccctcatctattgctgagagtgaggagcacctcccagccgtggcagagaccgcacagcgtggatacatccactatcataacaccacagccacagctgctcaggaccccactctttttgacccagaagccttcatgagacttgcgatatgccagggtcccgctgcagccaccatctcctgcctgaaggccgccgggtggtcacgatctagtggcgccgcaccagaagggcagcccagggaatcgtttaccaagaagctctccactgaggaactcatcgagtctgttgttgcggagcttgaggcactggacattgacaagaaggatccaccagatgcgaaccctgacccaaagaaccagatggcgcgtgaactcattaagcagacaagagagatggagacgcagcttaaggagcgaaaggaatgggcacagggaaaggcgatacaggctgctcgcaagcttggtgctgatcttactgagctgcgtgtgctgcggatggaacatgatgagaaccagcggcgtaagaaggaaaaacaggtgatggaggatgacacaatgaagcgccttgctcatctggagaatgagctgaagaaaaagagtgggcagcttgacaggagtaatgcaacagttcagaggctggaaatggagaatgcagagatacgtgctgagatggaagctgcaaaactgagtgcatcagagactgaaaaacaatgccagggtctcttaaggaaagagaagaaggatagcaaaaggcttgaagtctgggagcgccagaaagcgaagctgaaggaggacattgctgaatgcaagacaaatattacacaagctgaaagggagcttgctgaggtcaacaaggcaataaaaaatatggagaagaagatgcgagaagacacaagggtcaaagaagaaaacatggtgcttttggaagatgagcgcaggaagaaggaagctgcaaaagcagacaatgaccgccgacttgaagagcttcgtcgcaagaaagaagtcgaatccgagtgctacaaggatgacctacacaggctccaggatgaactcagccgcctgcagaagtcagcaggcagccaagcagcaggccatcctgcggccacaacctgcatctaaccggtcgctgccaccaccagcccagaagccaagccgccgccgggactgtgttgcctgcaagaaggcggcggcgtgtgtgatcctactccagtgtgcccaccaggtcctctgtgttggctgcaataagctgcatgaagataaaggcatcactcgctgcccctgctgcagcgctgaagtcgaagagagaatcagggttttcggagcgagctccaactgaggcaccaggtcggggtgaactgcaacttgtggttgagttttcctttttcttttacctccgttaatgtgaagaaagggttatagccttataggtgtcgcctgagcggttatactttgctacagcatccatgcatgattgcttagctgaattgcgacttatcttgggtattatatgagtataatcgagacctttctggagacaggcaatgatgcttagtctggatttattctctatatttcctcttctttttttcttgct

SEQ ID NO: 68958 - DNA, 2365 bp, Zea Mays
cacaaacaaacccaagccctaagttatccagcttgaaggactaaaaagcccaatcgagcccagcagcaaggccttcgttccccttccggtcttcttgttcctcgcttccgtccactcgccattttcctcgcactcgcacacatcgacgtggtctccgcgccgccgcacccccatcacagccaaccagcacctccgatccatcctccaaaccctattaccaccgctcccgccgcccccgactcgcgctcggatggcagggcaaccccgcgagcgtggtagccgctcgtcccggaagggccggtccgcccgcgcggggcttgcacaggcgcccccgccggcctccgatcccgatctgaccgtcggagaggatgccgcgccgtggctccgcgccacggcggacgagcttgaggagcgcctgctgaagaggctggatgaggcgtacgcggcggccctggcccgcctcgccgacctcggccacggcgaggaggcatccctcgaggccgttctccactcgggccactgttacggcaagctcaacgatcccgtttccaacatcgtggccaacgcccgcgcctacctctccgatcctggccacgccagcgcggccggcggcttcgccgacctccgacgcctcgaggaatactccctcgcggggcttgtctgcctcctccagagcagccgccctaccctcacccgcgccgaggccttgtggtgccttctctccagtgacctccgtattgaagaggcgatcgccataagcagctctttcaatggtgaaccctcatctattgctgagagtgaggagcacctcccagccgtggcagagaccgcacagcgtggatacatccactatcataacaccacagccacagctgctcaggaccccactctttttgacccagaagccttcatgagacttgcgatatgccagggtcccgctgcagccaccatctcctgcctgaaggccgccgggtggtcacgatctagtggcgccgcaccagaagggcagcccagggaatcgtttaccaagaagctctccactgaggaactcatcgagtctgttgttgcggagcttgaggcactggacattgacaagaaggatccaccagatgcgaaccctgacccaaagaaccagatggcgcgtgaactcattaagcagacaagagagatggagacgcagcttaaggagcgaaaggaatgggcacagggaaaggcgatacaggctgctcgcaagcttggtgctgatcttactgagctgcgtgtgctgcggatggaacatgatgagaaccagcggcgtaagaaggaaaaacaggtgatggaggatgacacaatgaagcgccttgctcatctggagaatgagctgaagaaaaagagtgggcagcttgacaggagtaatgcaacagttcagaggctggaaatggagaatgcagagatacgtgctgagatggaagctgcaaaactgagtgcatcagagactgaaaaacaatgccagggtctcttaaggaaagagaagaaggatagcaaaaggcttgaagtctgggagcgccagaaagcgaagctgaaggaggacattgctgaatgcaagacaaatattacacaagctgaaagggagcttgctgaggtcaacaaggcaataaaaaatatggagaagaagatgcgagaagacacaagggtcaaagaagaaaacatggtgcttttggaagatgagcgcaggaagaaggaagctgcaaaagcagacaatgaccgccgacttgaagagcttcgtcgcaagaaagaagtcgaatccgagtgctacaaggatgacctacacaggctccaggatgaactcagccgcctgcagaagtcagcagccaagcagcaggccatcctgcggccacaacctgcatctaaccggtcgctgccaccaccagcccagaagccaagccgccgccgggactgtgttgcctgcaagaaggcggcggcgtgtgtgatcctactccagtgtgcccaccaggtcctctgtgttggctgcaataagctgcatgaagataaaggcatcactcgctgcccctgctgcagcgctgaagtcgaagagagaatcagggttttcggagcgagctccaactgaggcaccaggtcggggtgaactgcaacttgtggttgagttttcctttttcttttacctccgttaatgtgaagaaagggttatagccttataggtgtcgcctgagcggttatactttgctacagcatccatgcatgattgcttagctgaattgcgacttatcttgggtattatatgagtataatcgagacctttctggagacaggcaatgatgcttagtctggatttattctctatatttcctcttctttttttcttgct

SEQ ID NO: 68959 - DNA, 1425 bp, Zea Mays
tattatatcatcgtacaagtttcttggtgatgtcacagttaatgatgtgtgaagggctgaaacacatgcacagctttgatcctccatacgctcataatgatgttaagcctggtaatgttcttataacctggcgtaaaggacaagcacctgttgcaactttaatggattttggaagtgcaaggcctgcaagaaaggaaatccgttctcgttctgaggcactacagttgcaggaatgggccgctgagcattgctctgctccttaccgggcccctgaattatgggactgcccaagccatgccgatattgatgagaggacagacatctggtctctaggatgcactctttttgctatcatgtacaatgtttcaccatttgagtatgctcttggtgaatctggaggaagtctgcaacttgccattgtaaacgggcagttgaaatggccagcaggacccaaacctccttatcctgatgagcttcgccattttgttatctggatgcttcaacctgaagctgtaatgcgccctcacatttctgatgtggttcttcatgttgacaagctcattgcaaaatacttgccctagatcaccctggagttcctctcatttctttgttatacagtacagagccaatatgatgtaaaattggcccatgcttgacgtcattcagtccttggataggctcaatattgattcttttgtagaactttcaggatattacatcagtctaatgtctgtggatctttgatactcatggagtcacggtgtcatgtaaaaatgtcaaactgaacatcaaagcagctatatgatatccttgcacttgggctacttctctgtgctcttattaaaataataggagaaataacagtacatagtgtcacattcttgttgtgaacttcccaagactcccatttacatcataatggatgatacaccaagtaatcaactaagctgatgtagcaaattacatgatttgaaatcaaatcaactgtctagttacaagaatggatgaacaagcgattattctgtatcttttacaaacgacggttgactgggaaaaaaatacaattcacttctgttttcatgcaaacatccaagagcacagacggcttcagtggcaactcgcaaatgatagttgtcatctttgatgctgaaagaatgatatgatctaataaaatctaatatctgcaaatcttctttagaaggaaaaaggtggtttcagaaggtgtgccttgctgtaggtatcacacaacatagttcttcagttaagcattcaacctaaaaagttaatcttcatgttcctcttcgccttcagaatctgcgcaacagtatattgtttttagtaaacaagaagatgctgctgacgtaaaacatctaacaccatgatggaaaaaagagacaatggtcactgaccggatcgaacatcatc

SEQ ID NO: 68960 - DNA, 500 bp, Zea Mays
gcaggaggctggagtcattgtctttgtccgcgtggacgcggctgacttgcgaacccaccggaccaaccaggacttggagcgtgcggcgtcggagttcgccggcggtgaggagcagaagaggaagggaaccaaagatgggctgctccatctcggggctcaacgcgctctacgatgcggccacgggcggcggcgacgtctggatcaacgagcgccgcttccgcgtccttcgccagatcggcgagggcgggttcgccttcgtctacctcgtcagagagcaccagcccgcctccgatgccgcgttcgctaggcgtgaccccgcccacgtctcagaggatggaacgtatgccatgaagaaggtgctgatacagagcaaggagcagttggatctggtgagggaggagatccgtgtgtcgtccttattcaatcaccccaaccttctgccgcttcttgatcatgccataatagccgtgaaggctctagaggctaaaagcaggggaggc

SEQ ID NO: 68961 - DNA, 227 bp, Zea Mays
ctgcagccgagggcaataactcacgctgggcccagaagaggtcgtgtcatggtgctccttcccccttttgccctaggcctgggcgatttccacgtggtgaacaatgacgacgtgtgccagagagatgggaaggcacgtggggcagacgccggtagtgagactgtacgaggtgatggacacgctccatcttctcccctcccctctcctcccacctacatcctctgtat

SEQ ID NO: 68962 - DNA, 2347 bp, Zea Mays
cacccacccatccaagcttccgtttctcgttctctccccccaccacaccacgaccccttccaaaacaacaaacagaaccgaagccgactagcgcgaccgaggaggcagagacgggtggaggaaaagggcaaagtcgccgcccgccgcccgccgctgatcggtcggtgagcccgatgcgctgtaccgctcggcctcgtcgtgttccgccgcgctgatctccgcctcccgcgacgcccgattccagaggatcgcttcttcggtttggccggccggtaggtgcgtggggggttcaggaggcggggtctcggcggctgcaatgcatgctcgcatctcgtggcggcgtttcatcgcttcggtccgtttgtttttcggcttgttgcgctgaaattgagcgattcgtttccttgattcaaggactactagtggggcgggggcatcctgcgtggtggctctggctgtctggtctgtatctgtatgatagtgggcgttggcagttgtgccgtcccggctagctgcggacttgtcttggcctagcagggaagtgatggagcacaagaaagctagagcagtggaggatcctgcccggttgatttgcgacgatgccctcaccgaggtattccgcaggctgcctgcccgtgcgctcgcggcctgcagactggtgtgcaagtcatggatgtccgtgctcacagatccacacttcatccatgagcacctgagccgtggccagcagaagctgctgctctttgcgactgacaggggaaacgacaggtcgctcgccatggtgctcgcggacaacaacgcatccatgtaccagctgtcaaggcccgcggcgtctcggagcgtcttcgtgcacaattcttgcaatggcctgctctgcctaggtgacagcacaggagctgtcgaggtgctgaacccaacgactggtgaatctttaatgttgccgatgccaatgtacacggcagggagcagccagttctcgtcctgcaattggcactgcttggggttttgcccacaaaaaagggaacacaaggtggtgcatttctatccaggagctcacaatgacccgttcaaggtacactgtgagatatacacgattggagtcggtgtctggagacaagttgggagctgtcatggtgctccgactgacagaggggtgcatgtgaatgggatggtatactatctgacaaagttccgctacattgcttcatcgcgtatcaactgcttgaatcttgagagcgaaaaatttgatgtgatgatgcttcctccacacaaatcttatggaggtcattgctctttggcagagcttgagggaaagctatgcttgttgattgtcgatggtgcattggaaggtccgcctcgtacaatggacatactgatgctcaatagccatgataagcagggctggactcacagataccacttctccttgccttggttgatgccttcatgttattttactccgaaacacacactcttccacggtggaaaaatttgggtgcagttgttggctaggaatctatattgttttgacccaagttcaagttcagaagaactgacaacagcctggccagagcttgacttttcctttagcacacatactttcattgagagcatagttcctctgcgtaaagactactacttcaagcagatacagtgacagtggtgtgctgccccttgctttcaaggaccaactttgcttcgagttaagcaacaaaggtgataataaagcaaaagataaacatcttaattcaggcaagcacatagatcatacgaaggtcaaagttgttacatcacctttattctatgcccaaaagcttcatcaatgaagacacaatatgaagcctcaaaccacatgaagtctcacctacgaagactttgtatgaagcattaggagatatgaagcttcctaagaaaggcgatatcttcctacaattaagcaaagccacgaaagagtctttgccagaggtgaagacgtgcctgtgaagactggtcaccgacaagaattcaagcattgataaagatggaaacaaaccaaattgcccttgaatgggcaaacgattgtaactttatagtacagggtagttaggactttacagaagtgctaaaaggtgcccctataaatacccctgacatgtactatttatagacatgacatattttactgcaatttacctgtcggttaattcttccccaacatgtggtgcccaactgtttgtgtgcattcgctaacaccgcgcatgaccacaaacataatgtttagactcacgaagaagtgtgaagaagacaacacctagtgtaaatgaaaacaattttccccacaaaatgaaaactaagggcctgtttggat

SEQ ID NO: 68963 - DNA, 4034 bp, Zea Mays
cacccacccatccaagcttccgtttctcgttctctccccccaccacaccacgaccccttccaaaacaacaaacagaaccgaagccgactagcgcgaccgaggaggcagagacgggtggaggaaaagggcaaagtcgccgcccgccgcccgccgctgatcggtcggtgagcccgatgcgctgtaccgctcggcctcgtcgtgttccgccgcgctgatctccgcctcccgcgacgcccgattccagaggatcgcttcttcggtttggccggccggactactagtggggcgggggcatcctgcgtggtggctctggctgtctggtctgtatctgtatgatagtgggcgttggcagttgtgccgtcccggctagctgcggacttgtcttggcctagcagggaagtgatggagcacaagaaagctagagcagtggaggatcctgcccggttgatttgcgacgatgccctcaccgaggtattccgcaggctgcctgcccgtgcgctcgcggcctgcagactggtgtgcaagtcatggatgtccgtgctcacagatccacacttcatccatgagcacctgagccgtggccagcagaagctgctgctctttgcgactgacaggggaaacgacaggtcgctcgccatggtgctcgcggacaacaacgcatccatgtaccagctgtcaaggcccgcggcgtctcggagcgtcttcgtgcacaattcttgcaatggcctgctctgcctaggtgacagcacaggagctgtcgaggtgctgaacccaacgactggtgaatctttaatgttgccgatgccaatgtacacggcagggagcagccagttctcgtcctgcaattggcactgcttggggttttgcccacaaaaaagggaacacaaggtggtgcatttctatccaggagctcacaatgacccgttcaaggtacactgtgagatatacacgattggagtcggtgtctggagacaagttgggagctgtcatggtgctccgactgacagaggggtgcatgtgaatgggatggtatactatctgacaaagttccgctacattgcttcatcgcgtatcaactgcttgaatcttgagagcgaaaaatttgatgtgatgatgcttcctccacacaaatcttatggaggtcattgctctttggcagagcttgagggaaagctatgcttgttgattgtcgatggtgcattggaaggtccgcctcgtacaatggacatactgatgctcaatagccatgataagcagggctggactcacagataccacttctccttgccttggttgatgccttcatgttattttactccgaaacacacactcttccacggtggaaaaatttgggtgcagttgttggctaggaatctatattgttttgacccaagttcaagttcagaagaactgacaacagcctggccagagcttgacttttcctttagcacacatactttcattgagagcatagttcctctgcgtaaagactactacttcaagcagatacagtgacagtggtgtgctgccccttgctttcaaggtggttctcagtttacatctttacattatcttttatcttatcgtttcttttttcttatatgaacgaccaagctgttacgtgttagtcagcttaagatggtgtgctgttctggattctaattagcgataataattgcaatttccagacatcttaactactcattcttctagattttaattgatctggccatttctctttatgctgagaagttgataggccaagttcagaggatcatttcattagttcttatttcacagcttaggtgattattgatgtaaacactgaacctgtattttatactgcctccgaaaagtttcttgtaatctgatgggatataaattaaaaagtatatgaataccgtgtgatgttttctgctacacttcaacacttcgttgataacaaattttctagctgtgcctgttaaaagtctatgaataccgtgcatctgatgaaattagtatttgcatggaaatattttctttctaggtagatgaagttcaatacctggaatagtatctgaagaattgttggctagctgcatcatttgctgtgatgctcactatgcacgtacagttacttccttggacttggagtattctttacaaacatgattttttttccgtaattgctatcggtttgttctgattttccttatgagctttttattacttccttgactcagatgtgctttgcttttcaaaaattgctgccccagatatcttatttaaaattgttagtatggaacactgccatttgttctgtttttcatgctctagtgttgaaggaaaatacttttctagtttgggtcatattcggggataaattggctaagaagcttgaaaaagatatttctgaaccacaaactccacaaggtatccaattatccacctatccacattagctcgtgctgcttccagttaaaggcctgctttaaaattgtactctctgagtcaaattatatatctgtaatatgttaatatttctattgctctttcagaagtagaaagtcttcttactttgtttgcacagatatctggaacctttctgttcttgttatgaatataccgaacctagagctcagttttggtagtgtgtcaatctggtttgtgctttcagaagatgtttaaaggtcacaataataatgtatcaactatcaactaggtgatttctcacgcaaactctggatgatcgaaattatattgatttggtatgcatattgttgcatcaatttataggggtgttttatggaagagaagacaaaaaaaaaacattatgagtgatcatgttgcaaaatttattttagaatttacatgcaaatttggaatgtaacaatcgcaaaaaaacaatgaatcgacacatattgagctggaatttctacgtgaattgcttctctcaatcgataaaattgccggtctttggaacacagcttgcaaacctcaacatggtccattgctcaagcgtagcactatacatttctttctacttttctttttgaagcatctatgcatttcaatttcactgattccatatggggccctgttggcacttcatgtactgccaaaataattgagtaatctttcaagaaccacatgtggacatggatatgttgatttcataccagtatcacagtatgaactcggaagtacatgttttagctcatttgttggaatttgaaatgaaagattataaatgagcaaatttaacatgatataagataagtaataaaaaaccatgtccaacacgttggggtttcaccataggtaaacacccccatattttgaagctaatgaatagtctttctttgttttaaatttgctttcacctttcaggaccaactttgcttcgagttaagcaacaaaggtgataataaagcaaaagataaacatcttaattcaggcaagcacatagatcatacgaaggtcaaagttgttacatcacctttattctatgcccaaaagcttcatcaatgaagacacaatatgaagcctcaaaccacatgaagtctcacctacgaagactttgtatgaagcattaggagatatgaagcttcctaagaaaggcgatatcttcctacaattaagcaaagccacgaaagagtctttgccagaggtgaagacgtgcctgtgaagactggtcaccgacaagaattcaagcattgataaagatggaaacaaaccaaattgcccttgaatgggcaaacgattgtaactttatagtacagggtagttaggactttacagaagtgctaaaaggtgcccctataaatacccctgacatgtactatttatagacatgacatattttactgcaatttacctgtcggttaattcttccccaacatgtggtgcccaactgtttgtgtgcattcgctaacaccgcgcatgaccacaaacataatgtttagactcacgaagaagtgtgaagaagacaacacctagtgtaaatgaaaacaattttccccacaaaatgaaaactaagggcctgtttggat

SEQ ID NO: 68964 - DNA, 3217 bp, Zea Mays
cccacccacccatccaagcttccgtttctcgttctctccccccaccacaccacgaccccttccaaaacaacaaacagaaccgaagccgactagcgcgaccgaggaggcagagacgggtggaggaaaagggcaaagtcgccgcccgccgcccgccgctgatcggtcggtgagcccgatgcgctgtaccgctcggcctcgtcgtgttccgccgcgctgatctccgcctcccgcgacgcccgattccagaggatcgcttcttcggtttggccggccggtgcgtggggggttcaggaggcggggtctcggcggctgcaatgcatgctcgcatctcgtggcggcgtttcatcgcttcggtccgtttgtttttcggcttgttgcgctgaaattgagcgattcgtttccttgattcaaggactactagtggggcgggggcatcctgcgtggtggctctggctgtctggtctgtatctgtatgatagtgggcgttggcagttgtgccgtcccggctagctgcggacttgtcttggcctagcagggaagtgatggagcacaagaaagctagagcagtggaggatcctgcccggttgatttgcgacgatgccctcaccgaggtattccgcaggctgcctgcccgtgcgctcgcggcctgcagactggtgtgcaagtcatggatgtccgtgctcacagatccacacttcatccatgagcacctgagccgtggccagcagaagctgctgctctttgcgactgacaggggaaacgacaggtcgctcgccatggtgctcgcggacaacaacgcatccatgtaccagctgtcaaggcccgcggcgtctcggagcgtcttcgtgcacaattcttgcaatggcctgctctgcctaggtgacagcacaggagctgtcgaggtgctgaacccaacgactggtgaatctttaatgttgccgatgccaatgtacacggcagggagcagccagttctcgtcctgcaattggcactgcttggggttttgcccacaaaaaagggaacacaaggtggtgcatttctatccaggagctcacaatgacccgttcaaggtacactgtgagatatacacgattggagtcggtgtctggagacaagttgggagctgtcatggtgctccgactgacagaggggtgcatgtgaatgggatggtatactatctgacaaagttccgctacattgcttcatcgcgtatcaactgcttgaatcttgagagcgaaaaatttgatgtgatgatgcttcctccacacaaatcttatggaggtcattgctctttggcagagcttgagggaaagctatgcttgttgattgtcgatggtgcattggaaggtccgcctcgtacaatggacatactgatgctcaatagccatgataagcagggctggactcacagataccacttctccttgccttggttgatgccttcatgttattttactccgaaacacacactcttccacggtggaaaaatttgggtgcagttgttggctaggaatctatattgttttgacccaagttcaagttcagaagaactgacaacagcctggccagagcttgacttttcctttagcacacatactttcattgagagcatagttcctctgcgtaaagactactacttcaagcagatacagtgacagtggtgtgctgccccttgctttcaaggtggttctcagtttacatctttacattatcttttatcttatcgtttcttttttcttatatgaacgaccaagctgttacgtgttagtcagcttaagatggtgtgctgttctggattctaattagcgataataattgcaatttccagacatcttaactactcattcttctagattttaattgatctggccatttctctttatgctgagaagttgataggccaagttcagaggatcatttcattagttcttatttcacagcttaggtgattattgatgtaaacactgaacctgtattttatactgcctccgaaaagtttcttgtaatctgatgggatataaattaaaaagtatatgaataccgtgtgatgttttctgctacacttcaacacttcgttgataacaaattttctagctgtgcctgttaaaagtctatgaataccgtgcatctgatgaaattagtatttgcatggaaatattttctttctaggtagatgaagttcaatacctggaatagtatctgaagaattgttggctagctgcatcatttgctgtgatgctcactatgcacgtacagttacttccttggacttggagtattctttacaaacatgattttttttccgtaattgctatcggtttgttctgattttccttatgagctttttattacttccttgactcagatgtgctttgcttttcaaaaattgctgccccagatatcttatttaaaattgttagtatggaacactgccatttgttctgtttttcatgctctagtgttgaaggaaaatacttttctagtttgggtcatattcggggataaattggctaagaagcttgaaaaagatatttctgaaccacaaactccacaaggaccaactttgcttcgagttaagcaacaaaggtgataataaagcaaaagataaacatcttaattcaggcaagcacatagatcatacgaaggtcaaagttgttacatcacctttattctatgcccaaaagcttcatcaatgaagacacaatatgaagcctcaaaccacatgaagtctcacctacgaagactttgtatgaagcattaggagatatgaagcttcctaagaaaggcgatatcttcctacaattaagcaaagccacgaaagagtctttgccagaggtgaagacgtgcctgtgaagactggtcaccgacaagaattcaagcattgataaagatggaaacaaaccaaattgcccttgaatgggcaaacgattgtaactttatagtacagggtagttaggactttacagaagtgctaaaaggtgcccctataaatacccctgacatgtactatttatagacatgacatattttactgcaatttacctgtcggttaattcttccccaacatgtggtgcccaactgtttgtgtgcattcgctaacaccgcgcatgaccacaaacataatgtttagactcacgaagaagtgtgaagaagacaacacctagtgtaaatgaaaacaattttccccacaaaatgaaaactaagggcctgtttggat

SEQ ID NO: 68965 - DNA, 4186 bp, Zea Mays
acccccgcggcacccacccacccatccaagcttccgtttctcgttctctccccccaccacaccacgaccccttccaaaacaacaaacagaaccgaagccgactagcgcgaccgaggaggcagagacgggtggaggaaaagggcaaagtcgccgcccgccgcccgccgctgatcggtcggtgagcccgatgcgctgtaccgctcggcctcgtcgtgttccgccgcgctgatctccgcctcccgcgacgcccgattccagaggatcgcttcttcggtttggccggccggtgcgtggggggttcaggaggcggggtctcggcggctgcaatgcatgctcgcatctcgtggcggcgtttcatcgcttcggtccgtttgtttttcggcttgttgcgctgaaattgagcgattcgtttccttgattcaaggactactagtggggcgggggcatcctgcgtggtggctctggctgtctggtctgtatctgtatgatagtgggcgttggcagttgtgccgtcccggctagctgcggacttgtcttggcctagcagggaagtgatggagcacaagaaagctagagcagtggaggatcctgcccggttgatttgcgacgatgccctcaccgaggtattccgcaggctgcctgcccgtgcgctcgcggcctgcagactggtgtgcaagtcatggatgtccgtgctcacagatccacacttcatccatgagcacctgagccgtggccagcagaagctgctgctctttgcgactgacaggggaaacgacaggtcgctcgccatggtgctcgcggacaacaacgcatccatgtaccagctgtcaaggcccgcggcgtctcggagcgtcttcgtgcacaattcttgcaatggcctgctctgcctaggtgacagcacaggagctgtcgaggtgctgaacccaacgactggtgaatctttaatgttgccgatgccaatgtacacggcagggagcagccagttctcgtcctgcaattggcactgcttggggttttgcccacaaaaaagggaacacaaggtggtgcatttctatccaggagctcacaatgacccgttcaaggtacactgtgagatatacacgattggagtcggtgtctggagacaagttgggagctgtcatggtgctccgactgacagaggggtgcatgtgaatgggatggtatactatctgacaaagttccgctacattgcttcatcgcgtatcaactgcttgaatcttgagagcgaaaaatttgatgtgatgatgcttcctccacacaaatcttatggaggtcattgctctttggcagagcttgagggaaagctatgcttgttgattgtcgatggtgcattggaaggtccgcctcgtacaatggacatactgatgctcaatagccatgataagcagggctggactcacagataccacttctccttgccttggttgatgccttcatgttattttactccgaaacacacactcttccacggtggaaaaatttgggtgcagttgttggctaggaatctatattgttttgacccaagttcaagttcagaagaactgacaacagcctggccagagcttgacttttcctttagcacacatactttcattgagagcatagttcctctgcgtaaagactactacttcaagcagatacagtgacagtggtgtgctgccccttgctttcaaggtggttctcagtttacatctttacattatcttttatcttatcgtttcttttttcttatatgaacgaccaagctgttacgtgttagtcagcttaagatggtgtgctgttctggattctaattagcgataataattgcaatttccagacatcttaactactcattcttctagattttaattgatctggccatttctctttatgctgagaagttgataggccaagttcagaggatcatttcattagttcttatttcacagcttaggtgattattgatgtaaacactgaacctgtattttatactgcctccgaaaagtttcttgtaatctgatgggatataaattaaaaagtatatgaataccgtgtgatgttttctgctacacttcaacacttcgttgataacaaattttctagctgtgcctgttaaaagtctatgaataccgtgcatctgatgaaattagtatttgcatggaaatattttctttctaggtagatgaagttcaatacctggaatagtatctgaagaattgttggctagctgcatcatttgctgtgatgctcactatgcacgtacagttacttccttggacttggagtattctttacaaacatgattttttttccgtaattgctatcggtttgttctgattttccttatgagctttttattacttccttgactcagatgtgctttgcttttcaaaaattgctgccccagatatcttatttaaaattgttagtatggaacactgccatttgttctgtttttcatgctctagtgttgaaggaaaatacttttctagtttgggtcatattcggggataaattggctaagaagcttgaaaaagatatttctgaaccacaaactccacaaggtatccaattatccacctatccacattagctcgtgctgcttccagttaaaggcctgctttaaaattgtactctctgagtcaaattatatatctgtaatatgttaatatttctattgctctttcagaagtagaaagtcttcttactttgtttgcacagatatctggaacctttctgttcttgttatgaatataccgaacctagagctcagttttggtagtgtgtcaatctggtttgtgctttcagaagatgtttaaaggtcacaataataatgtatcaactatcaactaggtgatttctcacgcaaactctggatgatcgaaattatattgatttggtatgcatattgttgcatcaatttataggggtgttttatggaagagaagacaaaaaaaaaacattatgagtgatcatgttgcaaaatttattttagaatttacatgcaaatttggaatgtaacaatcgcaaaaaaacaatgaatcgacacatattgagctggaatttctacgtgaattgcttctctcaatcgataaaattgccggtctttggaacacagcttgcaaacctcaacatggtccattgctcaagcgtagcactatacatttctttctacttttctttttgaagcatctatgcatttcaatttcactgattccatatggggccctgttggcacttcatgtactgccaaaataattgagtaatctttcaagaaccacatgtggacatggatatgttgatttcataccagtatcacagtatgaactcggaagtacatgttttagctcatttgttggaatttgaaatgaaagattataaatgagcaaatttaacatgatataagataagtaataaaaaaccatgtccaacacgttggggtttcaccataggtaaacacccccatattttgaagctaatgaatagtctttctttgttttaaatttgctttcacctttcaggaccaactttgcttcgagttaagcaacaaaggtgataataaagcaaaagataaacatcttaattcaggcaagcacatagatcatacgaaggtcaaagttgttacatcacctttattctatgcccaaaagcttcatcaatgaagacacaatatgaagcctcaaaccacatgaagtctcacctacgaagactttgtatgaagcattaggagatatgaagcttcctaagaaaggcgatatcttcctacaattaagcaaagccacgaaagagtctttgccagaggtgaagacgtgcctgtgaagactggtcaccgacaagaattcaagcattgataaagatggaaacaaaccaaattgcccttgaatgggcaaacgattgtaactttatagtacagggtagttaggactttacagaagtgctaaaaggtgcccctataaatacccctgacatgtactatttatagacatgacatattttactgcaatttacctgtcggttaattcttccccaacatgtggtgcccaactgtttgtgtgcattcgctaacaccgcgcatgaccacaaacataatgtttagactcacgaagaagtgtgaagaagacaacacctagtgtaaatgaaaacaattttccccacaaaatgaaaactaagggcctgtttggat

SEQ ID NO: 68966 - DNA, 2460 bp, Zea Mays
cctaccgcgtcgacacggcgatacccccgcggcacccacccacccatccaagcttccgtttctcgttctctccccccaccacaccacgaccccttccaaaacaacaaacagaaccgaagccgactagcgcgaccgaggaggcagagacgggtggaggaaaagggcaaagtcgccgcccgccgcccgccgctgatcggtcggtgagcccgatgcgctgtaccgctcggcctcgtcgtgttccgccgcgctgatctccgcctcccgcgacgcccgattccagaggatcgcttcttcggtttggccggccggtgcgtggggggttcaggaggcggggtctcggcggctgcaatgcatgctcgcatctcgtggcggcgtttcatcgcttcggtccgtttgtttttcggcttgttgcgctgaaattgagcgattcgtttccttgattcaaggactactagtggggcgggggcatcctgcgtggtggctctggctgtctggtctgtatctgtatgatagtgggcgttggcagttgtgccgtcccggctagctgcggacttgtcttggcctagcagggaagtgatggagcacaagaaagctagagcagtggaggatcctgcccggttgatttgcgacgatgccctcaccgaggtattccgcaggctgcctgcccgtgcgctcgcggcctgcagactggtgtgcaagtcatggatgtccgtgctcacagatccacacttcatccatgagcacctgagccgtggccagcagaagctgctgctctttgcgactgacaggggaaacgacaggtcgctcgccatggtgctcgcggacaacaacgcatccatgtaccagctgtcaaggcccgcggcgtctcggagcgtcttcgtgcacaattcttgcaatggcctgctctgcctaggtgacagcacaggagctgtcgaggtgctgaacccaacgactggtgaatctttaatgttgccgatgccaatgtacacggcagggagcagccagttctcgtcctgcaattggcactgcttggggttttgcccacaaaaaagggaacacaaggtggtgcatttctatccaggagctcacaatgacccgttcaaggtacactgtgagatatacacgattggagtcggtgtctggagacaagttgggagctgtcatggtgctccgactgacagaggggtgcatgtgaatgggatggtatactatctgacaaagttccgctacattgcttcatcgcgtatcaactgcttgaatcttgagagcgaaaaatttgatgtgatgatgcttcctccacacaaatcttatggaggtcattgctctttggcagagcttgagggaaagctatgcttgttgattgtcgatggtgcattggaaggtccgcctcgtacaatggacatactgatgctcaatagccatgataagcagggctggactcacagataccacttctccttgccttggttgatgccttcatgttattttactccgaaacacacactcttccacggtggaaaaatttgggtgcagttgttggctaggaatctatattgttttgacccaagttcaagttcagaagaactgacaacagcctggccagagcttgacttttcctttagcacacatactttcattgagagcatagttcctctgcgtaaagactactacttcaagcagatacagtgacagtggtgtgctgccccttgctttcaaggtagatgaagttcaatacctggaatagtatctgaagaattgttggctagctgcatcatttgctgtgatgctcactatgcacgaccaactttgcttcgagttaagcaacaaaggtgataataaagcaaaagataaacatcttaattcaggcaagcacatagatcatacgaaggtcaaagttgttacatcacctttattctatgcccaaaagcttcatcaatgaagacacaatatgaagcctcaaaccacatgaagtctcacctacgaagactttgtatgaagcattaggagatatgaagcttcctaagaaaggcgatatcttcctacaattaagcaaagccacgaaagagtctttgccagaggtgaagacgtgcctgtgaagactggtcaccgacaagaattcaagcattgataaagatggaaacaaaccaaattgcccttgaatgggcaaacgattgtaactttatagtacagggtagttaggactttacagaagtgctaaaaggtgcccctataaatacccctgacatgtactatttatagacatgacatattttactgcaatttacctgtcggttaattcttccccaacatgtggtgcccaactgtttgtgtgcattcgctaacaccgcgcatgaccacaaacataatgtttagactcacgaagaagtgtgaagaagacaacacctagtgtaaatgaaaacaattttccccacaaaatgaaaactaagggcctgtttggat

SEQ ID NO: 68967 - DNA, 2470 bp, Zea Mays
aagcgcgcacattcggggccccagtccccaccgtcccgtccgccggcctcgcgattcgtgtcccacgcgctccctcctcctatccccgtctcctaccgcgtcgacacggcgatacccccgcggcacccacccacccatccaagcttccgtttctcgttctctccccccaccacaccacgaccccttccaaaacaacaaacagaaccgaagccgactagcgcgaccgaggaggcagagacgggtggaggaaaagggcaaagtcgccgcccgccgcccgccgctgatcggtcggtgagcccgatgcgctgtaccgctcggcctcgtcgtgttccgccgcgctgatctccgcctcccgcgacgcccgattccagaggatcgcttcttcggtttggccggccggtgcgtggggggttcaggaggcggggtctcggcggctgcaatgcatgctcgcatctcgtggcggcgtttcatcgcttcggtccgtttgtttttcggcttgttgcgctgaaattgagcgattcgtttccttgattcaaggactactagtggggcgggggcatcctgcgtggtggctctggctgtctggtctgtatctgtatgatagtgggcgttggcagttgtgccgtcccggctagctgcggacttgtcttggcctagcagggaagtgatggagcacaagaaagctagagcagtggaggatcctgcccggttgatttgcgacgatgccctcaccgaggtattccgcaggctgcctgcccgtgcgctcgcggcctgcagactggtgtgcaagtcatggatgtccgtgctcacagatccacacttcatccatgagcacctgagccgtggccagcagaagctgctgctctttgcgactgacaggggaaacgacaggtcgctcgccatggtgctcgcggacaacaacgcatccatgtaccagctgtcaaggcccgcggcgtctcggagcgtcttcgtgcacaattcttgcaatggcctgctctgcctaggtgacagcacaggagctgtcgaggtgctgaacccaacgactggtgaatctttaatgttgccgatgccaatgtacacggcagggagcagccagttctcgtcctgcaattggcactgcttggggttttgcccacaaaaaagggaacacaaggtggtgcatttctatccaggagctcacaatgacccgttcaaggtacactgtgagatatacacgattggagtcggtgtctggagacaagttgggagctgtcatggtgctccgactgacagaggggtgcatgtgaatgggatggtatactatctgacaaagttccgctacattgcttcatcgcgtatcaactgcttgaatcttgagagcgaaaaatttgatgtgatgatgcttcctccacacaaatcttatggaggtcattgctctttggcagagcttgagggaaagctatgcttgttgattgtcgatggtgcattggaaggtccgcctcgtacaatggacatactgatgctcaatagccatgataagcagggctggactcacagataccacttctccttgccttggttgatgccttcatgttattttactccgaaacacacactcttccacggtggaaaaatttgggtgcagttgttggctaggaatctatattgttttgacccaagttcaagttcagaagaactgacaacagcctggccagagcttgacttttcctttagcacacatactttcattgagagcatagttcctctgcgtaaagactactacttcaagcagatacagtgacagtggtgtgctgccccttgctttcaaggaccaactttgcttcgagttaagcaacaaaggtgataataaagcaaaagataaacatcttaattcaggcaagcacatagatcatacgaaggtcaaagttgttacatcacctttattctatgcccaaaagcttcatcaatgaagacacaatatgaagcctcaaaccacatgaagtctcacctacgaagactttgtatgaagcattaggagatatgaagcttcctaagaaaggcgatatcttcctacaattaagcaaagccacgaaagagtctttgccagaggtgaagacgtgcctgtgaagactggtcaccgacaagaattcaagcattgataaagatggaaacaaaccaaattgcccttgaatgggcaaacgattgtaactttatagtacagggtagttaggactttacagaagtgctaaaaggtgcccctataaatacccctgacatgtactatttatagacatgacatattttactgcaatttacctgtcggttaattcttccccaacatgtggtgcccaactgtttgtgtgcattcgctaacaccgcgcatgaccacaaacataatgtttagactcacgaagaagtgtgaagaagacaacacctagtgtaaatgaaaacaattttccccacaaaatgaaaactaagggcctgtttggat

SEQ ID NO: 68968 - DNA, 1285 bp, Zea Mays
cgtaaaccactacctgcgatctccgcacccgcgctcaccggctcaccgctatctactccgcatccgccggccgccggcgagcccctcctcctccacgatccgtgcttccccgcaggaggcaactccatgaattacatcgactccatcccgcccctcaacggagggaattacgagttatggcgagagaagcttgagctggcgcttgcgttgttagatattgatctggctatcactgatccctgtcccatcgctccggtagacccggtgcaggaagagaacgagagcgatgatgatttcaacgctcgtgtgcgcaatcatgcaccaataaaaatgaagtatgacctatacaaggtaaaatgggatcaatcgaaccgcaagtgtctgatggtgattaagagctctattatggatacaatcaggggagcattcccagcatgtaccaccgctacagagtatcttagtaaggtggagagtcactttactatctcttcaaaggcttatgcatgcacaataattgaaaggctacttaccgataaatacactggcggtggagtaagagagcatatattgaagatggccagcatggcttccaagcttaaacctatggaaatggcgctcccagatgagtttctggtctatttgatttttgcctctctgcctaaagaatttgaagcttttgagattaattataactcacaaccagacaattggggcattgagaaactgattgccatgtgtgtgcaagaagaggaaagaattaaggcttcacgtggtgattctatcaactatgttgggatatataaggcacatggcaaggctccacagaatgatcaccatctgaaaaataaagaggtggacaagaatgattgctactggtgcgaaaagtcagggcatcatcagaaggattgtccatccttcctgaagcacttgatcaataaagggattccatacgaggaggacccttcaaagaggagaaagatgcattaaagtcgtcaatggtgttgatgatgaagttgaagtgatagaacttccattattattgaataatagcttcattcttcacttgaataatgttctctatgtatcatctttcctgtcatgcgaatttaagctctctaatttattagaaatagaaaaatagatcctttcatgtaatgatatcgtgatattccatgttactccttttttgggtcgatgtagagacctccattgcatatgactggtattcaactaacaatatataggtcaaatatttcgaaattgactacctatgactgctgtttca

SEQ ID NO: 68969 - DNA, 1343 bp, Zea Mays
tttcgttacgcctcttttaatctctccgctccttcgtatcctccccttccagtcttccactcgtaaaccactacctgcgatctccgcacccgcgctcaccggctcaccgctatctactccgcatccgccggccgccggcgagcccctcctcctccacgatccgtgcttccccggaggcaactccatgaattacatcgactccatcccgcccctcaacggagggaattacgagttatggcgagagaagcttgagctggcgcttgcgttgttagatattgatctggctatcactgatccctgtcccatcgctccggtagacccggtgcaggaagagaacgagagcgatgatgatttcaacgctcgtgtgcgcaatcatgcaccaataaaaatgaagtatgacctatacaaggtaaaatgggatcaatcgaaccgcaagtgtctgatggtgattaagagctctattatggatacaatcaggggagcattcccagcatgtaccaccgctacagagtatcttagtaaggtggagagtcactttactatctcttcaaaggcttatgcatgcacaataattgaaaggctacttaccgataaatacactggcggtggagtaagagagcatatattgaagatggccagcatggcttccaagcttaaacctatggaaatggcgctcccagatgagtttctggtctatttgatttttgcctctctgcctaaagaatttgaagcttttgagattaattataactcacaaccagacaattggggcattgagaaactgattgccatgtgtgtgcaagaagaggaaagaattaaggcttcacgtggtgattctatcaactatgttgggatatataaggcacatggcaaggctccacagaatgatcaccatctgaaaaataaagaggtggacaagaatgattgctactggtgcgaaaagtcagggcatcatcagaaggattgtccatccttcctgaagcacttgatcaataaagggattccatacgaggaggacccttcaaagaggagaaagatgcattaaagtcgtcaatggtgttgatgatgaagttgaagtgatagaacttccattattattgaataatagcttcattcttcacttgaataatgttctctatgtatcatctttcctgtcatgcgaatttaagctctctaatttattagaaatagaaaaatagatcctttcatgtaatgatatcgtgatattccatgttactccttttttgggtcgatgtagagacctccattgcatatgactggtattcaactaacaatatataggtcaaatatttcgaaattgactacctatgactgctgtttca

SEQ ID NO: 68970 - DNA, 632 bp, Zea Mays
gttttggcatctttctatgtggcagcggtcgctactaaagttgggacaggggtcctgttgtattttgtataatatctagatcatggatgaacagccatacttgacgaggacgtaatagtgggacaatttgccttcttctgatgagctacatttggaagaagtctggaccatactgtatcctcacacatacagtattttgttcaatcatttctttagtcttttggttgataatgtgtttgatgtcctctccctccattgtagactcttcacgtagtatcacccgttctcgagtttactgtaatgaattgtcaactgtgttcatgtgcccagagaaccactcgtgctctcttcattcgttcgctcaactgatttgtttacatccatgtcttggcgccttcttctgtagtcatttttggaaatctgttgcaatgcatgtgttttcgtccttacttccttggcaggcgactgaggatatatattgaattctgaagtcacattctgtggtcacttgattgctgggccaacactggtggcctaatgattgctttttgcgaactctattactgcagatttgtcattgtgatagtgcatcacgaatcacttgctcctttaattttttttgtgacgttaat

SEQ ID NO: 68971 - DNA, 1334 bp, Zea Mays
atggcgcaaggcaccgtgccctccgcagccggggccggcggcggcggctgcccctcggcccccgccgtctcgacgactcctccgggcacgccccgggctgccccgcctccgccatctaccttcgcgaccggattctactacgccgtggagctctatttcgacccggcgctggagaaccaggtgctcaaagcgtggaacgcgctggcgcggcggcagctaggcagccgcctcatcgacgctgccgcccgcccgcacctcccgctgctccacctccccgccgccgcgctcccgcctcctggcaccggcgcgggcggggatccgctcctccgcctcgcaccctcgctccgcgcgctcgcgtcgcgcctcgacccgctcgcgctcgcgctctcctcgctcgccgcgctcccagcctccgcctcctcctccccgcacgacaacgttctcttcctcgcgcccactccaaccgccgcgctgctcggcctccatgcgcagctctgcgagctgctgcggaaggacgctggcgtcgaggtccccgacgcgttccggcccgaccactggctaccgcggtgcgccgtcgccgtcgacgtgccccgcggccgcatggcggaggccttctgcgtgctccgagagctcaagctgcttcccgtctccgggtacgggatggacatcgcgctcgtcgaggtcggggccaccgttagggagctcgtgtcctacccgctcggcggtggcagcagcgctggagcggactgagaggtcctgttgtattttgtataatatctagatcatggatgaacagccatacttgacgaggacgtaatagtgggacaatttgccttcttctgatgagctacatttggaagaagtctggaccatactgtatcctcacacatacagtattttgttcaatcatttctttagtcttttggttgataatgtgtttgatgtcctctccctccattgtagactcttcacgtagtatcacccgttctcgagtttactgtaatgaattgtcaactgtgttcatgtgcccagagaaccactcgtgctctcttcattcgttcgctcaactgatttgtttacatccatgtcttggcgccttcttctgtagtcatttttggaaatctgttgcaatgcatgtgttttcgtccttacttccttggcaggcgactgaggatatatattgaattctgaagtcacattctgtggtcacttgattgctgggccaacactggtggcctaatgattgctttttgcgaactctattactgcagatttgtcattgtgatagtgcatcacgaatcacttgctcctttaattttttttgtgacgttaat

SEQ ID NO: 68972 - DNA, 7129 bp, Zea Mays
atggaggccctcggcgccccgcccccgccgcgtttcactgtggccgacctcctccggctccgccgtcccacaaccggcgcctcctccctcctttgcctctccgtccccacctccacctccacatcccgaccccgtaaaaagcacaagctctccgccccagtcccaacctggagcaccggcacggtcccgttcgcgccgatgtcccaccccgtgctcctttccggcacgctctccctcccctccgcctcctccccgatctcctgccgcagcaactgcttttccttctccgacccatgccccaccgctgcctccccggccaccgcggccgcctccgtctgctgctgcatcctcgacttcgatcccgccgctctgggccgcgtgatccgtgtccttgcgtggaactacctaccctcactgcgcctccacgccgagccgggcgtactcgaagtggtccgctggcacctcgaggagtccgctcctcccgtgaaatatagcttcctggcgacggtccccttccgtttcccggatcaagagcccgacttggctacccgcggctgcgcatttggtttggtcaggtccgtcagcattgtgttcagtatgccgcttgccaaggctgatgcaggaagcagaaattcagttgggtttctggcggagattttgtgttgtgggtgtcgccgctgctgcagggcgacaccgccggaagatgcccagactcacatgtttgagacgatgaaatttgtctactttgtggatgcgtctagcatgtggcggccggttctagtgtggcttgtggggaggctggtgtacatttctgggttaagtaaaaaaatggtttctgttggggacaaagcctcacacacaattttggtgtcatctgcgaagacaaccatggcatggtgcccatcctacaggggcagtctgccattggataacttacctgaaaagtgcggtggagagtatgctggggttatcactggaatttattcacagggtctggtggttgagctggatgacactgcatggctgctgattgatgatcagaagcttctgccaccacattcccttcgagttggtgccattgtctctgtaaagaactttcgagcagtgtgtctgaactttgcttggacacgggttgttctgcttgcaacttgcagtaaaacctgcattactgtaaactgtttttccttggtggattccaaaattcatttgaagacagataacaagggcctcttaggaacgtttgttgactcattggagatgcctgctcgattttggatgttacttctgatatcatgctttaaacagaagtttactaaattattttctgataaagagattttgggttcacaaaatgtaccaacagaagcaagggttggttcatgcttatgctactaaaattctcacgtcaaagtgccaacctcaggaaagtttaataataaaattctgcagacataactgtagtagcttaagccttggatctaaactggaggcttgcaaattggtactggtcgtaccattctctaatttagtctgcaagtgtgaatcattgtggatattatcgatgcttaaattatggaacggttctgaaaaagtgggcaagagccagggtttcttatgcgatggggtttcctataccagcagtaccaaaagaataatttcgagtgaagatctggattttatattagtgggaagcatcaagacttctccgctgtcagggagactgcagttggttgattccactggatgtatagatgtttttatacctgatctcccgcctaatgagagcttgcatgacatatatgagattgtcaattacaaactagctcttgaaggcccgatggcttacatagatcattatgatgttgctgatgccctatcctgtaaagctgtgtttcagaagcttccttacaaaaaaagattgcatcacctcaatatttatgttatagttcaatggaggcaattaattcatattggcccttcctcgtgtattccttcttatattaattataggatcaggttgtttcacttgctgaagttgtcccacatatttcctgtgaatagcaacattcaatgttcaaacatgccagggtctagcctgtatgctgaagctgtaatacttccatatgttttgaagtttattgggcaaggcgaatttcttgagcatgctgagggctttataatgtcacactctactttactaggtaattctgaagcctctgtggcaaaatcatgcaatattccatgttcgctaagctttggcagcaccaacctttgtggtactctggtgtctacctatgcctctggatcagaaggtactgttctaaatgaacctattgtactaagaaaagaatactcaaggatcttgttggagttcgaggcaggaatttttaagaaatatcagttaccgcgaatcaatggttcctatattctccaatgtcccagtcgaagttttacttgcaccatgggaaactgtggatgtttgcaaggtggtaaagtctcgattgatgctcaagatagactttggagcttcgccattaccattggtggtaatataaacatcaaggggtcaattggggatcaatctattggagttacttcaatgaagatggatgagatattttccagaaatatggtcgatgatgagctaagattagttcagccttggaatgacttctaccgtaattcttattttcatttggatttttcttatgaggcaataagcaaaaagatggaagattataacaccgtatgtcatgtattgaatgggctgtgtgtttcctccagtgaagttttaagtgtgtcatcatgtgttgatattatgatgcctaaagatgcttctgtgtccgctgacttcaaaactaaagaagtggttcatggagatttattaatatcagtacagggaaaagtagaaaatatacattcacttgtctgtaagtgggaaagatgcattcctggtaatgagaagtacagtctatgtatccatattgctgataataatcatgcggtatatatccgtggatactcaaacaaacattttactgttggcattggaccaggggcaacagtgacattccaccgcatccgtttcaaacagtttgctccttcccttctggttttctttaattgtttcttccattattttgttaggatcgttgcagcataaaacccctatttacccatctgcagcattttagcttttaccttgatctgactagaaacctgatgtgatgtctacccttgcttgctttgtaagaaatggtagtttggtggtacactgaatagaacatgttgagcgaactgactagtgcgccctgtttacatgttatactctacatggataaacatgattttaatgagtttacttttgtcaatccttacaaattacaataactcgctgtgctaattgcttgggatcattctttttacataatatcaggttcaatgtataaatctgaacttcagggtacaatttacttctaaatataccattgcattctctttttttgaccgaaagggccatgccccccatttcattaagaaatgaaccacattcatactgtcttacaaggaccaggcaaaagcaagatttaatcctaaaccgccagttcaaccaaaatagcaaaaggaaccaaatgctaagactggtctagagtttaacattatcaacgctgaaacatacaagcagagataggccatctagattattacaaatttacaagctgttaggagacgaagctccagatcagctaagatgcagttaagacccagcaaccaaatttttccagcagcgctctcagaaatgctccagcagatgatgacgaatgtcgcgccagtcaacaacatcttccccgcgccactcatccaagaattctcttggtattcggcgcccagcctttagctcgatcaaacacctcccttgccgtccttctgactagacggcttcctccctccagggtctcttttcccattttttttctgcaaaatcgaccattagtccaaccaatgacaacataagaaaacaatgtcaaaactcaaaaggctcactaatcaacttattattgaaacaagcatcatttctgatttcccaaatggaccagagaaccgcccctgctcccacaatcatcaaatttctgtgcttcttactaaagccgtccaaccaacgagtacaggtctgtgtggctccttggaacagacttcaggttcagggcaacctgtacaattctccagatgaatttagccacagagcatttgaagaacaagtgatcaggttattcaaaaaccccacagaaacaacacacacaacttcctttccagtttttttttttttcagattgctttttgttagaattttgttgttaacgaccaaccagaggaaaattttgatcttttgaggtatgttaactttccacaagaaattgaaagggacttttgttgcaatgcttctaatctgtttgtaaagagattttacagagaagcctgctttgcctaaagtacacagagccgagtcctcttctctcagtctttaggacccacataacagtttaagggattcaaaatgagtcccagatttcaccaactaatcttctcctaaattttaaagcagaaaggttggatctaagaactctgttcactgtaatgtttttgtcaaaggttaagctaaatagaattgagttgccaggggggaatctcccagccaggtatcattccaaaagctagtttggttaccattgcctatcttttttctacagaacttgtaaacagtatctttaactttcagcagacctttccaaaaatacaaatcatcttgctttttctctaccataataagaggttttcccttaactgtatttcgacctaacgatattctgccaaatcccatctgaggtttctaacttccaaatccacttggcaaggaggccaatattcattttttccaagtcaatcacacccaaacccccttgatcttcagggagacacaccgtgtcccaatccgttaagtggtattttttggtcaattgacccccctgccacaataatcttttttctgtaaatatcaagttttttaatcagacttaggggcagaatacagggagagcatgtataaaggaacgttcgaaaggctgctgttcagcagagtgatcctaccccctaaatggcgcctctgagggggacaggtgctggttttcattctttatttttaactcattaattttttgagttaggtattttttggattttttgtactccttcaaaatttaggttccaccctttcagctttttttaaagtcttttcactttccccttccatatctccaaactgttctcgtttttgactggggatttccagttactctccacaatctgtttgaactcttgtcttttaatccaacaaagctcatacctaaaatcctttttcggaacactcatcccacctgtactcagacagaggggaacgttatccaaaaatgatctgtttaagactaaccatcacattaatataagttagatcccaatcgggactaaccaaaattctgtccaatttttcaaaggtggggggctctctgttgttggaccacatgtagagtctacccatgaggtccaattctataagattatactgagcaatgatatcattgaaaaggaaactccatctattatttcctcccggtttgtttttgtcttttttcccatcttagaacattgaagtctcccccaaccaacataggatatctgttattagaacagaaaaccggcagttctctaagaaagttctctttcctattatcctgagccgcaccataaacgttgatgaagttccatttaatctgcttgtttcttatattctctgttatctggctgcaggcatggattattcttaacctctgagacatacattgaggttagctccatcagccatgctaacttgactgaacaaagtgttatttcatcaccaaagtctaatttgtcaaaagatggttcattttgcacagcttcaccgtgcttgttctttcatcagaagtattttacagacagtagacccatgcaatttcactgcagggtagcaactatccttgtgctggtattgaacaaatcgactaatcagggtgaaactccaaatgtaaaagttcggctagctggttttattctggatgatggatcatccctgtgctgtggctgggctgatgatgctagggcagaattattgcttaggctgcaggaaattgtgcatctggatgcttctgttaatttaaagctttcaaaaggaggagagaatagcacaaaattaaaatatactattggatgctgtcttgaaaaaatgttgaagcagcacacaagtgttaccgtaaagaactgtggaattcctcctgatttctattgccgagatttggatgcatcttctgtttcggacaaagccttaagtcgcttggaagacaaacttctgaaatttattgtccttaatgcttgttgcaagggatctctgaatgttatggcatcagctctgagcccagatgatataaatgggttcaatgtggagctccctgttccagtgcagaacatgcggatgctttggatagaagaagttttcccagtagatcccttggaagaagctcgcagactacatgatattttggaaaacagctagtgttcacacattctggatagttagtatgcagcataaaaaaaagaggatggattgtccagaactccagatcgtactgccacttcgctgagattttcgcaaaggaaaacttgtttcacactcagtatccagaaaaggatggtttgtccagatagggccgccaccttgaagttgatcccagattggtcctccacattttccaaagagatgtactcacggcgaacgagcgatatatccttttgatgctgatactgatctctgacgtatgaagaagggacataaatttggctgttcgatctcttttgctgaacgagcgggccttttgtatccaatgtcccaagctccccaaagcaacgcaatgtgtatattctacttgcattattatgtcccaacgttaattttggcttatatcatgcttcctctttcgtatcctactactgttactataatctgatggtgtcaagatcaactgtgtagtttggacacaca

SEQ ID NO: 68973 - DNA, 7109 bp, Zea Mays
atggaggccctcggcgccccgcccccgccgcgtttcactgtggccgacctcctccggctccgccgtcccacaaccggcgcctcctccctcctttgcctctccgtccccacctccacctccacatcccgaccccgtaaaaagcacaagctctccgccccagtcccaacctggagcaccggcacggtcccgttcgcgccgatgtcccaccccgtgctcctttccggcacgctctccctcccctccgcctcctccccgatctcctgccgcagcaactgcttttccttctccgacccatgccccaccgctgcctccccggccaccgcggccgcctccgtctgctgctgcatcctcgacttcgatcccgccgctctgggccgcgtgatccgtgtccttgcgtggaactacctaccctcactgcgcctccacgccgagccgggcgtactcgaagtggtccgctggcacctcgaggagtccgctcctcccgtgaaatatagcttcctggcgacggtccccttccgtttcccggatcaagagcccgacttggctacccgcggctgcgcatttggtttggtcaggtccgtcagcattgtgttcagtatgccgcttgccaaggctgatgcaggaagcagaaattcagttgggtttctggcggagattttgtgttgtgggtgtcgccgctgctgcagggcgacaccgccggaagatgcccagactcacatgtttgagacgatgaaatttgtctactttgtggatgcgtctagcatgtggcggccggttctagtgtggcttgtggggaggctggtgtacatttctgggttaagtaaaaaaatggtttctgttggggacaaagcctcacacacaattttggtgtcatctgcgaagacaaccatggcatggtgcccatcctacaggggcagtctgccattggataacttacctgaaaagtgcggtggagagtatgctggggttatcactggaatttattcacagggtctggtggttgagctggatgacactgcatggctgctgattgatgatcagaagcttctgccaccacattcccttcgagttggtgccattgtctctgtaaagaactttcgagcagtgtgtctgaactttgcttggacacgggttgttctgcttgcaacttgcagtaaaacctgcattactgtaaactgtttttccttggtggattccaaaattcatttgaagacagataacaagggcctcttaggaacgtttgttgactcattggagatgcctgctcgattttggatgttacttctgatatcatgctttaaacagaagtttactaaattattttctgataaagagattttgggttcacaaaataagcaagggttggttcatgcttatgctactaaaattctcacgtcaaagtgccaacctcaggaaagtttaataataaaattctgcagacataactgtagtagcttaagccttggatctaaactggaggcttgcaaattggtcgtaccattctctaatttagtctgcaagtgtgaatcattgtggatattatcgatgcttaaattatggaacggttctgaaaaagtgggcaagagccagggtttcttatgcgatggggtttcctataccagcagtaccaaaagaataatttcgagtgaagatctggattttatattagtgggaagcatcaaggttatttctgttcttgcattatctacctcaaattaatgggttttcttttaaaaaaacatctatcaagtcataagatactagaattgtgatacctggaatattttacttctccgctgtcagggagactgcagttggttgattccactggatgtatagatgtttttatacctgatctcccgcctaatgagagcttgcatgacatatatgagattgtcaattacaaactagctcttgaaggcccgatggcttacatagatcattatgatgttgctgatgccctatcctgtaaagctgtgtttcagaagcttccttacaaaaaaagattgcatcacctcaatatttatgttatagttcaatggaggcaattaattcatattggcccttcctcgtgtattccttcttatattaattataggatcaggttgtttcacttgctgaagttgtcccacatatttcctgtgaatagcaacattcaatgttcaaacatgccagggtctagcctgtatgctgaagctgtaatacttccatatgttttgaagtttattgggcaaggcgaatttcttgagcatgctgagggctttataatgtcacactctactttactagaaggtactgttctaaatgaacctattgtactaagaaaagaatactcaaggatcttgttggagttcgaggcaggaatttttaagaaatatcagttaccgcgaatcaatggttcctatattctccaatgtcccagtcgaagttttacttgcaccatgggaaactgtggatgtttgcaaggtggtaaagtctcgattgatgctcaagatagactttggagcttcgccattaccattggtggtaatataaacatcaaggggtcaattggggatcaatctattggagttacttcaatgaagatggatgagatattttccagaaatatggtcgatgatgagctaagattagttcagccttggaatgacttctaccgtaattcttattttcatttggatttttcttatgaggcaataagcaaaaagatggaagattataacaccgtatgtcatgtattgaatgggctgtgtgtttcctccagtgaagttttaagtgtgtcatcatgtgttgatattatgatgcctaaagatgcttctgtgtccgctgacttcaaaactaaagaagtggttcatggagatttattaatatcagtacagggaaaagtagaaaatatacattcacttgtctgtaagtgggaaagatgcattcctggtaatgagaagtacagtctatgtatccatattgctgataataatcatgcggtatatatccgtggatactcaaacaaacattttactgttggcattggaccaggggcaacagtgacattccaccgcatccgtttcaaacagtttgctccttcccttctggttttctttaattgtttcttccattattttgttaggatcgttgcagcataaaacccctatttacccatctgcagcattttagcttttaccttgatctgactagaaacctgatgtgatgtctacccttgcttgctttgtaagaaatggtagtttggtggtacactgaatagaacatgttgagcgaactgactagtgcgccctgtttacatgttatactctacatggataaacatgattttaatgagtttacttttgtcaatccttacaaattacaataactcgctgtgctaattgcttgggatcattctttttacataatatcaggttcaatgtataaatctgaacttcagggtacaatttacttctaaatataccattgcattctctttttttgaccgaaagggccatgccccccatttcattaagaaatgaaccacattcatactgtcttacaaggaccaggcaaaagcaagatttaatcctaaaccgccagttcaaccaaaatagcaaaaggaaccaaatgctaagactggtctagagtttaacattatcaacgctgaaacatacaagcagagataggccatctagattattacaaatttacaagctgttaggagacgaagctccagatcagctaagatgcagttaagacccagcaaccaaatttttccagcagcgctctcagaaatgctccagcagatgatgacgaatgtcgcgccagtcaacaacatcttccccgcgccactcatccaagaattctcttggtattcggcgcccagcctttagctcgatcaaacacctcccttgccgtccttctgactagacggcttcctccctccagggtctcttttcccattttttttctgcaaaatcgaccattagtccaaccaatgacaacataagaaaacaatgtcaaaactcaaaaggctcactaatcaacttattattgaaacaagcatcatttctgatttcccaaatggaccagagaaccgcccctgctcccacaatcatcaaatttctgtgcttcttactaaagccgtccaaccaacgagtacaggtctgtgtggctccttggaacagacttcaggttcagggcaacctgtacaattctccagatgaatttagccacagagcatttgaagaacaagtgatcaggttattcaaaaaccccacagaaacaacacacacaacttcctttccagtttttttttttttcagattgctttttgttagaattttgttgttaacgaccaaccagaggaaaattttgatcttttgaggtatgttaactttccacaagaaattgaaagggacttttgttgcaatgcttctaatctgtttgtaaagagattttacagagaagcctgctttgcctaaagtacacagagccgagtcctcttctctcagtctttaggacccacataacagtttaagggattcaaaatgagtcccagatttcaccaactaatcttctcctaaattttaaagcagaaaggttggatctaagaactctgttcactgtaatgtttttgtcaaaggttaagctaaatagaattgagttgccaggggggaatctcccagccaggtatcattccaaaagctagtttggttaccattgcctatcttttttctacagaacttgtaaacagtatctttaactttcagcagacctttccaaaaatacaaatcatcttgctttttctctaccataataagaggttttcccttaactgtatttcgacctaacgatattctgccaaatcccatctgaggtttctaacttccaaatccacttggcaaggaggccaatattcattttttccaagtcaatcacacccaaacccccttgatcttcagggagacacaccgtgtcccaatccgttaagtggtattttttggtcaattgacccccctgccacaataatcttttttctgtaaatatcaagttttttaatcagacttaggggcagaatacagggagagcatgtataaaggaacgttcgaaaggctgctgttcagcagagtgatcctaccccctaaatggcgcctctgagggggacaggtgctggttttcattctttatttttaactcattaattttttgagttaggtattttttggattttttgtactccttcaaaatttaggttccaccctttcagctttttttaaagtcttttcactttccccttccatatctccaaactgttctcgtttttgactggggatttccagttactctccacaatctgtttgaactcttgtcttttaatccaacaaagctcatacctaaaatcctttttcggaacactcatcccacctgtactcagacagaggggaacgttatccaaaaatgatctgtttaagactaaccatcacattaatataagttagatcccaatcgggactaaccaaaattctgtccaatttttcaaaggtggggggctctctgttgttggaccacatgtagagtctacccatgaggtccaattctataagattatactgagcaatgatatcattgaaaaggaaactccatctattatttcctcccggtttgtttttgtcttttttcccatcttagaacattgaagtctcccccaaccaacataggatatctgttattagaacagaaaaccggcagttctctaagaaagttctctttcctattatcctgagccgcaccataaacgttgatgaagttccatttaatctgcttgtttcttatattctctgttatctggctgcaggcatggattattcttaacctctgagacatacattgaggttagctccatcagccatgctaacttgactgaacaaagtgttatttcatcaccaaagtctaatttgtcaaaagatggttcattttgcacagcttcaccgtgcttgttctttcatcagaagtattttacagacagtagacccatgcaatttcactgcagggtagcaactatccttgtgctggtattgaacaaatcgactaatcagggtgaaactccaaatgtaaaagttcggctagctggttttattctggatgatggatcatccctgtgctgtggctgggctgatgatgctagggcagaattattgcttaggctgcaggaaattgtgcatctggatgcttctgttaatttaaagctttcaaaaggaggagagaatagcacaaaattaaaatatactattggatgctgtcttgaaaaaatgttgaagcagcacacaagtgttaccgtaaagaactgtggaattcctcctgatttctattgccgagatttggatgcatcttctgtttcggacaaagccttaagtcgcttggaagacaaacttctgaaatttattgtccttaatgcttgttgcaagggatctctgaatgttatggcatcagctctgagcccagatgatataaatgggttcaatgtggagctccctgttccagtgcagaacatgcggatgctttggatagaagaagttttcccagtagatcccttggaagaagctcgcagactacatgatattttggaaaacagctagtgttcacacattctggatagttagtatgcagcataaaaaaaagaggatggattgtccagaactccagatcgtactgccacttcgctgagattttcgcaaaggaaaacttgtttcacactcagtatccagaaaaggatggtttgtccagatagggccgccaccttgaagttgatcccagattggtcctccacattttccaaagagatgtactcacggcgaacgagcgatatatccttttgatgctgatactgatctctgacgtatgaagaagggacataaatttggctgttcgatctcttttgctgaacgagcgggccttttgtatccaatgtcccaagctccccaaagcaacgcaatgtgtatattctacttgcattattatgtcccaacgttaattttggcttatatcatgcttcctctttcgtatcctactactgttactataatctgatggtgtcaagatcaactgtgtagtttggacacaca

SEQ ID NO: 68974 - DNA, 6940 bp, Zea Mays
atggaggccctcggcgccccgcccccgccgcgtttcactgtggccgacctcctccggctccgccgtcccacaaccggcgcctcctccctcctttgcctctccgtccccacctccacctccacatcccgaccccgtaaaaagcacaagctctccgccccagtcccaacctggagcaccggcacggtcccgttcgcgccgatgtcccaccccgtgctcctttccggcacgctctccctcccctccgcctcctccccgatctcctgccgcagcaactgcttttccttctccgacccatgccccaccgctgcctccccggccaccgcggccgcctccgtctgctgctgcatcctcgacttcgatcccgccgctctgggccgcgtgatccgtgtccttgcgtggaactacctaccctcactgcgcctccacgccgagccgggcgtactcgaagtggtccgctggcacctcgaggagtccgctcctcccgtgaaatatagcttcctggcgacggtccccttccgtttcccggatcaagagcccgacttggctacccgcggctgcgcatttggtttggtcaggtccgtcagcattgtgttcagtatgccgcttgccaaggctgatgcaggaagcagaaattcagttgggtttctggcggagattttgtgttgtgggtgtcgccgctgctgcagggcgacaccgccggaagatgcccagactcacatgtttgagacgatgaaatttgtctactttgtggatgcgtctagcatgtggcggccggttctagtgtggcttgtggggaggctggtgtacatttctgggttaagtaaaaaaatggtttctgttggggacaaagcctcacacacaattttggtgtcatctgcgaagacaaccatggcatggtgcccatcctacaggggcagtctgccattggataacttacctgaaaagtgcggtggagagtatgctggggttatcactggaatttattcacagggtctggtggttgagctggatgacactgcatggctgctgattgatgatcagaagcttctgccaccacattcccttcgagttggtgccattgtctctgtaaagaactttcgagcagtgtgtctgaactttgcttggacacgggttgttctgcttgcaacttgcagtaaaacctgcattactgtaaactgtttttccttggtggattccaaaattcatttgaagacagataacaagggcctcttaggaacgtttgttgactcattggagatgcctgctcgattttggatgttacttctgatatcatgctttaaacagaagtttactaaattattttctgataaagagattttgggttcacaaaataagcaagggttggttcatgcttatgctactaaaattctcacgtcaaagtgccaacctcaggaaagtttaataataaaattctgcagacataactgtagtagcttaagccttggatctaaactggaggcttgcaaattggtcgtaccattctctaatttagtctgcaagtgtgaatcattgtggatattatcgatgcttaaattatggaacggttctgaaaaagtgggcaagagccagggtttcttatgcgatggggtttcctataccagcagtaccaaaagaataatttcgagtgaagatctggattttatattagtgggaagcatcaagacttctccgctgtcagggagactgcagttggttgattccactggatgtatagatgtttttatacctgatctcccgcctaatgagagcttgcatgacatatatgagctgtgtttcagaagcttccttacaaaaaaagattgcatcacctcaatatttatgttatagttcaatggaggcaattaattcatattggcccttcctcgtgtattccttcttatattaattataggatcaggttgtttcacttgctgaagttgtcccacatatttcctgtgaatagcaacattcaatgttcaaacatgccagggtctagcctgtatgctgaagctgtaatacttccatatgttttgaagtttattgggcaaggcgaatttcttgagcatgctgagggctttataatgtcacactctactttactaggtaattctgaagcctctgtggcaaaatcatgcaatattccatgttcgctaagctttggcagcaccaacctttgtggtactctggtgtctacctatgcctctggatcagaaggtactgttctaaatgaacctattgtactaagaaaagaatactcaaggatcttgttggagttcgaggcaggaatttttaagaaatatcagttaccgcgaatcaatggttcctatattctccaatgtcccagtcgaagttttacttgcaccatgggaaactgtggatgtttgcaaggtggtaaagtctcgattgatgctcaagatagactttggagcttcgccattaccattggtggtaatataaacatcaaggggtcaattggggatcaatctattggagttacttcaatgaagatggatgagatattttccagaaatatggtcgatgatgagctaagattagttcagccttggaatgacttctaccgtaattcttattttcatttggatttttcttatgaggcaataagcaaaaagatggaagattataacaccgtatgtcatgtattgaatgggctgtgtgtttcctccagtgaagttttaagtgtgtcatcatgtgttgatattatgatgcctaaagatgcttctgtgtccgctgacttcaaaactaaagaagtggttcatggagatttattaatatcagtacagggaaaagtagaaaatatacattcacttgtctgtaagtgggaaagatgcattcctggtaatgagaagtacagtctatgtatccatattgctgataataatcatgcggtatatatccgtggatactcaaacaaacattttactgttggcattggaccaggggcaacagtgacattccaccgcatccgtttcaaacagtttgctccttcccttctggttttctttaattgtttcttccattattttgttaggatcgttgcagcataaaacccctatttacccatctgcagcattttagcttttaccttgatctgactagaaacctgatgtgatgtctacccttgcttgctttgtaagaaatggtagtttggtggtacactgaatagaacatgttgagcgaactgactagtgcgccctgtttacatgttatactctacatggataaacatgattttaatgagtttacttttgtcaatccttacaaattacaataactcgctgtgctaattgcttgggatcattctttttacataatatcaggttcaatgtataaatctgaacttcagggtacaatttacttctaaatataccattgcattctctttttttgaccgaaagggccatgccccccatttcattaagaaatgaaccacattcatactgtcttacaaggaccaggcaaaagcaagatttaatcctaaaccgccagttcaaccaaaatagcaaaaggaaccaaatgctaagactggtctagagtttaacattatcaacgctgaaacatacaagcagagataggccatctagattattacaaatttacaagctgttaggagacgaagctccagatcagctaagatgcagttaagacccagcaaccaaatttttccagcagcgctctcagaaatgctccagcagatgatgacgaatgtcgcgccagtcaacaacatcttccccgcgccactcatccaagaattctcttggtattcggcgcccagcctttagctcgatcaaacacctcccttgccgtccttctgactagacggcttcctccctccagggtctcttttcccattttttttctgcaaaatcgaccattagtccaaccaatgacaacataagaaaacaatgtcaaaactcaaaaggctcactaatcaacttattattgaaacaagcatcatttctgatttcccaaatggaccagagaaccgcccctgctcccacaatcatcaaatttctgtgcttcttactaaagccgtccaaccaacgagtacaggtctgtgtggctccttggaacagacttcaggttcagggcaacctgtacaattctccagatgaatttagccacagagcatttgaagaacaagtgatcaggttattcaaaaaccccacagaaacaacacacacaacttcctttccagtttttttttttttcagattgctttttgttagaattttgttgttaacgaccaaccagaggaaaattttgatcttttgaggtatgttaactttccacaagaaattgaaagggacttttgttgcaatgcttctaatctgtttgtaaagagattttacagagaagcctgctttgcctaaagtacacagagccgagtcctcttctctcagtctttaggacccacataacagtttaagggattcaaaatgagtcccagatttcaccaactaatcttctcctaaattttaaagcagaaaggttggatctaagaactctgttcactgtaatgtttttgtcaaaggttaagctaaatagaattgagttgccaggggggaatctcccagccaggtatcattccaaaagctagtttggttaccattgcctatcttttttctacagaacttgtaaacagtatctttaactttcagcagacctttccaaaaatacaaatcatcttgctttttctctaccataataagaggttttcccttaactgtatttcgacctaacgatattctgccaaatcccatctgaggtttctaacttccaaatccacttggcaaggaggccaatattcattttttccaagtcaatcacacccaaacccccttgatcttcagggagacacaccgtgtcccaatccgttaagtggtattttttggtcaattgacccccctgccacaataatcttttttctgtaaatatcaagttttttaatcagacttaggggcagaatacagggagagcatgtataaaggaacgttcgaaaggctgctgttcagcagagtgatcctaccccctaaatggcgcctctgagggggacaggtgctggttttcattctttatttttaactcattaattttttgagttaggtattttttggattttttgtactccttcaaaatttaggttccaccctttcagctttttttaaagtcttttcactttccccttccatatctccaaactgttctcgtttttgactggggatttccagttactctccacaatctgtttgaactcttgtcttttaatccaacaaagctcatacctaaaatcctttttcggaacactcatcccacctgtactcagacagaggggaacgttatccaaaaatgatctgtttaagactaaccatcacattaatataagttagatcccaatcgggactaaccaaaattctgtccaatttttcaaaggtggggggctctctgttgttggaccacatgtagagtctacccatgaggtccaattctataagattatactgagcaatgatatcattgaaaaggaaactccatctattatttcctcccggtttgtttttgtcttttttcccatcttagaacattgaagtctcccccaaccaacataggatatctgttattagaacagaaaaccggcagttctctaagaaagttctctttcctattatcctgagccgcaccataaacgttgatgaagttccatttaatctgcttgtttcttatattctctgttatctggctgcaggcatggattattcttaacctctgagacatacattgagcttcaccgtgcttgttctttcatcagaagtattttacagacagtagacccatgcaatttcactgcagggtagcaactatccttgtgctggtattgaacaaatcgactaatcagggtgaaactccaaatgtaaaagttcggctagctggttttattctggatgatggatcatccctgtgctgtggctgggctgatgatgctagggcagaattattgcttaggctgcaggaaattgtgcatctggatgcttctgttaatttaaagctttcaaaaggaggagagaatagcacaaaattaaaatatactattggatgctgtcttgaaaaaatgttgaagcagcacacaagtgttaccgtaaagaactgtggaattcctcctgatttctattgccgagatttggatgcatcttctgtttcggacaaagccttaagtcgcttggaagacaaacttctgaaatttattgtccttaatgcttgttgcaagggatctctgaatgttatggcatcagctctgagcccagatgatataaatgggttcaatgtggagctccctgttccagtgcagaacatgcggatgctttggatagaagaagttttcccagtagatcccttggaagaagctcgcagactacatgatattttggaaaacagctagtgttcacacattctggatagttagtatgcagcataaaaaaaagaggatggattgtccagaactccagatcgtactgccacttcgctgagattttcgcaaaggaaaacttgtttcacactcagtatccagaaaaggatggtttgtccagatagggccgccaccttgaagttgatcccagattggtcctccacattttccaaagagatgtactcacggcgaacgagcgatatatccttttgatgctgatactgatctctgacgtatgaagaagggacataaatttggctgttcgatctcttttgctgaacgagcgggccttttgtatccaatgtcccaagctccccaaagcaacgcaatgtgtatattctacttgcattattatgtcccaacgttaattttggcttatatcatgcttcctctttcgtatcctactactgttactataatctgatggtgtcaagatcaactgtgtagtttggacacaca

SEQ ID NO: 68975 - DNA, 7022 bp, Zea Mays
atggaggccctcggcgccccgcccccgccgcgtttcactgtggccgacctcctccggctccgccgtcccacaaccggcgcctcctccctcctttgcctctccgtccccacctccacctccacatcccgaccccgtaaaaagcacaagctctccgccccagtcccaacctggagcaccggcacggtcccgttcgcgccgatgtcccaccccgtgctcctttccggcacgctctccctcccctccgcctcctccccgatctcctgccgcagcaactgcttttccttctccgacccatgccccaccgctgcctccccggccaccgcggccgcctccgtctgctgctgcatcctcgacttcgatcccgccgctctgggccgcgtgatccgtgtccttgcgtggaactacctaccctcactgcgcctccacgccgagccgggcgtactcgaagtggtccgctggcacctcgaggagtccgctcctcccgtgaaatatagcttcctggcgacggtccccttccgtttcccggatcaagagcccgacttggctacccgcggctgcgcatttggtttggtcaggtccgtcagcattgtgttcagtatgccgcttgccaaggctgatgcaggaagcagaaattcagttgggtttctggcggagattttgtgttgtgggtgtcgccgctgctgcagggcgacaccgccggaagatgcccagactcacatgtttgagacgatgaaatttgtctactttgtggatgcgtctagcatgtggcggccggttctagtgtggcttgtggggaggctggtgtacatttctgggttaagtaaaaaaatggtttctgttggggacaaagcctcacacacaattttggtgtcatctgcgaagacaaccatggcatggtgcccatcctacaggggcagtctgccattggataacttacctgaaaagtgcggtggagagtatgctggggttatcactggaatttattcacagggtctggtggttgagctggatgacactgcatggctgctgattgatgatcagaagcttctgccaccacattcccttcgagttggtgccattgtctctgtaaagaactttcgagcagtgtgtctgaactttgcttggacacgggttgttctgcttgcaacttgcagtaaaacctgcattactgtaaactgtttttccttggtggattccaaaattcatttgaagacagataacaagggcctcttaggaacgtttgttgactcattggagatgcctgctcgattttggatgttacttctgatatcatgctttaaacagaagtttactaaattattttctgataaagagattttgggttcacaaaataagcaagggttggttcatgcttatgctactaaaattctcacgtcaaagtgccaacctcaggaaagtttaataataaaattctgcagacataactgtagtagcttaagccttggatctaaactggaggcttgcaaattggtcgtaccattctctaatttagtctgcaagtgtgaatcattgtggatattatcgatgcttaaattatggaacggttctgaaaaagtgggcaagagccagggtttcttatgcgatggggtttcctataccagcagtaccaaaagaataatttcgagtgaagatctggattttatattagtgggaagcatcaagacttctccgctgtcagggagactgcagttggttgattccactggatgtatagatgtttttatacctgatctcccgcctaatgagagcttgcatgacatatatgagattgtcaattacaaactagctcttgaaggcccgatggcttacatagatcattatgatgttgctgatgccctatcctgtaaagctgtgtttcagaagcttccttacaaaaaaagattgcatcacctcaatatttatgttatagttcaatggaggcaattaattcatattggcccttcctcgtgtattccttcttatattaattataggatcaggttgtttcacttgctgaagttgtcccacatatttcctgtgaatagcaacattcaatgttcaaacatgccagggtctagcctgtatgctgaagctgtaatacttccatatgttttgaagtttattgggcaaggcgaatttcttgagcatgctgagggctttataatgtcacactctactttactaggtaattctgaagcctctgtggcaaaatcatgcaatattccatgttcgctaagctttggcagcaccaacctttgtggtactctggtgtctacctatgcctctggatcagaaggtactgttctaaatgaacctattgtactaagaaaagaatactcaaggatcttgttggagttcgaggcaggaatttttaagaaatatcagttaccgcgaatcaatggttcctatattctccaatgtcccagtcgaagttttacttgcaccatgggaaactgtggatgtttgcaaggtggtaaagtctcgattgatgctcaagatagactttggagcttcgccattaccattggtggtaatataaacatcaaggggtcaattggggatcaatctattggagttacttcaatgaagatggatgagatattttccagaaatatggtcgatgatgagctaagattagttcagccttggaatgacttctaccgtaattcttattttcatttggatttttcttatgaggcaataagcaaaaagatggaagattataacaccgtatgtcatgtattgaatgggctgtgtgtttcctccagtgaagttttaagtgtgtcatcatgtgttgatattatgatgcctaaagatgcttctgtgtccgctgacttcaaaactaaagaagtggttcatggagatttattaatatcagtacagggaaaagtagaaaatatacattcacttgtctgtaagtgggaaagatgcattcctggtaatgagaagtacagtctatgtatccatattgctgataataatcatgcggtatatatccgtggatactcaaacaaacattttactgttggcattggaccaggggcaacagtgacattccaccgcatccgtttcaaacagtttgctccttcccttctggttttctttaattgtttcttccattattttgttaggatcgttgcagcataaaacccctatttacccatctgcagcattttagcttttaccttgatctgactagaaacctgatgtgatgtctacccttgcttgctttgtaagaaatggtagtttggtggtacactgaatagaacatgttgagcgaactgactagtgcgccctgtttacatgttatactctacatggataaacatgattttaatgagtttacttttgtcaatccttacaaattacaataactcgctgtgctaattgcttgggatcattctttttacataatatcaggttcaatgtataaatctgaacttcagggtacaatttacttctaaatataccattgcattctctttttttgaccgaaagggccatgccccccatttcattaagaaatgaaccacattcatactgtcttacaaggaccaggcaaaagcaagatttaatcctaaaccgccagttcaaccaaaatagcaaaaggaaccaaatgctaagactggtctagagtttaacattatcaacgctgaaacatacaagcagagataggccatctagattattacaaatttacaagctgttaggagacgaagctccagatcagctaagatgcagttaagacccagcaaccaaatttttccagcagcgctctcagaaatgctccagcagatgatgacgaatgtcgcgccagtcaacaacatcttccccgcgccactcatccaagaattctcttggtattcggcgcccagcctttagctcgatcaaacacctcccttgccgtccttctgactagacggcttcctccctccagggtctcttttcccattttttttctgcaaaatcgaccattagtccaaccaatgacaacataagaaaacaatgtcaaaactcaaaaggctcactaatcaacttattattgaaacaagcatcatttctgatttcccaaatggaccagagaaccgcccctgctcccacaatcatcaaatttctgtgcttcttactaaagccgtccaaccaacgagtacaggtctgtgtggctccttggaacagacttcaggttcagggcaacctgtacaattctccagatgaatttagccacagagcatttgaagaacaagtgatcaggttattcaaaaaccccacagaaacaacacacacaacttcctttccagtttttttttttttcagattgctttttgttagaattttgttgttaacgaccaaccagaggaaaattttgatcttttgaggtatgttaactttccacaagaaattgaaagggacttttgttgcaatgcttctaatctgtttgtaaagagattttacagagaagcctgctttgcctaaagtacacagagccgagtcctcttctctcagtctttaggacccacataacagtttaagggattcaaaatgagtcccagatttcaccaactaatcttctcctaaattttaaagcagaaaggttggatctaagaactctgttcactgtaatgtttttgtcaaaggttaagctaaatagaattgagttgccaggggggaatctcccagccaggtatcattccaaaagctagtttggttaccattgcctatcttttttctacagaacttgtaaacagtatctttaactttcagcagacctttccaaaaatacaaatcatcttgctttttctctaccataataagaggttttcccttaactgtatttcgacctaacgatattctgccaaatcccatctgaggtttctaacttccaaatccacttggcaaggaggccaatattcattttttccaagtcaatcacacccaaacccccttgatcttcagggagacacaccgtgtcccaatccgttaagtggtattttttggtcaattgacccccctgccacaataatcttttttctgtaaatatcaagttttttaatcagacttaggggcagaatacagggagagcatgtataaaggaacgttcgaaaggctgctgttcagcagagtgatcctaccccctaaatggcgcctctgagggggacaggtgctggttttcattctttatttttaactcattaattttttgagttaggtattttttggattttttgtactccttcaaaatttaggttccaccctttcagctttttttaaagtcttttcactttccccttccatatctccaaactgttctcgtttttgactggggatttccagttactctccacaatctgtttgaactcttgtcttttaatccaacaaagctcatacctaaaatcctttttcggaacactcatcccacctgtactcagacagaggggaacgttatccaaaaatgatctgtttaagactaaccatcacattaatataagttagatcccaatcgggactaaccaaaattctgtccaatttttcaaaggtggggggctctctgttgttggaccacatgtagagtctacccatgaggtccaattctataagattatactgagcaatgatatcattgaaaaggaaactccatctattatttcctcccggtttgtttttgtcttttttcccatcttagaacattgaagtctcccccaaccaacataggatatctgttattagaacagaaaaccggcagttctctaagaaagttctctttcctattatcctgagccgcaccataaacgttgatgaagttccatttaatctgcttgtttcttatattctctgttatctggctgcaggcatggattattcttaacctctgagacatacattgagcttcaccgtgcttgttctttcatcagaagtattttacagacagtagacccatgcaatttcactgcagggtagcaactatccttgtgctggtattgaacaaatcgactaatcagggtgaaactccaaatgtaaaagttcggctagctggttttattctggatgatggatcatccctgtgctgtggctgggctgatgatgctagggcagaattattgcttaggctgcaggaaattgtgcatctggatgcttctgttaatttaaagctttcaaaaggaggagagaatagcacaaaattaaaatatactattggatgctgtcttgaaaaaatgttgaagcagcacacaagtgttaccgtaaagaactgtggaattcctcctgatttctattgccgagatttggatgcatcttctgtttcggacaaagccttaagtcgcttggaagacaaacttctgaaatttattgtccttaatgcttgttgcaagggatctctgaatgttatggcatcagctctgagcccagatgatataaatgggttcaatgtggagctccctgttccagtgcagaacatgcggatgctttggatagaagaagttttcccagtagatcccttggaagaagctcgcagactacatgatattttggaaaacagctagtgttcacacattctggatagttagtatgcagcataaaaaaaagaggatggattgtccagaactccagatcgtactgccacttcgctgagattttcgcaaaggaaaacttgtttcacactcagtatccagaaaaggatggtttgtccagatagggccgccaccttgaagttgatcccagattggtcctccacattttccaaagagatgtactcacggcgaacgagcgatatatccttttgatgctgatactgatctctgacgtatgaagaagggacataaatttggctgttcgatctcttttgctgaacgagcgggccttttgtatccaatgtcccaagctccccaaagcaacgcaatgtgtatattctacttgcattattatgtcccaacgttaattttggcttatatcatgcttcctctttcgtatcctactactgttactataatctgatggtgtcaagatcaactgtgtagtttggacacaca

SEQ ID NO: 68976 - DNA, 6381 bp, Zea Mays
atggaggccctcggcgccccgcccccgccgcgtttcactgtggccgacctcctccggctccgccgtcccacaaccggcgcctcctccctcctttgcctctccgtccccacctccacctccacatcccgaccccgtaaaaagcacaagctctccgccccagtcccaacctggagcaccggcacggtcccgttcgcgccgatgtcccaccccgtgctcctttccggcacgctctccctcccctccgcctcctccccgatctcctgccgcagcaactgcttttccttctccgacccatgccccaccgctgcctccccggccaccgcggccgcctccgtctgctgctgcatcctcgacttcgatcccgccgctctgggccgcgtgatccgtgtccttgcgtggaactacctaccctcactgcgcctccacgccgagccgggcgtactcgaagtggtccgctggcacctcgaggagtccgctcctcccgtgaaatatagcttcctggcgacggtccccttccgtttcccggatcaagagcccgacttggctacccgcggctgcgcatttggtttggtcaggtccgtcagcattgtgttcagtatgccgcttgccaaggctgatgcaggaagcagaaattcagttgggtttctggcggagattttgtgttgtgggtgtcgccgctgctgcagggcgacaccgccggaagatgcccagactcacatgtttgagacgatgaaatttgtctactttgtggatgcgtctagcatgtggcggccggttctagtgtggcttgtggggaggctggtgtacatttctgggttaagtaaaaaaatggtttctgttggggacaaagcctcacacacaattttggtgtcatctgcgaagacaaccatggcatggtgcccatcctacaggggcagtctgccattggataacttacctgaaaagtgcggtggagagtatgctggggttatcactggaatttattcacagggtctggtggttgagctggatgacactgcatggctgctgattgatgatcagaagcttctgccaccacattcccttcgagttggtgccattgtctctgtaaagaactttcgagcagtgtgtctgaactttgcttggacacgggttgttctgcttgcaacttgcagtaaaacctgcattactgtaaactgtttttccttggtggattccaaaattcatttgaagacagataacaagggcctcttaggaacgtttgttgactcattggagatgcctgctcgattttggatgttacttctgatatcatgctttaaacagaagtttactaaattattttctgataaagagattttgggttcacaaaatgtaccaacagaagcaagggttggttcatgcttatgctactaaaattctcacgtcaaagtgccaacctcaggaaagtttaataataaaattctgcagacataactgtagtagcttaagccttggatctaaactggaggcttgcaaattggtcgtaccattctctaatttagtctgcaagtgtgaatcattgtggatattatcgatgcttaaattatggaacggttctgaaaaagtgggcaagagccagggtttcttatgcgatggggtttcctataccagcagtaccaaaagaataatttcgagtgaagatctggattttatattagtgggaagcatcaaggtacattttgaaatgcctgtgttctttctgtcttcagacttctccgctgtcagggagactgcagttggttgattccactggatgtatagatgtttttatacctgatctcccgcctaatgagagcttgcatgacatatatgagattgtcaattacaaactagctcttgaaggcccgatggcttacatagatcattatgatgttgctgatgccctatcctgtaaagctgtgtttcagaagcttccttacaaaaaaagattgcatcacctcaatatttatgttatagttcaatggaggcaattaattcatattggcccttcctcgtgtattccttcttatattaattataggatcaggttgtttcacttgctgaagttgtcccacatatttcctgtgaatagcaacattcaatgttcaaacatgccagggtctagcctgtatgctgaagctgtaatacttccatatgttttgaagtttattgggcaaggcgaatttcttgagcatgctgagggctttataatgtcacactctactttactaggtaattctgaagcctctgtggcaaaatcatgcaatattccatgttcgctaagctttggcagcaccaacctttgtggtactctggtgtctacctatgcctctggatcagaaggtactgttctaaatgaacctattgtactaagaaaagaatactcaaggatcttgttggagttcgaggcaggaatttttaagaaatatcagttaccgcgaatcaatggttcctatattctccaatgtcccagtcgaagttttacttgcaccatgggaaactgtggatgtttgcaaggtggtaaagtctcgattgatgctcaagatagactttggagcttcgccattaccattggtggtaatataaacatcaaggggtcaattggggatcaatctattggagttacttcaatgaagatggatgagatattttccagaaatatggtcgatgatgagctaagattagttcagccttggaatgacttctaccgtaattcttattttcatttggatttttcttatgaggcaataagcaaaaagatggaagattataacaccgtatgtcatgtattgaatgggctgtgtgtttcctccagtgaagttttaagtgtgtcatcatgtgttgatattatgatgcctaaagatgcttctgtgtccgctgacttcaaaactaaagaagtggttcatggagatttattaatatcagtacagggaaaagtagaaaatatacattcacttgtctgtaagtgggaaagatgcattcctggtaatgagaagtacagtctatgtatccatattgctgataataatcatgcggtatatatccgtggatactcaaacaaacattttactgttggcattggaccaggggcaacagtgacattccaccgcatccgtttcaaacagtttgctccttcccttctggttttctttaattgtttcttccattattttgttaggatcgttgcagcataaaacccctatttacccatctgcagcattttagcttttaccttgatctgactagaaacctgatgtgatgtctacccttgcttgctttgtaagaaatggtagtttggtggtacactgaatagaacatgttgagcgaactgactagtgcgccctgtttacatgttatactctacatggataaacatgattttaatgagtttacttttgtcaatccttacaaattacaataactcgctgtgctaattgcttgggatcattctttttacataatatcaggttcaatgtataaatctgaacttcagggtacaatttacttctaaatataccattgcattctctttttttgaccgaaagggccatgccccccatttcattaagaaatgaaccacattcatactgtcttacaaggaccaggcaaaagcaagatttaatcctaaaccgccagttcaaccaaaatagcaaaaggaaccaaatgctaagactggtctagagtttaacattatcaacgctgaaacatacaagcagagataggccatctagattattacaaatttacaagctgttaggagacgaagctccagatcagctaagatgcagttaagacccagcaaccaaatttttccagcagcgctctcagaaatgctccagcagatgatgacgaatgtcgcgccagtcaacaacatcttccccgcgccactcatccaagaattctcttggtattcggcgcccagcctttagctcgatcaaacacctcccttgccgtccttctgactagacggcttcctccctccagggtctcttttcccattttttttctgcaaaatcgaccattagtccaaccaatgacaacataagaaaacaatgtcaaaactcaaaaggctcactaatcaacttattattgaaacaagcatcatttctgatttcccaaatggaccagagaaccgcccctgctcccacaatcatcaaatttctgtgcttcttactaaagccgtccaaccaacgagtacaggtctgtgtggctccttggaacagacttcaggttcagggcaacctgtacaattctccagatgaatttagccacagagcatttgaagaacaagtgatcaggttattcaaaaaccccacagaaacaacacacacaacttcctttccagtttttttttttttcagattgctttttgttagaattttgttgttaacgaccaaccagaggaaaattttgatcttttgaggtatgttaactttccacaagaaattgaaagggacttttgttgcaatgcttctaatctgtttgtaaagagattttacagagaagcctgctttgcctaaagtacacagagccgagtcctcttctctcagtctttaggacccacataacagtttaagggattcaaaatgagtcccagatttcaccaactaatcttctcctaaattttaaagcagaaaggttggatctaagaactctgttcactgtaatgtttttgtcaaaggttaagctaaatagaattgagttgccaggggggaatctcccagccaggtatcattccaaaagctagtttggttaccattgcctatcttttttctacagaacttgtaaacagtatctttaactttcagcagacctttccaaaaatacaaatcatcttgctttttctctaccataataagaggttttcccttaactgtatttcgacctaacgatattctgccaaatcccatctgaggtttctaacttccaaatccacttggcaaggaggccaatattcattttttccaagtcaatcacacccaaacccccttgatcttcagggagacacaccgtgtcccaatccgttaagtggtattttttggtcaattgacccccctgccacaataatcttttttctgtaaatatcaagttttttaatcagacttaggggcagaatacagggagagcatgtataaaggaacgttcgaaaggctgctgttcagcagagtgatcctaccccctaaatggcgcctctgagggggacaggcatggattattcttaacctctgagacatacattgagcttcaccgtgcttgttctttcatcagaagtattttacagacagtagacccatgcaatttcactgcagggtagcaactatccttgtgctggtattgaacaaatcgactaatcagggtgaaactccaaatgtaaaagttcggctagctggttttattctggatgatggatcatccctgtgctgtggctgggctgatgatgctagggcagaattattgcttaggctgcaggaaattgtgcatctggatgcttctgttaatttaaagctttcaaaaggaggagagaatagcacaaaattaaaatatactattggatgctgtcttgaaaaaatgttgaagcagcacacaagtgttaccgtaaagaactgtggaattcctcctgatttctattgccgagatttggatgcatcttctgtttcggacaaagccttaagtcgcttggaagacaaacttctgaaatttattgtccttaatgcttgttgcaagggatctctgaatgttatggcatcagctctgagcccagatgatataaatgggttcaatgtggagctccctgttccagtgcagaacatgcggatgctttggatagaagaagttttcccagtagatcccttggaagaagctcgcagactacatgatattttggaaaacagctagtgttcacacattctggatagttagtatgcagcataaaaaaaagaggatggattgtccagaactccagatcgtactgccacttcgctgagattttcgcaaaggaaaacttgtttcacactcagtatccagaaaaggatggtttgtccagatagggccgccaccttgaagttgatcccagattggtcctccacattttccaaagagatgtactcacggcgaacgagcgatatatccttttgatgctgatactgatctctgacgtatgaagaagggacataaatttggctgttcgatctcttttgctgaacgagcgggccttttgtatccaatgtcccaagctccccaaagcaacgcaatgtgtatattctacttgcattattatgtcccaacgttaattttggcttatatcatgcttcctctttcgtatcctactactgttactataatctgatggtgtcaagatcaactgtgtagtttggacacaca

SEQ ID NO: 68977 - DNA, 6334 bp, Zea Mays
atggaggccctcggcgccccgcccccgccgcgtttcactgtggccgacctcctccggctccgccgtcccacaaccggcgcctcctccctcctttgcctctccgtccccacctccacctccacatcccgaccccgtaaaaagcacaagctctccgccccagtcccaacctggagcaccggcacggtcccgttcgcgccgatgtcccaccccgtgctcctttccggcacgctctccctcccctccgcctcctccccgatctcctgccgcagcaactgcttttccttctccgacccatgccccaccgctgcctccccggccaccgcggccgcctccgtctgctgctgcatcctcgacttcgatcccgccgctctgggccgcgtgatccgtgtccttgcgtggaactacctaccctcactgcgcctccacgccgagccgggcgtactcgaagtggtccgctggcacctcgaggagtccgctcctcccgtgaaatatagcttcctggcgacggtccccttccgtttcccggatcaagagcccgacttggctacccgcggctgcgcatttggtttggtcaggtccgtcagcattgtgttcagtatgccgcttgccaaggctgatgcaggaagcagaaattcagttgggtttctggcggagattttgtgttgtgggtgtcgccgctgctgcagggcgacaccgccggaagatgcccagactcacatgtttgagacgatgaaatttgtctactttgtggatgcgtctagcatgtggcggccggttctagtgtggcttgtggggaggctggtgtacatttctgggttaagtaaaaaaatggtttctgttggggacaaagcctcacacacaattttggtgtcatctgcgaagacaaccatggcatggtgcccatcctacaggggcagtctgccattggataacttacctgaaaagtgcggtggagagtatgctggggttatcactggaatttattcacagggtctggtggttgagctggatgacactgcatggctgctgattgatgatcagaagcttctgccaccacattcccttcgagttggtgccattgtctctgtaaagaactttcgagcagtgtgtctgaactttgcttggacacgggttgttctgcttgcaacttgcagtaaaacctgcattactgtaaactgtttttccttggtggattccaaaattcatttgaagacagataacaagggcctcttaggaacgtttgttgactcattggagatgcctgctcgattttggatgttacttctgatatcatgctttaaacagaagtttactaaattattttctgataaagagattttgggttcacaaaataagcaagggttggttcatgcttatgctactaaaattctcacgtcaaagtgccaacctcaggaaagtttaataataaaattctgcagacataactgtagtagcttaagccttggatctaaactggaggcttgcaaattggtcgtaccattctctaatttagtctgcaagtgtgaatcattgtggatattatcgatgcttaaattatggaacggttctgaaaaagtgggcaagagccagggtttcttatgcgatggggtttcctataccagcagtaccaaaagaataatttcgagtgaagatctggattttatattagtgggaagcatcaagacttctccgctgtcagggagactgcagttggttgattccactggatgtatagatgtttttatacctgatctcccgcctaatgagagcttgcatgacatatatgagattgtcaattacaaactagctcttgaaggcccgatggcttacatagatcattatgatgttgctgatgccctatcctgtaaagctgtgtttcagaagcttccttacaaaaaaagattgcatcacctcaatatttatgttatagttcaatggaggcaattaattcatattggcccttcctcgtgtattccttcttatattaattataggatcaggttgtttcacttgctgaagttgtcccacatatttcctgtgaatagcaacattcaatgttcaaacatgccagggtctagcctgtatgctgaagctgtaatacttccatatgttttgaagtttattgggcaaggcgaatttcttgagcatgctgagggctttataatgtcacactctactttactaggtaattctgaagcctctgtggcaaaatcatgcaatattccatgttcgctaagctttggcagcaccaacctttgtggtactctggtgtctacctatgcctctggatcagaaggtactgttctaaatgaacctattgtactaagaaaagaatactcaaggatcttgttggagttcgaggcaggaatttttaagaaatatcagttaccgcgaatcaatggttcctatattctccaatgtcccagtcgaagttttacttgcaccatgggaaactgtggatgtttgcaaggtggtaaagtctcgattgatgctcaagatagactttggagcttcgccattaccattggtggtaatataaacatcaaggggtcaattggggatcaatctattggagttacttcaatgaagatggatgagatattttccagaaatatggtcgatgatgagctaagattagttcagccttggaatgacttctaccgtaattcttattttcatttggatttttcttatgaggcaataagcaaaaagatggaagattataacaccgtatgtcatgtattgaatgggctgtgtgtttcctccagtgaagttttaagtgtgtcatcatgtgttgatattatgatgcctaaagatgcttctgtgtccgctgacttcaaaactaaagaagtggttcatggagatttattaatatcagtacagggaaaagtagaaaatatacattcacttgtctgtaagtgggaaagatgcattcctggtaatgagaagtacagtctatgtatccatattgctgataataatcatgcggtatatatccgtggatactcaaacaaacattttactgttggcattggaccaggggcaacagtgacattccaccgcatccgtttcaaacagtttgctccttcccttctggttttctttaattgtttcttccattattttgttaggatcgttgcagcataaaacccctatttacccatctgcagcattttagcttttaccttgatctgactagaaacctgatgtgatgtctacccttgcttgctttgtaagaaatggtagtttggtggtacactgaatagaacatgttgagcgaactgactagtgcgccctgtttacatgttatactctacatggataaacatgattttaatgagtttacttttgtcaatccttacaaattacaataactcgctgtgctaattgcttgggatcattctttttacataatatcaggttcaatgtataaatctgaacttcagggtacaatttacttctaaatataccattgcattctctttttttgaccgaaagggccatgccccccatttcattaagaaatgaaccacattcatactgtcttacaaggaccaggcaaaagcaagatttaatcctaaaccgccagttcaaccaaaatagcaaaaggaaccaaatgctaagactggtctagagtttaacattatcaacgctgaaacatacaagcagagataggccatctagattattacaaatttacaagctgttaggagacgaagctccagatcagctaagatgcagttaagacccagcaaccaaatttttccagcagcgctctcagaaatgctccagcagatgatgacgaatgtcgcgccagtcaacaacatcttccccgcgccactcatccaagaattctcttggtattcggcgcccagcctttagctcgatcaaacacctcccttgccgtccttctgactagacggcttcctccctccagggtctcttttcccattttttttctgcaaaatcgaccattagtccaaccaatgacaacataagaaaacaatgtcaaaactcaaaaggctcactaatcaacttattattgaaacaagcatcatttctgatttcccaaatggaccagagaaccgcccctgctcccacaatcatcaaatttctgtgcttcttactaaagccgtccaaccaacgagtacaggtctgtgtggctccttggaacagacttcaggttcagggcaacctgtacaattctccagatgaatttagccacagagcatttgaagaacaagtgatcaggttattcaaaaaccccacagaaacaacacacacaacttcctttccagtttttttttttttcagattgctttttgttagaattttgttgttaacgaccaaccagaggaaaattttgatcttttgaggtatgttaactttccacaagaaattgaaagggacttttgttgcaatgcttctaatctgtttgtaaagagattttacagagaagcctgctttgcctaaagtacacagagccgagtcctcttctctcagtctttaggacccacataacagtttaagggattcaaaatgagtcccagatttcaccaactaatcttctcctaaattttaaagcagaaaggttggatctaagaactctgttcactgtaatgtttttgtcaaaggttaagctaaatagaattgagttgccaggggggaatctcccagccaggtatcattccaaaagctagtttggttaccattgcctatcttttttctacagaacttgtaaacagtatctttaactttcagcagacctttccaaaaatacaaatcatcttgctttttctctaccataataagaggttttcccttaactgtatttcgacctaacgatattctgccaaatcccatctgaggtttctaacttccaaatccacttggcaaggaggccaatattcattttttccaagtcaatcacacccaaacccccttgatcttcagggagacacaccgtgtcccaatccgttaagtggtattttttggtcaattgacccccctgccacaataatcttttttctgtaaatatcaagttttttaatcagacttaggggcagaatacagggagagcatgtataaaggaacgttcgaaaggctgctgttcagcagagtgatcctaccccctaaatggcgcctctgagggggacaggcatggattattcttaacctctgagacatacattgagcttcaccgtgcttgttctttcatcagaagtattttacagacagtagacccatgcaatttcactgcagggtagcaactatccttgtgctggtattgaacaaatcgactaatcagggtgaaactccaaatgtaaaagttcggctagctggttttattctggatgatggatcatccctgtgctgtggctgggctgatgatgctagggcagaattattgcttaggctgcaggaaattgtgcatctggatgcttctgttaatttaaagctttcaaaaggaggagagaatagcacaaaattaaaatatactattggatgctgtcttgaaaaaatgttgaagcagcacacaagtgttaccgtaaagaactgtggaattcctcctgatttctattgccgagatttggatgcatcttctgtttcggacaaagccttaagtcgcttggaagacaaacttctgaaatttattgtccttaatgcttgttgcaagggatctctgaatgttatggcatcagctctgagcccagatgatataaatgggttcaatgtggagctccctgttccagtgcagaacatgcggatgctttggatagaagaagttttcccagtagatcccttggaagaagctcgcagactacatgatattttggaaaacagctagtgttcacacattctggatagttagtatgcagcataaaaaaaagaggatggattgtccagaactccagatcgtactgccacttcgctgagattttcgcaaaggaaaacttgtttcacactcagtatccagaaaaggatggtttgtccagatagggccgccaccttgaagttgatcccagattggtcctccacattttccaaagagatgtactcacggcgaacgagcgatatatccttttgatgctgatactgatctctgacgtatgaagaagggacataaatttggctgttcgatctcttttgctgaacgagcgggccttttgtatccaatgtcccaagctccccaaagcaacgcaatgtgtatattctacttgcattattatgtcccaacgttaattttggcttatatcatgcttcctctttcgtatcctactactgttactataatctgatggtgtcaagatcaactgtgtagtttggacacaca

SEQ ID NO: 68978 - DNA, 7113 bp, Zea Mays
ctcaaacccccaaccccaacgcccctccccaatcccttagccatggaggccctcggcgccccgcccccgccgcgtttcactgtggccgacctcctccggctccgccgtcccacaaccggcgcctcctccctcctttgcctctccgtccccacctccacctccacatcccgaccccgtaaaaagcacaagctctccgccccagtcccaacctggagcaccggcacggtcccgttcgcgccgatgtcccaccccgtgctcctttccggcacgctctccctcccctccgcctcctccccgatctcctgccgcagcaactgcttttccttctccgacccatgccccaccgctgcctccccggccaccgcggccgcctccgtctgctgctgcatcctcgacttcgatcccgccgctctgggccgcgtgatccgtgtccttgcgtggaactacctaccctcactgcgcctccacgccgagccgggcgtactcgaagtggtccgctggcacctcgaggagtccgctcctcccgtgaaatatagcttcctggcgacggtccccttccgtttcccggatcaagagcccgacttggctacccgcggctgcgcatttggtttggtcaggtccgtcagcattgtgttcagtatgccgcttgccaaggctgatgcaggaagcagaaattcagttgggtttctggcggagattttgtgttgtgggtgtcgccgctgctgcagggcgacaccgccggaagatgcccagactcacatgtttgagacgatgaaatttgtctactttgtggatgcgtctagcatgtggcggccggttctagtgtggcttgtggggaggctggtgtacatttctgggttaagtaaaaaaatggtttctgttggggacaaagcctcacacacaattttggtgtcatctgcgaagacaaccatggcatggtgcccatcctacaggggcagtctgccattggataacttacctgaaaagtgcggtggagagtatgctggggttatcactggaatttattcacagggtctggtggttgagctggatgacactgcatggctgctgattgatgatcagaagcttctgccaccacattcccttcgagttggtgccattgtctctgtaaagaactttcgagcagtgtgtctgaactttgcttggacacgggttgttctgcttgcaacttgcagtaaaacctgcattactgtaaactgtttttccttggtggattccaaaattcatttgaagacagataacaagggcctcttaggaacgtttgttgactcattggagatgcctgctcgattttggatgttacttctgatatcatgctttaaacagaagtttactaaattattttctgataaagagattttgggttcacaaaatgtaccaacagaagcaagggttggttcatgcttatgctactaaaattctcacgtcaaagtgccaacctcaggaaagtttaataataaaattctgcagacataactgtagtagcttaagccttggatctaaactggaggcttgcaaattggtcgtaccattctctaatttagtctgcaagtgtgaatcattgtggatattatcgatgcttaaattatggaacggttctgaaaaagtgggcaagagccagggtttcttatgcgatggggtttcctataccagcagtaccaaaagaataatttcgagtgaagatctggattttatattagtgggaagcatcaagacttctccgctgtcagggagactgcagttggttgattccactggatgtatagatgtttttatacctgatctcccgcctaatgagagcttgcatgacatatatgagattgtcaattacaaactagctcttgaaggcccgatggcttacatagatcattatgatgttgctgatgccctatcctgtaaagctgtgtttcagaagcttccttacaaaaaaagattgcatcacctcaatatttatgttatagttcaatggaggcaattaattcatattggcccttcctcgtgtattccttcttatattaattataggatcaggttgtttcacttgctgaagttgtcccacatatttcctgtgaatagcaacattcaatgttcaaacatgccagggtctagcctgtatgctgaagctgtaatacttccatatgttttgaagtttattgggcaaggcgaatttcttgagcatgctgagggctttataatgtcacactctactttactaggtaattctgaagcctctgtggcaaaatcatgcaatattccatgttcgctaagctttggcagcaccaacctttgtggtactctggtgtctacctatgcctctggatcagaaggtactgttctaaatgaacctattgtactaagaaaagaatactcaaggatcttgttggagttcgaggcaggaatttttaagaaatatcagttaccgcgaatcaatggttcctatattctccaatgtcccagtcgaagttttacttgcaccatgggaaactgtggatgtttgcaaggtggtaaagtctcgattgatgctcaagatagactttggagcttcgccattaccattggtggtaatataaacatcaaggggtcaattggggatcaatctattggagttacttcaatgaagatggatgagatattttccagaaatatggtcgatgatgagctaagattagttcagccttggaatgacttctaccgtaattcttattttcatttggatttttcttatgaggcaataagcaaaaagatggaagattataacaccgtatgtcatgtattgaatgggctgtgtgtttcctccagtgaagttttaagtgtgtcatcatgtgttgatattatgatgcctaaagatgcttctgtgtccgctgacttcaaaactaaagaagtggttcatggagatttattaatatcagtacagggaaaagtagaaaatatacattcacttgtctgtaagtgggaaagatgcattcctggtaatgagaagtacagtctatgtatccatattgctgataataatcatgcggtatatatccgtggatactcaaacaaacattttactgttggcattggaccaggggcaacagtgacattccaccgcatccgtttcaaacagtttgctccttcccttctggttttctttaattgtttcttccattattttgttaggatcgttgcagcataaaacccctatttacccatctgcagcattttagcttttaccttgatctgactagaaacctgatgtgatgtctacccttgcttgctttgtaagaaatggtagtttggtggtacactgaatagaacatgttgagcgaactgactagtgcgccctgtttacatgttatactctacatggataaacatgattttaatgagtttacttttgtcaatccttacaaattacaataactcgctgtgctaattgcttgggatcattctttttacataatatcaggttcaatgtataaatctgaacttcagggtacaatttacttctaaatataccattgcattctctttttttgaccgaaagggccatgccccccatttcattaagaaatgaaccacattcatactgtcttacaaggaccaggcaaaagcaagatttaatcctaaaccgccagttcaaccaaaatagcaaaaggaaccaaatgctaagactggtctagagtttaacattatcaacgctgaaacatacaagcagagataggccatctagattattacaaatttacaagctgttaggagacgaagctccagatcagctaagatgcagttaagacccagcaaccaaatttttccagcagcgctctcagaaatgctccagcagatgatgacgaatgtcgcgccagtcaacaacatcttccccgcgccactcatccaagaattctcttggtattcggcgcccagcctttagctcgatcaaacacctcccttgccgtccttctgactagacggcttcctccctccagggtctcttttcccattttttttctgcaaaatcgaccattagtccaaccaatgacaacataagaaaacaatgtcaaaactcaaaaggctcactaatcaacttattattgaaacaagcatcatttctgatttcccaaatggaccagagaaccgcccctgctcccacaatcatcaaatttctgtgcttcttactaaagccgtccaaccaacgagtacaggtctgtgtggctccttggaacagacttcaggttcagggcaacctgtacaattctccagatgaatttagccacagagcatttgaagaacaagtgatcaggttattcaaaaaccccacagaaacaacacacacaacttcctttccagtttttttttttttcagattgctttttgttagaattttgttgttaacgaccaaccagaggaaaattttgatcttttgaggtatgttaactttccacaagaaattgaaagggacttttgttgcaatgcttctaatctgtttgtaaagagattttacagagaagcctgctttgcctaaagtacacagagccgagtcctcttctctcagtctttaggacccacataacagtttaagggattcaaaatgagtcccagatttcaccaactaatcttctcctaaattttaaagcagaaaggttggatctaagaactctgttcactgtaatgtttttgtcaaaggttaagctaaatagaattgagttgccaggggggaatctcccagccaggtatcattccaaaagctagtttggttaccattgcctatcttttttctacagaacttgtaaacagtatctttaactttcagcagacctttccaaaaatacaaatcatcttgctttttctctaccataataagaggttttcccttaactgtatttcgacctaacgatattctgccaaatcccatctgaggtttctaacttccaaatccacttggcaaggaggccaatattcattttttccaagtcaatcacacccaaacccccttgatcttcagggagacacaccgtgtcccaatccgttaagtggtattttttggtcaattgacccccctgccacaataatcttttttctgtaaatatcaagttttttaatcagacttaggggcagaatacagggagagcatgtataaaggaacgttcgaaaggctgctgttcagcagagtgatcctaccccctaaatggcgcctctgagggggacaggtgctggttttcattctttatttttaactcattaattttttgagttaggtattttttggattttttgtactccttcaaaatttaggttccaccctttcagctttttttaaagtcttttcactttccccttccatatctccaaactgttctcgtttttgactggggatttccagttactctccacaatctgtttgaactcttgtcttttaatccaacaaagctcatacctaaaatcctttttcggaacactcatcccacctgtactcagacagaggggaacgttatccaaaaatgatctgtttaagactaaccatcacattaatataagttagatcccaatcgggactaaccaaaattctgtccaatttttcaaaggtggggggctctctgttgttggaccacatgtagagtctacccatgaggtccaattctataagattatactgagcaatgatatcattgaaaaggaaactccatctattatttcctcccggtttgtttttgtcttttttcccatcttagaacattgaagtctcccccaaccaacataggatatctgttattagaacagaaaaccggcagttctctaagaaagttctctttcctattatcctgagccgcaccataaacgttgatgaagttccatttaatctgcttgtttcttatattctctgttatctggctgcaggcatggattattcttaacctctgagacatacattgagcttcaccgtgcttgttctttcatcagaagtattttacagacagtagacccatgcaatttcactgcagggtagcaactatccttgtgctggtattgaacaaatcgactaatcagggtgaaactccaaatgtaaaagttcggctagctggttttattctgggtaagacatgcagtattttttctgtttaagctacagaagatgatggatcatccctgtgctgtggctgggctgatgatgctagggcagaattattgcttaggctgcaggaaattgtgcatctggatgcttctgttaatttaaagctttcaaaaggaggagagaatagcacaaaattaaaatatactattggatgctgtcttgaaaaaatgttgaagcagcacacaagtgttaccgtaaagaactgtggaattcctcctgatttctattgccgagatttggatgcatcttctgtttcggacaaagccttaagtcgcttggaagacaaacttctgaaatttattgtccttaatgcttgttgcaagggatctctgaatgttatggcatcagctctgagcccagatgatataaatgggttcaatgtggagctccctgttccagtgcagaacatgcggatgctttggatagaagaagttttcccagtagatcccttggaagaagctcgcagactacatgatattttggaaaacagctagtgttcacacattctggatagttagtatgcagcataaaaaaaagaggatggattgtccagaactccagatcgtactgccacttcgctgagattttcgcaaaggaaaacttgtttcacactcagtatccagaaaaggatggtttgtccagatagggccgccaccttgaagttgatcccagattggtcctccacattttccaaagagatgtactcacggcgaacgagcgatatatccttttgatgctgatactgatctctgacgtatgaagaagggacataaatttggctgttcgatctcttttgctgaacgagcgggccttttgtatccaatgtcccaagctccccaaagcaacgcaatgtgtatattctacttgcattattatgtcccaacgttaattttggcttatatcatgcttcctctttcgtatcctactactgttactataatctgatggtgtcaagatcaactgtgtagtttggacacaca

SEQ ID NO: 68979 - DNA, 6985 bp, Zea Mays
ctcaaacccccaaccccaacgcccctccccaatcccttagccatggaggccctcggcgccccgcccccgccgcgtttcactgtggccgacctcctccggctccgccgtcccacaaccggcgcctcctccctcctttgcctctccgtccccacctccacctccacatcccgaccccgtaaaaagcacaagctctccgccccagtcccaacctggagcaccggcacggtcccgttcgcgccgatgtcccaccccgtgctcctttccggcacgctctccctcccctccgcctcctccccgatctcctgccgcagcaactgcttttccttctccgacccatgccccaccgctgcctccccggccaccgcggccgcctccgtctgctgctgcatcctcgacttcgatcccgccgctctgggccgcgtgatccgtgtccttgcgtggaactacctaccctcactgcgcctccacgccgagccgggcgtactcgaagtggtccgctggcacctcgaggagtccgctcctcccgtgaaatatagcttcctggcgacggtccccttccgtttcccggatcaagagcccgacttggctacccgcggctgcgcatttggtttggtcaggtccgtcagcattgtgttcagtatgccgcttgccaaggctgatgcaggaagcagaaattcagttgggtttctggcggagattttgtgttgtgggtgtcgccgctgctgcagggcgacaccgccggaagatgcccagactcacatgtttgagacgatgaaatttgtctactttgtggatgcgtctagcatgtggcggccggttctagtgtggcttgtggggaggctggtgtacatttctgggttaagtaaaaaaatggtttctgttggggacaaagcctcacacacaattttggtgtcatctgcgaagacaaccatggcatggtgcccatcctacaggggcagtctgccattggataacttacctgaaaagtgcggtggagagtatgctggggttatcactggaatttattcacagggtctggtggttgagctggatgacactgcatggctgctgattgatgatcagaagcttctgccaccacattcccttcgagttggtgccattgtctctgtaaagaactttcgagcagtgtgtctgaactttgcttggacacgggttgttctgcttgcaacttgcagtaaaacctgcattactgtaaactgtttttccttggtggattccaaaattcatttgaagacagataacaagggcctcttaggaacgtttgttgactcattggagatgcctgctcgattttggatgttacttctgatatcatgctttaaacagaagtttactaaattattttctgataaagagattttgggttcacaaaatgtaccaacagaagcaagggttggttcatgcttatgctactaaaattctcacgtcaaagtgccaacctcaggaaagtttaataataaaattctgcagacataactgtagtagcttaagccttggatctaaactggaggcttgcaaattggtcgtaccattctctaatttagtctgcaagtgtgaatcattgtggatattatcgatgcttaaattatggaacggttctgaaaaagtgggcaagagccagggtttcttatgcgatggggtttcctataccagcagtaccaaaagaataatttcgagtgaagatctggattttatattagtgggaagcatcaagacttctccgctgtcagggagactgcagttggttgattccactggatgtatagatgtttttatacctgatctcccgcctaatgagagcttgcatgacatatatgagattgtcaattacaaactagctcttgaaggcccgatggcttacatagatcattatgatgttgctgatgccctatcctgtaaagctgtgtttcagaagcttccttacaaaaaaagattgcatcacctcaatatttatgttatagttcaatggaggcaattaattcatattggcccttcctcgtgtattccttcttatattaattataggatcaggttgtttcacttgctgaagttgtcccacatatttcctgtgaatagcaacattcaatgttcaaacatgccagggtctagcctgtatgctgaagctgtaatacttccatatgttttgaagtttattgggcaaggcgaatttcttgagcatgctgagggctttataatgtcacactctactttactaggtaattctgaagcctctgtggcaaaatcatgcaatattccatgttcgctaagctttggcagcaccaacctttgtggtactctggtgtctacctatgcctctggatcagaaggtactgttctaaatgaacctattgtactaagaaaagaatactcaaggatcttgttggagttcgaggcaggaatttttaagaaatatcagttaccgcgaatcaatggttcctatattctccaatgtcccagtcgaagttttacttgcaccatgggaaactgtggatgtttgcaaggtggtaaagtctcgattgatgctcaagatagactttggagcttcgccattaccattggtggtaatataaacatcaaggggtcaattggggatcaatctattggagttacttcaatgaagatggatgagatattttccagaaatatggtcgatgatgagctaagattagttcagccttggaatgacttctaccgtaattcttattttcatttggatttttcttatgaggcaataagcaaaaagatggaagattataacaccgtatgtcatgtattgaatgggctgtgtgtttcctccagtgaagttttaagtgtgtcatcatgtgttgatattatgatgcctaaagatgcttctgtgtccgctgacttcaaaactaaagaagtggttcatggagatttattaatatcagtacagggaaaagtagaaaatatacattcacttgtctgtaagtgggaaagatgcattcctggtaatgagaagtacagtctatgtatccatattgctgataataatcatgcggtatatatccgtggatactcaaacaaacattttactgttggcattggaccaggggcaacagtgacattccaccgcatccgtttcaaacagtttgctccttcccttctggttttctttaattgtttcttccattattttgttaggatcgttgcagcataaaacccctatttacccatctgcagcattttagcttttaccttgatctgactagaaacctgatgtgatgtctacccttgcttgctttgtaagaaatggtagtttggtggtacactgaatagaacatgttgagcgaactgactagtgcgccctgtttacatgttatactctacatggataaacatgattttaatgagtttacttttgtcaatccttacaaattacaataactcgctgtgctaattgcttgggatcattctttttacataatatcaggttcaatgtataaatctgaacttcagggtacaatttacttctaaatataccattgcattctctttttttgaccgaaagggccatgccccccatttcattaagaaatgaaccacattcatactgtcttacaaggaccaggcaaaagcaagatttaatcctaaaccgccagttcaaccaaaatagcaaaaggaaccaaatgctaagactggtctagagtttaacattatcaacgctgaaacatacaagcagagataggccatctagattattacaaatttacaagctgttaggagacgaagctccagatcagctaagatgcagttaagacccagcaaccaaatttttccagcagcgctctcagaaatgctccagcagatgatgacgaatgtcgcgccagtcaacaacatcttccccgcgccactcatccaagaattctcttggtattcggcgcccagcctttagctcgatcaaacacctcccttgccgtccttctgactagacggcttcctccctccagggtctcttttcccattttttttctgcaaaatcgaccattagtccaaccaatgacaacataagaaaacaatgtcaaaactcaaaaggctcactaatcaacttattattgaaacaagcatcatttctgatttcccaaatggaccagagaaccgcccctgctcccacaatcatcaaatttctgtgcttcttactaaagccgtccaaccaacgagtacaggtctgtgtggctccttggaacagacttcaggttcagggcaacctgtacaattctccagatgaatttagccacagagcatttgaagaacaagtgatcaggttattcaaaaaccccacagaaacaacacacacaacttcctttccagtttttttttttttcagattgctttttgttagaattttgttgttaacgaccaaccagaggaaaattttgatcttttgaggtatgttaactttccacaagaaattgaaagggacttttgttgcaatgcttctaatctgtttgtaaagagattttacagagaagcctgctttgcctaaagtacacagagccgagtcctcttctctcagtctttaggacccacataacagtttaagggattcaaaatgagtcccagatttcaccaactaatcttctcctaaattttaaagcagaaaggttggatctaagaactctgttcactgtaatgtttttgtcaaaggttaagctaaatagaattgagttgccaggggggaatctcccagccaggtatcattccaaaagctagtttggttaccattgcctatcttttttctacagaacttgtaaacagtatctttaactttcagcagacctttccaaaaatacaaatcatcttgctttttctctaccataataagaggttttcccttaactgtatttcgacctaacgatattctgccaaatcccatctgaggtttctaacttccaaatccacttggcaaggaggccaatattcattttttccaagtcaatcacacccaaacccccttgatcttcagggagacacaccgtgtcccaatccgttaagtgggagagcatgtataaaggaacgttcgaaaggctgctgttcagcagagtgatcctaccccctaaatggcgcctctgagggggacaggtgctggttttcattctttatttttaactcattaattttttgagttaggtattttttggattttttgtactccttcaaaatttaggttccaccctttcagctttttttaaagtcttttcactttccccttccatatctccaaactgttctcgtttttgactggggatttccagttactctccacaatctgtttgaactcttgtcttttaatccaacaaagctcatacctaaaatcctttttcggaacactcatcccacctgtactcagacagaggggaacgttatccaaaaatgatctgtttaagactaaccatcacattaatataagttagatcccaatcgggactaaccaaaattctgtccaatttttcaaaggtggggggctctctgttgttggaccacatgtagagtctacccatgaggtccaattctataagattatactgagcaatgatatcattgaaaaggaaactccatctattatttcctcccggtttgtttttgtcttttttcccatcttagaacattgaagtctcccccaaccaacataggatatctgttattagaacagaaaaccggcagttctctaagaaagttctctttcctattatcctgagccgcaccataaacgttgatgaagttccatttaatctgcttgtttcttatattctctgttatctggctgcaggcatggattattcttaacctctgagacatacattgagcttcaccgtgcttgttctttcatcagaagtattttacagacagtagacccatgcaatttcactgcagggtagcaactatccttgtgctggtattgaacaaatcgactaatcagggtgaaactccaaatgtaaaagttcggctagctggttttattctggatgatggatcatccctgtgctgtggctgggctgatgatgctagggcagaattattgcttaggctgcaggaaattgtgcatctggatgcttctgttaatttaaagctttcaaaaggaggagagaatagcacaaaattaaaatatactattggatgctgtcttgaaaaaatgttgaagcagcacacaagtgttaccgtaaagaactgtggaattcctcctgatttctattgccgagatttggatgcatcttctgtttcggacaaagccttaagtcgcttggaagacaaacttctgaaatttattgtccttaatgcttgttgcaagggatctctgaatgttatggcatcagctctgagcccagatgatataaatgggttcaatgtggagctccctgttccagtgcagaacatgcggatgctttggatagaagaagttttcccagtagatcccttggaagaagctcgcagactacatgatattttggaaaacagctagtgttcacacattctggatagttagtatgcagcataaaaaaaagaggatggattgtccagaactccagatcgtactgccacttcgctgagattttcgcaaaggaaaacttgtttcacactcagtatccagaaaaggatggtttgtccagatagggccgccaccttgaagttgatcccagattggtcctccacattttccaaagagatgtactcacggcgaacgagcgatatatccttttgatgctgatactgatctctgacgtatgaagaagggacataaatttggctgttcgatctcttttgctgaacgagcgggccttttgtatccaatgtcccaagctccccaaagcaacgcaatgtgtatattctacttgcattattatgtcccaacgttaattttggcttatatcatgcttcctctttcgtatcctactactgttactataatctgatggtgtcaagatcaactgtgtagtttggacacaca

SEQ ID NO: 68980 - DNA, 6386 bp, Zea Mays
ctcaaacccccaaccccaacgcccctccccaatcccttagccatggaggccctcggcgccccgcccccgccgcgtttcactgtggccgacctcctccggctccgccgtcccacaaccggcgcctcctccctcctttgcctctccgtccccacctccacctccacatcccgaccccgtaaaaagcacaagctctccgccccagtcccaacctggagcaccggcacggtcccgttcgcgccgatgtcccaccccgtgctcctttccggcacgctctccctcccctccgcctcctccccgatctcctgccgcagcaactgcttttccttctccgacccatgccccaccgctgcctccccggccaccgcggccgcctccgtctgctgctgcatcctcgacttcgatcccgccgctctgggccgcgtgatccgtgtccttgcgtggaactacctaccctcactgcgcctccacgccgagccgggcgtactcgaagtggtccgctggcacctcgaggagtccgctcctcccgtgaaatatagcttcctggcgacggtccccttccgtttcccggatcaagagcccgacttggctacccgcggctgcgcatttggtttggtcaggtccgtcagcattgtgttcagtatgccgcttgccaaggctgatgcaggaagcagaaattcagttgggtttctggcggagattttgtgttgtgggtgtcgccgctgctgcagggcgacaccgccggaagatgcccagactcacatgtttgagacgatgaaatttgtctactttgtggatgcgtctagcatgtggcggccggttctagtgtggcttgtggggaggctggtgtacatttctgggttaagtaaaaaaatggtttctgttggggacaaagcctcacacacaattttggtgtcatctgcgaagacaaccatggcatggtgcccatcctacaggggcagtctgccattggataacttacctgaaaagtgcggtggagagtatgctggggttatcactggaatttattcacagggtctggtggttgagctggatgacactgcatggctgctgattgatgatcagaagcttctgccaccacattcccttcgagttggtgccattgtctctgtaaagaactttcgagcagtgtgtctgaactttgcttggacacgggttgttctgcttgcaacttgcagtaaaacctgcattactgtaaactgtttttccttggtggattccaaaattcatttgaagacagataacaagggcctcttaggaacgtttgttgactcattggagatgcctgctcgattttggatgttacttctgatatcatgctttaaacagaagtttactaaattattttctgataaagagattttgggttcacaaaatgtaccaacagaagcaagggttggttcatgcttatgctactaaaattctcacgtcaaagtgccaacctcaggaaagtttaataataaaattctgcagacataactgtagtagcttaagccttggatctaaactggaggcttgcaaattggtcgtaccattctctaatttagtctgcaagtgtgaatcattgtggatattatcgatgcttaaattatggaacggttctgaaaaagtgggcaagagccagggtttcttatgcgatggggtttcctataccagcagtaccaaaagaataatttcgagtgaagatctggattttatattagtgggaagcatcaagacttctccgctgtcagggagactgcagttggttgattccactggatgtatagatgtttttatacctgatctcccgcctaatgagagcttgcatgacatatatgagattgtcaattacaaactagctcttgaaggcccgatggcttacatagatcattatgatgttgctgatgccctatcctgtaaagctgtgtttcagaagcttccttacaaaaaaagattgcatcacctcaatatttatgttatagttcaatggaggcaattaattcatattggcccttcctcgtgtattccttcttatattaattataggatcaggttgtttcacttgctgaagttgtcccacatatttcctgtgaatagcaacattcaatgttcaaacatgccagggtctagcctgtatgctgaagctgtaatacttccatatgttttgaagtttattgggcaaggcgaatttcttgagcatgctgagggctttataatgtcacactctactttactaggtaattctgaagcctctgtggcaaaatcatgcaatattccatgttcgctaagctttggcagcaccaacctttgtggtactctggtgtctacctatgcctctggatcagaaggtactgttctaaatgaacctattgtactaagaaaagaatactcaaggatcttgttggagttcgaggcaggaatttttaagaaatatcagttaccgcgaatcaatggttcctatattctccaatgtcccagtcgaagttttacttgcaccatgggaaactgtggatgtttgcaaggtggtaaagtctcgattgatgctcaagatagactttggagcttcgccattaccattggtggtaatataaacatcaaggggtcaattggggatcaatctattggagttacttcaatgaagatggatgagatattttccagaaatatggtcgatgatgagctaagattagttcagccttggaatgacttctaccgtaattcttattttcatttggatttttcttatgaggcaataagcaaaaagatggaagattataacaccgtatgtcatgtattgaatgggctgtgtgtttcctccagtgaagttttaagtgtgtcatcatgtgttgatattatgatgcctaaagatgcttctgtgtccgctgacttcaaaactaaagaagtggttcatggagatttattaatatcagtacagggaaaagtagaaaatatacattcacttgtctgtaagtgggaaagatgcattcctggtaatgagaagtacagtctatgtatccatattgctgataataatcatgcggtatatatccgtggatactcaaacaaacattttactgttggcattggaccaggggcaacagtgacattccaccgcatccgtttcaaacagtttgctccttcccttctggttttctttaattgtttcttccattattttgttaggatcgttgcagcataaaacccctatttacccatctgcagcattttagcttttaccttgatctgactagaaacctgatgtgatgtctacccttgcttgctttgtaagaaatggtagtttggtggtacactgaatagaacatgttgagcgaactgactagtgcgccctgtttacatgttatactctacatggataaacatgattttaatgagtttacttttgtcaatccttacaaattacaataactcgctgtgctaattgcttgggatcattctttttacataatatcaggttcaatgtataaatctgaacttcagggtacaatttacttctaaatataccattgcattctctttttttgaccgaaagggccatgccccccatttcattaagaaatgaaccacattcatactgtcttacaaggaccaggcaaaagcaagatttaatcctaaaccgccagttcaaccaaaatagcaaaaggaaccaaatgctaagactggtctagagtttaacattatcaacgctgaaacatacaagcagagataggccatctagattattacaaatttacaagctgttaggagacgaagctccagatcagctaagatgcagttaagacccagcaaccaaatttttccagcagcgctctcagaaatgctccagcagatgatgacgaatgtcgcgccagtcaacaacatcttccccgcgccactcatccaagaattctcttggtattcggcgcccagcctttagctcgatcaaacacctcccttgccgtccttctgactagacggcttcctccctccagggtctcttttcccattttttttctgcaaaatcgaccattagtccaaccaatgacaacataagaaaacaatgtcaaaactcaaaaggctcactaatcaacttattattgaaacaagcatcatttctgatttcccaaatggaccagagaaccgcccctgctcccacaatcatcaaatttctgtgcttcttactaaagccgtccaaccaacgagtacaggtctgtgtggctccttggaacagacttcaggttcagggcaacctgtacaattctccagatgaatttagccacagagcatttgaagaacaagtgatcaggttattcaaaaaccccacagaaacaacacacacaacttcctttccagtttttttttttttcagattgctttttgttagaattttgttgttaacgaccaaccagaggaaaattttgatcttttgaggtatgttaactttccacaagaaattgaaagggacttttgttgcaatgcttctaatctgtttgtaaagagattttacagagaagcctgctttgcctaaagtacacagagccgagtcctcttctctcagtctttaggacccacataacagtttaagggattcaaaatgagtcccagatttcaccaactaatcttctcctaaattttaaagcagaaaggttggatctaagaactctgttcactgtaatgtttttgtcaaaggttaagctaaatagaattgagttgccaggggggaatctcccagccaggtatcattccaaaagctagtttggttaccattgcctatcttttttctacagaacttgtaaacagtatctttaactttcagcagacctttccaaaaatacaaatcatcttgctttttctctaccataataagaggttttcccttaactgtatttcgacctaacgatattctgccaaatcccatctgaggtttctaacttccaaatccacttggcaaggaggccaatattcattttttccaagtcaatcacacccaaacccccttgatcttcagggagacacaccgtgtcccaatccgttaagtggtattttttggtcaattgacccccctgccacaataatcttttttctgtaaatatcaagttttttaatcagacttaggggcagaatacagggagagcatgtataaaggaacgttcgaaaggctgctgttcagcagagtgatcctaccccctaaatggcgcctctgagggggacaggcatggattattcttaacctctgagacatacattgagcttcaccgtgcttgttctttcatcagaagtattttacagacagtagacccatgcaatttcactgcagggtagcaactatccttgtgctggtattgaacaaatcgactaatcagggtgaaactccaaatgtaaaagttcggctagctggttttattctggatgatggatcatccctgtgctgtggctgggctgatgatgctagggcagaattattgcttaggctgcaggaaattgtgcatctggatgcttctgttaatttaaagctttcaaaaggaggagagaatagcacaaaattaaaatatactattggatgctgtcttgaaaaaatgttgaagcagcacacaagtgttaccgtaaagaactgtggaattcctcctgatttctattgccgagatttggatgcatcttctgtttcggacaaagccttaagtcgcttggaagacaaacttctgaaatttattgtccttaatgcttgttgcaagggatctctgaatgttatggcatcagctctgagcccagatgatataaatgggttcaatgtggagctccctgttccagtgcagaacatgcggatgctttggatagaagaagttttcccagtagatcccttggaagaagctcgcagactacatgatattttggaaaacagctagtgttcacacattctggatagttagtatgcagcataaaaaaaagaggatggattgtccagaactccagatcgtactgccacttcgctgagattttcgcaaaggaaaacttgtttcacactcagtatccagaaaaggatggtttgtccagatagggccgccaccttgaagttgatcccagattggtcctccacattttccaaagagatgtactcacggcgaacgagcgatatatccttttgatgctgatactgatctctgacgtatgaagaagggacataaatttggctgttcgatctcttttgctgaacgagcgggccttttgtatccaatgtcccaagctccccaaagcaacgcaatgtgtatattctacttgcattattatgtcccaacgttaattttggcttatatcatgcttcctctttcgtatcctactactgttactataatctgatggtgtcaagatcaactgtgtagtttggacacaca

SEQ ID NO: 68981 - DNA, 141 bp, Zea Mays
atggctcgttattggggcaaaaattctctaatccgaagcgtctgggagtccaaaaccattgccccgaaaacaaaagcaggaaatttcccccctaataaattgggttcttcttcaaaatcgagccccgaacaccggcgataa

SEQ ID NO: 68982 - DNA, 1214 bp, Zea Mays
cttttgtattgtgccgcttaatgaaaattggaccagcaagcaaatattatgaggtggctatgtttcatcttgcgtgaagcaaacagttgtacatacaaagtgttcatgctcaaatgcatcatcgtgcgtgcgtgccactgaattctcaactaatccaacaaccatctccttgtgaacaactaaacatgtttatgtgtaacggcaccaccacaagagattttaacactagtacatctctcgcagagtaccgcagcgctgtggtcgatgacgacgagtcgagttctccggtccttgctcctcgtttgatggcatcatgccccgaaggagacggacccgtcgtcctcgtcgccgcggatggcattgatcatgccggcgacctcccgcatggtcggcggcggggcagagccgggggaggcgtcgacgcactgcatcgcgacctgcagcagccgcaccatgcggtgctcggatgacccgacgccggtgccggcgagcagcgcgcggtcgaacacctcggcggtccactcctcccggatcaccgaggtcacccaccgcgccagctccgcgccgtcgccctgcgcggacgtcgccttccccgtcagcagctcgagcagcagcacgccgagcgcgcgcacgtcggcgcggaacgccgcggcgccgtccctgcccggcgcggtgacgccgtactcgctgatgcacgggtccatgccggccgtgaagaggacgttggaggccttgaggttgccgtgggcgattgggccgcctgacgaggaattggtggtcccgccgtcgccgcgcagggtggtgtgcatgaacgccatgccgtcggcgaccttggcggcgatgtggaggcgcgctggccaatccagcggcgcttggctgctctctatggagcctgcagattgcaacctcgctgacggagcaaggagctgctcaggaggtagcccgggatccagcaccaaagcctgcaccagaggatctgcctgccacagctttggatggcaagccccggttttatgcataacctgttatttatgctattttactacacttaatgattgtaggattgaatgtgcacttaagtgtaggagttgtttgaaactctagttgcatgatctaaggaatcccattgagattaatactagtatgctaagccgagtagctgctttattaattagggatttcggtagaagtcgagtgatttttctagcactctc

SEQ ID NO: 68983 - DNA, 1113 bp, Zea Mays
ctggctcctagcagccgccgccatcccttctccctctccctcctctcctctagcttctctccctcgcttccctcccctgcagcttcctcacgccatgcttccggacccgcgccaagccttggccacgcagcgagcgcccaacccgacgcagccgcgacaccgaccctgcccctccctgcactcgacgcgcctggagccccgccagccgagtactgtgaagcgcgccaccgaccggcatccagacccgcgtcgagccccagcccgacaccccggcttccccgcgtctacgcagcagcgccctgctcatccgcaagaactggcagcgaagcttgtcgttaagggatccaaaaacagataaacaaaattgttttgggctgattccaaaatgacccaaatctgaacttttgcaagacattaaggagttcttttccttttcaggagatattaatcatgtggagatgcagaggattgacggagaggaagcaaaaaatgactgtatgggagaatatgcagaaagctgaagcagaagcagccatacaaaaccttgtgataaaacttgaaaagaaaaggccatactcgctagagaggattttcaacacccttaggtctggctctcggaagacacaggtggtacgcagtacatcaaccgcaaatcagaatcagcatatttccagaactatcaaaacggcgccaaacctcagcaagaacggtcaaatgagttcattgagtggatgcttcagacaagatctatagcatggatcataatctggattgtccttaagtttttattgtgctaggggaacataagaaagtatgtagagcaaaatgagaggagctgttgttaccctcaattctttgtgattattgtgctagagtgatgtagttgtttggctttttgaacaatagctggagtgatatgaaacattagtgatctagttgtgaatgatattataattgtgatggttttgtgaatatataattgtggtgcttttgtgtttatgtgatggatctatgactgtggtatactgattaactgtgtatgtctttatgatttgtgtataaaaatctgtgatttatggtgcttaattaaatgtatattattattaataaaaa

SEQ ID NO: 68984 - DNA, 1165 bp, Zea Mays
ctggctcctagcagccgccgccatcccttctccctctccctcctctcctctagcttctctccctcgcttccctcccctgcagcttcctcacgccatgcttccggacccgcgccaagccttggccacgcagcgagcgcccaacccgacgcagccgcgacaccgaccctgcccctccctgcactcgacgcgcctggagccccgccagccgagtactgtgaagcgcgccaccgaccggcatccagacccgcgtcgagccccagcccgacaccccggcttccccgcgtctacgcagcagcgccctgctcatccgcaagaactggcagcgaagcttgtcgttaagggatccaaaaacagataaacaaaattgttttgggctgattccaaaatgacccaaatctgaacttttgcaagacattaaggagttcttttccttttcaggagatattaatcatgtggagatgcagaggttagctagatctctacgtcagtgcttgatttgatttgtttaacttcccatggattgacggagaggaagcaaaaaatgactgtatgggagaatatgcagaaagctgaagcagaagcagccatacaaaaccttgtgataaaacttgaaaagaaaaggccatactcgctagagaggattttcaacacccttaggtctggctctcggaagacacaggtggtacgcagtacatcaaccgcaaatcagaatcagcatatttccagaactatcaaaacggcgccaaacctcagcaagaacggtcaaatgagttcattgagtggatgcttcagacaagatctatagcatggatcataatctggattgtccttaagtttttattgtgctaggggaacataagaaagtatgtagagcaaaatgagaggagctgttgttaccctcaattctttgtgattattgtgctagagtgatgtagttgtttggctttttgaacaatagctggagtgatatgaaacattagtgatctagttgtgaatgatattataattgtgatggttttgtgaatatataattgtggtgcttttgtgtttatgtgatggatctatgactgtggtatactgattaactgtgtatgtctttatgatttgtgtataaaaatctgtgatttatggtgcttaattaaatgtatattattattaataaaaa

SEQ ID NO: 68985 - DNA, 3307 bp, Zea Mays
ctggctcctagcagccgccgccatcccttctccctctccctcctctcctctagcttctctccctcgcttccctcccctgcagcttcctcacgccatgcttccggacccgcgccaagccttggccacgcagcgagcgcccaacccgacgcagccgcgacaccgaccctgcccctccctgcactcgacgcgcctggagccccgccagccgagtactgtgaagcgcgccaccgaccggcatccagacccgcgtcgagccccagcccgacaccccggcttccccgcgtctacgcagcagcgccctgctcatccgcaagaactggcagcgaagcttgtcgttaaggtaattcaggatttagctgtattactgcaaaatatttttgccagccgtgccaccacagccgcatcacaggtgggccaccgcttaactctatccattttgcatcaacttttgcccacttctgttatctacaacgagtccttcccttacccatgttggttcactgtcatacgccatccaaccacagttacaaagccccagctagacatagggagttaggagcttaaaacaccatgaactccagctctccaaactgaattcgaacagactgaaccacggtttcaggcacctagactgaacctctactgttatcctaccaaaatctcactacttcaagtggtaacaaagggatcaactttaacaccaattgtttaccatattatcctctaactaattgttgtaggggctgtaggccataacaccatgaatcagtcacaaaacagctccaaagaccgaataaaactcattgcacccacgtcaactgaacaaagttcagttctctgaatctaaaccttaggccacactgcatccttcctgttaatcctcattttctcacaaatttcaatgacaccagaccaacccagttggccaaaaatgctccccaaccatagcactatcaggttactacaacaatccaagtctagctcacacagaacaaaagttacaaatgctcaaagtgaacccaatccactgaatatcgttttcagttaactgaaaacaagaacctgacggaaagcactttggaatagatttactcccaactttgtgtagcaccaagctaagcacctctaagtaaagttgttcactaatacttggtctttaaccttgctacacaaggcatgtctcacaactgcatagaatagtcccaaaggaagttcaaagttgaggcaacatgactgaaattcagtctggattactgaacaacatgcaatgctcttttgcctgacagcacaaatttgtgcagtttgagcatgccgaccccctcccccttgctgtccaaactgaaacaaattcagccccacacgcccagttactggattggcttggattcccctttcaactaccagccttccgcatcttaaagcacagcttcaattcactaaaacaatgggcgaatggttgcagcgtgcagagctttctgctcccaaaaactgaatccagtttccagtcacttgaaacagaattcagcactaatcaactgaagacctacctttaacccctttgatcctcactagtgcaagcaatacatgccaatcttagttaacaaagattgttcccaacacatagatttaaatgtttgcagcagcagccttaggtcaaacattcatggatcaaaagttatggtgctccaaaatggtgtgaaaatacaagaattcaggttcagctagctgaaacaaaaactgaaatcaacaccagacagagagagtttgggcacaatttactccaaatttggtgcagcaccaaatcaaacttatttaaggaaacttgttcactaacttatgatctccaatgtttctatataattcatagtttaagacctaatggaatggccacacaagtgctctaaacagggcaccaatcgctgaaattcagttgtctgttaactgaacaaaatttagtccatgtaaacactgacagcccacttttgagtaacttttactccatgttctgggtcagatcaggcctaatgcacataacgaaatttgttcactgacatatgctcttcaactctcctatagcaaccatggtccaaagctgcctagaacaggcaacacacagccccaaaatggcactaaaaacactgatttcagaattaggcaactattcgaagtctgaaaatccagaagtctgacagtcccactttgaacacctttttctcctagttgcatatggttttagggctgctacatttcataaacattgttctcctatagttactctacaggtttgttatagcaactgtttccaaaatactcatggattaaatgttacagggatccaaaaacagataaacaaaattgttttgggctgattccaaaatgacccaaatctgaacttttgcaagacattaaggagttcttttccttttcaggagatattaatcatgtggagatgcagaggtttgtaaaacctgtccaactaggctgccccttctgttttcatgtccatactaattaaatttgtaccgcaggttagctagatctctacgtcagtgcttgatttgatttgtttaacttcccatggtaaaagttgctcagatcccatgtagttcagctttgttttcttatagatcagttggatgtacttgcttttttgtataaaggattgacggagaggaagcaaaaaatgactgtatgggagaatatgcagaaagctgaagcagaagcagccatacaaaaccttgtgataaaacttgaaaagaaaaggccatactcgctagagaggattttcaacacccttaggtctggctctcggaagacacaggtggtacgcagtacatcaaccgcaaatcagaatcagcatatttccagaactatcaaaacggcgccaaacctcagcaagaacggtcaaatgagttcattgagtggatgcttcagacaagatctatagcatggatcataatctggattgtccttaagtttttattgtgctaggggaacataagaaagtatgtagagcaaaatgagaggagctgttgttaccctcaattctttgtgattattgtgctagagtgatgtagttgtttggctttttgaacaatagctggagtgatatgaaacattagtgatctagttgtgaatgatattataattgtgatggttttgtgaatatataattgtggtgcttttgtgtttatgtgatggatctatgactgtggtatactgattaactgtgtatgtctttatgatttgtgtataaaaatctgtgatttatggtgcttaattaaatgtatattattattaataaaaa

SEQ ID NO: 68986 - DNA, 1160 bp, Zea Mays
ctggctcctagcagccgccgccatcccttctccctctccctcctctcctctagcttctctccctcgcttccctcccctgcagcttcctcacgccatgcttccggacccgcgccaagccttggccacgcagcgagcgcccaacccgacgcagccgcgacaccgaccctgcccctccctgcactcgacgcgcctggagccccgccagccgagtactgtgaagcgcgccaccgaccggcatccagacccgcgtcgagccccagcccgacaccccggcttccccgcgtctacgcagcagcgccctgctcatccgcaagaactggcagcgaagcttgtcgttaagggatccaaaaacagataaacaaaattgttttgggctgattccaaaatgacccaaatctgaacttttgcaagacattaaggagttcttttccttttcaggagatattaatcatgtggagatgcagagctagatctctacgtcagtgcttgatttgatttgtttaacttcccatggattgacggagaggaagcaaaaaatgactgtatgggagaatatgcagaaagctgaagcagaagcagccatacaaaaccttgtgataaaacttgaaaagaaaaggccatactcgctagagaggattttcaacacccttaggtctggctctcggaagacacaggtggtacgcagtacatcaaccgcaaatcagaatcagcatatttccagaactatcaaaacggcgccaaacctcagcaagaacggtcaaatgagttcattgagtggatgcttcagacaagatctatagcatggatcataatctggattgtccttaagtttttattgtgctaggggaacataagaaagtatgtagagcaaaatgagaggagctgttgttaccctcaattctttgtgattattgtgctagagtgatgtagttgtttggctttttgaacaatagctggagtgatatgaaacattagtgatctagttgtgaatgatattataattgtgatggttttgtgaatatataattgtggtgcttttgtgtttatgtgatggatctatgactgtggtatactgattaactgtgtatgtctttatgatttgtgtataaaaatctgtgatttatggtgcttaattaaatgtatattattattaataaaaa

SEQ ID NO: 68987 - DNA, 1067 bp, Zea Mays
ctggctcctagcagccgccgccatcccttctccctctccctcctctcctctagcttctctccctcgcttccctcccctgcagcttcctcacgccatgcttccggacccgcgccaagccttggccacgcagcgagcgcccaacccgacgcagccgcgacaccgaccctgcccctccctgcactcgacgcgcctggagccccgccagccgagtactgtgaagcgcgccaccgaccggcatccagacccgcgtcgagccccagcccgacaccccggcttccccgcgtctacgcagcagcgccctgctcatccgcaagaactggcagcgaagcttgtcgttaaggagatattaatcatgtggagatgcagaggttagctagatctctacgtcagtgcttgatttgatttgtttaacttcccatggattgacggagaggaagcaaaaaatgactgtatgggagaatatgcagaaagctgaagcagaagcagccatacaaaaccttgtgataaaacttgaaaagaaaaggccatactcgctagagaggattttcaacacccttaggtctggctctcggaagacacaggtggtacgcagtacatcaaccgcaaatcagaatcagcatatttccagaactatcaaaacggcgccaaacctcagcaagaacggtcaaatgagttcattgagtggatgcttcagacaagatctatagcatggatcataatctggattgtccttaagtttttattgtgctaggggaacataagaaagtatgtagagcaaaatgagaggagctgttgttaccctcaattctttgtgattattgtgctagagtgatgtagttgtttggctttttgaacaatagctggagtgatatgaaacattagtgatctagttgtgaatgatattataattgtgatggttttgtgaatatataattgtggtgcttttgtgtttatgtgatggatctatgactgtggtatactgattaactgtgtatgtctttatgatttgtgtataaaaatctgtgatttatggtgcttaattaaatgtatattattattaataaaaa

SEQ ID NO: 68988 - DNA, 988 bp, Zea Mays
cctggctcctagcagccgccgccatcccttctccctctccctcctctcctctagcttctctccctcgcttccctcccctgcagcttcctcacgccatgcttccggacccgcgccaagccttggccacgcagcgagcgcccaacccgacgcagccgcgacaccgaccctgcccctccctgcactcgacgcgcctggagccccgccagccgagtactgtgaagcgcgccaccgaccggcatccagacccgcgtcgagccccagcccgacaccccggcttccccgcgtctacgcagcagcgccctgctcatccgcaagaactggcagcgaagcttgtcgttaaggattgacggagaggaagcaaaaaatgactgtatgggagaatatgcagaaagctgaagcagaagcagccatacaaaaccttgtgataaaacttgaaaagaaaaggccatactcgctagagaggattttcaacacccttaggtctggctctcggaagacacaggtggtacgcagtacatcaaccgcaaatcagaatcagcatatttccagaactatcaaaacggcgccaaacctcagcaagaacggtcaaatgagttcattgagtggatgcttcagacaagatctatagcatggatcataatctggattgtccttaagtttttattgtgctaggggaacataagaaagtatgtagagcaaaatgagaggagctgttgttaccctcaattctttgtgattattgtgctagagtgatgtagttgtttggctttttgaacaatagctggagtgatatgaaacattagtgatctagttgtgaatgatattataattgtgatggttttgtgaatatataattgtggtgcttttgtgtttatgtgatggatctatgactgtggtatactgattaactgtgtatgtctttatgatttgtgtataaaaatctgtgatttatggtgcttaattaaatgtatattattattaataaaaa

SEQ ID NO: 68989 - DNA, 3078 bp, Zea Mays
cgcccgccgcccgggaagaggccacattcacatcacatcagaccgatctgatcgccggagacacgtttcgtggcgtcgcccgcacgtaccaaccgcccccggccccgccggtgccaagcaaatcttacgacgcgggacacggccggggtcctgtcgtcctgcgctgctgctgctgcgtcttcgtagtcgacgtgagccgcggcggccgcggttgagggtaaccacccgtccatccagctgcatcgcaaccactccaaccaaaggacgcgaagaaggccggcgtccctgatctccatctccatctccatctagttaacgagggacacgccgacctgtcgcctcggatccggaggactgtttgttgtcagatctcaccgcgttggcccagtcaaagcccagcccaaccgataccacgccaggggtataaagcaccagcccgagcaggcggcgagatgcggaagtggacgaggaagctgggccacaccctctcccgcatcgtcacgaccaagccgcgcttcgccttctcccagcccaggcctaggcccaggcccaggcccgcacaacccggtctgccttcctcacaacccgtctcgatcccgccgcagccgccggagcttccccccttcgtccccaccgccatgccgcaccacggcagccaccgcccgccggcgccgccgccggggggccccgtgttcccgcgcgcaacgtccacggtggtgcccgacccgtcccgcttcttcgcgccgccgctcctcgccgcgccgctccccaccaactccttcttccagaacttcgtgctcaagaacggggaccagccggagtacgtccacccgtactccgtccgctcccccggaggcgccgctctcgacatctgctacccttcgcggaaccactcgccgtccttcgtcatccagaccttcgtccccgacctcaccgtctccgacgccgccgggagcgcgcagcgccactgcgtctcggctttcgacgacctctccgtcacgctcgacgtctccccgtccctccgcgcgcacctcgtccgcggatgcccgtacgtcaccgtcaccaccacggccggcgccgtcgacatctccgtcgcgtccgtccatgccttcctcgacgtcgcctcctgcgacgactccggcaccaagtggcgcctcgggatgaacagcggccagaccttcctcctctacgcgtcggccccgatccgcctcgcgcagaccaccaccacgcagctctccgcgcctggcttcgccggagccatccgggtcgcctacctccccgacgcgtccatggagccggtcctcgaccgctacagccgctgcttcccgaccgccggccacgcggccctgagccggcccttctgcgtcgactacgcctggcgcaaggacgggcccggggagctgctcatgctcgcgcatccgctccacctccgcctgctcgccgacgactgccccgtgcgggtgctcgacgacttccggtaccggagcatcgacggcgatatggtcggcgtggtcggcgacgcctgggtcctgcgcaccgaccctgtttccccgacgtggcactcgacccgcggcgttagcgaggacggcgtcgccgaagtggtggccgcgctgcgagctgacgtggccggcctcgcgtccaccgcgataaccaccacttcgtcctacttctacgggaaggcgatcgcgcgggcggcgcggctggcgctgatcgcggaggaggtggggtgccccgacgtgatcccggcggtgcagcagttcctcaaggccgctgtgacgccgtggctggacggcagcttccaggggaacggcttcttctacgacgccaaatggggcgggctggtgacgctgcaggggctcaaggactccggcgccgacttcgggttcggcatctacaacgaccaccactaccacctgggctacttcctgtacgccatcgcggtgctgtccaagatcgacccgtgctggggccgcaagtacatgccgcaggcctactccatggtggccgacttcatgacgctgtcgcgcaacaaggccggcgccagcttcacccgcctgcggatgttcgacctctggaagctgcactcgtgggccgggggcctgacggagttcgccgacgggcgcaaccaggagagcaccagcgaggccgtgaacgcctactactcggcggcgcttgtggggctcagctacggggacgcgcacctcgtctccgtgggcgcgacgctcaccgcgctggagatgctggcggcccagacgtggtggcacgtccgggaaggggagggcatctacgaggacgacttcagcgggaacaaccgcgtggttggggtgctgtgggccaacaagcgcgacagcgggctgtggttcgcgccgcccgagtggaaggagtgccggctggggatccagctgctgcccgtgctgcccatcagcgaggcgctgttcccggacgtggcgttcgtcaaggacctggtggcgtggacgctgccggcgctggcgagggacggcgtgggcgaagggtggaaggggttcgtgtacgcgctggaggggatctacgacagggaggcagcgctgaccaagacccgcgccctcaaggggcatgatgatggcaactcgctgaccaacctgctgtggtggctccacagccgaggcagcgtcgtcggtgacggcgacgctgggttcggccgctgctgctggtaccgccagtactgccactgacgaaagtgtggtgaccagcacgagtgtggttgttcatgtctgcttgcggagcagagcacgtagatcagtgaagggatggagttgatacgttgcaaagtcattgtggttgttattcgttgatactacacacttctatacagttgaataaagtcagtcctttatgtgaagcttgatgatgctatctgttacatggatcttgggttatcataaatttctggcttgaggagattgttggttacttaattttgattccttaatggcattgaaagacaaggcaacatctatcttttttaatctctcactctccaagacaagatagaataaaaggatgaaaagaatattaaagacaacataaaacacaagttaa

SEQ ID NO: 68990 - DNA, 3137 bp, Zea Mays
cgcccgccgcccgggaagaggccacattcacatcacatcagaccgatctgatcgccggagacacgtttcgtggcgtcgcccgcacgtaccaaccgcccccggccccgccggtgccaagcaaatcttacgacgcgggacacggccggggtcctgtcgtcctgcgctgctgctgctgcgtcttcgtagtcgacgtgagccgcggcggccgcggttgagggtaaccacccgtccatccagctgcatcgcaaccactccaaccaaaggacgcgaagaaggccggcgtccctgatctccatctccatctccatctagttaacgaggtaggccgtgtcggaactgctccaccttctccacgcccgtgtgtctctttccagatcagggacacgccgacctgtcgcctcggatccggaggactgtttgttgtcagatctcaccgcgttggcccagtcaaagcccagcccaaccgataccacgccaggggtataaagcaccagcccgagcaggcggcgagatgcggaagtggacgaggaagctgggccacaccctctcccgcatcgtcacgaccaagccgcgcttcgccttctcccagcccaggcctaggcccaggcccaggcccgcacaacccggtctgccttcctcacaacccgtctcgatcccgccgcagccgccggagcttccccccttcgtccccaccgccatgccgcaccacggcagccaccgcccgccggcgccgccgccggggggccccgtgttcccgcgcgcaacgtccacggtggtgcccgacccgtcccgcttcttcgcgccgccgctcctcgccgcgccgctccccaccaactccttcttccagaacttcgtgctcaagaacggggaccagccggagtacgtccacccgtactccgtccgctcccccggaggcgccgctctcgacatctgctacccttcgcggaaccactcgccgtccttcgtcatccagaccttcgtccccgacctcaccgtctccgacgccgccgggagcgcgcagcgccactgcgtctcggctttcgacgacctctccgtcacgctcgacgtctccccgtccctccgcgcgcacctcgtccgcggatgcccgtacgtcaccgtcaccaccacggccggcgccgtcgacatctccgtcgcgtccgtccatgccttcctcgacgtcgcctcctgcgacgactccggcaccaagtggcgcctcgggatgaacagcggccagaccttcctcctctacgcgtcggccccgatccgcctcgcgcagaccaccaccacgcagctctccgcgcctggcttcgccggagccatccgggtcgcctacctccccgacgcgtccatggagccggtcctcgaccgctacagccgctgcttcccgaccgccggccacgcggccctgagccggcccttctgcgtcgactacgcctggcgcaaggacgggcccggggagctgctcatgctcgcgcatccgctccacctccgcctgctcgccgacgactgccccgtgcgggtgctcgacgacttccggtaccggagcatcgacggcgatatggtcggcgtggtcggcgacgcctgggtcctgcgcaccgaccctgtttccccgacgtggcactcgacccgcggcgttagcgaggacggcgtcgccgaagtggtggccgcgctgcgagctgacgtggccggcctcgcgtccaccgcgataaccaccacttcgtcctacttctacgggaaggcgatcgcgcgggcggcgcggctggcgctgatcgcggaggaggtggggtgccccgacgtgatcccggcggtgcagcagttcctcaaggccgctgtgacgccgtggctggacggcagcttccaggggaacggcttcttctacgacgccaaatggggcgggctggtgacgctgcaggggctcaaggactccggcgccgacttcgggttcggcatctacaacgaccaccactaccacctgggctacttcctgtacgccatcgcggtgctgtccaagatcgacccgtgctggggccgcaagtacatgccgcaggcctactccatggtggccgacttcatgacgctgtcgcgcaacaaggccggcgccagcttcacccgcctgcggatgttcgacctctggaagctgcactcgtgggccgggggcctgacggagttcgccgacgggcgcaaccaggagagcaccagcgaggccgtgaacgcctactactcggcggcgcttgtggggctcagctacggggacgcgcacctcgtctccgtgggcgcgacgctcaccgcgctggagatgctggcggcccagacgtggtggcacgtccgggaaggggagggcatctacgaggacgacttcagcgggaacaaccgcgtggttggggtgctgtgggccaacaagcgcgacagcgggctgtggttcgcgccgcccgagtggaaggagtgccggctggggatccagctgctgcccgtgctgcccatcagcgaggcgctgttcccggacgtggcgttcgtcaaggacctggtggcgtggacgctgccggcgctggcgagggacggcgtgggcgaagggtggaaggggttcgtgtacgcgctggaggggatctacgacagggaggcagcgctgaccaagacccgcgccctcaaggggcatgatgatggcaactcgctgaccaacctgctgtggtggctccacagccgaggcagcgtcgtcggtgacggcgacgctgggttcggccgctgctgctggtaccgccagtactgccactgacgaaagtgtggtgaccagcacgagtgtggttgttcatgtctgcttgcggagcagagcacgtagatcagtgaagggatggagttgatacgttgcaaagtcattgtggttgttattcgttgatactacacacttctatacagttgaataaagtcagtcctttatgtgaagcttgatgatgctatctgttacatggatcttgggttatcataaatttctggcttgaggagattgttggttacttaattttgattccttaatggcattgaaagacaaggcaacatctatcttttttaatctctcactctccaagacaagatagaataaaaggatgaaaagaatattaaagacaacataaaacacaagttaa

SEQ ID NO: 68991 - DNA, 580 bp, Zea Mays
ctctcacaaatattcacgagggtgctgccccaatctccggtggcgaccatttggaaggaataaaagaaaaaaatacaaaagaaaaagaatcgcttttggaggaggatgttgctttgaagaggttcaaatcatacaagaacagtgtgaaacaggtctccaagattgggaatgttctcactttagctgttgtatttggttgtagctacgagcttggtgtgttggcggcaagcatgaagtgaaggaaaacacagccattattccgggaagtgatccatcagcgtagactgtcattctatcacctcgtgtttttagcctgtctgcgtctctctttttttttttgtcgtgcatcatgtataaaataaaactaaactaggttaaccttgatttgcgaataacgttttctgtttctatggcctagtcgcaaacgaagtggcacaagcattccatggctaatcttgatgaatgagcatcgcctgcttttgtttgccacctggcagtgcatcctgctgcacagacagtataacagacgtatcatttgtcgaattcggttcatcaacaaaataaaggtcgttaatccctg

SEQ ID NO: 68992 - DNA, 1459 bp, Zea Mays
cacgcaatcatgctgcacacaagaggactgttttaatgaaattcatgcacatgatatgccaaatggcttgggtttgaatcattcttccaactggtcgaccatgaactccaatagatcatcaaaaatcaagcccttatgggaggggagctgtgacgatgttgacatgtgtgagtttgcagacaaggatgaatatgcaccagtaggatctagctataatcctatgtcagaaccatttgataactgggaaaacaagtttgacacaagcccagagcaaagttctcatgaaccaatggaatttggtgaattggccaaacatgctgaaagcagcataactgagaatgattttacgtgtcctgttgagggaagttgtgaagatgatgtacttacagagtcaaaaataaaggcatttcttgaggagaaggctcttgacctgaaaaagctacaaacacctttgtatgaggagttctacaacactgtgcacggagggagttgccaaacttccaagggaaaattcccaatcagtccaaaattgccccctcgaggaaagtcacctccaagtaagacgaggggaggtgcatgtgacactttgaataacacagctcccgaaagctgcagcaagcaatttcctagaagcagtgtggtggagagcagccgaattttgagagaaattgcttctcctcaacttaatgagtttgctgataaactccatcttgatgcccaagatagcccaagcatcagcttcaccgaaaggcagaggaagtggaaagaagagttggaccaggaacttgagagggagagagtgatgagattagctggctgtggtaaaactccatctccaaatagaggttccaacgtgaaaaaggagtgtcatgctgaccattgaacagacagcagcattcgtcgtctctttatatcatcccacagaagacacaacaaatgatagtaaagtacacagtgtgccagagattggtggcaacagcagtacagcctgtgccaccttatcatttgcggtgttagccaagctatgatcgcagaaccgtcctgtacaaaatgacagatttacgttgaagtggatcggtacagggggcactcatcacccattcaccctcaaatcaggatcattgtcgctgctgcctagaaggacgtcatgctgacacttccctgattttaaggccgcatttatcattctttttgatgcagtgctatacgtcgggcttcggttatgtatggtttatgttgagaaaacggtcttgccaaaattgtgtttgtaagcccagattggcgtggggcttggttttgtatggagcttgtttgcgaaagtgtgtaataagatagtgatgcgagatacgggtcattctgcatttctgcttgcagaatgaatctgagcttttctgaagctacaactgactgtaattaataatttcaatcaaatcgtgagtcctgtgcctgtatgttacac

SEQ ID NO: 68993 - DNA, 1747 bp, Zea Mays
gcagccaaaacaatgaaaggcacaccgtattggatggcacctgaagtcattgttgggagtgggcatagcttctctgcggatatatggagtgtagggtgcacagtcattgaaatggccacgggcaaaccaccatggagccagcagtatcaagaggttgctcttctttttcatgttggaaccacaaagtcgcatccacctatacctgaacatctatcgcaagaggccaaagattttcttctgaagtgcctgcagaaggaaccagagctgaggtctactgccccagacttattaaagcatccttttgtcactggagaattagatgatctgcagccacgcaatcatgctgcacacaaggactgttttaatgaaattcatgcacatgatatgccaaatggcttgggtttgaatcattcttccaactggtcgaccatgaactccaatagatcatcaaaaatcaagcccttatgggaggggagctgtgacgatgttgacatgtagctataatcctatgtcagaaccatttgataactgggaaaacaagtttgacacaagcccagagcaaagttctcatgaaccaatggaatttggtgaattggccaaacatgctgaaagcagcataactgagaatgattttacgtgtcctgttgagggaagttgtgaagatgatgtacttacagagtcaaaaataaaggcatttcttgaggagaaggctcttgacctgaaaaagctacaaacacctttgtatgaggagttctacaacactgtgcacggagggagttgccaaacttccaagggaaaattcccaatcagtccaaaattgccccctcgaggaaagtcacctccaagtaagacgaggggaggtgcatgtgacactttgaataacacagctcccgaaagctgcagcaagcaatttcctagaagcagtgtggtggagagcagccgaattttgagagaaattgcttctcctcaacttaatgagtttgctgataaactccatcttgatgcccaagatagcccaagcatcagcttcaccgaaaggcagaggaagtggaaagaagagttggaccaggaacttgagagggagagagtgatgagattagctggctgtggtaaaactccatctccaaatagaggttccaacgtgaaaaaggagtgtcatgctgaccattgaacagacagcagcattcgtcgtctctttatatcatcccacagaagacacaacaaatgatagtaaagtacacagtgtgccagagattggtggcaacagcagtacagcctgtgccaccttatcatttgcggtgttagccaagctatgatcgcagaaccgtcctgtacaaaatgacagatttacgttgaagtggatcggtacagggggcactcatcacccattcaccctcaaatcaggatcattgtcgctgctgcctagaaggacgtcatgctgacacttccctgattttaaggccgcatttatcattctttttgatgcagtgctatacgtcgggcttcggttatgtatggtttatgttgagaaaacggtcttgccaaaattgtgtttgtaagcccagattggcgtggggcttggttttgtatggagcttgtttgcgaaagtgtgtaataagatagtgatgcgagatacgggtcattctgcatttctgcttgcagaatgaatctgagcttttctgaagctacaactgactgtaattaataatttcaatcaaatcgtgagtcctgtgcctgtatgttacac

SEQ ID NO: 68994 - DNA, 2583 bp, Zea Mays
ctagaaccaagccatgcgacgggacgacgccggcggaggaaccgggttccacgacttgtttgactcggtgcgccgctccatctccttccggcccaccgcccccgccccggaagcccccgcgggcccattcggcgcgggggcaggggggatcggcgtgcggatcagctcttgcctccggaagtcgcgggggatggggctgctaggtctcatcactaaaagcccctcgccgccgcgccgcatgctaccgccgatgcccgatcagtcggacggcggcagcggagggggtggggccaacggcggagtcggagaggagaacccactgatccggtggcgtaagggggagctcatcggggccggtgcgttcgggcaggtctaccttgggatgaacctggactcgggcgagctcctcgctgtcaaacaggttttgatcggcacgagcaacgcgacacgggagaaggctcaagctcatattaaagagctcgaagaagaagtgaagctactcaagaacctgtctcaccccaacattgttaggtaccttgggactgttcgtgaggaagacacactaaacattttgctggaatttgtccctggagggtctattcagtcacttttggggaagcttggttcattcccagagcctgtcattaagaaatacactaagcaaattttgcaaggattggagtatctgcatagcaatgcaataatacatagagatataaagggtgcaaacattcttgtagataataaagggtgcatcaaacttgctgattttggggcatctaagcaagtggcaaagttgccaaaacaatgaaaggcacaccgtattggatggcacctgaagtcattgttgggagtgggcatagcttctctgcggatatatggagtgtagggtgcacagtcattgaaatggccacgggcaaaccaccatggagccagcagtatcaagaggttgctcttctttttcatgttggaaccacaaagtcgcatccacctatacctgaacatctatcgcaagaggccaaagattttcttctgaagtgcctgcagaaggaaccagagctgaggtctactgccccagacttattaaagcatccttttgtcactggagaattagatgatctgcagccacgcaatcatgctgcacacaaggactgttttaatgaaattcatgcacatgatatgccaaatggcttgggtttgaatcattcttccaactggtcgaccatgaactccaatagatcatcaaaaatcaagcccttatgggaggggagctgtgacgatgttgacatgtgtgagtttgcagacaaggatgaatatgcaccagtaggatctagctataatcctatgtcagaaccatttgataactgggaaaacaagtttgacacaagcccagagcaaagttctcatgaaccaatggaatttggtgaattggccaaacatgctgaaagcagcataactgagaatgattttacgtgtcctgttgagggaagttgtgaagatgatgtacttacagagtcaaaaataaaggcatttcttgaggagaaggctcttgacctgaaaaagctacaaacacctttgtatgaggagttctacaacactgtgcacggagggagttgccaaacttccaagggaaaattcccaatcagtccaaaattgccccctcgaggaaagtcacctccaagtaagacgaggggaggtgcatgtgacactttgaataacacagctcccgaaagctgcagcaagcaatttcctagaagcagtgtggtggagagcagccgaattttgagagaaattgcttctcctcaacttaatgagtttgctgataaactccatcttgatgcccaagatagcccaagcatcagcttcaccgaaaggcagaggaagtggaaagaagagttggaccaggaacttgagagggagagagtgatgagattagctggctgtggtaaaactccatctccaaatagaggttccaacgtgaaaaaggagtgtcatgctgaccattgaacagacagcagcattcgtcgtctctttatatcatcccacagaagacacaacaaatgatagtaaagtacacagtgtgccagagattggtggcaacagcagtacagcctgtgccaccttatcatttgcggtgttagccaagctatgatcgcagaaccgtcctgtacaaaatgacagatttacgttgaagtggatcggtacagggggcactcatcacccattcaccctcaaatcaggatcattgtcgctgctgcctagaaggacgtcatgctgacacttccctgattttaaggccgcatttatcattctttttgatgcagtgctatacgtcgggcttcggttatgtatggtttatgttgagaaaacggtcttgccaaaattgtgtttgtaagcccagattggcgtggggcttggttttgtatggagcttgtttgcgaaagtgtgtaataagatagtgatgcgagatacgggtcattctgcatttctgcttgcagaatgaatctgagcttttctgaagctacaactgactgtaattaataatttcaatcaaatcgtgagtcctgtgcctgtatgttacac

SEQ ID NO: 68995 - DNA, 2489 bp, Zea Mays
ccccattcgatccagcttgacgccgctccccgacgacgtggacgcccgtggagccctagaaccaagccatgcgacgggacgacgccggcggaggaaccgggttccacgacttgtttgactcggtgcgccgctccatctccttccggcccaccgcccccgccccggaagcccccgcgggcccattcggcgcgggggcaggggggatcggcgtgcggatcagctcttgcctccggaagtcgcgggggatggggctgctaggtctcatcactaaaagcccctcgccgccgcgccgcatgctaccgccgatgcccgatcagtcggacggcggcagcggagggggtggggccaacggcggagtcggagaggagaacccactgatccggtggcgtaagggggagctcatcggggccggtgcgttcgggcaggtctaccttgggatgaacctggactcgggcgagctcctcgctgtcaaacaggttttgatcggcacgagcaacgcgacacgggagaaggctcaagctcatattaaagagctcgaagaagaagtgaagctactcaagaacctgtctcaccccaacattgttaggtaccttgggactgttcgtgaggaagacacactaaacattttgctggaatttgtccctggagggtctattcagtcacttttggggaagcttggttcattcccagagcctgtcattaagaaatacactaagcaaattttgcaaggattggagtatctgcatagcaatgcaataatacatagagatataaagggtgcaaacattcttgtagataataaagggtgcatcaaacttgctgattttggggcatctaagcaagtggcaaagttggttgctcttctttttcatgttggaaccacaaagtcgcatccacctatacctgaacatctatcgcaagaggccaaagattttcttctgaagtgcctgcagaaggaaccagagctgaggtctactgccccagacttattaaagcatccttttgtcactggagaattagatgatctgcagccacgcaatcatgctgcacacaaggactgttttaatgaaattcatgcacatgatatgccaaatggcttgggtttgaatcattcttccaactggtcgaccatgaactccaatagatcatcaaaaatcaagcccttatgggaggggagctgtgacgatgttgacatgtgtgagtttgcagacaaggatgaatatgcaccagtaggatctagctataatcctatgtcagaaccatttgataactgggaaaacaagtttgacacaagcccagagcaaagttctcatgaaccaatggaatttggtgaattggccaaacatgctgaaagcagcataactgagaatgattttacgtgtcctgttgagggaagttgtgaagatgatgtacttacagagtcaaaaataaaggcatttcttgaggagaaggctcttgacctgaaaaagctacaaacacctttgtatgaggagttctacaacactgtgcacggagggagttgccaaacttccaagggaaaattcccaatcagtccaaaattgccccctcgaggaaagtcacctccaagtaagacgaggggaggtgcatgtgacactttgaataacacagctcccgaaagctgcagcaagcaatttcctagaagcagtgtggtggagagcagccgaattttgagagaaattgcttctcctcaacttaatgagtttgctgataaactccatcttgatgcccaagatagcccaagcatcagcttcaccgaaaggcagaggaagtggaaagaagagttggaccaggaacttgagagggagagagtgatgagattagctggctgtggtaaaactccatctccaaatagaggttccaacgtgaaaaaggagtgtcatgctgaccattgaacagacagcagcattcgtcgtctctttatatcatcccacagaagacacaacaaatgatagtaaagtacacagtgtgccagagattggtggcaacagcagtacagcctgtgccaccttatcatttgcggtgttagccaagctatgatcgcagaaccgtcctgtacaaaatgacagatttacgttgaagtggatcggtacagggggcactcatcacccattcaccctcaaatcaggatcattgtcgctgctgcctagaaggacgtcatgctgacacttccctgattttaaggccgcatttatcattctttttgatgcagtgctatacgtcgggcttcggttatgtatggtttatgttgagaaaacggtcttgccaaaattgtgtttgtaagcccagattggcgtggggcttggttttgtatggagcttgtttgcgaaagtgtgtaataagatagtgatgcgagatacgggtcattctgcatttctgcttgcagaatgaatctgagcttttctgaagctacaactgactgtaattaataatttcaatcaaatcgtgagtcctgtgcctgtatgttacac

SEQ ID NO: 68996 - DNA, 2809 bp, Zea Mays
cacggtcttccgcgctaaaagctgaaccactccactttcgaatgcttccatcgctaacggtcgcgactcgcgagggacattcccgtccttctgccgccccgcaaacccccaaaatttcaaagccccgcactcgagagcgggtgtctccaaccattccccattcgatccagcttgacgccgctccccgacgacgtggacgcccgtggagccctagaaccaagccatgcgacgggacgacgccggcggaggaaccgggttccacgacttgtttgactcggtgcgccgctccatctccttccggcccaccgcccccgccccggaagcccccgcgggcccattcggcgcgggggcaggggggatcggcgtgcggatcagctcttgcctccggaagtcgcgggggatggggctgctaggtctcatcactaaaagcccctcgccgccgcgccgcatgctaccgccgatgcccgatcagtcggacggcggcagcggagggggtggggccaacggcggagtcggagaggagaacccactgatccggtggcgtaagggggagctcatcggggccggtgcgttcgggcaggtctaccttgggatgaacctggactcgggcgagctcctcgctgtcaaacaggttttgatcggcacgagcaacgcgacacgggagaaggctcaagctcatattaaagagctcgaagaagaagtgaagctactcaagaacctgtctcaccccaacattgttaggtaccttgggactgttcgtgaggaagacacactaaacattttgctggaatttgtccctggagggtctattcagtcacttttggggaagcttggttcattcccagagcctgtcattaagaaatacactaagcaaattttgcaaggattggagtatctgcatagcaatgcaataatacatagagatataaagggtgcaaacattcttgtagataataaagggtgcatcaaacttgctgattttggggcatctaagcaagtggcaaagttggctactgtgacagcagccaaaacaatgaaaggcacaccgtattggatggcacctgaagtcattgttgggagtgggcatagcttctctgcggatatatggagtgtagggtgcacagtcattgaaatggccacgggcaaaccaccatggagccagcagtatcaagaggttgctcttctttttcatgttggaaccacaaagtcgcatccacctatacctgaacatctatcgcaagaggccaaagattttcttctgaagtgcctgcagaaggaaccagagctgaggtctactgccccagacttattaaagcatccttttgtcactggagaattagatgatctgcagccacgcaatcatgctgcacacaaggactgttttaatgaaattcatgcacatgatatgccaaatggcttgggtttgaatcattcttccaactggtcgaccatgaactccaatagatcatcaaaaatcaagcccttatgggaggggagctgtgacgatgttgacatgtgtgagtttgcagacaaggatgaatatgcaccagtaggatctagctataatcctatgtcagaaccatttgataactgggaaaacaagtttgacacaagcccagagcaaagttctcatgaaccaatggaatttggtgaattggccaaacatgctgaaagcagcataactgagaatgattttacgtgtcctgttgagggaagttgtgaagatgatgtacttacagagtcaaaaataaaggcatttcttgaggagaaggctcttgacctgaaaaagctacaaacacctttgtatgaggagttctacaacactgtgcacggagggagttgccaaacttccaagggaaaattcccaatcagtccaaaattgccccctcgaggaaagtcacctccaagtaagacgaggggaggtgcatgtgacactttgaataacacagctcccgaaagctgcagcaagcaatttcctagaagcagtgtggtggagagcagccgaattttgagagaaattgcttctcctcaacttaatgagtttgctgataaactccatcttgatgcccaagatagcccaagcatcagcttcaccgaaaggcagaggaagtggaaagaagagttggaccaggaacttgagagggagagagtgatgagattagctggctgtggtaaaactccatctccaaatagaggttccaacgtgaaaaaggagtgtcatgctgaccattgaacagacagcagcattcgtcgtctctttatatcatcccacagaagacacaacaaatgatagtaaagtacacagtgtgccagagattggtggcaacagcagtacagcctgtgccaccttatcatttgcggtgttagccaagctatgatcgcagaaccgtcctgtacaaaatgacagatttacgttgaagtggatcggtacagggggcactcatcacccattcaccctcaaatcaggatcattgtcgctgctgcctagaaggacgtcatgctgacacttccctgattttaaggccgcatttatcattctttttgatgcagtgctatacgtcgggcttcggttatgtatggtttatgttgagaaaacggtcttgccaaaattgtgtttgtaagcccagattggcgtggggcttggttttgtatggagcttgtttgcgaaagtgtgtaataagatagtgatgcgagatacgggtcattctgcatttctgcttgcagaatgaatctgagcttttctgaagctacaactgactgtaattaataatttcaatcaaatcgtgagtcctgtgcctgtatgttacac

SEQ ID NO: 68997 - DNA, 496 bp, Zea Mays
attcggacacccctagataccctaatcacttcacacgatcgcaccactctgttctcttctccctctctccctctattctgttggactctggcgaggaagactcgatgtcgacggccatggtggcaccgccgtggggctcatgctagctaatgaagtagcaggatgtgaccgcccaccccgctgtccgagaagaagcgtagctgcgcgtcgctgtccatgtcaacaggcaacaaattgatgaatggaacagggggcaacacactaccatgcctaagcttgtatagctgtccaatagctgcttatggtattttaactagctagctagctagtattttgtctcgaatactattctcacaggatacatacattagtttttaattcttttttatagcatttttaattatttcagtttctattgaacccaaatattttctaaagtcgaatcctccatataggcgtggaactgaaacttttataaaaagtatagtttcgtaat

SEQ ID NO: 68998 - DNA, 1348 bp, Zea Mays
atcgcagcccgcaggtgaaagggcctaagcgtattggggcactctatgttacctgccagctattcaaaatttacttcaggcttggaacagtaaacctttgccgtagtgtcataagaagtatcgaaactgcaaggaattttgattttgaagactttccagtgaaagacaaggtcacttatatgtactacactgggcggttggaggtgtttaacgagaactttcttgttgcagatcagaagctaacttatgctttgatgcattgcaatcctcaaagcgagtcaaatttgaggagaattttgaagttccttatccctgtaaagctttcaataggtgtactgccaaaaaggactcttttggagcggtatagtttgcttgagtatgcagatgttgtcactgcacttaagagaggagatctcaggcttctcaggcaagctctagacaggcacgaagaccaatttttgaaatctggcgtctaccttgtactggagaaacttgaacttcaagtctatcagagattagttaagaaaatccacatcattcagagacagaaggaaccagctaaggcacatcagattaagctagatgttgtcgtaaaagctctgaaatggcttgaaatcgacatggatgtggatgaggtggagtgcatcatggcatgccttatatacaagaaccttataaaagggtactttgctcacaagagtaaggtccttgtcctcagcaaacaagaccccttccccaagttgaacgggaagcctgtttaaatacaattgtcacggagaaatcctgtaatacaatggtattttttttgtttagtatgcagagatgctttccatattaagtgaaactccaagcctgacaaggacatttagggcctgatcggttataccggaataagccaggattcattctagctcatcaaaatctatataaggccttgttcgtttgtgccggattggtgggtcggaacgattcctaaccggattgtttctctaaattatataaactttgattagctgaaacgatttcgggtgcaatccgacacaaacgaacaaggcctaaattagagaagtaatccagctaggaattaatccgggactccaatcccaaacaaccgaacaaggccttatatttaatcacctctggatgtaatgtaacctgtatcattattgcctcattgaccttcattttccatacgcgaatgcgctatgtttatttttctatcatgtttagaagagagttcttgtccggtacccaggtcagcaaaatcacttaaggccttgttcggttattcccaatacacatggattggatgtgattgaaaaaaattattaagaattttgacttgttc

SEQ ID NO: 68999 - DNA, 2465 bp, Zea Mays
accggcttctaccatccgccaccgcccgccgcggaattcggaaaccccaaaccccaacgcggccgctgtgacgctgtccctggagatggcggcgtacttgagcatgggtgaagcgcaacgccgcatcggcgactacctctctcgggtgaccaacgccatctcctgctccgacgccgccgcgctcgcctcccttctttccgtctcctccgcgccggcctccaccccgctctccgacgcgctcgccgccatcccggacttcccgcgcctcgctggagatcgctaccccgaccttgccgacctcctcgttccgttgctccgagccatccacttccactccatccagcgcttcgccgacgcctactcctcgttcgagaaggcctccaacgcgttcctgcaggagtttaggaactgggagacgccgtgggcgatggaggcgatgcacactgtggcgctcgagatcaggctaatcgccgagaagatagggagcttgcgacgaatggaaagaaccctgacaagcttcaggcggctgggtcttttctgatgaaggtttttggtacactagcgcttgtctcaaggaagcagccaaatgcacatgtccaacaatcatttgttagcaacttagcatctggtaatggcctggcacacctgtgcagtagatgccactgttgtgccttcatatgtacaaccccagaggtgcatgcagtaacagctcaaggcacatggggtcgtcaagccatcgcagcccgcaggtatattctgcacatgctgcacgcaaagcatgtcaaagttgtgtgattgtatccttgggagtatgtagggcccacatgctgtcagacaggagggagtgcagaggactccggttattctcaatgatgatgcacacgtgtgtacaatttccatgtgattgatggacgatagactcggactttgtttgtggagtgcttgagagttggatgcttctaggagcgacagaataaacctcattccctttaatattagtagaggtagagatatttacttttttccatcatttatgttgtgatagctattttctgcccaatgtttcaggtgaaagggcctaagcgtattggggcactctatgttacctgccagctattcaaaatttacttcaggcttggaacagtaaacctttgccgtagtgtcataagaagtatcgaaactgcaaggaattttgattttgaagactttccagtgaaagacaaggtcacttatatgtactacactgggcggttggaggtgtttaacgagaactttcttgttgcagatcagaagctaacttatgctttgatgcattgcaatcctcaaagcgagtcaaatttgaggagaattttgaagttccttatccctgtaaagctttcaataggtgtactgccaaaaaggactcttttggagcggtatagtttgcttgagatgttgtcactgcacttaagagaggagatctcaggcttctcaggcaagctctagacaggcacgaagaccagtgagttgatctgttcttgtgcttaaaaaacccaattccttttgccatctctgatagcttgttttgcaagatttttgaaatctggcgtctaccttgtactggagaaacttgaacttcaagtctatcagagattagttaagaaaatccacatcattcagagacagaaggaaccagctaaggcacatcagattaagctagatgttgtcgtaaaagctctgaaatggcttgaaatcgacatggatgtggatgaggtggagtgcatcatggcatgccttatatacaagaaccttataaaagggtactttgctcacaagagtaaggtccttgtcctcagcaaacaagaccccttccccaagttgaacgggaagcctgtttaaatacaattgtcacggagaaatcctgtaatacaatggtattttttttgtttagtatgcagagatgctttccatattaagtgaaactccaagcctgacaaggacatttagggcctgatcggttataccggaataagccaggattcattctagctcatcaaaatctatataaggccttgttcgtttgtgccggattggtgggtcggaacgattcctaaccggattgtttctctaaattatataaactttgattagctgaaacgatttcgggtgcaatccgacacaaacgaacaaggcctaaattagagaagtaatccagctaggaattaatccgggactccaatcccaaacaaccgaacaaggccttatatttaatcacctctggatgtaatgtaacctgtatcattattgcctcattgaccttcattttccatacgcgaatgcgctatgtttatttttctatcatgtttagaagagagttcttgtccggtacccaggtcagcaaaatcacttaaggccttgttcggttattcccaatacacatggattggatgtgattgaaaaaaattattaagaattttgacttgttc

SEQ ID NO: 69000 - DNA, 2393 bp, Zea Mays
accggcttctaccatccgccaccgcccgccgcggaattcggaaaccccaaaccccaacgcggccgctgtgacgctgtccctggagatggcggcgtacttgagcatgggtgaagcgcaacgccgcatcggcgactacctctctcgggtgaccaacgccatctcctgctccgacgccgccgcgctcgcctcccttctttccgtctcctccgcgccggcctccaccccgctctccgacgcgctcgccgccatcccggacttcccgcgcctcgctggagatcgctaccccgaccttgccgacctcctcgttccgttgctccgagccatccacttccactccatccagcgcttcgccgacgcctactcctcgttcgagaaggcctccaagagtttaggaactgggagacgccgtgggcgatggaggcgatgcacactgtggcgctcgagatcaggctaatcgccgagaaggcagatagggagcttgcgacgaatggaaagaaccctgacaagcttcaggcggctgggtcttttctgatgaaggtttttggtacactagcgcttgtctcaaggaagcagccaaatgcacatgtccaacaatcatttgttagcaacttagcatctggtaatggcctggcacacctgtgcagtagatgccactgttgtgccttcatatgtacaaccccagaggtgcatgcagtaacagctcaaggcacatggggtcgtcaagccatcgcagcccgcaggtatattctgcacatgctgcacgcaaagcatgtcaaagttgtgtgattgtatccttgggagtatgtagggcccacatgctgtcagacaggagggagtgcagaggactccggttattctcaatgatgatgcacacgtgtgtacaatttccatgtgattgatggacgatagactcggactttgtttgtggagtgcttgagagttggatgcttctaggagcgacagaataaacctcattccctttaatattagtagaggtagagatatttacttttttccatcatttatgttgtgatagctattttctgcccaatgtttcaggtgaaagggcctaagcgtattggggcactctatgttacctgccagctattcaaaatttacttcaggcttggaacagtaaacctttgccgtagtgtcataagaagtatcgaaactgcaaggaattttgattttgaagactttccagtgaaagacaaggtcacttatatgtactacactgggcggttggaggtgtttaacgagaactttcttgttgcagatcagaagctaacttatgctttgatgcattgcaatcctcaaagcgagtcaaatttgaggagaattttgaagttccttatccctgtaaagctttcaataggtgtactgccaaaaaggactcttttggagcggtatagtttgcttgagtatgcagatgttgtcactgcacttaagagaggagatctcaggcttctcaggcaagctctagacaggcacgaagaccaatttttgaaatctggcgtctaccttgtactggagaaacttgaacttcaagtctatcagagattagttaagaaaatccacatcattcagagacagaaggaaccagctaaggcacatcagattaagctagatgttgtcgtaaaagctctgaaatggcttgaaatcgacatggatgtggatgaggtggagtgcatcatggcatgccttatatacaagaaccttataaaagggtactttgctcacaagagtaaggtccttgtcctcagcaaacaagaccccttccccaagttgaacgggaagcctgtttaaatacaattgtcacggagaaatcctgtaatacaatggtattttttttgtttagtatgcagagatgctttccatattaagtgaaactccaagcctgacaaggacatttagggcctgatcggttataccggaataagccaggattcattctagctcatcaaaatctatataaggccttgttcgtttgtgccggattggtgggtcggaacgattcctaaccggattgtttctctaaattatataaactttgattagctgaaacgatttcgggtgcaatccgacacaaacgaacaaggcctaaattagagaagtaatccagctaggaattaatccgggactccaatcccaaacaaccgaacaaggccttatatttaatcacctctggatgtaatgtaacctgtatcattattgcctcattgaccttcattttccatacgcgaatgcgctatgtttatttttctatcatgtttagaagagagttcttgtccggtacccaggtcagcaaaatcacttaaggccttgttcggttattcccaatacacatggattggatgtgattgaaaaaaattattaagaattttgacttgttc

SEQ ID NO: 69001 - DNA, 2556 bp, Zea Mays
accggcttctaccatccgccaccgcccgccgcggaattcggaaaccccaaaccccaacgcggccgctgtgacgctgtccctggagatggcggcgtacttgagcatgggtgaagcgcaacgccgcatcggcgactacctctctcgggtgaccaacgccatctcctgctccgacgccgccgcgctcgcctcccttctttccgtctcctccgcgccggcctccaccccgctctccgacgcgctcgccgccatcccggacttcccgcgcctcgctggagatcgctaccccgaccttgccgacctcctcgttccgttgctccgagccatccacttccactccatccagcgcttcgccgacgcctactcctcgttcgagaaggcctccaacgcgttcctgcaggagtttaggaactgggagacgccgtgggcgatggaggcgatgcacactgtggcgctcgagatcaggctaatcgccgagaaggcagatagggagcttgcgacgaatggaaagaaccctgacaagcttcaggcggctgggtcttttctgatgaaggtttttggtacactagcgacatagagacaatagacttactactatcaggatcaaaacatgtataccattaggcaagaataaagaagtgattactgactactacctgtagcttgtctcaaggaagcagccaaatgcacatgtccaacaatcatttgttagcaacttagcatctggtaatggcctggcacacctgtgcagtagatgccactgttgtgccttcatatgtacaaccccagaggtgcatgcagtaacagctcaaggcacatggggtcgtcaagccatcgcagcccgcaggtatattctgcacatgctgcacgcaaagcatgtcaaagttgtgtgattgtatccttgggagtatgtagggcccacatgctgtcagacaggagggagtgcagaggactccggttattctcaatgatgatgcacacgtgtgtacaatttccatgtgattgatggacgatagactcggactttgtttgtggagtgcttgagagttggatgcttctaggagcgacagaataaacctcattccctttaatattagtagaggtagagatatttacttttttccatcatttatgttgtgatagctattttctgcccaatgtttcaggtgaaagggcctaagcgtattggggcactctatgttacctgccagctattcaaaatttacttcaggcttggaacagtaaacctttgccgtagtgtcataagaagtatcgaaactgcaaggaattttgattttgaagactttccagtgaaagacaaggtcacttatatgtactacactgggcggttggaggtgtttaacgagaactttcttgttatcagaagctaacttatgctttgatgcattgcaatcctcaaagcgagtcaaatttgaggagaattttgaagttccttatccctgtaaagctttcaataggtgtactgccaaaaaggactcttttggagcggtatagtttgcttgagatgttgtcactgcacttaagagaggagatctcaggcttctcaggcaagctctagacaggcacgaagaccagtgagttgatctgttcttgtgcttaaaaaacccaattccttttgccatctctgatagcttgttttgcaagatttttgaaatctggcgtctaccttgtactggagaaacttgaacttcaagtctatcagagattagttaagaaaatccacatcattcagagacagaaggaaccagctaaggcacatcagattaagctagatgttgtcgtaaaagctctgaaatggcttgaaatcgacatggatgtggatgaggtggagtgcatcatggcatgccttatatacaagaaccttataaaagggtactttgctcacaagagtaaggtccttgtcctcagcaaacaagaccccttccccaagttgaacgggaagcctgtttaaatacaattgtcacggagaaatcctgtaatacaatggtattttttttgtttagtatgcagagatgctttccatattaagtgaaactccaagcctgacaaggacatttagggcctgatcggttataccggaataagccaggattcattctagctcatcaaaatctatataaggccttgttcgtttgtgccggattggtgggtcggaacgattcctaaccggattgtttctctaaattatataaactttgattagctgaaacgatttcgggtgcaatccgacacaaacgaacaaggcctaaattagagaagtaatccagctaggaattaatccgggactccaatcccaaacaaccgaacaaggccttatatttaatcacctctggatgtaatgtaacctgtatcattattgcctcattgaccttcattttccatacgcgaatgcgctatgtttatttttctatcatgtttagaagagagttcttgtccggtacccaggtcagcaaaatcacttaaggccttgttcggttattcccaatacacatggattggatgtgattgaaaaaaattattaagaattttgacttgttc

SEQ ID NO: 69002 - DNA, 2445 bp, Zea Mays
ctcagttttactggtcgcgcaccggcttctaccatccgccaccgcccgccgcggaattcggaaaccccaaaccccaacgcggccgctgtgacgctgtccctggagatggcggcgtacttgagcatgggtgaagcgcaacgccgcatcggcgactacctctctcgggtgaccaacgccatctcctgctccgacgccgccgcgctcgcctcccttctttccgtctcctccgcgccggcctccaccccgctctccgacgcgctcgccgccatcccggacttcccgcgcctcgctggagatcgctaccccgaccttgccgacctcctcgttccgttgctccgagccatccacttccactccatccagcgcttcgccgacgcctactcctcgttcgagaaggcctccaacgcgttcctgcaggagtttaggaactgggagacgccgtgggcgatggaggcgatgcacactgtggcgctcgagatcaggctaatcgccgagaagatagggagcttgcgacgaatggaaagaaccctgacaagcttcaggcggctgggtcttttctgatgaaggtttttggtacactagcgacatagagacaatagacttactactatcaggatcaaaacatgtataccattaggcaagaataaagaagtgattactgactactacctgtagcttgtctcaaggaagcagccaaatgcacatgtccaacaatcatttgttagcaacttagcatctggtaatggcctggcacacctgtgcagtagatgccactgttgtgccttcatatgtacaaccccagaggtgcatgcagtaacagctcaaggcacatggggtcgtcaagccatcgcagcccgcagggcccacatgctgtcagacaggagggagtgcagaggactccggttattctcaatgatgatgcacacgtgtgtacaatttccatgtgattgatggacgatagactcggactttgtttgtggagtgcttgagagttggatgcttctaggagcgacagaataaacctcattccctttaatattagtagaggtagagatatttacttttttccatcatttatgttgtgatagctattttctgcccaatgtttcaggtgaaagggcctaagcgtattggggcactctatgttacctgccagctattcaaaatttacttcaggcttggaacagtaaacctttgccgtagtgtcataagaagtatcgaaactgcaaggaattttgattttgaagactttccagtgaaagacaaggtcacttatatgtactacactgggcggttggaggtgtttaacgagaactttcttgttgcagatcagaagctaacttatgctttgatgcattgcaatcctcaaagcgagtcaaatttgaggagaattttgaagttccttatccctgtaaagctttcaataggtgtactgccaaaaaggactcttttggagcggtatagtttgcttgagtatgcagatgttgtcactgcacttaagagaggagatctcaggcttctcaggcaagctctagacaggcacgaagaccaatttttgaaatctggcgtctaccttgtactggagaaacttgaacttcaagtctatcagagattagttaagaaaatccacatcattcagagacagaaggaaccagctaaggcacatcagattaagctagatgttgtcgtaaaagctctgaaatggcttgaaatcgacatggatgtggatgaggtggagtgcatcatggcatgccttatatacaagaaccttataaaagggtactttgctcacaagagtaaggtccttgtcctcagcaaacaagaccccttccccaagttgaacgggaagcctgtttaaatacaattgtcacggagaaatcctgtaatacaatggtattttttttgtttagtatgcagagatgctttccatattaagtgaaactccaagcctgacaaggacatttagggcctgatcggttataccggaataagccaggattcattctagctcatcaaaatctatataaggccttgttcgtttgtgccggattggtgggtcggaacgattcctaaccggattgtttctctaaattatataaactttgattagctgaaacgatttcgggtgcaatccgacacaaacgaacaaggcctaaattagagaagtaatccagctaggaattaatccgggactccaatcccaaacaaccgaacaaggccttatatttaatcacctctggatgtaatgtaacctgtatcattattgcctcattgaccttcattttccatacgcgaatgcgctatgtttatttttctatcatgtttagaagagagttcttgtccggtacccaggtcagcaaaatcacttaaggccttgttcggttattcccaatacacatggattggatgtgattgaaaaaaattattaagaattttgacttgttc

SEQ ID NO: 69003 - DNA, 809 bp, Zea Mays
accggcttctaccatccgccaccgcccgccgcggaattcggaaaccccaaaccccaacgcggccgctgtgacgctgtccctggagatggcggcgtacttgagcatgggtgaagcgcaacgccgcatcggcgactacctctctcgggtgaccaacgccatctcctgctccgacgccgccgcgctcgcctcccttctttccgtctcctccgcgccggcctccaccccgctctccgacgcgctcgccgccatcccggacttcccgcgcctcgctggagatcgctaccccgaccttgccgacctcctcgttccgttgctccgagccatccacttccactccatccagcgcttcgccgacgcctactcctcgttcgagaaggcctccaacgcgttcctgcaggagtttaggaactgggagacgccgtgggcgatggaggcgatgcacactgtggcgctcgagatcaggctaatcgccgagaaggcagatagggagcttgcgacgaatggaaagaaccctgacaagcttcaggcggctgggtcttttctgatgaaggtttttggtacactagcggtgaaagggcctaagcgtattggggcactctatgttacctgccagctattcaaaatttacttcaggcttggaacagtaaacctttgccgtagtgtcataagaagtatcgaaactgcaaggaattttgattttgaagactttccagtgaaagacaaggtcacttatatgtactacactgggcggttggaggtgtttaacgagaactttcttgttcgaaactgcttacaacagattttgttta

SEQ ID NO: 69004 - DNA, 1258 bp, Zea Mays
agaaaggtggtcatcttgcaggatggtgaacctcgtacacgtagccaagaaacagctggtgcagcgcctggcgaagatggccggactgcggcagcgcgccgtcgacgtcgatgatgccggcacagtcatcagtatctgggtacccaaggacaagctaccggctggccccaccgctgaggagatggagacggagaggaggaagaaggagacgaagcggaacggcggcaggctctccgtcgtgctcctgcacggcttcgctggtgatgggattctgacgttgtcgcactggcgagacactacgacgtgtacgtgccggacctgctcttcttcggtggctcggtgtcgccggcgggcgcggaccagactccgggtttccaggcggagtgcgtggcgtccgcgctgcggaggctaggggtggagcggtgcgtggcggtcgggttcagctacggcggcttcgtggcgttcaagatggccgaggcggacccggctctggtcgtgtccgtcgtcgccacggggtcgctggtctacatgacccgctccaccagcgaggccatgctgcggaggctcggcgcggcgtcgttcgccgagttcctcctgcccaacgatgtcgccgggctcaagtcgctcttcgccgctggcacctataggaaatggtggctgcctgatcgcgtcctcagtgactatatgaagctgatgatctttaaccgcaaggaaaggacgcagctgctggaaggcttggtggtcagcgatgaagacgcagctgttgtcgtccgttcttatcggcagcttctctatgcatcccggctctactcatgcaaagaagcgaccgcagccaggcttccgagcgaagctcacggcgagcgtacgcgcccagccaggctcagcgcatgcagcggcacgtataccgaggagatactcttgctctggggcgacaacgacagcatcttcaacatggagcttgcgagaagcctcaaagagcagctcggcgagaaggcgacgctgcgaagcatagcaaaggcgggccacttggtgatgctggagcggccgcgcgtcttcaacggctgtctcagagagttcctgttgcggcagtcacgctgatgcatcaccacgacgacggccgcggcgcggcgtacgcccaggcctgctatctagctaagatctagtcaagctatagctagacttgtgtacatatgctaataataaagaacattgtgctagtgtgttgaccagcttcatgcatatatgataattattatcg

SEQ ID NO: 69005 - DNA, 2892 bp, Zea Mays
gttcaaaaaaaccaatctcactctctccctccaccgccactgccccacccacccctaccccaatcccctcttccccattcaccagatcgagcgccgcgtgcctagggtttgcgcccccgccggtagcgatgcccccgtcctccgtgtcggggggcagcggccccggaggcgtctccccggacgccatcatcgagtggctgcaggacgagatggggtaccccacggccccgcccgcaccggagcagctccgcaagatctgccggggcaacatgatccccgtctggtccttcctgctccgacgcgtccgctccgagcgcaccgttgccactgcgcgccgcaacatcctcgtccacggcgtcgcggcccggcgggcgcgggagggcggggtgataggggcgggcgtgggtgacgccgcggccagggaggccgaggcgagggagcgggacctcgccgccgaggaggccgagcggctgcgcggaatcgtgaggaggcagcgcaaggagctccgcgcgcgcatcgcggaggtcgccagggaggaggcggagcgcaagcgcgtccttggcgagcgctccaatgccaggcacaagcaagttatgctcgaagcatatgaacagcaatgcgacgaagcatgcaaaatatttgctgaataccagcgtcggctacatcagtttgtcaaccaagcaagggacgtgcaaagatcaagtataggtgtggctggaactacaggttctgttgaagatatgcaattgcagagcaatagagacgacctttactcatcaactattaaaagcaataggttgtcagaggatcttttagaaactgcaggtgaaaggagcatccggaaggcatgtgaaactcttgctgcagatatgattgaaacgattcgaagttcattcccggcatttgaagggagtggcattaattcaagttgccaattaactgcagcaaagctgggtattgacttggatggtgaaatacccacagatgttaaagctgttgcattggattccctaaagaatccgttcctgcttctgcagtcaatcattacctacacatcgcgcatgaaaacacttatacatagagaaacagacaagattgacatacgtgctgatgcagaattactgaggtgtatggcaatgggaagattggatctcagttgccaactcgaggaacatatgatcagctattagaaagacagaaagaacatgtacagcaattcttggcaacagaagatgctttgaacaaagctgcagaagctaaagcactaagtcagaagcttttgcaacgcctgtatggaaccattgatatggcaggaagtaaaaagttgcctactgggaacaccacacaaaatgtgaccaacagtaggcatttagagctggatgtttgggccaaggaaagagaagttgcaggactaaaggcaagcttgagtacacttacatctgaggtacaacgtttgtataagttatgtgctgagtggaaggaagcagaagattcactgaagaagaaatggaagaaaatcgaagaatttgacgcccgtcgaacagagctggagtgcatttacagtgctcttcagcgggctaatatggcccttttggaggccgtgggttctaacggcatgacaggatcagaagcacttgcagctgcagagaaacatgcagctctgttaactgcaagagctggtgctagagatccatctgctgtgccatctatatgccgcatctctgctgctcttcagtataattttggtacagaaggcacagattttggcttggcttcagtattaaattcactggagttctgtctaaagccttgtgggtctgaagctagcatattagaggatttatcaaaatctatcaacttcgtgcacacacggagaaatcttgttgaaaatgaccgtgttttgctgaaccgtgcacatcgtgctcaacaagaatatgaaagagtggccaactattgtcttaaattagctggcgaacaagaaaagctggtgagtgaaagatggcttccggagctgagaaatgcagttcaagaagctcggaggtgttttgatgactgccagcgtgttaggggcttggttgatgagtggtacgagcagccagcagccacaattgtcgattgggtaacgatagatggacagagcgtgggtgcctggatcaacctcgtgaagcaactccacatggagatctccagacggacgctggcaatgtcatctgtaggagacgactgaagcaaccagctgtgacccagctgtggctttggatgttcggaggctccgtgtgatgggttcggtttggcaccaagatatcttctatctactcgatagccttttcccattgtagtttatacgcctctctctggtttggtttgtaattagtttttttgtatggtgtcaattgccatgtgttgaatttgtcatttgtcacaaattatcggtgttggtgttgtggctttgctgattgggctgcacgtcccgacgtgccgtcctgctgttagttgtacagggtcgcgcctcacctttgagtgttcaagcagtccgtgaattatctcagttatataatgactgcacgtaatgctaagggtagctgtgatggtgggttttagcaccattatgggcgctactatagagaataaaagttttagcagtgattcaggtggaggcagtaaggttgtcgcttccacccaaaaaatgggaaggagcccattcactggcacaagtgtgacatcactatctttgctcatctaaagcttgtattttattcacgatcaagtttatagagataaacacattcaagtgtaggagtaactgttggtggatataacagtgctgcattctattgatctattctataaacgtaaataatagatgaaggcaaatggttgccctttttattt

SEQ ID NO: 69006 - DNA, 3116 bp, Zea Mays
agagggctcaccggtaagtcgccggtcggccgtcctcgagagtcgagacatcgactaccaaacagccggcctgctccagcgccgtcccgttgcctcgtcctgtccaagcggacagatccaaagcaaaaccgggaaaaagttcaaaaaaaccaatctcactctctccctccaccgccactgccccacccacccctaccccaatcccctcttccccattcaccagatcgagcgccgcgtgcctagggtttgcgcccccgccggtagcgatgcccccgtcctccgtgtcggggggcagcggccccggaggcgtctccccggacgccatcatcgagtggctgcaggacgagatggggtaccccacggccccgcccgcaccggagcagctccgcaagatctgccggggcaacatgatccccgtctggtccttcctgctccgacgcgtccgctccgagcgcaccgttgccactgcgcgccgcaacatcctcgtccacggcgtcgcggcccggcgggcgcgggagggcggggtgataggggcgggcgtgggtgacgccgcggccagggaggccgaggcgagggagcgggacctcgccgccgaggaggccgagcggctgcgcggaatcgtgaggaggcagcgcaaggagctccgcgcgcgcatcgcggaggtcgccagggaggaggcggagcgcaagcgcgtccttggcgagcgctccaatgccaggcacaagcaagttatgctcgaagcatatgaacagcaatgcgacgaagcatgcaaaatatttgctgaataccagcgtcggctacatcagtttgtcaaccaagcaagggacgtgcaaagatcaagtataggtgtggctggaactacaggttctgttgaagatatgcaattgcagagcaatagagacgacctttactcatcaactattaaaagcaataggttgtcagaggatcttttagaaactgcaggtgaaaggagcatccggaagcaaagctgggtattgacttggatggtgaaatacccacagatgttaaagctgttgcattggattccctaaagaatccgttcctgcttctgcagtcaatcattacctacacatcgcgcatgaaaacacttatacatagagaaacagacaagattgacatacgtgctgatgcagaattactgaggtgtatggcaatgggaagattggatctcagttgccaactcgaggaacatatgatcagctattagaaagacagaaagaacatgtacagcaattcttggcaacagaagatgctttgaacaaagctgcagaagctaaagcactaagtcagaagcttttgcaacgcctgtatggaaccattgatatggcaggaagtaaaaagttgcctactgggaacaccacacaaaatgtgaccaacagtaggcatttagagctggatgtttgggccaaggaaagagaagttgcaggactaaaggcaagcttgagtacacttacatctgaggtacaacgtttgtataagttatgtgctgagtggaaggaagcagaagattcactgaagaagaaatggaagaaaatcgaagaatttgacgcccgtcgaacagagctggagtgcatttacagtgctcttcagcgggctaatatggatgcatcatcattttgggagcaacaaccattatcagctagaggatatgcatcaagtacaattatccctgcgtgccatactgtggtagacatgtctacgaactcaagggacctcatagagcgagaattagctgcatttagccagagcttggataatagcttgtgcaggttgccagcaaccccgcaggcccttttggaggccgtgggttctaacggcatgacaggatcagaagcacttgcagctgcagagaaacatgcagctctgttaactgcaagagctggtgctagagatccatctgctgtgccatctatatgccgcatctctgctgctcttcagtataattttggtacagaaggcacagattttggcttggcttcagtattaaattcactggagttctgtctaaagccttgtgggtctgaagctagcatattagaggatttatcaaaatctatcaacttcgtgcacacacggagaaatcttgttgaaaatgaccgtgttttgctgaaccgtgcacatcgtgctcaacaagaatatgaaagagtggccaactattgtcttaaattagctggcgaacaagaaaagctggtgagtgaaagatggcttccggagctgagaaatgcagttcaagaagctcggaggtgttttgatgactgccagcgtgttaggggcttggttgatgagtggtacgagcagccagcagccacaattgtcgattgggtaacgatagatggacagagcgtgggtgcctggatcaacctcgtgaagcaactccacatggagatctccagacggacgctggcaatgtcatctgtaggagacgactgaagcaaccagctgtgacccagctgtggctttggatgttcggaggctccgtgtgatgggttcggtttggcaccaagatatcttctatctactcgatagccttttcccattgtagtttatacgcctctctctggtttggtttgtaattagtttttttgtatggtgtcaattgccatgtgttgaatttgtcatttgtcacaaattatcggtgttggtgttgtggctttgctgattgggctgcacgtcccgacgtgccgtcctgctgttagttgtacagggtcgcgcctcacctttgagtgttcaagcagtccgtgaattatctcagttatataatgactgcacgtaatgctaagggtagctgtgatggtgggttttagcaccattatgggcgctactatagagaataaaagttttagcagtgattcaggtggaggcagtaaggttgtcgcttccacccaaaaaatgggaaggagcccattcactggcacaagtgtgacatcactatctttgctcatctaaagcttgtattttattcacgatcaagtttatagagataaacacattcaagtgtaggagtaactgttggtggatataacagtgctgcattctattgatctattctataaacgtaaataatagatgaaggcaaatggttgccctttttattt

SEQ ID NO: 69007 - DNA, 3251 bp, Zea Mays
cccaggcagacggcagtgagaccgatagagggctcaccggtaagtcgccggtcggccgtcctcgagagtcgagacatcgactaccaaacagccggcctgctccagcgccgtcccgttgcctcgtcctgtccaagcggacagatccaaagcaaaaccgggaaaaagttcaaaaaaaccaatctcactctctccctccaccgccactgccccacccacccctaccccaatcccctcttccccattcaccagatcgagcgccgcgtgcctagggtttgcgcccccgccggtagcgatgcccccgtcctccgtgtcggggggcagcggccccggaggcgtctccccggacgccatcatcgagtggctgcaggacgagatggggtaccccacggccccgcccgcaccggagcagctccgcaagatctgccggggcaacatgatccccgtctggtccttcctgctccgacgcgtccgctccgagcgcaccgttgccactgcgcgccgcaacatcctcgtccacggcgtcgcggcccggcgggcgcgggagggcggggtgataggggcgggcgtgggtgacgccgcggccagggaggccgaggcgagggagcgggacctcgccgccgaggaggccgagcggctgcgcggaatcgtgaggaggcagcgcaaggagctccgcgcgcgcatcgcggaggtcgccagggaggaggcggagcgcaagcgcgtccttggcgagcgctccaatgccaggcacaagcaagttatgctcgaagcatatgaacagcaatgcgacgaagcatgcaaaatatttgctgaataccagcgtcggctacatcagtttgtcaaccaagcaagggacgtgcaaagatcaagtataggtgtggctggaactacaggttctgttgaagatatgcaattgcagagcaatagagacgacctttactcatcaactattaaaagcaataggttgtcagaggatcttttagaaactgcaggtgaaaggagcatccggaaggcatgtgaaactcttgctgcagatatgattgaaacgattcgaagttcattcccggcatttgaagggagtggcattaattcaagttgccaattaactgcagcaaagctgggtattgacttggatggtgaaatacccacagatgttaaagctgttgcattggattccctaaagaatccgttcctgcttctgcagtcaatcattacctacacatcgcgcatgaaaacacttatacatagagaaacagacaagattgacatacgtgctgatgcagaattactgaggtgtatggcaatgggaagattggatctcagttgccaactcgaggaacatatgatcagctattagaaagacagaaagaacatgtacagcaattcttggcaacagaagatgctttgaacaaagctgcagaagctaaagcactaagtcagaagcttttgcaacgcctgtatggaaccattgatatggcaggaagtaaaaagttgcctactgggaacaccacacaaaatgtgaccaacagtaggcatttagagctggatgtttgggccaaggaaagagaagttgcaggactaaaggcaagcttgagtacacttacatctgaggtacaacgtttgtataagttatgtgctgagtggaaggaagcagaagattcactgaagaagaaatggaagaaaatcgaagaatttgacgcccgtcgaacagagctggagtgcatttacagtgctcttcagcgggctaatatggatgcatcatcattttgggagcaacaaccattatcagctagaggatatgcatcaagtacaattatccctgcgtgccatactgtggtagacatgtctacgaactcaagggacctcatagagcgagaattagctgcatttagccagagcttggataatagcttgtgcaggttgccagcaaccccgcaggcccttttggaggccgtgggttctaacggcatgacaggatcagaagcacttgcagctgcagagaaacatgcagctctgttaactgcaagagctggtgctagagatccatctgctgtgccatctatatgccgcatctctgctgctcttcagtataattttgtttcaccaggtacagaaggcacagattttggcttggcttcagtattaaattcactggagttctgtctaaagccttgtgggtctgaagctagcatattagaggatttatcaaaatctatcaacttcgtgcacacacggagaaatcttgttgaaaatgaccgtgttttgctgaaccgtgcacatcgtgctcaacaagaatatgaaagagtggccaactattgtcttaaattagctggcgaacaagaaaagctggtgagtgaaagatggcttccggagctgagaaatgcagttcaagaagctcggaggtgttttgatgactgccagcgtgttaggggcttggttgatgagtggtacgagcagccagcagccacaattgtcgattgggtaacgatagatggacagagcgtgggtgcctggatcaacctcgtgaagcaactccacatggagatctccagacggacgctggcaatgtcatctgtaggagacgactgaagcaaccagctgtgacccagctgtggctttggatgttcggaggctccgtgtgatgggttcggtttggcaccaagatatcttctatctactcgatagccttttcccattgtagtttatacgcctctctctggtttggtttgtaattagtttttttgtatggtgtcaattgccatgtgttgaatttgtcatttgtcacaaattatcggtgttggtgttgtggctttgctgattgggctgcacgtcccgacgtgccgtcctgctgttagttgtacagggtcgcgcctcacctttgagtgttcaagcagtccgtgaattatctcagttatataatgactgcacgtaatgctaagggtagctgtgatggtgggttttagcaccattatgggcgctactatagagaataaaagttttagcagtgattcaggtggaggcagtaaggttgtcgcttccacccaaaaaatgggaaggagcccattcactggcacaagtgtgacatcactatctttgctcatctaaagcttgtattttattcacgatcaagtttatagagataaacacattcaagtgtaggagtaactgttggtggatataacagtgctgcattctattgatctattctataaacgtaaataatagatgaaggcaaatggttgccctttttattt

SEQ ID NO: 69008 - DNA, 3229 bp, Zea Mays
cttccatgctccagtgcccaggcagacggcagtgagaccgatagagggctcaccggtaagtcgccggtcggccgtcctcgagagtcgagacatcgactaccaaacagccggcctgctccagcgccgtcccgttgcctcgtcctgtccaagcggacagatccaaagcaaaaccgggaaaaagttcaaaaaaaccaatctcactctctccctccaccgccactgccccacccacccctaccccaatcccctcttccccattcaccagatcgagcgccgcgtgcctagggtttgcgcccccgccggtagcgatgcccccgtcctccgtgtcggggggcagcggccccggaggcgtctccccggacgccatcatcgagtggctgcaggacgagatggggtaccccacggccccgcccgcaccggagcagctccgcaagatctgccggggcaacatgatccccgtctggtccttcctgctccgacgcgtccgctccgagcgcaccgttgccactgcgcgccgcaacatcctcgtccacggcgtcgcggcccggcgggcgcgggagggcggggtgataggggcgggcgtgggtgacgccgcggccagggaggccgaggcgagggagcgggacctcgccgccgaggaggccgagcggctgcgcggaatcgtgaggaggcagcgcaaggagctccgcgcgcgcatcgcggaggtcgccagggaggaggcggagcgcaagcgcgtccttggcgagcgctccaatgccaggcacaagcaagttatgctcgaagcatatgaacagcaatgcgacgaagcatgcaaaatatttgctgaataccagcgtcggctacatcagtttgtcaaccaagcaagggacgtgcaaagatcaagtataggtgtggctggaactacaggtgaaaggagcatccggaaggcatgtgaaactcttgctgcagatatgattgaaacgattcgaagttcattcccggcatttgaagggagtggcattaattcaagttgccaattaactgcagcaaagctgggtattgacttggatggtgaaatacccacagatgttaaagctgttgcattggattccctaaagaatccgttcctgcttctgcagtcaatcattacctacacatcgcgcatgaaaacacttatacatagagaaacagacaagattgacatacgtgctgatgcagaattactgaggtataaatatgaaaatgagcaggttattgatgctgcttcaactgatgcaagctcacccttaccgtatcaggtgtatggcaatgggaagattggatctcagttgccaactcgaggaacatatgatcagctattagaaagacagaaagaacatgtacagcaattcttggcaacagaagatgctttgaacaaagctgcagaagctaaagcactaagtcagaagcttttgcaacgcctgtatggaaccattgatatggcaggaagtaaaaagttgcctactgggaacaccacacaaaatgtgaccaacagtaggcatttagagctggatgtttgggccaaggaaagagaagttgcaggactaaaggcaagcttgagtacacttacatctgaggtacaacgtttgtataagttatgtgctgagtggaaggaagcagaagattcactgaagaagaaatggaagaaaatcgaagaatttgacgcccgtcgaacagagctggagtgcatttacagtgctcttcagcgggctaatatggatgcatcatcattttgggagcaacaaccattatcagctagaggatatgcatcaagtacaattatccctgcgtgccatactgtggtagacatgtctacgaactcaagggacctcatagagcgagaattagctgcatttagccagagcttggataatagcttgtgcaggttgccagcaaccccgcaggcccttttggaggccgtgggttctaacggcatgacaggatcagaagcacttgcagctgcagagaaacatgcagctctgttaactgcaagagctggtgctagagatccatctgctgtgccatctatatgccgcatctctgctgctcttcagtataattttggtacagaaggcacagattttggcttggcttcagtattaaattcactggagttctgtctaaagccttgtgggtctgaagctagcatattagaggatttatcaaaatctatcaacttcgtgcacacacggagaaatcttgttgaaaatgaccgtgttttgctgaaccgtgcacatcgtgctcaacaagaatatgaaagagtggccaactattgtcttaaattagctggcgaacaagaaaagctggtgagtgaaagatggcttccggagctgagaaatgcagttcaagaagctcggaggtgttttgatgactgccagcgtgttaggggcttggttgatgagtggtacgagcagccagcagccacaattgtcgattgggtaacgatagatggacagagcgtgggtgcctggatcaacctcgtgaagcaactccacatggagatctccagacggacgctggcaatgtcatctgtaggagacgactgaagcaaccagctgtgacccagctgtggctttggatgttcggaggctccgtgtgatgggttcggtttggcaccaagatatcttctatctactcgatagccttttcccattgtagtttatacgcctctctctggtttggtttgtaattagtttttttgtatggtgtcaattgccatgtgttgaatttgtcatttgtcacaaattatcggtgttggtgttgtggctttgctgattgggctgcacgtcccgacgtgccgtcctgctgttagttgtacagggtcgcgcctcacctttgagtgttcaagcagtccgtgaattatctcagttatataatgactgcacgtaatgctaagggtagctgtgatggtgggttttagcaccattatgggcgctactatagagaataaaagttttagcagtgattcaggtggaggcagtaaggttgtcgcttccacccaaaaaatgggaaggagcccattcactggcacaagtgtgacatcactatctttgctcatctaaagcttgtattttattcacgatcaagtttatagagataaacacattcaagtgtaggagtaactgttggtggatataacagtgctgcattctattgatctattctataaacgtaaataatagatgaaggcaaatggttgccctttttattt

SEQ ID NO: 69009 - DNA, 897 bp, Zea Mays
cttatcctaacgcttctatccgagtctgcagcgctttgatcgggagggggcgataaccgtaatggtcgcgtccctctttcacgcccgcgcgatattaaaaggccagagggtgtcagcttgggaaccatcgttcccggtataccccacgccaatatacacctattcgatctagatttgcgcacgggaattggagggaaggttgccgccaggttcaccatccgtgtatgaaccactcgctctcagctcaccgttgccagtgaagaacagcaggccctaatggcgagctcgacaaatcccgaaggtgaagaagatgatcgtctatgccgttgagcatgctttggcgattctgaaagagccttgcacaccccgcgagtccgcctgaacaagctggcatcatatctgggtttctgctagtcaacgagggaaactagagaacatgatgcgatgttgtgcgacagtagacgtggggtagcgctagttgctttgcttgtcggcacaaataataatcttggaaatattactaataagggctcggttaggaagggattggaggagattaaattttttttttttattttaactgaatagaaagagatttgatgagatccctatacaatcgaaaaaggcctaaaatggtagattttgctgatggtgtgcatcactgaagagctgggcatgctgaaaaaaatagatgtcatactgtaaatctacaaaatgtggcttcgtttccaaaaggccttgcccctgttatctataactgtctacagtctatacgagtaacatatgctttcggcgttattattaccgaataccgtagaaactgcatcgtaatgcgaacaagaagaaatttgcctaaaaatctcttattcgccaatgcactacagcgcagtttttttg

SEQ ID NO: 69010 - DNA, 2652 bp, Zea Mays
gttcttcctttttgtgttccattctgttagattgccacagtgaactctgtcacagaacttggttttgaggaaatgcaatagcaatgaatcatctaaaagggaaaagaggcccacttctgcaggtgtgatatcaccccaggctcatagtgcagcaccatgtactaaagaaattggactctcctttgtgactacaaataggatgaataatgtgtctgccatgtgggccaaagtggatacatcagatgtgagggctgaggaggttgaccctgaaacaaaacgcaaatacgcaagctacctattgcactacctgttgccttgtttgacacaactcaacaaggaccagatggaagaaagagaagcagaagccaaaattcgaggattgcaattgtcggaattgattgttgagaaagctgtctcctggaatgatgagagggtgttctgtaacaattgcaaaacgtcaatatttgatctgcatagaagctgctcaaactgctcgtacgagttgtgcatcagttgttgtaaggagctccgtggaaattttcttaagatcaattgtcaaaagggactggtacctgagcataagagtagaggaattgactatatgcatggtggtgattgtaagccacctaatctagaaaatgacagagaaacaggtttgtctagttaccaatctaagtctatcaagtgggaagctgatcctggtgggaccatttattgccctccatctgaactagatgggtgtggtaaccatgttcttgagttgaaacaaatttttgaaacagataggttaattaagcttgaaatggaagcattgcggctgagcaaccagatagaaccttctgatatttccagtatagatatatgtgaatgctcatgttcagctaataatgtaagttcaaggaaagctgccaccagagagaactccacagataacaacatatactgtccaatatcagataatggtgggccagatgatctcaagcacttccaaaagcactgggtgaaaggagagcctgtaatagtgcaaggggtgctcagtgaaatgtctgatttgagatgggagcctgaaaaaatgtgggctgaagtacatgacgccaatactagttctgagatgaaaagtgtgaaaaccactgattgtatgtcttgttgtgaggttgagataagtgccaaggactttttcaatgggtattatcatggtcggatgtatcataatctttggcctgaaatgcttaaattgaaggattggcctacttcagaccattttgagaatattttgccttcccatggaaagacgtacatcaattctttgccttttcaaccatacacaaatttgaaatctggtttactaaatgtctctgcattgcttcctggtgacgtcttaaagcttgacatgggcccaaaatcatatatagcttatggctatgcagaggaactcattagaggagattctgttacaaagcttcattgtgatttgtctgatgcagttaatgttttaatgcatactgccaaagttgtgccttctgaagaacaaaaagaggggataagagatttgaaaataaggcatgcagaacaagataaaaaggaatgcttggggaattcatcaatagatggaaataaaacaagcatggagcatgctcatatatcatcagtttcctgcgaggatggtggaggtgcactatgggatatttttaggagggaggatgttggaaagctgaaagagtacctcacaaaacattccaaagaatttcgccatatgtactgttgtccagttgaaaagatatttaaccctgtacatgatgaaacattttatctgaccaacaaacacaagagaaagctcaaggaggagtatggaatcgagccatggacctttgtgcaaagacttggagatgcggttttcatacctgctgggtgtcctcatcaagtacggaatctaaagtcttgcaccaagatagctctggattttgtatcaccagagaacattcagcaatgtctcagcttaaccgaggatttccggagacttccagtgggccacagggcaaaagaagataaactagaggtgaagaagatgatcgtctatgccgttgagcatgctttggcgattctgaaagagccttgcacaccccgcgagtccgcctgaacaagctggcatcatatctgggtttctgctagtcaacgagggaaactagagaacatgatgcgatgttgtgcgacagtagacgtggggtagcgctagttgctttgcttgtcggcacaaataataatcttggaaatattactaataagggctcggttaggaagggattggaggagattaaattttttttttttattttaactgaatagaaagagatttgatgagatccctatacaatcgaaaaaggcctaaaatggtagattttgctgatggtgtgcatcactgaagagctgggcatgctgaaaaaaatagatgtcatactgtaaatctacaaaatgtggcttcgtttccaaaaggccttgcccctgttatctataactgtctacagtctatacgagtaacatatgctttcggcgttattattaccgaataccgtagaaactgcatcgtaatgcgaacaagaagaaatttgcctaaaaatctcttattcgccaatgcactacagcgcagtttttttg

SEQ ID NO: 69011 - DNA, 3728 bp, Zea Mays
caacgccaacgacgacgcacctaaaaataataaggactcaaaattccatccaaatccatccgcctcaccgcctgaggcctgagctcaatcgcacccaacccaatacatcccgtcgatccgcgtaggctttgctcctgatttgatagattctcagacctcgcgtcgtcggccgatctgccgcgccgtgttcctgccgccgtgtcctggccatgacggcggtggagctcaggatcgggccgctagagtgggcgatggatgacgagagcccaggtgtgggcgacgaggatggcaaggacgaggactgggctctcgatatggagaggaagggaaggggaaagcggaagaggtccgctcctcggagacgctcgggacccaagcggcgccgcgccgctgcggcgatggcgcccgcgcccgcgcgatcacagtcagagccgtgcccggggacagccgagccttcgccagaacatggcttcaatgctgctgctgcggcggcgggagttaaggaggaaaacggggtgaggaaggaggaaggggagaacgtggctccgagcaccagtggcagaggaggaggcggcgggaggaagccgggggctaggaggtcgtgccaccagtgcaagagggtcaagcgtctgaaggagatggtcaggtgccagtgctgtgacgagaggatctactgcgacctctgcatcaggaacaggtacgcgatgatgtcaccggatgctgttagagagcagtgccccttctgccgtggactctgcaattgtacgcgatgccttaacaaggatagggataagcagcttggacccgagaacttggttttgaggaaatgcaatagcaatgaatcatctaaaagggaaaagaggcccacttctgcaggtgtgatatcaccccaggctcatagtgcagcaccatgtactaaagaaattggactctcctttgtgactacaaataggatgaataatgtgtctgccatgtgggccaaagtggatacatcagatgtgagggctgaggaggttgaccctgaaacaaaacgcaaatacgcaagctacctattgcactacctgttgccttgtttgacacaactcaacaaggaccagatggaagaaagagaagcagaagccaaaattcgaggattgcaattgtcggaattgattgttgagaaagctgtctcctggaatgatgagagggtgttctgtaacaattgcaaaacgtcaatatttgatctgcatagaagctgctcaaactgctcgtacgagttgtgcatcagttgttgtaaggagctccgtggaaattttcttaagatcaattgtcaaaagggactggtacctgagcataagagtagaggaattgactatatgcatggtggtgattgtaagccacctaatctagaaaatgacagagaaacaggtttgtctagttaccaatctaagtctatcaagtgggaagctgatcctggtgggaccatttattgccctccatctgaactagatgggtgtggtaaccatgttcttgagttgaaacaaatttttgaaacagataggttaattaagcttgaaatggaagcattgcggctgagcaaccagatagaaccttctgatatttccagtatagatatatgtgaatgctcatgttcagctaataatgtaagttcaaggaaagctgccaccagagagaactccacagataacaacatatactgtccaatatcagataatggtgggccagatgatctcaagcacttccaaaagcactgggtgaaaggagagcctgtaatagtgcaaggggtgctcagtgaaatgtctgatttgagatgggagcctgaaaaaatgtgggctgaagtacatgacgccaatactagttctgagatgaaaagtgtgaaaaccactgattgtatgtcttgttgtgaggttgagataagtgccaaggactttttcaatgggtattatcatggtcggatgtatcataatctttggcctgaaatgcttaaattgaaggattggcctacttcagaccattttgagaatattttgccttcccatggaaagacgtacatcaattctttgccttttcaaccatacacaaatttgaaatctggtttactaaatgtctctgcattgcttcctggtgacgtcttaaagcttgacatgggcccaaaatcatatatagcttatggctatgcagaggaactcattagaggagattctgttacaaagcttcattgtgatttgtctgatgcagttaatgttttaatgcatactgccaaagttgtgccttctgaagaacaaaaagaggggataagagatttgaaaataaggcatgcagaacaagataaaaaggaatgcttggggaattcatcaatagatggaaataaaacaagcatggagcatgctcatatatcatcagtttcctgcgaggatggtggaggtgcactatgggatatttttaggagggaggatgttggaaagctgaaagagtacctcacaaaacattccaaagaatttcgccatatgtactgttgtccagttgaaaagatatttaaccctgtacatgatgaaacattttatctgaccaacaaacacaagagaaagctcaaggaggagtatggaatcgagccatggacctttgtgcaaagacttggagatgcggttttcatacctgctgggtgtcctcatcaagtacggaatctaaagtcttgcaccaagatagctctggattttgtatcaccagagaacattcagcaatgtctcagcttaaccgaggatttccggagacttccagtgggccacagggcaaaagaagataaactagaggttgatctcagactcggtttggacttatcctaactgcttctatccgagtctccagtgccttgatcggcggtgcaacaaccacaatggttgcggccctctttcacgcccgtgcgacattaaaaggctagggggtgccggctcgggaaccatcgttccccggtataccccacgccaatatacacttatccgatctagatttgcgcatgggaagtgaagggaaggtcgtgcgaggtttaccatctgtatgtgaacccgtcactctcatctcgccgttgcggtgaagaacaaccgaccctaatggcgagctcgacaaatcccgaaggtgaagaagatgatcgtctatgccgttgagcatgctttggcgattctgaaagagccttgcacaccccgcgagtccgcctgaacaagctggcatcatatctgggtttctgctagtcaacgagggaaactagagaacatgatgcgatgttgtgcgacagtagacgtggggtagcgctagttgctttgcttgtcggcacaaataataatcttggaaatattactaataagggctcggttaggaagggattggaggagattaaattttttttttttattttaactgaatagaaagagatttgatgagatccctatacaatcgaaaaaggcctaaaatggtagattttgctgatggtgtgcatcactgaagagctgggcatgctgaaaaaaatagatgtcatactgtaaatctacaaaatgtggcttcgtttccaaaaggccttgcccctgttatctataactgtctacagtctatacgagtaacatatgctttcggcgttattattaccgaataccgtagaaactgcatcgtaatgcgaacaagaagaaatttgcctaaaaatctcttattcgccaatgcactacagcgcagtttttttg

SEQ ID NO: 69012 - DNA, 3508 bp, Zea Mays
cgacccgttttgggcccgtgggtttcattcacggtctcgcttgccccccgcgcgctccacgtgctcccacggtcgcgaccgctcctagcgcggcgcgcagcccaacgccaacgacgacgcacctaaaaataataaggactcaaaattccatccaaatccatccgcctcaccgcctgaggcctgagctcaatcgcacccaacccaatacatcccgtcgatccgcgtaggctttgctcctgatttgatagattctcagacctcgcgtcgtcggccgatctgccgcgccgtgttcctgccgccgtgtcctggccatgacggcggtggagctcaggatcgggccgctagagtgggcgatggatgacgagagcccaggtgtgggcgacgaggatggcaaggacgaggactgggctctcgatatggagaggaagggaaggggaaagcggaagaggtccgctcctcggagacgctcgggacccaagcggcgccgcgccgctgcggcgatggcgcccgcgcccgcgcgatcacagtcagagccgtgcccggggacagccgagccttcgccagaacatggcttcaatgctgctgctgcggcggcgggagttaaggaggaaaacggggtgaggaaggaggaaggggagaacgtggctccgagcaccagtggcagaggaggaggcggcgggaggaagccgggggctaggaggtcgtgccaccagtgcaagagggtcaagcgtctgaaggagatggtcaggtgccagtgctgtgacgagaggatctactgcgacctctgcatcaggaacaggtacgcgatgatgtcaccggatgctgttagagagcagtgccccttctgccgtggactctgcaattgtacgcgatgccttaacaaggatagggataagcagcttggacccgagaacttggttttgaggaaatgcaatagcaatgaatcatctaaaagggaaaagaggcccacttctgcaggtgtgatatcaccccaggctcatagtgcagcaccatgtactaaagaaattggactctcctttgtgactacaaataggatgaataatgtgtctgccatgtgggccaaagtggatacatcagatgtgagggctgaggaggttgaccctgaaacaaaacgcaaatacgcaagctacctattgcactacctgttgccttgtttgacacaactcaacaaggaccagatggaagaaagagaagcagaagccaaaattcgaggattgcaattgtcggaattgattgttgagaaagctgtctcctggaatgatgagagggtgttctgtaacaattgcaaaacgtcaatatttgatctgcatagaagctgctcaaactgctcgtacgagttgtgcatcagttgttgtaaggagctccgtggaaattttcttaagatcaattgtcaaaagggactggtacctgagcataagagtagaggaattgactatatgcatggtggtgattgtaagccacctaatctagaaaatgacagagaaacaggtttgtctagttaccaatctaagtctatcaagtgggaagctgatcctggtgggaccatttattgccctccatctgaactagatgggtgtggtaaccatgttcttgagttgaaacaaatttttgaaacagataggttaattaagcttgaaatggaagcattgcggctgagcaaccagatagaaccttctgatatttccagtatagatatatgtgaatgctcatgttcagctaataatgtaagttcaaggaaagctgccaccagagagaactccacagataacaacatatactgtccaatatcagataatggtgggccagatgatctcaagcacttccaaaagcactgggtgaaaggagagcctgtaatagtgcaaggggtgctcagtgaaatgtctgatttgagatgggagcctgaaaaaatgtgggctgaagtacatgacgccaatactagttctgagatgaaaagtgtgaaaaccactgattgtatgtcttgttgtgaggttgagataagtgccaaggactttttcaatgggtattatcatggtcggatgtatcataatctttggcctgaaatgcttaaattgaaggattggcctacttcagaccattttgagaatattttgccttcccatggaaagacgtacatcaattctttgccttttcaaccatacacaaatttgaaatctggtttactaaatgtctctgcattgcttcctggtgacgtcttaaagcttgacatgggcccaaaatcatatatagcttatggctatgcagaggaactcattagaggagattctgttacaaagcttcattgtgatttgtctgatgcagttaatgttttaatgcatactgccaaagttgtgccttctgaagaacaaaaagaggggataagagatttgaaaataaggcatgcagaacaagataaaaaggaatgcttggggaattcatcaatagatggaaataaaacaagcatggagcatgctcatatatcatcagtttcctgcgaggatggtggaggtgcactatgggatatttttaggagggaggatgttggaaagctgaaagagtacctcacaaaacattccaaagaatttcgccatatgtactgttgtccagttgaaaagatatttaaccctgtacatgatgaaacattttatctgaccaacaaacacaagagaaagctcaaggaggagtatggaatcgagccatggacctttgtgcaaagacttggagatgcggttttcatacctgctgggtgtcctcatcaagtacggaatctaaagtcttgcaccaagatagctctggattttgtatcaccagagaacattcagcaatgtctcagcttaaccgaggatttccggagacttccagtgggccacagggcaaaagaagataaactagaggtgaagaagatgatcgtctatgccgttgagcatgctttggcgattctgaaagagccttgcacaccccgcgagtccgcctgaacaagctggcatcatatctgggtttctgctagtcaacgagggaaactagagaacatgatgcgatgttgtgcgacagtagacgtggggtagcgctagttgctttgcttgtcggcacaaataataatcttggaaatattactaataagggctcggttaggaagggattggaggagattaaattttttttttttattttaactgaatagaaagagatttgatgagatccctatacaatcgaaaaaggcctaaaatggtagattttgctgatggtgtgcatcactgaagagctgggcatgctgaaaaaaatagatgtcatactgtaaatctacaaaatgtggcttcgtttccaaaaggccttgcccctgttatctataactgtctacagtctatacgagtaacatatgctttcggcgttattattaccgaataccgtagaaactgcatcgtaatgcgaacaagaagaaatttgcctaaaaatctcttattcgccaatgcactacagcgcagtttttttg

SEQ ID NO: 69013 - DNA, 2782 bp, Zea Mays
atccgcctcaccgcctgaggcctgagctcaatcgcacccaacccaatacatcccgtcgatccgcgtaggctttgctcctgatttgatagattctcagacctcgcgtcgtcggccgatctgccgcgccgtgttcctgccgccgtgtcctggccatgacggcggtggagctcaggatcgggccgctagagtgggcgatggatgacgagagcccaggtgtgggcgacgaggatggcaaggacgaggactgggctctcgatatggagaggaagggaaggggaaagcggaagaggtccgctcctcggagacgctcgggacccaagcggcgccgcgccgctgcggcgatggcgcccgcgcccgcgcgatcacagtcagagccgtgcccggggacagccgagccttcgccagaacatggcttcaatgctgctgctgcggcggcgggagttaaggaggaaaacggggtgaggaaggaggaaggggagaacgtggctccgagcaccagtggcagaggaggaggcggcgggaggaagccgggggctaggaggtcgtgccaccagtgcaagagggtcaagcgtctgaaggagatggtcaggtgccagtgctgtgacgagaggatctactgcgacctctgcatcaggaacaggtacgcgatgatgtcaccggatgctgttagagagcagtgccccttctgccgtggactctgcaattgtacgcgatgccttaacaaggatagggataagcagcttggacccgagaacttggttttgaggaaatgcaatagcaatgaatcatctaaaagggaaaagaggcccacttctgcaggtgtgatatcaccccaggctcatagtgcagcaccatgtactaaagaaattggactctcctttgtgactacaaataggatgaataatgtgtctgccatgtgggccaaagtggatacatcagatgtgagggctgaggaggttgaccctgaaacaaaacgcaaatacgcaagctacctattgcactacctgttgccttgtttgacacaactcaacaaggaccagatggaagaaagagaagcagaagccaaaattcgaggattgcaattgtcggaattgattgttgagaaagctgtctcctggaatgatgagagggtgttctgtaacaattgcaaaacgtcaatatttgatctgcatagaagctgctcaaactgctcgtacgagttgtgcatcagttgttgtaaggagctccgtggaaattttcttaagatcaattgtcaaaagggactggtacctgagcataagagtagaggaattgactatatgcatggtggtgattgtaagccacctaatctagaaaatgacagagaaacaggtttgtctagttaccaatctaagtctatcaagtgggaagctgatcctggtgggaccatttattgccctccatctgaactagatgggtgtggtaaccatgttcttgagttgaaacaaatttttgaaacagataggttaattaagcttgaaatggaagcattgcggctgagcaaccagatagaaccttctgatatttccagtatagatatatgtgaatgctcatgttcagctaataatgtaagttcaaggaaagctgccaccagagagaactccacagataacaacatatactgtccaatatcagataatggtgggccagatgatctcaagcacttccaaaagcactgggtgaaaggagagcctgtaatagtgcaaggggtgctcagtgaaatgtctgatttgagatgggagcctgaaaaaatgtgggctgaagtacatgacgccaatactagttctgagatgaaaagtgtgaaaaccactgattgtatgtcttgttgtgaggttgagataagtgccaaggactttttcaatgggtattatcatggtcggatgtatcataatctttggcctgaaatgcttaaattgaaggattggcctacttcagaccattttgagaatattttgccttcccatggaaagacgtacatcaattctttgccttttcaaccatacacaaatttgaaatctggtttactaaatgtctctgcattgcttcctggtgacgtcttaaagcttgacatgggcccaaaatcatatatagcttatggctatgcagaggaactcattagaggagattctgttacaaagcttcattgtgatttgtctgatgcagttaatgttttaatgcatactgccaaagttgtgccttctgaagaacaaaaagaggggataagagatttgaaaataaggcatgcagaacaagataaaaaggaatgcttggggaattcatcaatagatggaaataaaacaagcatggagcatgctcatatatcatcagtttcctgcgaggatggtggaggtgcactatgggatatttttaggagggaggatgttggaaagctgaaagagtacctcacaaaacattccaaagaatttcgccatatgtactgttgtccagttgaaaagatatttaaccctgtacatgatgaaacattttatctgaccaacaaacacaagagaaagctcaaggaggagtatggaatcgagccatggacctttgtgcaaagacttggagatgcggttttcatacctgctgggtgtcctcatcaagtacggaatctaaagtcttgcaccaagatagctctggattttgtatcaccagagaacattcagcaatgtctcagcttaaccgaggatttccggagacttccagtgggccacagggcaaaagaagataaactagaggtatatttatccaatgaaggaacgatcag

SEQ ID NO: 69014 - DNA, 3148 bp, Zea Mays
cgctccacgtgctcccacggtcgcgaccgctcctagcgcggcgcgcagcccaacgccaacgacgacgcacctaaaaataataaggactcaaaattccatccaaatccatccgcctcaccgcctgaggcctgagctcaatcgcacccaacccaatacatcccgtcgatccgcgtaggctttgctcctgatttgatagattctcagacctcgcgtcgtcggccgatctgccgcgccgtgttcctgccgccgtgtcctggccatgacggcggtggagctcaggatcgggccgctagagtgggcgatggatgacgagagcccaggtgtgggcgacgaggatggcaaggacgaggactgggctctcgatatggagaggaagggaaggggaaagcggaagaggtccgctcctcggagacgctcgggacccaagcggcgccgcgccgctgcggcgatggcgcccgcgcccgcgcgatcacagtcagagccgtgcccggggacagccgagccttcgccagaacatggcttcaatgctgctgctgcggcggcgggagttaaggaggaaaacggggtgaggaaggaggaaggggagaacgtggctccgagcaccagtggcagaggaggaggcggcgggaggaagccgggggctaggaggtcgtgccaccagtgcaagagggtcaagcgtctgaaggagatggtcaggtgccagtgctgtgacgagaggatctactgcgacctctgcatcaggaacaggtacgcgatgatgtcaccggatgctgttagagagcagtgccccttctgccgtggactctgcaattgtacgcgatgccttaacaaggatagggataagcagcttggacccgagaacttggttttgaggaaatgcaatagcaatgaatcatctaaaagggaaaagaggcccacttctgcaggtgtgatatcaccccaggctcatagtgcagcaccatgtactaaagaaattggactctcctttgtgactacaaataggatgaataatgtgtctgccatgtgggccaaagtggatacatcagatgtgagggctgaggaggttgaccctgaaacaaaacgcaaatacgcaagctacctattgcactacctgttgccttgtttgacacaactcaacaaggaccagatggaagaaagagaagcagaagccaaaattcgaggattgcaattgtcggaattgattgttgagaaagctgtctcctggaatgatgagagggtgttctgtaacaattgcaaaacgtcaatatttgatctgcatagaagctgctcaaactgctcgtacgagttgtgcatcagttgttgtaaggagctccgtggaaattttcttaagatcaattgtcaaaagggactggtacctgagcataagagtagaggaattgactatatgcatggtggtgattgtaagccacctaatctagaaaatgacagagaaacaggtttgtctagttaccaatctaagtctatcaagtgggaagctgatcctggtgggaccatttattgccctccatctgaactagatgggtgtggtaaccatgttcttgagttgaaacaaatttttgaaacagataggttaattaagcttgaaatggaagcattgcggctgagcaaccagatagaaccttctgatatttccagtatagatatatgtgaatgctcatgttcagctaataatgtaagttcaaggaaagctgccaccagagagaactccacagataacaacatatactgtccaatatcagataatggtgggccagatgatctcaagcacttccaaaagcactgggtgaaaggagagcctgtaatagtgcaaggggtgctcagtgaaatgtctgatttgagatgggagcctgaaaaaatgtgggctgaagtacatgacgccaatactagttctgagatgaaaagtgtgaaaaccactgattgtatgtcttgttgtgaggttgagataagtgccaaggactttttcaatgggtattatcatggtcggatgtatcataatctttggcctgaaatgcttaaattgaaggattggcctacttcagaccattttgagaatattttgccttcccatggaaagacgtacatcaattctttgccttttcaaccatacacaaatttgaaatctggtttactaaatgtctctgcattgcttcctggtgacgtcttaaagcttgacatgggcccaaaatcatatatagcttatggctatgcagaggaactcattagaggagattctgttacaaagcttcattgtgatttgtctgatgcagttaatgttttaatgcatactgccaaagttgtgccttctgaagaacaaaaagaggggataagagatttgaaaataaggcatgcagaacaagataaaaaggaatgcttggggaattcatcaatagatggaaataaaacaagcatggagcatgctcatatatcatcagtttcctgcgaggatggtggaggtgcactatgggatatttttaggagggaggatgttggaaagctgaaagagtacctcacaaaacattccaaagaatttcgccatatgtactgttgtccagttgaaaagatatttaaccctgtacatgatgaaacattttatctgaccaacaaacacaagagaaagctcaaggaggagtatggaatcgagccatggacctttgtgcaaagacttggagatgcggttttcatacctgctgggtgtcctcatcaagtacggaatctaaagtcttgcaccaagatagctctggattttgtatcaccagagaacattcagcaatgtctcagcttaaccgaggatttccggagacttccagtgggccacagggcaaaagaagataaactagaggaccttcgcataggggaagtgattgggactggccgtcgccgtagagccgctcctcgcctctacatcttggactctttgcggcttccttccttggctacatctccagcgcatgtgctttcagctaccctttcttctgttgcgtcttttgcccagtggcatcatcgtctaggtcatttgtgtggctctagattgtctactttaataaagtcaggttgcttaggtcatacttcggttgagtctaattttcattgtaagggttgtcatcttggaaaacaaatacaacttcca

SEQ ID NO: 69015 - DNA, 2810 bp, Zea Mays
atccgcctcaccgcctgaggcctgagctcaatcgcacccaacccaatacatcccgtcgatccgcgtaggctttgctcctgatttgatagattctcagacctcgcgtcgtcggccgatctgccgcgccgtgttcctgccgccgtgtcctggccatgacggcggtggagctcaggatcgggccgctagagtgggcgatggatgacgagagcccaggtgtgggcgacgaggatggcaaggacgaggactgggctctcgatatggagaggaagggaaggggaaagcggaagaggtccgctcctcggagacgctcgggacccaagcggcgccgcgccgctgcggcgatggcgcccgcgcccgcgcgatcacagtcagagccgtgcccggggacagccgagccttcgccagaacatggcttcaatgctgctgctgcggcggcgggagttaaggaggaaaacggggtgaggaaggaggaaggggagaacgtggctccgagcaccagtggcagaggaggaggcggcgggaggaagccgggggctaggaggtcgtgccaccagtgcaagagggtcaagcgtctgaaggagatggtcaggtgccagtgctgtgacgagaggatctactgcgacctctgcatcaggaacaggtacgcgatgatgtcaccggatgctgttagagagcagtgccccttctgccgtggactctgcaattgtacgcgatgccttaacaaggatagggataagcagcttggacccgagaacttggttttgaggaaatgcaatagcaatgaatcatctaaaagggaaaagaggcccacttctgcaggtgtgatatcaccccaggctcatagtgcagcaccatgtactaaagaaattggactctcctttgtgactacaaataggatgaataatgtgtctgccatgtgggccaaagtggatacatcagatgtgagggctgaggaggttgaccctgaaacaaaacgcaaatacgcaagctacctattgcactacctgttgccttgtttgacacaactcaacaaggaccagatggaagaaagagaagcagaagccaaaattcgaggattgcaattgtcggaattgattgttgagaaagctgtctcctggaatgatgagagggtgttctgtaacaattgcaaaacgtcaatatttgatctgcatagaagctgctcaaactgctcgtacgagttgtgcatcagttgttgtaaggagctccgtggaaattttcttaagatcaattgtcaaaagggactggtacctgagcataagagtagaggaattgactatatgcatggtggtgattgtaagccacctaatctagaaaatgacagagaaacaggtttgtctagttaccaatctaagtctatcaagtgggaagctgatcctggtgggaccatttattgccctccatctgaactagatgggtgtggtaaccatgttcttgagttgaaacaaatttttgaaacagataggttaattaagcttgaaatggaagcattgcggctgagcaaccagatagaaccttctgatatttccagtatagatatatgtgaatgctcatgttcagctaataatgtaagttcaaggaaagctgccaccagagagaactccacagataacaacatatactgtccaatatcagataatggtgggccagatgatctcaagcacttccaaaagcactgggtgaaaggagagcctgtaatagtgcaaggggtgctcagtgaaatgtctgatttgagatgggagcctgaaaaaatgtgggctgaagtacatgacgccaatactagttctgagatgaaaagtgtgaaaaccactgattgtatgtcttgttgtgaggttgagataagtgccaaggactttttcaatgggtattatcatggtcggatgtatcataatctttggcctgaaatgcttaaattgaaggattggcctacttcagaccattttgagaatattttgccttcccatggaaagacgtacatcaattctttgccttttcaaccatacacaaatttgaaatctggtttactaaatgtctctgcattgcttcctggtgacgtcttaaagcttgacatgggcccaaaatcatatatagcttatggctatgcagaggaactcattagaggagattctgttacaaagcttcattgtgatttgtctgatgcagttaatgttttaatgcatactgccaaagttgtgccttctgaagaacaaaaagaggggataagagatttgaaaataaggcatgcagaacaagataaaaaggaatgcttggggaattcatcaatagatggaaataaaacaagcatggagcatgctcatatatcatcagtttcctgcgaggatggtggaggtgcactatgggatatttttaggagggaggatgttggaaagctgaaagagtacctcacaaaacattccaaagaatttcgccatatgtactgttgtccagttgaaaagatatttaaccctgtacatgatgaaacattttatctgaccaacaaacacaagagaaagctcaaggaggagtatggaatcgagccatggacctttgtgcaaagacttggagatgcggttttcatacctgctgggtgtcctcatcaagtacggaatctaaagtcttgcaccaagatagctctggattttgtatcaccagagaacattcagcaatgtctcagcttaaccgaggatttccggagacttccagtgggccacagggcaaaagaagataaactagagggatatcatcttcgtgatcgtagtacaattgaacctccagatcgctatggatttcct

SEQ ID NO: 69016 - DNA, 3117 bp, Zea Mays
atccgcctcaccgcctgaggcctgagctcaatcgcacccaacccaatacatcccgtcgatccgcgtaggctttgctcctgatttgatagattctcagacctcgcgtcgtcggccgatctgccgcgccgtgttcctgccgccgtgtcctggccatgacggcggtggagctcaggatcgggccgctagagtgggcgatggatgacgagagcccaggtgtgggcgacgaggatggcaaggacgaggactgggctctcgatatggagaggaagggaaggggaaagcggaagaggtccgctcctcggagacgctcgggacccaagcggcgccgcgccgctgcggcgatggcgcccgcgcccgcgcgatcacagtcagagccgtgcccggggacagccgagccttcgccagaacatggcttcaatgctgctgctgcggcggcgggagttaaggaggaaaacggggtgaggaaggaggaaggggagaacgtggctccgagcaccagtggcagaggaggaggcggcgggaggaagccgggggctaggaggtcgtgccaccagtgcaagagggtcaagcgtctgaaggagatggtcaggtgccagtgctgtgacgagaggatctactgcgacctctgcatcaggaacaggtacgcgatgatgtcaccggatgctgttagagagcagtgccccttctgccgtggactctgcaattgtacgcgatgccttaacaaggatagggataagcagcttggacccgagaacttggttttgaggaaatgcaatagcaatgaatcatctaaaagggaaaagaggcccacttctgcaggtgtgatatcaccccaggctcatagtgcagcaccatgtactaaagaaattggactctcctttgtgactacaaataggatgaataatgtgtctgccatgtgggccaaagtggatacatcagatgtgagggctgaggaggttgaccctgaaacaaaacgcaaatacgcaagctacctattgcactacctgttgccttgtttgacacaactcaacaaggaccagatggaagaaagagaagcagaagccaaaattcgaggattgcaattgtcggaattgattgttgagaaagctgtctcctggaatgatgagagggtgttctgtaacaattgcaaaacgtcaatatttgatctgcatagaagctgctcaaactgctcgtacgagttgtgcatcagttgttgtaaggagctccgtggaaattttcttaagatcaattgtcaaaagggactggtacctgagcataagagtagaggaattgactatatgcatggtggtgattgtaagccacctaatctagaaaatgacagagaaacaggtttgtctagttaccaatctaagtctatcaagtgggaagctgatcctggtgggaccatttattgccctccatctgaactagatgggtgtggtaaccatgttcttgagttgaaacaaatttttgaaacagataggttaattaagcttgaaatggaagcattgcggctgagcaaccagatagaaccttctgatatttccagtatagatatatgtgaatgctcatgttcagctaataatgtaagttcaaggaaagctgccaccagagagaactccacagataacaacatatactgtccaatatcagataatggtgggccagatgatctcaagcacttccaaaagcactgggtgaaaggagagcctgtaatagtgcaaggggtgctcagtgaaatgtctgatttgagatgggagcctgaaaaaatgtgggctgaagtacatgacgccaatactagttctgagatgaaaagtgtgaaaaccactgattgtatgtcttgttgtgaggttgagataagtgccaaggactttttcaatgggtattatcatggtcggatgtatcataatctttggcctgaaatgcttaaattgaaggattggcctacttcagaccattttgagaatattttgccttcccatggaaagacgtacatcaattctttgccttttcaaccatacacaaatttgaaatctggtttactaaatgtctctgcattgcttcctggtgacgtcttaaagcttgacatgggcccaaaatcatatatagcttatggctatgcagaggaactcattagaggagattctgttacaaagcttcattgtgatttgtctgatgcagttaatgttttaatgcatactgccaaagttgtgccttctgaagaacaaaaagaggggataagagatttgaaaataaggcatgcagaacaagataaaaaggaatgcttggggaattcatcaatagatggaaataaaacaagcatggagcatgctcatatatcatcagtttcctgcgaggatggtggaggtgcactatgggatatttttaggagggaggatgttggaaagctgaaagagtacctcacaaaacattccaaagaatttcgccatatgtactgttgtccagttgaaaagatatttaaccctgtacatgatgaaacattttatctgaccaacaaacacaagagaaagctcaaggaggagtatggaatcgagccatggacctttgtgcaaagacttggagatgcggttttcatacctgctgggtgtcctcatcaagtacggaatctaaagtcttgcaccaagatagctctggattttgtatcaccagagaacattcagcaatgtctcagcttaaccgaggatttccggagacttccagtgggccacagggcaaaagaagataaactagaggttgatctcagactcggtttggacttatcctaactgcttctatccgagtctccagtgccttgatcggcggtgcaacaaccacaatggttgcggccctctttcacgcccgtgcgacattaaaaggctagggggtgccggctcgggaaccatcgttccccggtataccccacgccaatatacacttatccgatctagatttgcgcatgggaagtgaagggaaggtcgtgcgaggtttaccatctgtatgtgaacccgtcactctcatctcgccgttgcggtgaagaacaaccgaccctaatggcgagctcgacaaatcccgaagattaatgatgggtcacagtttgctgatgcattaccaaatcac

SEQ ID NO: 69017 - DNA, 3359 bp, Zea Mays
atccgcctcaccgcctgaggcctgagctcaatcgcacccaacccaatacatcccgtcgatccgcgtaggctttgctcctgatttgatagattctcagacctcgcgtcgtcggccgatctgccgcgccgtgttcctgccgccgtgtcctggccatgacggcggtggagctcaggatcgggccgctagagtgggcgatggatgacgagagcccaggtgtgggcgacgaggatggcaaggacgaggactgggctctcgatatggagaggaagggaaggggaaagcggaagaggtccgctcctcggagacgctcgggacccaagcggcgccgcgccgctgcggcgatggcgcccgcgcccgcgcgatcacagtcagagccgtgcccggggacagccgagccttcgccagaacatggcttcaatgctgctgctgcggcggcgggagttaaggaggaaaacggggtgaggaaggaggaaggggagaacgtggctccgagcaccagtggcagaggaggaggcggcgggaggaagccgggggctaggaggtcgtgccaccagtgcaagagggtcaagcgtctgaaggagatggtcaggtgccagtgctgtgacgagaggatctactgcgacctctgcatcaggaacaggtacgcgatgatgtcaccggatgctgttagagagcagtgccccttctgccgtggactctgcaattgtacgcgatgccttaacaaggatagggataagcagcttggacccgagaacttggttttgaggaaatgcaatagcaatgaatcatctaaaagggaaaagaggcccacttctgcaggtgtgatatcaccccaggctcatagtgcagcaccatgtactaaagaaattggactctcctttgtgactacaaataggatgaataatgtgtctgccatgtgggccaaagtggatacatcagatgtgagggctgaggaggttgaccctgaaacaaaacgcaaatacgcaagctacctattgcactacctgttgccttgtttgacacaactcaacaaggaccagatggaagaaagagaagcagaagccaaaattcgaggattgcaattgtcggaattgattgttgagaaagctgtctcctggaatgatgagagggtgttctgtaacaattgcaaaacgtcaatatttgatctgcatagaagctgctcaaactgctcgtacgagttgtgcatcagttgttgtaaggagctccgtggaaattttcttaagatcaattgtcaaaagggactggtacctgagcataagagtagaggaattgactatatgcatggtggtgattgtaagccacctaatctagaaaatgacagagaaacaggtttgtctagttaccaatctaagtctatcaagtgggaagctgatcctggtgggaccatttattgccctccatctgaactagatgggtgtggtaaccatgttcttgagttgaaacaaatttttgaaacagataggttaattaagcttgaaatggaagcattgcggctgagcaaccagatagaaccttctgatatttccagtatagatatatgtgaatgctcatgttcagctaataatgtaagttcaaggaaagctgccaccagagagaactccacagataacaacatatactgtccaatatcagataatggtgggccagatgatctcaagcacttccaaaagcactgggtgaaaggagagcctgtaatagtgcaaggggtgctcagtgaaatgtctgatttgagatgggagcctgaaaaaatgtgggctgaagtacatgacgccaatactagttctgagatgaaaagtgtgaaaaccactgattgtatgtcttgttgtgaggttgagataagtgccaaggactttttcaatgggtattatcatggtcggatgtatcataatctttggcctgaaatgcttaaattgaaggattggcctacttcagaccattttgagaatattttgccttcccatggaaagacgtacatcaattctttgccttttcaaccatacacaaatttgaaatctggtttactaaatgtctctgcattgcttcctggtgacgtcttaaagcttgacatgggcccaaaatcatatatagcttatggctatgcagaggaactcattagaggagattctgttacaaagcttcattgtgatttgtctgatgcagttaatgttttaatgcatactgccaaagttgtgccttctgaagaacaaaaagaggggataagagatttgaaaataaggcatgcagaacaagataaaaaggaatgcttggggaattcatcaatagatggaaataaaacaagcatggagcatgctcatatatcatcagtttcctgcgaggatggtggaggtgcactatgggatatttttaggagggaggatgttggaaagctgaaagagtacctcacaaaacattccaaagaatttcgccatatgtactgttgtccagttgaaaagatatttaaccctgtacatgatgaaacattttatctgaccaacaaacacaagagaaagctcaaggaggagtatggaatcgagccatggacctttgtgcaaagacttggagatgcggttttcatacctgctgggtgtcctcatcaagtacggaatctaaagtcttgcaccaagatagctctggattttgtatcaccagagaacattcagcaatgtctcagcttaaccgaggatttccggagacttccagtgggccacagggcaaaagaagataaactagaggtacagacctttaatgcacatccatcttgaacttgtcctcttatcagctcgttggtatcagcgacagaccatctacacagggataagctcacatggttggtcaccgttgcttcagcatttcaaaaagtgcaatgtatacaaaaacataaggacctaaagtcctaaatacaatcacaacatagcatgcatgccatgcatttaaatatttaattaataacacaaatgcatcatttctgtgttaggttgatctcagactcggtttggacttatcctaactgcttctatccgagtctccagtgccttgatcggcggtgcaacaaccacaatggttgcggccctctttcacgcccgtgcgacattaaaaggctagggggtgccggctcgggaaccatcgttccccggtataccccacgccaatatacacttatccgatctagatttgcgcatgggaagtgaagggaaggtcgtgcgaggtttaccatctgtatgtgaacccgtcactctcatctcgccgttgcggtgaagaacaaccgaccctaatggcgagctcgacaaatcccgaagattaatgatgggtcacagtttgctgatgcattaccaaatcac

SEQ ID NO: 69018 - DNA, 2804 bp, Zea Mays
tccaaatccatccgcctcaccgcctgaggcctgagctcaatcgcacccaacccaatacatcccgtcgatccgcgtaggctttgctcctgatttgatagattctcagacctcgcgtcgtcggccgatctgccgcgccgtgttcctgccgccgtgtcctggccatgacggcggtggagctcaggatcgggccgctagagtgggcgatggatgacgagagcccaggtgtgggcgacgaggatggcaaggacgaggactgggctctcgatatggagaggaagggaaggggaaagcggaagaggtccgctcctcggagacgctcgggacccaagcggcgccgcgccgctgcggcgatggcgcccgcgcccgcgcgatcacagtcagagccgtgcccggggacagccgagccttcgccagaacatggcttcaatgctgctgctgcggcggcgggagttaaggaggaaaacggggtgaggaaggaggaaggggagaacgtggctccgagcaccagtggcagaggaggaggcggcgggaggaagccgggggctaggaggtcgtgccaccagtgcaagagggtcaagcgtctgaaggagatggtcaggtgccagtgctgtgacgagaggatctactgcgacctctgcatcaggaacaggtacgcgatgatgtcaccggatgctgttagagagcagtgccccttctgccgtggactctgcaattgtacgcgatgccttaacaaggatagggataagcagcttggacccgagaacttggttttgaggaaatgcaatagcaatgaatcatctaaaagggaaaagaggcccacttctgcaggtgtgatatcaccccaggctcatagtgcagcaccatgtactaaagaaattggactctcctttgtgactacaaataggatgaataatgtgtctgccatgtgggccaaagtggatacatcagatgtgagggctgaggaggttgaccctgaaacaaaacgcaaatacgcaagctacctattgcactacctgttgccttgtttgacacaactcaacaaggaccagatggaagaaagagaagcagaagccaaaattcgaggattgcaattgtcggaattgattgttgagaaagctgtctcctggaatgatgagagggtgttctgtaacaattgcaaaacgtcaatatttgatctgcatagaagctgctcaaactgctcgtacgagttgtgcatcagttgttgtaaggagctccgtggaaattttcttaagatcaattgtcaaaagggactggtacctgagcataagagtagaggaattgactatatgcatggtggtgattgtaagccacctaatctagaaaatgacagagaaacaggtttgtctagttaccaatctaagtctatcaagtgggaagctgatcctggtgggaccatttattgccctccatctgaactagatgggtgtggtaaccatgttcttgagttgaaacaaatttttgaaacagataggttaattaagcttgaaatggaagcattgcggctgagcaaccagatagaaccttctgatatttccagtatagatatatgtgaatgctcatgttcagctaataatgtaagttcaaggaaagctgccaccagagagaactccacagataacaacatatactgtccaatatcagataatggtgggccagatgatctcaagcacttccaaaagcactgggtgaaaggagagcctgtaatagtgcaaggggtgctcagtgaaatgtctgatttgagatgggagcctgaaaaaatgtgggctgaagtacatgacgccaatactagttctgagatgaaaagtgtgaaaaccactgattgtatgtcttgttgtgaggttgagataagtgccaaggactttttcaatgggtattatcatggtcggatgtatcataatctttggcctgaaatgcttaaattgaaggattggcctacttcagaccattttgagaatattttgccttcccatggaaagacgtacatcaattctttgccttttcaaccatacacaaatttgaaatctggtttactaaatgtctctgcattgcttcctggtgacgtcttaaagcttgacatgggcccaaaatcatatatagcttatggctatgcagaggaactcattagaggagattctgttacaaagcttcattgtgatttgtctgatgcagttaatgttttaatgcatactgccaaagttgtgccttctgaagaacaaaaagaggggataagagatttgaaaataaggcatgcagaacaagataaaaaggaatgcttggggaattcatcaatagatggaaataaaacaagcatggagcatgctcatatatcatcagtttcctgcgaggatggtggaggtgcactatgggatatttttaggagggaggatgttggaaagctgaaagagtacctcacaaaacattccaaagaatttcgccatatgtactgttgtccagttgaaaagatatttaaccctgtacatgatgaaacattttatctgaccaacaaacacaagagaaagctcaaggaggagtatggaatcgagccatggacctttgtgcaaagacttggagatgcggttttcatacctgctgggtgtcctcatcaagtacggaatctaaagtcttgcaccaagatagctctggattttgtatcaccagagaacattcagcaatgtctcagcttaaccgaggatttccggagacttccagtgggccacagggcaaaagaagataaactagagattaatgatgggtcacagtttgctgatgcattaccaaatcac

SEQ ID NO: 69019 - DNA, 4091 bp, Zea Mays
ccgccaccaacaagccgaaactgtcaatcgatcgcccactcacccatcacttcatcaggcaaggcaccagcgtagcccgtcgtcgatcggcagctcgcctgcccaaccacccgccgcagccactgttcgaactgagaacccaaccagccggcggggcgacacgccaagtccgcacccctgccggagcacgcgtacatgtcgcggggcgggcaggagagggtgcgccgatcatttctcgcacacctggaaagcggagagcgcgagagagccccccgcaggcagatcgccagtggctgaccgcccgcagagcgcagacgccccccccccccccacatccggcatccgtcctagagacgcaacgcaacaataaaagaggacaggacagagaggaaaccccgaacaccgagagcccctcccgtcccgtcccaacccaagcaccgcgtcgaacaaagcatcgacatacagacagccagactgcgagggaaaccgggtcccccaaaaccaaatactctgtgtgcgtacgcgcggcagtgagcgacgaggcgcggtgcgcgcgcactggccatgagccggggccgcgcacgccggccggttccaggcagcggcacccgcgccggcgcgctcgaggtcctcctcctcctggcgtccgccgtgctgctggcagcgtgccccgccgcggccgtggaggcagaggcaggggacgaggaggcggtggactacggcgctgcgctgtccaagagcctgctctacttcgaggcgcagcggtcggggcggctgccgcacaaccagcgcgtgccgtggcggggccactcgggcctcaccgacgggctgcagcagggcgtggacctggtcggcggctactacgacgccggggaccacgtcaagttcggcctgcccatggccttcaccgtcaccatgctctcctggggcgccatcgacttcgccgacgacgtcgcggccgccggcgagtggggccacgcgctcgaggccatcaagtggggcaccgactacttcgtcaaggcgcacaccgagccattcgtctactgggcagaggtgggcgacggcgacacggaccactactgctggcagcggccggaggacatgacgacgtcgcggcaggcgtaccgcatcgacaaggacagcccgggctccgacctggccggcgagaccgccgccgcgctcgccgcggcctccatcgtcttccgccgctccaacccgcattactcccacctcctcctgcaccacgcccagcagctgttcgagttcggagaccggtaccgcggcacgtacgacagcagcatcgaggaggtgcgcagctactacgcgtccgtgagcggctaccgggacgagctgctgtgggcggcgctgtggctgcaccgcgccacgggccgcgacgagtacctccgctacgccgtcgacaaggccgactccttcggcggcgtcggctgggccatgaccgagttcagctgggacgtcaagtacgccggcgtccaggtcctcgcagccaagctgctgctggagggcgacccgggagcccaggagcacggcgcggtgctggagaagtacaaggcgaaggcggagcactacctgtgcgcgtgcctgggccggaacggcggcaacggcagcgacgacgtggagcggagccccggcgggatgctgtacgtgcgccagtggaacaacctccagtacgtctccagcgccgccttcctcctcaccgcctactcgcgctacctcggcggcggcctcctccgctgccccgcgggcgcccccgccgcgccgtccgacctgctggccctggcgcgctcgcaggccgactacatcctgggccgcaacccgctgcggctcagctacatggtcggctacggccgccggtacccggtccgcgtgcaccaccgcggcgcctccatcgtcgcgcacaaggccaacagccgcttcatcggctgcatgcagggcttcgacgactggttcggccgcggccgccccaaccccaacgtgctcgccggcgccatcgtcggcgggcccaactccagggacgagttccgggacgagcgcgagaactacatgcagaccgaggcctgcacatacaacaccgcgccaatggtcgccgtcttcgccaggctgcaccgcctggcgcgcgacggcggccctgccggaggtgtgccggagaggaacgacgcccgatgagctaggcggactgtagataaaaaatggtggcggcggtggtatggaaaggcgggccagggtaattcttttttttctttctcataagcttataatttactactagctgcttccatataattatttttttgaagtgttaatatgagagaaagataaaggaaaagagagttttggttagtgaaagaaaggacaggaatcatagtggagcaataaggacgagaaaagggccggtgtgcagtgtatgtgtttaaatctaggtgtctcagaactgaaaagaactgtaatatttatttactgggagaaacagcaaatacatagtcacagacaaattacatgctctatctatcttcggagtaatgtttgctgtaatgtgttctctttacatgcatacaactataagttctcttaggctgtgtgtgaagaaaaggcaagccgatcgagccttcaaataattatatctgaatcaataggacctctcatttctgaagcaatgatttgctatttttttgtcagatggcatgctttggttgtcaacatttggccacgctaacacctggcctgctgccctgctgaatttgcaaagggaacaatatgttcaaaatagtgcaaataagttcacggtcgccgctatccgcctcccctcgccgccgccctcttctctctcacgccagatgcagggcgtcactgtgcagtccccctccacttcttcgcgcggaagaatccgcccgcggcaccgaccggaagcttcgcggtcgtcttctctcctgttcgaggcgcctgcgtttcggcgattcgcgacgaggcgacggcgattcgggcgcgctagcgtgccggtccccgtcggagctgtggacgacgaagtggaggtggtcagcaaggtgctccggtcaagaccgaagacgaagcgggcgcaaatccggctccgtccagcacagttccgaatggcatcctcgaaagaagataccatgaagtctttggttaaagtacttgtcgactgtgccgaggatgccacaaaatcccttcgtggattagtagatcatgcattagaccacatgcatgacgaagagatattagctagaaccctctttgccatgaaagaaaaacttgatttgcttcaccaagatgccttagaggcaaaagtccaagcttttcctgaaattgctaagtacgagggggatgacataagtgttgatccgacatctccgtcgacccctccaacagttactgaaccatccgtcgacgaagaggagttctactgcccggatgtgagtgacgagtggtacttcagcgactcagatagagcacttagcagccgatgggacaagataagggctgatgtcctaagagagaaacaaagtggtctaagtgatgacgataagacatcgaaggcagccactttgttcgctcatgaggagggcaaaccatttcattatatgcactgctggcatcaactgaagggggaacccaaatgggagagcatatgtcaaggacactcgtttagaggattacatgcaagatcaataccttcgtcggggtgtccatcagtggaaacaccggagactgacagtggatccgctggactgtcaggaaagaggccccgtggccgtgattacagtaaagctgagagaaagaaagctggttcatcttcgtccccggagtacttaagccgattacaagaaattactgagaaacaaatacagaggtccatagaaaaggggaaaaaaaagaaaagaccactgaagaagacagggagatacaaaagaagagattggatttggaagcccaaaagttaagcataagacaaagggaactcaaactataagaactgaaatcggcagaacaacgtttgcagatgctgttgtcgacaaacgaagaagatgtagatcctgaagtttgggttgtgatgaagg

SEQ ID NO: 69020 - DNA, 1980 bp, Zea Mays
cgtgcatgcatgaatgctcgctcctgcatgctactattaaacaaggaagccatgggagagaacaggaagatcacccgcgggtcaaggctggtgacaaacaagctgctgcaccgctgccagcaactgcatggccacggatctgtatctggggtttctgaaaccttggggaagagacccttgaatgggaacaaggatacacttgtgtacagtgtgtttgccagcacctggaatgtcggcggcgttacaccatccgatggcttggacttggaggattggctggacacaagggctaacgcctacgacatctacgtcctagggttccaggagatagtgccactgaacgcgagaaatgtgctgggtcctaggaagagccgcgtgtctgccaagtggaactcgctgatcggggaggcgctcaacagaaggtgtcgagaagaaggcggggcgaacacgaacagcagcgccaaggacgacgaaggctctgtggagggatcacagggcttcagatgcatcaggagcaagcagatggtcggcatcttcacgtcggtgtgggcgagaagcagccttaggccgctcatccgtcacctggatgcgtcgtgcatcggctcgggcatcatgggctgcctagggaacaagggctctgtttcgatccggttcgtgctgcacgacacgagcttctgcttcgtctgctgtcacctggcttcaggcggcaagcaaggggacgtgctgctgaggaacttggacgtcgcggacatacttgcaaggacaaggttccctggccctgcagctcacgagttgccggagaagatccttgatcatgagtaggtgtacattagctcacccttcaaactgcttcaacctcagcctcatatttccatcttctagaatatggattctactataagtgatccctaaactaatgctttagtctgatgtgacatgtttaaatttttactaaatgtgcctgtctcctttgtgaatgaaaaaaaaacgaaggggggtatccgaaatggcatcacgcataaactgcagacatcaccctgtgcaccatgtctctgtggactgtttatccaaacaatatgtgttttctttcccgtttgtgcagccaagtggttttgctcggtgacttgaactacaggatatccctggaggaggccgagacgaggtcgctggtgagagccaagagatggcccgtcttgttggaaaacgatcagctgctgttcgagttctcgagagggcggcattttgagggctggcaggaaggcctgatcaccttctcccccacctacaagtaccagcccaactccgaccagtaccactggtgcttcgacagtgcgggcagcgacaagaagcgtgctccagcatggtgcgatcgcattctgtggcgaggcaaggggctgaagcaagtgcaatacgagacgtgcagctacaggctgtcggaccaccggccggtgagagcggttttccacgccgaatgcgacgcgttatcggaggcggtgtcgcacaagtaaaaacattgccaggctgctaccccgccgcacagagcgcccagcagcaagcaaagcgactgatgtgatgagacgtctattcaaccagagagtgatggatatggacgacggcgcgcgagtgccgccaaatcgagagagaactggacgcaagattggaccaagcgagtagagccaagaagagatttcttctgagacgaacatgaagttgttgttgttttttttttctgtctctctgtctctccctctgaacgccgattgagttgtgtgcagaagaggtgcatggggatagagtaccgggatccaagaagaggtgctggttttttttggcattgttctgttggtggcggtgttcagattcttttttccctcgtttaaaagctagctccttctgggctttgggcttgtgtctgaaagaatatcagagcctaaaaacggcatctgcacattctgttgcttaatagattggagattaccg

SEQ ID NO: 69021 - DNA, 1605 bp, Zea Mays
atgtgggccccacccgcggcgtcgccgacaggggcattcccctcgctccggccgtcgaggacggcggtggtccgcgtcctagtcacgctgcctgccgctgcgcggccgcaggatcagccgcggcggcggctctgtctcgcggtaccacggcccgctccggagatggcctctgcggctgctgaaggggagggggaggaggaggacgtggtggtggtggaaggggacacggggaagaagacggcggtggagatggacgcgacggtgaggcgggagctggcgatccggagactgcgagaggaggccgaggaggaggcgaacgaggcggggacgaggaggaggagcagcagaagggatttcgccgtgttcgagaccgccaggggcgacgcgctcttcacgcaatcgtggactccggccgccgacgatcgcctcaagggcgttgttatactgttgcatggtctaaatgagcatagtggaaggtacagccatttcgcaaaactgttgaatgatcaagggcttaaagtttatgccatggactggattgttgtttgattttcatcttcttgtattttgtctccgaaggacatggtggaagtgatggagttcatggatatgtttcgtcacttgatcatgctgttggtgacttgaaagaatttctggaggatgttgtattggaggaaaaccatggtttgccgtgcttcttatttgggcactccacaggtggagctattgttttgaaggccgcgctggatccttctgtagaacttcatgtagaaggtgtggtcttaacgtcgccagctattcatgttcaaccatctcatccaatcatcaaagttgttgcaccaatattctccatgttagctccaaaataccgtgtcagtgctttgcataagagaggacctcctgtttcccgcgatccagaggctctgaagatgaaatattcagatcccctggtgtatactggaccaattagagtcagaactggcaatgaaatcctccggatatcatcatttctgcaaagaaacttgagcagagttactgtcccttttcttgttctacatggtacagctgacacaataactgatccaagagcatccgagcgattataccaaacatcaatgtcaacaaataaatcaataaaattatatgatgggtatttacatgatctcctctttgaacctgaaagggatgatatcgcaaatgatatcatcaattggttgagcgcaagacttagtgttcttcagagatggtgagctgaatcaagtatgaactacaaggtgcttccccttatgtagttaccggcggttttactggaactgtatacatggcatagagtgcagaatagtgtaaatgtaaactaggatgttatcattatgtcttcacggtcacggtcatttcttgtcttcagctctgctgtataagtttgggaagagcctacatgagatgtaaataatattagagttaagctgaaaataatgtatctcctaatacacaggtagttcagtgtcactttttttttaaaaggacttggttcgcatctttttctgaattgctctcggtcattctctcacatcttttttacttcaccattagagatgaatatttcag

SEQ ID NO: 69022 - DNA, 1812 bp, Zea Mays
tgatgggagatttctttcttatataaccatcatcggggaagcttctattccgagatcccttgccctgtcccttgtcccattccgtgcttccaaagttccatttctccccctcctccggcctagtcggcgcctcgctgacatgtgggccccacccgcggcgtcgccgacaggggcattcccctcgctccggccgtcgaggacggcggtggtccgcgtcctagtcacgctgcctgccgctgcgcggccgcaggatcagccgcggcggcggctctgtctcgcggtaccacggcccgctccggagatggcctctgcggctgctgaaggggagggggaggaggaggacgtggtggtggtggaaggggacacggggaagaagacggcggtggagatggacgcgacggtgaggcgggagctggcgatccggagactgcgagaggaggccgaggaggaggcgaacgaggcggggacgaggaggaggagcagcagaagggatttcgccgtgttcgagaccgccaggggcgacgcgctcttcacgcaatcgtggactccggccgccgacgatcgcctcaagggcgttgttatactgttgcatggtctaaatgagcatagtggaaggtacagccatttcgcaaaactgttgaatgatcaagggcttaaagtttatgccatggactggattggacatggtggaagtgatggagttcatggatatgtttcgtcacttgatcatgctgttggtgacttggtactgtttcgtacatacagaattgtgcacagatataaatttcaagttgcagtttttttttcttgcagtattttctcaatctatttttgaagttccttcctgtgcagaaagaatttctggaggatgttgtattggaggaaaaccatggtttgccgtgcttcttatttgggcactccacaggtggagctattgttttgaaggccgcgctggatccttctgtagaacttcatgtagaaggtgtggtcttaacgtcgccagctattcatgttcaaccatctcatccaatcatcaagttgttgcaccaatattctccatgttagctccaaaataccgtgtcagtgctttgcataagagaggacctcctgtttcccgcgatccagaggctctgaagatgaaatattcagatcccctggtgtatactggaccaattagagtcagaactggcaatgaaatcctccggatatcatcatttctgcaaagaaacttgagcagagttactgtcccttttcttgttctacatggtacagctgacacaataactgatccaagagcatccgagcgattataccaaacatcaatgtcaacaaataaatcaataaaattatatgatgggtatttacatgatctcctctttgaacctgaaagggatgatatcgcaaatgatatcatcaattggttgagcgcaagacttagtgttcttcagagatggtgagctgaatcaagtatgaactacaaggtgcttccccttatgtagttaccggcggttttactggaactgtatacatggcatagagtgcagaatagtgtaaatgtaaactaggatgttatcattatgtcttcacggtcacggtcatttcttgtcttcagctctgctgtataagtttgggaagagcctacatgagatgtaaataatattagagttaagctgaaaataatgtatctcctaatacacaggtagttcagtgtcactttttttttaaaaggacttggttcgcatctttttctgaattgctctcggtcattctctcacatcttttttacttcaccattagagatgaatatttcag

SEQ ID NO: 69023 - DNA, 1786 bp, Zea Mays
cgaaactctgggctccgaacgaattcacctccatcatcgcattcgcaggagagccttgtgatttccttcgcctccctcctcgcgccattcttcctttcttttttcttctcttgtttgggtcagacaagaacgccaatgcagtaactccagacggtgaatgaaacggtccgatgggcggggcctcgttcgtagccaagaaactgccattcctggcggaggagagagatgcatgggtgtggggatgtgtgtggatgagagagaaagagggcaaaagtagtcatcattacacaataatgcagtgtatgtgcatccgcgcctagttagcgtatgtgtgtgtaggtgtgtgcgcgcacggcccaaagcactagtcacagcttcagaaagaaccatggccagaggagagagagagagagagggcatcatagtatttccatgtgtccatttgctggtgttctcttgcgcgccgatccgcctgctcatccatttatgtatcggaccgtgaagagcactgacaagcctgcggcgtcatcaggggcgaacgacggcggctccggcgacgaggacttcgccggcggtggccaggctggctccggcggcgagaacatgtgcgcgaggccgttcggggagcaccggtccacctccgagggtgcggcgagctcggtgggcggcggcggcgggggcgacatggaccagtcttcggcaggcaacggcagcaccaggtggagcaactcgtcaagggacccatggctgtcgtcgaattcatgcaacatggatgctcatcgcttggcagcgttgtcttctccgattgagaacggggagccttgccgatcgagcagctcgcaggtgtcgaaccaggagctgatgagcagcccgagcctggagttcacgcttgggaggccggactggcagggcacggatcatgactagcagtagcaatagctaagctactagctgctagccatgcgtcgaccgtacgtggagctctagctagctagaaggctaacttcttcattgaggccgggtggttatagtagcagcactactactgatatcaggcggtgcgcgcgtgtgcatgcctgatgatcccccaagcaactcgtagacgacgacgacgacgacaggttttttcgcctgcgaagtcgaacagatcaatcaacaagtacagcagcagcagcaaccgcgcgcgtctccatcgatgggtgtggagatcatggtgagtacgtacgtgccgacggacggagcaccggcctggaagaagggattttaaagacttactgggtcactctctctatttcttctctgtcagagagagggagggagagttgagtgggctgcctttgggtgagtggtttgttagattggccatgccatgttcctgatttccttttctttcttgcttctctctctttttgtttccttgtgccatgtcgagcgggcgcgagattgtgtcagcgcagccggcggtgcagcagggggtatgcatgatgggagtcgtcgtagctggctggctagctgatgatggcgagagagaggcgtaaagctagccttgtgtggtggtgtgggagtgagtgagtgagtcgtgtgcgttcgtccaatgcatgtttggtccgtgtggtgtgtgaagctagctatacctagcgtatcattagcacatgcaaagctggaaaggagagaaaagaaagaaaagggaatgagttctcatgaagcaatatctaaccgccgagacgaagatctcatcctttttgtgcatgcatgcatgcatgtgtgtttccgtgcgtgatctctc

SEQ ID NO: 69024 - DNA, 1430 bp, Zea Mays
gtcagtcgtctcatgcaaaacaaaacaggggaaaaaaaatcagatgcagtcttctcctacaatatcaatatggagcaggagtagtacacatacctacatggacatgaacacagatttttaattccaggagatgtatcggaccgtgaagagcactgacaagcctgcggcgtcatcaggggcgaacgacggcggctccggcgacgaggacttcgccggcggtggccaggctggctccggcggcgagaacatgtgcgcgaggccgttcggggagcaccggtccacctccgagggtgcggcgagctcggtgggcggcggcggcgggggcgacatggaccagtcttcggcaggcaacggcagcaccaggtggagcaactcgtcaagggacccatggctgtcgtcgaattcatgcaacatggatgctcatcgcttggcagcgttgtcttctccgattgagaacggggagccttgccgatcgagcagctcgcaggtgtcgaaccaggagctgatgagcagcccgagcctggagttcacgcttgggaggccggactggcagggcacggatcatgactagcagtagcaatagctaagctactagctgctagccatgcgtcgaccgtacgtggagctctagctagctagaaggctaacttcttcattgaggccgggtggttatagtagcagcactactactgatatcaggcggtgcgcgcgtgtgcatgcctgatgatcccccaagcaactcgtagacgacgacgacgacgacaggttttttcgcctgcgaagtcgaacagatcaatcaacaagtacagcagcagcagcaaccgcgcgcgtctccatcgatgggtgtggagatcatggtgagtacgtacgtgccgacggacggagcaccggcctggaagaagggattttaaagacttactgggtcactctctctatttcttctctgtcagagagagggagggagagttgagtgggctgcctttgggtgagtggtttgttagattggccatgccatgttcctgatttccttttctttcttgcttctctctctttttgtttccttgtgccatgtcgagcgggcgcgagattgtgtcagcgcagccggcggtgcagcagggggtatgcatgatgggagtcgtcgtagctggctggctagctgatgatggcgagagagaggcgtaaagctagccttgtgtggtggtgtgggagtgagtgagtgagtcgtgtgcgttcgtccaatgcatgtttggtccgtgtggtgtgtgaagctagctatacctagcgtatcattagcacatgcaaagctggaaaggagagaaaagaaagaaaagggaatgagttctcatgaagcaatatctaaccgccgagacgaagatctcatcctttttgtgcatgcatgcatgcatgtgtgtttccgtgcgtgatctctc

SEQ ID NO: 69025 - DNA, 1823 bp, Zea Mays
ttttttctttcgagaaggatttacagggcagttaggaacacgcttctagaaatccttgctaggtgtactactaggtagtagtagtagttgaggagaaaatagaggcaaagcccaaagcggaacccagtttgggcctccggttgccgaattacacagcccaacatcagtcatttaatttaccagtagatagataaaaacaaatggatccaaagcccagcgggtcacagtttggaatcgacttgacctaaataataatccacatctgacaatagtacaccacgcagccatcaaacaaagaagcagtgaccgtagccacgtatgcatatagagctgcacttattttccctcgccaacctagccggccggtgatgattgatatggggcatgcggcgaccggcctgcttcactatttttgctgcatcacaccagtcttcatatggactgcacggccctggccatggcgaaggcggcggcggaggcgagcgcgccgacgacggtggtctggacggcgctgaagaaggggcggtcgcccgtgaagcggcccttgacgaagccgaagaagagcagcgccgcgagcgtcacggcgacggacacggccatggcgcgcgcggcctccggcacgaacatgtaggggagcagcggcaccagcccgcccgcgacgtaggacagcgcgatggtggcggcgctcaccagcgcgcgccggggctcaggcctctccagcccgagctcgaacttcatcatgaactccagccacgccttggggttgttgcggagggaggtcaccacggggccgtactcctccgggcccagcccgtactgcgacaggatgtcggcgatctcggcggcctctgcattatttgcatgcgaaatgtacaggacggacgaggcgatggtcagacgaccttactacatatgcattagccgtctgaagagaagaaggtgagctcgtcgcgggcggttgcgtttgcttaccgacgtcggggacggtgtcgatctcgtcctgctcgcgctgcagctcccggttgtagtggtcagcctcgctcttcgccgccaggtacctgaacgcacgcacagcacagcaactgaagaggttagttttggtgggtgggtagctgggctcaaacgtcatttatttgggtcagattcgtgcgggccgaattgcgtgagtgcaggcccacaagctgttggaaacacaaacaaacaaatgaataaaatagcagttcgcaattttggatcgcaatttttctgaattcttgtctctttcctgaccagtgaccagagtgctgcactgcagagagcagtaattgcatctgtggattttttttcttcctgtggaagaaatatgacgctagtttgccttatagaacttatgcttctggaagagaagtattgtatttacaaacgtctagctatgtttagtcatgtttgtactgagtcgtcatatatacatttcgataccaaaaacacacactttcagacgtgtccggaggcccaaaagtacttcaaatttcagagagtgtgttatgcatgtaacgagtatccatcggaaaatgtttccgagcatgagaaacgcccttttataaattaattaactggcgatcaggagttttaattagcaactgattacgtttgcataaacgcgctgtaatgcgcagaagaatacgaaactgaaaccaacagctgcatgcacgatctgtaacgttgggaagaaacaagggcatgtgaagccaagatgagctcagcaccagccatcagttatgctaatacgcatgtcgggttgctgaccgcaccgcggcaccagtgaactgaagaagcaaatcgag

SEQ ID NO: 69026 - DNA, 2137 bp, Zea Mays
cgagcccacgacggcccacgttcttgcatgttttgaagggaagagacatttcttagcggagaattgaagccaccgcccaccggacctggcgcaccgcgcacgacaccaaagtaccaaacgcttgggagctttggactctacaccgcgcatagatcgtgggcatcgcgacacctcacctgcccccctgcggccgccgtctctcctcgccgcggtggcgtcgaccggcagcggcgttcaactgcgccccacgagcaggtttcttggccccgtcgacttccagtgagttcagtttagctcagtaagcatctgatcaacttcgaggtgccagacagatcctatgctgccttactgggatgaaaggagccccagtactcactatcttcagcccaacaccagggcaattaaaagttctctctcaaggttttctacatcagcaggagcaggaacatcttggagatgatggagcaaccctagctggatctccaggtccagcttccaggagccgctcgcaaaaaagtaggggcaaagtgatgaaaaattgcaactacgcaaaggggaagtggatagaagatgataagcggccgctgtactctggtaatgagtgcaaacaatggctgtcaaaaatgtgggcttgtcgaatgatgcggcgcacacatttctcttatgagaattaccggtggcaaccacatgactgtgagatgcctgagtttacagggcctaagttcttaaaaaggatgagaaaccgaactcttgcttttgttggtgattcacttggcagacaacaatttcagtcaatgatgtgtatagcaactggtggcaaatacagtccagaggttgaagatgttggttggaaatatggccttgtcaaagccccaggtgctctaagacctgacgggtgggcttatagattttcgtccaccaacacaactatccttttctactggtctgctactctgtctgaattggaacctctgaatacagaacacacagttaccagatatgcattgcatcttgatcgaccagttacatttttgaaggagtatcttaatgactttgatgtcctagtacttaacactggccatcactggaacagagggaaattcaatggaaatcactgggaattgcatgctgacgggaagcctgtaggcaatggtagtagactcgcagacctaaaccgtgcaaaaaatcttacattgtatagcattgctagatggatggattcagaactcacacggcatcctaagatgaaagttttcctcaggacaatttcaccaaggcactttgtaaatggtgactggaacacaggtggaacatgtggaaatactgtcccctttactaatggaagtgaagtgttgcaggatcattcaattgatatacccgcagaaaatgctgtgaagggaactcgggttaagcttttggatatcactgctatctcaaaactacgggatgaggggcatatctcaaactctagtttcaaaaaggcttccaccggaattaatgattgcttgcactggtgcttacctggtataccagacatgtggaatgagcttctctttgtacagatttagtatcaccctctggttaggcagatctttttcagagccccaaggatctccgctgttcatagcatagaagtaaagtttatggaattttgggtcgcccatatggaggtgttcacaagatgatactattgatttctatgaagtacgaaatttacagtgtggaacagattattccaacttcctttcggagcagagtagatggaggtgttgcccagcccaatctgactatcgagtattcttcagggcccggacggacgacctcgtctggatgtagcccgtgcgaaatgggggaccgcatgggcgcatggcatgtgaaaggaggccagtgctgccagcttaccgcgacgactgattcgttattcgagttatttacaagtacctaatatatctagatgatacatttgcaacatgcatcaaaatttgctgaaacatttcgaatgtgtttgtaacataagtatagttattacaatagactccctcggttcgttttttatttgttgtctgttagcacagagctgaatagggtggcgtttggtttgcgaaatataacgtaaatgataatggtaactatttac

SEQ ID NO: 69027 - DNA, 2139 bp, Zea Mays
cgagcccacgacggcccacgttcttgcatgttttgaagggaagagacatttcttagcggagaattgaagccaccgcccaccggacctggcgcaccgcgcacgacaccaaagtaccaaacgcttgggagctttggactctacaccgcgcatagatcgtgggcatcgcgacacctcacctgcccccctgcggccgccgtctctcctcgccgagcggtggcgtcgaccggcagcggcgttcaactgcgccccacgagcaggtttcttggccccgtcgacttccagtgagttcagtttagctcagtaagcatctgatcaacttcgaggtgccagacagatcctatgctgccttactgggatgaaaggagccccagtactcactatcttcagcccaacaccagggcaattaaaagttctctctcaaggttttctacatcagcaggagcaggaacatcttggagatgatggagcaaccctagctggatctccaggtccagcttccaggagccgctcgcaaaaaagtaggggcaaagtgatgaaaaattgcaactacgcaaaggggaagtggatagaagatgataagcggccgctgtactctggtaatgagtgcaaacaatggctgtcaaaaatgtgggcttgtcgaatgatgcggcgcacacatttctcttatgagaattaccggtggcaaccacatgactgtgagatgcctgagtttacagggcctaagttcttaaaaaggatgagaaaccgaactcttgcttttgttggtgattcacttggcagacaacaatttcagtcaatgatgtgtatagcaactggtggcaaatacagtccagaggttgaagatgttggttggaaatatggccttgtcaaagccccaggtgctctaagacctgacgggtgggcttatagattttcgtccaccaacacaactatccttttctactggtctgctactctgtctgaattggaacctctgaatacagaacacacagttaccagatatgcattgcatcttgatcgaccagttacatttttgaaggagtatcttaatgactttgatgtcctagtacttaacactggccatcactggaacagagggaaattcaatggaaatcactgggaattgcatgctgacgggaagcctgtaggcaatggtagtagactcgcagacctaaaccgtgcaaaaaatcttacattgtatagcattgctagatggatggattcagaactcacacggcatcctaagatgaaagttttcctcaggacaatttcaccaaggcactttgtaaatggtgactggaacacaggtggaacatgtggaaatactgtcccctttactaatggaagtgaagtgttgcaggatcattcaattgatatacccgcagaaaatgctgtgaagggaactcgggttaagcttttggatatcactgctatctcaaaactacgggatgaggggcatatctcaaactctagtttcaaaaaggcttccaccggaattaatgattgcttgcactggtgcttacctggtataccagacatgtggaatgagcttctctttgtacagatttagtatcaccctctggttaggcagatctttttcagagccccaaggatctccgctgttcatagcatagaagtaaagtttatggaattttgggtcgcccatatggaggtgttcacaagatgatactattgatttctatgaagtacgaaatttacagtgtggaacagattattccaacttcctttcggagcagagtagatggaggtgttgcccagcccaatctgactatcgagtattcttcagggcccggacggacgacctcgtctggatgtagcccgtgcgaaatgggggaccgcatgggcgcatggcatgtgaaaggaggccagtgctgccagcttaccgcgacgactgattcgttattcgagttatttacaagtacctaatatatctagatgatacatttgcaacatgcatcaaaatttgctgaaacatttcgaatgtgtttgtaacataagtatagttattacaatagactccctcggttcgttttttatttgttgtctgttagcacagagctgaatagggtggcgtttggtttgcgaaatataacgtaaatgataatggtaactatttac

SEQ ID NO: 69028 - DNA, 2482 bp, Zea Mays
cgagcccacgacggcccacgttcttgcatgttttgaagggaagagacatttcttagcggagaattgaagccaccgcccaccggacctggcgcaccgcgcacgacaccaaagtaccaaacgcttgggagctttggactctacaccgcgcatagatcgtgggcatcgcgacacctcacctgcccccctgcggccgccgtctctcctcgccgcggtggcgtcgaccggcagcggcgttcaactgcgccccacgagcaggtttcttggccccgtcgacttccagtgagttcagtttagctcagtaagcatctgatcaacttcgaggtgccagacagatcctatgctgccttactgggatgaaaggtggctgtctgcataggctccttgtccacaagctatgctttggcctgagtattctcactgtgccgattattgttctgttactggaaggagccccagtactcactatcttcagcccaacaccagggcaattaaaagttctctctcaaggttttctacatcagcaggagcaggaacatcttggagatgatggagcaaccctagctggatctccaggtccagcttccaggagccgctcgcaaaaaagtaggggcaaagtgatgaaaaattgcaactacgcaaaggggaagtggatagaagatgataagcggccgctgtactctggtaatgagtgcaaacaatggctgtcaaaaatgtgggcttgtcgaatgatgcggcgcacacatttctcttatgagaattaccggtggcaaccacatgactgtgagatgcctgagtttacagggcctaagttcttaaaaaggatgagaaaccgaactcttgcttttgttggtgattcacttggcagacaacaatttcagtcaatgatgtgtatagcaactggtggcaaatacagtccagaggttgaagatgttggttggaaatatggccttgtcaaagccccaggtgctctaagacctgacgggtgggcttatagattttcgtccaccaacacaactatccttttctactggtctgctactctgtctgaattggaacctctgaatacagaacacacagttaccagatatgcattgcatcttgatcgaccagttacatttttgaaggagtatcttaatgactttgatgtcctagtacttaacactggccatcactggaacagagggaaattcaatggaaatcactgggaattgcatgctgacgggaagcctgtaggcaatggtagtagactcgcagacctaaaccgtgcaaaaaatcttacattgtatagcattgctagatggatggattcagaactcacacggcatcctaagatgaaagttttcctcaggacaatttcaccaaggcactttgtaaatggtgactggaacacaggtggaacatgtggaaatactgtcccctttactaatggaagtgaagtgttgcaggatcattcaattgatatacccgcagaaaatgctgtgaagggaactcgggttaagcttttggatatcactgctatctcaaaactacgggatgaggggcatatctcaaactctagtttcaaaaaggcttccaccggaattaatgattgcttgcactggtgcttacctggtataccagacatgtggaatgagcttctctttgtacagatttagtatcaccctctggttaggcagatctttttcagagccccaaggatctccgctgttcatagcatagaagtaaagtttatggaattttgggtcgcccatatggaggtgttcacaagatgatactattgatttctatgaagtacgaaatttacagtgtggaacagattattccaacttcctttcggagcagagtagatggaggtgttgcccagcccaatctgactatcgagtattcttcaggcacgttgaactttgtttctacttttaccttactgtaaaaccctaccacggtttaccatgtgcagcatatatccttcagaaaaatgttcatacctgttggtcgtaattatatttgttcattcagatgaaattaaaacttcaacatccgattgatttgtcatttgtgtgagctcaaaggcttcactcttgtctgtgtaacattttcagtgatagatgacctgatataccatgcatcttatacctatatgacacacctagggcccggacggacgacctcgtctggatgtagcccgtgcgaaatgggggaccgcatgggcgcatggcatgtgaaaggaggccagtgctgccagcttaccgcgacgactgattcgttattcgagttatttacaagtacctaatatatctagatgatacatttgcaacatgcatcaaaatttgctgaaacatttcgaatgtgtttgtaacataagtatagttattacaatagactccctcggttcgttttttatttgttgtctgttagcacagagctgaatagggtggcgtttggtttgcgaaatataacgtaaatgataatggtaactatttac

SEQ ID NO: 69029 - DNA, 2203 bp, Zea Mays
cgagcccacgacggcccacgttcttgcatgttttgaagggaagagacatttcttagcggagaattgaagccaccgcccaccggacctggcgcaccgcgcacgacaccaaagtaccaaacgcttgggagctttggactctacaccgcgcatagatcgtgggcatcgcgacacctcacctgcccccctgcggccgccgtctctcctcgccgcggtggcgtcgaccggcagcggcgttcaactgcgccccacgagcaggtttcttggccccgtcgacttccagtgagttcagtttagctcagtaagcatctgatcaacttcgaggtgccagacagatcctatgctgccttactgggatgaaaggtggctgtctgcataggctccttgtccacaagctatgctttggcctgagtattctcactgtgccgattattgttctgttactggaaggagccccagtactcactatcttcagcccaacaccagggcaattaaaagttctctctcaaggttttctacatcagcaggagcaggaacatcttggagatgatggagcaaccctagctggatctccaggtccagcttccaggagccgctcgcaaaaaaattgcaactacgcaaaggggaagtggatagaagatgataagcggccgctgtactctggtaatgagtgcaaacaatggctgtcaaaaatgtgggcttgtcgaatgatgcggcgcacacatttctcttatgagaattaccggtggcaaccacatgactgtgagatgcctgagtttacagggcctaagttcttaaaaaggatgagaaaccgaactcttgcttttgttggtgattcacttggcagacaacaatttcagtcaatgatgtgtatagcaactggtggcaaatacagtccagaggttgaagatgttggttggaaatatggccttgtcaaagccccaggtgctctaagacctgacgggtgggcttatagattttcgtccaccaacacaactatccttttctactggtctgctactctgtctgaattggaacctctgaatacagaacacacagttaccagatatgcattgcatcttgatcgaccagttacatttttgaaggagtatcttaatgactttgatgtcctagtacttaacactggccatcactggaacagagggaaattcaatggaaatcactgggaattgcatgctgacgggaagcctgtaggcaatggtagtagactcgcagacctaaaccgtgcaaaaaatcttacattgtatagcattgctagatggatggattcagaactcacacggcatcctaagatgaaagttttcctcaggacaatttcaccaaggcactttgtaaatggtgactggaacacaggtggaacatgtggaaatactgtcccctttactaatggaagtgaagtgttgcaggatcattcaattgatatacccgcagaaaatgctgtgaagggaactcgggttaagcttttggatatcactgctatctcaaaactacgggatgaggggcatatctcaaactctagtttcaaaaaggcttccaccggaattaatgattgcttgcactggtgcttacctggtataccagacatgtggaatgagcttctctttgtacagatttagtatcaccctctggttaggcagatctttttcagagccccaaggatctccgctgttcatagcatagaagtaaagtttatggaattttgggtcgcccatatggaggtgttcacaagatgatactattgatttctatgaagtacgaaatttacagtgtggaacagattattccaacttcctttcggagcagagtagatggaggtgttgcccagcccaatctgactatcgagtattcttcagggcccggacggacgacctcgtctggatgtagcccgtgcgaaatgggggaccgcatgggcgcatggcatgtgaaaggaggccagtgctgccagcttaccgcgacgactgattcgttattcgagttatttacaagtacctaatatatctagatgatacatttgcaacatgcatcaaaatttgctgaaacatttcgaatgtgtttgtaacataagtatagttattacaatagactccctcggttcgttttttatttgttgtctgttagcacagagctgaatagggtggcgtttggtttgcgaaatataacgtaaatgataatggtaactatttac

SEQ ID NO: 69030 - DNA, 2264 bp, Zea Mays
cgagcccacgacggcccacgttcttgcatgttttgaagggaagagacatttcttagcggagaattgaagccaccgcccaccggacctggcgcaccgcgcacgacaccaaagtaccaaacgcttgggagctttggactctacaccgcgcatagatcgtgggcatcgcgacacctcacctgcccccctgcggccgccgtctctcctcgccggttaccccttgctgcccgctcccctgcgcctcgcctttctcgccctctttccgcctttctcacacgtgcccgccttctccgcccctctcctcaccagcggtggcgtcgaccggcagcggcgttcaactgcgccccacgagcaggtttcttggccccgtcgacttccagtgagttcagtttagctcagtaagcatctgatcaacttcgaggtgccagacagatcctatgctgccttactgggatgaaaggagccccagtactcactatcttcagcccaacaccagggcaattaaaagttctctctcaaggttttctacatcagcaggagcaggaacatcttggagatgatggagcaaccctagctggatctccaggtccagcttccaggagccgctcgcaaaaaaattgcaactacgcaaaggggaagtggatagaagatgataagcggccgctgtactctggtaatgagtgcaaacaatggctgtcaaaaatgtgggcttgtcgaatgatgcggcgcacacatttctcttatgagaattaccggtggcaaccacatgactgtgagatgcctgagtttacagggcctaagttcttaaaaaggatgagaaaccgaactcttgcttttgttggtgattcacttggcagacaacaatttcagtcaatgatgtgtatagcaactggtggcaaatacagtccagaggttgaagatgttggttggaaatatggccttgtcaaagccccaggtgctctaagacctgacgggtgggcttatagattttcgtccaccaacacaactatccttttctactggtctgctactctgtctgaattggaacctctgaatacagaacacacagttaccagatatgcattgcatcttgatcgaccagttacatttttgaaggagtatcttaatgactttgatgtcctagtacttaacactggccatcactggaacagagggaaattcaatggaaatcactgggaattgcatgctgacgggaagcctgtaggcaatggtagtagactcgcagacctaaaccgtgcaaaaaatcttacattgtatagcattgctagatggatggattcagaactcacacggcatcctaagatgaaagttttcctcaggacaatttcaccaaggcactttgtaaatggtgactggaacacaggtggaacatgtggaaatactgtcccctttactaatggaagtgaagtgttgcaggatcattcaattgatatacccgcagaaaatgctgtgaagggaactcgggttaagcttttggatatcactgctatctcaaaactacgggatgaggggcatatctcaaactctagtttcaaaaaggcttccaccggaattaatgattgcttgcactggtgcttacctggtataccagacatgtggaatgagcttctctttgtacagatttagtatcaccctctggttaggcagatctttttcagagccccaaggatctccgctgttcatagcatagaagtaaagtttatggaattttgggtcgcccatatggaggtgttcacaagatgatactattgatttctatgaagtacgaaatttacagtgtggaacagattattccaacttcctttcggagcagagtagatggaggtgttgcccagcccaatctgactatcgagtattcttcagtgatagatgacctgatataccatgcatcttatacctatatgacacacctagggcccggacggacgacctcgtctggatgtagcccgtgcgaaatgggggaccgcatgggcgcatggcatgtgaaaggaggccagtgctgccagcttaccgcgacgactgattcgttattcgagttatttacaagtacctaatatatctagatgatacatttgcaacatgcatcaaaatttgctgaaacatttcgaatgtgtttgtaacataagtatagttattacaatagactccctcggttcgttttttatttgttgtctgttagcacagagctgaatagggtggcgtttggtttgcgaaatataacgtaaatgataatggtaactatttac

SEQ ID NO: 69031 - DNA, 2007 bp, Zea Mays
gagaagaaaatggatcacttcatttatcaaaccaaacacactctttatagagctttatttattacgtggctccttttccttttgcagccactctacaatttcccgtttgacaacggagccacgtgactagaagtggggtattttatcttactatcctaggtttagttcaccttcattccaaatcagcaggttgtgcacaaattcagtctaatatcatgtcaaatcttttttctcgttaacgacgggattttggagaagtttgtaggaagtctgtctccggaccatatcctagcgttagcgtccatggattatatgctgactcattgccacattggcccctcaaccatcctccctccacagatctctccggggaggcagcaacagttatgtcatatcattgtcgcgtcctcgtccccgttccatttcattatccccccggagctggtgcgcgagtcggagctggtgcagggtcacccttcccctcggcctcaagagctctgcggttgccgcggccaagggcgtccgtggagaagcgggagcaggtggcggcgatggaagagcaaggacgactccggcgtcctctccccctacagcttctccagaaggtggtagcatctgtcacggtcgcccagcactgctctgctctgctctgctctgccatattttattgtgttgttgcagctcctggaagatgtctaattaccttctctgcagtctgcacagttttggggtctctagatttttggttaatccttggtcagaggcttacctaatatagagtattcttgttcatggaatccattactaatttcagggttcctaaagacgacgatgtcacgatcaaggtgctctactgcgggatctgccacaccgacctgcacgtcatcaagaacgactggcgaaacgccatgtacccagtcgtcccggggcacgagatcgtgggcgtggtgaccggcgtcggcggcggcgtcacgcggttcaaggccggcgacacggtcggcgtgggctacttcgtggggtcctgccgctcctgcgacagctgcggcaagggggacgacaactactgcgcggggatcgtgctcacctccaacggcgtcgaccacgcgcacggcggcgcgcccaccagggggggattctccgacgtcctggtcgcgagcgagcactacgtggtccgcgtccccgacggcctggcgctggaccgcaccgcgccgctgctctgcgccggcgtcaccgtgtacagccccatgatgcgccacggcctcaacgagcccggcaagcacctcggcgtcgtcggcctcggcggcctcggccacgtcgccgtcaagttcggcaaggccttcgggatgaaggtcaccgtcatcagcacgtccgccagcaagcgccaggaggccatcgagaacctcggcgcggacgagttcctcatcagccgggacgaggaccagatgaaggcggcgacggggaccatggacggcatcatcgacacggtgtcggcgtggcacccgatcacgccgctgctggcgctgctgaagccgctggggcagatggtggtcgtgggcgcgccgagcaagccgctcgagctgccggcctacgccatcgtgccgggcgggaagggcgtggctgggaacaatgtcggcagcgtcagggactgccaggccatgctcgagttcgcggggaagcacggcatcggggccgaggtcgaggtcatcaagatggactacgtcaacacggccatggagcggctcgagaagaacgacgtccgctaccgcttcgtcatcgacgtcgccggcagcctcggctctgccgcctaggcatggctgcaaaggtttcaatcagagcccagccgcaataatttgttagctaccgaatgaatgatggtctacgcttgttgatgagttggtgctttgtcgtggttttgtggatgtaataattcgatgtacaaataaaaaaaggggagacaaggtgcttgttcccttggtttggtgaaaaaaaaaaaaaaaaaacaaaaaa

SEQ ID NO: 69032 - DNA, 2344 bp, Zea Mays
tttctctccatctcttcgtgcagcagacgccgtctccggatcctcaaagacgtccaaatggaaagcgccccggccgcggccgtgtttccgccacaccagctagcactgcgagctgcagccaccatctatctcctgtttctcgatcgagctgtaacacatcagcgtctgaattgtaatcacgcgcgatcgcgtatcgtctccttcctgcaaaaccccggccgctagcttccaccgccgcgttcctgtcaccatcgtcgcggcgcggccaaggccaatcctggcggggggcttatatcaggtccctgggccactggcttaactaacgaattcctcctgtcgttgcactctccgcactgctcctgcgcagacgacgtacgtagccgttgttatcgcagcgcgctgcccccttgcaccgatcactatcctccccacccggcccatcggccgcggccggtgccggcaatgcggtgggcgcccgggcgggcggcctacgtcctcctcgcggcggcgctgtggtgcgcctcactcaccccgcgcgcggcgccggacctcgcggcggaccgggcggcgctgctcgcgttccgggacgcggtggggcagcggctcccgtgggacgcggccgcggcgtcgccgtgcgggtggcgcggcgtcaggtgcgaccccgccgcctcgcgcgtcaccgcgctgcagctccctggggccagccttgtcggcgcggtgccgctcgggacgatcgggaacctcacggcgctgcggacgctatccctccgcctcaacgcgctgtccggcggcatcccggccgacatcgggagctgcacggagctccggcacctgtacctccaaggcaaccagctggatggacaggtaccggaggggttcttcgacctcgggctcctgcagcggctcgacctctcgaacaaccgcatcgccggcggggtctcgccgggcttcaacaggctccagaggctcgctactctgtacctggagaacaacagcctgaatggcacgctgccgtccaaccttgacctcccgaagcttcagcttttcaacgtgtccagaaacaacctcaccggccctgttccaaagtcgctcgcccgtatgcccgccagcgcctttgatgggacagggctctgtgaggacaatggccgaaaaatccgcggagacggcagccgacgccgacctggacgggtctcccgtgtcggtcaccgtggcgagcatggacatgaagaacgcgacgaggcggtcctcgcaggccacggcaggcaacagcgacaagaagctggtgttcttgggagcggcgccggacgcgccgtacgatctggagtcccttctgcacgcgtcggccgaggtgatcgggaagggctggctgggcacgacgtaccgcgccacgctggagggcggcgccaccaccgtggccgtgaagcggctcagggcggcgcccatcccggagcgggagttccgggacaaggtgatcgcgctgggcgcgctccggcacgagaacctggtgccggtccgcgcgtacttctacagccgggaggagaagctgatcgtgtacgacttcgtgggcggcggcagcctctgctccctcctccacggcgggagccccgagcggctggacttcgaggcgcgggcgcgcatcgcgctggcggccgcgcgcggcgtcgcgttcatccacggcgccggcccccgctcgtgccacggcaacatcaagtcgtccaacgtcctcgtcgccgacgcgcgcgacggcgcctacgtgaccgaccacggcatcctccggctcgtcggcgcgcacgtgcccctgaagcgcgtcaccgggtaccgcgcccccgaggtcaccgacccgcgcagggcgtcgcaggagacggacacgtacagcttcggcgtgctgctcctcgaggcgctgacggggaagccgccggtgaactcggtccccgggagcaccggcggcgtggagctgccgctgtgggtgcgcacggtggtgcaggaggagtggacggccgaggtgttcgacgccagcatcgcggtcgaggagcgcgtggaggaggagatggtgcggctgctgcagctcgccgtggaatgcaccgacgaccggccggaccggcggcctcggatggccgaggtggtggcgaggatcgaggtcatcgtccggagcgcggagctgaaggcgaaggccgacacggaggatgacgacttccatagcatctctccctaacctgccagcgcggtcgttctctgtggttattttcagatcttgggtgcacattgtgcggcgatgtacatattttcagaacgtgtggggttctttacgttccaaacagagccgatttgtctactctgtccgtgc

SEQ ID NO: 69033 - DNA, 1729 bp, Zea Mays
gcgctgcgtttcttgatctgtgcccgcaccgagccgtgccctagtttcttgccgtgctggggttgggttcgctccattcggtgcggcgagatgcggcatggcttacttcggcggagcaggagcagcagcagcagccccggcaatggactggtccttcgctagcaagcccggcgccgccccggcgttgatgtcgttccggtcagcttcgttcccccagttctcctccttcgacggcgccaagaacccggcccctcgtatcctcacgcaccagaggtcgttcggccccgacagcacgcactacgccgccgcgcaccgcacgcagcatgcgctgaacggggctagagtcactccggtctcgtcgccgttcaaccagaacagtccgatgttcagggtccagagctcgcctagccttccgaacggtactgcgttcaagcagccgccttttgccatcaacaacaacgctgcggccagttctactgttggtttctatggaacaagggatgtggtgaggccaaagacagcacaattgacgatcttctatgctggttctgtcaacgtattcgacaacgtctcagctgagaaggctcaggagctcatgctcttagccagcagagggtctcttccaagctcagcccccgtggcccgtaagccagaagctcctattctcgctccagcaaaagtcacagcgcctgaggttttgcatgcaacacagatgctgtttcaaaaaccacaacacgtttctccaccttcgtctgccatctccaaaccaatccctggcatcttgcaagctgcaagtctccccaggagcgcctcgagctctaaccttgactccccatttccaaaatcttcagtgccatttcctgtttctcctgtaagtcaggctccgagagctcagcctgcaaccattgccgctacaactgcagcagcaataatgcctagagctgtccctcaagctagaaaggcgtcccttgctcgattcttggagaaaagaaaggaaagggtgacaactgctgcaccttacccatcagccaagagcccgatggagagcagtgacacgtttggcagtgggagcgccaacgacaagtcatcatgcacagacattgccctctcaagcaaccatgaggagtccctatgtttagggcagcccaggaacatcagcttcatccaagagtcccccagtacaaaactacagatctgatctgaatatctgatcatgcccaatgttcatagatttgtccaggctgactgatgcaaggaccatacgatacttttgcattcaggcaaggactcgagaggaagagattacgtatgttatcggtgccgctagctgttgtttatgatgatgttttgttgtgctagtttactgtgatgctggtggtgcccccacctaactaacaagagagctgtcacttgcagactcttgatttttttttgtcctagcgccatttctttagcggtatcaagtcaatttatataggcttacaaattctgcgccttttgtatggccaaagtgtaatatttttgttcttgtattatgaacctccatgctgcagaatgcaagagcaaatcttattgtcgatggtgttctcattgccagcatgtgtacgcagtagcggttcatgttgttttgagctgttctgttttaataatatctcaaaaggttgccgattggtgcccgtaaggatgacatttcaagaacagatgggcagcagtcgttgcaaggttttgg

SEQ ID NO: 69034 - DNA, 3829 bp, Zea Mays
tagggatttgtccgaacttccggtaaatgcaagtaaatacagtggtggttgctaccgtttggtttgcatcctattccctgtcattgagtatgcataagttttaaatatgttaatcattgaattctttgatgaagtttatttgtttggaagtattaattctcaattgtctaatattatggatgatcataattggataatgatatatgtggtggattcccatcttggatgaagttgaagtatcttttttgaatcacgttatgtgaagtgttgtaggcatgacatgcacatcgcatcatccatcttgcatttttgaagttatgtcgtgatctttatggtccgaccgtaccggtacattttttagcatcgtacgttgcccgaggaggggtacgatgcggcttcatatccttagaggtatgaaggcagaagtcatccttgcatttgcagacatttgcattcatgaggaatatatgaagtgtgacattactatgttactattgtggtttctacctgcgaggtgtggtaactaggtgtgttgtacgttgtatacgtgatgcaccttggtaataagaaggttgtggaatcaggtggtggtaaaacaatgttcttatgtggttgaatagtttgatattattttacttgctgagatgtgtcatctcactcttgcattactcaatgcaggtacttgatacatgttgggaatgaggggagtagcagcacgtccacttacactctcacaataacgctgcccaggcgcagccatgatttaattagaaacttattgtcaaaggaagtttgttttttatatagtcgtgcgcactggttaattcagttcaggtcgtacgtttatatttccttgctagccgattaataatacttagtatgtttttgtcatgatatatgtttataccctgttgcccccttatttatgcaatcttgcaaaggggatgctgccgaaattttatatatggacgtcagaagcgtagttcagtagcattctgggttgtttgtggaacccggggtgttacaacaggacacaccagtgattctgtagagacatgtaagtactatataattgatttggattaaatggtatacaatggaatgcagctagatggaagttacaattgatccgaggttggtacctaaagttggtatgacattcagtggtgtggatgaagcatatcaattttatagtaggtatgcatatgaagttggcttcccattgaaaaagtatagggaactgaaaaattgtaagtggttgaattgctcgatggaaggaaagagtgtagtaaggggaatatcaaacccaaagaaggatatagaaaagaatcaattacaatgcaacaagacgcatgatcctgaatacatggagttcataagttcaatgcaggagagtcgaatcccgcaacattgtattatggattatgtttcagaaatgcacggtagtcctgagagtgtgcctgtaacagcacaggacatgtataacctgaaaaaggcaaagcaacgagagagaaatgcaaatgatgtgacaaagctactatctttttttgcatcatgcaaaaaggataatccacaatttttctctgacttccaattggataaagaaggaaagattttgagcatattttggtcacatgcaagccagcaaggggactacatggattttggtgatgcagttacatttgacacaacacataagactaatctgtatgaaaaaccactaggtatgtttgttggttcgaatcaccacctccattgcaccatatttgctttcgcattatttggggatgaaactgttgatacatttgaatgggcattcaacgccttcaaaacatgcatgggaatcaaagggccacgagtgatgctgccagatcaagatcctgcaatgccagtagcactcgagagggttttcccacacacaatacatcggttgtgtctatggcatgtgcaaaataggtatatgccttttctaaacgagttgtatgcaaggtttgagtaaatggactttaagacaaggttccaatctataatacatcatcctttgactgagttggagtttgagactacatggtcaatgctacttgaagatttccatctgcacgataacattactctcaataagttgtatggaatacgtaaggattaggtgcctgcctttttcaagaatcattattgtgggctaatgttatctacatagcgaaagcatgaacaagcttgtgaaaagtgcacatgtcgatgcaaacactccgcttcatcaattcgccaagcaaatgatgaagcttctacacagtagaaagatgaaagagtcaaaagaagtagtgggaagcatggtgaggacaaattgttatgaagtatatttataccttaatataagtgtcatctaatttgaattatatacgacacaggaaaggaaacaaacacgctatatatgtttgagataagggttgcaagagcatacacaagggttgtgatgaataaattccaggagtctttgaaatatgcaactacattcaagataatgcatgatcaagaagggggtgaaaatgattgggtagtgcagcatacaacaagatcgaataaaattgtgtggggacaacaccaattcaaagtgacagttgatgaagagacaggaaagtatacttgtgaatgcaaacattgggaacatacaggtatggagtacgaaatagtaaatatatacctttatattaaaaacatataaaaaaattcttataatcgttattgtttttatagggctattctgtgtacatgtactacgtgcgtttatgcatcttcagattgaacggatacctaaggaatacattttacaaagatacacctctctgcaaggcaagatgttccgtttccaagagatgataggaatttgaagggaaaggatggagaaacaaagtcatatagacagaagatgttgctaaaaaagctatgaaagtagtgcatcatgctagtttatcaaaggcatgtaatgatagagccctagcagtaatggatgagcttctcgaggtactttcgcgtttggagacagatatagaagttgaggagacttgtggaactaatgggggagatggtatacaggtatgtgatgttttaatgtatatatttttaacatattattcatcctaatacattgatgaagtataaaacaataaaatttcaggacgatgatgaagacaatagagacgtcgaaatagatggtgaattgggtgaaaggaataacaaggaaattcaagatgtatctaatatacttgaagggggtgtggacaatgttcaaatacctataccaatacgttcatttgaagaggatcacgcgaatatgaatgagagtggtgaccatgaacaaaatgatcatgtcagaaagaaactggattttgcagtcgatgggataagcttggcaagaccaaataactcaaaacccaaaggaagaacaataaaggggagtgaacaaaaggttattaaattgggagcaaaaggtacaaagaaaatgaacaggaaatgccagaagtgtggaattgctgatggtcacaacagtaggacatgtttgtcattggaggagaatagattacagttgggctagccttgctggacgtaagagaggacgacctcctggatctaggaacaagggtggaagtaacactcctcattggaatgagacaacaacatcaaaaaacacgcaattgattttgataatagtgagtcaggcaatgattaatatgttgtatgtgatacgaataattctttttttgcaataaacattgcatgagtcacaaatgatttatatacagttggttgttgaaatctattaaatatagcgtat

SEQ ID NO: 69035 - DNA, 2700 bp, Zea Mays
atggcttccgaatcccgacgcgtgagaaacgctagaggcccattttggttcccatgccactaccgggctttgacagtgcaccagcccgtgcagtcgagcaaggtattgcggcccgccatacagtcagctgcttctccactgctgctgctctcgcctttattgctacttcgttcttcctcgtttgcttcgtccccgcggcgacaacatccaccaccaagtcgtccactccgcgtgaacgcatccacgctccaatctcatctgttcgcggccgcctacgcttcctccgcctccagcgccatgatgaaggacaagatgaagggtttcatgaagaagatcacctcctccggctctgggaccccgtcctcattcaagggcacctcccacgtcctcggctccggcccctccccctcctcctcctcctcccaccccgcttcccgcccctcagaccctagcgcaaaccccaagcctgcccctaagcggccctcgccacctcccccgcccacttcaaccaccgatttcaccccgtacacgcccctcgtctcctcctcctcctcctcctcccgccgctccgtcgcgaatggcaccgcggccgccgccactatcgcgtgccccagctgcgaagacgcgttcccttccgagcttgccgtcaccgagcacctcgacggctgcctcgcgtccgcggggggcgcccgcgcgcgcgccgccgcgtacctcgctgccgacccacccccgccgcccgctgccgttgaagtggtcaaacgcctgctgggcaacctgctccgggagcccagcaacgacaagttcaggcgggtgaggctgggcaacccgcggatcaaggaggccgtggcggacagagaaggcggcgcggagctcctggaggccgtcgggttcagggtcggggatgagggcggggagcccttcgccgtgatggacgaagtgcccagcgacgccaggctcaacggtatcaggagggccctcctcctgctcgagggggcacactcctctgcggctccagggaaggtggaggctgaggccaaggagagttgcagcaatgtgcctgatgtgctgcaggacggtgctatgacaattgatcggcagattcgagtatttgtctctgttcccgggagttctgtgccacaaaatgatgtaccagattccttttacaagcttagtggtgaggagataaggaatgaagcaaagatgaggagggaaaggttagaacaatctaggttgctgataccaaagtcttacaaggagaagcacgcattggctgctcgacagaagtataaacaagcagtcatacgagttcagtttccagatagaatgattcttcagggcatattcctaccaggggaggccaccggttcgctgtatgagttcgtcacatctgctctgaagcaacaaggtttggaattcgaactcatctctccagccattcctaagccacgtgtggtgccacattttccaaacccgggagagcgggcacgcaccctacaagaggaggacctagtcccttccgcgctcctcaagttcattcccaaggagactgattccgtggttttcaccggtttgcttgatgagcttctcgaggccagtgagccgctacctgctgcatcacaatgaaccttaaaccgtttgagttgcagttcattggtaggctgctgggttttttttttttgaaccatatagacgatttcgtttttttccctaccgagcttctcttgatacaaactattgtgcaattaggcatcccatttaatcataacgcaattgaactacccaaattcatgaaaaattcttttaaaaataaaattttagatgaattttattatttactctaccgatacatcaaattttaatttatcatatgttaagagaaaaaaagaaaaaatataccattttaaagatttttattgaattataacttcaaatttatatattggtaaagtaaataatgaagtacaatctataaatttattttttaaagattttttaatgaaatttgggtaatttgattgtatggcgattgttcactgcagttttgtcctggttcttttacataggaattatagataacgatacatacgtgcattggctgacatcttgttaaaaagctactcaagaatttgttaggcccaaattgaactggatctgaagtgggctgggctagactgtaaaacttcaatgatttcttgattatgctgttgtggattcttaccgatttttccaaaggcccattttatgaactgtttatttttctctcacatatctactgaatgcagaaaaagtgttgcttcgtctgcaacagcagttttcgtccgacgtgacgattttacgcacgtcgcacatcttctccccgatgacgtgtaagaagttggcatgttagtatccaactatctatttgcatctttcttgtcgaagctaagtaggttggtctgctcctccgatcatctgggttagagtttagataattgtagatgactgagttttagtttaggacactaggttaaggtatagtggatttggatggaagtagagcccaattcaactaactaatctatattttactatgcattagtaagatgtcattatggacataattctacaatgcgtcacactcaatcaaagaagcaaaacaaacattggtcataataacaatcaggtgagcaaacaaagaagcaaaacaaacattggtcataa

SEQ ID NO: 69036 - DNA, 1401 bp, Zea Mays
atggcttccgaatcccgacgcgtgagaaacgctagaggcccattttggttcccatgccactaccgggctttgacagtgcaccagcccgtgcagtcgagcaaggtattgcggcccgccatacagtcagctgcttctccactgctgctgctctcgcctttattgctacttcgttcttcctcgtttgcttcgtccccgcggcgacaacatccaccaccaagtcgtccactccgcgtgaacgcatccacgctccaatctcatctgttcgcggccgcctacgcttcctccgcctccagcgccatgatgaaggacaagatgaagggtttcatgaagaagatcacctcctccggctctgggaccccgtcctcattcaagggcacctcccacgtcctcggctccggcccctccccctcctcctcctcctcccaccccgcttcccgcccctcagaccctagcgcaaaccccaagcctgcccctaagcggccctcgccacctcccccgcccacttcaaccaccgatttcaccccgtacacgcccctcgtctcctcctcctcctcctcctcccgccgctccgtcgcgaatggcaccgcggccgccgccactatcgcgtgccccagctgcgaagacgcgttcccttccgagcttgccgtcaccgagcacctcgacggctgcctcgcgtccgcggggggcgcccgcgcgcgcgccgccgcgtacctcgctgccgacccacccccgccgcccgctgccgttgaagtggtcaaacgcctgctgggcaacctgctccgggagcccagcaacgacaagttcaggcgggtgaggctgggcaacccgcggatcaaggaggccgtggcggacagagaaggcggcgcggagctcctggaggccgtcgggttcagggtcggggatgagggcggggagcccttcgccgtgatggacgaagtgcccagcgacgccaggctcaacggtatcaggagggccctcctcctgctcgagggggcacactcctctgcggctccagggaaggtggaggctgaggccaaggagagttgcagcaatgtgcctgatgtgctgcaggacggtgctatgacaattgatcggcagattcgagtatttgtctctgttcccgggagttctgtgccacaaaatgatgtaccagattccttttacaagcttagtggtgaggagataaggaatgaagcaaagatgaggagggaaaggttagaacaatctaggttgctgataccaaagtcttacaaggagaagcacgcattggctgctcgacagaagtataaacaagcagtcatacgagttcagtttccagatagaatgattcttcagggcatattcctaccaggggaggccaccggttcgctgtatgagggctgccaatttccaacaaaaaac

SEQ ID NO: 69037 - DNA, 1510 bp, Zea Mays
ctcaagctcgttaggcccacaagcagttgcagtgccgccgctcctctcgtcttccccgtggccttaactttacggcttcaccgaccgaaaacccccatttcctcttctccaaaccccactcaccgcaacgagccgccggatccatggccggcaaagacggctccgtcccttccccgcctcctccccggctcccatcctaccctgagatgatcgtggaggcaatccgggcgctgggactcgagaacggctgcaacaagactgcgatctcggactacatcaagggcagctacggctccaacctccctgcccagcacaacgccgtcctcacgggccacctcgcccgcatgaaggctaccgctcccgttgtcaccgctgatgtcgacgacattgacgtgcttgctccagctcccgttgtcagcgctgatgtcaaccctgttcataccaagcggggacgcggacggcccccgaagcccaaggaccccgttgctgagggctacggtggtaagcccgctacagctcccgtcgccgccgctgccgtgcctgtcaagcgcgggcgcggacgtccgccgaaacccaagaaccccgtcgccgaggactcagctcccactgcgtcttccgtcgtcaccactgatggcaatgccgtgcctgtgaagcgtgggcgcggacgccccccaaagctcaaggaccccatcaatgtggccactgaccaggccaccagcggcatgctcagcccacgtggccgtgggcgcccgcccaagaaggccaaggtcgccgtggaagatcccagaggtgaacctgctgcagctcgagacgttgttgttgatgccagtgctgtacatgtcaagcgtgggcgtggacggcccccaagatgagtcctgctcctgcagctgcagtgactgggaagccgtctgagtcttaaaccatgaaaattgaatcctatggtggtaatggtttgggagtagcttggtgtatcaaattgagttctgaactatcttatccagttgggtgcatagcatcggaagactaatctcaataatcgagaaatttgctgttttgccactctcaaatttggctgcttgttattatgccatctcgtgtctatgactggtgggaccgtctgtgtctatgatttgtgggtccgatggcatactggcgaagcccacaaatgataatggcaaaattgccaatggctcctcaataatctggatggtttctgtacattgaatggcggatgatgcgtaatagttgactgctgctgaagacttgacttaatcattgctattttcttctcattgttgcgtgttaattccatcttagcattatccgtcaactatttgagttgttacttgcacctctgtatggaattcgtttatcttttcatcatcaaggtatacatgttatctacttatcttaagggtggtttataggaattgcttagagcttatctgttatgtgtcagatggatgttgacttaaattttttaatgtaaataaacattattttctaagtt

SEQ ID NO: 69038 - DNA, 5648 bp, Zea Mays
ctgtcctgtatctctcgcaaatctcccacccgccccacataataagaaccgccgccgccgccgccgccgccgctcttctccaacctccgtctctccgagcatgcactctgcgttctcgtcctgccgtcctactcgctacgcggcgcggctctgaattggcatctcccgaccccgcctctcgcgcgccgtccccccgtccccgcacctgccgaagctgaaccccggtcccggcggcattgcgcgcgcgctctctctttctctctctcgctggaggcgggaccgcgggagagccgtctcactcagcggcgccgcgggccgctggccctgccgcacccgcgcagggtggttggtcccgtgtcgggtgtggtgaggcgctgacttggacgggacgcaatcagcggacgaaggaagcttcgggcgtggccgcgtcgcttcgcctcgtctcctgctacttgttcggaacttctccatctttccccacagttggttttgatcttagcgtgccgtatcgccctatcggggatggggttgctggagttcgcggtgggtaaggccagatcccttgccgccgccactgacctggagcagcggcacgtgcacaagggcgagctcgcgcggatcgagacgcggcggtgccaggaggcgggccatggcgtgaccacgcccaaggcccaggggccggcttcgcccgtcgggccgcccacgcccccgcgccgcctgaccgaggcgagatctggaggccaagccgatgccggcccgcgctctcatcctcccggctgtgatactaggcgagtggatgaggaggctgctgacgagtcaggggcccagtttgcagcctctgtgactgacttcttacatgacttctcagataccgaatctagtgttagtaactccatgtacagatcaatgaccccaagccccacagggagtcctacttgtgtggtgaggctggatgatgcttcagatcatgatgcaacaacattgactgactcagacgatgcacgtgagctagtcagcgctgctagcatctctggtgaaggagaactcgtcaatggatcaccacatatcgttgattttggtgatgctatttggtgcccaccaccaccagaagatgagagagatgatgttgaatcgaggatatttggatctgatgacgacgacgacgatgctttcttagaacctagttgtttcggtgataataaaatagccagtgggtacggtgcctttggtgcatctcaacaagatggtgttcagaatgatttgctgaagcactttcgggctctagttgcacagttactggaggcggaaggcattagtttttccagtgacgacaattcaaaaagttggcttgagatagtgtcctcgttggcatggcaagctgctaactatgtgaaacccgataccaagaaaggtggcagcatggatcctagtgattacgtgaagattaaatgcatagcatctgggaagccaactgatagcaattttgttagaggaattgtttgctctaagaatgtaagacacaaacggatggtctcagaacacaggagtgccaaattgctcattttaggaggtgcacttgagtatcaaaaagtttcaaataaattggcatccatagggactatactcgaacaggaaaaggagtatcttaaaactgttgtgagcaagatcgagtctaggcatcctaatgtccttctagttgagaaaagcgcctcatcttttgctcaggagctcttagcaaaagatatttctttagttttgaatgtgaagagacctcttttgaacagaatatcaagatgcacaggtggtcagattgcctcatcaattgacaacattgcctcagctaggcttggacaatgtgacttgttcaaggtggagaaagtcccagaacccttattagctgaacatggagaaaaggggtcaattaagactctgatgttctttgaaggctgtgtgaagcacttgggttgcacggttctgttgaggggaacatgtcgggaagatttaaagaagattaagcgtgcaatgcaacttgctgtttttgctgcttatcacctctccttggagacatcattccttgctgatgagggagcaacacttccgaaagttccttcaatatctgtgacaggtgcaccaaatatttctgctagtcctactgatcatggcacttctgatagtcttaaaaatgctgaagagacatatccacaaaattctactatcagccagatttttgaggttatctctgcatcttcaactttattaccactcgctggagtaagccaaggaatcatgcctgaatgtagagcatcaaaatttctagttgatcctctcaactctcaagatccgtcgaacttatgccatccaaatgtttcctgcaatggtgatttaatatctccatgttctgtcagtggttttagagcaacatatgttggcacacaacatggtggttcaaacaagtctttgcaatcttcaattgctgctgatgtctggcgtgatggtgcattaactttgaaacatagccaaccatgtcattcagaaaaccatagtagcaaccctgctgcagggaatacagatgacaaagacaagctttcagctggttacttatctggtactgacaacaatcagagtatcttagtttccctctcaagcacctgcattcccaaaagctttgcatgccagcgttctcatctcgttcggatcaagttttatggtagttttgataagccattagggaggtatcttcgtgaggacttatttgatcaggcatattgctgcccatcttgtaaggagccttcagaatcacatgtgaggtgctatatgcaccaacatggcagcctaacgattagtgtcaggcgccttcagtctcaaaagttgccaggtgaacatgatgggaggatatggatgtggcacagatgcatgaggtgcaagcttaaggatggaatgccaccagcaacacacagagtaatcatgtctgatgcagcttggggcttatcatttggcaagttcctggagctcagcttttcgaaccatatgactgctaacaggattgcaagttgtggccattctctccaaagggattgtcttcgcttttatgggtatggaaatatggcggccgccttccactatagtcccatgattactctgtctgttaaccttccgcccccagtgctagatttcaatactcatgctacacaagattgggtgaaaagagaggctgttgaggtatttcacacaatggacttgctgcacactgaggtatatgatgcacttaacaatcttgagaagagtatcattactgatgatgattcaaccaagacaagcatacagaggcaaatagttgagatgaaagatttgcttaatgtcgaaagaaatgagtatgaggttttgcttcttccagttataatggggagttctcattcattcaaaccaaatattgatattttggagcttaatcgtgttagacgtagtctcctcctagatgctcacacttgggaccgcaggttgtgcggcatagattcactcgaagcagatagccatatttccagaactgatccgtttaatctagagaaaacccaaggaatcaatgaagggagatctgatttgcttcagactgttaggaaacacggaggaacatatgaagaaccatgtccccaacactcttcagaaagcccaaggaaatctctcttgtctacagagggccatctgaatgataaaaaatatgtcatggttgagacagatttgccggttgggctagtggatggtgatgcaggtcttgatttgatcttcaacaaattgaatacatgtgaagaaggacgttgtctatcaaaatatcctagcaagacaggaccagtagagaggttaccttcacttgcatctattttagctgacaaaatagatatggcatggtctggatttggtgaattagactacaatcttccacatggtttgagcaaagcaaatgaaaatacatctttgaacttgtttggcaatccaagttacaagaaggctactggtccagtccgaatccattcatttgatactgtgttgagattacatcagcgagaacaaactggagtaatacctgcttcactccattcagcactgaaatcaattgattcctttagagacttgacaagccttgttaaggatccaatgacaaacatgcggagagccttttctcaaatatctcccaggacaagaggaaacttaaatactgttcttacacgtgctcccaagtatatcacatcagcttctcgtatggtgaatgatggggctcgactgcttctgcccaatattagctgtgaaggttctgtttttgtcactgtctatgatgacgagccaaccagtgtagtgtcatatgctatgacatcacaagaatatgctgaacatgtcacacataaaatgaatgcaaatactagcttttcagattttactagtagtaatggacttgatggatctctgtcctcacatgaagagctttcaaattttagaggagctcacttcagattatccttcgatgatgatgcatctcctactgatagtacaaagttttctgtcacttgctattttgcaaggcagtttgctgcacttagaaagaaatgttgtccaagtaatagtgattacatacgctcgataagtcgttgtaagcgatggagcgcgcaaggtggaaaaagcaatgtttactttgcaaagacaatggatgagagattcataattaaacaagtcaccaagacagagctggactcttttgtagaatttgctcctcattacttcaggcacttgacagaatcattgacttctagaagccctacttgcctggccaaaatattggggctttatcaggttagtatcaagaattcaaaaggtgggcgtgaggtgaagatggatctgatggtgatggagaacatactcttccaaagatcaatatctagggtgtatgatctgaagggttctgtgcgttcacgttataattctgatgcttctggtcacaacaaagttcttctagactctaatctcatagaagcactacatacaaagcctatttttttggggagtaaggcaaaacaaagattggaaagagctgtctggaatgatacatcatttcttgcgtctttggatgtcatggactactcccttttggtcggtgtcgacgaagagaaaaaagagctggtggttggcatcatcgatttcctgcggcagtacacctgggacaagcagctggagacatgggtgaaggcatcggggatcttagggggccccaagaatgagtctcccaccgtgatttctccaatccagtacaaaaagaggttcaggaaggccatgtcgaggtacttcctcgccgtccccgaccaatggacctcgaaaggtgacatgcaatagcttagagcagatgtgagaggacctctgacctggtggatggactgtgacattaagcatgatcattgcagtgtccggtcacatcttgagcgcttgatccaatgtaaatttgacggcgagccacggcgggttatttgacgccgagttgcgccgtactgaggaattgtattagaggattggaacactgatgttaattaatagacatgtaacagcgctctcaacacagttgctttagcgtgaatgtgtgtcctgggctcatattgccgactgcacgt

SEQ ID NO: 69039 - DNA, 5712 bp, Zea Mays
ctgtcctgtatctctcgcaaatctcccacccgccccacataataagaaccgccgccgccgccgccgccgccgctcttctccaacctccgtctctccgagcatgcactctgcgttctcgtcctgccgtcctactcgctacgcggcgcggctctgaattggcatctcccgaccccgcctctcgcgcgccgtccccccgtccccgcacctgccgaagctgaaccccggtcccggcggcattgcgcgcgcgctctctctttctctctctcgctggaggcgggaccgcgggagagccgtctcactcagcggcgccgcgggccgctggccctgccgcacccgcgcagggtggttggtcccgtgtcgggtgtggtgaggcgctgacttggacgggacgcaatcagcggacgaaggaagcttcgggcgtggccgcgtcgcttcgcctcgtctcctgctacttgttcggaacttctccatctttccccacagttggttttgatcttagcgtgccgtatcgccctatcggggatggggttgctggagttcgcggtgggtaaggccagatcccttgccgccgccactgacctggagcagcggcacgtgcacaagggcgagctcgcgcggatcgagacgcggcggtgccaggaggcgggccatggcgtgaccacgcccaaggcccaggggccggcttcgcccgtcgggccgcccacgcccccgcgccgcctgaccgaggcgagatctggaggccaagccgatgccggcccgcgctctcatcctcccggctgtgatactaggcgagtggatgaggaggctgctgacgagtcaggggcccagtttgcagcctctgtgactgacttcttacatgacttctcagataccgaatctagtgttagtaactccatgtacagatcaatgaccccaagccccacagggagtcctacttgtgtggtgaggctggatgatgcttcagatcatgatgcaacaacattgactgactcagacgatgcacgtgagctagtcagcgctgctagcatctctggtgaaggagaactcgtcaatggatcaccacatatcgttgattttggtgatgctatttggtgcccaccaccaccagaagatgagagagatgatgttgaatcgaggatatttggatctgatgacgacgacgacgatgctttcttagaacctagttgtttcggtgataataaaatagccagtgggtacggtgcctttggtgcatctcaacaagatggtgttcagaatgatttgctgaagcactttcgggctctagttgcacagttactggaggcggaaggcattagtttttccagtgacgacaattcaaaaagttggcttgagatagtgtcctcgttggcatggcaagctgctaactatgtgaaacccgataccaagaaaggtggcagcatggatcctagtgattacgtgaagattaaatgcatagcatctgggaagccaactgatagcaattttgttagaggaattgtttgctctaagaatgtaagacacaaacggatggtctcagaacacaggagtgccaaattgctcattttaggaggtgcacttgagtatcaaaaagtttcaaataaattggcatccatagggactatactcgaacaggaaaaggagtatcttaaaactgttgtgagcaagatcgagtctaggcatcctaatgtccttctagttgagaaaagcgcctcatcttttgctcaggagctcttagcaaaagatatttctttagttttgaatgtgaagagacctcttttgaacagaatatcaagatgcacaggtggtcagattgcctcatcaattgacaacattgcctcagctaggcttggacaatgtgacttgttcaaggtggagaaagtcccagaacccttattagctgaacatggagaaaaggggtcaattaagactctgatgttctttgaaggctgtgtgaagcacttgggttgcacggttctgttgaggggaacatgtcgggaagatttaaagaagattaagcgtgcaatgcaacttgctgtttttgctgcttatcacctctccttggagacatcattccttgctgatgagggagcaacacttccgaaagttccttcaatatctgtgacaggtgcaccaaatatttctgctagtcctactgatcatggcacttctgatagtcttaaaaatgctgaagagacatatccacaaaattctactatcagccagatttttgaggttatctctgcatcttcaactttattaccactcgctggagtaagccaaggaatcatgcctgaatgtagagcatcaaaatttctagttgatcctctcaactctcaagatccgtcgaacttatgccatccaaatgtttcctgcaatggtgatttaatatctccatgttctgtcagtggttttagagcaacatatgttggcacacaacatggtggttcaaacaagtctttgcaatcttcaattgctgctgatgtctggcgtgatggtgcattaactttgaaacatagccaaccatgtcattcagaaaaccatagtagcaaccctgctgcagggaatacagatgacaaagacaagctttcagctggttacttatctggtactgacaacaatcagagtatcttagtttccctctcaagcacctgcattcccaaaagctttgcatgccagcgttctcatctcgttcggatcaagttttatggtagttttgataagccattagggaggtatcttcgtgaggacttatttgatcaggcatattgctgcccatcttgtaaggagccttcagaatcacatgtgaggtgctatatgcaccaacatggcagcctaacgattagtgtcaggcgccttcagtctcaaaagttgccaggtgaacatgatgggaggatatggatgtggcacagatgcatgaggtgcaagcttaaggatggaatgccaccagcaacacacagagtaatcatgtctgatgcagcttggggcttatcatttggcaagttcctggagctcagcttttcgaaccatatgactgctaacaggattgcaagttgtggccattctctccaaagggattgtcttcgcttttatgggtatggaaatatggcggccgccttccactatagtcccatgattactctgtctgttaaccttccgcccccagtgctagatttcaatactcatgctacacaagattgggtgaaaagagaggctgttgaggtatttcacacaatggacttgctgcacactgaggtatatgatgcacttaacaatcttgagaagagtatcattactgatgatgattcaaccaagacaagcatacagaggcaaatagttgagatgaaagatttgcttaatgtcgaaagaaatgagtatgaggttttgcttcttccagttataatggggagttctcattcattcaaaccaaatattgatattttggagcttaatcgtgttagacgtagtctcctcctagatgctcacacttgggaccgcaggttgtgcggcatagattcactcgaagcagatagccatatttccagaactgatccgtttaatctagagaaaacccaaggaatcaatgaagggagatctgatttgcttcagactgttaggaaacacggaggaacatatgaagaaccatgtccccaacactcttcagaaagcccaaggaaatctctcttgtctacagagggccatctgaatgataaaaaatatgtcatggttgagacagatttgccggttgggctagtggatggtgatgcaggtcttgatttgatcttcaacaaattgaatacatgtgaagaaggacgttgtctatcaaaatatcctagcaagacaggaccagtagagaggttaccttcacttgcatctattttagctgacaaaatagatatggcatggtctggatttggtgaattagactacaatcttccacatggtttgagcaaagcaaatgaaaatacatctttgaacttgtttggcaatccaagttacaagaaggctactggtccagtccgaatccattcatttgatactgtgttgagattacatcagcgagaacaaactggagtaatacctgcttcactccattcagcactgaaatcaattgattcctttagagacttgacaagccttgttaaggatccaatgacaaacatgcggagagccttttctcaaatatctcccaggacaagaggaaacttaaatactgttcttacacgtgctcccaagtatatcacatcagcttctcgtatggtgaatgatggggctcgactgcttctgcccaatattagctgtgaaggttctgtttttgtcactgtctatgatgacgagccaaccagtgtagtgtcatatgctatgacatcacaagaatatgctgaacatgtcacacataaaatgaatgcaaatactagcttttcagattttactagtagtaatggacttgatggatctctgtcctcacatgaagagctttcaaattttagaggagctcacttcagattatccttcgatgatgatgcatctcctactgatagtacaaagttttctgtcacttgctattttgcaaggcagtttgctgcacttagaaagaaatgttgtccaagtaatagtgattacatacgctcgataagtcgttgtaagcgatggagcgcgcaaggtggaaaaagcaatgtttactttgcaaagacaatggatgagagattcataattaaacaagtcaccaagacagagctggactcttttgtagaatttgctcctcattacttcaggcacttgacagaatcattgacttctagaagccctacttgcctggccaaaatattggggctttatcaggttagtatcaagaattcaaaaggtgggcgtgaggtgaagatggatctgatggtgatggagaacatactcttccaaagatcaatatctagggtgtatgatctgaagggttctgtgcgttcacgttataattctgatgcttctggtcacaacaaagttcttctagactctaatctcatagaagcactacatacaaagcctatttttttggggagtaaggcaaaacaaagattggaaagagctgtctggaatgatacatcatttcttgcgtctttggatgtcatggactactcccttttggtcggtgtcgacgaagagaaaaaagagctggtggttggcatcatcgatttcctgcggcagtacacctgggacaagcagctggagacatgggtgaaggcatcggggatcttagggggccccaagaatgagtctcccaccgtgatttctccaatccagtacaaaaagaggttcaggaaggccatgtcgagcgaaagcatcactcgttcatccttggcaaattttgagcgaaagggtgacagacggctaggtattctttatttgcctgttgcttccgttttttataccaacaggtgacatgcaatagcttagagcagatgtgagaggacctctgacctggtggatggactgtgacattaagcatgatcattgcagtgtccggtcacatcttgagcgcttgatccaatgtaaatttgacggcgagccacggcgggttatttgacgccgagttgcgccgtactgaggaattgtattagaggattggaacactgatgttaattaatagacatgtaacagcgctctcaacacagttgctttagcgtgaatgtgtgtcctgggctcatattgccgactgcacgt

SEQ ID NO: 69040 - DNA, 5528 bp, Zea Mays
ctgtcctgtatctctcgcaaatctcccacccgccccacataataagaaccgccgccgccgccgccgccgccgctcttctccaacctccgtctctccgagcatgcactctgcgttctcgtcctgccgtcctactcgctacgcggcgcggctctgaattggcatctcccgaccccgcctctcgcgcgccgtccccccgtccccgcacctgccgaagctgaaccccggtcccggcggcattgcgcgcgcgctctctctttctctctctcgctggaggcgggaccgcgggagagccgtctcactcagcggcgccgcgggccgctggccctgccgcacccgcgcagggtggttggtcccgtgtcgggtgtggtgaggcgctgacttggacgggacgcaatcagcggacgaaggaagcttcgggcgtggccgcgtcgcttcgcctcgtctcctgctacttgttcggaacttctccatctttccccacagttggttttgatcttagcgtgccgtatcgccctatcggggatggggttgctggagttcgcggtgggtaaggccagatcccttgccgccgccactgacctggagcagcggcacgtgcacaagggcgagctcgcgcggatcgagacgcggcggtgccaggaggcgggccatggcgtgaccacgcccaaggcccaggggccggcttcgcccgtcgggccgcccacgcccccgcgccgcctgaccgaggcgagatctggaggccaagccgatgccggcccgcgctctcatcctcccggctgtgatactaggcgagtggatgaggaggctgctgacgagtcaggggcccagtttgcagcctctgtgactgacttcttacatgacttctcagataccgaatctagtgttagtaactccatgtacagatcaatgaccccaagccccacagggagtcctacttgtgtggtgaggctggatgatgcttcagatcatgatgcaacaacattgactgactcagacgatgcacgtgagctagtcagcgctgctagcatctctggtgaaggagaactcgtcaatggatcaccacatatcgttgattttggtgatgctatttggtgcccaccaccaccagaagatgagagagatgatgttgaatcgaggatatttggatctgatgacgacgacgacgatgctttcttagaacctagttgtttcggtgataataaaatagccagtgggtacggtgcctttggtgcatctcaacaagatggtgttcagaatgatttgctgaagcactttcgggctctagttgcacagttactggaggcggaaggcattagtttttccagtgacgacaattcaaaaagttggcttgagatagtgtcctcgttggcatggcaagctgctaactatgtgaaacccgataccaagaaaggtggcagcatggatcctagtgattacgtgaagattaaatgcatagcatctgggaagccaactgatagcaattttgttagaggaattgtttgctctaagaatgtaagacacaaacggatggtctcagaacacaggagtgccaaattgctcattttaggaggtgcacttgagtatcaaaaagtttcaaataaattggcatccatagggactatactcgaacaggaaaaggagtatcttaaaactgttgtgagcaagatcgagtctaggcatcctaatgtccttctagttgagaaaagcgcctcatcttttgctcaggagctcttagcaaaagatatttctttagttttgaatgtgaagagacctcttttgaacagaatatcaagatgcacaggtggtcagattgcctcatcaattgacaacattgcctcagctaggcttggacaatgtgacttgttcaaggtggagaaagtcccagaacccttattagctgaacatggagaaaaggggtcaattaagactctgatgttctttgaaggctgtgtgaagcacttgggttgcacggttctgttgaggggaacatgtcgggaagatttaaagaagattaagcgtgcaatgcaacttgctgtttttgctgcttatcacctctccttggagacatcattccttgctgatgagggagcaacacttccgaaagttccttcaatatctgtgacaggtgcaccaaatatttctgctagtcctactgatcatggcacttctgatagtcttaaaaatgctgaagagacatatccacaaaattctactatcagccagatttttgaggttatctctgcatcttcaactttattaccactcgctggagtaagccaaggaatcatgcctgaatgtagagcatcaaaatttctagttgatcctctcaactctcaagatccgtcgaacttatgccatccaaatgtttcctgcaatggtgatttaatatctccatgttctgtcagtggttttagagcaacatatgttggcacacaacatggtggttcaaacaagtctttgcaatcttcaattgctgctgatgtctggcgtgatggtgcattaactttgaaacatagccaaccatgtcattcagaaaaccatagtagcaaccctgctgcagggaatacagatgacaaagacaagctttcagctggttacttatctggtactgacaacaatcagagtatcttagtttccctctcaagcacctgcattcccaaaagctttgcatgccagcgttctcatctcgttcggatcaagttttatggtagttttgataagccattagggaggtatcttcgtgaggacttatttgatcaggcatattgctgcccatcttgtaaggagccttcagaatcacatgtgaggtgctatatgcaccaacatggcagcctaacgattagtgtcaggcgccttcagtctcaaaagttgccaggtgaacatgatgggaggatatggatgtggcacagatgcatgaggtgcaagcttaaggatggaatgccaccagcaacacacagagtaatcatgtctgatgcagcttggggcttatcatttggcaagttcctggagctcagcttttcgaaccatatgactgctaacaggattgcaagttgtggccattctctccaaagggattgtcttcgcttttatgggtatggaaatatggcggccgccttccactatagtcccatgattactctgtctgttaaccttccgcccccagtgctagatttcaatactcatgctacacaagattgggtgaaaagagaggctgttgaggtatttcacacaatggacttgctgcacactgaggtatatgatgcacttaacaatcttgagaagagtatcattactgatgatgattcaaccaagacaagcatacagaggcaaatagttgagatgaaagatttgcttaatgtcgaaagaaatgagtatgaggttttgcttcttccagttataatggggagttctcattcattcaaaccaaatattgatattttggagcttaatcgtgttagacgtagtctcctcctagatgctcacacttgggaccgcaggttgtgcggcatagattcactcgaagcagatagccatatttccagaactgatccgtttaatctagagaaaacccaaggaatcaatgaagggagatctgatttgcttcagactgttaggaaacacggaggaacatatgaagaaccatgtccccaacactcttcagaaagcccaaggaaatctctcttgtctacagagggccatctgaatgataaaaaatatgtcatggttgagacagatttgccggttgggctagtggatggtgatgcaggtcttgatttgatcttcaacaaattgaatacatgtgaagaaggacgttgtctatcaaaatatcctagcaagacaggaccagtagagaggttaccttcacttgcatctattttagctgacaaaatagatatggcatggtctggatttggtgaattagactacaatcttccacatggtttgagcaaagcaaatgaaaatacatctttgaacttgtttggcaatccaagttacaagaaggctactggtccagtccgaatccattcatttgatactgtgttgagattacatcagcgagaacaaactggagtaatacctgcttcactccattcagcactgaaatcaattgattcctttagagacttgacaagccttgttaaggatccaatgacaaacatgcggagagccttttctcaaatatctcccaggacaagaggaaacttaaatactgttcttacacgtgctcccaagtatatcacatcagcttctcgtatggtgaatgatggggctcgactgcttctgcccaatattagctgtgaaggttctgtttttgtcactgtctatgatgacgagccaaccagtgtagtgtcatatgctatgacatcacaagaatatgctgaacatgtcacacataaaatgaatgcaaatactagcttttcagattttactagtagtaatggacttgatggatctctgtcctcacatgaagagctttcaaattttagaggagctcacttcagattatccttcgatgatgatgcatctcctactgatagtacaaagttttctgtcacttgctattttgcaaggcagtttgctgcacttagaaagaaatgttgtccaagtaatagtgattacatacgctcgataagtcgttgtaagcgatggagcgcgcaaggtggaaaaagcaatgtttactttgcaaagacaatggatgagagattcataattaaacaagtcaccaagacagagctggactcttttgtagaatttgctcctcattacttcaggcacttgacagaatcattgacttctagaagccctacttgcctggccaaaatattggggctttatcaggttagtatcaagaattcaaaaggtgggcgtgaggtgaagatggatctgatggtgatggagaacatactcttccaaagatcaatatctagggtgtatgatctgaagggttctgtgcgttcacgttataattctgatgcttctggtcacaacaaagttcttctagactctaatctcatagaagcactacatacaaagcctatttttttggggagtaaggcaaaacaaagattggaaagagctgtctggaatgatacatcatttcttgcgtctttggatgtcatggactactcccttttggtcggtgtcgacgaagagaaaaaagagctggtggttggcatcatcgatttcctgcggcagtacacctgggacaagcagctggagacatgggtgaaggcatcggggatcttagggggccccaagaatgagtctcccaccgtgatttctccaatccagtacaaaaagaggttcaggaaggccatgtcgagtgtccggtcacatcttgagcgcttgatccaatgtaaatttgacggcgagccacggcgggttatttgacgccgagttgcgccgtactgaggaattgtattagaggattggaacactgatgttaattaatagacatgtaacagcgctctcaacacagttgctttagcgtgaatgtgtgtcctgggctcatattgccgactgcacgt

SEQ ID NO: 69041 - DNA, 3852 bp, Zea Mays
ccttatacaccctgtgattgcctatgtccacttctccatatcctgcttccactacatcatcgccttcaacctcatcacgaccgcacgcactgactacttccattacatctagtacttggcatcgttgactcggtcatcttaccccactgtattgtccaagttgtatagtagttcagtcatttcttgtaataggggcacctctgagcatctttgtcatgtctgtcagctaggtcgtcatgttcgacttcatttttacagctcctctcaggctatgcacaattttgatctcataaactgatttgtggacctctccacttacaggtgtttcggtttataaatattatttggtgattctagataattcctctcattattaatggattttcccttgctttcgaagtatgatacttttgcaactcttctccacttttttgcttgtgtttccactcaatttggtcgcaccattaaggtcgtcaagtgtgacaatggtcatgagtttgataactcctctcatggggttcaactctgaatgtcttgcccatatacttctccttagaatggcaagactgagcacgtgattcgcaccactaacaatgccgtgtgctccctactatttcaagcattcattcctgctcgctactggattgagagtctccacaccgccaccgacctccttgatcgtcttcctactacgcgtaggggtggtaatggatcacggccctaatacttgtttcacaaaccaacaaggcccttaattttgttagttcaaaattatattgttttatgatccgaccctaacttgattcgatccttaaatttgctaggctaaattaaatggcccgttaccacccctaactacgcgactcacacctcccccccccactttgctctctttgacacaactccctactacactcatattcgtgtttttgggtgtgcatgctaccccaacatttttgctacatatccgctatcccttagctttattaagcctaagtcgaacacatctttgttcatctaccgacatggcagtggtactatgtacctcctctatgttgatgacattgtgctcactgtctgttcttcgagcctcctgcaccggatcatcatcgctcttcagcatgagtttgacatgaaggatttggttccttttcaccattttctagggattgctattgagcgttatccagatggcctctttctctagaagcgacagtacaccatggatcctcgagcgtgttggcatgttggattccaagtcttgtgtgactccggtggacatgcaggccaagctctccgctggtggtgcccctatcaacgaccccactacctaccacagtcttgtcgacgctcttcagtatctcacctttaccatattcgacatcatgtatgttgtctagcaggtctgtctcagacatgcatgatcctcgtgcacttgagtgcggtcaaacagatccttcagtatctttagggcactgttgactgctgaaagggaaataggcctacaccttttcctatatgaattttggtggttgaattgcccaacacaaattaattggactaactagtttgctctagattatgagttctacaggtgccaaaggttcaacacaaaccaataaaagtccaagaaagagttcaaataaaaagagcaaaagacaacccgaaggcagccctggtctggcgcaccggactgtccggtgtgccaccgaacagtgtccggtgcaccagggagatcgactctgaacttgccaccttcgggaatccggggagccgctccgctataattcaccggactgtccggtatgccagcggagcaacggctacttcgcgccaacggtcgtctgcagaggaacagtaaaagtgaacagtgcgcgcctgcgcgcgcagaagtcagagcagcgccagaatgcgcaccggacagtgaatagtgactgtccggtggcccagttgtcagaagctccaacggtcagaacccaacggcctggtgacatggctggcgcaccggactgtccggtgcgccatacgactgaagccctcaccaacggtccttttggtagttggggctataaataccctcaaccaccacacttcaatgcatccaagtttttagccatcaaacctcatacaagagctctaaacttcattccaagacacaaacaaagagatcaaatcctctcccaagtccaaagatcattccaatcaaatagtgactagtgagagagacaattgtgttcatttgagttcttgcgcttggattgcttttcttcttccttctttcttgtttctaactcaattgtaatcaaggcaagagacaccaattgtgtggtggtccttgtggggacttattgtcccgattgattgagaagagaagctcactcggtctaagtgaccgtgtgagagagggaaagggttgaaagagacccggtctttgtgaccacctcaacggggagtaggtttgcaagaaccgaaccttggtcaaacaaatcaccgtgttatccgccttatttacttgtgatttgttttcgccctctctttcgaactcgattatatttctaacgctaaccccgtcttgtagttgtgcttaaactttataaatttcaaatttgcctattcaccccccccctctaggcgactttcaactgcgagctccatatttggcgctcctccacacttgcgttgatcgtttacaccgacactgactaggtcgggtgtctggccacccgtcggtcgatattcgactatgcggtgtacctagaggccaacctcatttcttgatcctccaagcgatagctcgtggtctcccgatccagtgctgaggctgagtaatgggctgacgctaatgggttggctaaggcgagctggttgtgccagcttctccaggagattcacacacccctcaaccgaagcacactggtctactacgacaaccgaaaacgtcagagccatctacctctccatcaacctcgtccaacatcgccacaaaaagcatctcaaaattgacttttcacttcatccatgagcgtgttgctgtcggaggcatccacgccatcacgtcctgacgagcttgcagtttgccgacaattcaccaaggatcttccctccttgttgttctcgaagtttcagtccaatctcaacatctgttgcggcttgagtttcgactatgaaggtgtttagattattgttctgtctaagggttatgtgccttggtccaatccatgtcacccctttcctgatatatacaatactcagcccagacttttgcggctagggttttttattgcccaacaaatttcatgagccaaaaaaggttaactactctatgaaaatgttcatatgtgatttcctagctagtttagttcagataagtagttgcaagagatatgaaggtacaaaatatactgtgatgcataaataactgtgataaaaactacatgaccaaaccttgtcttctgaaagcatcaattcctgcagtgcattgcttactgttggagctttgtatgagatggggaagttactagatccagatatttgaccactagcacaatgagtgcttgcctaattaaaatatttgaatagatgagataagtgaagtcatccaagtgttaaatctgttgaagtaaaggaaattgcaaacatctgagaagccaaaagactattagaaaaaggtaaaaactgtacaaacgttggcacatatgtgattgtacagcagctttagtacagagaactactgctggagacagagatctgaaactaattctcatgtacaaagattcagcctcaaatcattagacaacaaaaaggcacactgcaaagttgactaaccttgtcctctgaaagcatcaattcctg

SEQ ID NO: 69042 - DNA, 2378 bp, Zea Mays
agctcggcgccgatgagatgtgaggcgaggaggggagaggcttctccggtcggtggcgcgggtgcgtgggttcgagggaggggggcagtgccggagcgccggttgatcggcctgcttggcggtggtgccatggctatggaggatgcggtggcggaggcggaccttgcggacccgaacccggacgtgggggacctgttccaccactacgacagcctctacttccagggcgcgctggctgccgccggcttcaccgtccagtggacctcctcgttgccgtttgccagaaggtcttttggatcttgctccttttcaaaacaacaaaataccattatactctcggagtcatttctgaagtatcgctcatgtactgaccggaagaatgcattgcttcattatatgatccacgcaatcatatacgtgaagcatcacaagaaggacagcaatcatggccctgcttttcgtgcttggatggatgccattaactcatgctgtgtagaagatcaccagagaccaaatggtgggtacaatatcaccacccgccatgatttcatcccagaagagccccgtagcttgaagggtattgtatggaaggtcttgtggtgatacacttctgaggttcacaaaccagggtcctccatctgatgcctgctgcattgagaacgatgacatcaatgcatcctgtgggaacatgctttgttattggcacaaccacaagaatgactgttctggtacatatgaaaaaacgatgaagttagaagcaccatctcaaaagaaagttgcaggaggtgctcagttgcttctgactttgccatcagaaatgtccaacattcaagaatccagttcatctatattgcagttagagtggagtactaaatccacagaaccaaatgctgaagacaagcatctttgtctagggagtggcagcaatgggaaacctcagggaagtagctcctcgaagaaagcaggtaagaggaacagtcctgaaatggttggggaaacaagtgttctgcctgctgcggcccaaggaaaacccaatcaaaaccatggattggttgcgatggcgaagcaagcgcctgcgtctgtggaaggctacagtgatgcagaatcaccggggagacatacatcaaagaaagctggcaagcgacataagcctgatgatcttcagaaaagcagtgttctcccttctgtaccccagggaacaacaaaaccaaagcatgcgttggttgcgacagagaataaccctctctcctcagcagagcgccgcaacgatgcaaaatcgccaaaaaccaatacctcgaagaaaccaggagactggcatgagctccagattgctcagaaagcctgttctcagccagctgaccctcacaaaaaactgaagcaagacctgggtgcaccggaaaagaaagaagttttctctttgatgggccccagcaatgagaagttactgggcaggagctcctcaaagaaggcaagcaggcagcatgaccgcgaagacattcaggaaaaaaacaccatcctgccaactgcccctggaatcagacccaaagcatcagcctttgctgcaccagagaagcggcgaaagggaaaatgcaaaaggaagcctgtggaggaaaaggagtacgctgtgatgagtgcgtggctgaactactacgaatcagacaggtcaagtggatcgcccgagccccttgtaaacaaaagaacagagcgaaggagaagagaaagggcaagaattctgacttattcacgatcaaagaagaacaaaactgagccattggccagctccgggacacatgcctctgtcagtagccacaaaatcgagatggcaccgcaagaccatgcagttgttactactggtaaccaggtggcggtggctccagcaactgtacatcaggcgcagccatctgctgattctgctccatgcctggatcttgttccatttcttcagccagcagatccattgacttctccagatcaaagcactgcccgagacatgatagtgatttctgatgacgactgacccttttcgatgatgatatcctctatcacattttggatggttgccgggctaattcagtggatgtggcgagtatgccatactatattagaagtgacatgctgtgcttgttcttactatagagtagtgtctgagggccccaccgaagtcccttaaactctttcgcgaacatgacgcgagaatgcaggtgctgcagcttgaacttgatttcttgaacaaaattcttggagttcagtactctcctgtgcttctgctggtgcttctaaagcctagtgtgcatatgcatgtggtacttgcatgaaagaaacatcaagtagtatccccgaatcgatcggtccggcataaagtcgtccgagacgtttcg

SEQ ID NO: 69043 - DNA, 2469 bp, Zea Mays
ctgcatgtaacctactaaagccctgcctagtgctagtgcctactcacactcgaagctcaaatccgtctccgtctctccccctcgtaagctcggcgccgatgagatgtgaggcgaggaggggagaggcttctccggtcggtggcgcgggtgcgtgggttcgagggaggggggcagtgccggagcgccggttgatcggcctgcttggcggtggtgccatggctatggaggatgcggtggcggaggcggaccttgcggacccgaacccggacgtgggggacctgttccaccactacgacagcctctacttccagggcgcgctggctgccgccggcttcaccgtccagtggacctcctcgttgccgtttgccagaaggtcttttggatcttgctccttttcaaaacaacaaaataccattatactctcggagtcatttctgaagtatcgctcatgtactgaccggaagaatgcattgcttcattatatgatccacgcaatcatatacgtgaagcatcacaagaaggacagcaatcatggccctgcttttcgtgcttggatggatgccattaactcatgctgtgtagaagatcaccagagaccaaatggtgggtacaatatcaccacccgccatgatttcatcccagaagagccccgtagcttgaagggtattgtatggaagtgtaggtcttgtggtgatacacttctgaggttcacaaaccagggtcctccatctgatgcctgctgcattgagaacgatgacatcaatgcatcctgtgggaacatgctttgttattggcacaaccacaagaatgactgttctggtacatatgaaaaaacgatgaagttagaagcaccatctcaaaagaaagttgcaggaggtgctcagttgcttctgactttgccatcagaaatgtccaacattcaagaatccagttcatctatattgcagttagagtggagtactaaatccacagaaccaaatgctgaagacaagcatctttgtctagggagtggcagcaatgggaaacctcagggaagtagctcctcgaagaaagcaggtaagaggaacagtcctgaaatggttggggaaacaagtgttctgcctgctgcggcccaaggaaaacccaatcaaaaccatggattggttgcgatggcgaagcaagcgcctgcgtctgtggaaggctacagtgatgcagaatcaccggggagacatacatcaaagaaagctggcaagcgacataagcctgatgatcttcagaaaagcagtgttctcccttctgtaccccagggaacaacaaaaccaaagcatgcgttggttgcgacagagaataaccctctctcctcagcagagcgccgcaacgatgcaaaatcgccaaaaaccaatacctcgaagaaaccaggagactggcatgagctccagattgctcagaaagcctgttctcagccagctgaccctcacaaaaaactgaagcaagacctgggtgcaccggaaaagaaagaagttttctctttgatgggccccagcaatgagaagttactgggcaggagctcctcaaagaaggcaagcaggcagcatgaccgcgaagacattcaggaaaaaaacaccatcctgccaactgcccctggaatcagacccaaagcatcagcctttgctgcaccagagaagcggcgaaagggaaaatgcaaaaggaagcctgtggaggaaaaggagtacgctgtgatgagtgcgtggctgaactactacgaatcagacaggtcaagtggatcgcccgagccccttgtaaacaaaagaacagagcgaaggagaagagaaagggcaagaattctgacttattcacgatcaaagaagaacaaaactgagccattggccagctccgggacacatgcctctgtcagtagccacaaaatcgagatggcaccgcaagaccatgcagttgttactactggtaaccaggtggcggtggctccagcaactgtacatcaggcgcagccatctgctgattctgctccatgcctggatcttgttccatttcttcagccagcagatccattgacttctccagatcaaagcactgcccgagacatgatagtgatttctgatgacgactgacccttttcgatgatgatatcctctatcacattttggatggttgccgggctaattcagtggatgtggcgagtatgccatactatattagaagtgacatgctgtgcttgttcttactatagagtagtgtctgagggccccaccgaagtcccttaaactctttcgcgaacatgacgcgagaatgcaggtgctgcagcttgaacttgatttcttgaacaaaattcttggagttcagtactctcctgtgcttctgctggtgcttctaaagcctagtgtgcatatgcatgtggtacttgcatgaaagaaacatcaagtagtatccccgaatcgatcggtccggcataaagtcgtccgagacgtttcg

SEQ ID NO: 69044 - DNA, 369 bp, Zea Mays
atgaggccacatccacgtttttcctcctcttcgaaattcttggctccgattctgatgtcaaaccagaacccaatgtcgatggtgttgaacctgacatcaaggaattctttggatttctctttcgtgatcgcactgcaacaacttcctcctcgtcttcctcatccagctccacctcctcagaagcatcctccacaacagtatccctcttccagtcctcgtcctcagtggaatcccctgcgccatcctctgcctcagccggtgattttgccaccgagatatcagacatccgccggagacgccgcagcttcctcgccggcagcaaggtcgactcctcaacgacggcggcccactcgaacttctccttcctga

SEQ ID NO: 69045 - DNA, 326 bp, Zea Mays
aataatgtacctagtttatgcacaacagaacaataatgttgcaactaagtatttagtgtgtaccttttcaagtttatcagcacacatcattaacaccttgaactacattatagactacactagattacacggtggtgatagtggtagtaggtcacactatttgaaaaagaaatcgctgaatcaaattctgaagaatgcctttatttttttattttttttgttattagtagtaggtagtaaggtacacattatttgtaaaacaagtagtagatatatattagcgaatcaaatgtatgcaatagtagtagctcagttatacatttaag

SEQ ID NO: 69046 - DNA, 1623 bp, Zea Mays
cccgggcccacactgcagtggctggccgccttcacggcttcacctaacgatctggttcgtctcccacctcgcgccgctcgccggattccgccgccctgcccgcgttctcctagacccaacccaaccgagtcctgaaaggggggtcatttgttcagtgatcatcaaccagtgcaccatggcgtctctgattcctccctgcctctccgtccccaccgccccgggacgcgcgcgccttgctgctccgggggcgccgcggcggaggaggatggcggtggtgagggcgaagattcgggagatattcatgccggcgctgagctcaacgatgatggagggcaagatcgtctcctggacggccgccgagggggaccgcgtgggcaagggcgacccagtggtggtcgtggagtccgacaaggccgatatggatgtggagacgttccacgatggcatagtcgcagtcgtcctcgtcccggccggtgggaccgcccccgtaggcgcccctatcgccctcctcgctgaatcagaggaggaggtcgcgctggcgcgggcgcgcgctcaggccctctcgcagggacaaagccaggcaccctctcctccccatgccgccgccgccctggggccacctcctccagcgcctgtggcgcctccagcgacaaagggcatcgcgacaccttacgccaagaaactcgcgaagcagcacagggtggacatcgccggggttgtcggcaccgggccacacggccgcgtcacggcggctgacgtcgaggcagctgctggcatcaagcacaagcgaccccctccacctccaccccctgcttctgttgacgctgcgccactagtgcccgcaagtgcggtgctgccaccagtacccggtggcacggtggtgccgttcacgacaatgcaggcggcggtgagcaagaacatggtggagagcttgagggtaccgacattccgggttagctactccatgatcactgacaagcttgacgcactctatgagaaggttaagtcaaagggggttacaaagacagtgctgctggtgaaggcggcagctgtggcgctcacccaacaccctgtagtaaatgctagctgcagagatggaaagagcttctcctacaacaatgatgtcaacattggagtggctgttgcactcgagggtggccttcttactccagtattagaggatgctgataagatggatatatatctgcttgcacgaaagtggagagtgctgctcaagaaggcacgcatgaagcagctgcaaccaaatgaatacaactctgggacgtttacactatccaatttgggtatgtttggggtggataaattcgacgcaatccttcctgctggtcagggggctatcatggctgttggagcgtcaagacctactgtagtggctgataaggatggtttctttagtatcaagagtgaaatgctggtgaatgttactgctgatcacaggattatctatggtgctgatttggcagcattcctgcaaacatttgcaaagattgttgaggatcctgaatgcctcacattgattcctaaattacaagaaggtaaaagatgccaggcaggcatatggttacgtcctctgaggcgggcctgccttggtgaagagtgaag

SEQ ID NO: 69047 - DNA, 1262 bp, Zea Mays
ggccgccttcacggcttcacctaacgatctggttcgtctcccacctcgcgccgctcgccggattccgccgccctgcccgcgttctcctagacccaacccaaccgagtcctgaaaggggggtcatttgttcagtgatcatcaaccagtgcaccatggcgtctctgattcctccctgcctctccgtccccaccgccccgggacgcgcgcgccttgctgctccgggggcgccgcggcggaggaggatggcggtggtgagggcgaagattcgggagatattcatgccggcgctgagctcaacgatgatggagggcaagatcgtctcctggacggccgccgagggggaccgcgtgggcaagggcgacccagtggtggtcgtggagtccgacaaggccgatatggtggagagcttgagggtaccgacattccgggttagctactccatgatcactgacaagcttgacgcactctatgagaaggttaagtcaaagggggttacaaagacagtgctgctggtgaaggcggcagctgtggcgctcacccaacaccctgtagtaaatgctagctgcagagatggaaagagcttctcctacaacaatgatgtcaacattggagtggctgttgcactcgagggtggccttcttactccagtattagaggatgctgataagatggatatatatctgcttgcacgaaagtggagagtgctgctcaagaaggcacgcatgaagcagctgcaaccaaatgaatacaactctgggacgtttacactatccaatttgggtatgtttggggtggataaattcgacgcaatccttcctgctggtcagggggctatcatggctgttggagcgtcaagacctactgtagtggctgataaggatggtttctttagtatcaagagtgaaatgctggtgaatgttactgctgatcacaggattatctatggtgctgatttggcagcattcctgcaaacatttgcaaagattgttgaggatcctgaatgcctcacattgtaagggaagcttcatacaagttctcaatttttttttattcacaattggaagacaatgccaatatagataataaaaagacacttttcaatgttatatctccacatacagatttttgtgtacagtttatacactgatcgttttcgctccgtgtgtttatctattcttggagggagaccctgattcaagaaaccatgaattgtgtaaacactttggggcattaataatgatagaggctgcttcctggttcct

SEQ ID NO: 69048 - DNA, 2072 bp, Zea Mays
cccgaaaagccagaaacgagcggggagaaacgagggaacgacccaccgtcagatcacacgcactgctcacgctcgcacatcgcacgttcatggcacggggagtaactggcgacgccgcgggaagtagcgccgccgacgagcgggggaggggggaggccgcgccgccgcagtctgcaacgtggcagcgggtgcggagggccgggcagggggtggcggcgcacgcgctgttgctctgcttcaccgcgctcctcgcgctcaagctcgacggcgtcctctcactctcctggtgggcgcttttcatccctgtatggttgttccatgctgttgcggctcgatgtctattctcattaccggctccatcacctgaaagttgtcaacgggttccattccattccattgtcgcaacaccgttactagttgcctttgagctgcttctctgtgtttatctagaaggcctcaaccacaatggtcatgtggagcctttcatcatagatttaaagcttgtgttccttccactcttggctttggaaatcattacactggttgacaacttcaggatgtgtggtgctttaatgcctggacatggagaaactataaccgaagaagcaatttgggagaggcttccttacttctgggttgcaatttccatggtatttctactagcggctacttcactcatgcttctcaagtcattggaggtcctgtattgataattcctatagtagtttttcaagttctactttgtatgcgcttagagggtactccatctaatgcacgttttatcccaattcgagctatttttctacccataattttgctgcaagtggctgctgtatcttttgctgtttggagattgttcagcaggcttcttactaaacttaaagatggaactattagtcaagcacatatttctgtgtcttccaaagtcgatgagctatttatgatgatacagtgtggttcaaggctccttcactggtggtctattgatgaagatagcaaagaggaacaggctcacttatgctatgcaaataatattggctatagtaccttttgcagttatccaccagaggtggtaaaagagatgccaaaggaagttcttgtcaaagaggtacagagacttcaactggccttggaagagcaaactgaaatggcaaatcatagccaacagcagtgtgataggctaagaaatgaacggatcttgtgtcgaatttgctttgaaagagacatatgcattgttatgcttccctgccgccatcatgttctctgcgagccatgctctaacaagtgtcagtcatgcccaatttgccgattgaccgttgagggcaggctatttgtttatgatgcagtgatgtcatccaatccatcatgttacgcagtttaaaagtgcacatgttgacagtatttgtagggtacctacttctggtgttgacaaagatggcccacacctgtttcctggcagtgaatgacaggttgtgaaattcttggtatgaaattaggaagaaagctaagaaagtcttctattatcagattgcagcacaaacaaaacaaaagccacgatgcacatccgtctccaatgatatgacacagaggaagacgaagtatatggactcttgctcatatatatgcaagcgtgaataaccacttaaataactgagtttgttctctagccatatatgacatctggccagtttcgattagtttgcaaacgagttctggttaacagttggatggataaccttgcaaacatgtggagcttcaggttgtttagaagttatttggagttcagcaaattggcaatatcccactgttcaactttgatgattccatgaattcacacaactgaggtaccaccttttccagtgatgttcacctgtaacggcttataaatacatctgtacagatgcgataataatgtctatcaattttatctccaaggcataagagcattgagctttctcctagtcatgtgaaacactgagatagcttgagcatatctattgtatgcagtggcggaggatgggcaaaaaataaggtgttgctaatgcaaccacacatgaaaattcacaacataa

SEQ ID NO: 69049 - DNA, 2071 bp, Zea Mays
cccgaaaagccagaaacgagcggggagaaacgagggaacgacccaccgtcagatcacacgcactgctcacgctcgcacatcgcacgttcatggcacggggagtaactggcgacgccgcgggaagtagcgccgccgacgagcgggggaggggggaggccgcgccgccgcagtctgcaacgtggcagcgggtgcggagggccgggcagggggtggcggcgcacgcgctgttgctctgcttcaccgcgctcctcgcgctcaagctcgacggcgtcctctcactctcctggtgggcgcttttcatccctgtatggttgttccatgctgttgcggctcgatgtctattctcattaccggctccatcacctgaaagttgtcaacgggttccattccattccattgtcgcaacaccgttactagttgcctttgagctgcttctctgtgtttatctagaaggcctcaaccacaatggtcatgtggagcctttcatcatagatttaaagcttgtgttccttccactcttggctttggaaatcattacactggttgacaacttcaggatgtgtggtgctttaatgcctggacatggagaaactataaccgaagaagcaatttgggagaggcttccttacttctgggttgcaatttccatggtatttctactagcggctacttcactcatgcttctcaagttatgtggtgatgcagttactctggggtggtgggatttatttattaattttgggatttcccagtgctttgcttttctagtatgcataagatggtcaaatccaatggtcattggaggtcctgtattgataattcctatagtagtttttcaagttctactttgtatgcgcttagaggcttcttactaaacttaaagatggaactattagtcaagcacatatttctgtgtcttccaaagtcgatgagctatttatgatgatacagtgtggttcaaggctccttcactggtggtctattgatgaagatagcaaagaggaacaggctcacttatgctatgcaaataatattggctatagtaccttttgcagttatccaccagaggtggtaaaagagatgccaaaggaagttcttgtcaaagaggtacagagacttcaactggccttggaagagcaaactgaaatggcaaatcatagccaacagcagtgtgataggctaagaaatgaacggatcttgtgtcgaatttgctttgaaagagacatatgcattgttatgcttccctgccgccatcatgttctctgcgagccatgctctaacaagtgtcagtcatgcccaatttgccgattgaccgttgagggcaggctatttgtttatgatgcagtgatgtcatccaatccatcatgttacgcagtttaaaagtgcacatgttgacagtatttgtagggtacctacttctggtgttgacaaagatggcccacacctgtttcctggcagtgaatgacaggttgtgaaattcttggtatgaaattaggaagaaagctaagaaagtcttctattatcagattgcagcacaaacaaaacaaaagccacgatgcacatccgtctccaatgatatgacacagaggaagacgaagtatatggactcttgctcatatatatgcaagcgtgaataaccacttaaataactgagtttgttctctagccatatatgacatctggccagtttcgattagtttgcaaacgagttctggttaacagttggatggataaccttgcaaacatgtggagcttcaggttgtttagaagttatttggagttcagcaaattggcaatatcccactgttcaactttgatgattccatgaattcacacaactgaggtaccaccttttccagtgatgttcacctgtaacggcttataaatacatctgtacagatgcgataataatgtctatcaattttatctccaaggcataagagcattgagctttctcctagtcatgtgaaacactgagatagcttgagcatatctattgtatgcagtggcggaggatgggcaaaaaataaggtgttgctaatgcaaccacacatgaaaattcacaacataa

SEQ ID NO: 69050 - DNA, 2172 bp, Zea Mays
cccgaaaagccagaaacgagcggggagaaacgagggaacgacccaccgtcagatcacacgcactgctcacgctcgcacatcgcacgttcatggcacggggagtaactggcgacgccgcgggaagtagcgccgccgacgagcgggggaggggggaggccgcgccgccgcagtctgcaacgtggcagcgggtgcggagggccgggcagggggtggcggcgcacgcgctgttgctctgcttcaccgcgctcctcgcgctcaagctcgacggcgtcctctcactctcctggtgggcgcttttcatccctgtatggttgttccatgctgttgcggctcgatgtctattctcattaccggctccatcacctgaaagttgtcaacgggttccattccattccattgtcgcaacaccgttactagttgcctttgagctgcttctctgtgtttatctagaaggcctcaaccacaatggtcatgtggagcctttcatcatagatttaaagcttgtgttccttccactcttggctttggaaatcattacactggttgacaacttcaggatgtgtggtgctttaatgcctggacatggagaaactataaccgaagaagcaatttgggagaggcttccttacttctgggttgcaatttccatggtatttctactagcggctacttcactcatgcttctcaagttatgtggtgatgcagttactctggggtggtgggatttatttattaattttgggatttcccagtgctttgcttttctagtatgcataagatggtcaaatccaatggtcattggaggtcctgtattgataattcctatagtagtttttcaagttctactttgtatgcgcttagagggtactccatctaatgcacgttttatcccaattcgagctatttttctacccataattttgctgcaagtggctgctgtatcttttgctgtttggagattgttcagcaggcttcttactaaacttaaagatggaactattagtcaagcacatatttctgtgtcttccaaagtcgatgagctatttatgatgatacagtgtggttcaaggctccttcactggtggtctattgatgaagatagcaaagaggaacaggctcacttatgctatgcaaataatattggctatagtaccttttgcagttatccaccagaggtggtaaaagagatgccaaaggaagttcttgtcaaagagagacttcaactggccttggaagagcaaactgaaatggcaaatcatagccaacagcagtgtgataggctaagaaatgaacggatcttgtgtcgaatttgctttgaaagagacatatgcattgttatgcttccctgccgccatcatgttctctgcgagccatgctctaacaagtgtcagtcatgcccaatttgccgattgaccgttgagggcaggctatttgtttatgatgcagtgatgtcatccaatccatcatgttacgcagtttaaaagtgcacatgttgacagtatttgtagggtacctacttctggtgttgacaaagatggcccacacctgtttcctggcagtgaatgacaggttgtgaaattcttggtatgaaattaggaagaaagctaagaaagtcttctattatcagattgcagcacaaacaaaacaaaagccacgatgcacatccgtctccaatgatatgacacagaggaagacgaagtatatggactcttgctcatatatatgcaagcgtgaataaccacttaaataactgagtttgttctctagccatatatgacatctggccagtttcgattagtttgcaaacgagttctggttaacagttggatggataaccttgcaaacatgtggagcttcaggttgtttagaagttatttggagttcagcaaattggcaatatcccactgttcaactttgatgattccatgaattcacacaactgaggtaccaccttttccagtgatgttcacctgtaacggcttataaatacatctgtacagatgcgataataatgtctatcaattttatctccaaggcataagagcattgagctttctcctagtcatgtgaaacactgagatagcttgagcatatctattgtatgcagtggcggaggatgggcaaaaaataaggtgttgctaatgcaaccacacatgaaaattcacaacataa

SEQ ID NO: 69051 - DNA, 1449 bp, Zea Mays
  misc_feature (1448)..(1449): n is a, c, g, or t
caggtattcacgcgcgccgaggctgccgttccccatcgcgacccttgcaccgggtccacgctgaccctcttcacgggggcggcgaaagatctcagccgcgacgggttcgagcgccggcgagcgctcgcccacctgggcctataaactggccccggctcctcttctcgcgtcgcagagcccagcctcgggatgacgtggcgtatcgcgacaccgccacagctcactcaaccgcgcgggtctccaacgaaccccttgtagaagcttccaaaccctagcgcaggaggaagaggagcgtggaggagctccaggaatggcgaaggcgaggaagcagaagggtgacggtagcggtacgggcggaggcgccaccgttctccaccagaaactctgcctctccatcgacatggagaaccagctgatctacgggtacactgagataaaagctcttctagctgaaaacgacacatttgctctacatgctgacaatatgacgatcaggagcattctggtggatggtgaaactgttgagttcgactattcccctcattggaaaaatgaaactgatcaacctaattggtcttcaatatcatgtttgaacactgttgctgatgctgcatgttcaacatatacttcgtctctaaatcgagaagctacaccaaatcttattgtgtcatctgagagatcaatcaagtcaatgattgagcagcagttagatgaaaacagtgaaaaatatgaagaaaatagtggaaggcttgaaaaacatggtggaaagaccatccaaacttcctatgatcaaattgttaatggctgcaatggttctgcagtggaagagggaatagaaaattctgcagtggaagaagggaaaaaaaaggaaaaggaaaaagagaaggaagagaaaaatggaaatgagaagagcaaggaaaatggaaatgagactgaaaatgaaaaggtgaagaacataaaactggttcacatagattatattttggagaaggctgaaactggcattcactttgttggcaatgtcatgcatagcagtaatcagataaggcgggcacactgttggtttccttgtgttgatactgccacacaacgctgtccatttgacttagaatttacagtcagcacagatttcatcgctgtcagcaacggtgacttgctttaccaggtcttaagtaaggaagatccttcaaaaaaaacctatgtgtataaattgaacactccagttagtgcacagtggatatccttggttgttggtccacttgaaattctccttgacagaaatgacataaatgtgtcacacatctgtttatctcctgccttgtcaaagcttcagaacactattgcatttttccacgatgcatacagactatcttgctgcaccgtttcccttaggtttatacaagcagatttttcttccatctgaaatgacagtattaccggcaagcttnn

SEQ ID NO: 69052 - DNA, 862 bp, Zea Mays
acggctgccgtggagtaaaccacaacgcaggacaagccatcgccccgatggacaccgccgcctcatgccgcctcctctcgccggcctcctcctctccgcccccctgtccgaacgccaagttcaggctcctctgcctcctccatgacaagtccgcgtcgccaacgacgtcggtgcagatgcagagctcacagtcacagttgcagaggctggcgacggtgttgcagtgcggagccgtctgggcagctgttgaggcgccggcggcgctggcggtgaccggcgaggaggacatcgacctgctagggatcctgccgccgctcgcggtgttcgccttcttctacttcctcgtcgctcctccggtgatcatgaactggatgaggctgaggtggtacaagcgcgaattcgtggagacgtacctgcagttcatgttcacctacctcttctacccagcgatgatgttctgggcgccattcgtcaacttcaggaagttcccgagggatcccaccatgaagtacccttggtccaagccgaaggagggcacgccgctgttcaaagacagatacccgcctatagactcctagatacagccttgatgcttgtactcggctcgtcgcgcgccacgggcatgcaggcagcagcgaaaaggccggtttcttcacctaaaaatctgtgtaaaacattactatatatcacacagtctaataatacccgtgctagtacatgggaaaggttactatcactaagattttaccatgatctatagttctatacctcacaacattcatgtaatcatgtccgttaaaaactatgttcaccagtacaaagaagctctataatgacggtcgtgaacatattttcactgacg

SEQ ID NO: 69053 - DNA, 446 bp, Zea Mays
tccagataagacgcgcgccacggctgccgtggagtaaaccacaacgcaggacaagccatcgccccgatggacaccgccgcctcatgccgcctcctctcgccggcctcctcctctccgcccccctgtccgaagcagctacccaagcggcgaccgaccttcgcggcctcgcagcagcagtcgcccagctccagcgccaagttcaggctcctctgcctcctccatgacaagtccgcgtcgccaacgacgtcggtgcagatgcagagctcacagtcacagttgcagaggctggcgacggtgttgcagtgcggagccgtctgggcagctgttgaggcgccggcggcgctggcggtgaccggcgaggaggacatcgacctgctagggatcctgccgccgctcgcggtgttcgccttcttctacttcctcgtcgctccttgtgcatgtgtgtg

SEQ ID NO: 69054 - DNA, 4074 bp, Zea Mays
gtcgtccaaaccactacctccgtcgcaggcgcaggccgcgcagtgcagggaatcatggccacgctctaccagcaccacctcctccccctgcagcgtctccccaactccccccgccgaccgcctcctcgcctccgcctccccacgaagccatcgaggcaccacaatcggcagctacgaccccgcgcggcagccagcacaacggccacagtgtctgcgatggaggacttccgccggtggctcgcctctcatggcgcgggcgatggaggaaaagccattccagccgccgtgccggagggtctcggcctcgtggcggcgcgcgatctgccccgcggggaggtggtcgcggaggtgcctaagaagctctggatggacgccgacgccgtcgcggcctccgacatcggccgcgcctgcggcggcggagggggcctccggccctgggtcgccgtcgcgctgctgctcctcagtgaggtcgcgcgcggggcggactcgccgtgggcgccctacctggccatcctcccgcgccagaccgactccaccatcttctggtctgaagaagagctcctagagatacaaggaacacagttgctaagcaccacagtgggcgtgaaagagtatgtgcaaagcgaatttgatagtgttcaagcagagatcataagcacaaataaggacctgttcccaggtagcataacatttgatgatttcctatgggcatttggaatgctcagatcaagggtgtttccagagctccgcggagataagcttgctctcataccatttgctgatttggttaatcacagtcctaatatcacctcagaagggtcaagttgggagatcaaaggaaagggtctttttggtagggaactcatgttctccttgcgaacaccagtgaatgttaaatctggacagcagatatatatccagtacgatctggacaagagtaatgctgaactggcactagactatgggtttgtggaatcaaatccatcaagggattcgtttactgtgaccctggaaatctctgaatctgatccattttatggagacaagcttgacattgcagaggcaaacggactgggggaaaccgcatactttgatgatgaagaactatcgggaagagagaatttgcagccaagacttgcaattgcaattggagtaagggccggtgaaaagaaagtactccagcacattgatggtatttttaaacagagggaggaggaattagatggccttgagtactaccaggaaagaagactcaaagatcttggtttagtcagtgacaatggtgaaattattttttgggagtagtagatatttgtttctagtatagtagtgctatttgtccataatgctaatgaaaggaatgcattctggcactgttaacaagaaatgcatggtaaatgtcatgcacacttctgtgacataatcacatagcaggtaaaaatgggcaaaataaatcatcacccacatttaaaagaatacatgatcatcactgatagtcgtatcaggtgaacagttaaattgacattcacctaactatagattggacgtcctctctagtgcatatgccaattgccaacagacttaaacctgtaaaatatctataaggccttttttattgcgcatgggttggctagggatatttttagttcaattctctggcaatccctctcaatccacatcagaaccagaaaggccacagtaaatctctgcaagtgcagcatatgttgcatacttgcttccacatgtacattcttccaggtgcgtttgcagatgggcttgtgcacatgtcatttgcaatggtttacattcaaccctcatcacagccatctatctgctccagttcctgttaatcagcgttgttgctgatcatattacagtactcgttttgttcagagcccgtaccacaaaatggcggcaattaaaaatcaaatccaatggcttcaaattttcatttgccttgagaacaaggtcaataagcagagggctttccaaataacgatcttacaatggtcgcacagatgtaacagattggtctaccatattgatgactgagtttgactaaaacgttccacaacctgtgaactggcttttgctctagaaatctgaagtatgtagtcaaaatccatttcttaacttacaacagtttggaggtcattcagtggtgcccatgaccagatctcagggcattctatcttgtaccttgttggtttaacaccaatcttcatcatatcagcatagagcatcatggcattcaagacatagccaagcatgcactgccctcgtatcagtagtgtataggtaaagctatcagggatcatacctgattttctcatgtaggagaaaagcttgccagcttcgcagtgttgaccatctaagtacaggccatatatcaaggtcatatatatcacactgtttggaattaaacattcttcctcaattgtaaagtttgagaagacagaatgaatgtcactgcacttcaaccctgagtactccatcacaaacctgaccgcttcctgaaccctattctctctgcacagaccatcgacaagaactgacactgtgatagcgttaggtgaaataccattctctatcatttccttgtgtaaacgaaaagcagcatctatgccaccattcttggcatggccatgaataagagcagtgtatgttaccacattaggctcaatccctttagccaccatctcagtgtatatagccattgctatttgcatcttccctcgttttgaatgcccatctatcaaggaggagtatgacaccacattgggctcaattccgacctcagtcattctagtgcatgttgctagcgcttcctccaaattcccaatcctgcagtactcatcaatcagtgcattgtaagcagctgcattcagattaacaccatcttcctgcacaccttgaagaaacctgtccgctacatgcatttgccctccatcacaaaggcctctcacaacaatgctgcaggtgaactcgtctgggcacaaacctaagcgagtcatctcctgataaagtgccaatgcttcttgtgcatttccagaccgaaaagctccatccatcaaactgttgtacacaggaacggtaggagcaaccccaaacctgggcatctcaagaaacataccttttgcttcactgaacctcttcgctttacagaaaccgtcaatcagggttgtaaagataacagcatttggattcaggccactcttcagcaattcctggtacaacacaactgcactgttgacatcatctctctgacagtgaccgctcatcagcacattgtatgtatactgattaggctgcatccccgcttccttcatagcgtcaaacaaccgctcagcatcgccaatgcatccctcttcacaaagtgcacatatcatcgtcgtatatgtgaccacatttgggtcaatctgctgtgccaccatctgatcccacacctcctgagccttggccacagtaccctggaaccggcatgcattgataagagtattgtacgtgaccacactgggcaccaacccccgtctaagcatttcgtcgaacagctcccaggcgcacccaggcctgcgtgctttcacgagcccatccaggaccgcgttgcacgccggaagcgccggtagcgtccttaagcgccggaacacgtacaaagcctcgtcgagcagccccatctgagagagggcgatgacgagcacgccgagggcgggggcaggggtggtggaggtggaggagagagcagtgaatgcggcgccggcgccggcggctgtggcagcagagctccggccggggaaggaacgggagacctggacgagggatttcgtcaaacggatggcttgcgcgaagttcttggccgcgaccgtgccgtgaacggcggcggcgaggcccgcggcgcggttgcgggacgaaggtgcaatggcagcggcagcggcggggccggaggcggagagactgtgacggctgcagagatgatggtgcggggcgttagggcggcggcgggagaagaggaggcggacagacgtggagggcggcggcataggggcattggggcagcggcaatctgccatatttgac

SEQ ID NO: 69055 - DNA, 1558 bp, Zea Mays
atcggccgtatatggccttctacatcaaggccctcgtgcgtcgcgtccagatatctatctttgtggtcgtggtcctcccgtcgtcgtcgactcgtcgtcgtcgttgctccgatgggcaaggactcgaagccgaaggacgccaaggggaagggcaagcaggcggccggctcctctggcggcgacgacggcggcggcaagggaggcaagggcaagggcaagggcaagggcggcaagtccgctgacggactcggcacttgcacctacgtcaaagctaggcacgtattgtgtgagaagcaggggaagatcaatgaagcttataagaagttgcaggatggatggctgaataatggggacaaagttcctcctgctgagtttgctaagagaatggatgctgtgtatgggcagttactagttaaagacggttgctttagctggcatatgaataatgcatctatgtgtattgactatcgagaaaaaggttttgtatgattttgttgcagctggcaaggcttctggtagcttagtcttagaaattagtacttggctgtttgcttttggtttagcctttttctgacagggaactggtctgggtactactcgccaaaggaccatatatcataattggaaaggagcaaggcaagctgtagggaagatcactgcacaattatttttatattatcgttcctataaggttttgagaatctgtggttaagttgtattgtaaagctagttagtagcaaaattgtttataaggctatttgagctcttatatcttcatacacatttaatttttcgcagcttgtgaacattgggaagcccaattaaatatttgaatctgcatagagtattggaaatagtcaatagtggtgaacttttgaatgattcagttttgagactctggttggagcatgtgtagctactatttagtggggtgcatgtgacatcaaatttcgattgttgacctcatatatgttactggacttcaaaatttgttcttccattttcaatctgactaactacttcgtcgaagtttttctcatattttttgtgccattattagataccatgatgataatagatcctgactttattttttgtactacaggtagcacaagagtattctgaatgcccatcagggaagaaaggtggagatcttggttggttcccgcgtggcaagatggctggtcctttccaggaggttgctttcaacacacctgagggaactgttagcgcaccattcaagtccacgcacgggtatcactttatcctctgcgaaggaaggaagaactgatctggaaatgtcggttggggagactgcatcatcaggttgtatgagacgcaatgcaaactactcaccttctctaataagcgctggacatgtgtactttgtgttgggctattcgcattctgttccaaacaagttgccaaaacaaaagaatgtgtgattcgctgtaattaacatattgtactgataatctgatatggcatacctatctgggtcagttaacaggtgggttttagcataccaaaatgacagtacatcatacaaaaaaatctt

SEQ ID NO: 69056 - DNA, 662 bp, Zea Mays
aagagacctttgctccagcaaattaccaaaactcatcctgatttaggagagggagaggtctcccctttatttaggagagttggtggtggatttaggagatctcctaaaatatagggataggatatgtgataagagatctactgcagctgttgccttcctatttgatggatagggagagtataggagatctggtggagatgctctaacacgcctcacatatccaggtatatggtggagaagccaggatctctagcttgcgcaaactatttccgttgatggaggacaagaggagccttgcatctgaagatgaacttgctaatgttgaagggaaggcttctgttctagcagctcttgactattatatcagcatgcatagcgacattttcatatctgcatctcctggaaacatgcacaatgctttggtggctcaccgaagctatgagaacttgaagaccataaggccaaacatggcactgcttgggcgcacctttgcgaataagagcatggagtggccagagtttcagcaggttgtacaggcaggacacaaaggaagatacgggcaaatccggttgagaaaggcaacgcaatccatctacacttatcctgcacctgacttgccgaactatgtgcttggagcgaaactgaccctgttcgaggtttag

SEQ ID NO: 69057 - DNA, 1512 bp, Zea Mays
cgtactccgtagacacggactcctggattcagagcgggagggcagagagggccggatggcgggctggcggcgatgctggtgcctggagtggaatgcccctaagccaatgcatccttctcttttgaatgaggccttgcgatggacagctacggacaaaagaaagatctatggtcacccttgccatatcaggggtggaaaccatgcttaacgccatcagtttctcacaaattacctctggaaccaagtggatacatccaagtatttcttgatggtggattgaaccaacaaagaatggggatatgtgatgccattgcagttgcaaagattcttaatgctactcttgtgatcccacatcttgaagtaaaccctgtttggaaggattcaagctcatttgaagaaatttttgatgtggatcactttatcaactccctaaaagatgaagtttccattatcaaagtgcttccaaaagaattttcttggagcacaagagagtactatggcacaggcatccgtgctacaagaataaaaactgcacctcttcatgcctcagcaaattggtatttggagaatgtcagtcctatcctgcaaagctatgggattgttgcgatcgctcccttttctcaccgccttgcatttgatgatttgcctgtggatcttcaacgcttgcgttgtaaagttaacttccaagctctggtcttccgttctcacattatctcacttggagaaacacttgtgaagcgcttgaggtctccggtccgggttcattccagtaaatctatccatcaagttgtaggagacacaaatcaagctgaaaaatatgcagttttgcatctccgttttgataaggatatggctgcacattctgcatgtgactttggaggtggcagagctgaacagctagctcttgctaagtacaggcaagttatatggcaaggaagggtattaaattcacagctaactgatgaggagcttcggaacacaggacgctgcccattgaccccagaagagattgggctgttactggtagcccttggctttgacaacagaactcgactctatcttgcatctcacaaggtatatggtggagaagccaggatctctagcttgcgcaaactatttccgttgatggaggacaagaggagccttgcatctgaagatgaacttgctaatgttgaagggaaggcttctgttctagcagctcttgactattatatcagcatgcatagcgacattttcatatctgcatctcctggaaacatgcacaatgctttggtggctcaccgaagctatgagaacttgaagaccataaggccaaacatggcactgcttgggcgcacctttgcgaataagagcatggagtggccagagtttcagcaggttgtacaggcaggacacaaaggaagatacgggcaaatccggttgagaaaggcaacgcaatccatctacacttatcctgcacctgacttgccgaactatgtgcttggagcgaaactgaccctgttcgaggtttag

SEQ ID NO: 69058 - DNA, 1865 bp, Zea Mays
cgtactccgtagacacggactcctggattcagagcgggagggcagagagggccggatggcgggctggcggcgatgctggtgcctggagtggaatgcccctaagccaatgcatccttctcttttgaatgaggccttgcgatggacagctacagacggacaaaagaaagatctatggtcacccttgccatatcaggggtggaaaccatgcttaacgccatcagtttctcacaaattacctctggaaccaagtggatacatccaagtatttcttgatggtggattgaaccaacaaagaatggggatatgtgatgccattgcagttgcaaagattcttaatgctactcttgtgatcccacatcttgaagtaaaccctgtttggaaggattcaagctcatttgaagaaatttttgatgtggatcactttatcaactccctaaaagatgaagtttccattatcaaagtgcttccaaaagaattttcttggagcacaagagagtactatggcacaggcatccgtgctacaagaataaaaactgcacctcttcatgcctcagcaaattggtatttggagaatgtcagtcctatcctgcaaagctatgggattgttgcgatcgctcccttttctcaccgccttgcatttgatgatttgcctgtggatcttcaacgcttgcgttgtaaagttaacttccaagctctggtcttccgttctcacattatctcacttggagaaacacttgtgaagcgcttgaggtctccggtccgggttcattccagtaaatctatccatcaagttgtaggagacacaaatcaagctgaaaaatatgcagttttgcatctccgttttgataaggatatggctgcacattctgcatgtgactttggaggtggcagagctgaacagctagctcttgctaagtacaggcaagttatatggcaaggaagggtattaaattcacagctaactgatgaggagcttcggaacacaggacgctgcccattgaccccagaagagattgggctgttactggtagcccttggctttgacaacagaactcgactctatcttgcatctcacaaggtatatggtggagaagccaggatctctagcttgcgcaaactatttccgttgatggaggacaagaggagccttgcatctgaagatgaacttgctaatgttgaagggaaggcttctgttctagcagctcttgactattatatcagcatgcatagcgacattttcatatctgcatctcctggaaacatgcacaatgctttggtggctcaccgaagctatgagaacttgaagaccataaggccaaacatggcactgcttgggcgcacctttgcgaataagagcatggagtggccagagtttcagcaggttgtacaggcaggacacaaaggaagatacgggcaaatccggttgagaaaggcaacgcaatccatctacacttatcctgcacctgactgtatgtgccaaggataggctactggtttcaaaatttcagaaaaccaatcggttctgcagcaaatgaaggtcgaggatcgccgtctcaaatgttgcattgcggttagtacattccagctgccactagatatgcaagtttgatttttttgggacagctgctatgtactggatctcctctctctctctctctctctctctctctctctcttcacaatacagtttggtgcagatgcagtttatagatattctcatattcgtggttgtgacgggtgttaagatatcacacttgccattaacactttgcgctcttcagcttctacatctattttaatgcatcatgtattcttcagtgccgaactatgtgcttggagcgaaactgaccctgttcgaggtttag

SEQ ID NO: 69059 - DNA, 1427 bp, Zea Mays
cgtactccgtagacacggactcctggattcagagcgggagggcagagagggccggatggcgggctggcggcgatgctggtgcctggagtggaatgcccctaagccaatgcatccttctcttttgaatgaggccttgcgatggacagctacagacggacaaaagaaagatctatggtcacccttgccatatcaggggtggaaaccatgcttaacgccatcagtttctcacaaattacctctggaaccaagtggatacatccaagtatttcttgatggtggattgaaccaacaaagaatggggctcatttgaagaaatttttgatgtggatcactttatcaactccctaaaagatgaagtttccattatcaaagtgcttccaaaagaattttcttggagcacaagagagtactatggcacaggcatccgtgctacaagaataaaaactgcacctcttcatgcctcagcaaattggtatttggagaatgtcagtcctatcctgcaaagctatgggattgttgcgatcgctcccttttctcaccgccttgcatttgatgatttgcctgtggatcttcaacgcttgcgttgtaaagttaacttccaagctctggtcttccgttctcacattatctcacttggagaaacacttgtgaagcgcttgaggtctccggtccgggttcattccagtaaatctatccatcaagttgtaggagacacaaatcaagctgaaaaatatgcagttttgcatctccgttttgataaggatatggctgcacattctgcatgtgactttggaggtggcagagctgaacagctagctcttgctaagtacaggcaagttatatggcaaggaagggtattaaattcacagctaactgatgaggagcttcggaacacaggacgctgcccattgaccccagaagagattgggctgttactggtagcccttggctttgacaacagaactcgactctatcttgcatctcacaaggtatatggtggagaagccaggatctctagcttgcgcaaactatttccgttgatggaggacaagaggagccttgcatctgaagatgaacttgctaatgttgaagggaaggcttctgttctagcagctcttgactattatatcagcatgcatagcgacattttcatatctgcatctcctggaaacatgcacaatgctttggtggctcaccgaagctatgagaacttgaagaccataaggccaaacatggcactgcttgggcgcacctttgcgaataagagcatggagtggccagagtttcagcaggttgtacaggcaggacacaaaggaagatacgggcaaatccggttgagaaaggcaacgcaatccatctacacttatcctgcacctgacttgccgaactatgtgcttggagcgaaactgaccctgttcgaggtttag

SEQ ID NO: 69060 - DNA, 1817 bp, Zea Mays
ccgtggaaccgtgaaaactagtactttatagtagtgatgatgaaatgatattgttttcatcggtttttatttcatcaattaaaatggtgacatgagtatatttttgaaaaaacgaattaaaaataaaatttaatccgtcaagggaagatggactcacgctcaatgggctgaatttgggctttcccgtagaaaactcagtccacgcttttgggctttccctttgcccctactcgtcttccccaccgaagcagggtgatgcggagggcgtcgccttcgctgtctccggcgaggggcccggcggtcttcgccgccgcggtcgtggtgtttctgccggtcttattccccgggttgttctcccctcttggccacgctttcccttctgtcttctcggagtggaatgcccctaagccaatgcatccttctcttttgaatgaggccttgcgatggacagctacggacaaaagaaagatctatggtcacccttgccatatcaggggtggaaaccatgcttaacgccatcagtttctcacaaattacctctggaaccaagtggatacatccaagtatttcttgatggtggattgaaccaacaaagaatggggatatgtgatgccattgcagttgcaaagattcttaatgctactcttgtgatcccacatcttgaagtaaaccctgtttggaaggattcaagctcatttgaagaaatttttgatgtggatcactttatcaactccctaaaagatgaagtttccattatcaaagtgcttccaaaagaattttcttggagcacaagagagtactatggcacaggcatccgtgctacaagaataaaaactgcacctcttcatgcctcagcaaattggtatttggagaatgtcagtcctatcctgcaaagctatgggattgttgcgatcgctcccttttctcaccgccttgcatttgatgatttgcctgtggatcttcaacgcttgcgttgtaaagttaacttccaagctctggtcttccgttctcacattatctcacttggagaaacacttgtgaagcgcttgaggtctccggtccgggttcattccagtaaatctatccatcaagttgtaggagacacaaatcaagctgaaaaatatgcagttttgcatctccgttttgataaggatatggctgcacattctgcatgtgactttggaggtggcagagctgaacagctagctcttgctaagtacaggcaagttatatggcaaggaagggtattaaattcacagctaactgatgaggagcttcggaacacaggacgctgcccattgaccccagaagagattgggctgttactggtagcccttggctttgacaacagaactcgactctatcttgcatctcacaaggtatatggtggagaagccaggatctctagcttgcgcaaactatttccgttgatggaggacaagaggagccttgcatctgaagatgaacttgctaatgttgaagggaaggcttctgttctagcagctcttgactattatatcagcatgcatagcgacattttcatatctgcatctcctggaaacatgcacaatgctttggtggctcaccgaagctatgagaacttgaagaccataaggccaaacatggcactgcttgggcgcacctttgcgaataagagcatggagtggccagagtttcagcaggttgtacaggcaggacacaaaggaagatacgggcaaatccggttgagaaaggcaacgcaatccatctacacttatcctgcacctgacttgccgaactatgtgcttggagcgaaactgaccctgttcgaggtttag

SEQ ID NO: 69061 - DNA, 1821 bp, Zea Mays
ccgtggaaccgtgaaaactagtactttatagtagtgatgatgaaatgatattgttttcatcggtttttatttcatcaattaaaatggtgacatgagtatatttttgaaaaaacgaattaaaaataaaatttaatccgtcaagggaagatggactcacgctcaatgggctgaatttgggctttcccgtagaaaactcagtccacgcttttgggctttccctttgcccctactcgtcttccccaccgaagcagggtgatgcggagggcgtcgccttcgctgtctccggcgaggggcccggcggtcttcgccgccgcggtcgtggtgtttctgccggtcttattccccgggttgttctcccctcttggccacgctttcccttctgtcttctcggagtggaatgcccctaagccaatgcatccttctcttttgaatgaggccttgcgatggacagctacagacggacaaaagaaagatctatggtcacccttgccatatcaggggtggaaaccatgcttaacgccatcagtttctcacaaattacctctggaaccaagtggatacatccaagtatttcttgatggtggattgaaccaacaaagaatggggatatgtgatgccattgcagttgcaaagattcttaatgctactcttgtgatcccacatcttgaagtaaaccctgtttggaaggattcaagctcatttgaagaaatttttgatgtggatcactttatcaactccctaaaagatgaagtttccattatcaaagtgcttccaaaagaattttcttggagcacaagagagtactatggcacaggcatccgtgctacaagaataaaaactgcacctcttcatgcctcagcaaattggtatttggagaatgtcagtcctatcctgcaaagctatgggattgttgcgatcgctcccttttctcaccgccttgcatttgatgatttgcctgtggatcttcaacgcttgcgttgtaaagttaacttccaagctctggtcttccgttctcacattatctcacttggagaaacacttgtgaagcgcttgaggtctccggtccgggttcattccagtaaatctatccatcaagttgtaggagacacaaatcaagctgaaaaatatgcagttttgcatctccgttttgataaggatatggctgcacattctgcatgtgactttggaggtggcagagctgaacagctagctcttgctaagtacaggcaagttatatggcaaggaagggtattaaattcacagctaactgatgaggagcttcggaacacaggacgctgcccattgaccccagaagagattgggctgttactggtagcccttggctttgacaacagaactcgactctatcttgcatctcacaaggtatatggtggagaagccaggatctctagcttgcgcaaactatttccgttgatggaggacaagaggagccttgcatctgaagatgaacttgctaatgttgaagggaaggcttctgttctagcagctcttgactattatatcagcatgcatagcgacattttcatatctgcatctcctggaaacatgcacaatgctttggtggctcaccgaagctatgagaacttgaagaccataaggccaaacatggcactgcttgggcgcacctttgcgaataagagcatggagtggccagagtttcagcaggttgtacaggcaggacacaaaggaagatacgggcaaatccggttgagaaaggcaacgcaatccatctacacttatcctgcacctgacttgccgaactatgtgcttggagcgaaactgaccctgttcgaggtttag

SEQ ID NO: 69062 - DNA, 1048 bp, Zea Mays
cgtactccgtagacacggactcctggattcagagcgggagggcagagagggccggatggcgggctggcggcgatgctggtgcctggagtggaatgcccctaagccaatgcatccttctcttttgaatgaggccttgcgatggacagctacagacggacaaaagaaagatctatggtcacccttgccatatcaggggtggaaaccatgcttaacgccatcagtttctcacaaattacctctggaaccaagtggatacatccaagtatttcttgatggtggattgaaccaacaaagaatggggatatgtgatgccattgcagttgcaaagattcttaatgctactcttgtgatcccacatcttgaagtaaaccctgtttggaaggattcaagctcatttgaagaaatttttgatgtggatcactttatcaactccctaaaagatgaagtttccattatcaaagtgcttccaaaagaattttcttggagcacaagagagtactatggcacaggcatccgtgctacaagaataaaaactgcacctcttcatgcctcagcaaattggtatttggagaatgtcagtcctatcctgcaaagctatgggattgttgcgatcgctcccttttctcaccgccttgcatttgatgatttgcctgtggatcttcaacgcttgcgttgtaaagttaacttccaagctctggtcttccgttctcacattatctcacttggagaaacacttgtgaagcgcttgaggtctccggtccgggttcattccagtaaatctatccatcaagttgtaggagacacaaatcaagctgaaaaatatgcagttttgcatctccgttttgataaggatatggctgcacattctgcatgtgactttggaggtggcagagctgaacagctagctcttgctaagtacaggcaagttatatggcaaggaagggtattaaattcacagctaactgatgaggagcttcggaacacaggacgctgcccattgaccccagaagagattgggctgttactggggaaatcaggaagttttaag

SEQ ID NO: 69063 - DNA, 1426 bp, Zea Mays
ccgtggaaccgtgaaaactagtactttatagtagtgatgatgaaatgatattgttttcatcggtttttatttcatcaattaaaatggtgacatgagtatatttttgaaaaaacgaattaaaaataaaatttaatccgtcaagggaagatggactcacgctcaatgggctgaatttgggctttcccgtagaaaactcagtccacgcttttgggctttccctttgcccctactcgtcttccccaccgaagcagggtgatgcggagggcgtcgccttcgctgtctccggcgaggggcccggcggtcttcgccgccgcggtcgtggtgtttctgccggtcttattccccgggttgttctcccctcttggccacgctttcccttctgtcttctcggagtggaatgcccctaagccaatgcatccttctcttttgaatgaggccttgcgatggacagctgtgagtacatctatgtcaaatgaaaactgctgtcattgtggttgatgatattttaacatatgttttgttgcagacagacggacaaaagaaagatctatggtcacccttgccatatcaggggtggaaaccatgcttaacgccatcagtttctcacaaattacctctggaaccaagtggatacatccaagtatttcttgatggtggattgaaccaacaaagaatggggatatgtgatgccattgcagttgcaaagattcttaatgctactcttgtgatcccacatcttgaagtaaaccctgtttggaaggattcaagctcatttgaagaaatttttgatgtggatcactttatcaactccctaaaagatgaagtttccattatcaaagtgcttccaaaagaattttcttggagcacaagagagtactatggcacaggcatccgtgctacaagaataaaaactgcacctcttcatgcctcagcaaattggtatttggagaatgtcagtcctatcctgcaaagctatgggattgttgcgatcgctcccttttctcaccgccttgcatttgatgatttgcctgtggatcttcaacgcttgcgttgtaaagttaacttccaagctctggtcttccgttctcacattatctcacttggagaaacacttgtgaagcgcttgaggtctccggtccgggttcattccagtaaatctatccatcaagttgtaggagacacaaatcaagctgaaaaatatgcagttttgcatctccgttttgataaggatatggctgcacattctgcatgtgactttggaggtggcagagctgaacagctagctcttgctaagtacaggcaagttatatggcaaggaagggtattaaattcacagctaactgatgaggagcttcggaacacaggacgctgcccattgaccccagaagagattgggctgttactggggaaatcaggaagttttaag

SEQ ID NO: 69064 - DNA, 1608 bp, Zea Mays
cggccaccgcgttttctccgagattgaccagctaacgcccacttcccggacccctcggccacactcgtgcccttattagcatccctaggacccgtccgcgccgccacgatcccaatttccctaaccatagcgccatcggctcgccgtcaaccactggatagagagagggagagcggggatcttacatcgcaaaaatgcccgctcattgtcggccacatttgggttcaattagagtacctggagattcgcccagccctactgtgggtgcgtgaaccgtgggcgggcagagcgactggctgtggtgggcgaaatttctcgccgtagttgaagaaccgccgcgaacccgcaccacctcatggaccggaggtttctcgctgcgaactgagaagagcttgtgaccgaggatcctggtgaccagcagatagaagtagctgagcaggagttcattgaaggcaagttgtgtccttgaccacttttatacccaataatgttctttaatgtcattcattcatgcataggtttaattttgatgggacccaataggtcaccctagtctgtttatccctattaccttgttatccctgaatcacatgggtagttttgctattgctttacatgattttgggttaatatttcattatatccatgttcaattattttgttattttatttatgttcatgtcaagatcattaatgttaattggaacatggagcttaacttgagaaacacgtgccaccacaagggaggaatgggaccccttggctaactaattaggaaagctagtggaagactaccttacccaaaaggggcaagggtagtaggggagctgcatgcaaggaggttctcgggttgattttgctgcgatggcggtcagacgggggattcttgcaagtgctcttcccataaactgtagtgggttttcggaagctagtggaactttgcaaaggcctcgtagtgttgccctgcctcgcttcctaggtagaggtgtatgggagtcacgatcccttgccagatgggtaacatgacttgtgggtaaagggtacaacctctgcagagtgcaaaactggtatactagccgagctcacggtcaagagcagctcaggacattcgcatgattaatttatgtaacttaaattcaattttgttatttgcatatgcatgggattatttattaattttgttctactacttttattaaggtttggtatttacttacatttagtaactaataataaaatttttaccaactaattaaaagcaatgctcagctttaacctctgttgttgattagccttacacatcacatgagctcccacctttggtgagttcatgcccactggtttccccacaacttgttgagctatgatcatgtgtgagctcacccttgctatctcacacccccacaggagaagatcaggtggttcaagaggagcctcaaagcgaggagtttgatctaatctaggtggcgtttccctagttgacttttgcgccaaggatgatccttagttcattttatatttatcttttattttgtaataagacttccgctttgtaataaatactctgatgttattgtgacatttatctctatacactctgttattatt

SEQ ID NO: 69065 - DNA, 1066 bp, Zea Mays
cggccaccgcgttttctccgagattgaccagctaacgcccacttcccggacccctcggccacactcgtgcccttattagcatccctaggacccgtccgcgccgccacgatcccaatttccctaaccatagcgccatcggctcgccgtcaaccactggatagagagagggagagcggggatcttacatcgcaaaaatgcccgctcattgtcggccacatttgggttcaattagagtacctggagattcgcccagccctactgtgggtgcgtgaaccgtgggcgggcagagcgactggctgtggtgggcgaaatttctcgccgtagttgaagaaccgccgcgaacccgcaccacctcatggaccggaggtttctcgctgcgaactgaggtaagatttagtaccattctgttcgtttttctctcggtgtagtgtaacgcgattcaaactaggatctagcaccttgccgcacgagctgagagaacgccggccatgggccgccgcgaacgcaggcggcgccgccgcgcatgtgtgttcagttggtgaagtgttcgtgcactgtcggatgagagttggaccgtgtagattagagtgagtgtaccgtttcggcttgtgcttgtcttagccgtcggatcgtcgatgtggggatggagtggatctggcgtgttttaaatcctaacctttggtctttgatccgagggactggatcgcgtaccgcttcatgatgtaatagatctaatcgcactcgtcgggttttgatcgggcggcccgagtaatcccgtaccctcttcgcgagcacatttgtcctcattcactgttctttgagtcttaggagttttaccccgagacccctgcgcttcacaataattgacgcctagtccagatctcatgtaaattgaataaatgaattggaaaatggatttttaatatgaaaataattactagaacttgtcaaattcatagaaaatctatacttggtccaaattaatccattctagtttctaaaattttataatattattttctatcacttagagtctctgttttgacatgaaaacagtaagaaaaat

SEQ ID NO: 69066 - DNA, 1553 bp, Zea Mays
aggaagacgccatcggaaacatgccttctgcactgccccctctgctctgctgtctcgcggcttagcggggataagatgaggagtctttagaaaatcatgcacactaccaggtgaaaacagaagttgtaaaggtactcgtgaaatatcctatagattgagggtccgcatagcaaaagagaagttaggccttcttgtccgcttgtgttggcggcggcgatggcgacgtcggcgagcacgtccggcgagtggctcaagggcgcgctgcaggaacttcgggagcgtaagggcagctcgctggagttcgactcggatctcatctcgggcctcgtctccttctgcgagctcgcgcctccctccgacgccaccagctatctcgagaattttattgggaaagaagctgctcaggacatcattcaagaatacttgcggaggaggggtcacattggttcctcaaatggaactgagagctttcagtcatctaaccttcagccttatgttaagccttcagctgatgcagcaactacacaaacaaagaaacaaacacgcacgcaaaaagattcagcatcttcttctagtcagagttctaagagtcaatcagaaattgcagaatcacaagttccttccaagagaggttcaaaaaagaaaggagcaaaggtcatttccctcgctgaggcagcaaaaggttctattgtcttcaagcaggggaaaccttgttcatgccaagcacggcaacatgaccttgtcagcaactgcttatcatgtggcaaaattgtgtgtgaacaagagggcgagggaccctgtagtttctgtggcgcacttgtcttgaaggaaggtagcacttatgctggtctaagtgatgttgggctacccctttccgaagcagaaactgcagctgaagcatatgcaaagaggcttgttgactatgatagaaatgctgcagcaaggactaaagtttatgatgaccaaagtgactactatgaaatggaaggaaacagttggctctcttcaaaggagaggtcagtcctgaagcagcagcaagaggaagctgaggaagcagctaaaatccaaaagggtaaagtgattgttacatttgatttggtgggccgtaaggtgattttgaacaaggatggaagtactgaggtggaaacagagcacccgatcatgcgaccgccggaagagaaggaccagagccaccgcatacagcccaaccccacaatcagagagcaacctgtgttcgtcgaaacaagtccagtcaaaccaaaaactgaccgagcgaaacagagcaagaggcttgccaagaatggtctgtgcctggaggtaaccggacggctgcagcatgatgacaagggcatggagagcattctgagtggcaaggtgaagaagggtgatcacttggcttacagctcctttggtcaggcacgcgaaggggatgatgttgaatgctccccggattttgactgagcctttactttgagggagagagaggcaaatggtggcttcgttttcaaagcagagaggtaaaatcacaaagagcggtaaaatcacaattgaaa

SEQ ID NO: 69067 - DNA, 1092 bp, Zea Mays
aggaagacgccatcggaaacatgccttctgcactgccccctctgctctgctgtctcgcggcttagcggggataagatgaggagtctttagaaaatcatgcacactaccaggtgaaaacagaagttgtaaaggtactcgtgaaatatcctatagattgagggtccgcatagcaaaagagaagttaggccttcttgtccgcttgtgttggcggcggcgatggcgacgtcggcgagcacgtccggcgagtggctcaagggcgcgctgcaggaacttcgggagcgtaagggcagctcgctggagttcgactcggatctcatctcgggcctcgtctccttctgcgagctcgcgcctccctccgacgccaccagctatctcgagaattttattgggaaagaagctgctcaggacatcattcaagaatacttgcggaggaggggtcacattggttcctcaaatggaactgagagctttcagtcatctaaccttcagccttatgttaagccttcagctgatgcagcaactacacaaacaaagaaacaaacacgcacgcaaaaagattcagcatcttcttctagtcagagttctaagagtcaatcagaaattgcagaatcacaagttccttccaagagaggttcaaaaaagaaaggagcaaaggtcatttccctcgctgaggcagcaaaaggttctattgtcttcaagcaggggaaaccttgttcatgccaagcacggcaacatgaccttgtcagcaactgcttatcatgtggcaaaattgtgtgtgaacaagagggcgagggaccctgtagtttctgtggcgcacttgtcttgaaggaaggtagcacttatgctggtctaagtgatgttgggctacccctttccgaagcagaaactgcagctgaagcatatgcaaagaggcttgttgactatgatagaaatgctgcagcaaggactaaagtttatgatgaccaaagtgactactatgaaatggaaggaaacagttggctctcttcaaagaacatgtgacttcaaggacaagacaagaagctactgtgttgctgttttcagatatatacatgtccattcgagatacattca

SEQ ID NO: 69068 - DNA, 1174 bp, Zea Mays
gctggccggcagtgaggtgcgcctggagaaggtggcccccgtagagcctggttacttcggcccggcccattatgtcatcaaacagatccgagccgtccgattcaggttattcctcgcgacacatccatttatacccctgccgccgccactcccattcttctctttctcttagactatctgccgctccagcctttcgctagggtttatccaccggcggcgcgcgcgacggcggcaagatggtgcagcgtctgacctaccgcaagcggcacagctatgccacgaagtccaaccagacgcgggtcgtcaagacccctggtggcaagctcgtgtaccagtacaccaagaagagagccagcgggcccaagtgtcccgtgaccgggaagaagatccagggcattccccatctgaggccagctgagtacaaaaggtccaggttgtctaggaaccgcagaactgtgaaccgtccctatgggggagtactatctggaactgcagttagagaaagagcagaagattgtcaagaaggtgttgaaattacagaagaccaaagacaagacttcctcaaaaaagtaactctgaaacagaagtgagccactcttctgcagcaagggaagacatttttgtcgacagttattatcaatggcttagtctcttctagctgttctattgttcttgtatcttgagcggacaactggtttctagggcaccttgaaatctgtctacgagatctctaagattatgagatgacatatgaccccctattgcttttgttcactttgctaaaactgaaagtccgagttcacatgagttgggcatcagttggtgtttatttcctgcttgttgggtcttgcgtctgaattgggaatcagtttgtgtttatttcctacttgttgcatttagttcttattccaatttgtctggctgtgggttaagtttggaatatgtttcatcgttactagaggtgtcagtgggattttctctattaggcctcctttggtagccatggatcctggaaggattctggcctgttccctagccttgaaatccacgggtccaatttccttggggcaaatacaaaatgtatttggtgtcacacgcctcccggcccaatccgtgggggaagagtgggcttttgcccccggcctcataacgtcgggtaggttttccccgactt

SEQ ID NO: 69069 - DNA, 1116 bp, Zea Mays
gctggccggcagtgaggtgcgcctggagaaggtggcccccgtagagcctggttacttcggcccggcccattatgtcatcaaacagatccgagccgtccgattcagcctttcgctagggtttatccaccggcggcgcgcgcgacggcggcaagatggtgcagcgtctgacctaccgcaagcggcacagctatgccacgaagtccaaccagacgcgggtcgtcaagacccctggtggcaagctcgtgtaccagtacaccaagaagagagccagcgggcccaagtgtcccgtgaccgggaagaagatccagggcattccccatctgaggccagctgagtacaaaaggtccaggttgtctaggaaccgcagaactgtgaaccgtccctatgggggagtactatctggaactgcagttagagaaaggatcatccgtgctttcctggttgaagagcagaagattgtcaagaaggtgttgaaattacagaagaccaaagacaagacttcctcaaaaaagtaactctgaaacagaagtgagccactcttctgcagcaagggaagacatttttgtcgacagttattatcaatggcttagtctcttctagctgttctattgttcttgtatcttgagcggacaactggtttctagggcaccttgaaatctgtctacgagatctctaagattatgagatgacatatgaccccctattgcttttgttcactttgctaaaactgaaagtccgagttcacatgagttgggcatcagttggtgtttatttcctgcttgttgggtcttgcgtctgaattgggaatcagtttgtgtttatttcctacttgttgcatttagttcttattccaatttgtctggctgtgggttaagtttggaatatgtttcatcgttactagaggtgtcagtgggattttctctattaggcctcctttggtagccatggatcctggaaggattctggcctgttccctagccttgaaatccacgggtccaatttccttggggcaaatacaaaatgtatttggtgtcacacgcctcccggcccaatccgtgggggaagagtgggcttttgcccccggcctcataacgtcgggtaggttttccccgactt

SEQ ID NO: 69070 - DNA, 1019 bp, Zea Mays
gcctttgccccagtgagcatcacgacagataaactctggtgactcattctctcatcaccgcaagctcttctccgtccaaattcgtcgtactcatggtcgccctctataaattgagtgttcggcctgctccgctatcttgttacgaagctagtgcaccgttcctcgctcccgattagccaacacagcccccgaatttggaatttcccccaaatcggccaagaacgccgccgtgtgacctcgcgccgtggccagccatctgcagaaaacgaggaagaaactgtggttgaagaagttgtcactcaagctgagaaacctccagccgataacaacttctacttcgacatctgtggagtagacccggaacctcttgcaacgcaaggtgatgaaagagctgagttctgttgtttctgctccaaggtggtgcccaagcaaaaggaagaacgctagacttatttggggagggtgttttgcctcccagtaatgtaataataagtgccacactcgaacacccggttatgtaataactactctttctataattttatatgaatgtaaagtatattattgtaatccttttcgctcattctctactctgattatgtgtaatatctgtgtgatgggttaagcgctcctgggcgatatgatgaagatacagataaccgaacttgccgagttattatgcgcacctgcatgactgtctgaggaccttaggacaaggacatctataggtgggcctaataccttgggaggttctgtcacataatttctcgccctttggcattaagcaccaaaatagaagaactatttggccccttaaccccagttccttacacaaatcacaagtaaaaccaaaggcaatgagaaaacatagatagggacccaggacaagatacattgatactagaatgcagtggaagccccttctttgtccaagcccatctttttcctttcaattccatctttgagactagattaatattactcaagcaaacacattagtcgcaaaggataaagttgtt

SEQ ID NO: 69071 - DNA, 2079 bp, Zea Mays
gcctttgccccagtgagcatcacgacagataaactctggtgactcattctctcatcaccgcaagctcttctccgtccaaattcgtcgtactcatggtcgccctctataaattgagtgttcggcctgctccgctatcttgttacgaagctagtgcaccgttcctcgctcccgattagccaacacagcccccgaatttggaatttcccccaaatcggccaagaacgccgccgtgtgacctcgcgccgtggccagccatctgcagaaaacgaggaagaaactgtggttgaagaagttgtcactcaagctgagaaacctccagccgataacaacttctacttcgacatctgtggagtagacccggaacctcttgcaacgcaaggcaagccccggtgcattatccctttcattgttgatttaaaatctttatcaccttgtttgatgcattaggtgataggagttgtgtgataaacaattgatgcatttccttccatgaaaaattgattaccatcccttgataccctgttatgaaaaggatttttatgatgcttagccttgctttagaaaaacaaaatgttttgttttaaaacaaaaggtgatgcttcatattggatggggatttttacaaagaaaatacttatgatgatgaatccgtcatggccgtgatgggttccacatctgaaaagaagtacctctgtcaggtaccaaactttgggttttaaatgataaaaacgagaccgggcgggtgactttcatgagaagggtgtctcggtgtagtgtctccatctaagtcgattaaggaccaaaccgatgtaggcttgatgatcgaggaccttttatctggccacatgcctcgtcatgggtaagctttgcttcggtcggaccaatagcagaaaggccaccacgcaatgggagtggagagatggcgagagtagcatgtaccctctgtggcaagatgctgggcggtggtgtatctgtgctctcggttggcatgaacccattcttgtcttgagaaacccggtggcgagttgacatatgcaagggttaagtgctacatatttcgtgtggttggagatccccagctgggtattaatcgattctgttcgtcgttacttctcggacatgaagacttggtcattgacttacacgtagcaatcaagtgaactgaagggtcgataaaagacggctagtatatataggccaagtgcttgatctaggatagaaagaattctagatgcagataactacttaacctattaataaaaatagatttttaaagatccactcatagtaagcttttctgcaaacagagtctttgaatcgtgataaactttaccttgaatcccaaaggccagcatatccttgagagtcttttcctttgacgggtaagacttgcaaaagtacactccgtactgagggttttcaaacccatcttgttgtaggtgatgaaagagctgagttctgttgtttctgctccaaggtggtgcccaagcaaaaggaagaacgctagacttatttggggagggtgttttgcctcccagtaatgtaataataagtgccacactcgaacacccggttatgtaataactactctttctataattttatatgaatgtaaagtatattattgtaatccttttcgctcattctctactctgattatgtgtaatatctgtgtgatgggttaagcgctcctgggcgatatgatgaagatacagataaccgaacttgccgagttattatgcgcacctgcatgactgtctgaggaccttaggacaaggacatctataggtgggcctaataccttgggaggttctgtcacataatttctcgccctttggcattaagcaccaaaatagaagaactatttggccccttaaccccagttccttacacaaatcacaagtaaaaccaaaggcaatgagaaaacatagatagggacccaggacaagatacattgatactagaatgcagtggaagccccttctttgtccaagcccatctttttcctttcaattccatctttgagactagattaatattactcaagcaaacacattagtcgcaaaggataaagttgtt

SEQ ID NO: 69072 - DNA, 902 bp, Zea Mays
gcctttgccccagtgagcatcacgacagataaactctggtgactcattctctcatcaccgcaagctcttctccgtccaaattcgtcgtactcatggtcgccctctataaattgagtgttcggcctgctccgctatcttgttacgaagctagtgcaccgttcctcgctcccgattagccaacacagcccccgaatttggaatttcccccaaatcggccaagaacgccgccgtgtgacctcgcgccgtggccagccatctgcaggtgatgaaagagctgagttctgttgtttctgctccaaggtggtgcccaagcaaaaggaagaacgctagacttatttggggagggtgttttgcctcccagtaatgtaataataagtgccacactcgaacacccggttatgtaataactactctttctataattttatatgaatgtaaagtatattattgtaatccttttcgctcattctctactctgattatgtgtaatatctgtgtgatgggttaagcgctcctgggcgatatgatgaagatacagataaccgaacttgccgagttattatgcgcacctgcatgactgtctgaggaccttaggacaaggacatctataggtgggcctaataccttgggaggttctgtcacataatttctcgccctttggcattaagcaccaaaatagaagaactatttggccccttaaccccagttccttacacaaatcacaagtaaaaccaaaggcaatgagaaaacatagatagggacccaggacaagatacattgatactagaatgcagtggaagccccttctttgtccaagcccatctttttcctttcaattccatctttgagactagattaatattactcaagcaaacacattagtcgcaaaggataaagttgtt

SEQ ID NO: 69073 - DNA, 1303 bp, Zea Mays
gcctttgccccagtgagcatcacgacagataaactctggtgactcattctctcatcaccgcaagctcttctccgtccaaattcgtcgtactcatggtcgccctctataaattgagtgttcggcctgctccgctatcttgttacgaagctagtgcaccgttcctcgctcccgattagccaacacagcccccgaatttggaatttcccccaaatcggccaagaacgccgccgtgtgacctcgcgccgtggccagccatctgcaggtccgttcatgtccctctcatttgcgtttatgcatcctttgacgctaggacagctcttggtctcgactgattgaacgctaccgtgccatagtgtagagaacgggcgatggtactgtccgagaacgccgccgcggacatagctcacgtagaccggccgttccgggtagtttccgtccaagtttgcgcaagaaccataaccatagtaagccactcagtccttccgcatccttggatttagctagaccggctcgggtgcaccggtaaagtcacgccggtgatccggttccactgccaccgcgggtagctgagttaagggtgctctgaccaaattaagcgcgtgaataggctcgagttacatccctgagggtgtccgcatgctcggcaccatcggagcacgtcctcgacaatgggtatgcacggctccgaccatgtgcttggcgtgccgtcgccagggacttgatgtgtgaaggaatagaaatgcaggggcttaagtgcaatggtcagagaaacatatgaatagtgcttagggactctttacggtttatttaataggtcgagggtctctgcgcaaattcgccagcgtgggcgcttacgtgttttccctgttcgcgggccgacttgggctgaattgagcccaacattattcattgtttctctttttctttttgctggcagattaggaaatgtgtagaaatagtagaaaaatgataaaattatgaaacaaattttgctagactcctaaaattatctagtatttaataaaaaatagttccaagatttttattccaaacctataattatgtagcatttaaaaatgctcaaaccaagccttttagagttttagaaataatttagtagctccaaaaatggtataactttttgggtaggcttagtatgatgattgaaaaccttgggtgaagtttgaaatgattcggacactgtttggtcacaaccccaataactagcctcctagagttaatttacttaacactaatagaataccaacttaggaaaccctagtgattagtgtataccgtgaag

SEQ ID NO: 69074 - DNA, 814 bp, Zea Mays
gccaaatccgagcggggccacgcccacgcccacgccggcgtcacggcctagtacgaccatggaacgcgcggggtagctgcctgccgcaagctatccggcttgttcgtttgcccgctcgctcacgggtgagagaattaggcggacacggcacgggtgagggagcggagcgcggacgtacgtaccggagatgccgatgtcgtagccgaagatggcgcccccgacggcggccacgaggcaggtcgtggcgacggcgagcgtcatgcgccccttgtactgcgccgcgcgctccgtcttcacgcccagcgccgccacccctccgcccgccatcgctgctggatgcttcctggctccgatcccggcgctctctctctctctctctctctctcttctcctccaagacgaactcggccagcagaagatccgagctatcaaccgcaccacacggaagcaatgctctaaccgacgaccgcccgtccgcagaccacaggtttaattagacgcggagtcgactacctcgcttgatccgttgatccttcggttgtctcttcccttctttgacctgccagactcatggggcgaactagagtctagagtgtgaagtgaatgggggacacagagagccagcatgttggggatgggtctacggttgcttacataagcggcgagcaggacgacagctaagctaactcatgcatcgggccgttgagatacagataggaatacgtatctactgactgtccgaagagaagtggacagtgatttaaatacccttgtaatagttaaaatatcctaataaattttcagataccaaaat

SEQ ID NO: 69075 - DNA, 1750 bp, Zea Mays
aaccatgcatgcttcactccagtcatcccttgtgattgttgctggcaggtgccgcatgaccctcagccgcgccccagccatcctcgagcggcatgtccggcatgaccttcttccagaaccagtgcttccgccatagcagcaccatctcttcgatgggcacgcccttggtctccggcaggaagacgtagacgaacacggtcatgacggtgatccaccccgcgaaaaagaggaagatgccgaacttgaaggcgcacagcagcgacaggaacgcctgcgcgatggcgaaggtgaagagcaggttcacggccaccgtgatgctctgccccgccgaccgcgtctccagcgggaagatctcgctcggcaccgtccatcccagcgggccccacgaccacccgaacgccagaacgaacaggcagatcaccaccaccaccgcgaccgagtagctccgcgccagttgcttctccgccccgaacttcacgcccaggatcaccgccacgatcacctgcacgcacgagtccatgcaagcagagtacgttagtttgcaagagcttgacagcgaactgcactgcggcgccactgtggttctagtgtcacctggcagacgatcatctggatcccgccgctgatgaggagcttccggcggccgaggcggtcgacgatgccgatggagatgagcgtcgaggagaagagcacggcgccggtgagcacggaggagtagagggacgcgttcccgccgaaacccatgctctggaacaggaccggcgcgtagaagaggatggagttgatgcccgtcaggatctggaacgccggcatgcacacggccatcaccagctgcggccggttgcgcggctgcaggatgttccggaacgggtgctcgacggtgttggccagctcgctcgcctccaccatgtccgtgaactcggcgtccacgtcggccgtgccccggatgcgctccagcacgcgccgaccctcctccacgcgcccgcgctcaatgaggctgttgggagtctccggaagaaagagcccgcccaacgtcatcagcagcgccggcaccgccgcgaggcccagcgacagccgccacccccacggcttgatgttctgcgtgccatagttgatcaggttcgccgtgaagatgcccagcgtcgtcgcgagctggaacatcatgttcaggcaggtcgtggcgacggcgagcgtcatgcgccccttgtactgcgccgcgcgctccgtcttcacgcccagcgccgccacccctccgcccgccatcgctgctggatgcttcctggctccgatcccggcgctctctctctctctctctctctctcttctcctccaagacgaactcggccagcagaagatccgagctatcaaccgcaccacacggaagcaatgctctaaccgacgaccgcccgtccgcagaccacaggtttaattagacgcggagtcgactacctcgcttgatccgttgatccttcggttgtctcttcccttctttgacctgccagactcatggggcgaactagagtctagagtgtgaagtgaatgggggacacagagagccagcatgttggggatgggtctacggttgcttacataagcggcgagcaggacgacagctaagctaactcatgcatcgggccgttgagatacagataggaatacgtatctactgactgtccgaagagaagtggacagtgatttaaatacccttgtaatagttaaaatatcctaataaattttcagataccaaaat

SEQ ID NO: 69076 - DNA, 1406 bp, Zea Mays
ctcgggtcggccgacctagactcctctaatcgacgtagagccgaagagagacgaagaatttgggggttggatagctaaacctaaactagactagaactactcctaggataaaatgtaaattgtattgattgaaggttcgattgattatcacaaatcggccgtatacctctctatttatagaggaggggggctggaccctttacaaactaatttccgagcatatcccatgattttagctaacaaccgtagtacaaaactcggaaccctaatatgttctgcgcacgcgtggaccgtccggcccacaggcgcggaccgtccgcgcgctcaaattggtgctcaacaatgggtatgtttttggggagtgtccatatgattggtttacttcgctcaaccattaattgcattgcgggtatggccttgctctttccaaccaatatcataaaatacgattgtgtaccgtcgcaacgcacggatattatagcagtatatattacaagtatcagtttatataagaaaaacgtaaaaacagagaaagtctaattaaggaggaggaccgaaaagagagcgtactgtttttaggtaatcattagacaggtaaatagatagttatgttcagttgatagaactttgagtgctttcaacgccgatggtctctactctctactagttagagataaatatcaagtggtcatgttgtcatttgataaactgcagtagttgccatgttatatacgctaatagtacttatcacggtgcgtgtaaaccgggtcctgcagttgactttgttttgacttgcgaatataatagatactactttttaataaaataataacactctctgcgtactataaagttcttattgtagacgaaactactgtagattctacagattctgtcgtgaaaaatcatcaatatccatagcattaaatatgtatgcggtttttattttgtgttaagttcattaatacttacttggtactcataacactgctgatacttttatataagaaattaatcaaacttgatagtttggcctgctacaaaatgctatacagccacttttaaatcacaggcctgtctacctaaggataaggtttggacttcgaaccagaatggcagaatcacgcagcaacggcagttgatgcccttcatcggtttgtttttttttgttttttttgtttttttgatggaaccaaatgagggagtccttcgtcttcctaccagtaggaattttgcatatcccttttctttttctttttcccgtgtgacggcatgaacggcggcacggcgctcaatgcaccccgcaactactactcccctcccaaatagaagaaaaaaactttgacaaacacaagaagatttgctcgtcagtcgtcacatgtgggtgttttcactgcagccttttt

SEQ ID NO: 69077 - DNA, 1597 bp, Zea Mays
ctcgtatcccggaatctccggatataattactaactgattcatccttttcttgtcgtagagccactaagtctactaaatctagctcataatcgccaaagaagaaatgttcatgaaatttttgttctaaaatatccccacgacaaaaatggaaattaggaggggagcgtggcataccatgtgaatgcagtccccgttaaagataatgaaaataaacgcacacggaatgcttcggtgtcggccaattctcctaactgtgctaagaactggtctatgtgctcacgcgtgctcttttcttggtcacccgaaaactttacgaatttgggtattttggtcccctgtgggtatgggagtcggtcaaacttgctatcataaggtctccgatatgactgcccctcggggactatactaactccgagcttatctcggaacgccccagctatttcctcccttactatatcgatggcagccggtgggagaccatcggctctttgatccaatatgggtgagtttgtttggatgttggtgtgttgttttcctccccattggtttaggttttgcgacgcgttaatgcatgccctatgaggctcataggactggccattcctttctggccttctaggggccggaaagttctcactctcacaggtttgatagattatattatgatgctgttgtgtcgtatggtgagatggggagtctagctgggacgaatacggagttagatatccatcctccttaaaaaactctgtgccggaccgtccggttaaatacgcggaccgtccgactccatgcgcggactgtccggccatgtggccggaccgtccgacattatattcgggatgtctggcgtcatacgcagacggtccgaatgggttatctagggtttgtatggcatgtggtggcttgggtgcaggtctcggtaattcgcttctaaaaataggatcagccgccgctggcccggacggtccgcgcccatgtgcaaacgatccggacatgcgcagatcggcaaatttatcgccgatgtgcgtgggaggctgtcgttgcctagggtacatgtccatcggcatcccataaaggggttgtgactggtcgtgccaacctgaagccgatgaattatgtgtgtatttcctccattcaacctcgtgcgaagaaagatttgccgtagtagacttatcaagcgcacgcactagacatttatgatcattttgtatatcccctacgatatgctgcaactgttctcgctgttcgtctatgtaagctttaagagtttggagttcgttggtgctacttacattggggatatctgttgtgggttggaacgaagccggatccgtcgcccgatgtcggacgaccttgttgttcctgtccactttgaagttggtcaagaactttgcttttgcttcttggatcagctgctcctggcgctcctcgaacaggagctgttcttcagccggcaaggtctcccatgtcggtgtgatgatattgctggtggaaacctcagagctatcttttgaaccggccattgagggccgatttgatagatctatatgtgttgtccccagcggagtcgccaaaaagtatgttgacgcctttccg

SEQ ID NO: 69078 - DNA, 933 bp, Zea Mays
gcaagatgccgcacggcgtggcacgtagtgctaccatcgccgatgagcatgatgagcgccatcgtcatgagcaccgtggcggagaagagaaacgaagtgtcacaagtcattgctagccgctaggaaaagtgcttcctcaggagtgaggagctacaaggctgttgcgtgcttgcaacgagtccttggcgagtattttattgtagttccatttaaagctgagcatatactattttgctagagctaggccagttgggaacgagatagagatggttggtggccttccgatgcaaagcatggacgacagatacgtagtggatggatgttgttcgagacatttggttcattagctcatctgtttcttgtagctggatcagaattaaccacccctcgtgcatgacgcaagatgatactggacaccgctcaactcatgcatggtttatgaatgttgcatcatgaatccatgcatgacctctgtttgataattgttgaggcatgttttttctctatcgaattattgtgcaatagccagagacatctttatggttctatctatccatgaattgtgtgtttaatgcgtgtgtctaagagaaaataaaaggacatatgttcagtggaagatgttgtgggtctttaaaatcggcagtcataccgtgtatttatatggagtcaatatcttgagttataagtcatcaagactgttacaccatatatatatatgtcgtaagaagccactaagcccaatacgacaggaagtcgtacatatatagtaacacctcgttagctggaggaggacgagctacggagagctctataaaaatagggattgagttctttttcaacccatatctttcttggtattttggttaaaataaagtgtaatatttattcttatcaatttattacctggtctatagacaatatgctcactttgat

SEQ ID NO: 69079 - DNA, 2992 bp, Zea Mays
taccgggaagaatttctccaggaatgggtccatggatgtcacgcctcctgaagcattgggtcagtcagatcggcagaacataccaggagataatccattgtgaaacatttggcactctagggttcaagaagtccaaacactgtacagtttgttgtgaccatgagctctcaaattctaatagtggcacgattaaaagggtcttcgcccgaactcaactagcggcccagcgagtgcgtgtaattttggtactttctggcacgaatattgttgttagagattatccacgattgggccaacgaatatgggttttcttggcttctcaaaaaaaattaagaaaaaacccaagtcattcccaacaaggtccaacaagagaaagcaaatgtttctaaaagggcttggtcctgtttggacccggcgctttttaacagttaaagaagggatttccatctattcaattttgaatagtaaaagatttcatcccatatggatctcctccaaattctttataaccaaacctgcccttagaatgtctccactagagtgtgtaaaaataggggacgcagaactgtagatgacactgtttgacattatttgcagagagaagttttaaatagggaatgggataaaggatgagataggagatctgctgaagataaccttagggtttaaaaaattaacaacactggatcctaacaaaccaatactaaaagatgggaattgcaaggaagtgctaagaattaatagaatcttcaatagtttccaaaagctacttctaattctagttttttggcaagattttaaatactctccaacaagtcataatccatctgcactcgaaaaactgattgaattgtcacaaatatatatatgcttgtatcaattgacaaatctggaggtggaagaacatggcaaagggtaagagaaagaatagagttctcaatgtcaagtaaaaagtctacgttcaccccctcacatataaaaccatctaaataaccccttaaactattgaaaaccacacaaataacctcatgaggtggttttgaaaatggttttactgatgtgtcatcttgaaaagtttatataaccccaacatattagggtctatataacccctgcactccccctccccaaatgtgaggctacttcgaacatacgacctagtaattcagtgagacaactctcaccactacagtagacccatcccatttgcaccaatcataggatacaaaattcaaattttacttttgtattttgggttctaattcctagttcatgttcttccaggaaatttatgagaaatgcatgacacatggttccagtaggtatgttaaatgtttgtattctaatttctaactcctagcattttgttttctgctactgtttgcaatattataggtacgaagttatatagacccttgatatgtcaggggttatatagacttctaaaaatgatacatcagcaaaaccaccttcaaaaccgcttcgagggttattttagagggttttaaaaagttaagtggtcagaatacatggttttgtaggtggagggtgaagtagacaaccatccatagttgagggggttaagtgaattttttcctcgatataattatataagagagaaagatagtagaaaagtagttgtagttgttttgaaattgttcaacggtcctaatgaaaaattgtcttttgtttttgccatactttgagaacttttggagaaacgaaacaaatatgctctcattttttagcaacatgaaatccttattgacttaccaactaatcttttaagaactattagggatgttgtaatggataaaaaacctagggtcactgctacaaccacaacctacatgatcatgagctaacttgtcaacacatggcacttagaaaagacgtttttagacccctaaacttttaaaatagtacacacctatgtttaaacttgtaaaatggcacatcacctaacaagtttaagggcccaaagctcatgaacctaagtgttatattttgacacatttaggacatgtacaatcatgagcctttggatcgattttccaagtatatgagacatataagagactgtatgatacaactcattagctttttaaatacagttaagaaaaaatatgtatagacagtcgtgtaagagctcgtctcttatacctttttcagttaacctactaaatacctcttaagagaccacatattgaatggatggagttgtacatgcctttagaagctgctgatgcatttaactctataaccattctctgccctcattttcatgtaagatcatgaaccaacgcattaagattttttagccataagacacgatcacacacaaggatcagtttcaacgctcgtcccgcgtcatagttttacaaataactcctattgtatgaaataacccacaagacacattctcttcacatcgatcgcatctgatccagttcgtctatccactccccgtcctccacgaattcgcgccctgcacgacgcgcgagcgactcagtcacccacacaaagacacaaattcacgcacgtcatgtcttctgttcatagcaacgatctgcatggcaagtgggcctgtgccaaatgcaccgcgatagcagcccaacaacccatgcatgtcgctcgatccgtaggggacagggaaagcggtttcagcagacccacacatgccgcgtcttccatgcatagaaacgtggggaaagcggcttcagcagctgcggggtggagccgttttactcatcctaatccgtctaccaatctggctacaaaaagtcgtatcgaggcccctcaagcgatagtggtggtggatctactcgtcgcaggtggcctgacactctccagctactctgactcgcctacgtcctccaaggtacgcacacatgtacatctgattttctggctcactaactccacgggcatcttcacaggcctgttcatcgagttcgtgtcacgttcgtgggacctaatggagaccaatgct

SEQ ID NO: 69080 - DNA, 769 bp, Zea Mays
cctggaataaacactatgttagtgttggttagacgacgtccgcttgacgatcatcttcaggtttgttcatcagcatcatcctgtggagtagcccgtgcttggggtcgacttgggtcgtcttctgcatcgcgcgattaattaacgtacctgaatggaatgcattatgcacatgaatgcatatcgatggaaatattacaaacctaaatagtgttacgtgatggcgaatttaaacacctagcggcgaggcgttgtacaatttcatacggaatccctagttattaatatacgactacacgcaataattacgcccctcgaacctaacgcaaacatcacgaacaacaaactatacacattaaatacaattagcctacacaactcaccagctaattgattaattgctaaccttattccttgttttataaattatactacatggctcacaaggaactattttaattttatttcactccttacatattttacatatcaacaattaatcaaacatctctttatgttatttatttaatgcaattgacaatgacaaaattcatcaagtagttgtataaaacactaaatctatcctttacgtcgttacttcgcccagatatcacctaaattaatacacctttcgcattactaaacccatcgtactttacttatttttaatactaccacaatacgcctgcgctaaatacgaggattattacgattaataattctagttaatccaatcattaaataaacttacaaaaattataaatcggctcac

SEQ ID NO: 69081 - DNA, 2303 bp, Zea Mays
aaggacttgtttcctaggctgggccaccatcaccaggagtcccacaaagtagtaaacagccataggactaggtccccacatgcggaacgcgaacctccacgcaggcccatcggacccccagaggtggagtcttgtcacactcggttttggaaggcaaaccgaatgcgaaccatgtacgtgccaggatcagaaactcacgtacacatcgattacatagttggacatcatcacacattgctcaaaataatagcggaaatagtactttattacatcaagatgtccaagacatccacagagtcattaacataacatagtcattaacataatcaaagtgtggaatacgaaacatagaggataaggccttcataggcagctgactgggggttgccactaaacacgactagaactcatcgtagtcttgaaactcttcaaaatcctccatgttgccttcatcccctcctgagcactgattgcaattggaacaacctagggttggggggtttaaagcaagggtgagtacacttcaacgtacccaacaaatgtcccgtttggctaaagtggactagatgtatgtggcgttgaggttaaagcagttgcttttagttggtcatgtatttactactagtagtagactaagttctagtaataaactcagttattacccaaaagtactccctccaagaggaaatgccagaagccacagttataatcatcatgagttaccatcatcataaaagtatccaaagttattctaatcaaagaggacccaaggatgctcttaactgtgaacacgactgatataccagtttctaacactctgcagaggttgcacactttacccatgagtcgtaatccctttccagcttgcgtttgcaagacccgatcttcactaccgaggtgaaccaccagggatacactatgtagcctttacaaagattcccctagtgcatagttgctcgtttggtttcaccagtcgtacaaacacagcactcctccctaaggtgggtgactaacaaaaccaaatcaaatgaacctcggcacccaaccttagcagagcgagcactatgccctagcccccattgatggccctctggcaaatccaactacacccccaagttcatctaattaatcagctaatggtgtcccattctaccctcatggttgtactattatcccgggtggtctctcaacaaacagatccttacggagaggtactcaggaaacagcctgagtcccctaaagtatcatagttcatcatcataatcaagataacatcatcatatcataaatattctcatcatgttcgttgattaaagtggagcaatagcatgaatctaaccataataacccaaaaggtaatcaaggacaaggtaaatacaaactagtcaatccataggtttcaattaagtaatgcgggacagtgaattataaagtaaataagacataatgggtcagaggacacttgccttcaccatgttgctgctcagggaagtctccgacaacacactcaggaactacggactgctcgttgtctacgcaaagaatcatgcattcaacacattgagaaatgacaaataaacagtacaccaaacatgtacaatcaagtgaacacaaactcaaaagaaaagtaacaaactcaaaagtgaagtatgggttctagggtggactaatacacctagaggtttgtggttctctaagtagtgcctatctcggggatcacataacttaacttcatttatcttaatgaatggctaaaattatactagggatgggttcatacaatacatgagattactttcacaaagttgatcatttaactattcattagggttttccttttattttcctattaataaataaaccatcactttaaccaaactatagtctagtcctaaaattaagacatgcagagagtgaaagattataatttaaacaagtagagaataattttatgaacattttgcaatttgaaccacccaatttggagttcatatgcaaaagatatgaaataaacaagttttgggattcaaattacaaaattaagcctatttctgtgataaaataaaaggtcagaggcttctgtgcaaaattccagggatctgcacgcaaaacacaaggatgatgggttgatgtccagaaagtcgagggggcttttaacaaaattttacaggcaaacgggtatcagatgatctcgaccgccagatcacaaatcaacagccaagattagatatgagcgcgagcgcgcgcagatgcgcggttgtgcgctgacaggcgggctaggggggtcagcgactggggaggga

SEQ ID NO: 69082 - DNA, 997 bp, Zea Mays
cgtaaaccctagcttccgtcacccacacagccggcgaggtggcttccatctcgctcgtgggccgatctcactgagcccccgccgttcttctctccacttcctgcgttctccagccgccgtcttcgctgataggctacgccgcccgctggcctgcgcgcgccgcagccttaccctgtgtgcaccctgttcctaaccctgcgtgtggccgccgccgactggcttgcgtgcgcccgcgcctccgcctaaccctgctagcttgcgcgcccaacgccagatgccctgagcccaccgccggctgtctgtgcacgcaagtgaacccatccggctacctgggcacgccatccgacctccctgcgaacctctgtatcggccgatattcctcaagaacacagtgcaaacagtaagttctggagacagcaaaaccttaaggtaacacatcagcaagttcgagactgccaaaaatatgcaaggcagctggctggaaagaaccatcatttgactttgaagaacaaggacctccgcataacagagtattcacatgcaaggtgaccgtccacctggatgaactggtcaacaccattatggagtgtttcagcgaccccaaacctaagaagaaagctgcacgggagaacgccgcacaaggggcattatggtgccttgagcgctctggttatgtcaagtcatcttcagatgttcctgacctgtgcggccatcagcccttctgctagccagatctacccttgtaggagtattaatgttggtagacgggtgcagcttgttgctgtggcacagtggttatccatgcactgatgccatgatactcttgagaagttgagtcccttatgaatcttgagccggctgtgttggctcgtgtacctagtctctagctcgtttggttacatgcccaacgcctgcacttgtactgtgtaaaatactgaactccggcgatcaatgcaatcaaactggaactcctagccgagctctgtcttgcaattcg

SEQ ID NO: 69083 - DNA, 979 bp, Zea Mays
agtgtgggcagcgtaaaccctagcttccgtcacccacacagccggcgaggtggcttccatctcgctcgtgggccgatctcactgagcccccgccgttcttctctccacttcctgcgttctccagccgccgtcttcgctgataggctacgccgcccgctggcctgcgcgcgccgcagccttaccctgtgtgcaccctgttcctaaccctgcgtgtggccgccgccgactggcttgcgtgcgcccgcgcctccgcctaaccctgctagcttgcgcgcccaacgccagatgccctgagcccaccgccggctgtctgtgcacgcaagtgaacccatccggctacctgggcacgccatccgacctccctgcgaacctctgtatcggccgatattcctcaagaacacagtgcaaacagtaacacatcagcaagttcgagactgccaaaaatatgcaaggcagctggctggaaagaaccatcatttgactttgaagaacaaggacctccgcataacagagtattcacatgcaaggtgaccgtccacctggatgaactggtcaacaccattatggagtgtttcagcgaccccaaacctaagaagaaagctgcacgggagaacgccgcacaaggggcattatggtgccttgagcgctctggttatgtcaagtcatcttcagatgttcctgacctgtgcggccatcagcccttctgctagccagatctacccttgtaggagtattaatgttggtagacgggtgcagcttgttgctgtggcacagtggttatccatgcactgatgccatgatactcttgagaagttgagtcccttatgaatcttgagccggctgtgttggctcgtgtacctagtctctagctcgtttggttacatgcccaacgcctgcacttgtactgtgtaaaatactgaactccggcgatcaatgcaatcaaactggaactcctagccgagctctgtcttgcaattcg

SEQ ID NO: 69084 - DNA, 304 bp, Zea Mays
gatttatctagaacacaatatacgagagttcaattctatttgcaataaatcaattgtataccttaaggttttgctgtctccagaacttattgtttgccctgtgttcttgaggaatacggccgatacagaggttcgcagggaggtcggatggcgtgcccaggtagccggatgggttcacttgcgtgcacagacagccggcggtgggctcagggcatctggcttctggcgttgggcgcgcaagctagcagggttaggcggaggcgcgggcgcacgcaagccagtcggcggcggccacacgcagggt

SEQ ID NO: 69085 - DNA, 1648 bp, Zea Mays
ctactaaacaaacgaccgtgtggaaccggctggggaaaactatttcgtggcggctagggtttaacaaatgccaaccacgctgctttgctagaccgccgccgatatctacggtcggattaggttcggtgccctcttcgcctctgtctcccgaggtctccctgcggcggcggtcaccgtagtggactccggccacccccacgacaaccggcaaaagggtacgggagtgtgaactatgccgtgcaaagacctgcgcttcactgcctttgcccacacctcaggctagaaaatggttcctgattccgtcaataaccaagacatatggatgctcatatatttattatttttaaacatcaagaattcctatgaagctacactcattcatttcacaattgctcatacgactgttctgctcctctttagaattgttctacgcatctctatgtatgctccaagcactatctctttaatctacgacaagaatttcatagcagctttgactactattgaagttgatctttttactagtgtggtctgcttagcagtaggtagcactacaactagcaatgtatggatgaattaaaggaagtgaagaaggcagacaatcttacataaactctacatcttaaaactgccatgattggcaaagaagctggatgcatcctttgcattggtgtattcttatcaccaagcagtaacgtgaagcaagtcctgaccagattgaagctctgtatcagtacgccaaatttcagtttgagtgtggtaactactcaggggctgctgattacctttaccagtatcgtgctttgtgcacaaacagtgagcgaaatgtgagtgccgtctggggaaagctggcagcagaaatcctaatgcagaactgggacgtagctttggaggaactcaaccgcttgaaggaaataattgattcaaagaacttctcatcacctctgaatcagctctagaacaggatatggctgatgcattgggctctgttcatcttctttaaccatgaaaatggtagaaatgggatcattgatctgttcttccaggacaggtacttgaatgctatacagacaaatgcacaccatcttattaggtatctagctactgcagttgttgtcaacaaaaggagaaggaatatgcttgaagagttgattaaggtcattcaacaggagcaccatagctacaaggatcccgtaactgaatttctggaatgcttatatgtaaactatgattttgatggtgctcaacagaaactcatagagtgtgagcagggttctggacaaagaaagcttgtaccttaaaacaggaggatacaagaagctggagtggttgtctgaaggcttttgaactgcttgaagcattagtgtagctttggtgcttttgtgactgatcaactctggagcagctagagtgatgtagttgtgggcttttgaacaatagctggagtgatatgaaacattagtgatgtagttgtgggcttttgaactgcttcaagctggagtgatgtcgttgtggtgcttttgtgactgatctagtcgtgaatgatattataattgtgatgcttttgtgtttatgtgatggatctatgattgtggtatactgattaactgtgtatgtctttatgatttgtgtataaaatatgtgattt

SEQ ID NO: 69086 - DNA, 1498 bp, Zea Mays
ctactaaacaaacgaccgtgtggaaccggctggggaaaactatttcgtggcggctagggtttaacaaatgccaaccacgctgctttgctagaccgccgccgatatctacggtcggattaggttcggtgccctcttcgcctctgtctcccgaggtctccctgcggcggcggtcaccgtagtggactccggccacccccacgacaaccggcaaaagggtaagggagtgcaagaactagggtacaccggcctcatgaacagctccattaacaatctctttgatctcatcacgaaccaaggtacgggagtgtgaactatgccgtgcaaagacctgcgcttcactgcctttgcccacacctcaggctagaaaatggttcctgattccgtcaataaccaaggtagcactacaactagcaatgtatggatgaattaaaggaagtgaagaaggcagacaatcttacataaactctacatcttaaaactgccatgattggcaaagaagctggatgcatcctttgcattggtgtattcttatcaccaagcagtaacgtgaagcaagtcctgaccagattgaagctctgtatcagtacgccaaatttcagtttgagtgtggtaactactcaggggctgctgattacctttaccagtatcgtgctttgtgcacaaacagtgagcgaaatgtgagtgccgtctggggaaagctggcagcagaaatcctaatgcagaactgggacgtagctttggaggaactcaaccgcttgaaggaaataattgattcaaagaacttctcatcacctctgaatcagctctagaacaggatatggctgatgcattgggctctgttcatcttctttaaccatgaaaatggtagaaatgggatcattgatctgttcttccaggacaggtacttgaatgctatacagacaaatgcacaccatcttattaggtatctagctactgcagttgttgtcaacaaaaggagaaggaatatgcttgaagagttgattaaggtcattcaacaggagcaccatagctacaaggatcccgtaactgaatttctggaatgcttatatgtaaactatgattttgatggtgctcaacagaaactcatagagtgtgagcagggttctggacaaagaaagcttgtaccttaaaacaggaggatacaagaagctggagtggttgtctgaaggcttttgaactgcttgaagcattagtgtagctttggtgcttttgtgactgatcaactctggagcagctagagtgatgtagttgtgggcttttgaacaatagctggagtgatatgaaacattagtgatgtagttgtgggcttttgaactgcttcaagctggagtgatgtcgttgtggtgcttttgtgactgatctagtcgtgaatgatattataattgtgatgcttttgtgtttatgtgatggatctatgattgtggtatactgattaactgtgtatgtctttatgatttgtgtataaaatatgtgattt

SEQ ID NO: 69087 - DNA, 1542 bp, Zea Mays
ctactaaacaaacgaccgtgtggaaccggctggggaaaactatttcgtggcggctagggtttaacaaatgccaaccacgctgctttgctagaccgccgccgatatctacggtcggattaggttcggtgccctcttcgcctctgtctcccgaggtctccctgcggcggcggtcaccgtagtggactccggccacccccacgacaaccggcaaaagggtacgggagtgtgaactatgccgtgcaaagacctgcgcttcactgcctttgcccacacctcaggctagaaaatggttcctgattccgtcaataaccaagaattgttctacgcatctctatgtatgctccaagcactatctctttaatctacgacaagaatttcatagcagctttgactactattgaagttgatctttttactagtgtggtctgcttagcagtaggtagcactacaactagcaatgtatggatgaattaaaggaagtgaagaaggcagacaatcttacataaactctacatcttaaaactgccatgattggcaaagaagctggatgcatcctttgcattggtgtattcttatcaccaagcagtaacgtgaagcaagtcctgaccagattgaagctctgtatcagtacgccaaatttcagtttgagtgtggtaactactcaggggctgctgattacctttaccagtatcgtgctttgtgcacaaacagtgagcgaaatgtgagtgccgtctggggaaagctggcagcagaaatcctaatgcagaactgggacgtagctttggaggaactcaaccgcttgaaggaaataattgattcaaagaacttctcatcacctctgaatcagctctagaacaggatatggctgatgcattgggctctgttcatcttctttaaccatgaaaatggtagaaatgggatcattgatctgttcttccaggacaggtacttgaatgctatacagacaaatgcacaccatcttattaggtatctagctactgcagttgttgtcaacaaaaggagaaggaatatgcttgaagagttgattaaggtcattcaacaggagcaccatagctacaaggatcccgtaactgaatttctggaatgcttatatgtaaactatgattttgatggtgctcaacagaaactcatagagtgtgagcagggttctggacaaagaaagcttgtaccttaaaacaggaggatacaagaagctggagtggttgtctgaaggcttttgaactgcttgaagcattagtgtagctttggtgcttttgtgactgatcaactctggagcagctagagtgatgtagttgtgggcttttgaacaatagctggagtgatatgaaacattagtgatgtagttgtgggcttttgaactgcttcaagctggagtgatgtcgttgtggtgcttttgtgactgatctagtcgtgaatgatattataattgtgatgcttttgtgtttatgtgatggatctatgattgtggtatactgattaactgtgtatgtctttatgatttgtgtataaaatatgtgattt

SEQ ID NO: 69088 - DNA, 2882 bp, Zea Mays
taaactatgcatatttattaaaaaacacaatgtactcatatttatacttgttgtgtgattgcctattgtacgcgtgctcgttggcgactgttggagctcgacctcttacgctgacggtgtttgttcctaggtgaggaaaaacataaaatttgctagacttaggagtgacatgaaatgatacacctaatactgagggaatgagagaaacctttggctgatgccttgatgcatgttaattgcataaatatttgataccttgacacttggatgaaactggacgggaatgaaaccagagcagtagggtaagtgttggtgcatgcgctaccatggtggtagacttgagaccgagttgtcatggtgacatctcgggtttactagttttggttggtggctgctctggtgaaccataaggactgtgtgttggggtgccatctcacctaacttatttccagtgcgaccacatgagcttgtatgggcaagccttagcctaatcccactggctggcctggtagtcgtccgaggtggatatgttttgggttggggacccgagcggtcagaacccagggtttgtgggcggctaggcgaggttgagccatgactgggtgttggctatgatagagtcgtcttgggacggtgatgtgcgtgtggcactacacgacggttgatctttagcgacccttattagggaccgacggttggtcgctaaaagttatggaccgacgattggtcgctaaatacgtttatagcgacggtctgtgggtcactaaaagtctagaaatttaacgacttatggtcggtcgctataggggtaagtgtgtgactgatggtgggtcgctatagaggtacgtgatttttgtgtttcttatttactcaccaaagcccatctaaaggcctactaaacaaacgaccgtgtggaaccggctggggaaaactatttcgtggcggctagggtttaacaaatgccaaccacgctgctttgctagaccgccgccgatatctacggtcggattaggttcggtgccctcttcgcctctgtctcccgaggtctccctgcggcggcggtcaccgtagtggactccggccacccccacgacaaccggcaaaagggtacgggagtgtgaactatgccgtgcaaagacctgcgcttcactgcctttgcccacacctcaggctagaaaatggttcctgattccgtcaataaccaaggtatgaatagttgaaagctattgcaatatactactgcaacattcattgctttgtgccactttgcttatgttagtaatttcgacatgctctgcttatttagttgacacttgttgatacgattgtgcttgccgtccataagtgagttctaaagactattgatttcattgacgatatttaatcttatgcactatgtttatgtgacctattaatatttttgctgctttgttgattgcttatacctctttactgttatctcaggacagttatagttttccaatttgtacacttacatatagattaataattgaagtccaattgttgttaacaaaaaatattccttagacatatggatgctcatatatttattatttttaaacatcaagaattcctatgaagctacactcattcatttcacaattgctcatacgactgttctgctcctctttagaattgttctacgcatctctatgtatgctccaagcactatctctttaatctacgacaagaatttcatagcagctttgactactattgaagttgatctttttactagtgtggtctgcttagcagtaggtagcactacaactagcaatgtatggatgaattaaaggaagtgaagaaggcagacaatcttacataaactctacatcttaaaactgccatgattggcaaagaagctggatgcatcctttgcattggtgtattcttatcaccaagcagtaacgtgaagcaagtcctgaccagattgaagctctgtatcagtacgccaaatttcagtttgagtgtggtaactactcaggggctgctgattacctttaccagtatcgtgctttgtgcacaaacagtgagcgaaatgtgagtgccgtctggggaaagctggcagcagaaatcctaatgcagaactgggacgtagctttggaggaactcaaccgcttgaaggaaataattgattcaaagaacttctcatcacctctgaatcagctctagaacaggatatggctgatgcattgggctctgttcatcttctttaaccatgaaaatggtagaaatgggatcattgatctgttcttccaggacaggtacttgaatgctatacagacaaatgcacaccatcttattaggtatctagctactgcagttgttgtcaacaaaaggagaaggaatatgcttgaagagttgattaaggtcattcaacaggagcaccatagctacaaggatcccgtaactgaatttctggaatgcttatatgtaaactatgattttgatggtgctcaacagaaactcatagagtgtgagcagggttctggacaaagaaagcttgtaccttaaaacaggaggatacaagaagctggagtggttgtctgaaggcttttgaactgcttgaagcattagtgtagctttggtgcttttgtgactgatcaactctggagcagctagagtgatgtagttgtgggcttttgaacaatagctggagtgatatgaaacattagtgatgtagttgtgggcttttgaactgcttcaagctggagtgatgtcgttgtggtgcttttgtgactgatctagtcgtgaatgatattataattgtgatgcttttgtgtttatgtgatggatctatgattgtggtatactgattaactgtgtatgtctttatgatttgtgtataaaatatgtgattt

SEQ ID NO: 69089 - DNA, 1388 bp, Zea Mays
ctactaaacaaacgaccgtgtggaaccggctggggaaaactatttcgtggcggctagggtttaacaaatgccaaccacgctgctttgctagaccgccgccgatatctacggtcggattaggttcggtgccctcttcgcctctgtctcccgaggtctccctgcggcggcggtcaccgtagtggactccggccacccccacgacaaccggcaaaagggtacgggagtgtgaactatgccgtgcaaagacctgcgcttcactgcctttgcccacacctcaggctagaaaatggttcctgattccgtcaataaccaagaattcctatgaagctacactcattcatttcacaattgctcatacgactgttctgctcctctttagaattgttctacgcatctctatgtatgctccaagcactatctctttaatctacgacaagaatttcatagcagctttgactactattgaagttgatctttttactagtgtggtctgcttagcagtaggtagcactacaactagcaatgtatggatgaattaaaggaagtgaagaaggcagacaatcttacataaactctacatcttaaaactgccatgattggcaaagaagctggatgcatcctttgcattggtgtattcttatcaccaagcagtaacgtgaagcaagtcctgaccagattgaagctctgtatcagtacgccaaatttcagtttgagtgtggtaactactcaggggctgctgattacctttaccagtatcgtgctttgtgcacaaacagtgagcgaaatgtgagtgccgtctggggaaagctggcagcagaaatcctaatgcagaactgggacgtagctttggaggaactcaaccgcttgaaggaaataattgattcaaagaacttctcatcacctctgaatcagctctagaacaggatatggctgatgcattgggctctgttcatcttctttaaccatgaaaatggtagaaatgggatcattgatctgttcttccaggacaggtacttgaatgctatacagacaaatgcacaccatcttattaggtatctagctactgcagttgttgtcaacaaaaggagaaggaatatgcttgaagagttgattaaggtcattcaacaggagcaccatagctacaaggatcccgtaactgaatttctggaatgcttatatgtaaactatgattttgatggtgctcaacagaaactcatagagtgtgagcagaatcagtataataatatggactatttggagtggtctttaaatgagcttggatgttggtgcataaggctgcaacaccgtctagtggaggtagataaggcatcaaaattgtatttttatttgcaaatgtagcaacaatatactaatttgatgtacttttt

SEQ ID NO: 69090 - DNA, 2295 bp, Zea Mays
aaactatgcatatttattaaaaaacacaatgtactcatatttatacttgttgtgtgattgcctattgtacgcgtgctcgttggcgactgttggagctcgacctcttacgctgacggtgtttgttcctaggtgaggaaaaacataaaatttgctagacttaggagtgacatgaaatgatacacctaatactgagggaatgagagaaacctttggctgatgccttgatgcatgttaattgcataaatatttgataccttgacacttggatgaaactggacgggaatgaaaccagagcagtagggtaagtgttggtgcatgcgctaccatggtggtagacttgagaccgagttgtcatggtgacatctcgggtttactagttttggttggtggctgctctggtgaaccataaggactgtgtgttggggtgccatctcacctaacttatttccagtgcgaccacatgagcttgtatgggcaagccttagcctaatcccactggctggcctggtagtcgtccgaggtggatatgttttgggttggggacccgagcggtcagaacccagggtttgtgggcggctaggcgaggttgagccatgactgggtgttggctatgatagagtcgtcttgggacggtgatgtgcgtgtggcactacacgacggttgatctttagcgacccttattagggaccgacggttggtcgctaaaagttatggaccgacgattggtcgctaaatacgtttatagcgacggtctgtgggtcactaaaagtctagaaatttaacgacttatggtcggtcgctataggggtaagtgtgtgactgatggtgggtcgctatagaggtacgtgatttttgtgtttcttatttactcaccaaagcccatctaaaggcctactaaacaaacgaccgtgtggaaccggctggggaaaactatttcgtggcggctagggtttaacaaatgccaaccacgctgctttgctagaccgccgccgatatctacggtcggattaggttcggtgccctcttcgcctctgtctcccgaggtctccctgcggcggcggtcaccgtagtggactccggccacccccacgacaaccggcaaaagggtaagggagtgcaagaactagggtacaccggcctcatgaacagctccattaacaatctctttgatctcatcacgaaccaaggtacgggagtgtgaactatgccgtgcaaagacctgcgcttcactgcctttgcccacacctcaggctagaaaatggttcctgattccgtcaataaccaagaattgttctacgcatctctatgtatgctccaagcactatctctttaatctacgacaagaatttcatagcagctttgactactattgaagttgatctttttactagtgtggtctgcttagcagtaggtagcactacaactagcaatgtatggatgaattaaaggaagtgaagaaggcagacaatcttacataaactctacatcttaaaactgccatgattggcaaagaagctggatgcatcctttgcattggtgtattcttatcaccaagcagtaacgtgaagcaagtcctgaccagattgaagctctgtatcagtacgccaaatttcagtttgagtgtggtaactactcaggggctgctgattacctttaccagtatcgtgctttgtgcacaaacagtgagcgaaatgtgagtgccgtctggggaaagctggcagcagaaatcctaatgcagaactgggacgtagctttggaggaactcaaccgcttgaaggaaataattgattcaaagaacttctcatcacctctgaatcagctctagaacaggatatggctgatgcattgggctctgttcatcttctttaaccatgaaaatggtagaaatgggatcattgatctgttcttccaggacaggtacttgaatgctatacagacaaatgcacaccatcttattaggtatctagctactgcagttgttgtcaacaaaaggagaaggaatatgcttgaagagttgattaaggtcattcaacaggagcaccatagctacaaggatcccgtaactgaatttctggaatgcttatatgtaaactatgattttgatggtgctcaacagaaactcatagagtgtgagcagaatcagtataataatatggactatttggagtggtctttaaatgagcttggatgttggtgcataaggctgcaacaccgtctagtggaggtagataaggcatcaaaattgtatttttatttgcaaatgtagcaacaatatactaatttgatgtacttttt

SEQ ID NO: 69091 - DNA, 1239 bp, Zea Mays
ctactaaacaaacgaccgtgtggaaccggctggggaaaactatttcgtggcggctagggtttaacaaatgccaaccacgctgctttgctagaccgccgccgatatctacggtcggattaggttcggtgccctcttcgcctctgtctcccgaggtctccctgcggcggcggtcaccgtagtggactccggccacccccacgacaaccggcaaaagggtacgggagtgtgaactatgccgtgcaaagacctgcgcttcactgcctttgcccacacctcaggctagaaaatggttcctgattccgtcaataaccaagaattgttctacgcatctctatgtatgctccaagcactatctctttaatctacgacaagaatttcatagcagctttgactactattgaagttgatctttttactagtgtggtctgcttagcagtaggtagcactacaactagcaatgtatggatgaattaaaggaagtgaagaaggcagacaatcttacataaactctacatcttaaaactgccatgattggcaaagaagctggatgcatcctttgcattggtgtattcttatcaccaagcagtaacgtgaagcaagtcctgaccagattgaagctctgtatcagtacgccaaatttcagtttgagtgtggtaactactcaggggctgctgattacctttaccagtatcgtgctttgtgcacaaacagtgagcgaaatgtgagtgccgtctggggaaagctggcagcagaaatcctaatgcagaactgggacgtagctttggaggaactcaaccgcttgaaggaaataattgattcaaagaacttctcatcacctctgaatcagctctagaacaggatatggctgatgcattgggctctgttcatcttctttaaccatgaaaatggtagaaatgggatcattgatctgttcttccaggacaggtacttgaatgctatacagacaaatgcacaccatcttattaggtatctagctactgcagttgttgtcaacaaaaggagaaggaatatgcttgaagagttgattaaggtcattcaacaggagcaccatagctacaaggatcccgtaactgaatttctggaatgcttatatgtaaactatgattttgatggtgctcaacagaaactcatagagtgtgagcagcctgaaagacaacacatcctttttttgtgtgcaaaacatccttctgtaaaatgatcctcaaccgtcaattcttt

SEQ ID NO: 69092 - DNA, 418 bp, Zea Mays
ccgatatccagcccgtttttgtgttgcccgaaacagtcacgaaaactatccgaatgagatttagtcagaatcgtatacctcggattttctgtttcttgattcggaaaataaagtgtgtagccagttgtcgtctagtgcgttgatccttttgttcatcgctaaaaaaaaagaaaaaaacaaaatagaaaaagatcttgccgccgcccctccctatatatttttttcagccatcctcatcctctccaagccgacgccaaaccttatcatgtgcacgaacttatcttctccatcttctccccattttcctctgcgccggccacctgggaggattgagctcacccctctacgccctccatgctcactgctctccagctcgccatctccctcagctctccaccgcgcggctctgctcgtcgtt

SEQ ID NO: 69093 - DNA, 993 bp, Zea Mays
gtagcattgcaccactgggctcggcagcggcacagcactgcggaggaggagcacggtcggtcgcacccggcacggaggttggaagctcagttagatgaccaaatgatcgcataccgtaaattggtttctatgaaatcagatggttcagagaatgatattgagtctgatatagaaagatcactgaagcagttgcagcaagtaaattcgcaaatgcaaacttgggtatcatcaggaggttctgaagttctttctcatactctgactcgtcatatggagattttgcaagaccttactcaggaattctatcggcttcgatcaagtctcagggtgaaacaacagcatgcttctctccttgacctgagagattttgacagagcaaagtttgatgttgaagagccatcagactcagctgatcaagctcttctcagggaacaagctgcgattggcaggagtactggacagatggataacgtgatatcacaagctcaggcaacactaggttctctcatgactcaacggtcaacattcggcggcatcactacaaagataagcaacgtcagcagccgacttccaacaattaaccatgtcctcgcgtctatcagaaggaagaaatccatggacactatcatcctttcccttgtcgcatcagtctgcgcgttcctcatcttcatctactggctgtcgaagtaggtttaccaaagcaaatgtattacggtgttgtaagcttgggatcacactaccggtacagatgatcgtgattggtgtttgtacaatattggttgattgaatgctattacgattcgggagtgctgtagccaccgtgtctccaagctgtgattgattgggcgcatggattgagttggcctatcagcaacttatattataatggagggaaaaaatcatttggtgttattgcacgaagaacatgaaagtggtcctacaatgaacaagctatttttcagattggatcttgaagcaatgaactcatgttcg

SEQ ID NO: 69094 - DNA, 1262 bp, Zea Mays
ccgttcttccttcgagccaccaacctttcctcagcttatccagccagctcccttgtaaccctagctgcccgccggctcataaaccctagcgattatcgagggatgcagcccacgacgcgggaaatgcacgccatggtcgccgccagccagatctccctcgacgacttgcgcgcggcagcaggcgctgctggcggcgtgcacgacgacttcctggaccagatgttcggaggcctgccgccgtcagcatggccggaactggcatccgtggcgggagggaaggcgccggatggcggcgcgcaggcggaggggatggaacaccagccgcagcactttgggagaggagaaatcgccggcagcgtcttcggcggctcctttgtcggatcgctccagcagcagcagcattttcagtcgcatcatccgcagcagcaaacagccccgccgttgccgggccagggcttcggtggaggaggcagaggaggtggacgcgcgggcgcgcccggcggcatgtcgcagccgcaggccggggctgcggtaggaggcgcggcggcgccgcccaggcagcgcgtacgggcgcggcgcggccaggccaccgacccccacagtatcgcggagcggctccgtagagagaggatcgcggagaggatgaaggcgctgcaggagctggtgtccaatgccaacaagacggacaaggcgtcgatgctggacgagatcatcgactacgtcaagttcctacagctccaagtcaaggtgctgagcatgagccggttaggtggcgccgctcgtagccgacagggtcgagacggcgcggcggccgcggccgggagcgacggcctggcggtgacagagcagcaggtggcgaagctgatggaggaggacatgggtactgccatgcagtacctgcaggggaaagggctgtgcctcatgcccgtctccctcgccgccgccatatcctccgcaacgtgccacatgcgaccgccggtggggggacccggggtcgccgccgggcaccacatggccgccatgcggttgccccacgtcacgaacggcggcgccggagccgacgacgtgtcggcctccccgagcatgtccatgctcacgacgccgtcggccatgcccaacggcgccggggcaggcgttgatggcaaggacgccgcgtccgtgtcgaagccgtgatctaagggcaatggacgccgtttcactaacggcgaaaccctgacacccgaggacttggactactgggaaatgtgggctgacccacgggc

SEQ ID NO: 69095 - DNA, 1901 bp, Zea Mays
ctacaacttccccatacggcggcggcggcgggagggacttcacctgcacgggcggcttcacggcttccgcatccttcagccgatccgaagacaccatgcctccagggaggaagggaatacgaagcacaagggaacccccaccagaaatcacttctactgagtatgagaaacaaagggcagcaaatgtgatgaggaacaatcagatgttccaacggcttgggattaatcagttacgcacaatgatgactgctacaagagtaaagagcaaatatgatggtccagaggaatcagggtctttgtttgacggcgaggatagtgaaggctctgagccagaggaggattcccatgttgcacaaggtgtacgtagccacaacccaactcatgttgctgacaaacctacacaacaaacacgaggttctaaaagggttgtggcccctgatgttcatggacaacagattagattcactaggcaaaggagtgctgccataaatcaacaatcctccctaagcctaactactactacacaagctggttcaagagccaccacaaaccaagaatccacccaaaacttggctgctgcaacacaatttacttcaagtgttgccactgagcaagatcacactgtaggcctgactactgctgcacaacctagttctcccacacaagctgaggtcaatgaccacaatagagatgaagaattggtactaaggcaaagaagtaggggcaaacaacttgaatccttgagcagagggttaggcactaagattccaatccaaatctctaatgggaagcgaaggtcagagccacctattcaggctgcaaagtttgcatcggagggtgggatcatactgaggcaacaccttccaatatttccacactggaaggagtacaagaagcaagagaacgagggtaaaattacagactacattgggaagcttgctggtcaattcaccatggatgttgagagtaatgcagtaaaagatgcatgtgttgatatgctaaagggtggacagcgccaaatgaggtataggctggaaaaaagtacttcactggagttcctgcaaatcaagtgaggactacatcacctaacaattgtgtgaagaacaaacttaatcgtgagaaggtgcaatttccacagtgcacaggatctcaatcatatgttgcaaaagcttatgtagtgagacaagaaaaatataaagatgtcgaacctagtgcaattgatcttttcaaggagatgcattgcagcaagaaaaaaggatttaattaagttgttcagaaagccataggtgatatggaagcaatggtggcaacaccagctgaagatggacagcttgcaaagtctgcaacagaagttgtttccaatgtgctaccgggttcaagtaaatttcttcacaatgctggccttttgccctcctccaagagaagcaacacagggactgtttcagcaagaatgcaagagcttcagtctcaattggacaatgagaggcgagaaaaagatggacttcgagaagataaggataccttaaaagtcaagtcacaagcatctcaggcaaccattgctaatcaatcaactgagattgcagatttaaagaagtccttagcagaaaatagcatcctacttcgacagatattaagtattagtcatgatcaggtgaatccttaagcatgcttgctaagatgatggtgtcaaccatcctgaagacacatctcacaaaactgtggacctctttttatcctcatgtttgctatatggaactgcaacttacagtctattatatgtgttctcttgttatagagttttagtacttgtctggttaaagaattatgaaccatgttcttttgtgtgttggacatattatgcttgaaatatatggatgttggaaaaagttgtaactttggat

SEQ ID NO: 69096 - DNA, 1911 bp, Zea Mays
agacgacgaactccgctccgcccgaccccagggctcggactcgggctcggccccgaaagacgacgaactccgcctcgcccgaccccagggctcggactccgccctggcctctgccgaacgacttccgcctcgcccgacccaggggctcgggctcggcctcggcgacggaagacagattcgaccccagcttcggaggagcccccacgtcgcccggcctcgggcgcgggcccgccacgtcaacagggagcgccatcatcactctaccccgagccgactcgggccgcagagaacaagaccggtgtcccatctgaccagctccgccagataggcaatgatggcgcctcccaagctctatgacggcggtggctctcagctctcttacggaaacaggtggacgtcagcaaggactcgaccgctccgacagttgtccttccgccaagctccgttgctcctccgacagccacgacatcacaccagcagggtgccaagatctctccggctgccacattggcatgtacttagggcgctagctctctctccactagacacgtagcaccctgctacacccccattgtacacctggatcctctccttacgcctataaaaggaaggaccagggccttctcagagaaggttggccgcgcgggaccgaggacgggacatgcgctctcttggggccgctcgcttccctactgcaagcgcacccgacctgggcacgggacgaacacgaaggccgcgggacttccacctctctcacgcccgtctccggccacctcgcctctccccccttcgcgctcgcccacgcgctcgacccatctgggctggggcacgcagcacactcactcgtcggcttagggaccccccggtctcgaaacgccgacaatagtatacaaatatattttgcataaaatcgaattagcttaattgatatatgcctaaattactattattagaatggaattcaattccaatgatccaaacggggcgtaatatgattttatgcgaaatatatttatatacatatgcgggagatatttattactatagaagagtgaagcaaatagtgtcttacaagtttcaaggtagaaatatattccgttgatacataaaattattttccaaactgtccccatgaatttaagatagatttatatctgagctttgaaaaatggtggcatgttaaattctaagccaaattgactactttattaagtaaattctaattcctccaaaatcaatagatccaaacggctcttaagggctgatttggtgacaagataattggagagatccatggggaggaatagcaagggatttcctcacctatagatcctctacaattcccttgtcaccaaaccatctctaaacggctcttaagggctgatttggtgacaagagaattggagagatccatgggaggaatagcaagggatttcctcacctatagatcctctacaattcccttgtcaccaaaccatctctaaaggctagtttgggagtaaaaaaccggagggtattgaagaggctaaaatccctctcttattcaaaattgaataacgagaggattttagcccctccaatcccctccggttttgtggctcccaaactagccctaagagatcgtttggatccattcgaatcagaatctactaaattaagtaggctatttatcttgaaatttgacaacccaacactttccaaagttcaaatataagcctatctcaaatttatcgagttcaggttctttgaatccctgaatcaatactactcatgcatttaaacaaggaaaaatccataaattcaatcaagcaacaagtacaacagcataatctgttttcaactgtattttcagtggaacatccattaagcagcaagacatgaactaaattagctaagagaacttactcatat

SEQ ID NO: 69097 - DNA, 1583 bp, Zea Mays
acacctttaccgagtgccgagaccgataatgaaggatacgcaactctctgtgtttccagagaaaaaagcaaaacctttgtcaaagtcaggtatatatatgtacatggattcatatttattaccaagtcatatacttcacacatgcagatagacatcgttgctattgaacttggttacatacactgtgtcagaaattaaaagcacacaatagaagcgtaaaggtcacagacgcgggtttgccgcatctcccatagcgcccacatatctcactatgatgaccgcaatcacaactctcttataattgatgtttagtttacaaggtatggcataacctatggacacttaaccacatatataggaactgaaaactattgtacatgaagattagaattactcatagctaaccttataagtacaacaccactgtgctcccgcaatcagctgatcagcagaactgcagaatacgtacagcagaaagagaatggcttttcgtacagcgaggagttgatcatgaacaagctattgtatttgcataccttgtgctcctgaggtacatgttgtcactgtacagatccagctccttacatgccatgcacggtcaacaagagcaaactagcaaactggccggcagcgaaaagaagtaaagaacttgtatgcagggaaatggtaaattcctaacgccccgtttagatccttggaatcgaattccgttaatttagacaaacattaattaagctaacggggcgtttggatcccttcattttagaggaattggaattcactcaataaagtaacttatttagtttggattttgacattccaccactttccaaagttcagatataagcatatctcaaattcatggggtagagggtgagaaatgattttatgcattagtagaatttgtttctactctgtaacttgcatgacactcttcgtttcactcctctatagtaaaaatgtagcacataaatatctccgacatcttgctaataatagttgtcggggaccataattaggggtaccctcaagacgcctaattctcagctggtaacccccatcagcataaagctgcagaggcctgatgggtgcgattaagtcagggatcagtccatacgagtgactcgatcacgcttcacccgagcctagcctcggactcgggcagccgccctcgagggacttccgtctcgcccgaggccccccttttaacggcggacacatctccggctcgcccgaggccttggcttcgctaagaagcaaccctgactaaatcgccgcaccgactgaccaagttgcaggagcatttaacgcaaaggtggcctgacacctctatcctgacgcgtgccccccggcagagccgaagtgaccgccgtcactccgccgctccactgaccggtcagacagaaggacagcgccgcctgcgccactccgactgcagtgccactcggcagagtgggtctgacaggcagtcagacctcgccaggggcgccatagggaactccgctccgcccgaccccacggctcggactcgggctaagacccggaagacggcgaactccgctccgcccgaccccagggctcgg

SEQ ID NO: 69098 - DNA, 842 bp, Zea Mays
cacaaatgcggggaggctatttcgaaccgggacctggtgattcgatacaacagatccttcacactttggatcatctcaaagtgaacctatggaagaggaccatgtgactggacttccttttgccatgattgatgaaatcgctgatggttctcctgcttctgtggatggtttgcaacttggagatgagattgtaaagtttgggaatgtggaagctggtgatcagttgcaggaaaggctcatgtctgaagctctttccaatgaggacagtcaagtatctttagtcatcattcgccagggatcagcggtgaatttaacaattacaccaaggaagtggcatggaagaggacttctggggtgccatttcagaatgctatgaagagtccgtcgttcttcagcaggatgcgttggtctatcatgcttgcactcgtggagagtggagacggctctagcgatgccatttcagccgcaaagtgaactgatttaaccgaatgtgtgacatcttccaaaatactggttgcgtgtacttaacttgtggagcgcttgaaacatactagtgtaccaggctgcctgtgttgagacattttacttgtacacatggtcggttttcgttcttcctcgcttgcgtatcggtatcgcacaccaacttgaaattgaaagtcgtcaacgttcttctagttcatacggtcaggaccctgagtttgcatcaatcaacagctaaaaaagggccatatgctagcgatgcaagtttgaatccatgagcagattagggaacctttggtatcagctctacaccttctgtagggatgtttctgtcacgcttgagaataatatatgaggctaac

SEQ ID NO: 69099 - DNA, 797 bp, Zea Mays
agcaagttttgcggctggatgcattttagcgaagtcaggtgtcggcgtatgccaaatgtctcgttgagacaccgctgcagtgcagactcgccgaaaacgactcctcacgaactagtccgtttccgtgcgccgctgctgacgagggagtgggagggatcatggtggcgccggatgtgaaggcggagacgatgaagctgatggatcagcggggtgccctagaggcggagatggacgccatcatcgcccgcctcactgcggcaggcggaccgggcatcaccggcggcctcgtcgacgccgagggtttcccaaggtccgacatcgacataccgaacgtcctcgcccagcgccggaggcttgctgaattgcgaaatgaccacaaggatattacaaacaaaattggtaaaaatcttgaggttttacactcagcaaagttatcaaggaatgaacaatcaacctcaaggagatctgatacaacagatccttcacactttggatcatctcaaagtgaacctatggaagaggaccatgtgactggacttccttttgccatgattgatgaaatcgctgatggttctcctgcttctgtggatggtttgcaacttggagatgagattgtaaagtttgggaatgtggaagctggtgatcagttgcaggaaaggctcatgtctgaagctctttccaatgaggacagtcaagtatctttagtcatcattcgccagggatcagcggtgaatttaacaattacaccaaggaagtggcatggaagaggacttctgggcacctggaattaaagcaat

SEQ ID NO: 69100 - DNA, 821 bp, Zea Mays
agcaagttttgcggctggatgcattttagcgaagtcaggtgtcggcgtatgccaaatgtctcgttgagacaccgctgcagtgcagactcgccgaaaacgactcctcacgaactagtccgtttccgtgcgccgctgctgacgagggagtgggagggatcatggtggcgccggatgtgaaggcggagacgatgaagctgatggatcagcggggtgccctagaggcggagatggacgccatcatcgcccgcctcactgcggcaggcggaccgggcatcaccggcggcctcgtcgacgccgagggtttcccaaggtccgacatcgacataccgaacgtcctcgcccagcgccggaggcttgctgaattgcgaaatgaccacaaggatattacaaacaaaattggtaaaaatcttgaggttttacactcagcaaagttatcaaggaatgaacaatcaacctcaaggagatctgatacaacagatccttcacactttggatcatctcaaagtgaacctatggaagaggaccatgtgactggacttccttttgccatgattgatgaaatcgctgatggttctcctgcttctgtggatggtttgcaacttggagatgagattgtaaagtttgggaatgtggaagctggtgatcagttgcaggaaaggctcatgtctgaagctctttccaatgaggacagtcaagtatctttagtcatcattcgccagggatcagcggtgaatttaacaattacaccaaggaagtggcatggaagaggacttctggggtcttccagttagtcatttcaccatttgatgctaatgtctcag

SEQ ID NO: 69101 - DNA, 3229 bp, Zea Mays
cttgtttatgacagggctcttgcattggcgtccgttagtgctgtgcttgcgtttgaaccggactacttctactctatttcctggctagaaaatatgtggtctctgaccttgcaacagatgttgtggtgcatgttggtgaagtaaaattttacttgcacaagtttcccctcctttccaagagcggcaagcttcaaagattagttctgaaggccgctgaggacgagactgatgaggttcgcatagatgaccttcctgggggagcaaaatcattcgaaatatgtgccaagttctgctatggaatggtggtcaccctcagtccacacaacgttgtagctgcaagatgtgcgtcacagtatcttgaaatgaccgaagatatggaaaaggggaacttgatatttaaaatcgaggtcttcataaattctagcatacttcgtagctggaaggactctatcattgttctccagagcacaaaggctctatcaccatggtctgaagagctgaaggttgtgggtagatgtatcgatgccatcgcttcgaagacgtctgcggatcctgccaatgtaacctggtcatacagtcatagtagcaagaaaggaggagcttgtgctgaaatagtcgagccagcaggaaagccatcaatagctccaaaagattggtgggttgaggacttgtgtgaactggatgttgacctgtacaagagagtcatggttgctatcaaatccaaggggagaatgtcacctgaactgataggagaggcacttaaagcctatgcagttagatggctgccagactcctacgatgcattagttgccgaggattacatgaggaggaatcaatgtctggttgagacaataatatggttgctgccttctgacaagagctcgggatgttcttgcagatttctcctgaaactgttgaaagtggccatactagtcggaggcggggagcacgtgaaggaagagcttatcaggaggatcagcttccagttgcacaaagctactgttaaggatctcttattacctgccacttcgcctaatgatggtacctatgatgttcggctggtgcataatcttgtccagagatttgttgcaagaacagcgctgtctcataatggcggtttcattgagaagtccgacgaaaagatgattgagctcaacttcgagcaagaatccattttgtcggtaggagagcttgttgatggctacctgtctgaagtagcttcggatcaagacctttcgttgtctatgtttgttgaactggcgactgccgtgccagaggtggctaggcctgttcatgacaacctgtactatgcagtcgatgcatatctcaagacataaacaagtccgagaagaagaagatttgcagtctggtggatgtcaagaagctcagcgcagatgcatccgtgcacgccacacaaaacgaccgcctgcctctccggttggtggttcaggtcctcttcttccagcagctgagggccggcccaagcaaagaactcgccctgattgacaatggagaacacgcttgcacacggcctacgcaggatcaatgtgaccgtggtgaaaggcggataccgaagcatccaaactcactgaataagcaggtgacaagcctgagcgcgagagagagccagcagcaccggatcagcgagcacaggggcggcaggaacagctttaaagaccagcttgggggcctcctgctgcagtcgcgatccaggaggatctttgacaagctgtggagcagcaaagggcagggcgagcatggcgggaaaggctcggagacgtctggtagctcgcagagcccaccgttgtcagcaaagcctgcagaagtgaagccctcccctcttccccctcttaggggcaggaggtactctgtttcttagttttttttgggggtgggggctctcctagtttagggctctgggataggttgttgtacagaaggtatcatctgctgccaatccctttttgttttgtacgcagatcaatctgctgttctatgtgatgatccatgccgtagcttttactgtagcgtaatttcaactgggagcaaatatttaccagggcctgagttgttaaaaatgtttcaatggcaaaaggtgaaaagaaaaatcaacaaaaactcgtaccttgaagaacatgaatttcatgcgctacatcacgcaggactgccataaggaaccaatcttacaaaaaaaacgagagtatttcagtgcaaaagcaagtcaatttggaacaatgccgtcaaaaccaaactacagtataaaaaagaagacgcaaccacaccataagtatgaaaactgactaacatagcaaggttcaaatcaaataataataatgggtaaacgccgagacatgataatctggaacaattccatatcagacaataacttggaagacagccccttccactgggcaaaggcgcaaagctgataatttgttactatctccttgcaagttcaacatcaggcctgcacatttcgcagccaacacaacagtttatctgactgctagttcatcaggtttagactagtaaccacccctcagagcaaggacaagatggaggacagatccaccctcgatgttgtagtcctttgcggtcttgtcatcagcaagctgcttaccagcatagatgagcctgcaaaggcgaccaaagtagcttcatcagcaccagacgccaggaaagcataactggtttcaagtagaatgagcattccgaagaacaaatagtaacagttgcagatataacaaaaaaaatcagcatggtacctttgctgcacgggaggaatgccttctttctcttcaacacgctccttgatcctgtcaatcgagtcagtgggttcaatgtcgatctcgatctctttcccagtgagagttttgaccttgatcatggttccacccctaagcctgaggaccaaatgaagagttgactccttttggatgttgtagtcagccagcgtgcgtccatcctccagctgcttgccagcgaatatcagtcgctgttgatctgggggaatcccttccttgtcctggattttggctttgacgttgtcgacggtgtcgctgctctccacctcgagggtgatggtcttccccgtcagggtcttcacgaagatctgcatcttctcctcgcctcttcctccctcgcacagtcgtactagacggtgacgaactcgaaccttgtgacaacgaagccgaagaacgcccaagaaaatttcctttttctttaattt

SEQ ID NO: 69102 - DNA, 3268 bp, Zea Mays
ctgaaacctactttgttttcgtcactgctcttgtttatgacagggctcttgcattggcgtccgttagtgctgtgcttgcgtttgaaccggactacttctactctatttcctggctagaaaatatgtggtctctgaccttgcaacagatgttgtggtgcatgttggtgaagtaaaattttacttgcacaagtttcccctcctttccaagagcggcaagcttcaaagattagttctgaaggccgctgaggacgagactgatgaggttcgcatagatgaccttcctgggggagcaaaatcattcgaaatatgtgccaagttctgctatggaatggtggtcaccctcagtccacacaacgttgtagctgcaagatgtgcgtcacagtatcttgaaatgaccgaagatatggaaaaggggaacttgatatttaaaatcgaggtcttcataaattctagcatacttcgtagctggaaggactctatcattgttctccagagcacaaaggctctatcaccatggtctgaagagctgaaggttgtgggtagatgtatcgatgccatcgcttcgaagacgtctgcggatcctgccaatgtaacctggtcatacagtcatagtagcaagaaaggaggagcttgtgctgaaatagtcgagccagcaggaaagccatcaatagctccaaaagattggtgggttgaggacttgtgtgaactggatgttgacctgtacaagagagtcatggttgctatcaaatccaaggggagaatgtcacctgaactgataggagaggcacttaaagcctatgcagttagatggctgccagactcctacgatgcattagttgccgaggattacatgaggaggaatcaatgtctggttgagacaataatatggttgctgccttctgacaagagctcgggatgttcttgcagatttctcctgaaactgttgaaagtggccatactagtcggaggcggggagcacgtgaaggaagagcttatcaggaggatcagcttccagttgcacaaagctactgttaaggatctcttattacctgccacttcgcctaatgatggtacctatgatgttcggctggtgcataatcttgtccagagatttgttgcaagaacagcgctgtctcataatggcggtttcattgagaagtccgacgaaaagatgattgagctcaacttcgagcaagaatccattttgtcggtaggagagcttgttgatggctacctgtctgaagtagcttcggatcaagacctttcgttgtctatgtttgttgaactggcgactgccgtgccagaggtggctaggcctgttcatgacaacctgtactatgcagtcgatgcatatctcaaggaacacccagacataaacaagtccgagaagaagaagatttgcagtctggtggatgtcaagaagctcagcgcagatgcatccgtgcacgccacacaaaacgaccgcctgcctctccggttggtggttcaggtcctcttcttccagcagctgagggccggcccaagcaaagaactcgccctgattgacaatggagaacacgcttgcacacggcctacgcaggatcaatgtgaccgtggtgaaaggcggataccgaagcatccaaactcactgaataagcaggtgacaagcctgagcgcgagagagagccagcagcaccggatcagcgagcacaggggcggcaggaacagctttaaagaccagcttgggggcctcctgctgcagtcgcgatccaggaggatctttgacaagctgtggagcagcaaagggcagggcgagcatggcgggaaaggctcggagacgtctggtagctcgcagagcccaccgttgtcagcaaagcctgcagaagtgaagccctcccctcttccccctcttaggggcaggaggtactctgtttcttagttttttttgggggtgggggctctcctagtttagggctctgggataggttgttgtacagaaggtatcatctgctgccaatccctttttgttttgtacgcagatcaatctgctgttctatgtgatgatccatgccgtagcttttactgtagcgtaatttcaactgggagcaaatatttaccagggcctgagttgttaaaaatgtttcaatggcaaaaggtgaaaagaaaaatcaacaaaaactcgtaccttgaagaacatgaatttcatgcgctacatcacgcaggactgccataaggaaccaatcttacaaaaaaaacgagagtatttcagtgcaaaagcaagtcaatttggaacaatgccgtcaaaaccaaactacagtataaaaaagaagacgcaaccacaccataagtatgaaaactgactaacatagcaaggttcaaatcaaataataataatgggtaaacgccgagacatgataatctggaacaattccatatcagacaataacttggaagacagccccttccactgggcaaaggcgcaaagctgataatttgttactatctccttgcaagttcaacatcaggcctgcacatttcgcagccaacacaacagtttatctgactgctagttcatcaggtttagactagtaaccacccctcagagcaaggacaagatggaggacagatccaccctcgatgttgtagtcctttgcggtcttgtcatcagcaagctgcttaccagcatagatgagcctgcaaaggcgaccaaagtagcttcatcagcaccagacgccaggaaagcataactggtttcaagtagaatgagcattccgaagaacaaatagtaacagttgcagatataacaaaaaaaatcagcatggtacctttgctgcacgggaggaatgccttctttctcttcaacacgctccttgatcctgtcaatcgagtcagtgggttcaatgtcgatctcgatctctttcccagtgagagttttgaccttgatcatggttccacccctaagcctgaggaccaaatgaagagttgactccttttggatgttgtagtcagccagcgtgcgtccatcctccagctgcttgccagcgaatatcagtcgctgttgatctgggggaatcccttccttgtcctggattttggctttgacgttgtcgacggtgtcgctgctctccacctcgagggtgatggtcttccccgtcagggtcttcacgaagatctgcatcttctcctcgcctcttcctccctcgcacagtcgtactagacggtgacgaactcgaaccttgtgacaacgaagccgaagaacgcccaagaaaatttcctttttctttaattt

SEQ ID NO: 69103 - DNA, 3350 bp, Zea Mays
gtcgttgttgttgctgcatacagaaaaatacagaacataggcatgcttctctggtttgccaataccacaccgaatttatatgtggtctctgaccttgcaacagatgttgtggtgcatgttggtgaagtaaaattttacttgcacaagtttcccctcctttccaagagcggcaagcttcaaagattagttctgaaggccgctgaggacgagactgatgaggttcgcatagatgaccttcctgggggagcaaaatcattcgaaatatgtgccaagttctgctatggaatggtggtcaccctcagtccacacaacgttgtagctgcaagatgtgcgtcacagtatcttgaaatgaccgaagatatggaaaaggggaacttgatatttaaaatcgaggtcttcataaattctagcatacttcgtagctggaaggactctatcattgttctccagagcacaaaggctctatcaccatggtctgaagagctgaaggttgtgggtagatgtatcgatgccatcgcttcgaagacgtctgcggatcctgccaatgtaacctggtcatacagtcatagtagcaagaaaggaggagcttgtgctgaaatagtcgagccagcaggaaagccatcaatagctccaaaagattggtgggttgaggacttgtgtgaactggatgttgacctgtacaagagagtcatggttgctatcaaatccaaggggagaatgtcacctgaactgataggagaggcacttaaagcctatgcagttagatggctgccagactcctacgatgcattagttgccgaggattacatgaggaggaatcaatgtctggttgagacaataatatggttgctgccttctgacaagagctcgggatgttcttgcagatttctcctgaaactgttgaaagtggccatactagtcggaggcggggagcacgtgaaggaagagcttatcaggaggatcagcttccagttgcacaaagctactgttaaggatctcttattacctgccacttcgcctaatgatggtacctatgatgttcggctggtgcataatcttgtccagagatttgttgcaagaacagcgctgtctcataatggcggtttcattgagaagtccgacgaaaagatgattgagctcaacttcgagcaagaatccattttgtcggtaggagagcttgttgatggctacctgtctgaagtagcttcggatcaagacctttcgttgtctatgtttgttgaactggcgactgccgtgccagaggtggctaggcctgttcatgacaacctgtactatgcagtcgatgcatatctcaaggtatgttcaaacgtagaaggcaaacacttcgtgcgcctagcttgatgttcagttattgctgttgtattgtagtacattgtttggatgtttatactatgaatggcaaatctgttctttctaatcaggaacacccagacataaacaagtccgagaagaagaagatttgcagtctggtggatgtcaagaagctcagcgcagatgcatccgtgcacgccacacaaaacgaccgcctgcctctccggttggtggttcaggtcctcttcttccagcagctgagggccggcccaagcaaagaactcgccctgattgacaatggagaacacgcttgcacacggcctacgcaggatcaatgtgaccgtggtgaaaggcggataccgaagcatccaaactcactgaataagcaggtgacaagcctgagcgcgagagagagccagcagcaccggatcagcgagcacaggggcggcaggaacagctttaaagaccagcttgggggcctcctgctgcagtcgcgatccaggaggatctttgacaagctgtggagcagcaaagggcagggcgagcatggcgggaaaggctcggagacgtctggtagctcgcagagcccaccgttgtcagcaaagcctgcagaagtgaagccctcccctcttccccctcttaggggcaggaggtactctgtttcttagttttttttgggggtgggggctctcctagtttagggctctgggataggttgttgtacagaaggtatcatctgctgccaatccctttttgttttgtacgcagatcaatctgctgttctatgtgatgatccatgccgtagcttttactgtagcgtaatttcaactgggagcaaatatttaccagggcctgagttgttaaaaatgtttcaatggcaaaaggtgaaaagaaaaatcaacaaaaactcgtaccttgaagaacatgaatttcatgcgctacatcacgcaggactgccataaggaaccaatcttacaaaaaaaacgagagtatttcagtgcaaaagcaagtcaatttggaacaatgccgtcaaaaccaaactacagtataaaaaagaagacgcaaccacaccataagtatgaaaactgactaacatagcaaggttcaaatcaaataataataatgggtaaacgccgagacatgataatctggaacaattccatatcagacaataacttggaagacagccccttccactgggcaaaggcgcaaagctgataatttgttactatctccttgcaagttcaacatcaggcctgcacatttcgcagccaacacaacagtttatctgactgctagttcatcaggtttagactagtaaccacccctcagagcaaggacaagatggaggacagatccaccctcgatgttgtagtcctttgcggtcttgtcatcagcaagctgcttaccagcatagatgagcctgcaaaggcgaccaaagtagcttcatcagcaccagacgccaggaaagcataactggtttcaagtagaatgagcattccgaagaacaaatagtaacagttgcagatataacaaaaaaaatcagcatggtacctttgctgcacgggaggaatgccttctttctcttcaacacgctccttgatcctgtcaatcgagtcagtgggttcaatgtcgatctcgatctctttcccagtgagagttttgaccttgatcatggttccacccctaagcctgaggaccaaatgaagagttgactccttttggatgttgtagtcagccagcgtgcgtccatcctccagctgcttgccagcgaatatcagtcgctgttgatctgggggaatcccttccttgtcctggattttggctttgacgttgtcgacggtgtcgctgctctccacctcgagggtgatggtcttccccgtcagggtcttcacgaagatctgcatcttctcctcgcctcttcctccctcgcacagtcgtactagacggtgacgaactcgaaccttgtgacaacgaagccgaagaacgcccaagaaaatttcctttttctttaattt

SEQ ID NO: 69104 - DNA, 3653 bp, Zea Mays
gaggcgcgcagcacagggcgaaaaagagagagacgatgccgtattgacattgcaacaagcaacgagaagggcggctttgtcaggcgcggaggccagagagcagcagacagagagaaagagagagagagagagagagttgggtgcagtgcagcagtgcagagagcagagacggagcggagcgaccgagagagagagagaggggaagtttaataatatatcccatcactcacacgccacggcatcattcgccgcctccttcctcctcccgctcgtcgccgttcctcctccgagcaccagcagcgcgccccctccgctctcccttagctcaccagccgcctcttcgtcggagcagcaacagcagctgtgcatgggagtgggagcacggctctgagaggaaaaagggaagaagaaaggtgaccaaagggaaacaaagggaaccaaaggactaggaggatgaagttcatgaagctgggctccaagcccgacgccttccagtccgacggcgccgacgtccgatatgtggtctctgaccttgcaacagatgttgtggtgcatgttggtgaagtaaaattttacttgcacaagtttcccctcctttccaagagcggcaagcttcaaagattagttctgaaggccgctgaggacgagactgatgaggttcgcatagatgaccttcctgggggagcaaaatcattcgaaatatgtgccaagttctgctatggaatggtggtcaccctcagtccacacaacgttgtagctgcaagatgtgcgtcacagtatcttgaaatgaccgaagatatggaaaaggggaacttgatatttaaaatcgaggtcttcataaattctagcatacttcgtagctggaaggactctatcattgttctccagagcacaaaggctctatcaccatggtctgaagagctgaaggttgtgggtagatgtatcgatgccatcgcttcgaagacgtctgcggatcctgccaatgtaacctggtcatacagtcatagtagcaagaaaggaggagcttgtgctgaaatagtcgagccagcaggaaagccatcaatagctccaaaagattggtgggttgaggacttgtgtgaactggatgttgacctgtacaagagagtcatggttgctatcaaatccaaggggagaatgtcacctgaactgataggagaggcacttaaagcctatgcagttagatggctgccagactcctacgatgcattagttgccgaggattacatgaggaggaatcaatgtctggttgagacaataatatggttgctgccttctgacaagagctcgggatgttcttgcagatttctcctgaaactgttgaaagtggccatactagtcggaggcggggagcacgtgaaggaagagcttatcaggaggatcagcttccagttgcacaaagctactgttaaggatctcttattacctgccacttcgcctaatgatggtacctatgatgttcggctggtgcataatcttgtccagagatttgttgcaagaacagcgctgtctcataatggcggtttcattgagaagtccgacgaaaagatgattgagctcaacttcgagcaagaatccattttgtcggtaggagagcttgttgatggctacctgtctgaagtagcttcggatcaagacctttcgttgtctatgtttgttgaactggcgactgccgtgccagaggtggctaggcctgttcatgacaacctgtactatgcagtcgatgcatatctcaagacataaacaagtccgagaagaagaagatttgcagtctggtggatgtcaagaagctcagcgcagatgcatccgtgcacgccacacaaaacgaccgcctgcctctccggttggtggttcaggtcctcttcttccagcagctgagggccggcccaagcaaagaactcgccctgattgacaatggagaacacgcttgcacacggcctacgcaggatcaatgtgaccgtggtgaaaggcggataccgaagcatccaaactcactgaataagcaggtgacaagcctgagcgcgagagagagccagcagcaccggatcagcgagcacaggggcggcaggaacagctttaaagaccagcttgggggcctcctgctgcagtcgcgatccaggaggatctttgacaagctgtggagcagcaaagggcagggcgagcatggcgggaaaggctcggagacgtctggtagctcgcagagcccaccgttgtcagcaaagcctgcagaagtgaagccctcccctcttccccctcttaggggcaggaggtactctgtttcttagttttttttgggggtgggggctctcctagtttagggctctgggataggttgttgtacagaaggtatcatctgctgccaatccctttttgttttgtacgcagatcaatctgctgttctatgtgatgatccatgccgtagcttttactgtagcgtaatttcaactgggagcaaatatttaccagggcctgagttgttaaaaatgtttcaatggcaaaaggtgaaaagaaaaatcaacaaaaactcgtaccttgaagaacatgaatttcatgcgctacatcacgcaggactgccataaggaaccaatcttacaaaaaaaacgagagtatttcagtgcaaaagcaagtcaatttggaacaatgccgtcaaaaccaaactacagtataaaaaagaagacgcaaccacaccataagtatgaaaactgactaacatagcaaggttcaaatcaaataataataatgggtaaacgccgagacatgataatctggaacaattccatatcagacaataacttggaagacagccccttccactgggcaaaggcgcaaagctgataatttgttactatctccttgcaagttcaacatcaggcctgcacatttcgcagccaacacaacagtttatctgactgctagttcatcaggtttagactagtaaccacccctcagagcaaggacaagatggaggacagatccaccctcgatgttgtagtcctttgcggtcttgtcatcagcaagctgcttaccagcatagatgagcctgcaaaggcgaccaaagtagcttcatcagcaccagacgccaggaaagcataactggtttcaagtagaatgagcattccgaagaacaaatagtaacagttgcagatataacaaaaaaaatcagcatggtacctttgctgcacgggaggaatgccttctttctcttcaacacgctccttgatcctgtcaatcgagtcagtgggttcaatgtcgatctcgatctctttcccagtgagagttttgaccttgatcatggttccacccctaagcctgaggaccaaatgaagagttgactccttttggatgttgtagtcagccagcgtgcgtccatcctccagctgcttgccagcgaatatcagtcgctgttgatctgggggaatcccttccttgtcctggattttggctttgacgttgtcgacggtgtcgctgctctccacctcgagggtgatggtcttccccgtcagggtcttcacgaagatctgcatcttctcctcgcctcttcctccctcgcacagtcgtactagacggtgacgaactcgaaccttgtgacaacgaagccgaagaacgcccaagaaaatttcctttttctttaattt

SEQ ID NO: 69105 - DNA, 876 bp, Zea Mays
ctcatctcctgcgtgtcattgcattaagagatattcgataataatcaccaagatttctattgactctagttcgaacaggagctcgacaaacaactattgttgattactgaagagcgcaattgtttactctctgagacacaacagatgagatccatggtcgctgaagcagaggttttgaaagagaattgtaacagaaagttaatacatgccaaagatacaatagatgagttgagctctaggatatctgtcatggaagccaatctgaaaaatgatactgcgtctaataacaaagagaagacaaagcttcgcatggagattcgatggctgcgtccacaacttgacgcccatcgtggtcggctcaaagaagcgatgaatgagatgaagaccatggatgccaaataccaagaagcatgcaccacgctgaagaaggacctttctcagcatggtcgcgagatcctgaggttgagagagatgcttaaagaatcacagagcgcatcaaactgaggctataagtttctcatatctaatagctcacgtagcaaaatgcagatatgtcgtcagccctatggaagcactcgttgttgcgtttgttcgcttcggaccttcctggtaccgtggttcactgactttctttgaggtgtggtgcgattccatgcgtcagctacttctaatccaatgcgcttgcgctaccgtaaagaatcctgatgtatgggggcattttgctgttcaaactgtaccttttctttctatttagtctatagtgtaacaactacgataagtagcaggaagattgagcgaagcttgagttatctatgaaacgatgaaaatgtctaacgcactgaattagtcttctttaatatttttcataaattaaag

SEQ ID NO: 69106 - DNA, 2215 bp, Zea Mays
atgtatatatcaatatataaagttgaaggactgcaatgcaacagtacaatagctatagcaggacaacagtacactgattcagtggcggacccaagatttcttgactggcttcagcagatcactctagctgcagaagaacaagcaaaggttgctaatgagaacctgtccacactatctgctactgtaaaatccaaacaggaactagcatatgaattcctcggtaatttattgatggagactcaaggaataaatgtggagatggatcagtggagaaactcggttgacagtgctctttcttttattgatgaactctttcagaatctctgcatcatggcacaaggcattcgtgaagtaaatcactctgctcatgaagatagtgcacggtcctgttctgtgatcagggactatgaaaaactatcaacctgtttgatggacaaagtttacaaacttgaattggagaagaaactattggaggaacagtcccaagaccaacaaaatgagatttataagctgaaggccaatctggaaagctgtgagaaggccatagatgactgtactcttcaacatgaattggagaaggatgccattcttttagagctcctaaacctccagaaggaagtatctatcttgtcatcatcttctttgatgaaagaaaaggaatctatccgaaaggaacttgatagaactaaatcaaagttaagagagacggaggacaaacttaagaattccattcaggagaaaacaaaacttcagagtgagaaagcagaggcccacaaagaaattaagaaattgcaaagccagagaactttgcttgaacgtgatttacggaaacgtgattcagctactgttgacaaaaggcatgaactgaattccatgccacaggaaagttctggtgcttttggtcacatgcaggagaactaccaaaatcttgagatgcatgcttttgatatggatgctgaaatttattctttacaagaagctcttgtcacttcaattgatgaaaaggatgaagcgttgtctaaagtagggcttataacatctgaactagaagatcttgcgaataaactgaacttagcagaatcagaaaggaactcctttagcaacgagatcacactcttgactgaaaagttaattgcatctgaatcttcccttaaaagtttggagacttctctcaattctgtatcaagggaaaaggaagatttgggaatgcaacttactgatgcccttttggacatggaatctgaaagatcaatttggacagcaaaggagaaagaatatgtagaagctaatcatagattgaacatctgccttgatgagaaccacaaactttcagaagatttgatgaagcgaggcttgtaaagcatccgaccaaattgtggagaatggaggaaccattcctggtgctgcgtgtgaaaatgagctcgacaaacaactattgttgattactgaagagcgcaattgtttactctctgagacacaacagatgagatccatggtcgctgaagcagaggttttgaaagagaattgtaacagaaagttaatacatgccaaagatacaatagatgagttgagctctaggatatctgtcatggaagccaatctgaaaaatgatactgcgtctaataacaaagagaagacaaagcttcgcatggagattcgatggctgcgtccacaacttgacgcccatcgtggtcggctcaaagaagcgatgaatgagatgaagaccatggatgccaaataccaagaagcatgcaccacgctgaagaaggacctttctcagcatggtcgcgagatcctgaggttgagagagatgcttaaagaatcacagagcgcatcaaactgaggctataagtttctcatatctaatagctcacgtagcaaaatgcagatatgtcgtcagccctatggaagcactcgttgttgcgtttgttcgcttcggaccttcctggtaccgtggttcactgactttctttgaggtgtggtgcgattccatgcgtcagctacttctaatccaatgcgcttgcgctaccgtaaagaatcctgatgtatgggggcattttgctgttcaaactgtaccttttctttctatttagtctatagtgtaacaactacgataagtagcaggaagattgagcgaagcttgagttatctatgaaacgatgaaaatgtctaacgcactgaattagtcttctttaatatttttcataaattaaag

SEQ ID NO: 69107 - DNA, 3882 bp, Zea Mays
ctcaccgcagagtctcctcaccgcagtaccagactccggccgaaccgcacctctgcccccttcctcccggaggctcagggcctgtggcgcacgtctatggagcggatccacgtagcggtgcgctcgcggccgctctccccggaggactcgcggagcagcccgtggaagatctcgggcaacgcaatcgctcactccgcgcagtcctcctcccgcttcgagttcgacaggatattcggcgaggagtgccgcactgccgaggtctaccaggcccgcatcaagcacatcgtcgataacgtggtccgagggttcaatgtgggaagaccttcacaatgagaggatcggctaatgaacctggaataataccgcttgcagttcatgacttattccagcgtattcaagagcatatggacagagagtttcttgtgcggatgtcctacatggaaatttacaatgaagatattaatgaccttcttgtgcctgaacatcgaaaattgcagattcatgagagtattgaggtaatcgagagtagagaaaaaggcgatgacaatgaagttgaagatttttgtgatgctgtacgagtatctgttttgaaccttgttgacttagctggctcagaacgcgctgcaaagactggtgcagagggtgtgagacttaaggagggttctcatattaacaaaagtctcatgactcttggtacggtcataaagaaacttagtgaaggcattgagagtcaagggggacatgtgccataccgtgatagtaaactgacaaggatactgcagcctgctctgggtggaaattctaacacagctatcatctgcaatataacacttgcacagatccacactgatgagacaaaaagcagtttgcaatttgcgagtagagcattacgtgtaacaaactgtgcatgcgttaatgagattttgacagatgctgcattattaaaacgccaaaggaaagaaatagaagagcttcgagcaaaacttagaaaatctgaaagtgatcattgggaggaagaaattctgaatctgcgaaacacactactgcagagtgaattggaaaaggaaagaatctctttagagctggaggaggaaaagaaagctaaagagcagcgtgacagatgcttgattgaacaggcaaagaaaattgaaaatcttagttcactggttttaaattcagacagagatgacaggagtactgcttttagtaagaacaaaagaagggtaacatggtgtcctggaccaaatgcaaagcaatttgatattgaggatttaagacctgtccaggaaggctctacaagcagcacagttagaaatgaacgggatatgggaatgccaccactttttgaagagttaatgcaagaaagtaatgatgagccttgtgctaacgtttactcatctggacctggtaatgtgtccaaagacagtgaagacgtccctcttcctgactcgcatgctttgctgcatgttaccaacagaagaaagccaaaggcaatgaagaaatcagatcaagagcaattcagggggagagctggtgaactattaataccccaggacccctgtgatgggaatgatgctctacgccacaaaaacactgtgccttgtgtagttagtagcttatcttctcgagaatctgaagccattcttgtcatcaaacaacttcaagatcagatcaagctgctggaggcagagaagagttctgttcaaactaatttggatgctgttcttgtgctggcaactcaacagaaggtttcatttaatgaggagtatgaagagcttcagcagatcactctagctgcagaagaacaagcaaaggttgctaatgagaacctgtccacactatctgctactgtaaaatccaaacaggaactagcatatgaattcctcggtaatttattgatggagactcaaggaataaatgtggagatggatcagtggagaaactcggttgacagtgctctttcttttattgatgaactctttcagaatctctgcatcatggcacaaggcattcgtgaagtaaatcactctgctcatgaagatagtgcacggtcctgttctgtgatcagggactatgaaaaactatcaacctgtttgatggacaaagtttacaaacttgaattggagaagaaactattggaggaacagtcccaagaccaacaaaatgagatttataagctgaaggccaatctggaaagctgtgagaaggccatagatgactgtactcttcaacatgaattggagaaggatgccattcttttagagctcctaaacctccagaaggaagtatctatcttgtcatcatcttctttgatgaaagaaaaggaatctatccgaaaggaacttgatagaactaaatcaaagttaagagagacggaggacaaacttaagaattccattcaggagaaaacaaaacttcagagtgagaaagcagaggcccacaaagaaattaagaaattgcaaagccagagaactttgcttgaacgtgatttacggaaacgtgattcagctactgttgacaaaaggcatgaactgaattccatgccacaggaaagttctggtgcttttggtcacatgcaggagaactaccaaaatcttgagatgcatgcttttgatatggatgctgaaatttattctttacaagaagctcttgtcacttcaattgatgaaaaggatgaagcgttgtctaaagtagggcttataacatctgaactagaagatcttgcgaataaactgaacttagcagaatcagaaaggaactcctttagcaacgagatcacactcttgactgaaaagttaattgcatctgaatcttcccttaaaagtttggagacttctctcaattctgtatcaagggaaaaggaagatttgggaatgcaacttactgatgcccttttggacatggaatctgaaagatcaatttggacagcaaaggagaaagaatatgtagaagctaatcatagattgaacatctgccttgatgagaaccacaaactttcagaagatttgatgaagcgaggcttgtaaagcatccgaccaaattgtggagaatggaggaaccattcctggtgctgcgtgtgaaaatgagctcgacaaacaactattgttgattactgaagagcgcaattgtttactctctgagacacaacagatgagatccatggtcgctgaagcagaggttttgaaagagaattgtaacagaaagttaatacatgccaaagatacaatagatgagttgagctctaggatatctgtcatggaagccaatctgaaaaatgatactgcgtctaataacaaagagaagacaaagcttcgcatggagattcgatggctgcgtccacaacttgacgcccatcgtggtcggctcaaagaagcgatgaatgagatgaagaccatggatgccaaataccaagaagcatgcaccacgctgaagaaggacctttctcagcatggtcgcgagatcctgaggttgagagagatgcttaaagaatcacagagcgcatcaaactgaggctataagtttctcatatctaatagctcacgtagcaaaatgcagatatgtcgtcagccctatggaagcactcgttgttgcgtttgttcgcttcggaccttcctggtaccgtggttcactgactttctttgaggtgtggtgcgattccatgcgtcagctacttctaatccaatgcgcttgcgctaccgtaaagaatcctgatgtatgggggcattttgctgttcaaactgtaccttttctttctatttagtctatagtgtaacaactacgataagtagcaggaagattgagcgaagcttgagttatctatgaaacgatgaaaatgtctaacgcactgaattagtcttctttaatatttttcataaattaaag

SEQ ID NO: 69108 - DNA, 1032 bp, Zea Mays
attttgcatgatagcatttccagattggacttcgaataaccatgccatttatttaaggactatgaaaaactatcaacctgtttgatggacaaagtttacaaacttgaattggagaagaaactattggaggaacagtcccaagaccaacaaaatgagatttataagctgaaggccaatctggaaagctgtgagaaggccatagatgactgtactcttcaacatgaattggagaaggatgccattcttttagagctcctaaacctccagaaggaagtatctatcttgtcatcatcttctttgatgaaagaaaaggaatctatccgaaaggaacttgatagaactaaatcaaagttaagagagacggaggacaaacttaagaattccattcaggagaaaacaaaacttcagagtgagaaagcagaggcccacaaagaaattaagaaattgcaaagccagagaactttgcttgaacgtgatttacggaaacgtgattcagctactgttgacaaaaggcatgaactgaattccatgccacaggaaagttctggtgcttttggtcacatgcaggagaactaccaaaatcttgagatgcatgcttttgatatggatgctgaaatttattctttacaagaagctcttgtcacttcaattgatgaaaaggatgaagcgttgtctaaagtagggcttataacatctgaactagaagatcttgcgaataaactgaacttagcagaatcagaaaggaactcctttagcaacgagatcacactcttgactgaaaagttaattgcatctgaatcttcccttaaaagtttggagacttctctcaattctgtatcaagggaaaaggaagatttgggaatgcaacttactgatgcccttttggacatggaatctgaaagatcaatttggacagcaaaggagaaagaatatgtagaagctaatcatagattgaacatctgccttgatgagaaccacaaactttcagaagatttgatgaagtgtataaatggattgcctaccttctcttaa

SEQ ID NO: 69109 - DNA, 1377 bp, Zea Mays
atgtatatatcaatatataaagttgaaggactgcaatgcaacagtacaatagctatagcaggacaacagtacactgattcagtggcggacccaagatttcttgactggcttcagcagatcactctagctgcagaagaacaagcaaaggttgctaatgagaacctgtccacactatctgctactgtaaaatccaaacaggaactagcatatgaattcctcggtaatttattgatggagactcaaggaataaatgtggagatggatcagtggagaaactcggttgacagtgctctttcttttattgatgaactctttcagaatctctgcatcatggcacaaggcattcgtgaagtaaatcactctgctcatgaagatagtgcacggtcctgttctgtgatcagggactatgaaaaactatcaacctgtttgatggacaaagtttacaaacttgaattggagaagaaactattggaggaacagtcccaagaccaacaaaatgagatttataagctgaaggccaatctggaaagctgtgagaaggccatagatgactgtactcttcaacatgaattggagaaggatgccattcttttagagctcctaaacctccagaaggaagtatctatcttgtcatcatcttctttgatgaaagaaaaggaatctatccgaaaggaacttgatagaactaaatcaaagttaagagagacggaggacaaacttaagaattccattcaggagaaaacaaaacttcagagtgagaaagcagaggcccacaaagaaattaagaaattgcaaagccagagaactttgcttgaacgtgatttacggaaacgtgattcagctactgttgacaaaaggcatgaactgaattccatgccacaggaaagttctggtgcttttggtcacatgcaggagaactaccaaaatcttgagatgcatgcttttgatatggatgctgaaatttattctttacaagaagctcttgtcacttcaattgatgaaaaggatgaagcgttgtctaaagtagggcttataacatctgaactagaagatcttgcgaataaactgaacttagcagaatcagaaaggaactcctttagcaacgagatcacactcttgactgaaaagttaattgcatctgaatcttcccttaaaagtttggagacttctctcaattctgtatcaagggaaaaggaagatttgggaatgcaacttactgatgcccttttggacatggaatctgaaagatcaatttggacagcaaaggagaaagaatatgtagaagctaatcatagattgaacatctgccttgatgagaaccacaaactttcagaagatttgatgaagtgtataaatggattgcctaccttctcttaa

SEQ ID NO: 69110 - DNA, 1324 bp, Zea Mays
atgtatatatcaatatataaagttgaaggactgcaatgcaacagtacaatagctatagcaggacaacagtacactgattcagtggcggacccaagatttcttgactggcttcagcagatcactctagctgcagaagaacaagcaaaggttgctaatgagaacctgtccacactatctgctactgtaaaatccaaacaggaactagcatatgaattcctcggtaatttattgatggagactcaaggaataaatgtggagatggatcagtggagaaactcggttgacagtgctctttcttttattgatgaactctttcagaatctctgcatcatggcacaaggcattcgtggactatgaaaaactatcaacctgtttgatggacaaagtttacaaacttgaattggagaagaaactattggaggaacagtcccaagaccaacaaaatgagatttataagctgaaggccaatctggaaagctgtgagaaggccatagatgactgtactcttcaacatgaattggagaaggatgccattcttttagagctcctaaacctccagaaggaagtatctatcttgtcatcatcttctttgatgaaagaaaaggaatctatccgaaaggaacttgatagaactaaatcaaagttaagagagacggaggacaaacttaagaattccattcaggagaaaacaaaacttcagagtgagaaagcagaggcccacaaagaaattaagaaattgcaaagccagagaactttgcttgaacgtgatttacggaaacgtgattcagctactgttgacaaaaggcatgaactgaattccatgccacaggaaagttctggtgcttttggtcacatgcaggagaactaccaaaatcttgagatgcatgcttttgatatggatgctgaaatttattctttacaagaagctcttgtcacttcaattgatgaaaaggatgaagcgttgtctaaagtagggcttataacatctgaactagaagatcttgcgaataaactgaacttagcagaatcagaaaggaactcctttagcaacgagatcacactcttgactgaaaagttaattgcatctgaatcttcccttaaaagtttggagacttctctcaattctgtatcaagggaaaaggaagatttgggaatgcaacttactgatgcccttttggacatggaatctgaaagatcaatttggacagcaaaggagaaagaatatgtagaagctaatcatagattgaacatctgccttgatgagaaccacaaactttcagaagatttgatgaagtgtataaatggattgcctaccttctcttaa

SEQ ID NO: 69111 - DNA, 2482 bp, Zea Mays
gtcgttctcacactatatttcgcatggtaatcgagagtagagaaaaaggcgatgacaatgaagttgaagatttttgtgatgctgtacgagtatctgttttgaacgcgctgcaaagactggtgcagagggtgtgagacttaaggagggttctcatattaacaaaagtctcatgactcttggtacggtcataaagaaacttagtgaaggcattgagagtcaagggggacatgtgccataccgtgatagtaaactgacaaggatactgcagcctgctctgggtggaaattctaacacagctatcatctgcaatataacacttgcacagatccacactgatgagacaaaaagcagtttgcaatttgcgagtagagcattacgtgtaacaaactgtgcatgcgttaatgagattttgacagatgctgcattattaaaacgccaaaggaaagaaatagaagagcttcgagcaaaacttagaaaatctgaaagtgatcattgggaggaagaaattctgaatctgcgaaacacactactgcagagtgaattggaaaaggaaagaatctctttagagctggaggaggaaaagaaagctaaagagcagcgtgacagatgcttgattgaacaggcaaagaaaattgaaaatcttagttcactggttttaaattcagacagagatgacaggagtactgcttttagtaagaacaaaagaagggtaacatggtgtcctggaccaaatgcaaagcaatttgatattgaggatttaagacctgtccaggaaggctctacaagcagcacagttagaaatgaacgggatatgggaatgccaccactttttgaagagttaatgcaagaaagtaatgatgagccttgtgctaacgtttactcatctggacctggtaatgtgtccaaagacagtgaagacgtccctcttcctgactcgcatgctttgctgcatgttaccaacagaagaaagccaaaggcaatgaagaaatcagatcaagagcaattcagggggagagctggtgaactattaataccccaggacccctgtgatgggaatgatgctctacgccacaaaaacactgtgccttgtgtagttagtagcttatcttctcgagaatctgaagccattcttgtcatcaaacaacttcaagatcagatcaagctgctggaggcagagaagagttctgttcaaactaatttggatgctgttcttgtgctggcaactcaacagaaggtttcatttaatgaggagtatgaagagcttcagcagatcactctagctgcagaagaacaagcaaaggttgctaatgagaacctgtccacactatctgctactgtaaaatccaaacaggaactagcatatgaattcctcggtaatttattgatggagactcaaggaataaatgtggagatggatcagtggagaaactcggttgacagtgctctttcttttattgatgaactctttcagaatctctgcatcatggcacaaggcattcgtgtatgggactatgaaaaactatcaacctgtttgatggacaaagtttacaaacttgaattggagaagaaactattggaggaacagtcccaagaccaacaaaatgagatttataagctgaaggccaatctggaaagctgtgagaaggccatagatgactgtactcttcaacatgaattggagaaggatgccattcttttagagctcctaaacctccagaaggaagtatctatcttgtcatcatcttctttgatgaaagaaaaggaatctatccgaaaggaacttgatagaactaaatcaaagttaagagagacggaggacaaacttaagaattccattcaggagaaaacaaaacttcagagtgagaaagcagaggcccacaaagaaattaagaaattgcaaagccagagaactttgcttgaacgtgatttacggaaacgtgattcagctactgttgacaaaaggcatgaactgaattccatgccacaggaaagttctggtgcttttggtcacatgcaggagaactaccaaaatcttgagatgcatgcttttgatatggatgctgaaatttattctttacaagaagctcttgtcacttcaattgatgaaaaggatgaagcgttgtctaaagtagggcttataacatctgaactagaagatcttgcgaataaactgaacttagcagaatcagaaaggaactcctttagcaacgagatcacactcttgactgaaaagttaattgcatctgaatcttcccttaaaagtttggagacttctctcaattctgtatcaagggaaaaggaagatttgggaatgcaacttactgatgcccttttggacatggaatctgaaagatcaatttggacagcaaaggagaaagaatatgtagaagctaatcatagattgaacatctgccttgatgagaaccacaaactttcagaagatttgatgaagtgtataaatggattgcctaccttctcttaa

SEQ ID NO: 69112 - DNA, 2952 bp, Zea Mays
gcccgcatcaagcacatcgtcgataacgtggtccgagggttcaatggcactgtttttgcatatggtcaaactaacagtgggaagaccttcacaatgagaggatcggctaatgaacctggaataataccgcttgcagttcatgacttattccagcgtattcaagagcatatggacagagagtttcttgtgcggatgtcctacatggaaatttacaatgaagatattaatgaccttcttgtgcctgaacatcgaaaattgcagattcatgagagtattgagaaagggatctttgttgctggtttaagggaagaaattgttacatgcgcggaacaggtcatggatttcatgtcttttggagaatcccaccggcatatcggagagacaaacatgaatctttatagcagtcgttctcacactatatttcgcatggtaatcgagagtagagaaaaaggcgatgacaatgaagttgaagatttttgtgatgctgtacgagtatctgttttgaaccttgttgacttagctggctcagaacgcgctgcaaagactggtgcagagggtgtgagacttaaggagggttctcatattaacaaaagtctcatgactcttggtacggtcataaagaaacttagtgaaggcattgagagtcaagggggacatgtgccataccgtgatagtaaactgacaaggatactgcagcctgctctgggtggaaattctaacacagctatcatctgcaatataacacttgcacagatccacactgatgagacaaaaagcagtttgcaatttgcgagtagagcattacgtgtaacaaactgtgcatgcgttaatgagattttgacagatgctgcattattaaaacgccaaaggaaagaaatagaagagcttcgagcaaaacttagaaaatctgaaagtgatcattgggaggaagaaattctgaatctgcgaaacacactactgcagagtgaattggaaaaggaaagaatctctttagagctggaggaggaaaagaaagctaaagagcagcgtgacagatgcttgattgaacaggcaaagaaaattgaaaatcttagttcactggttttaaattcagacagagatgacaggagtactgcttttagtaagaacaaaagaagggtaacatggtgtcctggaccaaatgcaaagcaatttgatattgaggatttaagacctgtccaggaaggctctacaagcagcacagttagaaatgaacgggatatgggaatgccaccactttttgaagagttaatgcaagaaagtaatgatgagccttgtgctaacgtttactcatctggacctggtaatgtgtccaaagacagtgaagacgtccctcttcctgactcgcatgctttgctgcatgttaccaacagaagaaagccaaaggcaatgaagaaatcagatcaagagcaattcagggggagagctggtgaactattaataccccaggacccctgtgatgggaatgatgctctacgccacaaaaacactgtgccttgtgtagttagtagcttatcttctcgagaatctgaagccattcttgtcatcaaacaacttcaagatcagatcaagctgctggaggcagagaagagttctgttcaaactaatttggatgctgttcttgtgctggcaactcaacagaaggtttcatttaatgaggagtatgaagagcagatcactctagctgcagaagaacaagcaaaggttgctaatgagaacctgtccacactatctgctactgtaaaatccaaacaggaactagcatatgaattcctcggtaatttattgatggagactcaaggaataaatgtggagatggatcagtggagaaactcggttgacagtgctctttcttttattgatgaactctttcagaatctctgcatcatggcacaaggcattcgtgaagtaaatcactctgctcatgaagatagtgcacggtcctgttctgtgatcagggactatgaaaaactatcaacctgtttgatggacaaagtttacaaacttgaattggagaagaaactattggaggaacagtcccaagaccaacaaaatgagatttataagctgaaggccaatctggaaagctgtgagaaggccatagatgactgtactcttcaacatgaattggagaaggatgccattcttttagagctcctaaacctccagaaggaagtatctatcttgtcatcatcttctttgatgaaagaaaaggaatctatccgaaaggaacttgatagaactaaatcaaagttaagagagacggaggacaaacttaagaattccattcaggagaaaacaaaacttcagagtgagaaagcagaggcccacaaagaaattaagaaattgcaaagccagagaactttgcttgaacgtgatttacggaaacgtgattcagctactgttgacaaaaggcatgaactgaattccatgccacaggaaagttctggtgcttttggtcacatgcaggagaactaccaaaatcttgagatgcatgcttttgatatggatgctgaaatttattctttacaagaagctcttgtcacttcaattgatgaaaaggatgaagcgttgtctaaagtagggcttataacatctgaactagaagatcttgcgaataaactgaacttagcagaatcagaaaggaactcctttagcaacgagatcacactcttgactgaaaagttaattgcatctgaatcttcccttaaaagtttggagacttctctcaattctgtatcaagggaaaaggaagatttgggaatgcaacttactgatgcccttttggacatggaatctgaaagatcaatttggacagcaaaggagaaagaatatgtagaagctaatcatagattgaacatctgccttgatgagaaccacaaactttcagaagatttgatgaagtgtataaatggattgcctaccttctcttaa

SEQ ID NO: 69113 - DNA, 3075 bp, Zea Mays
ctcaccgcagagtctcctcaccgcagtaccagactccggccgaaccgcacctctgcccccttcctcccggaggctcagggcctgtggcgcacgtctatggagcggatccacgtagcggtgcgctcgcggccgctctccccggaggactcgcggagcagcccgtggaagatctcgggcaacgcaatcgctcactccgcgcagtcctcctcccgcttcgagttcgacaggatattcggcgaggagtgccgcactgccgaggtctaccaggcccgcatcaagcacatcgtcgataacgtggtccgagggttcaatggcactgtttttgcatatggtcaaactaacagtgggaagaccttcacaatgagaggatcggctaatgaacctggaataataccgcttgcagttcatgacttattccagcgtattcaagagcatatggacagagagtttcttgtgcggatgtcctacatggaaatttacaatgaagatattaatgaccttcttgtgcctgaacatcgaaaattgcagattcatgagagtattgaggtaatcgagagtagagaaaaaggcgatgacaatgaagttgaagatttttgtgatgctgtacgagtatctgttttgaaccttgttgacttagctggctcagaacgcgctgcaaagactggtgcagagggtgtgagacttaaggagggttctcatattaacaaaagtctcatgactcttggtacggtcataaagaaacttagtgaaggcattgagagtcaagggggacatgtgccataccgtgatagtaaactgacaaggatactgcagcctgctctgggtggaaattctaacacagctatcatctgcaatataacacttgcacagatccacactgatgagacaaaaagcagtttgcaatttgcgagtagagcattacgtgtaacaaactgtgcatgcgttaatgagattttgacagatgctgcattattaaaacgccaaaggaaagaaatagaagagcttcgagcaaaacttagaaaatctgaaagtgatcattgggaggaagaaattctgaatctgcgaaacacactactgcagagtgaattggaaaaggaaagaatctctttagagctggaggaggaaaagaaagctaaagagcagcgtgacagatgcttgattgaacaggcaaagaaaattgaaaatcttagttcactggttttaaattcagacagagatgacaggagtactgcttttagtaagaacaaaagaagggtaacatggtgtcctggaccaaatgcaaagcaatttgatattgaggatttaagacctgtccaggaaggctctacaagcagcacagttagaaatgaacgggatatgggaatgccaccactttttgaagagttaatgcaagaaagtaatgatgagccttgtgctaacgtttactcatctggacctggtaatgtgtccaaagacagtgaagacgtccctcttcctgactcgcatgctttgctgcatgttaccaacagaagaaagccaaaggcaatgaagaaatcagatcaagagcaattcagggggagagctggtgaactattaataccccaggacccctgtgatgggaatgatgctctacgccacaaaaacactgtgccttgtgtagttagtagcttatcttctcgagaatctgaagccattcttgtcatcaaacaacttcaagatcagatcaagctgctggaggcagagaagagttctgttcaaactaatttggatgctgttcttgtgctggcaactcaacagaaggtttcatttaatgaggagtatgaagagcttcagcagatcactctagctgcagaagaacaagcaaaggttgctaatgagaacctgtccacactatctgctactgtaaaatccaaacaggaactagcatatgaattcctcggtaatttattgatggagactcaaggaataaatgtggagatggatcagtggagaaactcggttgacagtgctctttcttttattgatgaactctttcagaatctctgcatcatggcacaaggcattcgtgaagtaaatcactctgctcatgaagatagtgcacggtcctgttctgtgatcagggactatgaaaaactatcaacctgtttgatggacaaagtttacaaacttgaattggagaagaaactattggaggaacagtcccaagaccaacaaaatgagatttataagctgaaggccaatctggaaagctgtgagaaggccatagatgactgtactcttcaacatgaattggagaaggatgccattcttttagagctcctaaacctccagaaggaagtatctatcttgtcatcatcttctttgatgaaagaaaaggaatctatccgaaaggaacttgatagaactaaatcaaagttaagagagacggaggacaaacttaagaattccattcaggagaaaacaaaacttcagagtgagaaagcagaggcccacaaagaaattaagaaattgcaaagccagagaactttgcttgaacgtgatttacggaaacgtgattcagctactgttgacaaaaggcatgaactgaattccatgccacaggaaagttctggtgcttttggtcacatgcaggagaactaccaaaatcttgagatgcatgcttttgatatggatgctgaaatttattctttacaagaagctcttgtcacttcaattgatgaaaaggatgaagcgttgtctaaagtagggcttataacatctgaactagaagatcttgcgaataaactgaacttagcagaatcagaaaggaactcctttagcaacgagatcacactcttgactgaaaagttaattgcatctgaatcttcccttaaaagtttggagacttctctcaattctgtatcaagggaaaaggaagatttgggaatgcaacttactgatgcccttttggacatggaatctgaaagatcaatttggacagcaaaggagaaagaatatgtagaagctaatcatagattgaacatctgccttgatgagaaccacaaactttcagaagatttgatgaagtgtataaatggattgcctaccttctcttaa

SEQ ID NO: 69114 - DNA, 3225 bp, Zea Mays
ctcaccgcagagtctcctcaccgcagtaccagactccggccgaaccgcacctctgcccccttcctcccggaggctcagggcctgtggcgcacgtctatggagcggatccacgtagcggtgcgctcgcggccgctctccccggaggactcgcggagcagcccgtggaagatctcgggcaacgcaatcgctcactccgcgcagtcctcctcccgcttcgagttcgacaggatattcggcgaggagtgccgcactgccgaggtctaccaggcccgcatcaagcacatcgtcgataacgtggtccgagggttcaatggcactgtttttgcatatggtcaaactaacagtgggaagaccttcacaatgagaggatcggctaatgaacctggaataataccgcttgcagttcatgacttattccagcgtattcaagagcatatggacagagagtttcttgtgcggatgtcctacatggaaatttacaatgaagatattaatgaccttcttgtgcctgaacatcgaaaattgcagattcatgagagtattgagaaagggatctttgttgctggtttaagggaagaaattgttacatgcgcggaacaggtcatggatttcatgtcttttggagaatcccaccggcatatcggagagacaaacatgaatctttatagcagtcgttctcacactatatttcgcatggtaatcgagagtagagaaaaaggcgatgacaatgaagttgaagatttttgtgatgctgtacgagtatctgttttgaaccttgttgacttagctggctcagaacgcgctgcaaagactggtgcagagggtgtgagacttaaggagggttctcatattaacaaaagtctcatgactcttggtacggtcataaagaaacttagtgaaggcattgagagtcaagggggacatgtgccataccgtgatagtaaactgacaaggatactgcagcctgctctgggtggaaattctaacacagctatcatctgcaatataacacttgcacagatccacactgatgagacaaaaagcagtttgcaatttgcgagtagagcattacgtgtaacaaactgtgcatgcgttaatgagattttgacagatgctgcattattaaaacgccaaaggaaagaaatagaagagcttcgagcaaaacttagaaaatctgaaagtgatcattgggaggaagaaattctgaatctgcgaaacacactactgcagagtgaattggaaaaggaaagaatctctttagagctggaggaggaaaagaaagctaaagagcagcgtgacagatgcttgattgaacaggcaaagaaaattgaaaatcttagttcactggttttaaattcagacagagatgacaggagtactgcttttagtaagaacaaaagaagggtaacatggtgtcctggaccaaatgcaaagcaatttgatattgaggatttaagacctgtccaggaaggctctacaagcagcacagttagaaatgaacgggatatgggaatgccaccactttttgaagagttaatgcaagaaagtaatgatgagccttgtgctaacgtttactcatctggacctggtaatgtgtccaaagacagtgaagacgtccctcttcctgactcgcatgctttgctgcatgttaccaacagaagaaagccaaaggcaatgaagaaatcagatcaagagcaattcagggggagagctggtgaactattaataccccaggacccctgtgatgggaatgatgctctacgccacaaaaacactgtgccttgtgtagttagtagcttatcttctcgagaatctgaagccattcttgtcatcaaacaacttcaagatcagatcaagctgctggaggcagagaagagttctgttcaaactaatttggatgctgttcttgtgctggcaactcaacagaaggtttcatttaatgaggagtatgaagagcttcagcagatcactctagctgcagaagaacaagcaaaggttgctaatgagaacctgtccacactatctgctactgtaaaatccaaacaggaactagcatatgaattcctcggtaatttattgatggagactcaaggaataaatgtggagatggatcagtggagaaactcggttgacagtgctctttcttttattgatgaactctttcagaatctctgcatcatggcacaaggcattcgtgaagtaaatcactctgctcatgaagatagtgcacggtcctgttctgtgatcagggactatgaaaaactatcaacctgtttgatggacaaagtttacaaacttgaattggagaagaaactattggaggaacagtcccaagaccaacaaaatgagatttataagctgaaggccaatctggaaagctgtgagaaggccatagatgactgtactcttcaacatgaattggagaaggatgccattcttttagagctcctaaacctccagaaggaagtatctatcttgtcatcatcttctttgatgaaagaaaaggaatctatccgaaaggaacttgatagaactaaatcaaagttaagagagacggaggacaaacttaagaattccattcaggagaaaacaaaacttcagagtgagaaagcagaggcccacaaagaaattaagaaattgcaaagccagagaactttgcttgaacgtgatttacggaaacgtgattcagctactgttgacaaaaggcatgaactgaattccatgccacaggaaagttctggtgcttttggtcacatgcaggagaactaccaaaatcttgagatgcatgcttttgatatggatgctgaaatttattctttacaagaagctcttgtcacttcaattgatgaaaaggatgaagcgttgtctaaagtagggcttataacatctgaactagaagatcttgcgaataaactgaacttagcagaatcagaaaggaactcctttagcaacgagatcacactcttgactgaaaagttaattgcatctgaatcttcccttaaaagtttggagacttctctcaattctgtatcaagggaaaaggaagatttgggaatgcaacttactgatgcccttttggacatggaatctgaaagatcaatttggacagcaaaggagaaagaatatgtagaagctaatcatagattgaacatctgccttgatgagaaccacaaactttcagaagatttgatgaagtgtataaatggattgcctaccttctcttaa

SEQ ID NO: 69115 - DNA, 3144 bp, Zea Mays
ctcaccgcagagtctcctcaccgcagtaccagactccggccgaaccgcacctctgcccccttcctcccggaggctcagggcctgtggcgcacgtctatggagcggatccacgtagcggtgcgctcgcggccgctctccccggaggactcgcggagcagcccgtggaagatctcgggcaacgcaatcgctcactccgcgcagtcctcctcccgcttcgagttcgacaggatattcggcgaggagtgccgcactgccgaggtctaccaggcccgcatcaagcacatcgtcgataacgtggtccgagggttcaatggcactgtttttgcatatggtcaaactaacagtgggaagaccttcacaatgagaggatcggctaatgaacctggaataataccgcttgcagttcatgacttattccagcgtattcaagagcatatggacagagagtttcttgtgcggatgtcctacatggaaatttacaatgaagatattaatgaccttcttgtgcctgaacatcgaaaattgcagattcatgagagtattgagaaagggatctttgttgctggtttaagggaagaaattgttacatgcgcggaacaggtcatggatttcatgtcttttggagaatcccaccggcatatcggagagacaaacatgaatctttatagcagtcgttctcacactatatttcgcatggtaatcgagagtagagaaaaaggcgatgacaatgaagttgaagatttttgtgatgctgtacgagtatctgttttgaaccttgttgacttagctggctcagaacgcgctgcaaagactggtgcagagggtgtgagacttaaggagggttctcatattaacaaaagtctcatgactcttggtacggtcataaagaaacttagtgaaggcattgagagtcaagggggacatgtgccataccgtgatagtaaactgacaaggatactgcagcctgctctgggtggaaattctaacacagctatcatctgcaatataacacttgcacagattttgacagatgctgcattattaaaacgccaaaggaaagaaatagaagagcttcgagcaaaacttagaaaatctgaaagtgatcattgggaggaagaaattctgaatctgcgaaacacactactgcagagtgaattggaaaaggaaagaatctctttagagctggaggaggaaaagaaagctaaagagcagcgtgacagatgcttgattgaacaggcaaagaaaattgaaaatcttagttcactggttttaaattcagacagagatgacaggagtactgcttttagtaagaacaaaagaagggtaacatggtgtcctggaccaaatgcaaagcaatttgatattgaggatttaagacctgtccaggaaggctctacaagcagcacagttagaaatgaacgggatatgggaatgccaccactttttgaagagttaatgcaagaaagtaatgatgagccttgtgctaacgtttactcatctggacctggtaatgtgtccaaagacagtgaagacgtccctcttcctgactcgcatgctttgctgcatgttaccaacagaagaaagccaaaggcaatgaagaaatcagatcaagagcaattcagggggagagctggtgaactattaataccccaggacccctgtgatgggaatgatgctctacgccacaaaaacactgtgccttgtgtagttagtagcttatcttctcgagaatctgaagccattcttgtcatcaaacaacttcaagatcagatcaagctgctggaggcagagaagagttctgttcaaactaatttggatgctgttcttgtgctggcaactcaacagaaggtttcatttaatgaggagtatgaagagcttcagcagatcactctagctgcagaagaacaagcaaaggttgctaatgagaacctgtccacactatctgctactgtaaaatccaaacaggaactagcatatgaattcctcggtaatttattgatggagactcaaggaataaatgtggagatggatcagtggagaaactcggttgacagtgctctttcttttattgatgaactctttcagaatctctgcatcatggcacaaggcattcgtgaagtaaatcactctgctcatgaagatagtgcacggtcctgttctgtgatcagggactatgaaaaactatcaacctgtttgatggacaaagtttacaaacttgaattggagaagaaactattggaggaacagtcccaagaccaacaaaatgagatttataagctgaaggccaatctggaaagctgtgagaaggccatagatgactgtactcttcaacatgaattggagaaggatgccattcttttagagctcctaaacctccagaaggaagtatctatcttgtcatcatcttctttgatgaaagaaaaggaatctatccgaaaggaacttgatagaactaaatcaaagttaagagagacggaggacaaacttaagaattccattcaggagaaaacaaaacttcagagtgagaaagcagaggcccacaaagaaattaagaaattgcaaagccagagaactttgcttgaacgtgatttacggaaacgtgattcagctactgttgacaaaaggcatgaactgaattccatgccacaggaaagttctggtgcttttggtcacatgcaggagaactaccaaaatcttgagatgcatgcttttgatatggatgctgaaatttattctttacaagaagctcttgtcacttcaattgatgaaaaggatgaagcgttgtctaaagtagggcttataacatctgaactagaagatcttgcgaataaactgaacttagcagaatcagaaaggaactcctttagcaacgagatcacactcttgactgaaaagttaattgcatctgaatcttcccttaaaagtttggagacttctctcaattctgtatcaagggaaaaggaagatttgggaatgcaacttactgatgcccttttggacatggaatctgaaagatcaatttggacagcaaaggagaaagaatatgtagaagctaatcatagattgaacatctgccttgatgagaaccacaaactttcagaagatttgatgaagtgtataaatggattgcctaccttctcttaa

SEQ ID NO: 69116 - DNA, 3141 bp, Zea Mays
ctcaccgcagagtctcctcaccgcagtaccagactccggccgaaccgcacctctgcccccttcctcccggaggctcagggcctgtggcgcacgtctatggagcggatccacgtagcggtgcgctcgcggccgctctccccggaggactcgcggagcagcccgtggaagatctcgggcaacgcaatcgctcactccgcgcagtcctcctcccgcttcgagttcgacaggatattcggcgaggagtgccgcactgccgaggtctaccaggcccgcatcaagcacatcgtcgataacgtggtccgagggttcaatgtgggaagaccttcacaatgagaggatcggctaatgaacctggaataataccgcttgcagttcatgacttattccagcgtattcaagagcatatggacagagagtttcttgtgcggatgtcctacatggaaatttacaatgaagatattaatgaccttcttgtgcctgaacatcgaaaattgcagattcatgagagtattgagaaagggatctttgttgctggtttaagggaagaaattgttacatgcgcggaacaggtcatggatttcatgtcttttggagaatcccaccggcatatcggagagacaaacatgaatctttatagcagtcgttctcacactatatttcgcatggtaatcgagagtagagaaaaaggcgatgacaatgaagttgaagatttttgtgatgctgtacgagtatctgttttgaaccttgttgacttagctggctcagaacgcgctgcaaagactggtgcagagggtgtgagacttaaggagggttctcatattaacaaaagtctcatgactcttggtacggtcataaagaaacttagtgaaggcattgagagtcaagggggacatgtgccataccgtgatagtaaactgacaaggatactgcagcctgctctgggtggaaattctaacacagctatcatctgcaatataacacttgcacagatccacactgatgagacaaaaagcagtttgcaatttgcgagtagagcattacgtgtaacaaactgtgcatgcgttaatgagattttgacagatgctgcattattaaaacgccaaaggaaagaaatagaagagcttcgagcaaaacttagaaaatctgaaagtgatcattgggaggaagaaattctgaatctgcgaaacacactactgcagagtgaattggaaaaggaaagaatctctttagagctggaggaggaaaagaaagctaaagagcagcgtgacagatgcttgattgaacaggcaaagaaaattgaaaatcttagttcactggttttaaattcagacagagatgacaggagtactgcttttagtaagaacaaaagaagggtaacatggtgtcctggaccaaatgcaaagcaatttgatattgaggatttaagacctgtccaggaaggctctacaagcagcacagttagaaatgaacgggatatgggaatgccaccactttttgaagagttaatgcaagaaagtaatgatgagccttgtgctaacgtttactcatctggacctggtaatgtgtccaaagacagtgaagacgtccctcttcctgactcgcatgctttgctgcatgttaccaacagaagaaagccaaaggcaatgaagaaatcagatcaagagcaattcagggggagagctggtgaactattaataccccaggacccctgtgatgggaatgatgctctacgccacaaaaacactgtgccttgtgtagttagtagcttatcttctcgagaatctgaagccattcttgtcatcaaacaacttcaagatcagatcaagctgctggaggcagagaagagttctgttcaaactaatttggatgctgttcttgtgctggcaactcaacagaaggtttcatttaatgaggagtatgaagagcttcagcagatcactctagctgcagaagaacaagcaaaggttgctaatgagaacctgtccacactatctgctactgtaaaatccaaacaggaactagcatatgaattcctcggtaatttattgatggagactcaaggaataaatgtggagatggatcagtggagaaactcggttgacagtgctctttcttttattgatgaactctttcagaatctctgcatcatggcacaaggcattcgtggactatgaaaaactatcaacctgtttgatggacaaagtttacaaacttgaattggagaagaaactattggaggaacagtcccaagaccaacaaaatgagatttataagctgaaggccaatctggaaagctgtgagaaggccatagatgactgtactcttcaacatgaattggagaaggatgccattcttttagagctcctaaacctccagaaggaagtatctatcttgtcatcatcttctttgatgaaagaaaaggaatctatccgaaaggaacttgatagaactaaatcaaagttaagagagacggaggacaaacttaagaattccattcaggagaaaacaaaacttcagagtgagaaagcagaggcccacaaagaaattaagaaattgcaaagccagagaactttgcttgaacgtgatttacggaaacgtgattcagctactgttgacaaaaggcatgaactgaattccatgccacaggaaagttctggtgcttttggtcacatgcaggagaactaccaaaatcttgagatgcatgcttttgatatggatgctgaaatttattctttacaagaagctcttgtcacttcaattgatgaaaaggatgaagcgttgtctaaagtagggcttataacatctgaactagaagatcttgcgaataaactgaacttagcagaatcagaaaggaactcctttagcaacgagatcacactcttgactgaaaagttaattgcatctgaatcttcccttaaaagtttggagacttctctcaattctgtatcaagggaaaaggaagatttgggaatgcaacttactgatgcccttttggacatggaatctgaaagatcaatttggacagcaaaggagaaagaatatgtagaagctaatcatagattgaacatctgccttgatgagaaccacaaactttcagaagatttgatgaagtgtataaatggattgcctaccttctcttaa

SEQ ID NO: 69117 - DNA, 3226 bp, Zea Mays
cctatctcaccgcagagtctcctcaccgcagtaccagactccggccgaaccgcacctctgcccccttcctcccggaggctcagggcctgtggcgcacgtctatggagcggatccacgtagcggtgcgctcgcggccgctctccccggaggactcgcggagcagcccgtggaagatctcgggcaacgcaatcgctcactccgcgcagtcctcctcccgcttcgagttcgacaggatattcggcgaggagtgccgcactgccgaggtctaccaggcccgcatcaagcacatcgtcgataacgtggtccgagggttcaatggcactgtttttgcatatggtcaaactaacagtgggaagaccttcacaatgagaggatcggctaatgaacctggaataataccgcttgcagttcatgacttattccagcgtattcaagagcatatggacagagagtttcttgtgcggatgtcctacatggaaatttacaatgaagatattaatgaccttcttgtgcctgaacatcgaaaattgcagattcatgagagtattgagaaagggatctttgttgctggtttaagggaagaaattgttacatgcgcggaacaggtcatggatttcatgtcttttggagaatcccaccggcatatcggagagacaaacatgaatctttatagcagtcgttctcacactatatttcgcatggtaatcgagagtagagaaaaaggcgatgacaatgaagttgaagatttttgtgatgctgtacgagtatctgttttgaaccttgttgacttagctggctcagaacgcgctgcaaagactggtgcagagggtgtgagacttaaggagggttctcatattaacaaaagtctcatgactcttggtacggtcataaagaaacttagtgaaggcattgagagtcaagggggacatgtgccataccgtgatagtaaactgacaaggatactgcagcctgctctgggtggaaattctaacacagctatcatctgcaatataacacttgcacagatccacactgatgagacaaaaagcagtttgcaatttgcgagtagagcattacgtgtaacaaactgtgcatgcgttaatgagattttgacagatgctgcattattaaaacgccaaaggaaagaaatagaagagcttcgagcaaaacttagaaaatctgaaagtgatcattgggaggaagaaattctgaatctgcgaaacacactactgcagagtgaattggaaaaggaaagaatctctttagagctggaggaggaaaagaaagctaaagagcagcgtgacagatgcttgattgaacaggcaaagaaaattgaaaatcttagttcactggttttaaattcagacagagatgacaggagtactgcttttagtaagaacaaaagaagggtaacatggtgtcctggaccaaatgcaaagcaatttgatattgaggatttaagacctgtccaggaaggctctacaagcagcacagttagaaatgaacgggatatgggaatgccaccactttttgaagagttaatgcaagaaagtaatgatgagccttgtgctaacgtttactcatctggacctggtaatgtgtccaaagacagtgaagacgtccctcttcctgactcgcatgctttgctgcatgttaccaacagaagaaagccaaaggcaatgaagaaatcagatcaagagcaattcagggggagagctggtgaactattaataccccaggacccctgtgatgggaatgatgctctacgccacaaaaacactgtgccttgtgtagttagtagcttatcttctcgagaatctgaagccattcttgtcatcaaacaacttcaagatcagatcaagctgctggaggcagagaagagttctgttcaaactaatttggatgctgttcttgtgctggcaactcaacagaaggtttcatttaatgaggagtatgaagagcttcagcagatcactctagctgcagaagaacaagcaaaggttgctaatgagaacctgtccacactatctgctactgtaaaatccaaacaggaactagcatatgaattcctcggtaatttattgatggagactcaaggaataaatgtggagatggatcagtggagaaactcggttgacagtgctctttcttttattgatgaactctttcagaatctctgcatcatggcacaaggcattcgttaaatcactctgctcatgaagatagtgcacggtcctgttctgtgatcagggactatgaaaaactatcaacctgtttgatggacaaagtttacaaacttgaattggagaagaaactattggaggaacagtcccaagaccaacaaaatgagatttataagctgaaggccaatctggaaagctgtgagaaggccatagatgactgtactcttcaacatgaattggagaaggatgccattcttttagagctcctaaacctccagaaggaagtatctatcttgtcatcatcttctttgatgaaagaaaaggaatctatccgaaaggaacttgatagaactaaatcaaagttaagagagacggaggacaaacttaagaattccattcaggagaaaacaaaacttcagagtgagaaagcagaggcccacaaagaaattaagaaattgcaaagccagagaactttgcttgaacgtgatttacggaaacgtgattcagctactgttgacaaaaggcatgaactgaattccatgccacaggaaagttctggtgcttttggtcacatgcaggagaactaccaaaatcttgagatgcatgcttttgatatggatgctgaaatttattctttacaagaagctcttgtcacttcaattgatgaaaaggatgaagcgttgtctaaagtagggcttataacatctgaactagaagatcttgcgaataaactgaacttagcagaatcagaaaggaactcctttagcaacgagatcacactcttgactgaaaagttaattgcatctgaatcttcccttaaaagtttggagacttctctcaattctgtatcaagggaaaaggaagatttgggaatgcaacttactgatgcccttttggacatggaatctgaaagatcaatttggacagcaaaggagaaagaatatgtagaagctaatcatagattgaacatctgccttgatgagaaccacaaactttcagaagatttgatgaagtgtataaatggattgcctaccttctcttaa

SEQ ID NO: 69118 - DNA, 2806 bp, Zea Mays
ctcaccgcagagtctcctcaccgcagtaccagactccggccgaaccgcacctctgcccccttcctcccggaggctcagggcctgtggcgcacgtctatggagcggatccacgtagcggtgcgctcgcggccgctctccccggaggactcgcggagcagcccgtggaagatctcgggcaacgcaatcgctcactccgcgcagtcctcctcccgcttcgagttcgacaggatattcggcgaggagtgccgcactgccgaggtctaccaggcccgcatcaagcacatcgtcgataacgtggtccgagggttcaatggcactgtttttgcatatggtcaaactaacagtgggaagaccttcacaatgagaggatcggctaatgaacctggaataataccgcttgcagttcatgacttattccagcgtattcaagagcatatggacagagagtttcttgtgcggatgtcctacatggaaatttacaatgaagatattaatgaccttcttgtgcctgaacatcgaaaattgcagattcatgagagtattgaggaaagggatctttgttgctggtttaagggaagaaattgttacatgcgcggaacaggtcatggatttcatgtcttttggagaatcccaccggcatatcggagagacaaacatgaatctttatagcagtcgttctcacactatatttcgcatggtaatcgagagtagagaaaaaggcgatgacaatgaagttgaagatttttgtgatgctgtacgagtatctgttttgaaccttgttgacttagctggctcagaacgcgctgcaaagactggtgcagagggtgtgagacttaaggagggttctcatattaacaaaagtctcatgactcttggtacggtcataaagaaacttagtgaaggcattgagagtcaagggggacatgtgccataccgtgatagtaaactgacaaggatactgcagcctgctctgggtggaaattctaacacagctatcatctgcaatataacacttgcacagatccacactgatgagacaaaaagcagtttgcaatttgcgagtagagcattacgtgtaacaaactgtgcatgcgttaatgagattttgacagatgctgcattattaaaacgccaaaggaaagaaatagaagagcttcgagcaaaacttagaaaatctgaaagtgatcattgggaggaagaaattctgaatctgcgaaacacactactgcagagtgaattggaaaaggaaagaatctctttagagctggaggaggaaaagaaagctaaagagcagcgtgacagatgcttgattgaacaggcaaagaaaattgaaaatcttagttcactggttttaaattcagacagagatgacaggagtactgcttttagtaagaacaaaagaagggtaacatggtgtcctggaccaaatgcaaagcaatttgatattgaggatttaagacctgtccaggaaggctctacaagcagcacagttagaaatgaacgggatatgggaatgccaccactttttgaagagttaatgcaagaaagtaatgatgagccttgtgctaacgtttactcatctggacctggtaatgtgtccaaagacagtgaagacgtccctcttcctgactcgcatgctttgctgcatgttaccaacagaagaaagccaaaggcaatgaagaaatcagatcaagagcaattcagggggagagctggtgaactattaataccccaggacccctgtgatgggaatgatgctctacgccacaaaaacactgtgccttgtgtagttagtagcttatcttctcgagaatctgaagccattcttgtcatcaaacaacttcaagatcagatcaagctgctggaggcagagaagagttctgttcaaactaatttggatgctgttcttgtgctggcaactcaacagaaggtttcatttaatgaggagtatgaagagcttcagcagatcactctagctgcagaagaacaagcaaaggttgctaatgagaacctgtccacactatctgctactgtaaaatccaaacaggaactagcatatgaattcctcggtaatttattgatggagactcaaggaataaatgtggagatggatcagtggagaaactcggttgacagtgctctttcttttattgatgaactctttcagaatctctgcatcatggcacaaggcattcgtgaagtaaatcactctgctcatgaagatagtgcacggtcctgttctgtgatcagggactatgaaaaactatcaacctgtttgatggacaaagtttacaaacttgaattggagaagaaactattggaggaacagtcccaagaccaacaaaatgagatttataagctgaaggccaatctggaaagctgtgagaaggccatagatgactgtactcttcaacatgaattggagaaggatgccattcttttagagctcctaaacctccagaaggaagtatctatcttgtcatcatcttctttgatgaaagaaaaggaatctatccgaaaggaacttgatagaactaaatcaaagttaagagagacggaggacaaacttaagaattccattcaggagaaaacaaaacttcagagtgagaaagcagaggcccacaaagaaattaagaaattgcaaagccagagaactttgcttgaacgtgatttacggaaacgtgattcagctactgttgacaaaaggcatgaactgaattccatgccacaggaaagttctggtgcttttggtcacatgcaggtcgacttttacatatcactgtagatgcttaatgcataatttttc

SEQ ID NO: 69119 - DNA, 1116 bp, Zea Mays
ttgtcaatcaggcaatgtaacatgcatataagtatcatgtcccattgtttctgtacagagcactactgagcatttgagggatacagtagcaaaactagctgtcagagaagcagcttatttcttagccacatcaactgagggcctaggtcttcaacgcgaaccggtcttgccatggaaccgccctcttaccttcacttacaggagagtactctcctgtatccctacaaactgataatttgacatcaggtgtcatcgtatcttcattcacctcgacctgatctaacttttcaacttctggatggccatgttgcccctggcaatcattccccacatcgttctgcagacaagaaggcccttttagctgacaaaaaaaacacttcccttatacagtttattttagttcatgaactccacacttaccaggacagaatcttgatttaagtcaaggtttgggtttctgctggtagaaggcacttcggtccctgcaccatggcccaatggggatggcatgtaccgagcctgcttcttcaacctgtaatgtgtctgctgcgagccacccttcggaaaggactgatacttccttcgcaagaaccttgcaacaaaaagcagctacacagttagtgaagctgaaaagcagtaataatgccagcatgaagaataagaagatgatactagtagtaacatggagccacaaagcaagagccggagaactgccatacttgacttcagcaagcagggcgaggcttcttcgcttcttgctcgccagcctcctcttctttgcctcggtctctgactcacctgcagcaggtcgtggtagtcccgccagagcgcgcggaacctgtccccgctgccggagcccctctccgcgggcgccgccggctgccgcctcttcttgcccttgctcctccgcaccagcagcgtctccccgccgccgtccatctcgccggtgaggcgagacgaggccaggagcccggcgctcgggctcgtggctgcggccgggagggcgaggacggcggcggagggtggggaggggataggatcagatctagacggagaggagggcgagaggagaccggggccgcgtggtggcgtcagcacggcacgggaagagtcgtc

SEQ ID NO: 69120 - DNA, 1844 bp, Zea Mays
ttctcgccccacctggcatcgatgcccgcatcccgtcatcctcaccaacctcgcggccacccacctactcgccaacgcaatccacgccccacctgacattcgaaggccacgccccgccatcctagcccctgagcccgcaatccccttccattggtggcatcacccatgcgttgcgtccccgccgtcgtcctcgccccattacgagtggaaggaggacgtccacatgaccacaccaggcaaggccatgcccctgcccgacgccaccccccagaccccccctctagaagcctagcgatggcaccgtctatccgtgcgagatctccgtgcttgaggtatctctgtgtcgagggaaagcgagtgctcctctcctagcctaacctcctctgaattcatgtcccaaccttctcttatttgtgtgtttatctcgtctacctgggttgatgttgtttgattccttctcctttttgtttgggaggtcgccaaattccatcccatctctcagcgtcgtggtctccccgatatggatgggggaaggtaatttgttttttctttgttaagaattgctagactctatcctccggcctctggcctcttggaaaatctaaaaacgatgtatttaattatgcattttcgtttgctttgctaaactctgtacctctacgagcttttccatggtaggatagcttgtgagagctactcgatgagctgacctgaaccattatgattgctggaatgaagctgcgctgctggtttccctccttttatttagtttttcatctccataattgttctttttgtaaaaaaatggttcttcttctatacaaccttggatttttttgcatttgtttttaggtttgcactggtgccgttggcaatatttgtcttcctagcctataaatactagaaaacaaggataacaatagatgcattcgagaagttcctgtgaatgtagcaaatgcttgttctgatgagatatgcatacacaaacatcattgctttcattggccatttcagagacaagctcgaacaaggaggctacgggcattgctttatgtttgtgacgctaaaggatctctatccatcattgtttccatattatcatggtattattgccttcaatattattctctatatcaactacagctaccgtggaggagttgatagtgaaggttgtccagttatttgtcgttgtcggtgctcactttcttcttcgctgcttgattcttgagttatttggtctatatgtagcaaatgtgattgaatcttaactgtcagtggacataattagacattttcaataagaagaatatcaattttagttgattcctatatgtaatcgtgtagatgcccttaataaccatgcagttcctgagcctgctcagtcatccctgttctctcttgacatacatgaatatcctaatcttaccgttgttcttgttctgtcctggcaaaaatacttgatgcatttgtttatgttttgtaatgggacatcactgctcaagtatccaaaagcttgggaaattgcacatgcactgcacgcgtggcggagcctcttcgagtttccatgcagcacgattcgttttccaacgcgttgccgctgcatgaaacgcaatgaaggcaagccgtcgcctggctacctccacccgctgcaggctacaaacatccgtgacaccgaactcttcggcgtccacgtctatggcaccgacctcgacgtcgagatccttaacgccaagattgctgccacgtgagcgttatcttagcacgtgaatccgagatcctagtgtaaaataaactagcgtcgagatgtattacgaataacttttaaaaaaagactaaaataaaag

SEQ ID NO: 69121 - DNA, 1054 bp, Zea Mays
attccatattctcgccccacctggcatcgatgcccgcatcccgtcatcctcaccaacctcgcggccacccacctactcgccaacgcaatccacgccccacctgacattcgaaggccacgccccgccatcctagcccctgagcccgcaatccccttccattggtggcatcacccatgcgttgcgtccccgccgtcgtcctcgccccattacgagtggaaggaggacgtccacatgaccacaccaggcaaggccatgcccctgcccgacgccaccccccagaccccccctctagaagcctagcgatggcaccgtctatccgtgcgagatctccgtgcttgaggtcgccaaattccatcccatctctcagcgtcgtggtctccccgatatggatgggggaagagacaagctcgaacaaggaggctacgggcattgctttatgtttgtgacgctaaaggatctctatccatcattgtttccatattatcatggtattattgccttcaatattattctctatatcaactacagctaccgtggaggagttgatagtgaagatgcccttaataaccatgcagttcctgagcctgctcagtcatccctgttctctcttgacatacatgaatatcctaatcttaccgttgttcttgttctgtcctggcaaaaatacttgatgcatttgtttatgttttgtaatgggacatcactgctcaagtatccaaaagcttgggaaattgcacatgcactgcacgcgtggcggagcctcttcgagtttccatgcagcacgattcgttttccaacgcgttgccgctgcatgaaacgcaatgaaggcaagccgtcgcctggctacctccacccgctgcaggctacaaacatccgtgacaccgaactcttcggcgtccacgtctatggcaccgacctcgacgtcgagatccttaacgccaagattgctgccacgtgagcgttatcttagcacgtgaatccgagatcctagtgtaaaataaactagcgtcgagatgtattacgaataacttttaaaaaaagactaaaataaaag

SEQ ID NO: 69122 - DNA, 2101 bp, Zea Mays
aaaaaaccaagaaagaaagaaaaccgtttcgcgcaccataaaatcgctttgggtttccaacgcaaaaccgccccgcacttctccgcaccgttaccaaattgatccttcccgcaaagctgcaatggagttcgcctcccgcagtcgacccaccaccacagcagccgacgacgaagaaaacgactgtcttcgccgcttccccgaccatccgccgtcgcagccgcagggacacggcgagcccaatacatccggggtagacgctgcactactggcgaggaggcagaaactgctgttggagctgctcaagggatccatccaacagggcttgatcttgcgtgagctcgtggagactgagcacgccatgggctttattgccggcagccacaatcctgtgccagcactcccacaggatttcttgcgttgctggacgccgtcgatgtctactttggaagcgcatctccgccagccatgcccttgtggctgtggaaactccatggcggtcagggcacctccagtgaacccacacttggagcggtcatcgcatgcacccgagcaaacaaggccaggcaatgatgctgagcagcatcaagaggacaggtcatctggggtgaggacacatccatttaacggccattttaaactgtgtcattcaccgagcaagcagactccagtgccaggcaaagctggtgtcaatcagatgcggccatcgtccggacaccaacaggccattgtttgggaaaagattggtgtggaggttgttcataacatgcagccgttgaacgaaatcaagaaccacagcagtgaggggcagaaggccgtagactctgccattgaggtttgtgtaaagaaacccatacaacagcgtcttcagtacaaaccagtggatcaggagaatgcagcaaacaatgagcatgcacctgagcagacaaggcaaggcaatgatgctgagcatcatcaagagggcaggtcatctggagtgaggacacatccatttaacggctactttgaactgtgtcgttcaccgagcaagcagattccactggcaggcaaagctggtatcaatcaggtgcgtccattgtcaggacaccaacagggtgttgtttgggaaaagattggtgtggaggtagttcataacatgcagccattgcacgaaatcaagaatccgagcagtgaggggcggaaggccatagactctggcattgaggattgtgtaaagaaacccatgcatcatcgtcttcagtacaaaccagtggatcaggagaatgcagcaagtaatgaccagaagagtacagagttcaacgagctgagggaacttccgctggggtgaaaaggaagctgaccaccccaagctcacctgtcaagaagcagaagccactcgggcaatggagctgcactatctgccaggctaacccagctagccagcgccaacttgagcaacaccttgccggcaagcggcaccagtcaaatgtcgcagcactgcaaccatctcagagcaacagcagcagccctgagcctgacacaaaagcgacgcccgcgaggagcaggatcatcgcgacgaacgcgcagcaagacggcaagcaggatgtgccggagaacagatggacgtgtacactctgccgggccaagtgctacactgaattgaactactacagccatctcgggggcttgtggcaccgggagaaggcacaggccaggcgcgaggagcacttgaggttctactgctcggtgtgcgacctgcaatgcaacagcgagaaaatgctggagtcacacctcggcggtaggaggcatcgggagactctggaggcgcgcgactaggatgccgaggcacggctgcaggctgacccgtccttgttcacggggaagctgttgtggctgggttccggcgggtcgatctgccattttgaggggcactacggtggtgcacgaagctgctatcgctggtctgctgctggactctgcctagttcgttgatttctctcgtttcgagcttttagtttcacgttggtaggttttaatgttatgcgacttttgatcttcgggcccaagacaaaacagacttgaaatgcgtatgtttcgatgtagtagttggttggtgttgcttatt

SEQ ID NO: 69123 - DNA, 1644 bp, Zea Mays
gtgccggtgcccgtgagggcgtagcggatgtggaattgtggatcagcagcacagacacgtcaattagcctaaaaaaaatcaaaatcaaaatccccttcccctcctccgctctttataaaccctcctcaccgtcactccactcccccacctagctcaccgctcactcaagcacgctgcgaaacacatacacacacagatcgaagcggaggatgaaggtggaggtggtggagacgacgctggtgccgccgagcgaggcgacgccgcggcacgcgctgtggctgtccaacctggacctggcggtgcccaagacccacacgccgctcgtctactactacccgagggcgcgctgttctgcgtcgcgcgggccgacttcaccggcgacgagatgttcgccgacttcgagccctcccccgaggcgcgccgcctgctcgtgcccttcgccgcgtccggcgacccgccctgcgtgctcgccatggtccaggtgaccttcctcaagtgcggcggcgtggccgtgggcacgggcatgcaccacgtgacgatggacggcgccggcgcgatccagttcatccgggcgtggacggcgctggcgcgcggggaggcccccgcgtggacgccgtcgcacgaccggacgctcctgcgcgcgcgctccccgccgcacgtccccgcctgcgagcacccggtctactccccggcctacctcaacggggcgccgcggcccttcgtgacgcgcgtctacgccgtgccgcccaagctgctggcaggcatccggtcgcgctgcgcgccgggcgcgtccacgtactgcgcggtcacggcgcacctgtggcgcgccatgtgcgtcgcccggggcctcccggcggccagcgacacgcggctgcgcgtcccggccaacgtccggcagcgcctgcgcccgccgctcccggcgtcctacttcggcaacgccatcgtgcgggacctggtcaccgtgcgggtgggcgacgtgctgtcgcagccgctgggcttcgtggcggagcggatcaagcgcgcggtggcccgcgtcgacgacgcccgcgtgcgctccgtcgtcgactacctggagcttgagtcggacaagggcaaccaggcggcgcgcggccagttcatgcccgagtccgacctgtgggtcgtcagctggctcggcatgcccatccacgacgccgacttcggctggggccgccccgggttcgtggcccccgcgcagatgttcggcagcggcacggcgtacgtcacgcagggacgcgacaaggacgaccccatcaacgtgctcttcgcgctcgagccagagtacctgaacaccttcgagaaggccttctacggggagtgaccgtgacccgaccacgaccagccatggcgaggagtctgatgacgataggatgtgattgtgatgccatgccgttgtggcatctcccggggtgtgcacactgttataccatatcatattgcatgtttcggaatgcaactcaatgcttactgggtgtgtgataaggtgcttcattccagctttgtactagtgtcaccaagcacattctgtcctaacatctacgtaaataacggaatgacaaactggaacatgcacggctggaaaaaaagccatgtagatgtagctgcaaataactgtttattttattg

SEQ ID NO: 69124 - DNA, 687 bp, Zea Mays
gtgccggtgcccgtgagggcgtagcggatgtggaattgtggatcagcagcacagacacgtcaattagcctaaaaaaaatcaaaatcaaaatccccttcccctcctccgctctttataaaccctcctcaccgtcactccactcccccacctagctcaccgctcactcaagcacgctgcgaaacacatacacacacagatcgaagcggaggatgaaggtggaggtggtggagacgacgctggtgccgccgagcgaggcgacgccgcggcacgcgctgtggctgtccaacctggacctggcggtgcccaagacccacacgccgctcgtctactactacccgaggtggtacagacggacacgctggtgattcagactgaagaattgtagcctattctgtagtatttacgtatcaaaaataatttagaactctaaagatgcgttacttattgattattatgttttttacagttcacaaaaaaattttgcaagagttccccttgttttattaacaaccacagttcaaataatcacatattataagacatataagcatttcaacatataatacatcacaaaatcacatcgaatataaaaacatccacagaacatagttcttcatataatgtccacaaacaaagtccaaaatacaagttcccaacacatagtccaaaacacaaaacatagttcat

SEQ ID NO: 69125 - DNA, 2680 bp, Zea Mays
ctcacatgcatgtgcattgtcctgtctgttctaaaaccatcagaatctccacgaataatgtttatgtgctttgtccttgctcaattgatgtacgatcccatgtagcagctgccatttgtccaaagatcttttttatgctttatagtagatctacaatgcatttatacattcagatgccaccttcctcccctgtttccgagcctctgtctagtcactctccttcacgattggccgcactagctatagctgttcgaagttttggcgctgaaatcgaaagttcctgttgcttgtttcaaattgaaatttggatgttcgttcttcttaatttgaggcttacctatttatttggtgtctggttgtgtgcctttaggtatacattggttgttgcagcaagctggtttcttgagatccatattgatgtggtttgttctggaaatttttattcttcatggatgctattaagagccatgcaaagaaggttgatcttgttgatgagactctaagaccaccactagttccatccgagaagcacaatgctttccgagtgaggaatgttgcatccaggtgcaaaactgatctggctgatgccactaagataagaagatgtacatcaccaagtcttggccagacctcagcaattgaaggcacaccagcacccaaaagagctcagtctgcagatagaagaaggccgacaccttcaacccctccctctaaggtgtcaacaccctcaacccctgtgtcaaggtccatcacaccagttcgtgataccactagagacttacacaagagttccaagcgtatagcaagcacaaaggctcctgatggcttgtggccagcaatgcgtaacttgtcttcatctttccagtcggaatctgtggctgcacctactactagaaatgataaggtagtcacggctttggattgtagcaaggggcaagtgagtgttctaacggagaggaagagaagtccttttagaaggaaaaacattggtgaacattgtgagaatgctcaaccttcagaggagccccctaagaggttaattgagcaacacagatggccagccatgatagctgggcaggcgccgaagaatctcatgtcaagaagcattgacctttcggacaaagctaatataccagtcgcatcatcaaatacatcaagaggtctttcaccaaggaagacgccttctgtcagacctgtgccatcatcaaatacatcaagaggcctttcaccaaggaagaccccttccgtcggaccagtcccatcatcaaatacatcaagatgcccttcaccaatgaagaccccttctgttgaagcttcagtgaaactgtcaaatcagtcattggatgaagtggcaaggagtttggctattcaatcaagcagaaaagatgataaggtagattcacagacaatagagagatccaaatctttgagccgaccaaacagaacagttacttttcctgttccaattctacaacgctcatcatcaccaagcagagcattgccagctacgtcctcaacttccagggcctttcagagcccatctcggacaaggccatcaacaccctgtcagtcccaaagtgttggagctatccaatcaagcgttccatcttctcttattaactacatggttgatgcgcggaaaggaaagaagaatgccagccaaatcgaaaatatccaccaagtgcgtttattgcacaatagacatttacagtggctctttataaatgcttatgcagaagatgctttatcttttcaaaaggctactgttgagaataccatgtataatgtttggaggaatactgtaaacctgcgggattctgttaatatgaaaagaataatggtgcaacacttccaacaagaactcaggctttacaacattctgaaagagcagattgcttaccttgaacaatggccaacgctagaaagggagaatagtatctctttactaggggcaactgaggctctgaaagcaagcaccctgcgcctgccagttacattgggagcaaaggctaacacaattgctctcaagaacgctgtaagctcagctgttgatgtcatgcaagttttgggctcatctgtttgctgcattcattcaaagatcacggacagcacatccttggtttcagaactctctgtcatagcaggacaagagaagatcatgcttgatgaatgccgagaactcttagctacagctgcaaaactgcaggtgcaggagtcgagcctacggacacatcttgtgcaacagagacaaaggcttcaggattgaaatggcaacctgaacaagatgcagaagccccaggccatgccattgaacaggtaaactgtgcaagttgaactgcaaacagaaaagtaatctgtagagtctaaacaataggaacaaaacaaatgttaaacatcccctggagattcatggtgtgatgccacaactaactacccgcagtgcatagatatgacaggtttactgaaaaaacctcatcatatgtaaatggttttcaccatataatgcactcccagccttttctagtattttttgtttctttgtatagagtggatccctccctctttgccattgtattttttgacattttgaaagaaatacatagataatggatgagctaagatggtgatatcattttttttttcagttttccttgttagaaacatatatattaacattttt

SEQ ID NO: 69126 - DNA, 2598 bp, Zea Mays
aggaaactgattcgtctcacatgcatgtgcattgtcctgtctgttctaaaaccatcagaatctccacgaataatgtttatgtgctttgtccttgctcaattgatgtacgatcccatgtagcagctgccatttgtccaaagatcttttttatgctttatagtagatctacaatgcatttatacattcagatgccaccttcctcccctgtttccgagcctctgtctagtcactctccttcacgattggccgcactagctatagctgttcgaagttttggcgctgaaatcggtatacattggttgttgcagcaagctggtttcttgagatccatattgatgtggtttgttctggaaatttttattcttcatggatgctattaagagccatgcaaagaaggttgatcttgttgatgagactctaagaccaccactagttccatccgagaagcacaatgctttccgagtgaggaatgttgcatccaggtgcaaaactgatctggctgatgccactaagataagaagatgtacatcaccaagtcttggccagacctcagcaattgaaggcacaccagcacccaaaagagctcagtctgcagatagaagaaggccgacaccttcaacccctccctctaaggtgtcaacaccctcaacccctgtgtcaaggtccatcacaccagttcgtgataccactagagacttacacaagagttccaagcgtatagcaagcacaaaggctcctgatggcttgtggccagcaatgcgtaacttgtcttcatctttccagtcggaatctgtggctgcacctactactagaaatgataaggtagtcacggctttggattgtagcaaggggcaagtgagtgttctaacggagaggaagagaagtccttttagaaggaaaaacattggtgaacattgtgagaatgctcaaccttcagaggagccccctaagaggttaattgagcaacacagatggccagccatgatagctgggcaggcgccgaagaatctcatgtcaagaagcattgacctttcggacaaagctaatataccagtcgcatcatcaaatacatcaagaggtctttcaccaaggaagacgccttctgtcagacctgtgccatcatcaaatacatcaagaggcctttcaccaaggaagaccccttccgtcggaccagtcccatcatcaaatacatcaagatgcccttcaccaatgaagaccccttctgttgaagcttcagtgaaactgtcaaatcagtcattggatgaagtggcaaggagtttggctattcaatcaagcagaaaagatgataaggtagattcacagacaatagagagatccaaatctttgagccgaccaaacagaacagttacttttcctgttccaattctacaacgctcatcatcaccaagcagagcattgccagctacgtcctcaacttccagggcctttcagagcccatctcggacaaggccatcaacaccctgtcagtcccaaagtgttggagctatccaatcaagcgttccatcttctcttattaactacatggttgatgcgcggaaaggaaagaagaatgccagccaaatcgaaaatatccaccaagtgcgtttattgcacaatagacatttacagtggctctttataaatgcttatgcagaagatgctttatcttttcaaaaggctactgttgagaataccatgtataatgtttggaggaatactgtaaacctgcgggattctgttaatatgaaaagaataatggtgcaacacttccaacaagaactcaggctttacaacattctgaaagagcagattgcttaccttgaacaatggccaacgctagaaagggagaatagtatctctttactaggggcaactgaggctctgaaagcaagcaccctgcgcctgccagttacattgggagcaaaggctaacacaattgctctcaagaacgctgtaagctcagctgttgatgtcatgcaagttttgggctcatctgtttgctgcattcattcaaagatcacggacagcacatccttggtttcagaactctctgtcatagcaggacaagagaagatcatgcttgatgaatgccgagaactcttagctacagctgcaaaactgcaggtgcaggagtcgagcctacggacacatcttgtgcaacagagacaaaggcttcaggattgaaatggcaacctgaacaagatgcagaagccccaggccatgccattgaacaggtaaactgtgcaagttgaactgcaaacagaaaagtaatctgtagagtctaaacaataggaacaaaacaaatgttaaacatcccctggagattcatggtgtgatgccacaactaactacccgcagtgcatagatatgacaggtttactgaaaaaacctcatcatatgtaaatggttttcaccatataatgcactcccagccttttctagtattttttgtttctttgtatagagtggatccctccctctttgccattgtattttttgacattttgaaagaaatacatagataatggatgagctaagatggtgatatcattttttttttcagttttccttgttagaaacatatatattaacattttt

SEQ ID NO: 69127 - DNA, 2341 bp, Zea Mays
attttgtccaagtgaattctcggcaacgtcaagtgaagtctggcggtttagctggtatacattggttgttgcagcaagctggtttcttgagatccatattgatgtggtttgttctggaaatttttattcttcatggatgctattaagagccatgcaaagaaggttgatcttgttgatgagactctaagaccaccactagttccatccgagaagcacaatgctttccgagtgaggaatgttgcatccaggtgcaaaactgatctggctgatgccactaagataagaagatgtacatcaccaagtcttggccagacctcagcaattgaaggcacaccagcacccaaaagagctcagtctgcagatagaagaaggccgacaccttcaacccctccctctaaggtgtcaacaccctcaacccctgtgtcaaggtccatcacaccagttcgtgataccactagagacttacacaagagttccaagcgtatagcaagcacaaaggctcctgatggcttgtggccagcaatgcgtaacttgtcttcatctttccagtcggaatctgtggctgcacctactactagaaatgataaggtagtcacggctttggattgtagcaaggggcaagtgagtgttctaacggagaggaagagaagtccttttagaaggaaaaacattggtgaacattgtgagaatgctcaaccttcagaggagccccctaagaggttaattgagcaacacagatggccagccatgatagctgggcaggcgccgaagaatctcatgtcaagaagcattgacctttcggacaaagctaatataccagtcgcatcatcaaatacatcaagaggtctttcaccaaggaagacgccttctgtcagacctgtgccatcatcaaatacatcaagaggcctttcaccaaggaagaccccttccgtcggaccagtcccatcatcaaatacatcaagatgcccttcaccaatgaagaccccttctgttgaagcttcagtgaaactgtcaaatcagtcattggatgaagtggcaaggagtttggctattcaatcaagcagaaaagatgataaggtagattcacagacaatagagagatccaaatctttgagccgaccaaacagaacagttacttttcctgttccaattctacaacgctcatcatcaccaagcagagcattgccagctacgtcctcaacttccagggcctttcagagcccatctcggacaaggccatcaacaccctgtcagtcccaaagtgttggagctatccaatcaagcgttccatcttctcttattaactacatggttgatgcgcggaaaggaaagaagaatgccagccaaatcgaaaatatccaccaagtgcgtttattgcacaatagacatttacagtggctctttataaatgcttatgcagaagatgctttatcttttcaaaaggctactgttgagaataccatgtataatgtttggaggaatactgtaaacctgcgggattctgttaatatgaaaagaataatggtgcaacacttccaacaagaactcaggctttacaacattctgaaagagcagattgcttaccttgaacaatggccaacgctagaaagggagaatagtatctctttactaggggcaactgaggctctgaaagcaagcaccctgcgcctgccagttacattgggagcaaaggctaacacaattgctctcaagaacgctgtaagctcagctgttgatgtcatgcaagttttgggctcatctgtttgctgcattcattcaaagttcagaactctctgtcatagcaggacaagagaagatcatgcttgatgaatgccgagaactcttagctacagctgcaaaactgcaggtgcaggagtcgagcctacggacacatcttgtgcaacagagacaaaggcttcaggattgaaatggcaacctgaacaagatgcagaagccccaggccatgccattgaacaggtaaactgtgcaagttgaactgcaaacagaaaagtaatctgtagagtctaaacaataggaacaaaacaaatgttaaacatcccctggagattcatggtgtgatgccacaactaactacccgcagtgcatagatatgacaggtttactgaaaaaacctcatcatatgtaaatggttttcaccatataatgcactcccagccttttctagtattttttgtttctttgtatagagtggatccctccctctttgccattgtattttttgacattttgaaagaaatacatagataatggatgagctaagatggtgatatcattttttttttcagttttccttgttagaaacatatatattaacattttt

SEQ ID NO: 69128 - DNA, 2535 bp, Zea Mays
cttaattctctacttccctgccgcccgcggcaaccgtcctccctcctccacctccaccagctgcactccccacgccgcgcacccgcccctctgcccctcctccagctccaaaccggaaacgcggggataccgcgccgtccgcgtggcgtgtccgaagagatcccacgacccggcgggcggcgctgcgaggctgaaggcgcggcggcggcggatttaagggcctcaccggctcgggatctccgcgcgatcgccgctgggccgcgcgctcgaggtatacattggttgttgcagcaagctggtttcttgagatccatattgatgtggtttgttctggaaatttttattcttcatggatgctattaagagccatgcaaagaaggttgatcttgttgatgagactctaagaccaccactagttccatccgagaagcacaatgctttccgagtgaggaatgttgcatccaggtgcaaaactgatctggctgatgccactaagataagaagatgtacatcaccaagtcttggccagacctcagcaattgaaggcacaccagcacccaaaagagctcagtctgcagatagaagaaggccgacaccttcaacccctccctctaaggtgtcaacaccctcaacccctgtgtcaaggtccatcacaccagttcgtgataccactagagacttacacaagagttccaagcgtatagcaagcacaaaggctcctgatggcttgtggccagcaatgcgtaacttgtcttcatctttccagtcggaatctgtggctgcacctactactagaaatgataaggtagtcacggctttggattgtagcaaggggcaagtgagtgttctaacggagaggaagagaagtccttttagaaggaaaaacattggtgaacattgtgagaatgctcaaccttcagaggagccccctaagaggttaattgagcaacacagatggccagccatgatagctgggcaggcgccgaagaatctcatgtcaagaagcattgacctttcggacaaagctaatataccagtcgcatcatcaaatacatcaagaggtctttcaccaaggaagacgccttctgtcagacctgtgccatcatcaaatacatcaagaggcctttcaccaaggaagaccccttccgtcggaccagtcccatcatcaaatacatcaagatgcccttcaccaatgaagaccccttctgttgaagcttcagtgaaactgtcaaatcagtcattggatgaagtggcaaggagtttggctattcaatcaagcagaaaagatgataaggtagattcacagacaatagagagatccaaatctttgagccgaccaaacagaacagttacttttcctgttccaattctacaacgctcatcatcaccaagcagagcattgccagctacgtcctcaacttccagggcctttcagagcccatctcggacaaggccatcaacaccctgtcagtcccaaagtgttggagctatccaatcaagcgttccatcttctcttattaactacatggttgatgcgcggaaaggaaagaagaatgccagccaaatcgaaaatatccaccaagtgcgtttattgcacaatagacatttacagtggctctttataaatgcttatgcagaagatgctttatcttttcaaaaggctactgttgagaataccatgtataatgtttggaggaatactgtaaacctgcgggattctgttaatatgaaaagaataatggtgcaacacttccaacaagaactcaggctttacaacattctgaaagagcagattgcttaccttgaacaatggccaacgctagaaagggagaatagtatctctttactaggggcaactgaggctctgaaagcaagcaccctgcgcctgccagttacattgggagcaaaggctaacacaattgctctcaagaacgctgtaagctcagctgttgatgtcatgcaagttttgggctcatctgtttgctgcattcattcaaaggacaagagaagatcatgcttgatgaatgccgagaactcttagctacagctgcaaaactgcaggtgcaggagtcgagcctacggacacatcttgtgcaacagagacaaaggcttcaggattgaaatggcaacctgaacaagatgcagaagccccaggccatgccattgaacaggtaaactgtgcaagttgaactgcaaacagaaaagtaatctgtagagtctaaacaataggaacaaaacaaatgttaaacatcccctggagattcatggtgtgatgccacaactaactacccgcagtgcatagatatgacaggtttactgaaaaaacctcatcatatgtaaatggttttcaccatataatgcactcccagccttttctagtattttttgtttctttgtatagagtggatccctccctctttgccattgtattttttgacattttgaaagaaatacatagataatggatgagctaagatggtgatatcattttttttttcagttttccttgttagaaacatatatattaacattttt

SEQ ID NO: 69129 - DNA, 2630 bp, Zea Mays
ttttactttattatactttatatatcttatttatattctgaaaaatgctattgtttttttgaaatttagaataaaagataattatatctagataacccagctgggagaggataccgagctctgttgcctgttgggagttcctcttaattctctacttccctgccgcccgcggcaaccgtcctccctcctccacctccaccagctgcactccccacgccgcgcacccgcccctctgcccctcctccagctccaaaccggaaacgcggggataccgcgccgtccgcgtggcgtgtccgaagagatcccacgacccggcgggcggcgctgcgaggctgaaggcgcggcggcggcggatttaagggcctcaccggctcgggatctccgcgcgatcgccgctgggccgcgcgctcgagagccatgcaaagaaggttgatcttgttgatgagactctaagaccaccactagttccatccgagaagcacaatgctttccgagtgaggaatgttgcatccaggtgcaaaactgatctggctgatgccactaagataagaagatgtacatcaccaagtcttggccagacctcagcaattgaaggcacaccagcacccaaaagagctcagtctgcagatagaagaaggccgacaccttcaacccctccctctaaggtgtcaacaccctcaacccctgtgtcaaggtccatcacaccagttcgtgataccactagagacttacacaagagttccaagcgtatagcaagcacaaaggctcctgatggcttgtggccagcaatgcgtaacttgtcttcatctttccagtcggaatctgtggctgcacctactactagaaatgataaggtagtcacggctttggattgtagcaaggggcaagtgagtgttctaacggagaggaagagaagtccttttagaaggaaaaacattggtgaacattgtgagaatgctcaaccttcagaggagccccctaagaggttaattgagcaacacagatggccagccatgatagctgggcaggcgccgaagaatctcatgtcaagaagcattgacctttcggacaaagctaatataccagtcgcatcatcaaatacatcaagaggtctttcaccaaggaagacgccttctgtcagacctgtgccatcatcaaatacatcaagaggcctttcaccaaggaagaccccttccgtcggaccagtcccatcatcaaatacatcaagatgcccttcaccaatgaagaccccttctgttgaagcttcagtgaaactgtcaaatcagtcattggatgaagtggcaaggagtttggctattcaatcaagcagaaaagatgataaggtagattcacagacaatagagagatccaaatctttgagccgaccaaacagaacagttacttttcctgttccaattctacaacgctcatcatcaccaagcagagcattgccagctacgtcctcaacttccagggcctttcagagcccatctcggacaaggccatcaacaccctgtcagtcccaaagtgttggagctatccaatcaagcgttccatcttctcttattaactacatggttgatgcgcggaaaggaaagaagaatgccagccaaatcgaaaatatccaccaagtgcgtttattgcacaatagacatttacagtggctctttataaatgcttatgcagaagatgctttatcttttcaaaaggctactgttgagaataccatgtataatgtttggaggaatactgtaaacctgcgggattctgttaatatgaaaagaataatggtgcaacacttccaacaagaactcaggctttacaacattctgaaagagcagattgcttaccttgaacaatggccaacgctagaaagggagaatagtatctctttactaggggcaactgaggctctgaaagcaagcaccctgcgcctgccagttacattgggagcaaaggctaacacaattgctctcaagaacgctgtaagctcagctgttgatgtcatgcaagttttgggctcatctgtttgctgcattcattcaaagatcacggacagcacatccttggtttcagaactctctgtcatagcaggacaagagaagatcatgcttgatgaatgccgagaactcttagctacagctgcaaaactgcaggtgcaggagtcgagcctacggacacatcttgtgcaacagagacaaaggcttcaggattgaaatggcaacctgaacaagatgcagaagccccaggccatgccattgaacaggtaaactgtgcaagttgaactgcaaacagaaaagtaatctgtagagtctaaacaataggaacaaaacaaatgttaaacatcccctggagattcatggtgtgatgccacaactaactacccgcagtgcatagatatgacaggtttactgaaaaaacctcatcatatgtaaatggttttcaccatataatgcactcccagccttttctagtattttttgtttctttgtatagagtggatccctccctctttgccattgtattttttgacattttgaaagaaatacatagataatggatgagctaagatggtgatatcattttttttttcagttttccttgttagaaacatatatattaacattttt

SEQ ID NO: 69130 - DNA, 1888 bp, Zea Mays
tcgaagttttggcgctgaaatcggtatacattggttgttgcagcaagctggtttcttgagatccatattgatgtggtttgttctggaaatttttattcttcatggatgctattaagagccatgcaaagaaggttgatcttgttgatgagactctaagaccaccactagttccatccgagaagcacaatgctttccgagtgaggaatgttgcatccaggtgcaaaactgatctggctgatgccactaagataagaagatgtacatcaccaagtcttggccagacctcagcaattgaaggcacaccagcacccaaaagagctcagtctgcagatagaagaaggccgacaccttcaacccctccctctaaggtgtcaacaccctcaacccctgtgtcaaggtccatcacaccagttcgtgataccactagagacttacacaagagttccaagcgtatagcaagcacaaaggctcctgatggcttgtggccagcaatgcgtaacttgtcttcatctttccagtcggaatctgtggctgcacctactactagaaatgataaggtagtcacggctttggattgtagcaaggggcaagtgagtgttctaacggagaggaagagaagtccttttagaaggaaaaacattggtgaacattgtgagaatgctcaaccttcagaggagccccctaagaggttaattgagcaacacagatggccagccatgatagctgggcaggcgccgaagaatctcatgtcaagaagcattgacctttcggacaaagctaatataccagtcgcatcatcaaatacatcaagaggtctttcaccaaggaagacgccttctgtcagacctgtgccatcatcaaatacatcaagaggcctttcaccaaggaagaccccttccgtcggaccagtcccatcatcaaatacatcaagatgcccttcaccaatgaagaccccttctgttgaagcttcagtgaaactgtcaaatcagtcattggatgaagtggcaaggagtttggctattcaatcaagcagaaaagatgataaggtagattcacagacaatagagagatccaaatctttgagccgaccaaacagaacagttacttttcctgttccaattctacaacgctcatcatcaccaagcagagcattgccagctacgtcctcaacttccagggcctttcagagcccatctcggacaaggccatcaacaccctgtcagtcccaaagtgttggagctatccaatcaagcgttccatcttctcttattaactacatggttgatgcgcggaaaggaaagaagaatgccagccaaatcgaaaatatccaccaagtgcgtttattgcacaatagacatttacagtggctctttataaatgcttatgcagaagatgctttatcttttcaaaaggctactgttgagaataccatgtataatgtttggaggaatactgtaaacctgcgggattctgttaatatgaaaagaataatggtgcaacacttccaacaagaactcaggctttacaacattctgaaagagcagattgcttaccttgaacaatggccaacgctagaaagggagaatagtatctctttactaggggcaactgaggctctgaaagcaagcaccctgcgcctgccagttacattgggagcaaaggctaacacaattgctctcaagaacgctgtaagctcagctgttgatgtcatgcaagttttgggctcatctgtttgctgcattcattcaaagatcacggacagcacatccttggtttcagaactctctgtcatagcaggacaagagaagatcatgcttgatgaatgccgagaactcttagctacagctgcaaaactgcagctcaggcagagtcacggcatgatggcatg

SEQ ID NO: 69131 - DNA, 710 bp, Zea Mays
ggaacgggtaatccttgaggcacttgtggtagacgagcacgcccagcatggacgccaccgcgccgatggcgtggaccagcccgacgaattcctacatccgtgcacgaggtggggggtgcaacaatgacttccatgcatctgatgtaattgttattctaatgatagtgatgccctaataatgttctgtttgcattttcggagttttttttcttcttctacaagagtacttgattataacccaaactcgtttatacagtaacttataacattccaagctaaaataagaagaaataaataaaaacccctaggataatgtagtttaccagttcatcataggcatctggtagggacattcaggacagtattattgaacaagcaatattggtgggatgggaccacaaactgcatcacagattcccagactgaaggagggcagcttttatctgggtttctttcagttagatcttgcttttgttagtttcagtttatatgggtgattggtgttgtacctagacttaagattaacattgttctgatctctaaaaaaagattactattgctctgtttaatggttctactgattggcaatgacatcaagcaggcaaggaaacgaacttttttacctgtgaaaatccaggattaggtggtgtcttgttagtataccagtagaattgcccctcatgggtgctgatactcagagccagcgaaag

SEQ ID NO: 69132 - DNA, 1961 bp, Zea Mays
gagatcctcaggttgatgcgacgggaagattggcgggcggacacggacccaaccccacgtccccacccaacgcatcgtcctcgcgaacaaaaccgacgcgcccaccccgtcccggctccggctgtgtggctcaccttccactttcccccacctccaccatcgtgcctcagcatcagcactcgaatgccacgagactgacctctccctcgtcgccgcagccgcgatgcccgcaccgaccgccgagccggcgctcccggcggccttcctctgcgtcccgtccccgctcctctccacgccgctccccggcgctgcactctccgcctcccccgcgccctcctcccaccatgcctccttcctcccgcgcccgcgcggcgggccccgagcgctctccgtcgccatctccgtcccgggccccactttctccgtggcgtcgcggctccatcagatgtggggcgagttcgcgcggttcgtgcggctgcacgggaaccaaatagcgccgctcgggttcgcgtccatgggcctgggtttcggcggcggtggcggggataacgtcggcggtgggggaggagggggtggaggggatgtggatggggtaggcgaggtagaggaggccgcggcgcgggccgaggcgccaaagaaggtgctgatcctcatgagcgacacgggcggcggtcaccgcgcgtctgccgaggccatcaaggctgccttcacccaggagttcggcgacgactaccaggtatttgtcactgatctgtggactgaccacactccatggccattcaatcaactgcctaggagctatagttttttggtgaaacatggacccttgtggaagatgacatactatggtactgcaccgcgtgtagtccatcagcctcattttgctgcaacatccacattcatagcaagagaagtggcaaaaggtctaatgaagtaccaaccagatgtaattatcagtgtacaccctttaatgcaacatgtccccctccgaattctaagatcgaaaggtctcttggataagatcccattcgcaactgttatcacggatctcagcacttgtcacccaacatggttccataagcttgtcactagatgttactgtccatcaactgaggtggaaaagagagcactgaaagctggactgaagcccgcacagattaaagtctatggcctccctgtccggccctcttttgtcaaacctgttcgaccgaaggatgagctgcgaagagagttaggcatggatgaagatctgcctgctgttctattaatgggtgggggtgaagggatgggtcctattgaggccactgctaaagcacttggtgattctctgtatgatgaaaacctaggggaacccactggtcaaatacttgtaatttgtgggcgtaataagaagctggtcaatcgattgcaatccataaattggaaagttccagttcaggtgaaaggctttgttacaaagatggaagaatgtatgggtgcttgtgattgtatcattacaaaggcaggacctggtacaattgcagaggcaatgatccgtggcttaccaattattctaaatgattatattgctggacaggaagctggcaatgtcccctacgttgttgaaaacggatgtgggaagttctcgaaatctccaaaacaaattgcgaagatagttgccgactggtttggcccaaggtcagacgaattcagggtaatgtcccagaatgccctcaagctagcacgacctgatgctgtgttcaaaatcgtccacgatctgcacgagctcgtcagggaaaaatgttttgtgccccaatatgcatgtgcaacataaaaggccgtatcctctattttgtgtttgcttaatttttttaaccccatgcggcactagctatagctgattgtgaggattgcgaatattgattgatttgaaacgtttccgtaagagaaatgaaaaatgtattgaatgctctaaaaaaaac

SEQ ID NO: 69133 - DNA, 2266 bp, Zea Mays
gagatcctcaggttgatgcgacgggaagattggcgggcggacacggacccaaccccacgtccccacccaacgcatcgtcctcgcgaacaaaaccgacgcgcccaccccgtcccggctccggctgtgtggctcaccttccactttcccccacctccaccatcgtgcctcagcatcagcactcgaatgccacgagactgacctctccctcgtcgccgcagccgcgatgcccgcaccgaccgccgagccggcgctcccggcggccttcctctgcgtcccgtccccgctcctctccacgccgctccccggcgctgcactctccgcctcccccgcgccctcctcccaccatgcctccttcctcccgcgcccgcgcggcgggccccgagcgctctccgtcgccatctccgtcccgggccccactttctccgtggcgtcgcggctccatcagatgtggggcgagttcgcgcggttcgtgcggctgcacgggaaccaaatagcgccgctcgggttcgcgtccatgggcctgggtttcggcggcggtggcggggataacgtcggcggtgggggaggagggggtggaggggatgtggatggggtaggcgaggtagaggaggccgcggcgcgggccgaggcgccaaagaaggtgctgatcctcatgagcgacacgggcggcggtcaccgcgcgtctgccgaggccatcaaggctgccttcacccaggagttcggcgacgactaccaggtatttgtcactgatctgtggactgaccacactccatggccattcaatcaactgcctaggagctatagttttttggtgaaacatggacccttgtggaagatgacatactatggtactgcaccgcgtgtagtccatcagcctcattttgctgcaacatccacattcatagcaagagaagtggcaaaaggtctaatgaagtaccaaccagatgtaattatcagtgtacaccctttaatgcaacatgtccccctccgaattctaagatcgaaaggtctcttggataagatcccattcgcaactgttatcacggatctcagcacttgtcacccaacatggttccataagcttgtcactagatgttactgtccatcaactgaggtggaaaagagagcactgaaagctggactgaagcccgcacagattaaagtctatggcctccctgtccggccctcttttgtcaaacctgttcgaccgaaggatgagctgcgaagagagttaggcatggatgaagatctgcctgctgttctattaatgggtgggggtgaagggatgggtcctattgaggccactgctaaagcacttggtgattctctgtatgatgaaaacctaggggaacccactggtcaaatacttgtaatttgtgggcgtaataagaagctggtcaatcgattgcaatccataaattggaaagttccagttcaggtgaaaggctttgttacaaagatggaagaatgtatgggtgcttgtgattgtatcattacaaaggcaggacctggtacaattgcagaggcaatgatccgtggcttaccaattattctaaatgattatattgctggacaggaagctggcaatgtcccctacgttgttgaaaacggatgtgggaagttctcgaaatctccaaaacaaattgcgaagatagttgccgactggtttggcccaaggtcagacgaattcagggtaatgtcccagaatgccctcaagctagcacgacctgatgctgtgttcaaaatcgtccacgatctgcacgagctcgtcagggaaaaatgttttgtgccccaatatgcatgtgcaacataaaaggccgtatcctctattttgtgtttgcttaatttttttaaccccatgcggcactagctatagctgattgtgaggattgcgaatattgattgatttgaaacgtttccgtaagagaaatgaaaaatgtattgaatgctctagtttaattttccgaaatactttttcaggctagtactgttgtgggtgctgcatgcagattgggttacgaacccaacccgatgaaattttcaatggattacttggacgacatggattttcttgggacatgtactttggtagaccgaaccgtcaagagctccgtctatccgggtttgatccagccttccgaaggctgttttgtctcaaaataaaaagaaaaggaaaaactggtgctgtgcaccttgaccgctgaagagtcctatcctgagctgtggaggctacgcatcgtttcaccacgtttgagccgagcgcatt

SEQ ID NO: 69134 - DNA, 2437 bp, Zea Mays
gagatcctcaggttgatgcgacgggaagattggcgggcggacacggacccaaccccacgtccccacccaacgcatcgtcctcgcgaacaaaaccgacgcgcccaccccgtcccggctccggctgtgtggctcaccttccactttcccccacctccaccatcgtgcctcagcatcagcactcgaatgccacgagactgacctctccctcgtcgccgcagccgcgatgcccgcaccgaccgccgagccggcgctcccggcggccttcctctgcgtcccgtccccgctcctctccacgccgctccccggcgctgcactctccgcctcccccgcgccctcctcccaccatgcctccttcctcccgcgcccgcgcggcgggccccgagcgctctccgtcgccatctccgtcccgggccccactttctccgtggcgtcgcggctccatcagatgtggggcgagttcgcgcggttcgtgcggctgcacgggaaccaaatagcgccgctcgggttcgcgtccatgggcctgggtttcggcggcggtggcggggataacgtcggcggtgggggaggagggggtggaggggatgtggatggggtaggcgaggtagaggaggccgcggcgcgggccgaggcgccaaagaaggtgctgatcctcatgagcgacacgggcggcggtcaccgcgcgtctgccgaggccatcaaggctgccttcacccaggagttcggcgacgactaccaggtatttgtcactgatctgtggactgaccacactccatggccattcaatcaactgcctaggagctatagttttttggtgaaacatggacccttgtggaagatgacatactatggtactgcaccgcgtgtagtccatcagcctcattttgctgcaacatccacattcatagcaagagaagtggcaaaaggtctaatgaagtaccaaccagatgtaattatcagtgtacaccctttaatgcaacatgtccccctccgaattctaagatcgaaaggtctcttggataagatcccattcgcaactgttatcacggatctcagcacttgtcacccaacatggttccataagcttgtcactagatgttactgtccatcaactgaggtggaaaagagagcactgaaagctggactgaagcccgcacagattaaagtctatggcctccctgtccggccctcttttgtcaaacctgttcgaccgaaggatgagctgcgaagagagttaggcatggatgaagatctgcctgctgttctattaatgggtgggggtgaagggatgggtcctattgaggccactgctaaagcacttggtgattctctgtatgatgaaaacctaggggaacccactggtcaaatacttgtaatttgtgggcgtaataagaagctggtcaatcgattgcaatccataaattggaaagttccagttcaggtgaaaggctttgttacaaagatggaagaatgtatgggtgcttgtgattgtatcattacaaaggcaggacctggtacaattgcagaggcaatgatccgtggcttaccaattattctaaatgattatattgctggacaggaagctggcaatgtcccctacgttgttgaaaacggatgtgggaagttctcgaaatctccaaaacaaattgcgaagatagttgccgactggtttggcccaaggtcagacgaattcagggtaatgtcccagaatgccctcaagctagcacgacctgatgctgtgttcaaaatcgtccacgatctgcacgagctcgtcagggaaaaatgttttgtgccccaatatgcatgtgcaacataaaaggccgtatcctctattttgtgtttgcttaatttttttaaccccatgcggcactagctatagctgattgtgaggattgcgaatattgattgatttgaaacgtttccgtaagagaaatgaaaaatgtattgaatgctctagtttaattttccgaaatactttttcaggctagtactgttgtgggtgctgcatgcagattgggttacgaacccaacccgatgaaattttcaatggattacttggacgacatggattttcttgggacatgtctaactctaatcctggaaagttgaaaggagctggtaggatctggtcaaagtcaaacaggctggtaggatctggtcaaagtcaaacatgcgagcacagctcttaaggctatctccaacagatcctcaatctcatcacctatctcatcttctatttcaaacttcattatacaaacagtgtaaaaaatagtgtcatctataattatgtgttctttattttgcactatcctgctagagatagtctaagagcactctcacaatctgaaaagataaaatgtttttatagcattaaatggccatgccacataatttttaaaaatgaggtgacacacttgtcaataaagagagagaaaaatac

SEQ ID NO: 69135 - DNA, 2160 bp, Zea Mays
ctcaggttgagagatcctcaggttgatgcgacgggaagattggcgggcggacacggacccaaccccacgtccccacccaacgcatcgtcctcgcgaacaaaaccgacgcgcccaccccgtcccggctccggctgtgtggctcaccttccactttcccccacctccaccatcgtgcctcagcatcagcactcgaatgccacgagactgacctctccctcgtcgccgcagccgcgatgcccgcaccgaccgccgagccggcgctcccggcggccttcctctgcgtcccgtccccgctcctctccacgccgctccccggcgctgcactctccgcctcccccgcgccctcctcccaccatgcctccttcctcccgcgcccgcgcggcgggccccgagcgctctccgtcgccatctccgtcccgggccccactttctccgtggcgtcgcggctccatcagatgtggggcgagttcgcgcggttcgtgcggctgcacgggaaccaaatagcgccgctcgggttcgcgtccatgggcctgggtttcggcggcggtggcggggataacgtcggcggtgggggaggagggggtggaggggatgtggatggggtaggcgaggtagaggaggccgcggcgcgggccgaggcgccaaagaaggtgctgatcctcatgagcgacacgggcggcggtcaccgcgcgtctgccgaggccatcaaggctgccttcacccaggagttcggcgacgactaccaggtatttgtcactgatctgtggactgaccacactccatggccattcaatcaactgcctaggagctatagttttttggtgaaacatggacccttgtggaagatgacatactatggtactgcaccgcgtgtagtccatcagcctcattttgctgcaacatccacattcatagcaagagaagtggcaaaaggtctaatgaagtaccaaccagatgtaattatcagtgtacaccctttaatgcaacatgtccccctccgaattctaagatcgaaaggtctcttggataagatcccattcgcaactgttatcacggatctcagcacttgtcacccaacatggttccataagcttgtcactagatgttactgtccatcaactgaggtggaaaagagagcactgaaagctggactgaagcccgcacagattaaagtctatggcctccctgtccggccctcttttgtcaaacctgttcgaccgaaggatgagctgcgaagagagttaggcatggatgaagatctgcctgctgttctattaatgggtgggggtgaagggatgggtcctattgaggccactgctaaagcacttggtgattctctgtatgatgaaaacctaggggaacccactggtcaaatacttgtaatttgtgggcgtaataagaagctggtcaatcgattgcaatccataaattggaaagttccagttcaggtgaaaggctttgttacaaagatggaagaatgtatgggtgcttgtgattgtatcattacaaaggcaggacctggtacaattgcagaggcaatgatccgtggcttaccaattattctaaatgattatattgctggacaggaagctggcaatgtcccctacgttgttgaaaacggatgtgggaagttctcgaaatctccaaaacaaattgcgaagatagttgccgactggtttggcccaaggtcagacgaattcagggctagtactgttgtgggtgctgcatgcagattgggttacgaacccaacccgatgaaattttcaatggattacttggacgacatggattttcttgggacatgtctaactctaatcctggaaagttgaaaggagctggtaggatctggtcaaagtcaaacaggctggtaggatctggtcaaagtcaaacatgcgagcacagctcttaaggctatctccaacagatcctcaatctcatcacctatctcatcttctatttcaaacttcattatacaaacagtgtaaaaaatagtgtcatctataattatgtgttctttattttgcactatcctgctagagatagtctaagagcactctcacaatctgaaaagataaaatgtttttatagcattaaatggccatgccacataatttttaaaaatgaggtgacacacttgtcaataaagagagagaaaaatac

SEQ ID NO: 69136 - DNA, 1889 bp, Zea Mays
gagatcctcaggttgatgcgacgggaagattggcgggcggacacggacccaaccccacgtccccacccaacgcatcgtcctcgcgaacaaaaccgacgcgcccaccccgtcccggctccggctgtgtggctcaccttccactttcccccacctccaccatcgtgcctcagcatcagcactcgaatgccacgagactgacctctccctcgtcgccgcagccgcgatgcccgcaccgaccgccgagccggcgctcccggcggccttcctctgcgtcccgtccccgctcctctccacgccgctccccggcgctgcactctccgcctcccccgcgccctcctcccaccatgcctccttcctcccgcgcccgcgcggcgggccccgagcgctctccgtcgccatcaaggctgccttcacccaggagttcggcgacgactaccaggtatttgtcactgatctgtggactgaccacactccatggccattcaatcaactgcctaggagctatagttttttggtgaaacatggacccttgtggaagatgacatactatggtactgcaccgcgtgtagtccatcagcctcattttgctgcaacatccacattcatagcaagagaagtggcaaaaggtctaatgaagtaccaaccagatgtaattatcagtgtacaccctttaatgcaacatgtccccctccgaattctaagatcgaaaggtctcttggataagatcccattcgcaactgttatcacggatctcagcacttgtcacccaacatggttccataagcttgtcactagatgttactgtccatcaactgaggtggaaaagagagcactgaaagctggactgaagcccgcacagattaaagtctatggcctccctgtccggccctcttttgtcaaacctgttcgaccgaaggatgagctgcgaagagagttaggcatggatgaagatctgcctgctgttctattaatgggtgggggtgaagggatgggtcctattgaggccactgctaaagcacttggtgattctctgtatgatgaaaacctaggggaacccactggtcaaatacttgtaatttgtgggcgtaataagaagctggtcaatcgattgcaatccataaattggaaagttccagttcaggtgaaaggctttgttacaaagatggaagaatgtatgggtgcttgtgattgtatcattacaaaggcaggacctggtacaattgcagaggcaatgatccgtggcttaccaattattctaaatgattatattgctggacaggaagctggcaatgtcccctacgttgttgaaaacggatgtgggaagttctcgaaatctccaaaacaaattgcgaagatagttgccgactggtttggcccaaggtcagacgaattcagggtaatgtcccagaatgccctcaagctagcacgacctgatgctgtgttcaaaatcgtccacgatctgcacgagctcgtcagggaaaaatgttttgtgccccaatatgcatgtgcaacataaaaggccgtatcctctattttgtgtttgcttaatttttttaaccccatgcggcactagctatagctgattgtgaggattgcgaatattgattgatttgaaacgtttccgtaagagaaatgaaaaatgtattgaatgctctagtttaattttccgaaatactttttcaggctagtactgttgtgggtgctgcatgcagattgggttacgaacccaacccgatgaaattttcaatggattacttggacgacatggattttcttgggacatgtaggtaaccggttcattttgaacgcataagcataaataatgtgaagcgaggttgagtctaattagacctgattatgggctgctcgacccgctcaaaaaaaaaaaa

SEQ ID NO: 69137 - DNA, 1462 bp, Zea Mays
gagatcctcaggttgatgcgacgggaagattggcgggcggacacggacccaaccccacgtccccacccaacgcatcgtcctcgcgaacaaaaccgacgcgcccaccccgtcccggctccggctgtgtggctcaccttccactttcccccacctccaccatcgtgcctcagcatcagcactcgaatgccacgagactgacctctccctcgtcgccgcagccgcgatgcccgcaccgaccgccgagccggcgctcccggcggccttcctctgcgtcccgtccccgctcctctccacgccgctccccggcgctgcactctccgcctcccccgcgccctcctcccaccatgcctccttcctcccgcgcccgcgcggcgggccccgagcgctctccgtcgccatctccgtcccgggccccactttctccgtggcgtcgcggctccatcagatgtggggcgagttcgcgcggttcgtgcggctgcacgggaaccaaatagcgccgctcgggttcgcgtccatgggcctgggtttcggcggcggtggcggggataacgtcggcggtgggggaggagggggtggaggggatgtggatggggtaggcgaggtagaggaggccgcggcgcgggccgaggcgccaaagaaggtgctgatcctcatgagcgacacgggcggcggtcaccgcgcgtctgccgaggccatcaaggctgccttcacccaggagttcggcgacgactaccaggtatttgtcactgatctgtggactgaccacactccatggccattcaatcaactgcctaggagctatagttttttggtgaaacatggacccttgtggaagatgacatactatggtactgcaccgcgtgtagtccatcagcctcattttgctgcaacatccacattcatagcaagagaagtggcaaaaggtctaatgaagtaccaaccagatgtaattatcagtgtacaccctttaatgcaacatgtccccctccgaattctaagatcgaaaggtctcttggataagatcccattcgcaactgttatcacggatctcagcacttgtcacccaacatggttccataagcttgtcactagatgttactgtccatcaactgaggtggaaaagagagcactgaaagctggactgaagcccgcacagattaaagtctatggcctccctgtccggccctcttttgtcaaacctgttcgaccgaaggatgagctgcgaagagagttaggcatggatgaagatctgcctgctgttctattaatgggtgggggtgaagggatgggtcctattgaggccactgctaaagcacttggtgattctctgtatgatgaaaacctaggggaacccactggtcaaatacttgtaatttgtgggcgtaataagaagctggtcaatcgattgcaatccataaattggaaagttccagttcagtttcttgatgttgctttttcccca

SEQ ID NO: 69138 - DNA, 1704 bp, Zea Mays
ccgccttgccgaaggtcctcaaaatgtctttacttccgtgtaagcaaatagcaaagaatggaagaaggtggcctccggccgaagcaacatgtaaaagaagcttcaactagacacatgtgcaacgaacgtgagagccaaggtcaccagcctcgtcttggaaaaggcttcaagcgcaaagcaacgagaaggaagaagctgaaggcttgtgtagaaagaaagaaagagaaaagacagtgatgccccctatcatttgtaaaccatgtgtgtaaactttgtgggcatgtttataatatcatgtgaatattgtacaacttctctataaataggtgaacactgccatgcataaattcacctttcgacggtcttaagctttgtctagcttagccttcgaagtatcttcgagctattcttggtgtgaagccgaaggtatgcttgtaaatttatattgtgtgcaaaaggatggaatgaaatatgctaagggacataagatgagtaaaatgcttcatcttttattattcttttgcacctaattacttcgtattcattcatatctctctcctcctcccttaagttacccttcagagaagtgacaacttaagggagaatattacaattttctaacttgtgttgtcttgtttttgataccttataataatcaaaagcaagtgaccaacaaagacaaaaaataaaacaatacaaaataactagaaaaaagtagtcaacaaaaataaaataaaatatataataataaactatagaaaaaagaaatatcataaagtaaaaaagaaaccatcacataagcatgcagattcttagtctatctttaatagcatcctctatatccattctctaaaagatttcttcctctctattaacattatctatatcttgcgtatttgtcataccttcaaataccttatacataatttagttttgcttaatctattatctaaaacataaaagtggaaagaggaaaggagatagagactatatgtaaaggatgaaaagtatcattctctatatttagttgaatttttagagggcacacttggaggctatggaagagataatcttctctatatttaggatatttaggatggaggagcatatatagcatgtttggatgattgtatgagggctaggtctgtcctagagcatgcaaactttgcttgtttggatgtatgaacaatgtcaagggtctaaccggatgtaggggatagatatccctagatcaccacgactcgattatgctctgtgggctgcctgaaaggccccaaatgggaaaggggcatagccttcaaaagatttgagtcgggcacaatcagttgcatgggcgtgaagactcctcgcccgcgttccgcgcatgaagaggacgtgcaaattctttaaagactcgctgacctccgagcaagtcggcacgactcccactgaggcaggcagactaagaacgtgtaccgcatcatgtgtgtaactcctcttctgttaggaataaggcggaggaggatcccctacaaaaacaagagatatcactcagtagtgtagccatcatctacccctagagaactctctgtaatcgcaaccatcaagcaatacacattcactaactcacatgacgtagggtattacacgtttaagtggtctgaacttgaataatcctttgtgttttctcgtgccctgcacgaccatcgagttgctatcgacctt

SEQ ID NO: 69139 - DNA, 3187 bp, Zea Mays
cccaaaggctagtttggtgaccagggaattggtgggggtctatggaggaggaatccctttgctatttaatgaatatatcaaggggatttctactttatggatcccctccaatttccgggtcaccaaaccaaccctaaccgaatggacaaccaagtaaacaaaatcatccctagaataaaagccataattgctggggacaaataacaagcttgtccatagcgctacaacaatgttgcaagcttgacgatttgtacttgacaatgtcatcccttcaaatcttacggataacttcattaacttataaatgaagaaaatagtaagcatagggtacatagaaacattgtcttttgcgtacttggccctgatgtataggttaagtgacagtgccaaagccaactaataattttgtccaggaaacagctatggaatgctatattttaagtcacagcacacagcagtaagtccattaatgacatcataaattcatttaacgaaagatatgctgtggacctcaaagtggtgcggaaagggattttgacatcttcaaatagtcaactatcacaaaacacaaaaaatacaccatgactatttacattggatagctttgctctcatcaaatttcatttctacaagccagctcatccaaggttcctatccgatgaacttcaaatcaagtgggttctaaaatttgttcctagtaaaatacatataaaacctaaccctcccatatgagaagaaagtaccaaatacagccatgtgcaaatatggtgccaaataatcatcagaatatgtgcaagcacactgacaaagaaaggcacatactcaaattatttttagataagttgtcaaaaaagtattatggcagctttgtacaggttcgtttgcttaatacaaaagtaccatatcccttccaaattccaaaatattttgttcttgtagaaactacaaagcacaaggatttgtagacagctaatctgacgctgttctaaactagcaacattttctgcacatcaattcaaatgaaaaacaagattcaatactgcaattgcaaagaacaatatgcaattacaaaaaggacacatctgtgtttccaaagatgatttggcttaaaaactttacaagatttcatggttgtaacataaaaaaactcgacctgtgggggtaagcatagggcctctagctgagttggttagttggtctgagtagcattccttatgtccttagttcgaatcccagctggagcgaattttaggctaaggttaaaaaaggtcactcactggttcccctgattgtgtgcatacgagatggactaacctatagagggcggatcctcgggtgggggctgggagagctcaaagcacgagtaaaaatctgatctatagggggggggggcgaaccctcatgttgcacgggggactagcttttgtgaccttttattgatcggggctccgattgaactttttcttaatataataccgtgggggcggtctttcccccaccggacgagttaagggggtaagggagccggccccctttttatcttttcagtggtaaggtgtaaggtgaggcgacaccttactaatatataaatataggaacatattcttaaataggtagggataataataccaaataggagtacaagttcaacataaaccaacataatagaattaaaaatccaacataactaatagatagtagtagaatattaggaaaaaatgaatacataactaatagatttactggtttaatagagaagtaaaaagaaaagaaaaaataaaggagatgggccaccggcctgctgtttctcggcccagccagcccactacttgacctaacttatcctgctccatagtacccctcgaggaagggaggggagctgccaccttgcaaccaccagagagaggagagggaggaggggaggttgttgaccgtctaagagatagagagaggaggacatgtgccagcgcctccgcgaaggaaggaccgagccgcacaaccgtggaagggagggtagagctgtgccgtcgtggaagggcggactggtgagcggagcaagaccctgtgcgcccacgccacagcagaaggcaaagaagggtcaccgccgtcaacagaaaagccaccgccaccaccaaaggaatggtggtgcaggtctagaagatcggtcgccaagatattacgcaagggattcaattttgtagttattcttgttgactgggaagtttggaagcacaagaatgctgctgttgtttgaaggaacttctctgaatgtccagtttgttcttcaaatgatagaagagggatgccaaatgtggcatttgccggtgcttctgctcttcgggagctcatcctgaggtcgcttgctctatacggggccccatagtttgggttatatgtctgaatgtatgcactcaatgctatggggccatttgaaccaacagtgacttgtactggattatgagtccaacatctacatatactagtacaatgtccgtgcattgcgacaacacacaatcttattattgttatattatgcatgattaacactgtaaattgtatatacttttttgactgaaacattgagtagatagccaccttaggatcaactatttaatttgtaccaaaaccaacctcaccaaaagttagcccatcgccgaggaacgtcgtgcccgacctgccgtataggcctcacccatcgtcgagaaagagacagggagaggaatatgcgtaccagggcccacccaaccggtgcacgacccgccatataggccttgcctgtcgtcgaggaacgtcgtccccgcgtgagtaagttagatgcaggggagtcatgttagttgggcgcaagagatgaggggaatctccgtagatgaccacatgttagattagaaagaagtataatgactcttttgcaaaaggggcgatagtaggaaccagaaaaattggtgttttataggagtagatactgtttctggtatcttctacctgtggcgctggaatggatgtttggacattgaatcatcatggtaacagcattttgtcatctctaactgaaattttccagattagggtattgaattcagttgatcatcgcgcgaaatcgccacagaaatcccatttgacatacaagtccgaagccccaaactctgatacggtgttcactgttgaagcatacaccttacacaaaggg

SEQ ID NO: 69140 - DNA, 6295 bp, Zea Mays
atgaacttgctggtgggattgctggtagtagtggaactgcatgtggtggttctggttctgctacttagtgattgtgtgatagttctggttctgatactacttagtgttggtgcttatcctggtctgtgtgttggactttttgtcaggctatggactagcctgacctatttttttgtgccgtgctcagtgggttggctgggtaaaaaattctataggtctgtgcttgggctgaagcgcacgatcggacgtcgcattgtcttctacttctcgttctctcattctctggcaacacctggggctgagcggctgagcagtacgccgcactctggcggtctggccgagcggccagcgggcagcggggacaggacaggacaacgtccagccgtccaccactccaccaagcaccaggcgtccaggcaccagcaggtgatggttaaagaaaatgagaaattagttacagaagcaagactaaggcttacgactaccatcaattccattaggtttgttgatgtgaccaaatctcgaaataagaatgataacaccatcgtttttcatcattataaatttgatgtgtttaatgttgaaattgatcaacaactgaatgagatagaagatcgatttggtggccaagcgacagaccttttatcactttgtgcttccttgaatccaatacttggctcttttgacatagaaaaggaccgcaatggcaacttgcgggaaacagaacttgaagtctacctgtgctttaaagcaacccctgatcgtcagtcatacgacgccccagcagcttccagggatcaaccaggttcagcatggctcgctcagcatgcaccaaatggactagtcatgtttgttattttgaactaggcagcgtaaaccagcaccacacgcaacgcaaacccaactctgcaccattattttgccaagtgctaacaccaattccgacaacccctcaagattccctaaccaacaagcaattggatcccattcatgtatttgaatcgtgagctaatggaccgtgcaaagtgctatatggtgcatgacaaagtttcccaatgtacacgtcattttcaaccaattctctagaggaacattaaagaaataataaatagcaatccatctttttattcctgacagggagcaaggatggtttgagaatgtacctgaagatatgaagagtaggcttgtaacatcataactatttattgactaattaaaaatgaccttgaatatcttgcttattttgatctcataaatttcttaaaggtgtcccaatcaatcatcacataacataagtgtaaattttgataatttgatactacaccatttttttctggatacagaaaatctagaaacaaagctaaaatacagcaaatctagaagcaaagctgcaaaaaaaatcatcaaggcaggtctttcaggaaaaaaaatcaaggtagctctagtcattaagacatctaacttcaagcccttgccaaagatcagtaactacataatcctatatactgatacattgttttgcacgaaggctgcataaattccaagtatccaacctagaactttaacaagtcaggataatgcagaaatatgccataaaagtcacaatcaattcatacaactccaatcaattgtcgtttgttttgcactgtaagttctatcaatagcaatggcaaataaacaaacaactttggctacttccatttggaggatctgtgttgtattgctcaaagcagtccaatccttggtacattttttgtcttaactgctgacagcatctctaccacagatagaatgagcccaacagaaaagataaaatagcccacaacaaaatagaaatgacaaaacaatgaaatatcaaggagttccaggtatcaatgcatcatcttattttccacaaaattgctcttctttagtttttcctaaggtaatgctctcaaagataaatttgatggcatggtacaacagtgcaacagtcaatgcataaagccaaatacaataaaaaatggcagatgcaatgacggaggcttccacataagtaaggtctagggaaggaataaactggggcgaaccttctcccacaaatgcagattgactgtttcgaacccgtaacctgatgacttagtgaaacagctctcaccactgcaccagccacatacaatgcacacagtccaaaattgcaatttcaagttaatcaggacaagcaaaagctacattaaaaaataaatttgaacagtaaacgcagtcattgttgattcattaacgctgtgaatattgcaattacaaagggtaatatgcagtactcaaccctcatattaaatggccaccatggaatttacaagacattaagggctagtttgggagtccgaaaactgaaggggattagaggggctaaaatcaccttcttattcaaattaaataagaaggtgattttagctccttcaatcccggttttcgggctctcaaatgagcccaaaggctagtttggtgaccagggaattggtgggggtctatggaggaggaatccctttgctatttaatgaatatatcaaggggatttctactttatggatcccctccaatttccgggtcaccaaaccaaccctaaccgaatggacaaccaagtaaacaaaatcatccctagaataaaagccataattgctggggacaaataacaagcttgtccatagcgctacaacaatgttgcaagcttgacgatttgtacttgacaatgtcatcccttcaaatcttacggataacttcattaacttataaatgaagaaaatagtaagcatagggtacatagaaacattgtcttttgcgtacttggccctgatgtataggttaagtgacagtgccaaagccaactaataattttgtccaggaaacagctatggaatgctatattttaagtcacagcacacagcagtaagtccattaatgacatcataaattcatttaacgaaagatatgctgtggacctcaaagtggtgcggaaagggattttgacatcttcaaatagtcaactatcacaaaacacaaaaaatacaccatgactatttacattggatagctttgctctcatcaaatttcatttctacaagccagctcatccaaggttcctatccgatgaacttcaaatcaagtgggttctaaaatttgttcctagtaaaatacatataaaacctaaccctcccatatgagaagaaagtaccaaatacagccatgtgcaaatatggtgccaaataatcatcagaatatgtgcaagcacactgacaaagaaaggcacatactcaaattatttttagataagttgtcaaaaaagtattatggcagctttgtacaggttcgtttgcttaatacaaaagtaccatatcccttccaaattccaaaatattttgttcttgtagaaactacaaagcacaaggatttgtagacagctaatctgacgctgttctaaactagcaacattttctgcacatcaattcaaatgaaaaacaagattcaatactgcaattgcaaagaacaatatgcaattacaaaaaggacacatctgtgtttccaaagatgatttggcttaaaaactttacaagatttcatggttgtaacataaaaaaactcgacctgtgggggtaagcatagggcctctagctgagttggttagttggtctgagtagcattccttatgtccttagttcgaatcccagctggagcgaattttaggctaaggttaaaaaaggtcactcactggttcccctgattgtgtgcatacgagatggactaacctatagagggcggatcctcgggtgggggctgggagagctcaaagcacgagtaaaaatctgatctatagggggggggggcgaaccctcatgttgcacgggggactagcttttgtgaccttttattgatcggggctccgattgaactttttcttaatataataccgtgggggcggtctttcccccaccggacgagttaagggggtaagggagccggccccctttttatcttttcagtggtaaggtgtaaggtgaggcgacaccttactaatatataaatataggaacatattcttaaataggtagggataataataccaaataggagtacaagttcaacataaaccaacataatagaattaaaaatccaacataactaatagatagtagtagaatattaggaaaaaatgaatacataactaatagatttactggtttaatagagaagtaaaaagaaaagaaaaaataaaggagatgggccaccggcctgctgtttctcggcccagccagcccactacttgacctaacttatcctgctccatagtacccctcgaggaagggaggggagctgccaccttgcaaccaccagagagaggagagggaggaggggaggttgttgaccgtctaagagatagagagaggaggacatgtgccagcgcctccgcgaaggaaggaccgagccgcacaaccgtggaagggagggtagagctgtgccgtcgtggaagggcggactggtgagcggagcaagaccctgtgcgcccacgccacagcagaaggcaaagaagggtcaccgccgtcaacagaaaagccaccgccaccaccaaaggtccgcagtctgtgcctccatttgtaccctgtcaccaaccctacccaaggccaaggcgtccagtatccaatgccttatgaacgccttgcgccccaaaggcgacgctctagcctaaggctgacgccttacgccgacgattaaggcgaccgcgacgacttgccctgtagcctcgcggccctcgcctgatcactttagcgtgacgccttaataactatggagggtaagatcgccccatgacattatattaagaagaataccttctcatgcaggtcgagaaaacccccaaacccttgccccacccatacacagtgacaccgtagtccatgtgagaacgaccgtgaccagggccagaccttagacttgtgctttaacgtaggacaaacgagggtttttttaactacagcctgaaattcgctcccacagagagtcaaacccaaaacatgaggaatgctactcagataacctaatcaactcagctagagaccctttcgccatggttgtaacatgcactgaggtatttcgataaaaaagcaacaagtaaaaggaatacacaagagtgaatatcactacttaaccaaagaattccagttctgcaagggcttatttgtttttttctcgaatgcgcaagagagttgtgcatcttttatattagagagagaaaagaaaggtcctacaagataaaactaagtaaacttggcattcatagctgttaaactatctactatctttttcatcttactttggggcctttacacattttaccttcaatcgtcaagttatttgcttgtgctaacatgagatgagaccactctaccatttgatgatgaaatttaaatttaaattgcagtttattttcactatttttagacatatatggcatttttccatgtcatgaccaaaggaaatatctctatctctactcctataaattatctaatctcacaattatgtagtttgttaaacaaaaacaacatggtggattttgtgggctcccaccaaatggttaaaatgcaactggattctagtggggagctaacaagaatcacttctcaatctacactacaaactgggagctaaaaaatgctccccattcaatcaccagttcaccaccagaatcacttctcgcctgctcctcacaagaatcagtccattagaaaatcttttttttctcgaacacgcagagagttgtgtatcattatattaataaggagaaaggtacaaggtcctacaagaagtaaagctcaagaatcaaggagagctctaccaaagtggctctagatagtcatttatcccattaaactctaaagtctaaacagtggtacaccatgtctgtttaatcagccatttatcccatttaaacggctgtttcaccaggctaacggtaggtgagtgattgtttagcgggaaacactgattatgaataacttaaacataaatagttttatttcctgaccgttttgtcaaaataatacagctcagaatggtagtatgcatttttatctgcttacgtacaaaacaagcaagagagagagaaactggtatatcctaattttctgcatgttgggcactgcacaagaaaagatgcaggatgctgaggcaaaacttgcaagttagagcaaaaaatacctcttgatactcatgttcttacagaaaatgtatgttgaataattaagaacatgtcataatatgg

SEQ ID NO: 69141 - DNA, 1681 bp, Zea Mays
cttgatcacgcgtggtgcttgtgctctgaagccatgtgtccaggtccaagcagctgctggcaccagcacgtcgatctctagcgccaggttcagtgccttcactctcgtactcaccccgcgcgcgcagtatatcctgcctgagtccatcgcacgctatcttctccgtgtctggtggtcgcaccgtcatctatcagtgctcggcccatacaccgctcgactcctcctttggcgacgtgtttcctcctatctcgtcgtggctgcttcactctctgtccgtcccagccgtgtgttattcctcaccggtggtcgaccctgtccgagcactggcgttgccccgtcgacaccctgctcctacatctctgtcgccctcacgccctggtctctagcgtccggacgccgccgtccctgctgcggtcgggctcggtcacgcctcgccactagacgtgtgtgtgcttcaacctcgccgacgctcgccgtgcagccttgctttcgccgacgctcgccgtgcagccttgcttgttgtgctcgccgcagtttcccgtccatgccgcatgctgcaacgtgctcatggttgtcgtctccgatttcctcgacccacagcctctcttccgacctcgtcgtgcttgcggtgtcattgtgaagctacttgccgcctgtctcgcggttcctcatgcccaacaagccatcgtgctcggcgtactttctccatgtggttctctcgcttcatcggctttccgcgtggtagagcagagctcccaaaataaagagtgaagatttaagatgaagtggttgctgaagaggagtctactccagtgcctgttcatcaagtggatggagtcatctaactgatcatcgtgttagaagtatctagaacctcttctctacaacaaaggagaagttttattcccttatcttttggttagttacttcatgtggaggccttgaagcttagaatgttatgtgtatctcttatggaaaggcttcacccttccaattgttataataagttatgcactttgggtactatcagaacttgtaataattaccattcttcttatgttgtaaaacttgagctttggaaatgtaaaatatgttttgtgaagtattccgctctatctccgaagtgtgtgtgtatcgagtgtgattactgtaatatgcatgaatgtgggagatccttgggatgatgagttcgagttggtgaactcgatagccttgttaagttactcggtatacgtgcacaaccatctgaggccgttaatggcaagggttggtgcatgtgggcctaataacttaggagggttgtcacacttacgcttcctcaagtgatgaagaatctagcgatgatgaaataaactattcatgtttattcaagggcctagatagaactaaggttgataagattaatgaattaattgatgcattgaatgataagaataggttattagaaaagcaataagatctcttgtatgaagaacatgataagtttgtagaggcacaaaaatctcttgttgtagaaattaaaaggaatgaaatgctttcttatgaattgtctacataccatgactctatttctagcttaaagagcataaatgatgatttgaatgctaagttagaaatagctaataaatcaacatcttgtgtagaacatgttacaatttgcaataggtgtaaagattttaat

SEQ ID NO: 69142 - DNA, 707 bp, Zea Mays
cttggaccgtgtacagcaaacccaaaatcacgacacagtcgccttgttcccattctcacgtacaggcgcacggagaagacaagctccatcgatggctgcgcacggcagcgaccccggcgtcgaaggagagcgaccagagaccttcgtcgtgggagatagcggcggcgggcgtggagggttcgcggcacagtcctctcgggtctcggcgagtagcagcgcccttccgttcaagcttcctcgtgccgacacctagcagtcacggccgaggcattgcaccacaggttccggcgatgtcgtccagagccgcatctccgacgggtgaagtctccctcgcgccggcgatgaccgcagacgcagggacctgtcgatccccatcttcggctggtacgcatgtgatccccttcacggcttcatcggcgaacaggccttcagcgattccaattaccttactagcttgtctggctgaagtccctgatagcatattcatggccaatcactgcataccaagggcatgatcgtaggtgtattagaatagatttttccagttagagacgtgtaataatctccatggtgtggtcctatattttccatagagtcgtatattttccattgcaggatttttcttttcttgatccgtgactgatacgtgacctttgcatatttctgtacttgtctgttcatgctgtgcaaaaaaaatgtctgaaaag

SEQ ID NO: 69143 - DNA, 913 bp, Zea Mays
ctacgtgcaccggcggccgaggtgcccacagcgggttgagcgcgctacgcagatcgagatctgtggcaacgctgaggaagcgtgacgcgcgagtgcaggggcctggcagagcggggcgagcaagcgctgcgacggcgttggatggaggcccaccgttgatggagggcggcgtgggagagagtctgtgcggcggcctgggagaggagtctgcgcttggaccgtgtacagcaaacccaaaatcacgtcgccttgttcccattctcacgtacaggcgcacggagaagacaagctccatcgatggctgcgcacggcagcgaccccggcgtcgaaggagagcgaccagagaccttcgtcgtgggagatagcggcggcgggcgtggagggttcgcggcacagtcctctcgggtctcggcgagtagcagcgcccttccgttcaagcttcctcgtgccgacacctagcagtcacggccgaggcattgcaccacaggttccggcgatgtcgtccagagccgcatctccgacgggtgaagtctccctcgcgccggcgatgaccgcagacgcagggacctgtcgatccccatcttcggctggtacgcatgtgatccccttcacggcttcatcggcgaacaggccttcagcgattccaattaccttactagcttgtctggctgaagtccctgatagcatattcatggccaatcactgcataccaagggcatgatcgtaggtgtattagaatagatttttccagttagagacgtgtaataatctccatggtgtggtcctatattttccatagagtcgtatattttccattgcaggatttttcttttcttgatccgtgactgatacgtgacctttgcatatttctgtacttgtctgttcatgctgtgcaaaaaaaatgtctgaaaag

SEQ ID NO: 69144 - DNA, 1789 bp, Zea Mays
agagacatttagaagaacaatcttgcattattatccagtctcaagctgaacagaaacagtcaagaaatttgaagaattttatggaacaactcaaagctcacactgcttctgaaatttcagaaaaaggcaaacatatgtccattgtgcaggatagagtttattatctgaatgtgtttgtgtactgatggcacacaggaataccccctccattctttctgaaaaaaacatgtggcgccattgtgtaactgtggttttgaaggatatacgtagcttcatacccagtgttgttattacccaggtatctcctagcaagcacttctgttccaaaaagggtctggtagtgacagtgttgttattacccagttctacacaaaattagatgagaaacataaagctttggaagcagagaaggacgaggctgaggccaggaaaaaggtaagaagaacttgcttctgaattctgatatctatcttagaagcaaccaactgtaggtcaggtcacttgagttttctatattcttctttttgacttctccttggcttctgaacttgtccttattgtttgacgacacgtgagataggagctagctgctcttatttttttccttgaacatttagacaaattactattcctataaatatttaattacataacttaatgatcaaaagctaagcacgagtaggcggtgatcatgcatgagcctctccttaactcctagtgaagtacatatgtgctaataactatatatatatatgcatgattaagttgagttttagttggttcttctttctttgcattggactgttatgttcacgatgatgtttttaatacagtttcctacgatattctccataccttttctttttattgtatacttggaatcacatgacctaatcttatttccactacggatgtagtgcgtacatcccactccagaaataattgttagttgcttatcaattaggctctcgtcctttgcattgctcgtatacattgggcgagggcacaccaggttattgagttcgatatgtgtaaggatttctaattgatgtgaccattggtattacttgtgatacctatagcacatatataccattgtagtaataagtactgtgctcagataatcattaggttaccattgtaggaaaaaagagttgtacggcttcataagaatgtgatgtattaacagtagataaaaatgaaccatgcaacaggaaattcaagttctagctagtctttgacgctagacaggggcgagaactcaaaattagcgtggattgaaccatcaaagcatggacgaaggaggaagggagccgagcaaagggccactacctggagcggatgcacacaggatctgcagaacagagaaatcgaacaagatccaatcgatgggcaggggcagcatcaacctggggattctggggaacttggcagaggcggaagaatcatttggaacttttggggagcgtttgtaggaaataaacagatcggtaggcgtctgagctgagaaatccctcgcgtcatccgcattcccttgacccagatttgcttgccggcttgggcgagccagatgagctcgtccatggcacacgccgccatgtcaactatcaaggggtgctccatttccgtcacgagcgctggcatctggtacgacagcccgaacgagcagccactgaggaggtagaggcccagcgatggcctgccgagggagctctactcacgaatcctgcccacggacaggtccaacgacggcatggacatggattaaccgaacaagcctaaatatttc

SEQ ID NO: 69145 - DNA, 2034 bp, Zea Mays
tagttatatgaagtatgaactccgatttcgtaccgcaatccaactgatccttattctattgagctggatccataaaaccatattgttcttcgaaacccaccactatatgctactaaaaacaataagaaaattctagtaacacatgcatcatatatttcatatattcacatgtataaactaagaggcaatatacgattcgcatgtggttttgtggctattgtcaaaaaacaagcttttaatgcgtcatgacttagcagagagattgaggatggaagttgcttgatgtgtgctaaaaaacagacaatgtgcaagggtggacacactttgttcgttatttcagcttgcaatgacttttaagtcaaaaacatatataatatgctaaacgtccattatactaattcggaagtacattcaggcactttcacaactatctatgactcgtagtacacttgtaattgtgtaagcgaaaacactctattgttcagactgttttaggccccgtttggtttgagggactaaagattagtccttctattttagtctcatttagtccctaaattgccaaagtgtgggactaaaactgggactaaactgttttagtctctagtccctcaaggggtgactaaaagggactaaaccatataaattccacttttgcccctcttttattttagctgcacttatggtgggagaatgctaaggggtattttagtccccttatgattcatttaatgtgttttgaatagttttagtccctagaaccaaacatggtaggactaaactttagtctcctaactaaactttagtccctggactaaaggaaccaaacgggacttagagtacagtgatgactctggatgtaacaattcgataaaaagagtgattaaaacgatcacacaaattacaacccttacctcggcatcttttatcactccacctctgaagggcacgtgcagtggctttcaacttcatctcaagagtcaggaaggggtaggagctaccaccacccgatgcccacgcttcctggatctggatgatgatggcgacgatacccgtacaccgtaatggcaggtaccgccagcgcgagctcacagttcccgtcggtttagggtcacagacgggatcccgccggtgtcaccattcccgggttcgctgccggcttcatcaaagggtcggattcgaccacctccatgagccgcgaccacatcctagtgccgccgaagaaccacgacccgtcgccgctggggtagggcaccaccgtcacggacgcggaccccagccgaccatggcgcacccagggcagcacgaggctgggcttcccgaacccgaggtccctgtcgatggcgaactgaagcaacccgaacatgaagagcgcggggctcccgagccccagattcaccgtctctgtccacttgtcgtcgtccctgaatgccgccttccgctcctccatccagtctaccagctcctggaaccgcgccgccgtcgtgacccccgcgatggccgcgcgcaccatgcccgccacctcggggagcggcacgcgaggacgtcgggggcggccatggcgcggtggaggaggatgtcgcaggggatccaggatctcatcgcggcgtgtgcggcgggcgtggtggggacgcgcgacgcgagatcaggtggcggccgcgggatggagaggcagaacatagccgcatgtggacgccgcgcagaaatcggaggccgccccgtcgccgccatcatcggtcccaacctcacgaacgaacacggcgcagggagcagagatcggctgcgtgaaatgtagaggccgcggagcataggggagcgcgagattagggggattatggcggctgcgggatgctatcgcgaccgagattctggaggtggcggccgcgggaatgcgggatggagaggctatcgtgaccgagtcggaggcagaacacagccgagtgtggacgcctacaatgagtgcttaattagttgtaaagatttagtagaatgattctatttgttatagtataataaggtaatcataactttaag

SEQ ID NO: 69146 - DNA, 1013 bp, Zea Mays
acctggatctggatgatgatggcgacgatacccgtacaccgtaatggcaggtaccgccagcgcgagctcacagttcccgtcggtttagggtcacagacgggatcccgccggtgtcaccattcccgggttcgctgccggcttcatcaaagggtcggattcgaccacctccatgagccgcgaccacatcctagtgccgccgaagaaccacgacccgtcgccgctggggtagggcaccaccgtcacggacgcggaccccagccgaccatggcgcacccagggcagcacgaggctgggcttcccgaacccgaggtccctgtcgatggcgaactgaagcaacccgaacatgaagagcgcggggctcccgagccccagattcaccgtctctgtccacttgtcgtcgtccctgaatgccgccttccgctcctccatccagtctaccagctcctggaaccgcgccgccgtcgtgacccccgcgatggccgcgcgcaccatgcccgccacctcggggagcggcacgcgaggacgtcgggggcggccatggcgcggtggaggaggatgtcgcaggggatccaggatctcatcgcggcgtgtgcggcgggcgtggtggggacgcgcgacgcgagatcaggtggcggccgcgggatggagaggcagaacatagccgcatgtggacgccgcgcagaaatcggaggccgccccgtcgccgccatcatcggtcccaacctcacgaacgaacacggcgcagggagcagagatcggctgcgtgaaatgtagaggccgcggagcataggggagcgcgagattagggggattatggcggctgcgggatgctatcgcgaccgagattctggaggtggcggccgcgggaatgcgggatggagaggctatcgtgaccgagtcggaggcagaacacagccgagtgtggacgcctacaatgagtgcttaattagttgtaaagatttagtagaatgattctatttgttatagtataataaggtaatcataactttaag

SEQ ID NO: 69147 - DNA, 1550 bp, Zea Mays
aaacgaataattttagtaacatttcattcactcaagaaaaataaaagaaaataaaaggacgaacacttaggattacattacattttgtagaagtgcatgatgaatatcttggatattgcttctgattacaccaactgaagaatcatttggaacttttggggagcgtttgtaggaaataaacagatcggtaggcgtctgagctgagaaatccctcgcgtcatccgcattcccttgacccagatttgcttgccggcttgggcgagccagatgagctcgtccatggcacacgccgccatgtcaactatcaaggggtgctccatttccgtcacgagcgctggcatctggtacgacagcccgaacgagcagccactgaggaggtagaggcccagcgatggcctgccgagggagctctactcacgaatcctgcccacggacaggtccaacgacggcatggacatggtaacgctctccatagctcccaaacaatttcacacccatgtccacatgcgaagcgcaggggccaagggatggggtctcacctggatctggatgatgatggcgacgatacccgtacaccgtaatggcaggtaccgccagcgcgagctcacagttcccgtcggtttagggtcacagacgggatcccgccggtgtcaccattcccgggttcgctgccggcttcatcaaagggtcggattcgaccacctccatgagccgcgaccacatcctagtgccgccgaagaaccacgacccgtcgccgctggggtagggcaccaccgtcacggacgcggaccccagccgaccatggcgcacccagggcagcacgaggctgggcttcccgaacccgaggtccctgtcgatggcgaactgaagcaacccgaacatgaagagcgcggggctcccgagccccagattcaccgtctctgtccacttgtcgtcgtccctgaatgccgccttccgctcctccatccagtctaccagctcctggaaccgcgccgccgtcgtgacccccgcgatggccgcgcgcaccatgcccgccacctcggggagcggcacgcgaggacgtcgggggcggccatggcgcggtggaggaggatgtcgcaggggatccaggatctcatcgcggcgtgtgcggcgggcgtggtggggacgcgcgacgcgagatcaggtggcggccgcgggatggagaggcagaacatagccgcatgtggacgccgcgcagaaatcggaggccgccccgtcgccgccatcatcggtcccaacctcacgaacgaacacggcgcagggagcagagatcggctgcgtgaaatgtagaggccgcggagcataggggagcgcgagattagggggattatggcggctgcgggatgctatcgcgaccgagattctggaggtggcggccgcgggaatgcgggatggagaggctatcgtgaccgagtcggaggcagaacacagccgagtgtggacgcctacaatgagtgcttaattagttgtaaagatttagtagaatgattctatttgttatagtataataaggtaatcataactttaag

SEQ ID NO: 69148 - DNA, 2355 bp, Zea Mays
gtaggaataatcttctgtgatacaacaaccatgtagccaccgatcctaatgagtcatgcataatagcagacacaggcaacagtgccccgtgagcacatgcaggatcagcagtacgacctccgactccgagctactgctcaccctctcgggctctcggcccgcccgtatgccagtctgtctctggtacactccttcatttcatcgcctagctagctactatatagtacgacctgcctgccttgctcttgccctgtgagcagcggcgtgcgatcgatcgaggcagtcgtagtaataagccaacaaacaaaccggccggaacgccatgctggaggagtacaaaccgtgtgcggccatggtggtgacgcagtgcatctacgccgctctagcgctcttgtccaaggcggcgttcaccggcggcatgagccccctggtgttcgtcgtctacaggcaggccgtcgccaccattgtactcgtccccgtcgtcatcgcggccaacaggaagaagatgaaggagatgacgacgggccttggactgacgggcttctcgctggtcttcgtcgcctcccttgtcggggcaacggtgaaccagtgcatgtactaccaaggggtgaatctgggctcgtcgtcgatggcaacggccatgaccaacttgatccccgccatcaccttcgtcatggcggcatcagtcgggtgagtgtctactactagtttgacagagaagagacggtcgacccgtttcatcagcgccgcgagcaaaatttagttgagcaccgtgcgttttctctgctgctccaccgtacgccgtctaatatgggcgagttggagatggggtgtcctggaccaacgctgccacctcacctcacctcacccacctgcgcgccttaattcacaagtatctggtgtagaccggaaatcaaacatttacttcagttaacgaagaccaaactcccatgaacaccgaacagattggctatcacatctcggttgctgcaaaatgcagttttaagcaatggcaaaaatggtcagtaggttcaatgcactaccttttcgtgccatgttaaattgttttgagacgtccactagctcccagaatattctcccggagtattctctgttcagattcctccctgaatatgtttctgagttcctcagattcctcctgcaaagaattaaagaaaaccccgtttcaattcgccgctaactgtcgtctgtctgatgcctcccactccgttccatctgacgattccatcaaccgacagcctagagagggtggaggccaggaggccgaggagcctggccaagatcttcggcacggccgtctgcgtgagcggcgccatggccatggctttcttcaagggcccgaagctgctcggcgacggcccgaacgctctccagctcctcctccacgcgggcggcggcggcaggtgggtggccggcgcgctcttcctcgtgggcagcagctcctgctggtcgctctggctcatcctgcaggtgcccatctgcaagtcgtacgtggagccgctggctctgtcggcgtggatgtgcgtcctgtccacgctccagtccgcgctgctcgtctccttcctcctgccggaccccagcgcctggaggatccactcgctcttcgagctctcctgctgcgtcttctcgggcgtgttcgggtccggcgtcacgttctacctgcagtcgtggtgcatctccgtgaggggcccgctctactccgccatgttcaacccgctctgcaccgtgatcaccaccgtgttcgccgccgccgtcctccgcgaagagctgcacgtcggcagcttgctgggcgcgatcgccgtcatcgcggggctgtacgtggtgctgtggggcaaagcgggcgacgccaacaagggcggggtggagccagagcaccactcggacgatctggagaagacgtcatcagcgcggtcggatcccaattcgacggccggcgtcggcagtggcatcgccgagcccctcctggcgggcggcgatccaacggagaagtagatgggattttgctgctcttcaagtgttctgtgcgtgcgcgcgcggtgttttcagggtcggtatgctagtgctactgtaacagtgccgtcccagttttgtcatgtacactagtggcagcttcaaatgactccgtgctgccgatgtgtattatccgcacaattttgttaagcaacgcggcgtccccgtccaaagtcgtcgtcgccaactccgggccgctccgctccgctcgccgtcgtctccaactctctcttgcttgtggggtggtcaggtcttggcctgctgcgactatatggcccatatgccgccgcatcgggtcaggtccaagcaggaagcactttgttc

SEQ ID NO: 69149 - DNA, 2117 bp, Zea Mays
gtaggaataatcttctgtgatacaacaaccatgtagccaccgatcctaatgagtcatgcataatagcagacacaggcaacagtgccccgtgagcacatgcaggatcagcagtacgacctccgactccgagctactgctcaccctctcgggctctcggcccgcccgtatgccagtctgtctctggtacactccttcatttcatcgcctagctagctactatatagtacgacctgcctgccttgctcttgccctgtgagcagcggcgtgcgatcgatcgaggcagtcgtagtaataagccaacaaacaaaccggccggaacgccatgctggaggagtacaaaccgtgtgcggccatggtggtgacgcagtgcatctacgccgctctagcgctcttgtccaaggcggcgttcaccggcggcatgagccccctggtgttcgtcgtctacaggcaggccgtcgccaccattgtactcgtccccgtcgtcatcgcggccaacaggaagaagatgaaggagatgacgacgggccttggactgacgggcttctcgctggtcttcgtcgcctcccttgtcggggcaacggtgaaccagtgcatgtactaccaaggggtgaatctgggctcgtcgtcgatggcaacggccatgaccaacttgatccccgccatcaccttcgtcatggcggcatcagtcgggtgagtgtctactactagtttgacagagaagagacggtcgacccgtttcatcagcgccgcgagcaaaatttagttgagcaccgtgcgttttctctgctgctccaccgtacgccgtctaatatgggcgagttggagatggggtgtcctggaccaacgctgccacctcacctcacctcacccacctgcgcgccttaattcacaagtatctggtgtagaccggaaatcaaacatttacttcagttaacgaagaccaaactcccatgaacaccgaacagattggctatcacatctcggttgctgcaaaatgcagttttaagcaatggcaaaaatgcctagagagggtggaggccaggaggccgaggagcctggccaagatcttcggcacggccgtctgcgtgagcggcgccatggccatggctttcttcaagggcccgaagctgctcggcgacggcccgaacgctctccagctcctcctccacgcgggcggcggcggcaggtgggtggccggcgcgctcttcctcgtgggcagcagctcctgctggtcgctctggctcatcctgcaggtgcccatctgcaagtcgtacgtggagccgctggctctgtcggcgtggatgtgcgtcctgtccacgctccagtccgcgctgctcgtctccttcctcctgccggaccccagcgcctggaggatccactcgctcttcgagctctcctgctgcgtcttctcgggcgtgttcgggtccggcgtcacgttctacctgcagtcgtggtgcatctccgtgaggggcccgctctactccgccatgttcaacccgctctgcaccgtgatcaccaccgtgttcgccgccgccgtcctccgcgaagagctgcacgtcggcagcttgctgggcgcgatcgccgtcatcgcggggctgtacgtggtgctgtggggcaaagcgggcgacgccaacaagggcggggtggagccagagcaccactcggacgatctggagaagacgtcatcagcgcggtcggatcccaattcgacggccggcgtcggcagtggcatcgccgagcccctcctggcgggcggcgatccaacggagaagtagatgggattttgctgctcttcaagtgttctgtgcgtgcgcgcgcggtgttttcagggtcggtatgctagtgctactgtaacagtgccgtcccagttttgtcatgtacactagtggcagcttcaaatgactccgtgctgccgatgtgtattatccgcacaattttgttaagcaacgcggcgtccccgtccaaagtcgtcgtcgccaactccgggccgctccgctccgctcgccgtcgtctccaactctctcttgcttgtggggtggtcaggtcttggcctgctgcgactatatggcccatatgccgccgcatcgggtcaggtccaagcaggaagcactttgttc

SEQ ID NO: 69150 - DNA, 3055 bp, Zea Mays
aggaggcacagacgccgctgagctctactagtaccactgctccgctcatctctcctgcggcggtggaagattaggaattgagcccgcggcaagctcggggagttactgtgaatccatctgattcccacccacccgcgcagacgcagctgcattccgcgatcccaggcggcgggaggcggctcttgatgctagagatgctcgctccgcgtcgttctcggcagcaccgacggcgggtaggtggaggcagagggccccgttgtcggcggcaatggcgccgggcctgaggctggcctacccgtgggggagggatgtccggcggggcacgccggtggtggtgaccatggagaaccccaactactcggtggtggagattgacgggcccgaggcggaggcgctccgggccggcgtgcctcccatggacaaaggccgaggccggggccggagcgccaagcagttcacttgggtgctgctcctccgcgcacaccgtgccgccgggtgcctcgcctcgctcgccgccgtcacctgggcgctgccgtctgccgtcgcgaagcgtttccggcgggccgccgccgccgagggcgtcggccgcggccggggctggctgctctacaggttcatcaaggtgctcttggcgctctccttgctcgccctcaccgttgagctggcggcctactggaaagggtggcactttcagaggcccaatttgactatgcctgaatttcatgtgccggaggtggaggacattcaggggtggctgcacacggcgtacctcgcctggatgtcattccgagctgactacatccgacggccgatcgagttcttgtccaaagtttgcattctgctatttgttgtccaatcgttggatcggctcgtcttgtgcatcgcatgcttctggattaagctcaagaaaatcaagccaaggcttgaaggggacccattccgggagggttcagggtatctgcacccgatggtacttgttcagattcctatgtgcaatgaaaaggaggtctatgagcagtcgatttcagccgtctgccagctagattggcctagggataagtttctaatccaggtgcttgatgattcgagcgacgagagcattcagatgttgatcaaagcagaagtttctaagtggaaccagcagggtgtgaacattgtctatcggcatcgggtgttgaggactgggtataaagctgggaacctgaactctgcaatgagctgtgactatgtcaagaattttgaatttgttgccatttttgacgcggacttccaaccaagcactgattttctcaagaaaacaatcccacattttgatgggaaccctgagcttggattagttcaagcccgttggagctttgtgaataaggatgagaacctcttgacccgccttcaaaatatcaacctttgcttccactttgaagtggagcagcaggtcaatggtgtcttcctgaacttctttgggttcaatggaactgctggagtctggaggatccaagctttagaagaatcaggaggctggcttgagcgaacaaccgtggaggatatggatattgctgttcgggctcacctgaatggatggaagttcatcttcctgaatgatgtgaaggtcttgtgtgaagttccagaatcttatgaagcatatcggaaacagcaacaccggtggcattctggcccaatgcaccttttccggctgtgctttccggacataattactgccaagatctcctcatggaagaaagcaaatttaatactattgttctttcttttgaggaagttgatacttcctttctattctttcacattattttgtgtcattcttccattaaccatgtttgttcccgaggccgagttgcctgtgtgggtcatctgttatgtgccgatttgcatgtccttcttgaatattctgccatccccaagatcatttcccttcattgtaccatacctcctcttcgagaacaccatgtctgttaccaaattcaacgcaatggtgtccgggctgttcaaactcgggagctcctacgaatgggttgtcaccaagaagtctggccgatcatctgaattggatctcttgacatcggaagaaaagaataggaagtgcaccacacttcctcagctccagaatcaattgcctgaaaacagtgagctggtcgagatcaatgtgcgaaaggaacagcgagagaaggtgccaaatgacgccaaaaggggggatgtcattccttgccgttggcctcgatctaattggtgaacagataagttgattcctcgcatgctattgttcttgttcagacagcatgggaatcacacatatgttcatacatacagtgatatcaaaattctaaatttcccattcatggtttagagttttgcttcagaattgcaaccctgctcaacgacaaaggggagcgcaactgcctccagaaagcccaacagtacataataaactgaagagttgatagctcttgttcatctgtacgctctcagtaaatgttccagcagtgttcataaatagagttccgtttccgctgaagttcttttgagttttcatgaacactgaaatgtgtaccgtgtttcatttgtaaatcgtgatacgacgaaattggtttcgaagaagataaactgtcaaattcagtgtgatatttgtctccatccttgctatgctaggtgaactgcgttgcggtctatctcgctatctgtcggtggatctgcttttagagtaaagccaacaggcagacagttggatcaactgttggtgcagtgacctttgttctcccgcgccatcatcataccttcataacggcatctagcattttgtgtgtggcgcaccggctgccggcgggcgtcacaattgccctctccttttcgctgaagatgctattacagggctccagctacctctgtcctggttactacttactagcgatggctggtacctgcagtgcagcaggttgctacttgtaattgctaatgagatctccgatccaagtaggcacagttcagatgtgcaaaactgcgaggttgttaaatctatctcataattgttgagatgagattttac

SEQ ID NO: 69151 - DNA, 1526 bp, Zea Mays
aaaaaatgctcttttcttctcaaaggccaaaaactactctcacagcatcagattttagaaagtatgatctagtacaatagcagagttctgcaacaaagtagatgctacttgattcatcacctagctctactgaaaacagacaactgtagagaagtcaaagaaatgttacttacataaccaaatccatcgaatttgtaagttggcccaaccatagtgtagttgtggcaatactttgagagaaacactttgagatatggtatttcatcaacaatgacggcaacttttctagttgatagggcgtcattgtactcctcaggagagctgaaagcgatcatttttgtttcattaattttcaaccttttcaaaagctcaggcatgaaagaatcactgaggtagccaacataatcccctcgcctgataacttcatctaaattggtgactgttggttgaagctgttctacagtgagaattgagcttaagcttgcagtataactctgctgcaatattagcaccacaaaaagccaaactactactgtaattcttgacaagttgttcacaatcctctccctatgagcaaatacaaatgttgagaaggagaagtagaagagtgatccaatttgagtggctggcggtcctctgaattcctgatttgttctgtgctcgataaaccaaactacaaagccggtgaagacaatgaaggctccagttcgtaaccatagatcagctgttaaaggttctaggaatgtccatgcagtcttctgtctccggtcccaaactggaaccagcatgcgtaccccggactcagtataagggagagtgtagtccacatatagagaacggttggctaaaattgttatgtcacctactaccgcatcaaataccttaagataaactttgtagacgagttcgtcataagttccattactttctccttttccatttccaaactccacatagtgcttgggaactttgtagggcagtttactaataacttcctcaaatatgtcaatgcagaaacccttggggataccatcttcagatcttataaaactgctaaacccagatttcccaggtactcctattttgagtactttattcactggcaaaagccatcctctaggtgtcttctcactgcctcctggccatacaatagtactgatatcatctttcttttctagaattctggatatgttcaatcctggagtccaaaaaccaactgctctcctctcatgaccaactacattgattattttgtaagttgttgatactaactggaactgcatatcttgaatgacaaattggccagtaatgcctgtgaaattaacctccaagaatgcagcatgaaattttttagcagccctagaagtacttattttgttgaaatcagtggaaccattgtttgtttcagatagcacaaaatcagaattaacatatccggccttctctgcagccaatgctattgcccatactgtatcatacgcatacagaccagacgttatagactcattaattgatgtaccaggatt

SEQ ID NO: 69152 - DNA, 1237 bp, Zea Mays
gccacgccgtcttagtcctagtctctgcagagagcgtcgttcctgctgcgccgccttaacgccatttccaagccactcgactcgagagggagctcggtctgctgccgatcgacttcaccgccgcgagaggcacgggcagctaagagagagagagagatgggcagggcgccgtgctgcgacaaggcgacggtgaagaaggggccgtgggcgccggaggaggacgccgtgctcaaggcctacatcgacgagcacggcgccggcggcaactggatacagctcccccacaagatcgggttgaacaggtgtggcaagagctgccggctgcggtggctcaactacctccggcccaacatccggcacggcggcttcacggaggaggaggacaggctgatatgcaacctctacatcagcatcgggggcaggtgggcaacgatcgccgcgcagctgccggggaggacggacaacgacgtcaagaaccactggaacaccaagctcaagcgccgcctgctcggcggcggccggcggccgagggcagaggcgcgcctccagctcctcaccaccagcccattctggcagcaccgcgattccttggcctcgtcggcggcggcgctcgagaggatgcaggtcagcacgcgcctgcaccggcgacaccagcctcgcctcgacgacccggcggcggcggcggcggccttcaccttgtacaacaactacggcagcctcggtgcgccgttatggccgagcctgctgtctccctcttcttctccttcgccggcggcgagtgagacctcggagatactgccgcggcagccaccacccgcttcggctacgcaggagctagagtagtgcggcaagagaacatggatggcacctgcacaccgccgctttctactagcaccaccggagagaccatgacgacggcagtaggcgtggagagctcgagctccacgccgacagcaagctctgcctccgccacgtttgggggtagtatggacgatgagatcgacatgttgctccggcagatccagtgcttcggggagaacggcagccacatcggcgacgatggcatagaccactgcttcagggcaacggaccaccacgagacggcgaacggcagcgttggttcttggggctcctgctgctccactcctggagtggattcagtgttccatgactacgtgcaagggcacaaccagtgctagaagctttgcagacatgcactactagctagcagcacgtg

SEQ ID NO: 69153 - DNA, 678 bp, Zea Mays
atgaagcgaaacatatgctttggagtccaaaaatctaattttttctgggaaaagtgcgagcacattgtttgtttggagaaatccaattttctactcacggacgccgcccctgtgcctcgccatcgcctcaggtacgcaaggcggccgaacacgagcgcccgccttcgttcttgcctgcgctgcccctctcctcgccgtttattcgggctcctacctcttgttacaacttgcgcggtgggggcagtgaggcagcaagacgtgaggtccaggatgatgaacaacaacagtggcggcggtgccggaggccctggagggggcatgggtacgggagtgggtggagggggggacgggcggcacgacgacgaggctgcgctcaccgagttcctctcatccctcatggactacacccccacgattcccgacgagctggtggagcactacctcggccgcagcgggttccactgccccgacctgcgcctaacgagactggttgctgtagccacccagaagttcctatcagacattgctagcgattctcttcagcactgcaaggccagggtagcagcacctatcaaagacaataagagcaaacagccgaagacgtcttgtattaaccatggatgatctttctaaagctttgcgcgaggaagggaagcgctgacttcatcccgagttcag

SEQ ID NO: 69154 - DNA, 997 bp, Zea Mays
taatcaatcatcatgataggctcatgtatcacatcatgtgccttagcaaggtgcgatttgaggttgtagtggcagcaggctagcgcctgctggagaggctcctagtttgacacgacctgaaatgcacattctgcagtcagcaatctggcaatcacatttagcctagacagctatggcaactgagctgcaggaattgctaaatgactagaacaggtgccaagctgattatttaccagggtccaggggagggggtcttaataaccctgaaaggcattgtgatttacaaagcccgtggaaaaacagatccattgtgcggggaggatgggatctttcggattatattgcgcactgcaaggccagggtagcagcacctatcaaagacaataagagcaaacagccgaagacgtcttgtattaaccatggatgatctttctaaagctttgcgcgagcacggcgtgaacttgaaacacgcggagtacttcgcagacagcccttcagctggaatggctccttcgaccagagaggagtagactggattaggccaacttgtacggaactagggagggatcgcgtggaatggatgggcatgttggcattcttgcccgatcagatcgatgggatgtattactattaagtactgctactatgactagtatatttctcaattaccattgtcactgagagaatccagacacaagtcgttttgcccatgcgcttttatttgtacaaactgtcaatcatctgtaaccctatggggcccaaggatgattgggcaaacatcatgagttttttgttttctacataccattctaaaggaggcagctcaccttccctgggtggcgaattgtcaaatcaccccctggccctaggagaacatctctatggacacttctctaggtcccttgtttcctccatgttgacaaagtgatcagtatgtacttaccacatgaccacactgattaattgtgtccttgctttcgtctatggcacaccacca

SEQ ID NO: 69155 - DNA, 1081 bp, Zea Mays
atgaagcgaaacatatgctttggagtccaaaaatctaattttttctgggaaaagtgcgagcacattgtttgtttggagaaatccaattttctactcacggacgccgcccctgtgcctcgccatcgcctcagtgaggcagcaagacgtgaggtccaggatgatgaacaacaacagtggcggcggtgccggaggccctggagggggcatgggtacgggagtgggtggagggggggacgggcggcacgacgacgaggctgcgctcaccgagttcctctcatccctcatggactacacccccacgattcccgacgagctggtggagcactacctcggccgcagcgggttccactgccccgacctgcgcctaacgagactggttgctgtagccacccagaagttcctatcagacattgctagcgattctcttcagcactgcaaggccagggtagcagcacctatcaaagacaataagagcaaacagccgaagacgtcttgtattaaccatggatgatctttctaaagctttgcgcgagcacggcgtgaacttgaaacacgcggagtacttcgcagacagcccttcagctggaatggctccttcgaccagagaggagtagactggattaggccaacttgtacggaactagggagggatcgcgtggaatggatgggcatgttggcattcttgcccgatcagatcgatgggatgtattactattaagtactgctactatgactagtatatttctcaattaccattgtcactgagagaatccagacacaagtcgttttgcccatgcgcttttatttgtacaaactgtcaatcatctgtaaccctatggggcccaaggatgattgggcaaacatcatgagttttttgttttctacataccattctaaaggaggcagctcaccttccctgggtggcgaattgtcaaatcaccccctggccctaggagaacatctctatggacacttctctaggtcccttgtttcctccatgttgacaaagtgatcagtatgtacttaccacatgaccacactgattaattgtgtccttgctttcgtctatggcacaccacca

SEQ ID NO: 69156 - DNA, 1073 bp, Zea Mays
atgaagcgaaacatatgctttggagtccaaaaatctaattttttctgggaaaagtgcgagcacattgtttgtttggagaaatccaattttctactcacggacgccgcccctgtgcctcgccatcgcctcagcaagacgtgaggtccaggatgatgaacaacaacagtggcggcggtgccggaggccctggagggggcatgggtacgggagtgggtggagggggggacgggcggcacgacgacgaggctgcgctcaccgagttcctctcatccctcatggactacacccccacgattcccgacgagctggtggagcactacctcggccgcagcgggttccactgccccgacctgcgcctaacgagactggttgctgtagccacccagaagttcctatcagacattgctagcgattctcttcagcactgcaaggccagggtagcagcacctatcaaagacaataagagcaaacagccgaagacgtcttgtattaaccatggatgatctttctaaagctttgcgcgagcacggcgtgaacttgaaacacgcggagtacttcgcagacagcccttcagctggaatggctccttcgaccagagaggagtagactggattaggccaacttgtacggaactagggagggatcgcgtggaatggatgggcatgttggcattcttgcccgatcagatcgatgggatgtattactattaagtactgctactatgactagtatatttctcaattaccattgtcactgagagaatccagacacaagtcgttttgcccatgcgcttttatttgtacaaactgtcaatcatctgtaaccctatggggcccaaggatgattgggcaaacatcatgagttttttgttttctacataccattctaaaggaggcagctcaccttccctgggtggcgaattgtcaaatcaccccctggccctaggagaacatctctatggacacttctctaggtcccttgtttcctccatgttgacaaagtgatcagtatgtacttaccacatgaccacactgattaattgtgtccttgctttcgtctatggcacaccacca

SEQ ID NO: 69157 - DNA, 4354 bp, Zea Mays
gaaggatcgacgcgacgttgataccaggttgtcaagagcagtgttcgacagggatgccggacctctactccggagctcgtactctcgctccgtgataactccggcagggttatgcccccgtgccgctgacacgctcaccgggttataccccctggctcactgtttgagaagagagagaggtgagattggtttaacttgtcttccctttctttccttctcagccatgcgctgatcctctttctttctcatcgtcctctttccttctcagcgtcggtcagctgtttggcgcgctcctgcgcacagcgcacgtccctggctcggtggcgcctggtgtacgtgcgcccgaacatgacaacctgagtcctggatacttacagggaaaggatgagacttcacatggcaactgctcttgcaatagtgttagctcttcttctcctcacctaatgggatacacattgcttttttggatatttgctattagtcctgaagcctctccaaatagcttcaggatgttgagcataacctggatatcactctctcttgggtgtaggaacataaccacatcatcagcatataatgatagtctatgttgcaggggtctggtggttaggggttgtaacaatcttgtatcttcaaccttagatactagatgcccaagaacatccattgttaagatcaaaagcataggtgaaagggggtctccctgcctcaaaacccttctgttctggatgctttttcctgggactccatttaggagggtttttgtggaggagatggccagtaagccgctgacgatatctctccaaatctgccgaaagcccattttctgtagtacttctaaaaggaatggccaagacacatagtcgaaggctttagtgatgtctagtttcagaagcacccttgcccttttttgttgatgcagtagcctagcagtttgctgcacgagcatgaagttgtcttgaatgaaatggcctttgatgaaagcactctgctgtgatgaaaccatgccctgtagctttggagtcaatctgtttgcaagtagttttgtaaccagtttggcaatgctatgtaccagactgataggtcgaaagtctttcacttcctctgctccttcctttttagggataaggattacatatgcagtatttaccctatcaaagcaggcaaaactcctactccacactgctgaaaatacaggcagtacttcttccttaataactgttattttgaggtccataaacataagtcaaccaccagtcctgcccattggttttctggaattgcacaaagatgctatgggaatccactcaattctgccagaatctgccttgttgcttgcaaatgacgtttccaagctaccaaaattccatcactagcaccattagaaggtagggctaggaaatgatcaaaatctgcacccaaaatatataggacatctcttctagagactccctgcatcttggtctcttgcaggcaaatgacatcagctctatatgaatcaacaaaggaacgaacatagttttgtctcagggcaaaatttaaagccccggacattccatataaaaatttgctttggatccattagaattataaagggacaacaactaccggggtaggtagctaacaaccagctatatcaggactgcttgtcctccggcatactccacctgaaaagtgttgctagtgcttctatatgagctgaggaaagtgtttcagaaaacatctttttgtaatcctttctggcttgttgactgatgtcttccccaactctgatcacattcaaggctttcatggctttctttgtggaccgtaagcacaagtcttggttatcaaattcagcccccatccctgcaatatgatggctgcgtcggggtggcagcaggggttttggtgctattattcttcaaggtcagatcaactgggtttggaggatgctagagatctgcttggtaagctggttgaagaactgtctctgctcaggggttagggtatttccagctgcttgtggagctggtcttccaacttcaacgcaatttgcctgttcaacctggttttgtcctgcattcatgtcagtcctctccaatgtgtcccccacatcatccactgttgccgcaataacctgatgggtcctctcttttcttgtcttacaccaaccttgccttttgtactcgtcttagtcttcttgagtataccatcagctgtggggtagcttgggatattcttaatggaggaggttaaaagtttccttagtagtgtgggatatctaccgagatttcagaaaacttcttatttcttggttagcaaaactgtttcttcagataggaaaggaatagcagtacaacaccctgtagaaagaagagaatgtgtataatgtgtaggataatttgcattgagcctttagggtgaatatatagaagtacatgacttggagggcaagtagcctatcctagagataagaaaggtcatcccgggattacaatcaatcgtagactaatcatatctggagttgcctaatataagttatcacagtattacaatcaatcatagactaaccatatctggagttgcctaatatactctaacacacccaatcaaggctacaacatacatctatatatctgattcaagagcaagccactaagcatcattaacacatgtttctccataaccacgttttccccttggaaatacatagaactgggtgtcactgcattaagaacaaaggagtttggtacagccatcatagtgatttgctcccccctcctcgggaccctgtggtcgacgatgattctgccaggcagcggcggcgataccgttctcgttcaacgcccccagactttgacggtcgtggaacccctgatgtggaaaatactcaccggggaaggcggtctgtcctgcatcgtttgggtccgacgtccgagacggctcccaaagatgcgggtgtttctgcaggagatcttcctggtgatgcttgggtgacctcttctgtaatgacggttctgggatcagagcttccccagggcaattctgtccctgtcgaggagcttgttcctgtggagctgtatggatcggtttctgacaccacaaatgttgctctcaacagttcaagccttgatcttgatggtgtgcttgaggcggtcaccgtggccccagaagcagtgctcctccaggacgttgttgttcctgttgaggaggttggtcctgttgagccccttggaccggtgggagatgcacccttgtatgctattaattcagccagcagcagccctgttcttgttgtggacagcacaaatgttgccctcaacagctcaggccttgttcttgatggtgtgctagagacggtcaccgtgactccagaagcaatgctcatccaggacgttgttgtccctgttgaggaggttgttcctgttgagccccatggaccggtggatgatgcacccttgtttgctattgcttcggccagcagcagccctgttcttgttcttcctactcagaacttgtttgaccagagatggcgtcctgatcgctgttgtctcaatgtctattctcgaagaacgaaggttgggtcagatccatctattctgaaggagctggttgattctttgcccctggagaccttcaaacaaattatcaccaaaccgattaacgggctgctctcgccacctaggtgcaatttgagaaagaagaagaccctgccgaaggacttcatgcctaggaggagtagaagggtggctaagcttcctcctgtcctcggaaacgtctcagttgccaaggtgtgcagacatttggggtactacggtgaccatgaggaaatctccttggaaaatgccgctagttatgccaaattattcgagaatggcctttccaaatcacatgtggaggctatggcagctttgatcggctgggaagtgctggtagagatccaggtctcagcctgatgctgtttggtcgtattcttctatattgttagtcatgaatcagtcaaattttctaatttggaatgttagaggtctgaatgataggcctagaagagactgtgtgaagtctgaggtccttagttccaagcctttgtcagtctgtttgcaggaaactaagctgagttccatctctgcttttgatgtcctatctattctgggtgttggctatggtaattttgtcttctgtcctactcatgggacaaggggggcatcctggtggcctggcgggatggagctctttcctccgccagcagtattgtgcatgatttctcagtctccattcagcttcaggaggaatctggaatgcaatggtggtttactggagtttacggcccgcatcaggacaatcttacgcagttttttcttcaagaattgag

SEQ ID NO: 69158 - DNA, 197 bp, Zea Mays
atcagaaaacatcatacagatccacgggcaggtcatgatcagcctagcggcttcctttgacaaaaaaccatttcgccccctccttgtcgaattggaggaccattacattactggtttgcgcggcatcacgatgcggacttgctataagaaaaaagaaaaagaaaaaaactctgacatacagataagacaactcgaac

SEQ ID NO: 69159 - DNA, 1786 bp, Zea Mays
ttttttttttacctgtgcatgcgtgattagtcctgagctcgtcctggtagatccgtgggatcttcagagaaacatggtgcgtcgcatgaagagtccgatcccctcgcatgtacacaacgcagcggtggcgactggcgagtgccgacctcgaccgattcttcttcgaaatcctccactagaggatcgcagcttctcttttgagcgaacaataaagcaccagctgctctcacgcttccgcgtttagccaggccggccccggccacgagcccacgacaatgaagccgcccgcgtcgtccaccgccacctcctacctcctcctggccccgctcgcgatcctcctgctcgtcttcgtgctaccgtcgctccgcccttggtcccgcgtaggctccgactccgacggcctcggcatcctcagcctactggtgggcgtgctgaccgtgccgggccggcgggagcggcgcgacatcgtgcgcacggcgtacgcgctgcagccggccgcggagggcgcgcgcgtggacgtgcgcttcgtgttctgccgcgtgacggaccccgtggacgcggcgctgctggcggtggaggcgaggcggcacggggacgtcctggtgctggacggctgcgccgagaacatgaacgacggcaagacgtacgcgtacctgtcgtcggtgccgcgcctcttcgcggcggagccgtacgactacgtgatgaaggccgacgacgacacgtacctgcgcgtggcggcgctggcgggcgagctgcggggcaagccccgccacgacgtgtacctgggctacggctacgccatgggcgggcagccgatgccgttcatgcacggcatggggtacgtggtgtcgtgggacgtggcggcctgggtggccggcgcgcgggagatcctggagcgcaacgacaccctgggccccgaggacctcatggtcggcaagtggctcaacctcgccggcaggggcaggaaccgctacgacctcaagccccggatgtacgacctcagctgggacatggacaacttcaggcccgacaccgtcgccgtgcacacgctcaagacgaaccgccggtgggcggcggcgttcaggtacttcaacgtcgtcactgcggggatcacgccgtcgtccgaactgtaccacctgccgtgatcgtctcatcgatcgaccaacactttttttttttgtaattgtctgcgacccttgccaattgtataacaattatctggcaatacatgaatggatcgtggaacagtggtgggggagcatttgagtcacgttgacgcgctcatgtaagcgcagcgacgacggttcgcccgttgacgcgctccaaaccgccgtgcaagttcctctcccggcgaggcgacgggtcccaaaggctgggtcttggcctcgctccgtcgctcgtgaggtcgtgacatggcatcctcgccgccgattcattgatctagatcggaaaacagcattgccaatctaatctgtctttgtcgtcctttcctcttttttttgtctttcttttggatgaaaatggatgccaaattgcctagtgatagacaaaggaggttagggtatggtatgtgcaatgtctgtcatcctgtatatccctgtgtactctccgcaatgatcgacgacacttgcatggaagccgtgctgtccacactccacaagtggtggcaactagcaagcacaccggttttcatttccttgtctaacttatatttggcacttggcagccaaggaaaaactcaaatgaccaaaaatgtatgaaccggaagctttcgtttcaaaaggcc

SEQ ID NO: 69160 - DNA, 2004 bp, Zea Mays
cttccgttgactttctgatagtcgatcaaaattgttgggtacgcctacgcgcaacaaatgtgaatacacgtatcactgatacattaactggacacgtgtgatgtcggtgatattacgagggatctcatcgacattatcccaatatatactcccttcatttcaaattagcatttgttttagttcttagattttttttgtctatatctaaatggatgataacaaattagacatatacagaaaacatatatcaattattgtataaacctattaaaaggttaaaaccaattttaatttggaacagatggagtactttttttcttttcatttcaattgttcattcaggtcattgctcacactgacactgccacccatggtgatgcgtgacacattattactcaatcatcgccgctaaatgactcaactagctagctagccagcggctatactacagcacatagtttcttcagtgggggacaccgccggcagcagcgtaggggcatggagtcggctgctgcaggatggactggaggaccaagccgaagatcgcctggtaccggtgctgcggctccacctgcctgagctgctggcaacactgctgccgcaacgactggcactgaggcgagcagtagggcgtcgccgtcgggctgcactgatgcctcaggaactcgacgcactggcccaggatcggggtgctgccaacgccgcaggttccctgcagctggcacgggcttggatgcggctgttggcacgggcatgggtgtggctggggatgaggctgaggccggggcggttgagtagggtagtggcatggtggcagatgcaccggcggcggtagatgaaccggcggcggtggctggcagccgcagccgccgcttgtatgcgtggaggtggcgctcgcagcgagagccaggagagcgagggcaacgagcaacaccctcatggtgtcgatcgggttcttctgcgctctggagtagataaagctaatggtctgaagacccagtggtggtgatggagaagtgcacaggcatgcgagcgttatttatagctttgattaattaacacaatttcttgtgttcttatgccaccgagacggctgtaggcagcttcatggtttcttgccaaatgtatatgactcgtcactctctttacgtagcacgtcgatggttcatctggaatcattctgtacttctgcgtggctcagttttgttgccttctacaggttgttgatctacgtaaaacgaattagatttagcttgacatatggcttttttttgttgtaaatttactttacacgtcaaggatttttgtcctgtccggcctattttatttttcatgaaacgatctttgtaatgcaatatgagttgtttgtaatgtcttgtgagctgtaagcatgtatatcagatgagtatgatctcggcatgactcaccgtgtttctttgcacacagagaggatttgtttgattgtttcttacccaatacccttgacgtgcaattttggttgatgttctgtgagttgttaaggatacaacaaattcttggagctttacatgccaatgcatggttgtttcgtgttcctcaccactttaggacttatacggttgcacctggatgatcgaaagggattgggagagattaaatctccttctattcaattttgactaggaagagatttaatcgtttccaacccctttcgatccagacgtaagcgaacaagttttttatttggataccctcttattcatcttaatacacacatgtattaagttgcactagttatatgcccgtgcattgctacggtttatatatatatatatatatatatgatatatgataaattttgttttaataaaacatatgttttctattgattaggttgtgtgaatatggagccaacaaccaatatccagaacacttatacataatttcaccttattttgtacataaactctcttattatagtagtagagaagagattataagagtgcgggttgattataaagaaat

SEQ ID NO: 69161 - DNA, 2019 bp, Zea Mays
aagctatatatagaccaggaattgtggatatcggactgccataagttgggcctaacgcctcatccacaacccattttttttgagtcgactcgcttccgttgactttctgatagtcgatcaaaattgttgggtacgcctacgcgcaacaaatgtgaatacacgtatcactgatacattaactggacacgtgtgatgtcggtgatattacgagggatctcatcgacattatcccaatatatactcccttcatttcaaattagcatttgttttagttcttagattttttttgtctatatctaaatggatgataacaaattagacatatacagaaaacatatatcaattattgtataaacctattaaaaggttaaaaccaattttaatttggaacagatggagtactttttttcttttcatttcaattgttcattcaggtcattgctcacactgacactgccacccatggtgatgcgtgacacattattactcaatcatcgccgctaaatgactcaactagctagctagccagcggctatactacagcacatagtttcttcagtgggggacaccgccggcagcagcgtaggggcatggagtcggctgctgcaggatggactggaggaccaagccgaagatcgcctggtaccggtgctgcggctccacctgcctgagctgctggcaacactgctgccgcaacgactggcactgaggcgagcagtagggcgtcgccgtcgggctgcactgatgcctcaggaactcgacgcactggcccaggatcggggtgctgccaacgccgcaggttccctgcagctggcacgggcttggatgcggctgttggcacgggcatgggtgtggctggggatgaggctgaggccggggcggttgagtagggtagtggcatggtggcgctcgcagcgagagccaggagagcgagggcaacgagcaacaccctcatggtgtcgatcgggttcttctgcgctctggagtagataaagctaatggtctgaagacccagtggtggtgatggagaagtgcacaggcatgcgagcgttatttatagctttgattaattaacacaatttcttgtgttcttatgccaccgagacggctgtaggcagcttcatggtttcttgccaaatgtatatgactcgtcactctctttacgtagcacgtcgatggttcatctggaatcattctgtacttctgcgtggctcagttttgttgccttctacaggttgttgatctacgtaaaacgaattagatttagcttgacatatggcttttttttgttgtaaatttactttacacgtcaaggatttttgtcctgtccggcctattttatttttcatgaaacgatctttgtaatgcaatatgagttgtttgtaatgtcttgtgagctgtaagcatgtatatcagatgagtatgatctcggcatgactcaccgtgtttctttgcacacagagaggatttgtttgattgtttcttacccaatacccttgacgtgcaattttggttgatgttctgtgagttgttaaggatacaacaaattcttggagctttacatgccaatgcatggttgtttcgtgttcctcaccactttaggacttatacggttgcacctggatgatcgaaagggattgggagagattaaatctccttctattcaattttgactaggaagagatttaatcgtttccaacccctttcgatccagacgtaagcgaacaagttttttatttggataccctcttattcatcttaatacacacatgtattaagttgcactagttatatgcccgtgcattgctacggtttatatatatatatatatatatatgatatatgataaattttgttttaataaaacatatgttttctattgattaggttgtgtgaatatggagccaacaaccaatatccagaacacttatacataatttcaccttattttgtacataaactctcttattatagtagtagagaagagattataagagtgcgggttgattataaagaaat

SEQ ID NO: 69162 - DNA, 1411 bp, Zea Mays
aggttctgaagcatctagcgccagatatatcatacaggagcttggttgcacttggtattggttgtataaatggtactcctgttgcttcatttgagaggcgggatgcagaccgtctattattcttttgcacaagtcagtgcaaagatttggctaatgaaaatggtccatattttcatcttccaagatggtcagcctcccttaccaaggacagaacaaaggtgggttcagaatcaaaacaaaatctgttgggtgcaaatggagttttggaagacaagaagcatatgatggaagggccttcctcatggtcagccgtcaaggctaaattaaagcctgcaactatgaggcccattcctcactctcgaaagcaacaaatgcatccatttatgggttttcctgaaacttcccttcacgaaactagtattgtgaagccaagcttgccagctgcaccaactgtgaagcacaattcagtttcttctgccacaaccacgcacagaaaatcaacatcagggccgtctcatactccctcagtcattcagttaaatcctctgccaatgaagaaacacggatgtgataggttgcctatccaagtgtgctctgaggaggattttttgaaggatgtcatgcagtttttaatccagaggggccacaatcgacttgtacctcacggaggactagctgaatttcctgatgcaatccttaacgccaagcgccttgatctttataacctgtacaaagagaggtggattttatgtgggtaatggcataaactggaagggtcaagttttttcaaagatgcgtaaccataccgcaacaaacagaatgactggtgtaggtaacacgttgaaaagacattacgagacatacttgttggaatatgagttggcacatgatgacgtggatggcgaatgctgcttactttgtcacagtagcgcacctggagattgggtgaactgcggtttatgtggtgaatgggctcactttggttgcgacagacgacaaggactaggcactttcaaggattacgctaagacagatggtttggaatacatctgcccccactgtagcttagcaaactacaagaagaagccaccaccaccaaaagcagctaacggtttttcaaatacagcatctgtaccacgaaatgcttaattttcttgttttttttttcttttcctttggtcccatgtttatgggaagaatcattagagtagataataggctgatggaaagatgggcaaggccttccaggtatgtagtagtattcgaatgtatcatctcgttaatttagtggttattatgaggcttatataacatgtaacaactgataacacagacaagctcctacagtagttggttagatgctggtgtaagcttcttgtttatattaatctcaattgtgtttttagtttcc

SEQ ID NO: 69163 - DNA, 1375 bp, Zea Mays
accgccgtaggttgcctcactgccttaacaatcatgctagaattttatgctgctttgatatgatcttgttctgaagcatctagcgccagatatatcatacaggagcttggttgcacttggtattggttgtataaatgatggtcagcctcccttaccaaggacagaacaaaggtgggttcagaatcaaaacaaaatctgttgggtgcaaatggagttttggaagacaagaagcatatgatggaagggccttcctcatggtcagccgtcaaggctaaattaaagcctgcaactatgaggcccattcctcactctcgaaagcaacaaatgcatccatttatgggttttcctgaaacttcccttcacgaaactagtattgtgaagccaagcttgccagctgcaccaactgtgaagcacaattcagtttcttctgccacaaccacgcacagaaaatcaacatcagggccgtctcatactccctcagtcattcagttaaatcctctgccaatgaagaaacacggatgtgataggttgcctatccaagtgtgctctgaggaggattttttgaaggatgtcatgcagtttttaatccagaggggccacaatcgacttgtacctcacggaggactagctgaatttcctgatgcaatccttaacgccaagcgccttgatctttataacctgtacaaagaggtggtgtctagaggtggattttatgtgggtaatggcataaactggaagggtcaagttttttcaaagatgcgtaaccataccgcaacaaacagaatgactggtgtaggtaacacgttgaaaagacattacgagacatacttgttggaatatgagttggcacatgatgacgtggatggcgaatgctgcttactttgtcacagtagcgcacctggagattgggtgaactgcggtttatgtggtgaatgggctcactttggttgcgacagacgacaaggactaggcactttcaaggattacgctaagacagatggtttggaatacatctgcccccactgtagcttagcaaactacaagaagaagccaccaccaccaaaagcagctaacggtttttcaaatacagcatctgtaccacgaaatgcttaattttcttgttttttttttcttttcctttggtcccatgtttatgggaagaatcattagagtagataataggctgatggaaagatgggcaaggccttccaggtatgtagtagtattcgaatgtatcatctcgttaatttagtggttattatgaggcttatataacatgtaacaactgataacacagacaagctcctacagtagttggttagatgctggtgtaagcttcttgtttatattaatctcaattgtgtttttagtttcc

SEQ ID NO: 69164 - DNA, 2266 bp, Zea Mays
atccattatccatgtagccgccgcgaccgcgagctgcggtacccgatgcacgcatccgaattccgacgcacaacaactctggcaccctgcagtctcgaaccgcgccagcgccaagccggatccccgatcacaacccctacaccacaccacaagtccacaggccacaccgaatcgatctgcaccaacaccaaccgaacacatacatgcacaccaaaagcagtcgcagcatccgatattccgatcccggcaaaaacaattctcccagaaagagattatttcgccccctcaccaatcctgctcccgaaattcctaatcttttaatccgcgtttttcctccgtccgtcccccggcttgcagcagtaatgaagcggaggaggaaaaggagaaaacgaaaaagcgcagggaaaacaacacaccagcacccgcagagagcaggcacacatcaactcatcaagctgagcgatgcgtgtgattgcgagcatgtgagcaggcaggcgggcagggcgaaaatccgaggaggaaaagtccgcgagaatctccggactggcctccccacacatcgtcaaaaatccaatcttgacgcctccctggtcgagccgagactgttccaaagtttctgcctctgtgatgcgtgcgggattgttgccagttggttggttgccgctgctaatgaggcccgcccgcccgatccccgtggtcgccgtctccggttaatcccgcttcagttcttgtaccggttcttggagagagatttttttccgcctctccccccctgtggattgcgccgtgtgtgtttgtctggatcgtgatgggggcgtgggccgattcgccaccaccacaagcacgactcctcttttttattgcctccgcactgggatttgctttcgcgttgttgcagtagctatttccgcgaatcgtcttctagggctccgtgtgttctcgcgcactttaccctctgttttccccattcacccgcaccgaatccacccccttcccggtcgcgtccggccgtcgattgaggccgtgccgccgccgattacgccgcaaaatcgcgtcttgggtttggtgcatgaagaagtggggttgatttcgaggggaggtttttctcctgcttggctgccgtcgggaaggctccggccggccagtcatgtctcaaatccaaagcttctcgaggaacaactgtgcgctcctcgcggtgctgtgtgggaagtatgctgagaaccgcacaccagcagcgaggtctgggctggaggcgaagcggccgcggccggcttacccgttcccggagctcagctcggctgggcgattggaggtccacaccctgttcaatcctacaccagagcagttcctcgaggcgcagcgggtggtgcaacctaacttcttgtacatccagggccagcagctcgaggatgagaaggagattggctcacttgtatggggggacgccgatgtctctgatccgcaggcatttagcactcttatcagcccaccattcccaacaatagtatatctggaagttcctattggtgaaaaacttgctcaagcagttcactcaaaggggatcccatatgtaatatactggagaaattcattctcgtcttatgcagcatctcattttcgccatgcgttgatgtcagcaattcaaagcttgctcatgcatccttccgtctatattgtgtaagaaacaatcatgtgcaaagtgttaagcttggtccgcgtctccttggggatgctccaaaaataaatataagcccacctgagacagaaatggttgatgaagaaggttcatctgaagtgaccccggctataaaaatatatgatgaagaaatcaacatgaaattactcttatgtggagtgccatgcaccttggatccttgtttattgggctctttagaggacggtctgaatgcacttctgaatattgaaattcgtgggagcaaactgcagaatcgaatcagtgcttctccaccacctcttgaagctgcatctctaccacgtgggatggttactatgcgctgtgatatcagtacttgcagttcttcccatgtgtcactcctcgtttctggtagcgcacaaacttgttttgatgaccagcttctagagagccacatcaagaatgaaattattgagaagagccagttagtccgtgctctatcaaatagtgaggacaagttaccatcaagcgagcctttaacttccatgtccacggcttgtggggcttctacctttgaagtttggatgtcccttcctaagtgggcagcacagg

SEQ ID NO: 69165 - DNA, 2251 bp, Zea Mays
attttgcacatccattatccatgtagccgccgcgaccgcgagctgcggtacccgatgcacgcatccgaattccgacgcacaacaactctggcaccctgcagtctcgaaccgcgccagcgccaagccggatccccgatcacaacccctacaccacaccacaagtccacaggccacaccgaatcgatctgcaccaacaccaaccgaacacatacatgcacaccaaaagcagtcgcagcatccgatattccgatcccggcaaaaacaattctcccagaaagagattatttcgccccctcaccaatcctgctcccgaaattcctaatcttttaatccgcgtttttcctccgtccgtcccccggcttgcagcagtaatgaagcggaggaggaaaaggagaaaacgaaaaagcgcagggaaaacaacacaccagcacccgcagagagcaggcacacatcaactcatcaagctgagcgatgcgtgtgattgcgagcatgtgagcaggcaggcgggcagggcgaaaatccgaggaggaaaagtccgcgagaatctccggactggcctccccacacatcgtcaaaaatccaatcttgacgcctccctggtcgagccgagactgttccaaagtttctgcctctgtgatgcgtgcgggattgttgccagttggttggttgccgctgctaatgaggcccgcccgcccgatccccgtggtcgccgtctccggttaatcccgcttcagttcttgtaccggttcttggagagagatttttttccgcctctccccccctgtggattgcgccgtgtgtgtttgtctggatcgtgatgggggcgtgggccgattcgccaccaccacaagcacgactcctcttttttattgcctccgcactgggatttgctttcgcgttgttgcagtagctatttccgcgaatcgtcttctagggctccgtgtgttctcgcgcactttaccctctgttttccccattcacccgcaccgaatccacccccttcccggtcgcgtccggccgtcgattgaggccgtgccgccgccgattacgccgcaaaatcgcgtcttgggtttggtgcatgaagaagtggggttgatttcgaggggaggtttttctcctgcttggctgccgtcgggaaggctccggccggccagtcatgtctcaaatccaaagcttctcgaggaacaactgtgcgctcctcgcggtgctgtgtgggaagtatgctgagaaccgcacaccagcagcgaggtctgggctggaggcgaagcggccgcggccggcttacccgttcccggagctcagctcggctgggcgattggaggtccacaccctgttcaatcctacaccagagcagttcctcgaggcgcagcgggtggtgcaacctaacttcttgtacatccagggccagcagctcgaggatgagaaggagattggctcacttgtatggggggacgccgatgtctctgatccgcaggcatttagcactcttatcagcccaccattcccaacaatagtatatctggaagttcctattggtgaaaaacttgctcaagcagttcactcaaaggggatcccatatgtaatatactggagaaattcattctcgtcttatgcagcatctcattttcgccatgcgttgatgtcagcaattcaaagttcagtgagccatacttgggatgcttttcagcttgctcatgcatccttccgtctatattgtgtaagaaacaatcatgtgcaaagtgttaagcttggtccgcgtctccttggggatgctccaaaaataaatataagcccacctgagacagaaatggttgatgaagaaggttcatctgaagtgaccccggctataaaaatatatgatgaagaaatcaacatgaaattactcttatgtggagtgccatgcaccttggatccttgtttattgggctctttagaggacggtctgaatgcacttctgaatattgaactgcatctctaccacgtgggatggttactatgcgctgtgatatcagtacttgcagttcttcccatgtgtcactcctcgtttctggtagcgcacaaacttgttttgatgaccagcttctagagagccacatcaagaatgaaattattgagaagagccagttagtccgtgctctatcaaatagtgaggacaagttaccatcaagcgagcctttaacttccatgtccacggcttgtggggcttctacctttgaagtttggatgtcccttcctaagtgggcagcacagg

SEQ ID NO: 69166 - DNA, 2306 bp, Zea Mays
attttgcacatccattatccatgtagccgccgcgaccgcgagctgcggtacccgatgcacgcatccgaattccgacgcacaacaactctggcaccctgcagtctcgaaccgcgccagcgccaagccggatccccgatcacaacccctacaccacaccacaagtccacaggccacaccgaatcgatctgcaccaacaccaaccgaacacatacatgcacaccaaaagcagtcgcagcatccgatattccgatcccggcaaaaacaattctcccagaaagagattatttcgccccctcaccaatcctgctcccgaaattcctaatcttttaatccgcgtttttcctccgtccgtcccccggcttgcagcagtaatgaagcggaggaggaaaaggagaaaacgaaaaagcgcagggaaaacaacacaccagcacccgcagagagcaggcacacatcaactcatcaagctgagcgatgcgtgtgattgcgagcatgtgagcaggcaggcgggcagggcgaaaatccgaggaggaaaagtccgcgagaatctccggactggcctccccacacatcgtcaaaaatccaatcttgacgcctccctggtcgagccgagactgttccaaagtttctgcctctgtgatgcgtgcgggattgttgccagttggttggttgccgctgctaatgaggcccgcccgcccgatccccgtggtcgccgtctccggttaatcccgcttcagttcttgtaccggttcttggagagagatttttttccgcctctccccccctgtggattgcgccgtgtgtgtttgtctggatcgtgatgggggcgtgggccgattcgccaccaccacaagcacgactcctcttttttattgcctccgcactgggatttgctttcgcgttgttgcagtagctatttccgcgaatcgtcttctagggctccgtgtgttctcgcgcactttaccctctgttttccccattcacccgcaccgaatccacccccttcccggtcgcgtccggccgtcgattgaggccgtgccgccgccgattacgccgcaaaatcgcgtcttgggtttggtgcatgaagaagtggggttgatttcgaggggaggtttttctcctgcttggctgccgtcgggaaggctccggccggccagtcatgtctcaaatccaaagcttctcgaggaacaactgtgcgctcctcgcggtgctgtgtgggaagtatgctgagaaccgcacaccagcagcgaggtctgggctggaggcgaagcggccgcggccggcttacccgttcccggagctcagctcggctgggcgattggaggtccacaccctgttcaatcctacaccagagcagttcctcgaggcgcagcgggtggtgcaacctaacttcttgtacatccagggccagcagctcgaggatgagaaggagattggctcacttgtatggggggacgccgatgtctctgatccgcaggcatttagcactcttatcagcccaccattcccaacaatagtatatctggaagttcctattggtgaaaaacttgctcaagcagttcactcaaaggggatcccatatgtaatatactggagaaattcattctcgtcttatgcagcatctcattttcgccatgcgttgatgtcagcaattcaaagttcagtgagccatacttgggatgcttttcagcttgctcatgcatccttccgtctatattgtgtaagaaacaatcatgtgcaaagtgttaagcttggtccgcgtctccttggggatgctccaaaaataaatataagcccacctgagacagaaatggttgatgaagaaggttcatctgaagtgaccccggctataaaaatatatgatgaagaaatcaacatgaaattactcttatgtggagtgccatgcaccttggatccttgtttattgggctctttagaggacggtctgaatgcacttctgaatattgaaattcgtgggagcaaactgcagaatcgaatcagtgcttctccaccacctcttgaagctgcatctctaccacgtgggatggttactatgcgctgtgatatcagtacttgcagttcttcccatgtgtcactcctcgtttctggtagcgcacaaacttgttttgatgaccagcttctagagagccacatcaagaatgaaattattgagaagagccagttagtccgtgctctatcaaatagtgaggacaagttaccatcaagcgagcctttaacttccatgtccacggcttgtggggcttctacctttgaagtttggatgtcccttcctaagtgggcagcacagg

SEQ ID NO: 69167 - DNA, 3471 bp, Zea Mays
aaacaaattattttgcacatccattatccatgtagccgccgcgaccgcgagctgcggtacccgatgcacgcatccgaattccgacgcacaacaactctggcaccctgcagtctcgaaccgcgccagcgccaagccggatccccgatcacaacccctacaccacaccacaagtccacaggccacaccgaatcgatctgcaccaacaccaaccgaacacatacatgcacaccaaaagcagtcgcagcatccgatattccgatcccggcaaaaacaattctcccagaaagagattatttcgccccctcaccaatcctgctcccgaaattcctaatcttttaatccgcgtttttcctccgtccgtcccccggcttgcagcagtaatgaagcggaggaggaaaaggagaaaacgaaaaagcgcagggaaaacaacacaccagcacccgcagagagcaggcacacatcaactcatcaagctgagcgatgcgtgtgattgcgagcatgtgagcaggcaggcgggcagggcgaaaatccgaggaggaaaagtccgcgagaatctccggactggcctccccacacatcgtcaaaaatccaatcttgacgcctccctggtcgagccgagactgttccaaagtttctgcctctgtgatgcgtgcgggattgttgccagttggttggttgccgctgctaatgaggcccgcccgcccgatccccgtggtcgccgtctccggttaatcccgcttcagttcttgtaccggttcttggagagagatttttttccgcctctccccccctgtggattgcgccgtgtgtgtttgtctggatcgtgatgggggcgtgggccgattcgccaccaccacaagcacgactcctcttttttattgcctccgcactgggatttgctttcgcgttgttgcagtagctatttccgcgaatcgtcttctagggctccgtgtgttctcgcgcactttaccctctgttttccccattcacccgcaccgaatccacccccttcccggtcgcgtccggccgtcgattgaggccgtgccgccgccgattacgccgcaaaatcgcgtcttgggtttggtgcatgaagaagtggggttgatttcgaggggaggtttttctcctgcttggctgccgtcgggaaggctccggccggccagtcatgtctcaaatccaaagcttctcgaggaacaactgtgcgctcctcgcggtgctgtgtgggaagtatgctgagaaccgcacaccagcagcgaggtctgggctggaggcgaagcggccgcggccggcttacccgttcccggagctcagctcggctgggcgattggaggtccacaccctgttcaatcctacaccagagcagttcctcgaggcgcagcgggtggtgcaacctaacttcttgtacatccagggccagcagctcgaggatgagaaggagattggctcacttgtatggggggacgccgatgtctctgatccgcaggcatttagcactcttatcagcccaccattcccaacaatagtatatctggaagttcctattggtgaaaaacttgctcaagcagttcactcaaaggggatcccatatgtaatatactggagaaattcattctcgtcttatgcagcatctcattttcgccatgcgttgatgtcagcaattcaaagttcagtgagccatacttgggatgcttttcagcttgctcatgcatccttccgtctatattgtgtaagaaacaatcatgtgcaaagtgttaagcttggtccgcgtctccttggggatgctccaaaaataaatataagcccacctgagacagaaatggttgatgaagaaggttcatctgaagtgaccccggctataaaaatatatgatgaagaaatcaacatgaaattactcttatgtggagtgccatgcaccttggatccttgtttattgggctctttagaggacggtctgaatgcacttctgaatattgaagtatgaatgaaagattctagctatgcagtacctttctatctgaactactttttatataataaactcgttgttttgaaaatcattggtcactagaaatgattaaaaacattttgttttttagtgtatgtaatagtaattcagacatatggcaatgttacatctatgctctgaatcatggatgttctctgtgaggatcatagaacaaaattgaactagatgtgcagcacacttgcatatagagaaatactagatcagcagcgatggtgatatccttaaaatcctaggatatcatcaacgatatccgttgtttcattactttgtctatttctattaatcacgccacatttctagatagcttattatcgtggggcgataattgtatgcctcccatggaggctggtgccctcgacatccaggtcgttgcctgcgatcgctttgatttgttttaatggaagtcttcatgcttgtatggtacatgaaagcaagaaattatgctgctatagtgtagacactattagctactttattctgcatcagaagtattgacatttggtgagaagtttcgtactgaatgactggaacttcagttcccgttagtctcagtctgtcctgggacctttttgcttgagcttctgggcagcttctcagcgtgaaaagccagaagctctaacaaacaactagttttttgatttagcgtccggaaagccaaaatctcaaaaatgctgagttcatatgtgaagctgaaaagactttttttggggctttcggtagcttcctgagtttaggaagctaataacatcataaaaaatctatcattggcttcttaggaccaaaaccccaataccaacttttcagagaagctccaaaagctgcagctcaaacaaataggcccttaggttgttcgggccgacaaaaatggatagtccagacatccacgccccctcccttcccttgtgtgcacacaaaaactgctctctagcatggggtgtgattaaacctgtgagctggctatccttttgtctcgtttaaagaatgctgacacataaagcaacggtgcaaatgtttaatgattgattatttaagttattacaaactttatgaccttctattttcctatactggaattgctataaaagagctcatgtttttttgacagattcgtgggagcaaactgcagaatcgaatcagtgcttctccaccacctcttgaagctgcatctctaccacgtgggatggttactatgcgctgtgatatcagtacttgcagttcttcccatgtgtcactcctcgtttctggtagcgcacaaacttgttttgatgaccagcttctagagagccacatcaagaatgaaattattgagaagagccagttagtccgtgctctatcaaatagtgaggacaagttaccatcaagcgagcctttaacttccatgtccacggcttgtggggcttctacctttgaagtttggatgtcccttcctaagtgggcagcacagg

SEQ ID NO: 69168 - DNA, 1670 bp, Zea Mays
atccattatccatgtagccgccgcgaccgcgagctgcggtacccgatgcacgcatccgaattccgacgcacaacaactctggcaccctgcagtctcgaaccgcgccagcgccaagccggatccccgatcacaacccctacaccacaccacaagtccacaggccacaccgaatcgatctgcaccaacaccaaccgaacacatacatgcacaccaaaagcagtcgcagcatccgatattccgatcccggcaaaaacaattctcccagaaagagattatttcgccccctcaccaatcctgctcccgaaattcctaatcttttaatccgcgtttttcctccgtccgtcccccggcttgcagcagtaatgaagcggaggaggaaaaggagaaaacgaaaaagcgcagggaaaacaacacaccagcacccgcagagagcaggcacacatcaactcatcaagctgagcgatgcgtgtgattgcgagcatgtgagcaggcaggcgggcagggcgaaaatccgaggaggaaaagtccgcgagaatctccggactggcctccccacacatcgtcaaaaatccaatcttgacgcctccctggtcgagccgagactgttccaaagtttctgcctctgtgatgcgtgcgggattgttgccagttggttggttgccgctgctaatgaggcccgcccgcccgatccccgtggtcgccgtctccggttaatcccgcttcagttcttgtaccggttcttggagagagatttttttccgcctctccccccctgtggattgcgccgtgtgtgtttgtctggatcgtgatgggggcgtgggccgattcgccaccaccacaagcacgactcctcttttttattgcctccgcactgggatttgctttcgcgttgttgcagtagctatttccgcgaatcgtcttctagggctccgtgtgttctcgcgcactttaccctctgttttccccattcacccgcaccgaatccacccccttcccggtcgcgtccggccgtcgattgaggccgtgccgccgccgattacgccgcaaaatcgcgtcttgggtttggtgcatgaagaagtggggttgatttcgaggggaggtttttctcctgcttggctgccgtcgggaaggctccggccggccagtcatgtctcaaatccaaagcttctcgaggaacaactgtgcgctcctcgcggtgctgtgtgggaagtatgctgagaaccgcacaccagcagcgaggtctgggctggaggcgaagcggccgcggccggcttacccgttcccggagctcagctcggctgggcgattggaggtccacaccctgttcaatcctacaccagagcagttcctcgaggcgcagcgggtggtgcaacctaacttcttgtacatccagggccagcagctcgaggatgagaaggagattggctcacttgtatggggggacgccgatgtctctgatccgcaggcatttagcactcttatcagcccaccattcccaacaatagtatatctggaagttcctattggtgaaaaacttgctcaagcagttcactcaaaggggatcccatatgtaatatactggagaaattcattctcgtcttatgcagcatctcattttcgccatgcgttgatgtcagcaattcaaaggatccttgtttattgggctcttt

SEQ ID NO: 69169 - DNA, 1136 bp, Zea Mays
tctccattcacggccggcggcagacgtgtgtagcctgtaggggataacaagatatagcaagtatatatggatgccttacattttttttttcttgcggttctcaataagcaccagctgctgccagcatgagcagctcgtcgaggctccagatatccccggcgctcgccccatctttatcaaggccaaagccaggcatggccgcgtcatgtgcgaggctgggcggcgcgccgccgtagctgctcctcattctcttcggcgctccgccttgcgtgtaagacgccgccggcagcacggcgttatcgggagcgaagaccgaggaggtgtagtccgaggtcatggcggcggccgccgcgtcgtcgtcccacgaccacgaccccaccaagtcggaggagccggagccgtaggagttgctgcgctggtcgtcggagacggagagcatagtgttggtcgcggacgacctcctcttattaccgggcaccaccgccaccgcaggcgcagggacgaggaagctgccactgccactgccaccctcggcggcggctggcttcgctgcaggaaccttcttcttattgtcaccgaacgcaaacatcgcaaacagatcatcgttgttgttgttgtcgtcgttcttcaggttgttaaagatctcatcggtcgttggcctgtgacgagtgcctgtcgcgtcatcgggaaaattcaccttcgctttcttgccgcggatcttgcgagcttcggcgtcgtatgccctagctgcctcctcggcggtgttgtaggttccgagccagacgcggacgcccttgttagggtccctgatctcagctgcccatttgccccaaggccgctgcctgattcccctgtactggttcttccggccgcgcttttttactgctctatctccttggacatcctttggaggaggagtcatcacgccatctataataaaaagactgtcgtctatcagtcagtccgtctcaacaaaacgtatctagcatgaattgtttgtttgtttgtaatcaacgaatagctactctacttgtttgtagggtagtttgttcgggttgctgaattggagaaaaagtagcaaacaacaaagaggctgaagcataaataatgtcattctctcaggaaaaaaagaagaa

SEQ ID NO: 69170 - DNA, 273 bp, Zea Mays
taattcagctgtctggtgatcgggatggctggcatggaagtgaggcggcgaaccacccgacgacgaccgtgctggagcaagaaccagcggtgcgtcgtgcgtaaatcctagactaggtgttgtggtgtggtgttgtgttgcacgctatttataatttttttatcgtattgttttttttttggagaggagggattattcctttgtgcgatgtggctggaatccaacaaatacgtttttgttgtaaggtcaagaattcaaattgatctgtcagtc

SEQ ID NO: 69171 - DNA, 1438 bp, Zea Mays
gctattaaagggggggcaaagggccatttgcgagaggaggaaaagcacgcgagagcttgtcggagggctctctgtctctgtgataaaccgatacgcagaggaagctgcggagaggtgtccctgctctgctggtgagctgcggccagcgggtgaagtgaagtggaccggacgtggacgaaggagagagagagagagagagaagaaagggcgccgcgggggccatggctggacacgcgccggcgagggacaagaccaccaccggcttcgccgctacgtgcagcctgctgagccagtttctcaaggagaagaagggcggcctgcagggcctcggcggcctcgccatggcgccggcgccggcagctggggctttccggccgccgaccaccatgaacttgctgtccgcgctcgacgcggccaaggccaccgtcggggagccagaaggccatggccaacgcaccggcgggaatccaagggaggcagctggggaggaggcgcagcagctgaccatcttctacggcgggaaagtggtcgtcttcgacaggttcccctccgccaaggtcaaggacctgctgcagatcgtgagcccgccgggggccgacgccgtggtggacggtgccggtgccggtgccgctgtccctacgcagaacctgcctaggccttcacacgacagtctctctgccgatctgccgatcgcgaggcggaactcgctgcacaggttcctcgagaagagaaaggacaggataaccgcaaaggcgccgtaccaagtcaacagttccgtcggcgctgaggcgtccaaggcggagaaaccctggctgggtctgggccaggaacaggaaggaagcgacggtcgtcaagcaggagaggagatgtgatcgatcagtagagactagattcgttcgtgcgcgcgtcgtcgtagcttcaggttaagggaaagaataatccaaccgtcggttaattgctcggcttaattacactgctctactacgtagtactggcactgctaccaccaccaccaccaccagagtgaccaagttaagctagggattgttacataggccggccggtcggccgttcgttcgcgagattgtttcgctgctggagatgcgcatgcacgctcgcagcagcttcgctggtccgcgtggccgcgtcttgtgttcgcgcaacgaacggtgcacgttccggtacgttttcatttgtctccgacctgtcctgtgtgtgtgcgtgtgtttttgcactggatattccccctcccctctcgtggtcgtagggagggtttgtatgttcagtggaaagatgtttggtatggtctactccattctatttcatgattcatgaatatgtatgtatgtatgtatgcgtgtgatgtactactgtggtatgctgtataaatttataaacacgcgctttattatattctgagctccagaggtgttttggc

SEQ ID NO: 69172 - DNA, 1794 bp, Zea Mays
ctcgttccgccggtccgtcacgtgtttcatgcgacgcgactcgcctcgcctccgccccggccccggcccccgaccaggctggccccgtcccacttgccggttcattggcacgcgctattaaagggggggcaaagggccatttgcgagaggaggaaaagcacgcgagagcttgtcggagggctctctgtctctgtgataaaccgatacgcagaggaagctgcggagaggtgtccctgctctgctggtgagctgcggccagcgggtgaagtgaagtggaccggacgtggacgaaggagagagagagagagagagaagaaagggcgccgcgggggccatggctggacacgcgccggcgagggacaagaccaccaccggcttcgccgctacgtgcagcctgctgagccagtttctcaaggagaagaagggcggcctgcagggcctcggcggcctcgccatggcgccggcgccggcagctggagcaggggctttccggccgccgaccaccatgaacttgctgtccgcgctcgacgcggccaaggccaccgtcggggagccagaaggccatggccaacgcaccggcgggaatccaaggtaaatcacaagcgaaattaaacccacgaccgtccgtgtgcaatactcctggtaaattgatgaccaggaaatcaagaaaaataaagcgtgtgtttgcgcatgtgttcaattctccccaacaagaaagaacaacacacactcagctcaaaagaaagaacgaacgaacgaacgtgtgatatatatatatacacacatatatatcattatgggcaaataacagagacagtgttcctgcagggaggcagctggggaggaggcgcagcagctgaccatcttctacggcgggaaagtggtcgtcttcgacaggttcccctccgccaaggtcaaggacctgctgcagatcgtgagcccgccgggggccgacgccgtggtggacggtgccggtgccggtgccgctgtccctacgcagaacctgcctaggccttcacacgacagtctctctgccgatctgccgatcgcgaggcggaactcgctgcacaggttcctcgagaagagaaaggacaggataaccgcaaaggcgccgtaccaagtcaacagttccgtcggcgctgaggcgtccaaggcggagaaaccctggctgggtctgggccaggaacaggaaggaagcgacggtcgtcaagcaggagaggagatgtgatcgatcagtagagactagattcgttcgtgcgcgcgtcgtcgtagcttcaggttaagggaaagaataatccaaccgtcggttaattgctcggcttaattacactgctctactacgtagtactggcactgctaccaccaccaccaccaccagagtgaccaagttaagctagggattgttacataggccggccggtcggccgttcgttcgcgagattgtttcgctgctggagatgcgcatgcacgctcgcagcagcttcgctggtccgcgtggccgcgtcttgtgttcgcgcaacgaacggtgcacgttccggtacgttttcatttgtctccgacctgtcctgtgtgtgtgcgtgtgtttttgcactggatattccccctcccctctcgtggtcgtagggagggtttgtatgttcagtggaaagatgtttggtatggtctactccattctatttcatgattcatgaatatgtatgtatgtatgtatgcgtgtgatgtactactgtggtatgctgtataaatttataaacacgcgctttattatattctgagctccagaggtgttttggc

SEQ ID NO: 69173 - DNA, 1783 bp, Zea Mays
gctactgttgcgtcggtggcggctgggaggcgagcgacggagctatatgtgttcatctgtttgacaaggttacttttagacgaccagaagatactaacgattctgtgaaggagactagttcagctaaggttcacatacttgtttttgaggtagaagaccgtgaaatgattggtggatctgcctatggaggtcagaaggctatttgttgtagttcagatcttgcaaaattaggagcttgcaaagaaggttctgtcatctatcgcccatcccaggtaaatcctggttggccaaagttgtttgttgcatcttttgagggaagtgatctgatcgcaacgctgccgtcaaggaccattcaaattaccaaaactgggatgtacaatatgtactttatacattgtgatccttcacttgctagtttggaaatcgaggggaaaaccatatggaaaaatcctactgggtatcttccaggtcggatggcgcctcttaagaacttttttggactgatgtcttttgcatttgttgtgcttgggatctactggttttatcagtacatgaaatcttggaaagaggttcttccacttcagaactgtattactcttgtgattacactaggcatgcttgagatggcattgtggtattttgagtatgctgagttcaatgagactggagttcggccaaaaggtatcacattttgggctgtcacgtttggaactgtgaagaggacggctgctgaagttattgtcctcattgtctcaatgggatatggtgttgtcgcacctaccttgggtggcttgacatcgaaagtggtcatgcttggaggaacgttctttctagcaacagaaattcttgagttggtagaaaatcttggtgctgttaatgatctatctggaaaagctcgtctgttcttggtctatccagtggccattttagatgccgcatttgttgtttggatatttatttctttagctaagaccatcggtaaacttcaggcaagaaggttgatggccaaacttgacatttataggaaatttgcaactgcattgattgtatctgttctggtgtccgttgggtggattggctatgagatttactccaaatcaacagatgtatttaacgaacgatggcagcatgcctggatcattcctgccttctggcatgtcttgtctttcttacttctttgtgtcatttgctacctgtgggcaccttcacagaactcaatgagattttcctacgacgcaagcgaattctttgatcgaaaggacaatctgtcattaattaggccagcaacgagtgcttccaagaacggctggagtttatcttctgcgccagaggccaaagcaacaaaggacgtgaatacagttgcagattttgaaggcgatgatgaggaaaacaaaagggagtagaatgtactgtcgatttggttaggggagggtatattctgagatcatttgaagtgggtgctagagcagttttggtacttaggagaggactggccatgctaattactaccagtggagcacgccacttgtggctgtttctttctttggttcattaccaccacagttcttcgcatgggtggctagttatgtacttatgttgtcatcgtcatagtctgaatgatggttatgataggggggaaaatagtctggtgtataatatttatattattggcaccatattgcttctggatcgtgggaactctacatatgctgcgaatgttagagaataaattgttttgctggacctttgctagaattccacttgattgtctaatgtttcgata

SEQ ID NO: 69174 - DNA, 2123 bp, Zea Mays
caaagagaactggtctgggccgaccaaaacactttccttccctccccgtttcctaccgacggccgagggggccacatccttcggcttctgtcccggttttgccccccggcccctgccgagctcagcaggggaagcgcggcgctctactccactccgcttcacgccagatccaacctcaccagctcgcccccatggccgtccacctcctccttgccgttgccgtcgctctcctcctctgccccggggatgcgtccgtgcacgactaccgcgggctcagctttgccaacaagggcaacgccttcattctccacgccggcagcgagggcctctacgcggcctcccacgccaacaccaccgccgaggacgacgaggacaccgccgcggtggccgacgccttcatccggtttgacaaggttacttttagacgaccagaagatactaacgattctgtgaaggagactagttcagctaaggttcacatacttgtttttgaggtagaagaccgtgaaatgattggtggatctgcctatggaggtcagaaggctatttgttgtagttcagatcttgcaaaattaggagcttgcaaagaaggttctgtcatctatcgcccatcccaggtaaatcctggttggccaaagttgtttgttgcatcttttgagggaagtgatctgatcgcaacgctgccgtcaaggaccattcaaattaccaaaactgggatgtacaatatgtactttatacattgtgatccttcacttgctagtttggaaatcgaggggaaaaccatatggaaaaatcctactgggtatcttccaggtcggatggcgcctcttaagaacttttttggactgatgtcttttgcatttgttgtgcttgggatctactggttttatcagtacatgaaatcttggaaagaggttcttccacttcagaactgtattactcttgtgattacactaggcatgcttgagatggcattgtggtattttgagtatgctgagttcaatgagactggagttcggccaaaaggtatcacattttgggctgtcacgtttggaactgtgaagaggacggctgctgaagttattgtcctcattgtctcaatgggatatggtgttgtcgcacctaccttgggtggcttgacatcgaaagtggtcatgcttggaggaacgttctttctagcaacagaaattcttgagttggtagaaaatcttggtgctgttaatgatctatctggaaaagctcgtctgttcttggtctatccagtggccattttagatgccgcatttgttgtttggatatttatttctttagctaagaccatcggtaaacttcagaaggttgatggccaaacttgacatttataggaaatttgcaactgcattgattgtatctgttctggtgtccgttgggtggattggctatgagatttactccaaatcaacagatgtatttaacgaacgatggcagcatgcctggatcattcctgccttctggcatgtcttgtctttcttacttctttgtgtcatttgctacctgtgggcaccttcacagaactcaatgagattttcctacgacgcaagcgaattctttgatcgaaaggacaatctgtcattaattaggccagcaacgagtgcttccaagaacggctggagtttatcttctgcgccagaggccaaagcaacaaaggacgtgaatacagttgcagattttgaaggcgatgatgaggaaaacaaaagggagtagaatgtactgtcgatttggttaggggagggtatattctgagatcatttgaagtgggtgctagagcagttttggtacttaggagaggactggccatgctaattactaccagtggagcacgccacttgtggctgtttctttctttggttcattaccaccacagttcttcgcatgggtggctagttatgtacttatgttgtcatcgtcatagtctgaatgatggttatgataggggggaaaatagtctggtgtataatatttatattattggcaccatattgcttctggatcgtgggaactctacatatgctgcgaatgttagagaataaattgttttgctggacctttgctagaattccacttgattgtctaatgtttcgata

SEQ ID NO: 69175 - DNA, 1154 bp, Zea Mays
gtaggctaggctcgcgctccctcatcccactcccacgcacgtgtactactttacttactggtggggggccggtctccagttccgcaggatatgaagattttcagttgggtagccaacaagatcggcgggaagcaagaaccgaagcgatctgccgcgcattatcgtggcaacgtatcagaatgtcgcaacgacgagttcagtgattggccccaatcattgctggcaatcgggacgtttgggaacaggcagctggaggaaggggtggtggagacgtcttctgggaacgtccaggccgcgcaagaccccgccaagttcacagaggaagaagaggcggacagcatacggagagaactcgaggtgctgctgctgcaaggcaataataataatggcggccaagcagaggcgcagggctctcgtggagacgaacgacgacaggtagcttggaaagagcatgacggtgaatgtagcaaggagaagcagccgacgagcggggagatggtcacgagcaaggcgagagcgagagaaatggtagcagggaagaaaaggagcacgctgaagccaaggtcggtggcctcgctccttagactgctcgcgtgcaagggcggctttgccaccccggttctggaaccgaggagccctttcccccagtcgagaatggagaagctgctcaaggcgatactggagaagaagatacacccgcagaaccccagcacggctgcagcgaggcggcaccagctggactggaagctagacgagaaagagatcgacgagtgccttgacgacgcgctgcgtgacctcgacgacgacggcgccaagtgggtcaaaactgactcggactgtcccgaagctctctcttggcggcctggtgcaaatatatatatgattattagattatatatgtgataaatagaaggaattaattatgggggtattgtaagcatcatgaggctatcatgtaccatctgtaagtttgggtttatgatgagtcggaacaacagatcctattccatgcctgcttctctttggattggctgtgagattgtaaagaaggcaccgtccggtttttctttttcttttcaagtgccgttgggcgttgcctgtttctcaacattccctgttcctgaattcctgatcctccttgtctttcagctatc

SEQ ID NO: 69176 - DNA, 252 bp, Zea Mays
ctggcggtatgcaccagctcgttgctgaatagcgtggttgctggctagatactgtactaccgtatatcgtgtccgtactgttgctgttatctgcatcatgtgctgcattttgctcttgtgtagtatactactattatgccacacgtatatcatgtctgtattgttcgtgtagagtctacaggtatattgtatgtcatacatagactatgcatgcatatatggtttgtctgaggaaattatggaaaagctaga

SEQ ID NO: 69177 - DNA, 2803 bp, Zea Mays
tctctctcttcacgcacacgcagcagcagacgggacgcaacccaagtagtacgcaagccgaacagattttccccatttccctgctctcctcgccctccccacgaaattccctgcttgatcacgccgatttcagctgtttgcaacacttcctcttgttcgatttttattaactcgtcgactccacctcaccgaggtcaaatctttggcatcggattctgttctgtgctgccttttggtttcggcgccgaattcagttccgattccgaacagttagcagctttaagcggctttcagttcgagcgcgtcggaggcatccctgattccggcgatgtcgttgcccgcgatttccatgtacaccagtccgccgggcgcggtctactcttcggagttcgacccagcctcccgtggctcgtcgccttgcaccaccgctgcgcccccgccgccggccgcctcgtaccgcttgccctccggcggcggcggcctgtcttgcctcttctcctcgccggcagctgcggccgcgccgccccgcgccccggctcacgacgacctcggtgcgctgtggcacaacagatccgacgacctgagcgtccccgccgacgggggcgggtactcctactcgcactcccactcgtcttcgcagctaaagcggagggacctgcatcaccaccaccacagccccgtgtcggtgttccaggggccgtccacctcttcaccatcccggagcccaccggcttcttggctcgccgcccgcgaccgcgaccgcctcttcgctggcttcgtgcgcaacgctctcggttcctgcgttgactacgcgccgcccaccagccctcgcccggaggtcggcgccagcgagctcgcgttcgagctcgacgagaacctcgcggaggctagccctgcctgcgagccatacgcccaagagctgctcgcgagtgcccaggatcgccaccgcatcttccacgaggagctggtcgtgaaggccttcttggaggccgagaaggctcaccgtggccagacgcgcgcgagtggtgacccctacttgcaacattgtgtggagactgctgtgctacttgccaaggtcggcgcaaatgcaacggttgtctctgctgggcttctgcatgacaccattgatgattcattcattgactatgaccacatcttccatatgtttggtgctggggttgccgatctcgtcgaaggggtatccaagttgagccacctcagcaaacttgctcgtgacaacaacacggcaagcaggacagttgaagcagatcgcttgcatacgatgctcctcgcaatggcggatgcacgcgctgttctaataaagcttgcggatcggctgcataacatggagaccttaaaagctttgccttgtgccaaacaagaaagattcgccaaggaaacaatggagattttcgtgcctctagctaaccggctaggggttgctagctggaaagaccagctggagaatctctgtttcaagtatctgaatccggaagagcacgaggagttgtcgtccaaacttagggaatccttcgacgaagaactgatcacatctgccgtggataaactggataaaggcctgagggatgctggtgtctcgtaccacagtctttctgggaggcacaagagcctatacagcatccattgcaagatgctaaagaagaacttgacgatggaagagatccacgatatacacgggctgcgtcttttggttgagagcgaagaagattgctacgaagccctttgcgtcgtccacagactgtggcctcgagtcaccggtcgattcaaggattacatatcacgtccgaaactaaatgggtatcggtcgctgcacactgtcgtcatgagcgaaggcgtccacccgttcgaggtccagatccgcacgagggagatgcatctgcaggccgagtacgggttcgcggcgcactggaggtacaaggagggcacctgcaggcactcgttcgtgctccggatggtggagtgggcaaggtgggtgctcacatggcagtgcgaggcgatggacagagaacggactgcctcccttggcagtgatgacggtactgtgagcgtgaggccaccaccagcatgcccgttcccccagcatgcagaggactgcccatactcgtacacccgccaatgcaaccatgatggaccgctgttcgtcatcctcttggagcatggcaagatgtctgtccaagaattcccggcgaacttgacggtgatggatctcatggaccgcgtgggcgccaacagctcgagatggagcccctacagcattccgatgaaggaggacctgcggccgagggtgaacggcgagcccatatgcgacccagaccggaggctcaacatgggggacgtggtggagctgacgccggccctgcctcgaaagtccctcagcgggtaccgggaagagatccagcgcatgtacgatcgcggcggcttcgcgctctcagcccggggcggcggcggcggcggcggcggcgccagacgctgctgagagacagtagcaagacgacgatgcgtagccctttttttttctagtaccattgtaccattcaattcgttgtaaatacgtagtatagcaggtaggtaggccttgcagccggggtgggtgggttctgaaatctgttgcaccctgtcctgaaccccatgcagtgtgtaaaaagtagaacgctgtgtatgtaagctgttcaagttcgtctcagcttctatctcaggccctgtttgaattacaaggactaattattagccactaaagtttagttcattttagtttagttcatttgtcgccaaccaggccgac

SEQ ID NO: 69178 - DNA, 2808 bp, Zea Mays
cagattctctctcttcacgcacacgcagcagcagacgggacgcaacccaagtagtacgcaagccgaacagattttccccatttccctgctctcctcgccctccccacgaaattccctgcttgatcacgccgatttcagctgtttgcaacacttcctcttgttcgatttttattaactcgtcgactccacctcaccgaggtcaaatctttggcatcggattctgttctgtgctgccttttggtttcggcgccgaattcagttccgattccgaacagttagcagctttaagcggctttcagttcgagcgcgtcggaggcatccctgattccggcgatgtcgttgcccgcgatttccatgtacaccagtccgccgggcgcggtctactcttcggagttcgacccagcctcccgtggctcgtcgccttgcaccaccgctgcgcccccgccgccggccgcctcgtaccgcttgccctccggcggcggcggcctgtcttgcctcttctcctcgccggcagctgcggccgcgccgccccgcgccccggctcacgacgacctcggtgcgctgtggcacaacagatccgacgacctgagcgtccccgccgacgggggcgggtactcctactcgcactcccactcgtcttcgcagctaaagcggagggacctgcatcaccaccaccacagccccgtgtcggtgttccaggggccgtccacctcttcaccatcccggagcccaccggcttcttggctcgccgcccgcgaccgcgaccgcctcttcgctggcttcgtgcgcaacgctctcggttcctgcgttgactacgcgccgcccaccagccctcgcccggaggtcggcgccagcgagctcgcgttcgagctcgacgagaacctcgcggaggctagccctgcctgcgagccatacgcccaagagctgctcgcgagtgcccaggatcgccaccgcatcttccacgaggagctggtcgtgaaggccttcttggaggccgagaaggctcaccgtggccagacgcgcgcgagtggtgacccctacttgcaacattgtgtggagactgctgtgctacttgccaaggtcggcgcaaatgcaacggttgtctctgctgggcttctgcatgacaccattgatgattcattcattgactatgaccacatcttccatatgtttggtgctggggttgccgatctcgtcgaaggggtatccaagttgagccacctcagcaaacttgctcgtgacaacaacacggcaagcaggacagttgaagcagatcgcttgcatacgatgctcctcgcaatggcggatgcacgcgctgttctaataaagcttgcggatcggctgcataacatggagaccttaaaagctttgccttgtgccaaacaagaaagattcgccaaggaaacaatggagattttcgtgcctctagctaaccggctaggggttgctagctggaaagaccagctggagaatctctgtttcaagtatctgaatccggaagagcacgaggagttgtcgtccaaacttagggaatccttcgacgaagaactgatcacatctgccgtggataaactggataaaggcctgagggatgctggtgtctcgtaccacagtctttctgggaggcacaagagcctatacagcatccattgcaagatgctaaagaagaacttgacgatggaagagatccacgatatacacgggctgcgtcttttggttgagagcgaagaagattgctacgaagccctttgcgtcgtccacagactgtggcctcgagtcaccggtcgattcaaggattacatatcacgtccgaaactaaatgggtatcggtcgctgcacactgtcgtcatgagcgaaggcgtccacccgttcgaggtccagatccgcacgagggagatgcatctgcaggccgagtacgggttcgcggcgcactggaggtacaaggagggcacctgcaggcactcgttcgtgctccggatggtggagtgggcaaggtgggtgctcacatggcagtgcgaggcgatggacagagaacggactgcctcccttggcagtgatgacggtactgtgagcgtgaggccaccaccagcatgcccgttcccccagcatgcagaggactgcccatactcgtacacccgccaatgcaaccatgatggaccgctgttcgtcatcctcttggagcatggcaagatgtctgtccaagaattcccggcgaacttgacggtgatggatctcatggaccgcgtgggcgccaacagctcgagatggagcccctacagcattccgatgaaggaggacctgcggccgagggtgaacggcgagcccatatgcgacccagaccggaggctcaacatgggggacgtggtggagctgacgccggccctgcctcgaaagtccctcagcgggtaccgggaagagatccagcgcatgtacgatcgcggcggcttcgcgctctcagcccggggcggcggcggcggcggcggcggcgccagacgctgctgagagacagtagcaagacgacgatgcgtagccctttttttttctagtaccattgtaccattcaattcgttgtaaatacgtagtatagcaggtaggtaggccttgcagccggggtgggtgggttctgaaatctgttgcaccctgtcctgaaccccatgcagtgtgtaaaaagtagaacgctgtgtatgtaagctgttcaagttcgtctcagcttctatctcaggccctgtttgaattacaaggactaattattagccactaaagtttagttcattttagtttagttcatttgtcgccaaccaggccgac

SEQ ID NO: 69179 - DNA, 917 bp, Zea Mays
ctagccttcaccaaccctgccccctcgtccctcgacgtagccgacgccgacgccggcgccggcgcctctccgaaccgacgccatgccccccgtcaaatggttgatgcactggcatccgagtcccggggcgacgctcaacagccagatcctggcggaggcgtgtggctgcgccgagtccctaggcggctccaaggacgggcggtggaagacctccatcttcttctaccgcgccatgacccgggacggcgcgggaggccccgcggtgcagcagcaccccgacttgcctagggagctcctcggcgtcgcgctccacgagcgcccgggtctctacttctccatcgtccgcgcccagcgcctcgttctccaggccgatgcggcgttcccccaggtcatggagaagctccagtcatacagaatccgcgtcgccctcaacttcgaggggtttcagtatcaactgggtgatttctgcctgaggataggaaaatgtgttcccaataattctgaagcactgagaggaatcatgatggaggtagagtattatcccctaacttccattgaaaaatccaaggcagtcatggaggacttctttgacatatggcaggaaacagttgcgaagaagtcattacctggtcaattcattcatgtagactcaaacttttcagaatatggtctttcagatcaatattcttttcaacatactgcagttcaatatgcaacttgcttgcagcagctcatggctgcagtaacagtaaggggttagctctagagagattctcaaaaccactctataacgtcgtaggttgattgtggcagcattcacaatgcctggatatatgttgtgtaattgacatacaatttacaaatgggttcccttcctcatgttcttttaagatgcccactacaggtaattggcaaat

SEQ ID NO: 69180 - DNA, 845 bp, Zea Mays
ctagccttcaccaaccctgccccctcgtccctcgacgtagccgacgccgacgccggcgccggcgcctctccgaaccgacgccatgccccccgtcaaatggttgatgcactggcatccgagtcccggggcgacgctcaacagccagatcctggcggaggcgtgtggctgcgccgagtccctaggcggctccaaggacgggcggtggaagacctccatcttcttctaccgcgccatgacccgggacggcgcgggaggccccgcggtgcagcagcaccccgacttgcctagggagctcctcggcgtcgcgctccacgagcgcccgggtctctacttctccatcgtccgcgcccagcgcctcgttctccaggccgatgcggcgttcccccaggtcatggagaagctccagtcatacagaatccgcgtcgccctcaacttcgaggggtttcagtatcaactgggtgatttctgcctgaggataggaaaatgtgttcccaataattctgaagcactgagaggaatcatgatggaggaaacagttgcgaagaagtcattacctggtcaattcattcatgtagactcaaacttttcagaatatggtctttcagatcaatattcttttcaacatactgcagttcaatatgcaacttgcttgcagcagctcatggctgcagtaacagtaaggggttagctctagagagattctcaaaaccactctataacgtcgtaggttgattgtggcagcattcacaatgcctggatatatgttgtgtaattgacatacaatttacaaatgggttcccttcctcatgttcttttaagatgcccactacaggtaattggcaaat

SEQ ID NO: 69181 - DNA, 1961 bp, Zea Mays
gatgcgagctaagcgcgcacctcgcctacacaaacatctccttgtttatttagattttgccttgcctttccttgcttccgtctggctgcttcgaatgtgagctaagcacacatgtctctcgtacgcgatctgcacgtaggccagatgtttgtgtaaatgcctcttgggcactgccgcactaggagtggcgatgcatgtacatttgactttgtacatatgtactcaattgtttatttcatgacagatcactttctaaagcgctgatgtattagcgttccatacattcagggtaaaattttattcctgaagttttgttgtattgtgttgacagcgaaaatggatggagatatggttcctatttgatttcacctgggaggacattttgattttgatggatactccgtgatttatgttggcagtgacggtcgtgttgaattattgcacatagagaagaacaagatttcactgccagaattgagaggctacttgtgtgatcatgtcactttgacagaggaagatagtgttgatttctattggttattttctggaggtgatgtgaataatgcattgcaaaagttgaatgagaataaaacgtgcatttatatggctaattgcattccagagggtggtgtaactgaaatttttgtgcagacaaacaacatttcaggtgataatgtaaacacggatgcgggagaaagtgatagtgaatttgttgatgaagaggcatatgctggagaagatgagagtgaatttgaagatcacaactatattccaagggatgaagacacatcagaagatgacgaagaagcaaatgagtttagaaccgtagcaacgaatcagagaaagaatcgaattactactgctgctgcaacagacattggaacaatttctagggtgcaaatcgaagaggctgacatagaagatgaatattttggtgaatcagaccctccaatgatagactcaagtgaataagctagttatgatgatgatgatgatgaggatgaagcatcaaggagggcgagcaggtttgtaaggtatgatagtaaagctgtcactcctaagttttgtcttggaatgacctttaggggtagaaaacaatttaagaatgcattgatcaagtatgggctggcaaccaggaggcacttatttttcccaaaggatgggaaaaacagaataagagctaggtgttcatggaatggttgcccttggttcatttttggttcacaacggacaaattgtgagtggtttcaagtgaagacttttaatgatgtgcacatttgtccgagaaggaaagacaacaggttggtgacagggacaaggatagctgatagatacgagagcataatcaaagcaaacccatcttggaaagttcgtatataaagcagacagtgctgcttgacatgggtgctgatgtgtcaatttcgaagatcaagagagcaaagggtattgtcatgagaagaatatataactcgtgcagaggacaatatgccaagatatttgagtgccaggctgacattcttaggagcaatcctgggagcacagttgctgtttgtttggaccctaattatgaaggagcggatctagacaaaataaccattggtgtcatctctattaagttatagtatcatcaactcatttaagtgctaacaaatagtcaaatatacattttaatggagattactaaaatctattggtgtcacatgacaccataaaaatggcttggatccacccctatttatgatatgccagtatttcaaagattttatgtctgctttgatgcttgcaaaagaggattcttatctgggtgtagggaagtcattggagtggatggttgtttcttcaaaggagcatgcaatggtgagcttttatgtgccctcggtagagatgcaaataaccaaatttatcccatagcatgggcagtggttgagaaagaaacagaagattcatggttatggtttttg

SEQ ID NO: 69182 - DNA, 2467 bp, Zea Mays
aataatgattaagctcattattacctccctcctgccaatgccaccccagctctttactcattttataaaaacacccctgagaagactcccaactgcgtccagctccccccacccagctctccttttccgggtcacgtgcggaagcgtcaactggtcaaacccaccattatcactcaggcggaaacgcgccggagggagggagagaggaggggcgtgggtggctgggccgagcgactcctccttccagtccaccgctataaagccccgcaggcctggcgagtcccgacggttccattactggtccctagcaggaagcaggatggagttggcgctcagcttgggggagaccatggcggatgccgggagggacctcatgctggggcttgggatgggggtcggggtgcggagggaggaggaagcgcagagagggaggagggacagggaggtgaggcgggagctggagttcacggcgaggagcgcccggtcgtcgccggagccggcggtgcgactcaccctcctgcacggcctcggcctcccgtggccgccgccgccgtcgtccgagaccaaccggcacctggaggcgtcggcgcgtggcttcgacgtgaaccgggcgccgtcgctgtccgcggccggtggcgccgcggaggaggacgaggagcaggacgaggcggcggcggcggcggcatcgtcgtcgcccaacaacagcgcgagctccttcccgacggacttctccgcgcagggccaggtggcgcccggcgccgaccgcgcgtgctcccgcgccagcgacgaggacgacggcggctccgcgcgcaagaagctgcgcctctccaaggagcagtccgcgttcctggaggatagcttcaaggagcacgccacgctgaacccgaagcagaagctcgcgctggcgaagcagctcaacctccggccgcgccaggtggaggtgtggttccagaaccgcagagccaggacgaagctgaagcagacggaggtggactgcgagtacctcaagcgatgctgcgagacgctgacggaggagaaccggcggctgcagaaggagctatccgagctccgcgcgctcaagacggtgcaccccttctacatgcacctcccggccaccaccctttccatgtgcccctcctgcgagcgcgtcgcctccaactccgcgccggcgcccgcgtcatcgccgtcccccgctactggcattgcggccccggcaccggagcagaggccctcgtcgttcgcggctctgttctcgtcccctctgaaccgcccgctggccgcccaggcgcaaccgcaaccgcaggcgccggccaactcgtgaggcgctctctactctatctccggcgacgcgaacggaggtggatctggctgtaaatacgatcacctttttttggcttcctttttcttttgttttcacttgatgcggttcttgagattttttttttgtggattgccgatgggttggtttaccggtttattagagcgcatcatctggccgtcggattggactgcggacggccgggtgcagaaaggaagtgctgcgatagagtttattaacctcagtagcatcgatcatgttttgttaccttgctatctatcttggcgtcaatataggccttgaaatccgaagttaccctgatgatgatgaaatgggtggtgtcaccatttaactgtcgaaggaacgctgttggtctccgcagttcgtacgcgcagattagtgaaatcacgacgcccatcgagtgctgctactcctgttctcgccgatcccttgcggcatacgagtatacgaccagcggcttgtggtggaaagtataccgttttttacaatttagtcctttttaaaaaaaacacgtttagctccttgacaaagtatttttatttttggaccctttactcggcgctatggtctatagcgctaaggtctcggctttgctgacatcagtttgcactactaggcgttgacgtggctcttaccttggtaccatagatcttagggccgagatagggaataacaccttatgcgatgcgcccttctctcgtctacacgttttctccgtcgtcgccgacacgctctcatccgccaccgcacacgttgtcgttcaccgccgccgtgtcctcgagttcagctcgtcaatcatcgctaccgcgcccctatagatccccatcgtcgcaccactgaactcgtcctcgaaatttagttcacaaacatgtttgttagcttgtaattttgtcatttagtttgattagtgcagtagctagctatttagctattagtgtatgtactgaatatgtatgtgcaagtcaaccacagtgttaatcgtcagttagtgaatgtacatccatgtttagatgtctggattaaaatacccatgctggcatgtcacagtcacaattagatacaggaggaacatggggtatccttgctagatgcatcggtgtataactctcgaggacgacctctcttttc

SEQ ID NO: 69183 - DNA, 3546 bp, Zea Mays
ctcctcctccctccatctcttctcgatagcttctcagtgccgtctgccgtggctcattcccaaccttccccagccagcataaaacaagcgaagagccaccctaaaccacctactagagcaaatactctcaagtcccaactaaccaaaactgggaggaagagaaaagctgcagacacggtctctctctcacccttcaccgcttcacgtagcagcaagaaaaagaaagaaaataaaaagagagagagagacagagatggcttgcaccttgaaactccaaaacccaccatgaaaaaagaccttctctggcccctgaccctgagagagagttgctgttgctgccattcggtcggtgcctccttttcggtacgccgctggtatgtggtatcactggtatggttgttctcccatcccaaggcgacgagggaataggaagctagaaagttcgtctgcagtctgcacctttgcccatggcctaggcgcctagctcaggccgtagctcagcgtccgtccatgggccagggagtctgaaaccttgcttgccttgcctgcccgctcctctcacttctctctctcctcctcgctcgtgtccccggcgttctgctggtccctggggactggagagcgaaggtctgtctcctttgcgcctgctctgcttcttcaatgctgggcgtcggtggcttgggctcgggctcgggcatggaaccaggtaccagctgcggtgctctgctcagagagcttcagcaaatctgggcagaagtaggggaaagtgagggcgagaagaacaaggcgttgctggacatcgaaagagagtgcctggaagtctaccgcaggaaggtggacgatgccaatcggactagggtccagctgcaccagtcagtggctgccaaagaagctgaggttgcatctctgatggcaacccttggggagcacaagctgtacttgaagaaagacaagggcgttgtaccactcaaggaacaacttgccaccgtcgccccagtactggagagcttgaaatgcaagaaagaggaaaggatcaaacagttctctaatattaggtcacagattgagaagatccgctttgagctaagtgaatataatgatcagggtgatgacccgagcagtcttgctgctgaggaacacgatttgtcgatgaggaagcttaatagttaccaaacacagcttcgtgcccttcagaaagataagtctgagcgcctccgcaaggttctggagtatataaatgaagtgcattccttatgtggagtccttggaattgattttggaagtactgtacacgaagttcatcccagtttgcatcagaatggtgttgagcagtccagaaatatcagtaacagcacactggagggccttgctagtacaatttataagctaaaagcggaacgaaagtctagaatccacaaggcgagagagatcatggagtcgttgtgtcaactttggaaactcatggactctcctgaagaagaaaagagacagtttagtaacgtaatgagcagcctcatattacctgaggagggaatcacgtcacctggagttctctccgaggaaacaatcgagaagatggaatttgaggtcgagaggttaacaagactaaagaccagcagactgaaggaaatcgtcatgaaaaggagggcagagttagaagcgatctgccagaatgcacacatagaacctgatgtcagcacggcccctgaacagactgatgctttgatcgattctggcctcatcgacccttctgagctcctggcgaatattgagtcacaaatattaaaagcgaaagaagagtctcttagtcggaaagatataatggacaggataaatagatggattgctgcttgcgatgaagaggcttggcttgaagaatataaccaggacccaaagaggtacagtgctggaaggggtgctcatataaaccttaaacgggcagaaaaggcacggattttggttagaaaaatcccaagtatggtggacgacttgataaaccgaacctttgcttgggaaaacgcaagaaataaaccctttctctatgatgggcctcttgatttgcgtgcgcttttgatagggacgcctaatatctgtactagaagagtacaggcttagccggcatcagaaagaagaggaaaatcgacggtaccgggaccagaagaagctggagagcatcctacttgcagagaaagaagcgatcttcggatctagaccaagcccaaggaagacgagcagcttaagtaggaaggcaaatgggtaccggccaaatgggaacaccaacggactcaagactccaactcctcgccgattgtctctcggcagtgctactcctgagcttttgacgcccagatcgtactctggccataatagatactttggcgatgtgaggcgtctatcgacttcccatctgaacttcggtgatgattcgctgtcaacgtttacatccatcagtggctctgaaccagaatccccctctattggatgaacaccgtactgctggatgactggatggtcagtattgcgtattgtaaatgggcaccatgttaccaagttcttgcactagcatgtacattcctgatgtcatatatttagctcatattggagtactaagtattggacgggttgacttggtttgggttgggtgtggagttgaattgtttcaagttgatggctttgtagattgacaattaggcggaaagatgtaggggagcgatctggatttgggcagtcagctgtaacatatcataacttatgtgtttggtttgtgtgtgcaaccttgtgtacaggtgcaatgaaaaatctgtgtgcagaatctactacttcaatagtactggtgttcctcaatatgcaccatgtgacgatgccggcttgagcttatcttgcgaaccagcacactttgtcttctgtgagcttcagactgcaagcaatggcatcaggtccacatgatgactccttccaaacatagtggcacaaggcgacacgaagggggctcggctccctgatcctcctagcgtggaccctgtggaaacatagaaaccagtatgcgttgtgatggagtgacaccatcggtctcggtagcgctccaggaaccaggagccaagcgagcaggcacattgctgtactttggcgggcggcaagaacggatcgaggacaaaataggagtaggagtacaaagatgaacattgaaatattaaagtgaggacatccaagttaggttgagcaggagatctcatgctaaaaatctaaactctactacttgcaacagagcaatgagcgggttcctagaccctcactcagcactctctaggcccctcgctggcaggcgcgaaggccctcgtgagctgctagagcaaagctggatagatgaccagcatgtaggggctctacagattgtttaacatgcaaaaattactaatcccagccatggaatcagctcataatctgatcattttttctatctaccaagtaccaacgaaggataacagctcttctatgggtttgagagaaaaaaaaatctgcgtcagatttttttatgcttgctcagtg

SEQ ID NO: 69184 - DNA, 1412 bp, Zea Mays
cgtaccacactgccgcatttttttctctctccccctcctctcgcgctccgacgactggtcgccgccgctgccccaacgccaggtgctagggtcttcggcggcgaccagaatttaacagatggacctatgcaatctctgcggtgacaatctccactgagtttctgaccaaaaccagacatttctgtaacttgatgaccaagcatacgaggaacaaaaaaagttcatctcatcagcttagatcctcgcatcacaggaaaccctaaagtagttccagattttttaaaaaaatccagcaagataccatttgcagcgatagagaaatatgcatggacagaggcaacttgtccagtatgcatggaattcccacacaacgctgttcttctactctgttcatcacatggcaatggctattgcccatatatttgtgcttccagctaccaacactcaaactgtcttgatcagcctgtggagtcatgcagaaaagaagcctctgaggacccagatgcaatagagcttgcgtgtcccctttgccgtggtgaggtcaagtgttataccttggttgacccagctcggaagcagctgaatcacaagaagaggagctccatggaagatggttgttcatacatggttacatacatagagctctgaaagcatgtccaaaagaaacacccttctgcaaacccacgagctgtggaccccttacatgcttacagatggaagagacttttatttcggctgcttcagaagcagttcggctggctgcaactctataactactaagtattgtcgcatgaactaaagaatctacagccgcagccataaaaagtctagctggtctgttcaagtacttcagaggtgatgcgaaggtttatttctctcatgctgcagtttgaggagcttgtggctccttcgcgagagggtggtgaccgtcatggcgctaccattgacgattcactgcaaagtgccaatgcagaatccactgatctatatgatctctggtcctctcgccgaaatgtgagaatctgtgttgatcctgcaggcaatcttgcatgaatccctgacttgctccccctgccgataagccgattcacaattactgacctgacaaagcgatagtagcctccatctgttctcaggggatgctcaatggtaatcttgaaatgaaacagactgttaagctttgatggatttattcagtaacagtgataatggctggttgaatggcatggggctagtgtgtcatgtgatgcattgttatcgtgcagcggctagccctcccccctccctcgattgtatggcataaccgtttctatggaatgcaatgtgatcctgttccgaaaacgaaatcgtgccttttccgcattcactgctttaattgtttttgcaaggcaagtgctgggtattattacttg

SEQ ID NO: 69185 - DNA, 1151 bp, Zea Mays
cgtaccacactgccgcatttttttctctctccccctcctctcgcgctccgacgactggtcgccgccgctgccccaacgccaggtgctagggtcttcggcggcgaccagaatttaacaggaatatcaaagatggacctatgcaatctctgcggtgacaatctccactgagtttctgaccaaaaccagacatttctgtaacttcctgtggagtcatgcagaaaagaagcctctgaggacccagatgcaatagagcttgcgtgtcccctttgccgtggtgaggtcaagtgttataccttggttgacccagctcggaagcagctgaatcacaagaagaggagctccatggaagatggttgttcatacatggttacatacatagagctctgaaagcatgtccaaaagaaacacccttctgcaaacccacgagctgtggaccccttacatgcttacagatggaagagacttttatttcggctgcttcagaagcagttcggctggctgcaactctataactactaagtattgtcgcatgaactaaagaatctacagccgcagccataaaaagtctagctggtctgttcaagtacttcagaggtgatgcgaaggtttatttctctcatgctgcagtttgaggagcttgtggctccttcgcgagagggtggtgaccgtcatggcgctaccattgacgattcactgcaaagtgccaatgcagaatccactgatctatatgatctctggtcctctcgccgaaatgtgagaatctgtgttgatcctgcaggcaatcttgcatgaatccctgacttgctccccctgccgataagccgattcacaattactgacctgacaaagcgatagtagcctccatctgttctcaggggatgctcaatggtaatcttgaaatgaaacagactgttaagctttgatggatttattcagtaacagtgataatggctggttgaatggcatggggctagtgtgtcatgtgatgcattgttatcgtgcagcggctagccctcccccctccctcgattgtatggcataaccgtttctatggaatgcaatgtgatcctgttccgaaaacgaaatcgtgccttttccgcattcactgctttaattgtttttgcaaggcaagtgctgggtattattacttg

SEQ ID NO: 69186 - DNA, 1895 bp, Zea Mays
ctcgtacccattcaattaagaaaatcacatatctctagcagtatataataaacaaaataaaaagagagaaaaaacagcgtaacgtaacagccttcccctaaaccagaggcctctctgcctctagaaaaacagcgttcccacctttgtgccgtgaacgtagcatttgctccgagtccaccattaaagtagtagtcgtcgtctccctcctgcctctcgtgtttcctctcctctgcttcggttacgtcgaacctgcataaagccgccctcccctcgctcgcctatggtgtgactcacgaaacgcatagacacgacacgacacgacacggcacgacacgccggagaagaggagagaggcggaacgatcggaggggaggtagatgaagcccaagaacggcggcctggcctcggacaggaggctgctctcgcgccggatactgatcctctgcttcctcagcttcttcctcggcatactcgtcacggacctgtttggatcggtgccgagcccggtcgtggtgcagacggggtggcacgagcacgagcacgagcacgacacggagctgcagagcctttccgaggattttgttgccaagccgaaaccggcagaagacagggacattatgggagaggtgtcgaagactcacgaggccatacaatacttggagaagtcaattgacacactgcagatggagctggcagcgaagcgcagcatcaacgagcttcacggggaaagtacaggtggtggcgtaagtaagcagaggagaagggtgttcgtggtgatcggggtcaacaccgccttcagcagcaggaagcgtcgggattccgtgagggagacctggatgcctcaaggtgagaagctcaagaaactggaggagaagggaatcgtcgtccggtttacgatagggcatagcgctacatcgaacaacgtccttgacaaagctatagacgcggaggatgaaattcatggcgactttcttaggctggaccatgtcgaagggtaccacaagctgtctgcgaagaccaagacattcttctcaactgccgtggccttatgggacgcggatttctatgtcaaggtggacgacgatgttcacctgaacctagggatgctcgtcgccaccctcggccggcacaagctgaagccacgggtgtacattggctgcatgaagtcgggaccggtcctctccgacaagaatgcgaaataccatgagcctgagttctggaagttcggagaggacgggaacaagtacttccgccacgccacggggcagatatacgccatctccaaggacctcgcgacctacatctccatcaaccagcccatactgcataaatacgcgaacgaagacgtctcgctcggcgcgtggttcatcggcctagacgtggagcacatcgacgacagggacatgtgctgcggcacgccaccaggcggggaacgtctgcatcgcgtcgtttgactggaggtgcagtggggtctgcaatccggtcgagaggatcaagtacgtgcattcgcgatgcggcgaagggcaggatgcgatctggagcgcctccttctgacaagatggtgatggaatcatggaatgattatatatatacagacgcacgcctgcttgtgtgcaggcccaggccatagctgcattagaaggctcgcgttgtgtacacacagtgagttcagagaaggggaggcatgcgtgtctgatacaggaagaaaccactggagcacaatctcttatcttttttgggggggagggttcagaaataggtgatacagccatacagagctcatgtgggtgggtatacatgttttttttcagtcgttagtgcagaaaacacgaatacattcgatttaattcattcgtcccctcttagaagctctgatcaggatcagagaagtttct

SEQ ID NO: 69187 - DNA, 1815 bp, Zea Mays
ccgagggcctccatccctccacgttctcagaaaagtcgtccacgcgtctataaaccacaccaatcttttggcccttcgcttctccgttctcccccaattcgccttcacctcgccgcttcctccttgaccgccaccgttgacgtcgtcttccggcgaggtagctcgccggaagacctcacctggacttttccgacgcaccctccacacactctttaaccctccggaatggccgcctgcttctagctcgtcgacgccccaatctccgcttgcttcctcgacagccccatccgcctcttctcgctctcgctacggctcctctgcctgttcgccatggcgatccgcatcaccgtctcctactccggctacgtggcgcagaacctcgccgcgtcgctcggccaccgcttctcctccgcctccgcctcgggcagccgcctcctccatgacggcgcctggcgccccttctgcatcttcacctccacccgccagcccgagcagcaccgcggcagcggcagcgaccgccatgacggaggcgactacaaccacccgaagccccaggccatcgccgccggagctcactcgttgctgctcacgcgtgcgtgcttatcgtccaagtcgccgccgccgtctcttgccgtggggctgctctcggtgcttgcgcagaggacgggaccgacgcctggaaccaccggatcggcggcttctctctcaggctcgtcgccgatttccctcggtttcaaccccacctccttcctcccgttcctgcagacagcgaggtggctcccgtgcagcgaccttgccacctcgtcgtcttcggcaccctcttcccctccccgctcgctggcgccttcggctccccccaagaaggcgttgattggtgcttctactggttctaccggaattgcgacgagcagtggtgctggtgcagcgatgagcaggagcaactggctgtcgaggtgggtcagctcctgctccgatgacgccaagacggcgtttgcggctgtgaccgtgccacttctctacgggtcgtccctggccgagccgaagtccatcccgtccaagtccatgtacccgaccttcgatgtcggtgatcggatacttgctgagaaggtctcatacatattccgggatccagaaatttcggacatcgtgatcttccgggctcccccaggacttcaggtttatggctacagctcaggtgatgtgttcatcaagagagttgtggccaagggaggagactatgttgaagtgcgtgatggcaagctgtttgttaatggagtagttcaggatgaggattttgtgctggagccacacaactacgagatggaaccagtgcttgtgccggaaggttatgtgttcgtgttgggagacaaccgcaacaacagctttgattcccacaactggggtccacttccagtgaggaacattgtcgggagatctatcctccggtattggccaccatcgaagatcaatgatacaatttatgagcctgatgtgtcccgcctcacggtgccgtcctcgtagtagtcgctgcagtgatgctggatatccagtgtgtgtacaatgaccttatacttcgtggagcctcatttgatgagttgagctccagttccaattctctcagaatattgtctcctgagtgttccctgtaaattctctttgcctgactgatttgttttcgctgccggttggcagatgcttgttcaaagcacgggaaagtgcagtaccttgcatcttgcaatacaaactaattaaaccggttacccttttttttttttagaaaggaatttgggggcacacatagttattcgcttgact

SEQ ID NO: 69188 - DNA, 1677 bp, Zea Mays
tccgctccacccactcccgctctgctcccgtcgatctgccatcctctgcctgccccgcttgctccgcgcgtctgctctagtgatttgagacggagatccgccagagatcgaggagccggagagcggcgtcgacgagggatggacgtccacggcggcggaacgggagccggcaagctgacgcggacgccgtcctcgctgctgcgctcgccaacggtgcgcaactgctcctcgttccaggccgtggttgtcgaggacccggagcccgacgacaagaaggcacaggcgcaccccaagcctccgccccaccacttccaccccggcggcggctccaaccacccgctgctcgtcctcgtgctcccgctcgccttcctgcccctgctcctcctcctccgcggcggcgacggccgccacctcgccctcctcgcggcgtccgcggccgccgcgctcgccgccgccgcgggggccgcgcgcctgctccggggacgcctgcgccgctcgccgggctccggctccgtccagtggttcatcggggacgacgacgacaagccgcagaagcgggcggacaaggccgccgcggcgccgcacggccgcgtcgtgcgcgagggcgtcgagttctacagcaatggggactgctacgagggcgagttccacaagggaaactgcaacggcagcggcgtgtacaacttcttcggcaagggcaagtacgagggcgactgggtcgacggcaagtacgacggctacggcgtcgagagctgggcgcggggcagccggtaccgcggccagtaccgccaggggctccgccacggccacggcgtctaccgcttctacagcggcgactgctacgcgggcgagtgggccggcggccagagccacggcatcggcgcgcagacctgctccgacggcagctcctacgtcggggagttcaagtgcggcgtcaagcacggcctcgggagctaccatttcagaaacggtgaccgttacgcgggcgagtacttcggggacaagatccacggcttcggcgtctacagcttcgccaacggccactgctacgaaggctcgtggcacgaaggcaagaagcagggattcgggatgtacacgttccggaacggcgacaagcgatcgggggactgggattctgggacgctcaagacccccttgcccccggccgatccttctgtccagcgagccgtacagtgattctccgtttgcaaatgtacttggaggtgcacatgggggaaggactgtaaatctccccgcttgtcctgccctgcaatgcaacccaagcgtctctggtctggcacagatggcatgaataatttccagtggcctgttgtgttgtcgatccactccctgctccctacctccctgagcccactgttttctgaaacctagagagagagagagagcaattcacagctttcggtcccctcacagatctttgcaccgggggcgtgaatgctggagaaaaagggttccggatcgcggaaatgtgaggctggcacaacgcattgttggttgccctggatccccctgttgcttcaaatttctcgcattattataggacagctatgtatgcccatctctcatacagttatccttccgctgcaccatgtgagataacgtcactcattccatcgtgtcagaagtggtgataattctgaaccttttgtccccgta

SEQ ID NO: 69189 - DNA, 2325 bp, Zea Mays
tccgctccacccactcccgctctgctcccgtcgatctgccatcctctgcctgccccgcttgctccgcgcgtctgctctagtgatttgagacggagatccgccagagatcgaggagccggagagcggcgtcgacgagggatggacgtccacggcggcggaacgggagccggcaagctgacgcggacgccgtcctcgctgctgcgctcgccaacggtgcgcaactgctcctcgttccaggccgtggttgtcgaggacccggagcccgacgacaagaaggcacaggcgcaccccaagcctccgccccaccacttccaccccggcggcggctccaaccacccgctgctcgtcctcgtgctcccgctcgccttcctgcccctgctcctcctcctccgcggcggcgacggccgccacctcgccctcctcgcggcgtccgcggccgccgcgctcgccgccgccgcgggggccgcgcgcctgctccggggacgcctgcgccgctcgccgggctccggctccgtccagtggttcatcggggacgacgacgacaagccgcagaagcgggcggacaaggccgccgcggcgccgcacggccgcgtcgtgcgcgagggcgtcgagttctacagcaatggggactgctacgagggcgagttccacaagggaaactgcaacggcagcggcgtgtacaacttcttcggcaagggcaagtacgagggcgactgggtcgacggcaagtacgacggctacggcgtcgagagctgggcgcggggcagccggtaccgcggccagtaccgccaggggctccgccacggccacggcgtctaccgcttctacagcggcgactgctacgcgggcgagtgggccggcggccagagccacggcatcggcgcgcagacctgctccgacggcagctcctacgtcggggagttcaagtgcggcgtcaagcacggcctcgggagctaccatttcagaaacggtgaccgttacgcgggcgagtacttcggggacaagatccacggcttcggcgtctacagcttcgccaacggccactgctacgaaggctcgtggcacgaaggcaagaagcagggattcgggatgtacacgttccggaacggcgacaagcgatcgggggactgggattctgggacgctcaagacccccttgcccccggccgatccttctgtccagcgagccgtacaggctgcacagcgagctgcagagaacgcgtttcgcttgcctagagttgatgagcaggtccacagggcggtaatggccgcgaacagggcggccacggccgctcgagtggcggcgatcaaggcagtccagaacaggatggatgggaagttttgtgagacctatgtgtgaattgctgtgtgcgagaccatgtttcgctctctctctctctttctaactgtacattagggtagtgaaggacaataactaatcagtgaggtgagacgacgaccggggcagcacaaccgcgcgcttccgagtcagggttcagcaacgagacgacgggagcctgtctgacgaagagcggagctggcagaaaccatttgcgagaaacggccatatcgccatggctgtcggaggggttccctcgcacctttccttgcaacaagctgtaactgtacatagatccaggcggtgtatcaatggtggagagcgagttttttcttcttctttccagtgcccttctcagttttcatttactcctcaattatgtctcagtaggggggatgtgtgcagggcactggggccactgcttacagtcacaggagtctgttagctttgcatctgcgtctccatttctccaacctaaatcttgaccgcttctcccatgtgcagtgattctccgtttgcaaatgtacttggaggtgcacatgggggaaggactgtaaatctccccgcttgtcctgccctgcaatgcaacccaagcgtctctggtctggcacagatggcatgaataatttccagtggcctgttgtgttgtcgatccactccctgctccctacctccctgagcccactgttttctgaaacctagagagagagagagagcaattcacagctttcggtcccctcacagatctttgcaccgggggcgtgaatgctggagaaaaagggttccggatcgcggaaatgtgaggctggcacaacgcattgttggttgccctggatccccctgttgcttcaaatttctcgcattattataggacagctatgtatgcccatctctcatacagttatccttccgctgcaccatgtgagataacgtcactcattccatcgtgtcagaagtggtgataattctgaaccttttgtccccgta

SEQ ID NO: 69190 - DNA, 740 bp, Zea Mays
gttcgttgctgacgatggggaaggaagcattagtcaatccagtggaggtggtgttggtggatccaggtcagtgatgagaaagataattaggtgctggtgtaggaacgtggaacttttgccttcacagttgcagccatgtgtaattcagggttatcatctatttctacttttctcaagttgtcgtatatgttagttggatgggggagatgtggtacatacttttgtatgcaacatcgctaacgatttgcctacacaaacctgccaaggttaactttgatcaggatgctacgcctatcacgcttttgatatgctggcggccaacgtgaatgcatctcacttaaaatcgtgcttgttacctttcctccccggatgttcatccttagcaacttgtactgtgtaatggcagaagaaaaacctactcttttgtatatatcaactgcccgttgttaaaccttttgctacatcgcacggctgcaaactgtgctctacttatttgtgtggctaaagtcttttggcaacccagaaatgcattttattccatgactcacttatatgctaccaatttcgtattttttgtttttttaaaatcgagtattatttttgttgatcaaattagccatttgcacatatacgatggcataatattctgtaatttatttcaaattgtttgatttcgttcctctttggtttgttgttgttttgaatggaatcatgtgcgtgctattgaactggatgtctgg

SEQ ID NO: 69191 - DNA, 763 bp, Zea Mays
cgcctggcaaatcaatagcaaaaaaaatgttcgttgctgacgatggggaaggaagcattagtcaatccagtggaggtggtgttggtggatccagtgatgagaaagataattaggtgctggtgtaggaacgtggaacttttgccttcacagttgcagccatgtgtaattcagggttatcatctatttctacttttctcaagttgtcgtatatgttagttggatgggggagatgtggtacatacttttgtatgcaacatcgctaacgatttgcctacacaaacctgccaaggttaactttgatcaggatgctacgcctatcacgcttttgatatgctggcggccaacgtgaatgcatctcacttaaaatcgtgcttgttacctttcctccccggatgttcatccttagcaacttgtactgtgtaatggcagaagaaaaacctactcttttgtatatatcaactgcccgttgttaaaccttttgctacatcgcacggctgcaaactgtgctctacttatttgtgtggctaaagtcttttggcaacccagaaatgcattttattccatgactcacttatatgctaccaatttcgtattttttgtttttttaaaatcgagtattatttttgttgatcaaattagccatttgcacatatacgatggcataatattctgtaatttatttcaaattgtttgatttcgttcctctttggtttgttgttgttttgaatggaatcatgtgcgtgctattgaactggatgtctgg

SEQ ID NO: 69192 - DNA, 510 bp, Zea Mays
gttaccgagcctggacaacgtatattgagatgtattgctctcacaggctctaatgtgggtgctgcggttttaataccaagaataaccctcaatactactgatgtaaaatggccgttcacactctagagaaggcaattcccagtacgagtatgctacgcaatgacaattaataagagccaaggacaaaccctgtccagggttgggctttacctcaagaaaccggtcttcactcatggacaactctggaaacgtctgcttccaggtcaatgctactataaaggaactaggcaatcaaaatgttgacatttcaacatcaaccgcagggtcacaccagtcttcgcttatgttctcacaaggtgcaagcagcaacatggaagacactcctcacaagacagacaccttgtcttcacctctgacacctttgacgcctcagggtagcgtcgccactacaaagtatttggaaaccgttgacgctggagacactgggtgtgtgactactcagtcctcatc

SEQ ID NO: 69193 - DNA, 708 bp, Zea Mays
atgagtccatgacacactcctgctcgcggtgggggtgctcatcccggcgctgttcctgctcgtgccctcgcgccaggaggggtacatctcagacgaccacgacgtgttcgctgctgaaatcaaagttggtttcactttggaaaagccagtgtcattccttacttctcacatagacaaactagggaatgccatatttgaagagattggtgtacctaatagcaaggtatcatcgtttcaatgcacccattagcttttaaatactccacacatgttgtttttggtgttcttccttatccaaaagatgcttcaataagtttgccagctctaagtgtgttgagatcatccttaatagagatgattctccagcaagtgaacctatccttgacaccactttttgggcatccatgttgtttcgagctgttgagatttcctggaggagttacagtcattcctgcagtgtctggttttacatgggcaaacacagaccccctattcgactttgtgttgaacaactccattttatcagattttgggtaatcttacagagctcaaggatcagctgaaacttggattgaacttaaggtcatatgaggaacgagagtgcagggcggcaggagcttccccaccaactgctgccaataattcattcccggaatcactgccacccactctgcctgccagatcgggtggatttcttcgtttcgccca

SEQ ID NO: 69194 - DNA, 1515 bp, Zea Mays
aggataacctggagctgataccaggtgtcatggaccttcggtccatgggtatagttgtcttctccggcgaggttatatccctctgccacaggcttggttctagggtagcagccctaggcgcttgagagggtcattgcaagagagagagattggtttgataatgatcttgcttgatttattccctgctaccatgcggcttataaatagccctatagctaaccaacttctacaaactctcaactaactactactttcttggacttatctgctgctaaccaactctccacaattctctcatctcaatcttattctctagccttatcccagctcatctcaatcttattctctagccttatcccagcctggctgttgcctctcgctccctatgatgcccatgacaggaatgggattggttcttcagttgaagctccagcaactatttgtggcatcggtattagatggaagcagcaatcttttaccagatagattgaaacaaatagctcagtaaatcggaaaacctgatgggaagaatcttgggcttaatcactctgtatttggtaaagtaaagggtgttcagctgtcatcgtacgtacaacacaaaatctccgatttatctcctagttcatcttcggctctggctccatcgccatcacagtcactttctccaagcatgccaccgtcgttatcatcgtttgggagcatcccttacactgcagggagactacctcgtccagctttagccccttcatggaacagacaccctcgttttccatattttaggtgtaatccctctcctgttggtagttcaatgttaaattaaaacctccttgcattattgaagacccctggttacctctcttaatgcattcagcaaagacatccatcttgccttccctgccaaaactcgttcatccagcagattcaccgcctgctcacatagatcctcctcgccccttacctaatcccattcattttccaaaagcaatctctggacccacttctcaaatgatgtcaataccttcaccccccatgaccagtgtctcaacattcgatgccccaaaaggaaaaaatggaatagcagaaacatcgaggttctcttcaattggcgccatcgccacatgctctcgttcacacttgaagttatggttgcttcgactgttagccatgcgtcatcaggaaaatcgagccagaagacaaggtcacaattttgcttcaagcataaccatgagttgcaatcatgggctatgatgcaaagatgaggctttgtttattggctactgtaactatatgattaattttaaagctttttgaggtcaggttaactgtagatatagatgttgcttcgactgtatatatgattaattttaaatctctcaccgaagggttgggagcttatatagaggaatgcaaggactcttactcgggtccacgttctgcaataatactttcttgtaacgtattgaccataaatacataatacaacatgcaacttctctgcaagattctgtttgttct

SEQ ID NO: 69195 - DNA, 617 bp, Zea Mays
atgagtccatgacacactcctgctcgcggtgggggtgctcatcccggcgctgttcctgctcgtgccctcgcgccaggaggggtacatctcagacgaccacgacgtgttcgctgctgaaatcaaagttggtttcactttggaaaagccagtgtcattccttacttctcacatagacaaactagggaatgccatatttgaagagattggtgtacctaatagcaagctctcgttcacacttgaagttatggttgcttcgactgttagccatgcgtcatcaggaaaatcgagccagaagacaaggtcacaattttgcttcaagcataaccatgagttgcaatcatgggctatgatgcaaagatgaggctttgtttattggctactgtaactatatgattaattttaaagctttttgaggtcaggttaactgtagatatagatgttgcttcgactgtatatatgattaattttaaatctctcaccgaagggttgggagcttatatagaggaatgcaaggactcttactcgggtccacgttctgcaataatactttcttgtaacgtattgaccataaatacataatacaacatgcaacttctctgcaagattctgtttgttct

SEQ ID NO: 69196 - DNA, 1023 bp, Zea Mays
caacgctcaactctaggtaaatggcaaggtatcggccatgagtccatgacacactcctgctcgcggtgggggtgctcatcccggcgctgttcctgctcgtgccctcgcgccaggaggggtacatctcagacgaccacgacgtgttcgctgctgaaatcaaagttggtttcactttggaaaagccagtgtcattccttacttctcacatagacaaactagggaatgccatatttgaagagattggtgtacctaatagcaaggtatcatcgtttcaatgcacccattagcttttaaatactccacacatgttgtttttggtgttcttccttatccaaaagatgcttcaataagtttgccagctctaagtgtgttgagatcatccttaatagagatgattctccagcaagtgaacctatccttgacaccactttttgggcatccatgttgtttcgagctgttgagatttcctggaggagttacagtcattcctgcagtgtctggttttacatgggcaaacacagaccccctattcgactttgtgttgaacaactccattttatcagattttgggtaatcttacagagctcaaggatcagctgaaacttggattgaacttaaggtcatatgagctctcgttcacacttgaagttatggttgcttcgactgttagccatgcgtcatcaggaaaatcgagccagaagacaaggtcacaattttgcttcaagcataaccatgagttgcaatcatgggctatgatgcaaagatgaggctttgtttattggctactgtaactatatgattaattttaaagctttttgaggtcaggttaactgtagatatagatgttgcttcgactgtatatatgattaattttaaatctctcaccgaagggttgggagcttatatagaggaatgcaaggactcttactcgggtccacgttctgcaataatactttcttgtaacgtattgaccataaatacataatacaacatgcaacttctctgcaagattctgtttgttct

SEQ ID NO: 69197 - DNA, 1011 bp, Zea Mays
atcggccatgagtccatgacacactcctgctcgcggtgggggtgctcatcccggcgctgttcctgctcgtgccctcgcgccaggaggggtacatctcagacgaccacgacgtgttcgctgctgaaatcaaagttggtttcactttggaaaagccagtgtcattccttacttctcacatagacaaactagggaatgccatatttgaagagattggtgtacctaatagcaaggtatcatcgtttcaatgcacccattagcttttaaatactccacacatgttgtttttggtgttcttccttatccaaaagatgcttcaataagtttgccagctctaagtgtgttgagatcatccttaatagagatgattctccagcaagtgaacctatccttgacaccactttttgggcatccatgttgtttcgagctgttgagatttcctggaggagttacagtcattcctgcagtgtctggttttacatgggcaaacacagaccccctattcgactttgtgttgaacaactccattttatcagattttgggtaatcttacagagctcaaggatcagctgaaacttggattgaacttaaggtcatatgagaaaatatatttgcaattcaggaattgtcatggaccttcggtccatggggatagttgtcttctccggcgaggttatacccctctgccgtaggcttggttctagggtagcagccctaggcgcttgagagggtcattgcaagagagagagattggtttgataatgatcttgcttgatttattctctgctgccatgcggcttataaatagccctatagctaaccaacttctacaaactctcaactaactcctactttcttggacttatctgctgctaactctccacaattctctcatctcaatcttattctctagccttatcccagctcatctcaatcttattctctagccttatcccagtctggttgttgcctctcgctctctatgatgcccatgacatctccccctcccttgag

SEQ ID NO: 69198 - DNA, 1355 bp, Zea Mays
ctcagttctctaaatttttctcctttgttccactcgttcttatccaatatctagtacacgtactccctggaagtctctccgtgcgttgtctcatctccagaaatccacgtgcagccctgagcagtgagcactagcttctccacgtcatatatcccctcacctcatcgcttaggcagaagcagccgagctcccttctcgtagtgcccctcgcattcctgttctcagcccgctctcctctctgctcggtctccccagtacttgcctcacctggacacgccgttctgttgttaccacttgccagtcacgatctcttccttcctggagtttgcgtgttgggagtccgtggatcatggctgaaactgcacgcgttctcgtctccttgctctggcacatcattgtgtggagctgctgaacgccactgtctctagctcctgtatcgtcgtgccggcactcggctccccaacttcgctgttgcctactggacctgctgctctctctgcaacagctcgtcggctccctagaaattccccagccgtcgcctgcctcctcgctgacgttctcccacgtcgcgtccgcagcgctaccacgaattcaacatcgcccaggcgtccccgtactcggtttcaggccattgcaccaaacgcgcatcttcaaagtgccatcgagtttcatctcacctcacggtggccagggatcttcaaagaacagaactctgccgtcgtggtttggcgccgtgaattacccctgcgccgacccgttaactcgcgccatttccggtcgagttcacacgcgcactatagagctcccagcagaaggagtgtaaattcaagatgaagtggttgtggaagaggaatttgctccagtgcttattcatcaagtggatggagctatctaactggtgatctggtagaagaattttgggatcttctcctgcaataaggcaagctccggtgcatttgccaccttccttgtgtttacaaaattttatcacttatatgctgcattaggtgataggagttgagtgattaaacacttgatgcattaccatccttgaaaggttgatttccacaccttgtcacccattttataaaagttagagatgcttagtcttgctgatagattaagaaacatattttgatctatgactcatgtttttacaaaaagaaaatgggcttgggataatgaaggcatcaagacgttgataaattcattatccaggcatggcccctctgtcaggcgccaaaattttgaaatagtttaaaatgggaccagacgctgagcaggaaaggtcgcccgtctgtgtcgattaaggaccgtaccgattgttggcctgatgatctaggaccttttaactg

SEQ ID NO: 69199 - DNA, 1299 bp, Zea Mays
ctcagttctctaaatttttctcctttgttccactcgttcttatccaatatctagtacacgtactccctggaagtctctccgtgcgttgtctcatctccagaaatccacgtgcagccctgagcagtgagcactagcttctccacgtcatatatcccctcacctcatcgcttaggcagaagcagccgagctcccttctcgtagtgcccctcgcattcctgttctcagcccgctctcctctctgctcggtctccccagtacttgcctcacctggacacgccgttctgttgttaccacttgccagtcacgatctcttccttcctggagtttgcgtgttgggagtccgtggatcatggctgaaactgcacgcgttctcgtctccttgctctggcacatcattgtgtggagctgctgaacgccactgtctctagctcctgtatcgtcgtgccggcactcggctccccaacttcgctgttgcctactggacctgctgctctctctgcaacagctcgtcggctccctagaaattccccagccgtcgcctgcctcctcgctgacgttctcccacgtcgcgtccgcagcgctaccacgaattcaacatcgcccaggcgtccccgtactcggtttcaggccattgcaccaaacgcgcatcttcaaagtgccatcgagtttcatctcacctcacggtggccagggatcttcaaaggtttcctcgaccgtgtggcgctagttttgtgctcacttaagagctcccagcagaaggagtgtaaattcaagatgaagtggttgtggaagaggaatttgctccagtgcttattcatcaagtggatggagctatctaactggtgatctggtagaagaattttgggatcttctcctgcaataaggcaagctccggtgcatttgccaccttccttgtgtttacaaaattttatcacttatatgctgcattaggtgataggagttgagtgattaaacacttgatgcattaccatccttgaaaggttgatttccacaccttgtcacccattttataaaagttagagatgcttagtcttgctgatagattaagaaacatattttgatctatgactcatgtttttacaaaaagaaaatgggcttgggataatgaaggcatcaagacgttgataaattcattatccaggcatggcccctctgtcaggcgccaaaattttgaaatagtttaaaatgggaccagacgctgagcaggaaaggtcgcccgtctgtgtcgattaaggaccgtaccgattgttggcctgatgatctaggaccttttaactg

SEQ ID NO: 69200 - DNA, 1350 bp, Zea Mays
ctcagttctctaaatttttctcctttgttccactcgttcttatccaatatctagtacacgtactccctggaagtctctccgtgcgttgtctcatctccagaaatccacgtgcagccctgagcagtgagcactagcttctccacgtcatatatcccctcacctcatcgcttaggcagaagcagccgagctcccttctcgtagtgcccctcgcattcctgttctcagcccgctctcctctctgctcggtctccccagtacttgcctcacctggacacgccgttctgttgttaccacttgccagtcacgatctcttccttcctggagtttgcgtgttgggagtccgtggatcatggctgaaactgcacgcgttctcgtctccttgctctggcacatcattgtgtggagctgctgaacgccactgtctctagctcctgtatcgtcgtgccggcactcggctccccaacttcgctgttgcctactggacctgctgctctctctgcaacagctcgtcggctccctagaaattccccagccgtcgcctgcctcctcgctgacgttctcccacgtcgcgtccgcagcgctaccacgaattcaacatcgcccaggcgtccccgtactcggtttcaggccattgcaccaaacgcgcatcttcaaagtgccatcgagtttcatctcacctcacggtggccagggatcttcaaagaactctgccgtcgtggtttggcgccgtgaattacccctgcgccgacccgttaactcgcgccatttccggtcgagttcacacgcgcactatagagctcccagcagaaggagtgtaaattcaagatgaagtggttgtggaagaggaatttgctccagtgcttattcatcaagtggatggagctatctaactggtgatctggtagaagaattttgggatcttctcctgcaataaggcaagctccggtgcatttgccaccttccttgtgtttacaaaattttatcacttatatgctgcattaggtgataggagttgagtgattaaacacttgatgcattaccatccttgaaaggttgatttccacaccttgtcacccattttataaaagttagagatgcttagtcttgctgatagattaagaaacatattttgatctatgactcatgtttttacaaaaagaaaatgggcttgggataatgaaggcatcaagacgttgataaattcattatccaggcatggcccctctgtcaggcgccaaaattttgaaatagtttaaaatgggaccagacgctgagcaggaaaggtcgcccgtctgtgtcgattaaggaccgtaccgattgttggcctgatgatctaggaccttttaactg

SEQ ID NO: 69201 - DNA, 1338 bp, Zea Mays
ctcagttctctaaatttttctcctttgttccactcgttcttatccaatatctagtacacgtactccctggaagtctctccgtgcgttgtctcatctccagaaatccacgtgcagccctgagcagtgagcactagcttctccacgtcatatatcccctcacctcatcgcttaggcagaagcagccgagctcccttctcgtagtgcccctcgcattcctgttctcagcccgctctcctctctgctcggtctccccagtacttgcctcacctggacacgccgttctgttgttaccacttgccagtcacgatctcttccttcctggagtttgcgtgttgggagtccgtggatcatggctgaaactgcacgcgttctcgtctccttgctctggcacatcattgtgtggagctgctgaacgccactgtctctagctcctgtatcgtcgtgccggcactcggctccccaacttcgctgttgcctactggacctgctgctctctctgcaacagctcgtcggctccctagaaattccccagccgtcgcctgcctcctcgctgacgttctcccacgtcgcgtccgcagcgctaccacgaattcaacatcgcccaggcgtccccgtactcggtttcaggccattgcaccaaacgcgcatcttcaaagtgccatcgagtttcatctcacctcacggtggccagggatcttcaaagaactctgccgtcgtggtttggcgccgtgaattacccctgcgccgacccgttaactcgcgccatttccggtcgagttcacacgcgcactatagaaggagtgtaaattcaagatgaagtggttgtggaagaggaatttgctccagtgcttattcatcaagtggatggagctatctaactggtgatctggtagaagaattttgggatcttctcctgcaataaggcaagctccggtgcatttgccaccttccttgtgtttacaaaattttatcacttatatgctgcattaggtgataggagttgagtgattaaacacttgatgcattaccatccttgaaaggttgatttccacaccttgtcacccattttataaaagttagagatgcttagtcttgctgatagattaagaaacatattttgatctatgactcatgtttttacaaaaagaaaatgggcttgggataatgaaggcatcaagacgttgataaattcattatccaggcatggcccctctgtcaggcgccaaaattttgaaatagtttaaaatgggaccagacgctgagcaggaaaggtcgcccgtctgtgtcgattaaggaccgtaccgattgttggcctgatgatctaggaccttttaactg

SEQ ID NO: 69202 - DNA, 777 bp, Zea Mays
agagaagtaagtccttacttaaggcaagcatagagttcttggttatggaggcagagttccctggtgtggtctgagagcttagtgatgatattagaatgtttagctcccctattgtttggttagttttgtgtgcacctttagtaaggtgtagtttgtactgctttaaagtatcttttttgtggttgcataagtatatgcattcatgttcatatcatttcatgtagagctcccagcagaaggagtgtaaattcaagatgaagtggttgtggaagaggaatttgctccagtgcttattcatcaagtggatggagctatctaactggtgatctggtagaagaattttgggatcttctcctgcaataaggcaagctccggtgcatttgccaccttccttgtgtttacaaaattttatcacttatatgctgcattaggtgataggagttgagtgattaaacacttgatgcattaccatccttgaaaggttgatttccacaccttgtcacccattttataaaagttagagatgcttagtcttgctgatagattaagaaacatattttgatctatgactcatgtttttacaaaaagaaaatgggcttgggataatgaaggcatcaagacgttgataaattcattatccaggcatggcccctctgtcaggcgccaaaattttgaaatagtttaaaatgggaccagacgctgagcaggaaaggtcgcccgtctgtgtcgattaaggaccgtaccgattgttggcctgatgatctaggaccttttaac

SEQ ID NO: 69203 - DNA, 1244 bp, Zea Mays
ctcagttctctaaatttttctcctttgttccactcgttcttatccaatatctagtacacgtactccctggaagtctctccgtgcgttgtctcatctccagaaatccacgtgcagccctgagcagtgagcactagcttctccacgtcatatatcccctcacctcatcgcttaggcagaagcagccgagctcccttctcgtagtgcccctcgcattcctgttctcagcccgctctcctctctgctcggtctccccagtacttgcctcacctggacacgccgttctgttgttaccacttgccagtcacgatctcttccttcctggagtttgcgtgttgggagtccgtggatcatggctgaaactgcacgcgttctcgtctccttgctctggcacatcattgtgtggagctgctgaacgccactgtctctagctcctgtatcgtcgtgccggcactcggctccccaacttcgctgttgcctactggacctgctgctctctctgcaacagctcgtcggctccctagaaattccccagccgtcgcctgcctcctcgctgacgttctcccacgtcgcgtccgcagcgctaccacgaattcaacatcgcccaggcgtccccgtactcggtttcaggccattgcaccaaacgcgcatcttcaaagtgccatcgagtttcatctcacctcacggtggccagggatcttcaaaggtttcctcgaccgtgtggcgctagttttgtgctcacttaagaactctgccgtcgtggtttggcgccgtgaattacccctgcgccgacccgttaactcgcgccatttccggtcgagttcacacgcgcactataggtttgtgagatcactgaagctctctggtaaatgtgtttttgggatccttagtgcagtttacaaattttaagtaatttaagtgtcctctaaaaaggattaattgaatatttagggagcaaatgtgagcaccaaaaattgtgagaacttttgagagtcttgttatcagaagataaactcttggtaaaagtttgtggctgtttgtaagctatttgctcagaaatccttgtagagtccctaattggaataataagcagaacataatcacatgtggattagaactttggaagaaggaacaagtttaacaagtgaaacctgatctttggataaagaagtaagagtgcatagtgggatctggatttttggcgtagtttgaagattgttctaatcctctagaagttcaagttgtag

SEQ ID NO: 69204 - DNA, 1203 bp, Zea Mays
ctcagttctctaaatttttctcctttgttccactcgttcttatccaatatctagtacacgtactccctggaagtctctccgtgcgttgtctcatctccagaaatccacgtgcagccctgagcagtgagcactagcttctccacgtcatatatcccctcacctcatcgcttaggcagaagcagccgagctcccttctcgtagtgcccctcgcattcctgttctcagcccgctctcctctctgctcggtctccccagtacttgcctcacctggacacgccgttctgttgttaccacttgccagtcacgatctcttccttcctggagtttgcgtgttgggagtccgtggatcatggctgaaactgcacgcgttctcgtctccttgctctggcacatcattgtgtggagctgctgaacgccactgtctctagctcctgtatcgtcgtgccggcactcggctccccaacttcgctgttgcctactggacctgctgctctctctgcaacagctcgtcggctccctagaaattccccagccgtcgcctgcctcctcgctgacgttctcccacgtcgcgtccgcagcgctaccacgaattcaacatcgcccaggcgtccccgtactcggtttcaggccattgcaccaaacgcgcatcttcaaagtgccatcgagtttcatctcacctcacggtggccagggatcttcaaagaactctgccgtcgtggtttggcgccgtgaattacccctgcgccgacccgttaactcgcgccatttccggtcgagttcacacgcgcactataggtttgtgagatcactgaagctctctggtaaatgtgtttttgggatccttagtgcagtttacaaattttaagtaatttaagtgtcctctaaaaaggattaattgaatatttagggagcaaatgtgagcaccaaaaattgtgagaacttttgagagtcttgttatcagaagataaactcttggtaaaagtttgtggctgtttgtaagctatttgctcagaaatccttgtagagtccctaattggaataataagcagaacataatcacatgtggattagaactttggaagaaggaacaagtttaacaagtgaaacctgatctttggataaagaagtaagagtgcatagtgggatctggatttttggcgtagtttgaagattgttctaatcctctagaagttcaagttgtag

SEQ ID NO: 69205 - DNA, 1208 bp, Zea Mays
ctcagttctctaaatttttctcctttgttccactcgttcttatccaatatctagtacacgtactccctggaagtctctccgtgcgttgtctcatctccagaaatccacgtgcagccctgagcagtgagcactagcttctccacgtcatatatcccctcacctcatcgcttaggcagaagcagccgagctcccttctcgtagtgcccctcgcattcctgttctcagcccgctctcctctctgctcggtctccccagtacttgcctcacctggacacgccgttctgttgttaccacttgccagtcacgatctcttccttcctggagtttgcgtgttgggagtccgtggatcatggctgaaactgcacgcgttctcgtctccttgctctggcacatcattgtgtggagctgctgaacgccactgtctctagctcctgtatcgtcgtgccggcactcggctccccaacttcgctgttgcctactggacctgctgctctctctgcaacagctcgtcggctccctagaaattccccagccgtcgcctgcctcctcgctgacgttctcccacgtcgcgtccgcagcgctaccacgaattcaacatcgcccaggcgtccccgtactcggtttcaggccattgcaccaaacgcgcatcttcaaagtgccatcgagtttcatctcacctcacggtggccagggatcttcaaagaacagaactctgccgtcgtggtttggcgccgtgaattacccctgcgccgacccgttaactcgcgccatttccggtcgagttcacacgcgcactataggtttgtgagatcactgaagctctctggtaaatgtgtttttgggatccttagtgcagtttacaaattttaagtaatttaagtgtcctctaaaaaggattaattgaatatttagggagcaaatgtgagcaccaaaaattgtgagaacttttgagagtcttgttatcagaagataaactcttggtaaaagtttgtggctgtttgtaagctatttgctcagaaatccttgtagagtccctaattggaataataagcagaacataatcacatgtggattagaactttggaagaaggaacaagtttaacaagtgaaacctgatctttggataaagaagtaagagtgcatagtgggatctggatttttggcgtagtttgaagattgttctaatcctctagaagttcaagttgtag

SEQ ID NO: 69206 - DNA, 1291 bp, Zea Mays
atgacggagcactggacagtctggacaggacctccaattgttggtaaagtatgtgctgcgcctgcgctggccaatttcttggagcccagccgtgacgtgcagaagattggaacaaggatagcctttcttcctgtgcagccactccagtgcacgccgccgcagcttgctacacgtgccgggcaagggcaatggattccagcagcagagtgatcgccttcgattgcagctccttcaaactctacatggacggccaagtcgagcgtgcggcccaacgcatggaaaccgtgcccgccggcttcgacgcggacacgggcgtggcatccaaagacgtcgtcatcgacgtcgccaccggcgccaccgtgcggctctacctaccaccagtccagggagccacgacgaagctcccagtcgtcgtcttcttccatggcggctacttcatcgtcggctcagcccgcgagcctatgtaccatcgctatgtcaactcgctggtcgccagagcacgcgtcgtcgctgtctccgccgactaccgcctcgcgccagagcacccgctcccggcagcctacgacgactcctgggccgcgctcaagtgggcggtctccggcgcggaccagtggctgtccgaccacggcgacctcggccgcgtcttcctggtcggcatcagcgccggcggtaacattgcccacaacatggccatctctgtgggcgtgagcggcttgccggccgctgaaccaccgcgcatagaaggcgtgatcctgctccacccttccttttccggcgaacagaagatggatgtagaagaagaggagttctggcgatctaacaatagcaggtgggcggtcatcttcccgggcgcgaccggcggggcggacgatccaaggattaacccgatggcggacggcgcgccgagcctggagaagctagtgggtgaaaggctgctcgtctgcacggcgtctttggacccgagggcgccgagggggcccggatactgcgaggccgtacgggccagcgggtggcgcgggaaggtggagtggttcgagacggaaggtgaggaccacggtttcttcgtcctcaaccccggcagccacaaggcggttgaggtcatggatcgagtggttgctttccttgcggaccagtgatgacctcctcagggcacagcaaggtctagcagctcgccgcaaaaccggacgtcctagctacggcgcagccgttctcaggcgattgtttactgtctgtactcccaagagtgtcctagatgagttattggaataaacactacagtcaattcaaacca

SEQ ID NO: 69207 - DNA, 1594 bp, Zea Mays
accattcgaaagatccctccaggaaagatttttcttccctcctccgacgccccagcccaccaacacactctataaagcagccctcagtcacacacagaacgcacaagcgcaagccgggcaagaaaactccgcaggccagtctgcgagttggatggccttcttcttggccctcgtgtgcatcctcatcttgctagccatcgcctcctacgtccagtacactcgctggcaaaaggggaaaggccgcttcggcggccatgggaggtctgctcccttgaagctgcctcctggctccatgggctggccttaccttggcgagaccctccagctttactcccaggaccccagcttcttcttcgcttccaaacagaaggtacggcgagatcttcaagacgcaccttctgggttgcccgtgcgtgatgctggcgagcccggaggcggcgcggttcgtgctggtgacgcaggcgcacctgttcaagccgacctacccgcggagcaaggagcgcatgatcgggccgtcggctctcttcttccaccagggcgactaccacctccgcctccgcaagctcgtccagggcgcgctcggccccgacgcgctgcgcgcgctcgttcctgaggtggaggccgccgtgcggtccactctcgcttcctgggacgccggccacgtcagaagcacgttccacgccatgaagacgctgtcgtttgatgtgggcatcgtgacgatcttcggcggccggctggacgagcggcgcaaggcggagctgaggaagaattactccgtcgtggagaaggggtacaactccttccccaacagcctgccggggacgctccattacaaggcgatgcaggtgattttggagagcttaaggatggcgagcatcatctcgttcacgttcagggaggccgtggccgacgtggagtacaaagggttccttatccccaaggggtggaaggtgatgccgctcttcaggaacatccaccacagcccggactacttccaggatccacacaagttcgacccttctagattccaggtggcgccgcgtccgagcacgttcctgccgtttgggcacggcgtgcacgcgtgccccgggaacgagctggccaagctcgagatgctcgtcctcatccaccacctggtcaccggctacaggtggcaaatcgttggatccagtgacgaggtcgagtacagcccgttccctgtgcccaagcacggcttgcctgtcagattatggagacaaaacaatccggtcgacagaaaggggcgtgagaccgacgacgatcatgtggagaggatatttatttagtttgactcttgagttaggcatgaatttaaccccaagctagctagagaagttttttttcccctttgaaattcttctttgctcgcctcttcctcctggatcaaattgcgttggaggagaagaaacggcagctttctctctttcgttttctttgcctgcttcaccgctacgataatggtgaaaatatgtaagctacgtggacatcaatgatccacagcatcgttgatatatataatatatagagaaaattctctgcacgatcaatgcaattttatccggtatcttatttacca

SEQ ID NO: 69208 - DNA, 1910 bp, Zea Mays
accattcgaaagatccctccaggaaagatttttcttccctcctccgacgccccagcccaccaacacactctataaagcagccctcagtcacacacagaacgcacaagcgcaagccgggcaagaaaactccgcaggccagtctgcgagttggatggccttcttcttggccctcgtgtgcatcctcatcttgctagccatcgcctcctacgtccagtacactcgctggcaaaaggggaaaggccgcttcggcggccatgggaggtctgctcccttgaagctgcctcctggctccatgggctggccttaccttggcgagaccctccagctttactcccaggaccccagcttcttcttcgcttccaaacagaagaggtacggcgagatcttcaagacgcaccttctgggttgcccgtgcgtgatgctggcgagcccggaggcggcgcggttcgtgctggtgacgcaggcgcacctgttcaagccgacctacccgcggagcaaggagcgcatgatcgggccgtcggctctcttcttccaccagggcgactaccacctccgcctccgcaagctcgtccagggcgcgctcggccccgacgcgctgcgcgcgctcgttcctgaggtggaggccgccgtgcggtccactctcgcttcctgggacgccggccacgtcagaagcacgttccacgccatgaagacgctgtcgtttgatgtgggcatcgtgacgatcttcggcggccggctggacgagcggcgcaaggcggagctgaggaagaattactccgtcgtggagaaggggtacaactccttccccaacagcctgccggggacgctccattacaaggcgatgcaggacacgacggccagcgcgctcacctggatcgtcaagtacctccacgaccaccccaagctgctcgaggccgtccgggcggagcaggcggcggtccgcgaggccaccggcggcgggaggcagccgctggcgtgggcgcacacgaagagcatggcgctaacgcatagggtgattttggagagcttaaggatggcgagcatcatctcgttcacgttcagggaggccgtggccgacgtggagtacaaagggttccttatccccaaggggtggaaggtgatgccgctcttcaggaacatccaccacagcccggactacttccaggatccacacaagttcgacccttctagattccaggtggcgccgcgtccgagcacgttcctgccgtttgggcacggcgtgcacgcgtgccccgggaacgagctggccaagctcgagatgctcgtcctcatccaccacctggtcaccggctacaggtgcgtccatctcctctcagatcctctccatatattcccgcttgtcctatagcttgtggaccaggatgacacatggctggctgctgccgctctccatggggctccggctctgatctctctccgtgcatgctccaaatctcctcctgtctgtggcaaatcgttggatccagtgacgaggtcgagtacagcccgttccctgtgcccaagcacggcttgcctgtcagattatggagacaaaacaatccggtcgacagaaaggggcgtgagaccgacgacgatcatgtggagaggatatttatttagtttgactcttgagttaggcatgaatttaaccccaagctagctagagaagttttttttcccctttgaaattcttctttgctcgcctcttcctcctggatcaaattgcgttggaggagaagaaacggcagctttctctctttcgttttctttgcctgcttcaccgctacgataatggtgaaaatatgtaagctacgtggacatcaatgatccacagcatcgttgatatatataatatatagagaaaattctctgcacgatcaatgcaattttatccggtatcttatttacca

SEQ ID NO: 69209 - DNA, 1596 bp, Zea Mays
accattcgaaagatccctccaggaaagatttttcttccctcctccgacgccccagcccaccaacacactctataaagcagccctcagtcacacacagaacgcacaagcgcaagccgggcaagaaaactccgcaggccagtctgcgagttggatggccttcttcttggccctcgtgtgcatcctcatcttgctagccatcgcctcctacgtccagtacactcgctggcaaaaggggaaaggccgcttcggcggccatgggaggtctgctcccttgaagctgcctcctggctccatgggctggccttaccttggcgagaccctccagctttactcccaggaccccagcttcttcttcgcttccaaacagaagaggtacggcgagatcttcaagacgcaccttctgggttgcccgtgcgtgatgctggcgagcccggaggcggcgcggttcgtgctggtgacgcaggcgcacctgttcaagccgacctacccgcggagcaaggagcgcatgatcgggccgtcggctctcttcttccaccagggcgactaccacctccgcctccgcaagctcgtccagggcgcgctcggccccgacgcgctgcgcgcgctcgttcctgaggtggaggccgccgtgcggtccactctcgcttcctgggacgccggccacgtcagaagcacgttccacgccatgaagacgctgtcgtttgatgtgggcatcgtgacgatcttcggcggccggctggacgagcggcgcaaggcggagctgaggaagaattactccgtcgtggagaaggggtacaactccttccccaacagcctgccggggacgctccattacaaggcgatgcaggtgattttggagagcttaaggatggcgagcatcatctcgttcacgttcagggaggccgtggccgacgtggagtacaaagggttccttatccccaaggggtggaaggtgatgccgctcttcaggaacatccaccacagcccggactacttccaggatccacacaagttcgacccttctagattccaggtggcgccgcgtccgagcacgttcctgccgtttgggcacggcgtgcacgcgtgccccgggaacgagctggccaagctcgagatgctcgtcctcatccaccacctggtcaccggctacaggtggcaaatcgttggatccagtgacgaggtcgagtacagcccgttccctgtgcccaagcacggcttgcctgtcagattatggagacaaaacaatccggtcgacagaaaggggcgtgagaccgacgacgatcatgtggagaggatatttatttagtttgactcttgagttaggcatgaatttaaccccaagctagctagagaagttttttttcccctttgaaattcttctttgctcgcctcttcctcctggatcaaattgcgttggaggagaagaaacggcagctttctctctttcgttttctttgcctgcttcaccgctacgataatggtgaaaatatgtaagctacgtggacatcaatgatccacagcatcgttgatatatataatatatagagaaaattctctgcacgatcaatgcaattttatccggtatcttatttacca

SEQ ID NO: 69210 - DNA, 1761 bp, Zea Mays
accattcgaaagatccctccaggaaagatttttcttccctcctccgacgccccagcccaccaacacactctataaagcagccctcagtcacacacagaacgcacaagcgcaagccgggcaagaaaactccgcaggccagtctgcgagttggatggccttcttcttggccctcgtgtgcatcctcatcttgctagccatcgcctcctacgtccagtacactcgctggcaaaaggggaaaggccgcttcggcggccatgggaggtctgctcccttgaagctgcctcctggctccatgggctggccttaccttggcgagaccctccagctttactcccaggaccccagcttcttcttcgcttccaaacagaagaggtacggcgagatcttcaagacgcaccttctgggttgcccgtgcgtgatgctggcgagcccggaggcggcgcggttcgtgctggtgacgcaggcgcacctgttcaagccgacctacccgcggagcaaggagcgcatgatcgggccgtcggctctcttcttccaccagggcgactaccacctccgcctccgcaagctcgtccagggcgcgctcggccccgacgcgctgcgcgcgctcgttcctgaggtggaggccgccgtgcggtccactctcgcttcctgggacgccggccacgtcagaagcacgttccacgccatgaagacgctgtcgtttgatgtgggcatcgtgacgatcttcggcggccggctggacgagcggcgcaaggcggagctgaggaagaattactccgtcgtggagaaggggtacaactccttccccaacagcctgccggggacgctccattacaaggcgatgcaggacacgacggccagcgcgctcacctggatcgtcaagtacctccacgaccaccccaagctgctcgaggccgtccgggcggagcaggcggcggtccgcgaggccaccggcggcgggaggcagccgctggcgtgggcgcacacgaagagcatggcgctaacgcatagggtgattttggagagcttaaggatggcgagcatcatctcgttcacgttcagggaggccgtggccgacgtggagtacaaagggttccttatccccaaggggtggaaggtgatgccgctcttcaggaacatccaccacagcccggactacttccaggatccacacaagttcgacccttctagattccaggtggcgccgcgtccgagcacgttcctgccgtttgggcacggcgtgcacgcgtgccccgggaacgagctggccaagctcgagatgctcgtcctcatccaccacctggtcaccggctacaggtggcaaatcgttggatccagtgacgaggtcgagtacagcccgttccctgtgcccaagcacggcttgcctgtcagattatggagacaaaacaatccggtcgacagaaaggggcgtgagaccgacgacgatcatgtggagaggatatttatttagtttgactcttgagttaggcatgaatttaaccccaagctagctagagaagttttttttcccctttgaaattcttctttgctcgcctcttcctcctggatcaaattgcgttggaggagaagaaacggcagctttctctctttcgttttctttgcctgcttcaccgctacgataatggtgaaaatatgtaagctacgtggacatcaatgatccacagcatcgttgatatatataatatatagagaaaattctctgcacgatcaatgcaattttatccggtatcttatttacca

SEQ ID NO: 69211 - DNA, 628 bp, Zea Mays
gtcgtcaaaaaaaatcgggccgtccgatcgccaatcaaaggttgatgtctcctcttgctctctcgctcgctccgcctctttcctctcgctccctctgcttctggatacttccgatgcctctcctcgctccctcggtcgctgctgatgcgccacgccgccaccggcgcctcatcggcaggaatcatatggacagcccagaggtggtggcctccgcgtccccggctgcggcggcgagcgagcgccaggagaggcccgcgaggctgcggcggaagatctcgtccgcgttctgcgcctgcatgggccatcccccggcgtcgcacgtgcagcagtaggcatgctacgaactaaccgtggatcgcgtgtggacggatgggtgtgatgtgcatttggtcggcgcgccgtctccacacgaggtgcatggtcgtctaccgtacacggtgtaccaacaggagccagttgtgtgcatatcgctacagcttgcgacttgcgagggtgacgaactgacgattgaatgctgtcgctccggtttctgggaatgatcggataagtttacttccagaattatataatacatcttatggattatataagcatctattcatctttcttatagattatcataatctag

SEQ ID NO: 69212 - DNA, 1845 bp, Zea Mays
ttcgcccgcggttgcccatccggccatccccgcccacgcttgctcgcttccctcgtactctaccggtcggcctcccaggctctcccactatatatcgtgccccgtccccggaccaaacgagagataagcttgctccacgctccatcactctcctcactagtcacaagtacacccactggccagtggctacacgagctgagctatctccgctagcagctcgctcacaagtcacacccacgcccagagtgttctagctacaccctagctccggtcttcttctttttcttttttgaaaggcgccaccttggcgcggccttcctcctagatcgagtccaggcgcgcggtgcgagagggttccagcacccgcaggctgcttcccacaaccccattccacccttggaggtggccactgggccggccggccgcacctaactccggtcttgatctcatagcttgataagtaacaacgacgggcgtaagagctcagagaggtgggagctagggagaggaacaaaagaaaccagcgcgcttgtgcgtcgtgtggcgatgcatggcatgtgttgacatgtacaacccagagcaccatcatcagcaccagccagcgccgccgtccttcatggcgccgcggatgtccttctccagcgacttcgcggtggagccgccgcccccggccgcggcgcgcgggggcggggacgccgacttcgaattctccgtcggcagccacccgatgatggccgccgaccagctcttctccaagggccgcctcctgccgctccgggaggcgccgcagcaggccgccggcgggaggcccgtgactctgcgcgacgagctgcgcgccgacgagcgccacggccgcgccccccgcgcgaccaacatccggtggaaggagctgctcgggctcaagaaggcgcccaagaagcagcaggccgccgccgccgccgccgaagctgccgccggcgcgtccaccgacgcccacatggatcttggaggccagggaagcacgagaggctgaagcatcaagatcagcttgtgactagctagctagcagtgagcggcgaagcaagtactgcatggtcattgggtggtacaaagcgcgcgtgccttttcagccggctgctcatcatctgatattgggggggggggggggggggggggggggttgatttggcatctcatcgagctacctagctagctgatccatatctcgatcatgtcagtggcttagcctaccgccggagacgaagctgctacatacggccggagaagaagacgtctctggtggctcatcacagtcacaccgatgtgcatttcccttttacctatttgccgcatcttgttcccttcttttatttattatttattctgggtgtataaggggaatttttttttgtcatttgtttcttgatagtagtagttcgttggccgagttattagtagatgcatgtccaaccatccatggctgcaggctgctgcagctagctttgttgcattgtagtaatggtcgtcgcgtgcggtgtagcagcagtcagtcagtagtagtcaaaattaaaactccgctagctggtgtggtgactggtgcgtgcctatctctgattgttttgaaaagggccagtatatttcccctttaatttcacatggtgtggtccctggtgtacgtgttgtttagctgctctgttcccatgcttgtctgcttttggcacggccgcccgcccctcatcagctcacctcactccacaaagcgtttgcttttgtggctactaggtgtattgtgatcatgagtaagtagctagcttttgagttcgctcgagattatgtcctgaatttcgcgggaaacatgacgatgat

SEQ ID NO: 69213 - DNA, 834 bp, Zea Mays
tggacccatatggcgccgagctatgcacccctctagcgtcgagggctgacacaacgccattgtggcacctagctcggcgccacagatcttgacatcgagctagaaaggcctataaatcggttgtttcctggccgagagctgcgcccagccatttgaaaccttcgtttcaatcttcttccataccgcccagaggtgctcgtatcttcatattcaagttggaaaactttaaataccaagaagaggggtcgtgctcgggagttatatccggttgtatctagtaaggatgctcttgttcctcctgatcttcctgttcctaattgtgactatagcagaccggcttgggtatgtcaatccaaacatccatacacgactgctcgcggcttctacacttgtggcggttttaatgatcactttgaggtgattttttagtgtattgacggccctgataaatttgaccctcgatatctccttttcgctgattggttgtgcataaggaatacacatgagcgttttaagcgttgggtgcctcctcccccgaacccgccaccaatgacggatgaggagaagaacttagccacagaaagatgactgtcgcctcggtgcgattgtggagatcgtgatgtcttatgtgaggacaatgtgaagtactttgtgtgtcctaacagtaattatgtgagtgcataacaaatgtccaaaattttgttattttttgcacaaatttactaagttattctcatgtagccatacagtgggcatatgtgtaattttagagagtggttgtatggtcctaggttgaagcgtcccaatcctttaggactcaaatatgattcaaat

SEQ ID NO: 69214 - DNA, 2109 bp, Zea Mays
acacgactcgtacacgaagccggccagggacccgccgagtagcggggcgatcccagtggttggtccagaccccggtggccatggcgggaccgaaggaccgcgccgggttcatggacgcgccggtgaagttgccgctggcgaggctgttggcgcctactatgcgccccgtcagcagcgggccgatggtgcggacctggctccgcgggtccaggatcatggcgtaggtgacgaagagcagcgagaaggtgaggatcacctccatcaccaggccctgcatcgggttgatgccagcgcccagggcgtgcaccggggtcacctgcatttttcacatttttggtcagcactgcgagctttgctgttgctgctggactagtgtagcttccgttcttaattcatgggtggaaaaagtgacgttaaacaagttttagtgagttcacgactgtcacagcatacgagttcattgctatctccattctcgaatatttgttgctccctggttcattttcaaactaaactgggacaaatataaactgtgacaaataaaaaaaagaacggagggagtatttgactggtaacttcaccaacaactgttatgcaaatcaatacttggtgatcaccaaatctgagcagctgattagatacaatctgtggtcatatatgcagagtagccagagcatgttgaaaccgaccctcaactgtacaagcgttcatgtaaacctttttcttcttcttatacatggacgcattcatgacaattgtcaaggtcacaataaagataagactctattggcatccagtttattatatgttgttatgcacattctgaacttaacacatgcatattgaagtttgccatgtttagcttgtgcccgagacttatgtcaagcatgatgctccacatataccttgtgtggggagcatttgttagtttgtagttattttttctacttttcaaacagtagacagaaaaacctcagttttatttttttcctacttccagcacagaggctctcacccattcgagcccagcccaagttgatctgagacagacaagcatgaccgaccaaaatctgccgaaacaaaacttcccattttactagttaatttctagttaattttaaactcaacacagctgagtcttactagtattcttccaattttttagttgttgtgcttggaatgtgtttctaattctgcagcagtacgtgtagttgttcattatatatgctgattggtgatcactaaaaaatagctaagagcatgttcttttttcaaacagttgtgcattcaatcgtataaactgtatatgcatgtttgttcaagtgtgcttatgatgtatgttttatctgctgtagatgcctcacaacaacttagaattggttagaagaaatttgggggaaatgagagagaggcgtaggaagaagaggcaaagagtagcatcattatttgttgcaacggtcatgggtatgattgcggaatattattatcggaaaagacctagacatcttatggatccctctgaggtgatagagagagatgtagctggtcggaaacaaatgcgcaagtacgagtccttaattgcacttccattgattctgaggaagagatggctgttgaagcaacttaaaaagtgaaccaagttgtggttgggtgaattgaactgttgttgggtgtgttgatgttgctgtcttagtttatgttgggtgaattgaacatcacattgagtagcaagtaatgtgttccaatgatatgtggacatttgagacaaatctgcatcattattactattctcgtgatgcattctgcttgataaattgtagggtgaaaacttgtgtattttgttgtgtgcaagttgatgtggttacttccctccaaatatgtaaattccatatataactatccaaacaagatattgaatttgattcatggaaaagaattccattagcatcaaaacaaaaaaattgaattgaatcaaattctaaggaattactttctttaggaatctaatatctaaaatgttattcatggaatgagtttcatttccaaggaaacaaacaggctcttataagaattggaatctacttaaggctgtctcgagcagcaccatat

SEQ ID NO: 69215 - DNA, 1911 bp, Zea Mays
ataccctggacggccggccggacctatataaacagctgcaagatcttggttatctttgcaactatattatgctctatcagtttacaatcctcagataaaaaaaaatatgaggagcatctccgcctgcttcttcttcgttcttctcatcgtctgcttgttgggatcgcacgcaaattcgtcgcaggaggctaggctaagagaatttatcctgtccagaaggagcagtggcagcgcgttcagcgcacacgacgagtcggcctccacggccactagccgcctcagatcagagtactccggtacggaccagagcgcgcagaaggcggccgacaagatcacagagctgcccgggcagccgggcggcgtcggcttcgaccagtacagcgggtacgtgaccgtcgacgaggagagcggccgtgcgctcttctactacttcgtggaagcggcgcacgacgccccggcaaagccgttgctcctgtggcttaacggaggccctggttgctcgtcggtaggctatggagcaatgatagaaatcggcccgttccgcataaccagcgacaacaaaaccctgagcagaaacgagaacgcctggaacagcgaggccaacgtgctgttcctggagtcacctgccggtgttggattctcctactccaacacgtcttcagactatggcaagagcggtgaccaaaggaccgcggacgatgcattcgttttcctcatcaattggctcgagaggttccctgagtacaaagcacgcgccttttacatctccggggagagctatgccggacactacgttccgcagctcgcaacagccatccttagtcacagtataaagagtgaaagcggcatcataaaccttcgggctatattggttggcaatgcgtacctggacgacaacaagaacacgaagggacagattgactacttgtggagccacggagtgatatcagatgaggtgtgggccaacattacaaagaactgcaagttcagtcttgcggacggtgacgcgtgctccgatgccatggcagcatatgattctgggtatattagtggatacaatatatatgctcctgtttgcatcgaccaacccaatggaaactactaccccagcagcaatgtaagagcgtttatttctttctcctcctttctcttccctgcgaaagaatacgaggtattttttttttggacatgctgttgttgagatgctatttgaagcctgtttgttttatctatattgaatccaagtcactttctgtacgtggaagctttacacgtatgtttcctttctggaaagtatttcccttcctttttttttcaagatatcgcgagaaccatatttctgttctaagttgtaactacttatgcaggttccgggaattgacccatgcagcaactactacattcaggcttacatgaacaatcccttggtgcagatggctttccacgcaagaacgacagagtggtcaggctgcacaaacttgcactggaaagatgctccagtgtccatgacgccgaccatcaaatggcttctgggacttggcctaccggtgtggctatacagtggagactttgatgccgtctgcccactcaccgccacaaggtactccatcgctgacctcgagctctcggtcatggagccatggcgcccgtggacagcaaccagagaggttggaggctatgttcagcagtacacgggaggtcttgtgcttatttcagtgaggggagctggtcatcaagttccttatttccggcctgagagagcactggtgctgctcagatccttcttgaaaggaacgctcccaccttatgtagtggactagtaaatttttattatgtaaccccgtaggaagctcctagtgttgatgcttgtttgacattaatttcagaattcagacagtcacaatgttttcc

SEQ ID NO: 69216 - DNA, 2079 bp, Zea Mays
ctttattttggtgtgctcagtgctcacgtttctgagttctgtttacaccctcgcagctagctgggatcttctccctgcactgcacctgcaaagatgaggaggagcaacaccaccaccttcgtcctcctctccgtcgcaatcctactgcagggcacgtcccacgtcgttgcttcgtcgcaggaggctcagctcagcaagctcatggcgtccggaagaagcaggctcaggctcagcctcagcccaaacgggcctgccgagaccgacacatgctcagactccggcacctacgcgccactgcccgagcgctgcaagcgcccgccgagcggtgggaaggaggcggacaggatcaaggagctgcccggccagccgccgcgcgccaggttcggccagtactccgggtacgtgacggtgaacgaggagcgcggtcgcgagctcttctactacttcgtcgagtctcccgccgacgcggcctccaagccgctcatcctgtggctcaatggagggccggggtgctcgtcgctgggatacggggcgatgatggagctcggcccgttccgtgtcaaccccgacggcgagacgctgagcgagaacaagcacgcctggaacagtctggcaaacgtgatcttcctggagtcgccggcgggcgtcgggttctccttctcgagggacgccgccgactacaagaccgccggcgacaggaggaccgccgaggacacgtacatcttcctggtgaattggctggagaggttccccgactacaagggccgcgagctgtacgtggcgggggagagctacggcggccacttcgtcccgcaggccgccaccgtcgtcacgctgatgaaccgccgcctccccgcccggcagacgcccatcaacctccgcggcatcttccttggcaacccgttgctggatctgtacctttacgagaaggggaagctggagttcatgtggagccacggcgtgatctccgacgaggtgtgggcgagcaccctccacaactgcagcttcctccacgacctgtgctcctccaacgcatcggagcacacgttcgagggagggaggatggactgcttcaacctctacgctccggtctgcctccagtcgcccaacggaacctactactccagcagccacttacctggctacgatccgtgcagcgaccattacgtcagatcttacctcaatagcgtcgaggtgcaagaggccctgcacgctcggatcagaaactggtcagcctgcatgccgaacttggtctggaacgattcccctgctttcatggtgccaaccatcagatacctggtcgattgtgggctcagagtatggatctatagtggcgatttcgattccatatgctcgcttaccgcgacaaggtactccgtcaaggatctcaatctagcagtcaccaaaaagtggggtccctggtacacccctaacggcgaggttggaggctttgttcagcagtaccaaggaggtttcacgctggcgtcggtgagggcggctggtcatatggtccctacgttccagccggagagagcacttgttctgctcagggctttcctgagaaacacgctcccgccggctgacatcgtcacgaactgaagaacgtgcactccgtcagtccgtcgtcgggatagttgtctccatccacgaccatctgccattggggaaaacttccgccgccggacatcatctcccgcgtcctcgggttgtcgcggcgagttgcggcctgcagatccgatgtagctctccttcccgaattcgttgcgtcgacgctgccgtcgcaacctccaacaccgacgacgacgacgatggatctcccgccgcagcctcccgccttgcctccacgaagaaaaggccgcgcgagggcggaaagcaaaaaatagggaaacaacggcagtatgttggagaggagatgacgcccttttctaaaaaaaaaaacgttttgtggttgttttatcagctgtcttggaattgttcaaaggacaatgataaagtacaaaactgttcaggacttggtgacgcgaatcttttgatttggatctcaagtttacgatattaccaaactagtttatggttgat

SEQ ID NO: 69217 - DNA, 3004 bp, Zea Mays
atggcgttcgtgcttgggagacatcgaagtcccgaaatacacacagtctactctatctatataagttataaacgcgcgcgagatgatctttgcattatgatggtggagcatcgagctcgatcgccacatgtctaagacaaaaatggcgaggaaccagatctcgcattgcattcccctgctggcgatcctactcgccctactaccgctgacgacgaacgccgccctggaccaaccggcgctgctgaggcagctcatggagtctcgacgatcagcacggcggagcgtgggcgtgtccgacgagaccgacggcggcacgtggaccgacccggtcagcagcttcggcaagctgcccacgtactgcgagtcgcccgagcagcagggcagcaaggaggcggacaggatcgcggcgctgccggggcagccgcggcgcgtgaacttcgagcagtacgcggggtacgtgacggtggacgaggagcacggccgcgcgctcttctactacttcgtggagtccccctacgacgcggccgccaagcccctcgtcctctggctcaacggagggccagggtgctcgtcgcttggagccggcgcgatgcaggagctcggcccgttccgcgtcaaccccgacggcaagaccctgagcaggaaccgccactcctggaacaacgtggccaacgtcatcttcctcgagtcgccggccggagtcggcttctcctactccaacacgtcgtcggactacgacgagagcggtgacacgaggaccgcagtggactcgtacaccttcctcctccactggctggagcggttccccgagtacaagggccgcgacctgtacatctccggcgagagctacgccggccactacgtcccggagctggccgccgtcatcgtggccgtccgcgagctcaccgggcagaacccgacgaacctcaagggaatcttcgttggcaacccggtgctcgatgactacaagaacgacaagggctcgctcgagttcttgtggaaccacggggtgatgtccgacgagatatgggctaacatcaccgcgcactgcagcttcggcccgtccgacggcgtttcgtgcgaggaggccaagtcggccttcgacttcaggccgaacttcgtcaagaacgccggcaacataaacccttgcctggctacgacccgtgcataggcaactacgtcgacgtctacttgaacaaccctaaggtgcaggaggccctccatgctcgggtgaacaccgattggtcaggctgcgcgggattgccatggaacgacagcccgtcaagcatggtgccgacgctctcatggcttatcgacaccggactaagagtttggctgtacagcggcgatatggatgacgtgtgccccattaccgcgacgaggtactccgtcaaggacctcaatctaagcatcacagagccatggcgcccctggtacactcctgccaacgaggttggaggctacatccagcagtacagtggaggattcacgttcgcttccgtgaggggagctggtcacctggtgcccagtttccagcccaagaggtcgctgctcctcttctactcgtttctgaaaggcgtgcttccgcctgccgtttcactgtggcaaccgtgacggcatccaggaactactccaagtctaaatatatatatagcccatgatggagtctttactatagacacaaataacctgcacatgatgcacgcgagcaagtcacgcgcgtgaggcttccaacaagtcctcgatgatgcaggagctctgctatttcatttaaggagagaagggaaacaagagtcttaaaaagttgctattacatataacgaaaaacactcaaacacaatccaaaaaagagaagacattacactacacatggatgcccaactgcagctcgtctcaacgccatttcttgtttggccagatgaaagaccacttatgtcgatgcttgcttgccctaaaaaatacgccgattccgctccttccaaatattacaggtgaagtacataagcaaacccgaaacagtgagttgatcttctttcgatttgttttggagcacaacagtccaccacgaatcgaagctctgaatatctgagctgggcggcatgatcagattattggtccacgacctgactaactcccacacttccaaagcaaaagggcacttgagacaaaggtgaatcgcagtctccggctcttgatcgcaaaggacacacacaggattgcatggccaatttctttgacttagtttatctgctgtgaggatctttgcttgaatgagcagccacacaaagaacttatgtttcccttcggcgtgcgccttccagatagattttgctttgaaagcactgtaagagcccttgaattgtgcaagataagctgatttggaagagtacactccattctcggtccatatccaccgaatgcaatcttcctggtcattgagctgcaccccctcaatatggttccacaattgtatgaattcagccatatgttgaacattttccattctccagagacctctcgtccaattgaggttaaccaattgttcagccaccgatctatttttgcgccatgccagggggtacaagctaggtgcaatgtcaatcggagctttgcctgagagccaagcgtcaagccaaaaatttgtcttcaacccgttgccaaccgttacagatgttgatgcccggaacaaagctgcatctattttatcacagggtatctgagaaccagcccacgacctattagaatcagtccagttgagccaaagccacctgaggcacaaagcacgggtgaaacactctagatccaagatgccaaggccacccaaggatttcggtctggcagacttggtccaattcactagacagtgcccaccattagcattttcagcacctctccaaaggaaagacctcataattttatcaatcttcttaatggcccacttcttcaaagggaaaactgtcaaaaaatgcaccgggacagccgtgatcattgaatttaccagagt

SEQ ID NO: 69218 - DNA, 1594 bp, Zea Mays
ctctctcaaccctggcctctgaacagctcagtgaactccaagcgttaatccaggctagaacttgagataagacagcacaagacaaatgagtatacatctgagaaggagagagttattatctgtcacaatggcctccagagatcacactggcttgacccgacaacttcttgattttcaacatgatacaatagatgaggtaggcgcaggacatgacccattcattgatttgaaagcgagattcatggactttaaacagagaaactatgtggaaaaattttcaaattaccaaacccttgctgagcagcaaacaccaaagttcatggtggttgcttgtgctgactccagggtctgccctaccgctgttttggggtttcagcctggggaagcatttacagttcgtaatgtggcaaatttggtaccaccatatgagcatggggggacagagactagtgcagcactagagtttgctgtcaataccctccaggtagaaaatgtactggtgataggccacagtaggtgtgggggcatccaggcactaatgagcatgaaagatgattcgacctccggaagcttcattaaaaactgggtttcaattgggaagagcgcaaggttaagcacgaaagctgcagctggaaatatgagttttgacatacagtgcaaacattgtgaaaaggaatcaataaatagttctctgttgaacttgttaacatacccatggattgagaagagggtgaatgaaggcactttgaatcttcatggaggctactacaacttcgtcgattgcacatttgagaaatggacattgttgtaccgtgaagggttggaaggtggaagcaagtatgccataaagaaccggtccacctggtgttgaccaacgaaggtcgtgtttacttggaagcacaataccacaatggagtgaggtgcaacgcgcgatggacaatatggttgcaaggtgaaagtctgtggaactgccgggggcaaagtgaattttatccaactatctgtaatatgtgtgctgttttccggttgaaactattaagaaaaaaataggaataagctgcaggatcggtcgtaatgcgtgtaattgtcgccacatttggcattaccttgctattgtaacatttgtaccatttgttgtatcattataactgagatatatacggtctcgtcaaatttgcttggtgacaatgttgtttgtttggaatggaagggtcggcaatggaaattccgtgatattctcacatgtaaaaaggtatgagtagcaccgtagcacacatgccagagtccttccctttcccttctgtctccaatcagtcacccgcttcgacagcgccactgcccactgtcctactaaaccctggcgaggtgcgccgagaagcgctgcctcttgtagcagcactcggcgccgagcatgtcctcccggctgagcagcacggcccggagcgccgcctgcagcgctgggcgcgacgacgtgcccgcgtcgtcgccgttgtgctgcccgccgacgtccagctccaggacgctccgcgtccgcccaccgacggtggctatctcggcgcgcacggccctggcgctgacggagcgcacggcgcgg

SEQ ID NO: 69219 - DNA, 1493 bp, Zea Mays
cttgcttccatcgttttcggagagagttattatctgtcacaatggcctccagagatcacactggcttgacccgacaacttcttgattttcaacatgatacaatagatgaggtaggcgcaggacatgacccattcattgatttgaaagcgagattcatggactttaaacagagaaactatgtggaaaaattttcaaattaccaaacccttgctgagcagcaaacaccaaagttcatggtggttgcttgtgctgactccagggtctgccctaccgctgttttggggtttcagcctggggaagcatttacagttcgtaatgtggcaaatttggtaccaccatatgagcatggggggacagagactagtgcagcactagagtttgctgtcaataccctccaggtagaaaatgtactggtgataggccacagtaggtgtgggggcatccaggcactaatgagcatgaaagatgattcgacctccggaagcttcattaaaaactgggtttcaattgggaagagcgcaaggttaagcacgaaagctgcagctggaaatatgagttttgacatacagtgcaaacattgtgaaaaggaatcaataaatagttctctgttgaacttgttaacatacccatggattgagaagagggtgaatgaaggcactttgaatcttcatggaggctactacaacttcgtcgattgcacatttgagaaatggacattgttgtaccgtgaagggttggaaggtggaagcaagtatgccataaagaaccggtccacctggtgttgaccaacgaagaagcacaataccacaatggagtgaggtgcaacgcgcgatggacaatatggttgcaaggtgaaagtctgtggaactgccgggggcaaagtgaattttatccaactatctgtaatatgtgtgctgttttccggttgaaactattaagaaaaaaataggaataagctgcaggatcggtcgtaatgcgtgtaattgtcgccacatttggcattaccttgctattgtaacatttgtaccatttgttgtatcattataactgagatatatacggtctcgtcaaatttgcttggtgacaatgttgtttgtttggaatggaagggtcggcaatggaaattccgtgatattctcacatgtaaaaaggtatgagtagcaccgtagcacacatgccagagtccttccctttcccttctgtctccaatcagtcacccgcttcgacagcgccactgcccactgtcctactaaaccctggcgaggtgcgccgagaagcgctgcctcttgtagcagcactcggcgccgagcatgtcctcccggctgagcagcacggcccggagcgccgcctgcagcgctgggcgcgacgacgtgcccgcgtcgtcgccgttgtgctgcccgccgacgtccagctccaggacgctccgcgtccgcccaccgacggtggctatctcggcgcgcacggccctggcgctgacggagcgcacggcgcgg

SEQ ID NO: 69220 - DNA, 1531 bp, Zea Mays
cagctgtctgtcttcatgcttcccttgcttccatcgttttcggagagagttattatctgtcacaatggcctccagagatcacactggcttgacccgacaacttcttgattttcaacatgatacaatagatgaggtaggcgcaggacatgacccattcattgatttgaaagcgagattcatggactttaaacagagaaactatgtggaaaaattttcaaattaccaaacccttgctgagcagcaaacaccaaagttcatggtggttgcttgtgctgactccagggtctgccctaccgctgttttggggtttcagcctggggaagcatttacagttcgtaatgtggcaaatttggtaccaccatatgagcatggggggacagagactagtgcagcactagagtttgctgtcaataccctccaggtagaaaatgtactggtgataggccacagtaggtgtgggggcatccaggcactaatgagcatgaaagatgattcgacctccggaagcttcattaaaaactgggtttcaattgggaagagcgcaaggttaagcacgaaagctgcagctggaaatatgagttttgacatacagtgcaaacattgtgaaaaggaatcaataaatagttctctgttgaacttgttaacatacccatggattgagaagagggtgaatgaaggcactttgaatcttcatggaggctactacaacttcgtcgattgcacatttgagaaatggacattgttgtaccgtgaagggttggaaggtggaagcaagtatgccataaagaaccggtccacctggtgttgaccaacgaaggtcgtgtttacttggaagcacaataccacaatggagtgaggtgcaacgcgcgatggacaatatggttgcaaggtgaaagtctgtggaactgccgggggcaaagtgaattttatccaactatctgtaatatgtgtgctgttttccggttgaaactattaagaaaaaaataggaataagctgcaggatcggtcgtaatgcgtgtaattgtcgccacatttggcattaccttgctattgtaacatttgtaccatttgttgtatcattataactgagatatatacggtctcgtcaaatttgcttggtgacaatgttgtttgtttggaatggaagggtcggcaatggaaattccgtgatattctcacatgtaaaaaggtatgagtagcaccgtagcacacatgccagagtccttccctttcccttctgtctccaatcagtcacccgcttcgacagcgccactgcccactgtcctactaaaccctggcgaggtgcgccgagaagcgctgcctcttgtagcagcactcggcgccgagcatgtcctcccggctgagcagcacggcccggagcgccgcctgcagcgctgggcgcgacgacgtgcccgcgtcgtcgccgttgtgctgcccgccgacgtccagctccaggacgctccgcgtccgcccaccgacggtggctatctcggcgcgcacggccctggcgctgacggagcgcacggcgcgg

SEQ ID NO: 69221 - DNA, 1857 bp, Zea Mays
ctcattgcccgtgccatatctggagcagttgtcttccctatagagccaatcgcaagccttgctgccatggaagttgggaggggagcacgtgcccaggtgcccgtccaggatccaccacaaccgccagtgccttttacaggtcatgccgcggacggcactgcttcgccttgctgcagcttcgacgcgcgcgtcctcggctcccgcggcgcggcggctgtactcgtcctcacactcacacggacacggcagcgaggagcacgcgatcactcgggaggatgagcagcttccaccgccgccccacgggccggaccccggcgtgcggcggctgcctcgtcgccgtggagagcatcggtgagcatggatagatagagagagttattatctgtcacaatggcctccagagatcacactggcttgacccgacaacttcttgattttcaacatgatacaatagatgaggtaggcgcaggacatgacccattcattgatttgaaagcgagattcatggactttaaacagagaaactatgtggaaaaattttcaaattaccaaacccttgctgagcagcaaacaccaaagttcatggtggttgcttgtgctgactccagggtctgccctaccgctgttttggggtttcagcctggggaagcatttacagttcgtaatgtggcaaatttggtaccaccatatgagcatggggggacagagactagtgcagcactagagtttgctgtcaataccctccaggtagaaaatgtactggtgataggccacagtaggtgtgggggcatccaggcactaatgagcatgaaagatgattcgacctccggaagcttcattaaaaactgggtttcaattgggaagagcgcaaggttaagcacgaaagctgcagctggaaatatgagttttgacatacagtgcaaacattgtgaaaaggaatcaataaatagttctctgttgaacttgttaacatacccatggattgagaagagggtgaatgaaggcactttgaatcttcatggaggctactacaacttcgtcgattgcacatttgagaaatggacattgttgtaccgtgaagggttggaaggtggaagcaagtatgccataaagaaccggtccacctggtgttgaccaacgaaggtcgtgtttacttggaagcacaataccacaatggagtgaggtgcaacgcgcgatggacaatatggttgcaaggtgaaagtctgtggaactgccgggggcaaagtgaattttatccaactatctgtaatatgtgtgctgttttccggttgaaactattaagaaaaaaataggaataagctgcaggatcggtcgtaatgcgtgtaattgtcgccacatttggcattaccttgctattgtaacatttgtaccatttgttgtatcattataactgagatatatacggtctcgtcaaatttgcttggtgacaatgttgtttgtttggaatggaagggtcggcaatggaaattccgtgatattctcacatgtaaaaaggtatgagtagcaccgtagcacacatgccagagtccttccctttcccttctgtctccaatcagtcacccgcttcgacagcgccactgcccactgtcctactaaaccctggcgaggtgcgccgagaagcgctgcctcttgtagcagcactcggcgccgagcatgtcctcccggctgagcagcacggcccggagcgccgcctgcagcgctgggcgcgacgacgtgcccgcgtcgtcgccgttgtgctgcccgccgacgtccagctccaggacgctccgcgtccgcccaccgacggtggctatctcggcgcgcacggccctggcgctgacggagcgcacggcgcgg

SEQ ID NO: 69222 - DNA, 1877 bp, Zea Mays
gtgtactcctgtacagctgaagaagatgggcatgccactcattgcccgtgccatatctggagcagttgtcttccctatagagccaatcgcaagccttgctgccatggaagttgggaggggagcacgtgcccaggtgcccgtccaggatccaccacaaccgccagtgccttttacaggtcatgccgcggacggcactgcttcgccttgctgcagcttcgacgcgcgcgtcctcggctcccgcggcgcggcggctgtactcgtcctcacactcacacggacacggcagcgaggagcacgcgatcactcgggaggatgagcagcttccaccgccgccccacgggccggaccccggcgtgcggcggctgcctcgtcgccgtggagagcatcggagagagttattatctgtcacaatggcctccagagatcacactggcttgacccgacaacttcttgattttcaacatgatacaatagatgaggtaggcgcaggacatgacccattcattgatttgaaagcgagattcatggactttaaacagagaaactatgtggaaaaattttcaaattaccaaacccttgctgagcagcaaacaccaaagttcatggtggttgcttgtgctgactccagggtctgccctaccgctgttttggggtttcagcctggggaagcatttacagttcgtaatgtggcaaatttggtaccaccatatgagcatggggggacagagactagtgcagcactagagtttgctgtcaataccctccaggtagaaaatgtactggtgataggccacagtaggtgtgggggcatccaggcactaatgagcatgaaagatgattcgacctccggaagcttcattaaaaactgggtttcaattgggaagagcgcaaggttaagcacgaaagctgcagctggaaatatgagttttgacatacagtgcaaacattgtgaaaaggaatcaataaatagttctctgttgaacttgttaacatacccatggattgagaagagggtgaatgaaggcactttgaatcttcatggaggctactacaacttcgtcgattgcacatttgagaaatggacattgttgtaccgtgaagggttggaaggtggaagcaagtatgccataaagaaccggtccacctggtgttgaccaacgaaggtcgtgtttacttggaagcacaataccacaatggagtgaggtgcaacgcgcgatggacaatatggttgcaaggtgaaagtctgtggaactgccgggggcaaagtgaattttatccaactatctgtaatatgtgtgctgttttccggttgaaactattaagaaaaaaataggaataagctgcaggatcggtcgtaatgcgtgtaattgtcgccacatttggcattaccttgctattgtaacatttgtaccatttgttgtatcattataactgagatatatacggtctcgtcaaatttgcttggtgacaatgttgtttgtttggaatggaagggtcggcaatggaaattccgtgatattctcacatgtaaaaaggtatgagtagcaccgtagcacacatgccagagtccttccctttcccttctgtctccaatcagtcacccgcttcgacagcgccactgcccactgtcctactaaaccctggcgaggtgcgccgagaagcgctgcctcttgtagcagcactcggcgccgagcatgtcctcccggctgagcagcacggcccggagcgccgcctgcagcgctgggcgcgacgacgtgcccgcgtcgtcgccgttgtgctgcccgccgacgtccagctccaggacgctccgcgtccgcccaccgacggtggctatctcggcgcgcacggccctggcgctgacggagcgcacggcgcgg

SEQ ID NO: 69223 - DNA, 1420 bp, Zea Mays
atggaggaagccaagaaaaatggtatccagcagctagctgaagaaacaactctggtgcagtttatatttgggggttatctgcgatctaagataaaatgtacgaagtgtcaggtcatttcaaaacacagtgagcgtattttggatttaactgttgaaatagatggggatatcagtacccttgatggtgcacttcgtcggtttacatcttcagaaattttagacggtgataataggtaccattgtagcaggtaggttccctccataattttgtagcttctctaaatgcttatagtgtgcacttgaatttttataatgttgcttgcatatatcacgttgcacagtcaaggaccttaatcagcaattgatcttgaactgaagtatttgtcaatttacttcatttgttgtaggggttgagtttggtgatcacttggtatcattacttgagatttatttaagaaatgaacgcattagttagcactgactactcatctaatctgcttgacctaatcatacctcacctgatccttttttttgcttctatataaaatcttgaatttatttactttcaccagatgtaattcgtacgagcgtgcccaaaagaagttgactatattagaggccccaaatatattgacaattgcactgaaaagatatcagtctggtgttcttggcaagatcagcaaggctgtcaagttcccagagcacttaaatttgtcccagtatatgtgtagaacagatgattctagtcctgtgtacagcttatatgctgtggttgtccaccgcaatgttaggaatgcaactgtgtctggtcattatgtatgttatgtcaaggattcccaagggaagtggcacgagatggacgataacaaggtgaaacctgtgtctgtccaaaaagtcctgtcaagatgtgcatacatgctgctctatgcaagatgttcaccgcgtgccccaacctctgcacgcgctaagaaacccaagcagatggcacgttcaggatcattcccttcgggaggaggcaggtaccggagcaggcaccaaggtgggctttatccaatctgggaggagcagatggagagttatgaagcaatgtactagctagagagctggagcctggaggcctaccgtacgtcgtcagggtcgaacggttggttgaagaagaaaacttgaagagaactgaatccctcgataaacatacttacatatatatataccaaaaaactcaggtgcagaataatgctcagactgatgagcgcgagacgttttgatgacatgcccgtggtgctttctttttctctttgtttctctctctctctctgatggtgcatggcaagatactggttgctgttgctggctgtaaaactttttttgtggaggaagcggaagttaacttttgaccgtgacagcagctgaggtctgtgat

SEQ ID NO: 69224 - DNA, 1400 bp, Zea Mays
tatgcaattgataatatgcaatctgctagcatggaggaagccaagaaaaatggtatccagcagctagctgaagaaacaactctggtgcagtttatatttgggggttatctgcgatctaagatgtaattcgtacgagcgtgcccaaaagaagttgactatattagaggccccaaatatattgacaattgcactgaaaagatatcagtctggtgttcttggcaagatcagcaaggctgtcaagttcccagagcacttaaatttgtcccagtatatgtgtagaacagatgattctagtcctgtgtacagcttatatgctgtggttgtccaccgcaatgttaggaatgcaactgtgtctggtcattatgtatgttatgtcaaggattcccaagggaagtggcacgagatggacgataacaaggtgaaacctgtgtctgtccaaaaagtcctgtcaagatgtgcatacatgctgctctatgcaagatgttcaccgcgtgccccaacctctgcacgcgctaagaaacccaagcagatggcacgttcaggatcattcccttcgggaggaggcaggtaccggagcaggcaccaaggtgggcaactgtctaaggacgatgcggtccacaaccttacatacacattgggtacatctgacacgtcatcgtacccggtagcaccctgctttagcggaagcaacagctcctcgctgttcagcagctctgatgcagggtcaagctgcactttcagcagcgacagcactgacagtgccgggaaatccagcatggagtatgaccgcatttttggaacctcgggctatatgtgcccggtggtaagctcagcggttgtgcccgagggagacaatcagagttacttgcggcaagggtctagctggaaccctagctcttcgggtcatgacatggatgaggcaggtaagtttgcgcggcagtaccagggagggtatcaggctggcggaggggctcccgtaggcggttgggagaccccatccttctcttacgccgatcaaggtgggctttatccaatctgggaggagcagatggagagttatgaagcaatgtactagctagagagctggagcctggaggcctaccgtacgtcgtcagggtcgaacggttggttgaagaagaaaacttgaagagaactgaatccctcgataaacatacttacatatatatataccaaaaaactcaggtgcagaataatgctcagactgatgagcgcgagacgttttgatgacatgcccgtggtgctttctttttctctttgtttctctctctctctctgatggtgcatggcaagatactggttgctgttgctggctgtaaaactttttttgtggaggaagcggaagttaacttttgaccgtgacagcagctgaggtctgtgat

SEQ ID NO: 69225 - DNA, 1353 bp, Zea Mays
ttaacaggtatgcaattgataatatgcaatctgctagcatggaggaagccaagaaaaatggtatccagcagctagctgaagaaacaactctggtgcagtttatatttgggggttatctgcgatctaagataaaatgtacgaagtgtcaggtcatttcaaaacacagtgagcgtattttggatttaactgttgaaatagatggggatatcagtacccttgatggtgcacttcgtcggtttacatcttcagaaattttagacggtgataataggtaccattgtagcagatgtaattcgtacgagcgtgcccaaaagaagttgactatattagaggccccaaatatattgacaattgcactgaaaagatatcaggtgaaacctgtgtctgtccaaaaagtcctgtcaagatgtgcatacatgctgctctatgcaagatgttcaccgcgtgccccaacctctgcacgcgctaagaaacccaagcagatggcacgttcaggatcattcccttcgggaggaggcaggtaccggagcaggcaccaaggtgggcaactgtctaaggacgatgcggtccacaaccttacatacacattgggtacatctgacacgtcatcgtacccggtagcaccctgctttagcggaagcaacagctcctcgctgttcagcagctctgatgcagggtcaagctgcactttcagcagcgacagcactgacagtgccgggaaatccagcatggagtatgaccgcatttttggaacctcgggctatatgtgcccggtggtaagctcagcggttgtgcccgagggagacaatcagagttacttgcggcaagggtctagctggaaccctagctcttcgggtcatgacatggatgaggcaggtaagtttgcgcggcagtaccagggagggtatcaggctggcggaggggctcccgtaggcggttgggagaccccatccttctcttacgccgatcaaggtgggctttatccaatctgggaggagcagatggagagttatgaagcaatgtactagctagagagctggagcctggaggcctaccgtacgtcgtcagggtcgaacggttggttgaagaagaaaacttgaagagaactgaatccctcgataaacatacttacatatatatataccaaaaaactcaggtgcagaataatgctcagactgatgagcgcgagacgttttgatgacatgcccgtggtgctttctttttctctttgtttctctctctctctctgatggtgcatggcaagatactggttgctgttgctggctgtaaaactttttttgtggaggaagcggaagttaacttttgaccgtgacagcagctgaggtctgtgat

SEQ ID NO: 69226 - DNA, 921 bp, Zea Mays
ttaacaggtatgcaattgataatatgcaatctgctagcatggaggaagccaagaaaaatggtatccagcagctagctgaagaaacaactctggtgcagtttatatttgggggttatctgcgatctaagataaaatgtacgaagtgtcaggtcatttcaaaacacagtgagcgtattttggatttaactgttgaaatagatggggatatcagtacccttgatggtgcacttcgtcggtttacatcttcagaaattttagacggtgataataggtaccattgtagcagatgtaattcgtacgagcgtgcccaaaagaagttgactatattagaggccccaaatatattgacaattgcactgaaaagatatcaggtgaaacctgtgtctgtccaaaaagtcctgtcaagatgtgcatacatgctgctctatgcaagatgttcaccgcgtgccccaacctctgcacgcgctaagaaacccaagcagatggcacgttcaggatcattcccttcgggaggaggcaggtaccggagcaggcaccaaggtgggctttatccaatctgggaggagcagatggagagttatgaagcaatgtactagctagagagctggagcctggaggcctaccgtacgtcgtcagggtcgaacggttggttgaagaagaaaacttgaagagaactgaatccctcgataaacatacttacatatatatataccaaaaaactcaggtgcagaataatgctcagactgatgagcgcgagacgttttgatgacatgcccgtggtgctttctttttctctttgtttctctctctctctctgatggtgcatggcaagatactggttgctgttgctggctgtaaaactttttttgtggaggaagcggaagttaacttttgaccgtgacagcagctgaggtctgtgat

SEQ ID NO: 69227 - DNA, 1380 bp, Zea Mays
tttggaccgcgggtccttaaccaaccagtaaatgtgccacgtggccgactctagatggtgtgcgaggagacacaagcgattatcctggttcgggctactctggaacaattttggtatctatttataacaaaactgtttgctagttttctggtagcaaatggtgatccaaaacatcccattaattggtattaatgaatgatttggtcagatcttcccatttcataaaacggctctgaatgataagttttaacaggtatgcaattgataatatgcaatctgctagcatggaggaagccaagaaaaatggtatccagcagctagctgaagaaacaactctggtgcagtttatatttgggggttatctgcgatctaagataaaatgtacgaagtgtcaggtcatttcaaaacacagtgagcgtattttggatttaactgttgaaatagatggggatatcagtacccttgatggtgcacttcgtcggtttacatcttcagaaattttagacggtgataataggtaccattgtagcagatgtaattcgtacgagcgtgcccaaaagaagttgactatattagaggccccaaatatattgacaattgcactgaaaagatatcagtctggtgttcttggcaagatcagcaaggctgtcaagttcccagagcacttaaatttgtcccagtatatgtgtagaacagatgattctagtcctgtgtacagcttatatgctgtggttgtccaccgcaatgttaggaatgcaactgtgtctggtcattatgtatgttatgtcaaggattcccaagggaagtggcacgagatggacgataacaaggtgaaacctgtgtctgtccaaaaagtcctgtcaagatgtgcatacatgctgctctatgcaagatgttcaccgcgtgccccaacctctgcacgcgctaagaaacccaagcagatggcacgttcaggatcattcccttcgggaggaggcaggtaccggagcaggcaccaaggtgggctttatccaatctgggaggagcagatggagagttatgaagcaatgtactagctagagagctggagcctggaggcctaccgtacgtcgtcagggtcgaacggttggttgaagaagaaaacttgaagagaactgaatccctcgataaacatacttacatatatatataccaaaaaactcaggtgcagaataatgctcagactgatgagcgcgagacgttttgatgacatgcccgtggtgctttctttttctctttgtttctctctctctctctgatggtgcatggcaagatactggttgctgttgctggctgtaaaactttttttgtggaggaagcggaagttaacttttgaccgtgacagcagctgaggtctgtgat

SEQ ID NO: 69228 - DNA, 1812 bp, Zea Mays
tttggaccgcgggtccttaaccaaccagtaaatgtgccacgtggccgactctagatggtgtgcgaggagacacaagcgattatcctggttcgggctactctggaacaattttggtatctatttataacaaaactgtttgctagttttctggtagcaaatggtgatccaaaacatcccattaattggtattaatgaatgatttggtcagatcttcccatttcataaaacggctctgaatgataagttttaacaggtatgcaattgataatatgcaatctgctagcatggaggaagccaagaaaaatggtatccagcagctagctgaagaaacaactctggtgcagtttatatttgggggttatctgcgatctaagataaaatgtacgaagtgtcaggtcatttcaaaacacagtgagcgtattttggatttaactgttgaaatagatggggatatcagtacccttgatggtgcacttcgtcggtttacatcttcagaaattttagacggtgataataggtaccattgtagcagatgtaattcgtacgagcgtgcccaaaagaagttgactatattagaggccccaaatatattgacaattgcactgaaaagatatcagtctggtgttcttggcaagatcagcaaggctgtcaagttcccagagcacttaaatttgtcccagtatatgtgtagaacagatgattctagtcctgtgtacagcttatatgctgtggttgtccaccgcaatgttaggaatgcaactgtgtctggtcattatgtatgttatgtcaaggattcccaagggaagtggcacgagatggacgataacaaggtgaaacctgtgtctgtccaaaaagtcctgtcaagatgtgcatacatgctgctctatgcaagatgttcaccgcgtgccccaacctctgcacgcgctaagaaacccaagcagatggcacgttcaggatcattcccttcgggaggaggcaggtaccggagcaggcaccaaggtgggcaactgtctaaggacgatgcggtccacaaccttacatacacattgggtacatctgacacgtcatcgtacccggtagcaccctgctttagcggaagcaacagctcctcgctgttcagcagctctgatgcagggtcaagctgcactttcagcagcgacagcactgacagtgccgggaaatccagcatggagtatgaccgcatttttggaacctcgggctatatgtgcccggtggtaagctcagcggttgtgcccgagggagacaatcagagttacttgcggcaagggtctagctggaaccctagctcttcgggtcatgacatggatgaggcaggtaagtttgcgcggcagtaccagggagggtatcaggctggcggaggggctcccgtaggcggttgggagaccccatccttctcttacgccgatcaaggtgggctttatccaatctgggaggagcagatggagagttatgaagcaatgtactagctagagagctggagcctggaggcctaccgtacgtcgtcagggtcgaacggttggttgaagaagaaaacttgaagagaactgaatccctcgataaacatacttacatatatatataccaaaaaactcaggtgcagaataatgctcagactgatgagcgcgagacgttttgatgacatgcccgtggtgctttctttttctctttgtttctctctctctctctgatggtgcatggcaagatactggttgctgttgctggctgtaaaactttttttgtggaggaagcggaagttaacttttgaccgtgacagcagctgaggtctgtgat

SEQ ID NO: 69229 - DNA, 1003 bp, Zea Mays
atgcaattgataatatgcaatctgctagcatggaggaagccaagaaaaatggtatccagcagctagctgaagaaacaactctggtgcagtttatatttgggggttatctgcgatctaagatgtaattcgtacgagcgtgcccaaaagaagttgactatattagaggccccaaatatattgacaattgcactgaaaagatatcaggtgaaacctgtgtctgtccaaaaagtcctgtcaagatgtgcatacatgctgctctatgcaagatgttcaccgcgtgccccaacctctgcacgcgctaagaaacccaagcagatggcacgttcaggatcattcccttcgggaggaggcaggtaccggagcaggcaccaaggtgggcaactgtctaaggacgatgcggtccacaaccttacatacacattgggtacatctgacacgtcatcgtacccggtagcaccctgctttagcggaagcaacagctcctcgctgttcagcagctctgatgcagggtcaagctgcactttcagcagcgacagcactgacagtgccgggaaatccagcatggagtatgaccgcatttttggaacctcgggctatatgtgcccggtggtaagctcagcggttgtgcccgagggagacaatcagagttacttgcggcaagggtctagctggaaccctagctcttcgggtcatgacatggatgaggcaggtaagtttgcgcggcagtaccagggagggtatcaggctggcggaggggctcccgtaggcggttgggagaccccatccttctcttacgccgatcaaggtaaatatcagggcagtagtagtcgtcgtaaccgtagtttcggtagtagctgtaaattaacacagcagcggaggagtacagggcgggcgtttttttatataaggtcgattagggagaggatacaagggggcttgggctcgggcttgggttcgtagagagattaattattcatcatgtatgattacgccattgcaattg

SEQ ID NO: 69230 - DNA, 1662 bp, Zea Mays
cttgctttgtcgatggtgttgttcaatgacatcaacaagatgaccacgaaggaggccattggatcaataaaggcgcatgaagacctgctcaagggacgggtggtccaagtagaagaacaactcctcatggcaagagtgcaaggtcgtgggcgtggctgtggcgaaggacgcaaaggcaagagcaagcaccttaaaatgtcagatagatcactggagaaatggccacaaagatcaatgccatcctctaggtcatggtgccacacaagatgatacacctgaaaatgttatggctggagtagggcttaaggatatgccctctggggcatccactacctaccaaatttgtgatgacaataaagacatgctgtattctcagtttactgggaaggcagaatctgttgattattcgaagctttcaacttcaagtaaaatttgcaaagtttgtgatggcactgttcatgaaaattcttgtcctgctcatgaccagcatgttgggttggaacctgaaccggagcaatccaacaagcaagctcttggcacagaaaaccatgaaagcttaagaaaattgccatgcatgccagctgttgacaaagttccttccgctcaaagtggtacatattgtttggcaagtaaccaacttaaaagagaagatgatcctcctggtccctgtgctaggccagagagctcaggtttgatgccacataattcatcaacagagaagaattatgccagacaacaaacaactacaatagctgcgaggaattatccaacagaatcgacggtttttgcatacaaaaaatttgttgagctctacagcttcaacaagttggaattgcacccatttggtctttgcaacctcgggaataggtaagtgattaatgcttcagttataattgcatatatgaaccatattatttgaggtgtataacctaactgatgtgtgccacaatttctttctatctttctacacatatgctatatgtaaatgaacataattttgcttctattatgtggttctgcataggctcatttggagagtgttaatatttgcattacttctgtaatgtttccttaaaacacattctgaaactaattaatttgtttcttccattaaagtttgaagggctggattttttagctatattttatcgaacacatttcatagaatttattgatgtgttaatccctgagctgggccattttttcacttcattctatcgtactttgcatgtacttcactttattgatgtgtttcatgtattcattgaatatgctgaagtgtgggattcaaatgaatacagatgagaattgagaagaaataaatgagatggtatcgctggcttttaaaatgcatttaatgttaatgtttgcacattactaagttttggttgattctcattgcattatgaatggagagcctattagcatttgtatagcacaatataataatatagttattgaaccagaacacacactataaacttagaggaacataactaagctggtagtgcttatagtgtagtgaatacctagatgttggaatataatataagtgaattgtccacttctttttaccagtttaggcttttgggttatcagagctagaggtctcaagtttgaatcctatttagcacaattaaataaaaatatttgttgttcgct

SEQ ID NO: 69231 - DNA, 2185 bp, Zea Mays
ctggcctgcgcgccgcgcggctactccccccctcgcgttttcacgccaccctctctgggctggagagccccggaaacggacgccgacgcgcggcagcccccctcgccgccttccggagccttccgcgtcttccgttaccagtccgggccatcataagggggcgagggcgagagggggggcgccccgtcgaaccctaaatccctcacccccattcctcaccgcgggcggcggcgcgcgcttgcggggcaaggctgctgctatgctcggcgaggatccactgaagtgaggttggactcagagagtccgaccttccggggatggaggtgcccaaggcggtggcgctcgtggccgccctggcgctcgtagcgctgggagcgctggccaccaggtggctgcagcgcatggaagcgcggaacgaggaggtacgccgcctcgcgttgctcgcggcggcggaagaggagaccatcgcgagggaggaggcctactactacgggcagtacggcgggtttgtgcgctcgtccgacttgccggaggcaccctcgctgtgggcggcgcaggaggtgcctcctgcgccgaaggaggtgatggctgaggcggcggcggcggcggcggcgacggtggcctcccctacggcggggaagggcgtctgtgcgatgtgctccaagccaacgacgctccggtgcaagcgatgcaagagtgtcaagtactgcaccttaaaatgtcagatagatcactggagaaatggccacaaagatcaatgccatcctctaggtcatggtgccacacaagatgatacacctgaaaatgttatggctggagtagggcttaaggatatgccctctggggcatccactacctaccaaatttgtgatgacaataaagacatgctgtattctcagtttactgggaaggcagaatctgttgattattcgaagctttcaacttcaagtaaaatttgcaaagtttgtgatggcactgttcatgaaaattcttgtcctgctcatgaccagcatgttgggttggaacctgaaccggagcaatccaacaagcaagctcttggcacagaaaaccatgaaagcttaagaaaattgccatgcatgccagctgttgacaaagttccttccgctcaaagtggtacatattgtttggcaagtaaccaacttaaaagagaagatgatcctcctggtccctgtgctaggccagagagctcaggtttgatgccacataattcatcaacagagaagaattatgccagacaacaaacaactacaatagctgcgaggaattatccaacagaatcgacggtttttgcatacaaaaaatttgttgagctctacagcttcaacaagttggaattgcacccatttggtctttgcaacctcgggaataggtaagtgattaatgcttcagttataattgcatatatgaaccatattatttgaggtgtataacctaactgatgtgtgccacaatttctttctatctttctacacatatgctatatgtaaatgaacataattttgcttctattatgtggttctgcataggctcatttggagagtgttaatatttgcattacttctgtaatgtttccttaaaacacattctgaaactaattaatttgtttcttccattaaagtttgaagggctggattttttagctatattttatcgaacacatttcatagaatttattgatgtgttaatccctgagctgggccattttttcacttcattctatcgtactttgcatgtacttcactttattgatgtgtttcatgtattcattgaatatgctgaagtgtgggattcaaatgaatacagatgagaattgagaagaaataaatgagatggtatcgctggcttttaaaatgcatttaatgttaatgtttgcacattactaagttttggttgattctcattgcattatgaatggagagcctattagcatttgtatagcacaatataataatatagttattgaaccagaacacacactataaacttagaggaacataactaagctggtagtgcttatagtgtagtgaatacctagatgttggaatataatataagtgaattgtccacttctttttaccagtttaggcttttgggttatcagagctagaggtctcaagtttgaatcctatttagcacaattaaataaaaatatttgttgttcgct

SEQ ID NO: 69232 - DNA, 2299 bp, Zea Mays
ccccaaataacaccaaggcaccaagcccagcgaggccaccagctgtccagctccacctcgtcgactcctccccgcacaagacaaaaaaaccctcgccttggagggtggaggcgcgtgagcccgacacccagagcgaaaaaagcaaggggtctgaccgccggcgatggcgtccatctccggagcggcggcggcgccatcttccgctgcgtgccggctgcggctgcgtaggcacatcctgctgcggccctcgcacctccgcctccgcgcgccccactccatcgccgacctctcccgctcctccagctcctctagttccgccccgacccgggcccagccgctgggctccaggccggagaacggcggcggcgtccgcgcggtggagaaggacccgatcaagctgtgggagcgctacgtcgagtggctctaccagcacaaggagctcggcctcttcgtcgacgtcagccggatggggttcacggaggacttcctgcgccagatggagccgcggatgcagcgggccttcgccgccatgcgggagctcgagaagggcgccatcgccaacccggacgaggctcgcatggtgggccactactggctccgcgacccggccctcgcgcccaactccttcctccgcagcaagatcgagaccacgctcgacaggatcctcgccttctcccaagatgtcgtctctggcaagattcaatccccatctggtcgtttcacttcaattctctctataggaattggagggtcagctttgggccctcaatttgttgctgaggcacttgcacctgataaccctccactgaagataagatttattgacaacaccgatcctgctgggattgatcatcaaattgctcaactaggacctgaactggcaactactcttgtaattgtcatttctaagagcggaggcacacctgaaacccgcaatggtctactagaagtacagaaagccttcagagatgcagggctgcaattctcgaaacagggtgttgcaattactcaagaaaattctctgttggataacactgctagaatagagggatggttagctcggtttcctatgtttgattgggttggtggtaggacttcagaaatgtcagctgtgggtttacttccagctgcattgcagggtattgatatcaaggaaatgctagctggtgcagctttaatggatgaggaaacccggaacactgtggttaaagaaaatccagcagcattgcttgcattatgttggtattgggcatcagaagggataggcaataaggatatggttgtacttccttacaaggatagtttgttgcttttgagtagatatttgcaacaacttgtcatggaatctcttgggaaagaatttgatctggatggcaaccgggtaaatcaagggctatctgtatatggaaacaaaggaagcactgaccagcacgcttacattcagcagctgagagaaggtgtacacaacttctttgttacttttatcgaggtcttgcgtgacaggcctgctggtcatgattgggagcttgaacctggagtcacatgtggtgactatttgtttgggatgttgcagggaacacgttctgctctttatgcaaatgaccgtgaatctatctctgttactgtgcaagaggtaactcctagagctgttggagcactggttgcactttatgaacgtgctgtggggctttatgcttctttggtgttgaggctgggaaaaaggcagcaggagaagtgttggcccttcagaaaagggtgctgactgtattaaatgaggcaacctgcaaggacccttgtgagccattgactatagatgaaattgcagatcgctgccattgccctgaagatattgagatgatctacaaaatagtccagcacatggctgctaacgacagagcaatcatagcagaaggcagctgtggctctcctcgcagcgttaaggtgtacctcggtgaatgcaatgtagacgaagacttgcaggccgcgtaggttccgagcctggatccgtgtaaaattgttggaataaatcaggcgcaacaagatagcgatgcaatgcatgggtgttggcggatcctgctgtgcagtttgtttcttgtttggtgtttcttgcacgcgaatacgcgattgccgcaacgacgtattttagaatttgaatttttttggaacccttgaaaatacaaaataaagaagataaggtggtgtccgtcgtattttttgctttttaactacgctctttctggtttaaattcagaaaatagaacttatcttggtgccatcattattgacgtgaagcttacac

SEQ ID NO: 69233 - DNA, 2368 bp, Zea Mays
ccccaaataacaccaaggcaccaagcccagcgaggccaccagctgtccagctccacctcgtcgactcctccccgcacaagacaaaaaaaccctcgccttggagggtggaggcgcgtgagcccgacacccagagcgaaaaaagcaaggggtctgaccgccggcgatggcgtccatctccggagcggcggcggcgccatcttccgctgcgtgccggctgcggctgcgtaggcacatcctgctgcggccctcgcacctccgcctccgcgcgccccactccatcgccgacctctcccgctcctccagctcctctagttccgccccgacccgggcccagccgctgggctccaggccggagaacggcggcggcgtccgcgcggtggagaaggacccgatcaagctgtgggagcgctacgtcgagtggctctaccagcacaaggagctcggcctcttcgtcgacgtcagccggatggggttcacggaggacttcctgcgccagatggagccgcggatgcagcgggccttcgccgccatgcgggagctcgagaagggcgccatcgccaacccggacgaggctcgcatggtgggccactactggctccgcgacccggccctcgcgcccaactccttcctccgcagcaagatcgagaccacgctcgacaggatcctcgccttctcccaagatgtcgtctctggcaagattcaatccccatctggtcgtttcacttcaattctctctataggaattggagggtcagctttgggccctcaatttgttgctgaggcacttgcacctgataaccctccactgaagataagatttattgacaacaccgatcctgctgggattgatcatcaaattgctcaactaggacctgaactggcaactactcttgtaattgtcatttctaagagcggaggcacacctgaaacccgcaatggtctactagaagtacagaaagccttcagagatgcagggctgcaattctcgaaacagggtgttgcaattactcaagaaaattctctgttggataacactgctagaatagagggatggttagctcggtttcctatgtttgattgggttggtggtaggacttcagaaatgtcagctgtgggtttacttccagctgcattgcagggtattgatatcaaggaaatgctagctggtgcagctttaatggatgaggaaacccggaacactgtggttaaagaaaatccagcagcattgcttgcattatgttggtattgggcatcagaagggataggcaataaggatatggttgtacttccttacaaggatagtttgttgcttttgagtagatatttgcaacaacttgtcatggaatctcttgggaaagaatttgatctggatggcaaccgggtaaatcaagggctatctgtatatggaaacaaaggaagcactgaccagcacgcctgagagaaggtgtacacaacttctttgttacttttatcgaggtcttgcgtgacaggcctgctggtcatgattgggagcttgaacctggagtcacatgtggtgactatttgtttgggatgttgcagggaacacgttctgctctttatgcaaatgaccgtgaatctatctctgttactgtgcaagaggtaactcctagagctgttggagcactggttgcactttatgaacgtgctgtggggctttatgcttctttggtaaatatcaatgcctatcatcaacctggtgttgaggctgggaaaaaggcagcaggagaagtgttggcccttcagaaaagggtgctgactgtattaaatgaggcaacctgcaaggacccttgtgagccattgactatagatgaaattgcagatcgctgccattgccctgaagataaacacaacgcttttcccccctctataacacatgcccaacgtttgcttcctcagattgagatgatctacaaaatagtccagcacatggctgctaacgacagagcaatcatagcagaaggcagctgtggctctcctcgcagcgttaaggtgtacctcggtgaatgcaatgtagacgaagacttgcaggccgcgtaggttccgagcctggatccgtgtaaaattgttggaataaatcaggcgcaacaagatagcgatgcaatgcatgggtgttggcggatcctgctgtgcagtttgtttcttgtttggtgtttcttgcacgcgaatacgcgattgccgcaacgacgtattttagaatttgaatttttttggaacccttgaaaatacaaaataaagaagataaggtggtgtccgtcgtattttttgctttttaactacgctctttctggtttaaattcagaaaatagaacttatcttggtgccatcattattgacgtgaagcttacac

SEQ ID NO: 69234 - DNA, 1439 bp, Zea Mays
cgaagcagcgcagcccatagtagtcatggacgtggaagcgcgcaaggactcgacgccaacgacacgcggcaaggttatgcgccgcctcctggtggtgctcaactgcgggatgctggcattgggcaccacggcggggccgctcctcacccgcctctactacgacaagggtggccagcgacagtggctctccgcgtggctccagtccgtcggctggccactgctgctgctccccgtggcggcttcctacgccgcgcgccgcgcgcgcgaccgggccgcccctgtcctgctcaccccgccacgcgtgctgctggccgccgcgggactcggcgtcgccacgggcgcggacaacttcatctacgcctacagcctccggtacctgccggtctccacctccgcgatcctcatctcgacgcagctcgccttcacggtcttcttcgcgttcctcatcgtgcgccagcgcctgacgcccgccacggtcaacgccgtggcgctgctcacggcgggcgccgccgtgctgggcctgcacgtctcgtccgaccgccccgcgggagtcacccgggggaagtacttgctgggcttcgccctggccctcggcgccgcggcgctctacgggctcatcctgccgctggtcgagctcacgtacaagcgagcggcgggcggcggccgcgcggtcacgtacgcgctggtgatggagatgcagctggtgatggggttcttcgccaccgtattctgcaccgtcggcatgatcatcgacaaggacttccaggcgatcccgcgggaggcgaggcggtacaagcttggggaggcgcggtactacgcggtgctggcgtggtcggcggtgctgtggcagtgcttcttcctgggcgcggtgggcgtcatcttctgcgtgcacacgctgctggcgggcatcctcatcgcggtgttcatcccggtgacggaggtggcggccgtcatcttcctgcgcgagaggttcagtagcgagaaaggcgtggcgctggtgctctcgctctggggcctcgcgtcctactcctacggcgagtggagcgaggccagggccaagaagaggaagaccaggacggaggagggcgccgcagccgcggaggccctgcagcaggcgaacccgtgatgctgctgcggactttggcctggcctcttcgatcttccccgttgtgtgtatatcagtatatgttgtgattgtgatcgctgctgtgtgctacgtggatagcgtcctgaatcgtcgtcacctgcagctgtcgcttctggtgtgggtgctcttctgttcggcggtggacgttggccaatactgtgctgcatggtgtgtagatgtaccttggcagtaccacgttcggttcggacagtaagtctggaccggcgcactttgtgggccgatcccagtacaggactgatctaatctgaacgaatataaaaaaaagaagaaa

SEQ ID NO: 69235 - DNA, 905 bp, Zea Mays
attgcctaggttcggatcttgctgcctgggtggagacgccaggaatcttgcccttctgtgaagaacattttacttctggattctgaaggaaagcgtgttgctgtaaagtatttctcagatgattggccgactaatgcatcaaagttagcctacgaaaagtctgtttttactaaaactctaaagacaaatgcacggacagaagctgagataacattgtttgatggttatattgtcgtttacaagtttgtacatgaccttcacttttttgtcaccgctggagatgatgagaatgagctcatcttagcaagtgtactacatggtttttctgattctgttggtcttctactcaggggtgatgttgagaagcggactgcgcttgagaacttggatttgatacttctctgcattgatgaaattgtggatgggggaatcatcctggaaacagatgcaaacaccattgctggtaaggttgcaaccaatgctgttgatggttctgtgcccttttctgagcagacgatatctcaggcactagccacagctagggagcaccttgcaagatctctactgaaatgaacaaccagcaatatgtatgacatatatgtgtgttaaaggttgggctactgaatgttaagggtctttgtagtcgttattcatcccaaagtgctgctgtgacagagcctagttgaatatccgagggattggtcacatgctcgttattttttttgaaccagtgagtttgtagctgccatatttcaggtaaaacataaaataaagagttgtaattgggtgtaatataattttcaccatacaaaaaaaatcatctcaactatcaaaccatggtaaaaggttcaaaattatctatcaaatgattatccctccagaaaagcaaaatacaaagactcaag

SEQ ID NO: 69236 - DNA, 663 bp, Zea Mays
cttgattagcaatcactgctgcgcccgataggtggcagcgagccagcgagccagcgacccacccgactctgttccaacgagccttccctcccaaacttgcacgctgcccccgcgctcgcctccgcccccgatccagatccagggtggaatagggaacggccatacaccatggcggatttctccaagaatcatcctggaaacagatgcaaacaccattgctggtaaggttgcaaccaatgctgttgatggttctgtgcccttttctgagcagacgatatctcaggcactagccacagctagggagcaccttgcaagatctctactgaaatgaacaaccagcaatatgtatgacatatatgtgtgttaaaggttgggctactgaatgttaagggtctttgtagtcgttattcatcccaaagtgctgctgtgacagagcctagttgaatatccgagggattggtcacatgctcgttattttttttgaaccagtgagtttgtagctgccatatttcaggtaaaacataaaataaagagttgtaattgggtgtaatataattttcaccatacaaaaaaaatcatctcaactatcaaaccatggtaaaaggttcaaaattatctatcaaatgattatccctccagaaaagcaaaatacaaagactcaag

SEQ ID NO: 69237 - DNA, 1016 bp, Zea Mays
cttgattagcaatcactgctgcgcccgataggtggcagcgagccagcgagccagcgacccacccgactctgttccaacgagccttccctcccaaacttgcacgctgcccccgcgctcgcctccgcccccgatccagatccaggtactcttcctttcgccgcggctgagaagcaactctccctctctgtcctcttcctgtcgccgcactcattttctcttgccggtaaggagtggagatccgcgtccatcttctattgattaggataccgggtggaatagggaacggccatacaccatggcggatttctccaagctgagataacattgtttgatggttatattgtcgtttacaagtttgtacatgaccttcacttttttgtcaccgctggagatgatgagaatgagctcatcttagcaagtgtactacatggtttttctgattctgttggtcttctactcaggggtgatgttgagaagcggactgcgcttgagaacttggatttgatacttctctgcattgatgaaattgtggatgggggaatcatcctggaaacagatgcaaacaccattgctggtaaggttgcaaccaatgctgttgatggttctgtgcccttttctgagcagacgatatctcaggcactagccacagctagggagcaccttgcaagatctctactgaaatgaacaaccagcaatatgtatgacatatatgtgtgttaaaggttgggctactgaatgttaagggtctttgtagtcgttattcatcccaaagtgctgctgtgacagagcctagttgaatatccgagggattggtcacatgctcgttattttttttgaaccagtgagtttgtagctgccatatttcaggtaaaacataaaataaagagttgtaattgggtgtaatataattttcaccatacaaaaaaaatcatctcaactatcaaaccatggtaaaaggttcaaaattatctatcaaatgattatccctccagaaaagcaaaatacaaagactcaag

SEQ ID NO: 69238 - DNA, 1344 bp, Zea Mays
gtgaggtagtggcaactagtagtagatcttgactcttgagggaaagtaggcggtttcgcctttttcgcgtgaaatttacgtgctcggactcggagcggagcagtggtcgctgctggtacgttttcgtagatagagatagatatactactaggagtatagtatataaaagctgctgctacgtgtttgtttaattgccatagatggaggatgccatcttttgcagtcagctttgggagggttactatgtgatgatgtgttagcctttttatagctagccattgtccaatgactccaatcgacaactgctgctgcggctacacgagcgattccgctaaccgggtccaggcggcgtgccaggagggagggattccgtttctcgtgaggaaagcttgctacctacctgtcgcgcactcgcgcaggagccccatccgtctccatctcccgtcagcgccttcgctaaaccacacggcattaggactttggagctgtaaagaagaagatatatagccgcaccccacacaccggcctcttctctctctggctcctctttatttgtggggagcagaccaaaagaatgcctttttcggctgtggctgctgtacgtatgtcgctcgtcccccctttcttcttcctctcaaatccttcatacgcgctatgccacgttcatctattcatcctaatcggtacgtctcctacccgaagcgcctcctatcatgtcaagatgtgtcctagccatcgcaccattctactccactagggttgaaaactcatgtcctgacccataccattttctagtccgctttcgaatttgcggaaaaaatccggaaataagacgggagtgagtctatcgcatccatttttttcggcccgtttttatccaaattgaacccttatgtatttcgtattagagaaatactgggtcaacccaatatgcatcagtgcattagctaaaacttcatattctttggtggcctaaaggctcaaacaacacccatcatagctatatgtacaccacaagcgaacaaataacaatggattgttgtccctttgtatctatttgtttcatgttgttgcctcacaagtcaatcattagttagccatcaatattatgtccgtttgtattaaattatgagtttccgcttaattttctcattcccgttcattttcttacacccatatatccctgtcgatgaaatgatcctcagtccctatgacccgctagtcagagagcgttgtcggcgtatcggacccgggggtccctcaaccgagccgaccagtgaatttatcgctgcgtgcccctgcctagataagttggcgcaagatggaacacaagggggaatgcgg

SEQ ID NO: 69239 - DNA, 3011 bp, Zea Mays
tcccttccgcgcgcgctccccaaggtgagatcagcatctccgtctcttccccgccgctcctcactcccctaccgccacccctaaaactagccccattcccttaccagcgtccgatcacactcctcggtcccacgcttggatggattccgtcggtacaaatcggcccccgctgcgccccgttgccgccgcagctactcgacgcagcgcgctcctgcgcccccctagccacctcgggctcggcaatcgttttgcggagactaagcttgggatcgcgtcagggtgtggaggaggaggagggtattttggaaaggtacagggatttgatgccttgcggagtaccacgacgaaagttcagagcgggaaggcggggaggagtgtgaccaaggaaatgggacacacttcatctggcaatgaagtgcccttgaaatattcttcaggcaaagccttccccctaggagtgtcacaagttgacgatgggttaaattttgcaatattctcacaacatgcttcttctgtcaccctttgcttgaattttcctgagagaggcaaccaagatgatgtggacattgtagagtttgctttagaccgccagaagaacaaaactggagatatatggcatgtgtcagtggagggtttgcctgcttctggtgttctttatgggtatcgcattaatggtcctcaagggtggcaacaaggtcatagatttgatgacagcgttattcttctggacccctatgcaaaattagtttatggtcgaaagcactttgctgttgaaaaagagaagccaagccagcttttcggaacatatgatttcgatagctcaccttttgactggggtgacaattataagcttcctaatttgcctgagacagatcttgttatatatgaaatgaatgtccgtgccttcactgccgacgagtcaagcaggcttgctccagctattcgtggaagttaccttggtgtcattgataaaattcctcatttgctggaacttggcgttaatgcagtggaactacttcctgtttttgagttcgatgagctggagttgaagaggttccctaacccaagggaccacatggtaaatacatggggatattctacaatcaacttttttgcgcccatgagtcgttatgctagtgctggtggtggacctgtggctgcttccaaagagctcaaacagatggtcaaggcatttcataattctggaattgagtttacaaccatacaaatgaagctgatgatgttaacccttacatgacttcctttcgtggtattgataacaaggtctattacatgttagatctcaacaacagtgcacagctgctgaacttctcgggttgcgggaatacactaaactgcaaccatcctgttgtcaaggagcttgtacttgacagtttaagacattgggttaaggagtatcacatagatggatttcggtttgaccttgcgagtgttctttgtcgtggaccagatggcagtcctcttgatgcacctccacttattaaggaaattgccaaagactctgtattgtctagatgtaagatcattgctgaaccttgggactgtggtggcctttatctagtagggaggttccctaattgggacaggtgggctgaatggaacgggaagtacagagatgatattcgaagatttattaagggagatcctggtatgaagggggtgtttgcaactcgcgtttctggttctgcagatctctaccaggtgaacaatcggaagccttaccatagtgtgaactttgtaattgctcatgatggatttactttatgtgaccttgtttcatataactccaagcacaatgatgcaaatggagaaggtggtcgtgatgggtgcaatgacaactacagctggaactgtggcattgaaggagaaacaaatgatttgaatgtgctaagtcttcgttcaaggcaaatgaagaacttccatgtggcattaatgatttcccagggtactccaatgatgctgatgggagatgaatatggtcacacacgttatggaaacaacaatagctatggacatgatactcacataaataattttcagtggggccagttggaagaaaggaaggatggccatttcaggtttttctcagagatgatcaagtttcggcataaccatcctatattgagacgagacaggtttctcaacaaaaatgatgtcacttggcatgaaaatcgttgggagaaccaggacagcaaatttttggcatttacgatacatgatcacagttctggtggagacatctatttggcattcaatgctcatgagtattttgtggatgctgtaattcccccaccaccacaccataaatcttggagtcgtgtggtggataccaacctggaatcaccaaaggatattgtcccagaaggggtgccattcacaggttcagggtacaggattgctccctactcttccatcttgcttaaggcaaagccttagaatggcggaggcaagtcattctcaagtaagcacgaataatggtgttgtgatccctaactttccaagctcttagccaactgtactgcaagtatagcaaactttggtatgtgaagtcggaccaacccttgcggaaatcaacggaagccatggtttgctaaaggtatactcatggagaattggagatatggcaaacacatacgcaagtaacctccacacatctaagcaagaagagcctttcattaggggatgcatggctcgaggaaactatatttgcatttggttgattcatttttatttgttgcacatgtcagtatgtcacctgtgtgtgtcaagctcttatttgcttaaaaattggacattcctttgttacatatttgtgttgtactgtgttggagctagcgttcctggtatattgcacgggggtgggaggacgggggacgctttgtcgccgtggtcttaggctaccagcaatggttttctctatatttctgctcctgtatcacttttttgcgtcacattatcaatatttcatcctctacttttttctatctcta

SEQ ID NO: 69240 - DNA, 3023 bp, Zea Mays
tcccttccgcgcgcgctccccaaggtgagatcagcatctccgtctcttccccgccgctcctcactcccctaccgccacccctaaaactagccccattcccttaccagcgtccgatcacactcctcggtcccacgcttggatggattccgtcggtacaaatcggcccccgctgcgccccgttgccgccgcagctactcgacgcagcgcgctcctgcgcccccctagccacctcgggctcggcaatcgttttgcggagactaagcttgggatcgcgtcagggtgtggaggaggaggagggtattttggaaaggtacagggatttgatgccttgcggagtaccacgacgaaagttcagagcgggaaggcggggaggagtgtgaccaaggaaatgggacacacttcatctggcaatgaagtgcccttgaaatattcttcaggcaaagccttccccctaggagtgtcacaagttgacgatgggttaaattttgcaatattctcacaacatgcttcttctgtcaccctttgcttgaattttcctgagagaggcaaccaagatgatgtggacattgtagagtttgctttagaccgccagaagaacaaaactggagatatatggcatgtgtcagtggagggtttgcctgcttctggtgttctttatgggtatcgcattaatggtcctcaagggtggcaacaaggtcatagatttgatgacagcgttattcttctggacccctatgcaaaattagtttatggtcgaaagcactttgctgttgaaaaagagaagccaagccagcttttcggaacatatgatttcgatagctcaccttttgactggggtgacaattataagcttcctaatttgcctgagatcttgttatatatgaaatgaatgtccgtgccttcactgccgacgagtcaagcaggcttgctccagctattcgtggaagttaccttggtgtcattgataaaattcctcatttgctggaacttggcgttaatgcagtggaactacttcctgtttttgagttcgatgagctggagttgaagaggttccctaacccaagggaccacatggtaaatacatggggatattctacaatcaacttttttgcgcccatgagtcgttatgctagtgctggtggtggacctgtggctgcttccaaagagctcaaacagatggtcaaggcatttcataattctggaattgaggttattttggatgtagtttacaaccatacaaatgaagctgatgatgttaacccttacatgacttcctttcgtggtattgataacaaggtctattacatgttagatctcaacaacagtgcacagctgctgaacttctcgggttgcgggaatacactaaactgcaaccatcctgttgtcaaggagcttgtacttgacagtttaagacattgggttaaggagtatcacatagatggatttcggtttgaccttgcgagtgttctttgtcgtggaccagatggcagtcctcttgatgcacctccacttattaaggaaattgccaaagactctgtattgtctagatgtaagatcattgctgaaccttgggactgtggtggcctttatctagtagggaggttccctaattgggacaggtgggctgaatggaacgggaagtacagagatgatattcgaagatttattaagggagatcctggtatgaagggggtgtttgcaactcgcgtttctggttctgcagatctctaccaggtgaacaatcggaagccttaccatagtgtgaactttgtaattgctcatgatggatttactttatgtgaccttgtttcatataactccaagcacaatgatgcaaatggagaaggtggtcgtgatgggtgcaatgacaactacagctggaactgtggcattgaaggagaaacaaatgatttgaatgtgctaagtcttcgttcaaggcaaatgaagaacttccatgtggcattaatgatttcccagggtactccaatgatgctgatgggagatgaatatggtcacacacgttatggaaacaacaatagctatggacatgatactcacataaataattttcagtggggccagttggaagaaaggaaggatggccatttcaggtttttctcagagatgatcaagtttcggcataaccatcctatattgagacgagacaggtttctcaacaaaaatgatgtcacttggcatgaaaatcgttgggagaaccaggacagcaaatttttggcatttacgatacatgatcacagttctggtggagacatctatttggcattcaatgctcatgagtattttgtggatgctgtaattcccccaccaccacaccataaatcttggagtcgtgtggtggataccaacctggaatcaccaaaggatattgtcccagaaggggtgccattcacaggttcagggtacaggattgctccctactcttccatcttgcttaaggcaaagccttagaatggcggaggcaagtcattctcaagtaagcacgaataatggtgttgtgatccctaactttccaagctcttagccaactgtactgcaagtatagcaaactttggtatgtgaagtcggaccaacccttgcggaaatcaacggaagccatggtttgctaaaggtatactcatggagaattggagatatggcaaacacatacgcaagtaacctccacacatctaagcaagaagagcctttcattaggggatgcatggctcgaggaaactatatttgcatttggttgattcatttttatttgttgcacatgtcagtatgtcacctgtgtgtgtcaagctcttatttgcttaaaaattggacattcctttgttacatatttgtgttgtactgtgttggagctagcgttcctggtatattgcacgggggtgggaggacgggggacgctttgtcgccgtggtcttaggctaccagcaatggttttctctatatttctgctcctgtatcacttttttgcgtcacattatcaatatttcatcctctacttttttctatctcta

SEQ ID NO: 69241 - DNA, 2989 bp, Zea Mays
tcccttccgcgcgcgctccccaaggtgagatcagcatctccgtctcttccccgccgctcctcactcccctaccgccacccctaaaactagccccattcccttaccagcgtccgatcacactcctcggtcccacgcttggatggattccgtcggtacaaatcggcccccgctgcgccccgttgccgccgcagctactcgacgcagcgcgctcctgcgcccccctagccacctcgggctcggcaatcgttttgcggagactaagcttgggatcgcgtcagggtgtggaggaggaggagggtattttggaaaggtacagggatttgatgccttgcggagtaccacgacgaaagttcagagcgggaaggcggggaggagtgtgaccaaggaaatgggacacacttcatctggcaatgaagtgcccttgaaatattcttcaggcaaagccttccccctaggagtgtcacaagttgacgatgggttaaattttgcaatattctcacaacatgcttcttctgtcaccctttgcttgaattttcctgagagaggcaaccaagatgatgtggacattgtagagtttgctttagaccgccagaagaacaaaactggagatatatggcatgtgtcagtggagggtttgcctgcttctggtgttctttatgggtatcgcattaatggtcctcaagggtggcaacaaggtcatagatttgatgacagcgttattcttctggacccctatgcaaaattagtttatggtcgaaagcactttgctgttgaaaaagagaagccaagccagcttttcggaacatatgatttcgatagctcaccttttgactggggtgacaattataagcttcctaatttgcctgagatcttgttatatatgaaatgaatgtccgtgccttcactgccgacgagtcaagcaggcttgctccagctattcgtggaagttaccttggtgtcattgataaatggaactacttcctgtttttgagttcgatgagctggagttgaagaggttccctaacccaagggaccacatggtaaatacatggggatattctacaatcaacttttttgcgcccatgagtcgttatgctagtgctggtggtggacctgtggctgcttccaaagagctcaaacagatggtcaaggcatttcataattctggaattgaggttattttggatgtagtttacaaccatacaaatgaagctgatgatgttaacccttacatgacttcctttcgtggtattgataacaaggtctattacatgttagatctcaacaacagtgcacagctgctgaacttctcgggttgcgggaatacactaaactgcaaccatcctgttgtcaaggagcttgtacttgacagtttaagacattgggttaaggagtatcacatagatggatttcggtttgaccttgcgagtgttctttgtcgtggaccagatggcagtcctcttgatgcacctccacttattaaggaaattgccaaagactctgtattgtctagatgtaagatcattgctgaaccttgggactgtggtggcctttatctagtagggaggttccctaattgggacaggtgggctgaatggaacgggaagtacagagatgatattcgaagatttattaagggagatcctggtatgaagggggtgtttgcaactcgcgtttctggttctgcagatctctaccaggtgaacaatcggaagccttaccatagtgtgaactttgtaattgctcatgatggatttactttatgtgaccttgtttcatataactccaagcacaatgatgcaaatggagaaggtggtcgtgatgggtgcaatgacaactacagctggaactgtggcattgaaggagaaacaaatgatttgaatgtgctaagtcttcgttcaaggcaaatgaagaacttccatgtggcattaatgatttcccagggtactccaatgatgctgatgggagatgaatatggtcacacacgttatggaaacaacaatagctatggacatgatactcacataaataattttcagtggggccagttggaagaaaggaaggatggccatttcaggtttttctcagagatgatcaagtttcggcataaccatcctatattgagacgagacaggtttctcaacaaaaatgatgtcacttggcatgaaaatcgttgggagaaccaggacagcaaatttttggcatttacgatacatgatcacagttctggtggagacatctatttggcattcaatgctcatgagtattttgtggatgctgtaattcccccaccaccacaccataaatcttggagtcgtgtggtggataccaacctggaatcaccaaaggatattgtcccagaaggggtgccattcacaggttcagggtacaggattgctccctactcttccatcttgcttaaggcaaagccttagaatggcggaggcaagtcattctcaagtaagcacgaataatggtgttgtgatccctaactttccaagctcttagccaactgtactgcaagtatagcaaactttggtatgtgaagtcggaccaacccttgcggaaatcaacggaagccatggtttgctaaaggtatactcatggagaattggagatatggcaaacacatacgcaagtaacctccacacatctaagcaagaagagcctttcattaggggatgcatggctcgaggaaactatatttgcatttggttgattcatttttatttgttgcacatgtcagtatgtcacctgtgtgtgtcaagctcttatttgcttaaaaattggacattcctttgttacatatttgtgttgtactgtgttggagctagcgttcctggtatattgcacgggggtgggaggacgggggacgctttgtcgccgtggtcttaggctaccagcaatggttttctctatatttctgctcctgtatcacttttttgcgtcacattatcaatatttcatcctctacttttttctatctcta

SEQ ID NO: 69242 - DNA, 2993 bp, Zea Mays
tcccttccgcgcgcgctccccaaggtgagatcagcatctccgtctcttccccgccgctcctcactcccctaccgccacccctaaaactagccccattcccttaccagcgtccgatcacactcctcggtcccacgcttggatggattccgtcggtacaaatcggcccccgctgcgccccgttgccgccgcagctactcgacgcagcgcgctcctgcgcccccctagccacctcgggctcggcaatcgttttgcggagactaagcttgggatcgcgtcagggtgtggaggaggaggagggtattttggaaaggtacagggatttgatgccttgcggagtaccacgacgaaagttcagagcgggaaggcggggaggagtgtgaccaaggaaatgggacacacttcatctggcaatgaagtgcccttgaaatattcttcaggcaaagccttccccctaggagtgtcacaagttgacgatgggttaaattttgcaatattctcacaacatgcttcttctgtcaccctttgcttgaattttcctgagagaggcaaccaagatgatgtggacattgtagagtttgctttagaccgccagaagaacaaaactggagatatatggcatgtgtcagtggagggtttgcctgcttctggtgttctttatgggtatcgcattaatggtcctcaagggtggcaacaaggtcatagatttgatgacagcgttattcttctggacccctatgcaaaattagtttatggtcgaaagcactttgctgttgaaaaagagaagccaagccagcttttcggaacatatgatttcgatagctcaccttttgactggggtgacaattataagcttcctaatttgcctgagacagatcttgttatatatgaaatgaatgtccgtgccttcactgccgacgagtcaagcaggcttgctccagctattcgtggaagttaccttggtgtcattgataaatggaactacttcctgtttttgagttcgatgagctggagttgaagaggttccctaacccaagggaccacatggtaaatacatggggatattctacaatcaacttttttgcgcccatgagtcgttatgctagtgctggtggtggacctgtggctgcttccaaagagctcaaacagatggtcaaggcatttcataattctggaattgaggttattttggatgtagtttacaaccatacaaatgaagctgatgatgttaacccttacatgacttcctttcgtggtattgataacaaggtctattacatgttagatctcaacaacagtgcacagctgctgaacttctcgggttgcgggaatacactaaactgcaaccatcctgttgtcaaggagcttgtacttgacagtttaagacattgggttaaggagtatcacatagatggatttcggtttgaccttgcgagtgttctttgtcgtggaccagatggcagtcctcttgatgcacctccacttattaaggaaattgccaaagactctgtattgtctagatgtaagatcattgctgaaccttgggactgtggtggcctttatctagtagggaggttccctaattgggacaggtgggctgaatggaacgggaagtacagagatgatattcgaagatttattaagggagatcctggtatgaagggggtgtttgcaactcgcgtttctggttctgcagatctctaccaggtgaacaatcggaagccttaccatagtgtgaactttgtaattgctcatgatggatttactttatgtgaccttgtttcatataactccaagcacaatgatgcaaatggagaaggtggtcgtgatgggtgcaatgacaactacagctggaactgtggcattgaaggagaaacaaatgatttgaatgtgctaagtcttcgttcaaggcaaatgaagaacttccatgtggcattaatgatttcccagggtactccaatgatgctgatgggagatgaatatggtcacacacgttatggaaacaacaatagctatggacatgatactcacataaataattttcagtggggccagttggaagaaaggaaggatggccatttcaggtttttctcagagatgatcaagtttcggcataaccatcctatattgagacgagacaggtttctcaacaaaaatgatgtcacttggcatgaaaatcgttgggagaaccaggacagcaaatttttggcatttacgatacatgatcacagttctggtggagacatctatttggcattcaatgctcatgagtattttgtggatgctgtaattcccccaccaccacaccataaatcttggagtcgtgtggtggataccaacctggaatcaccaaaggatattgtcccagaaggggtgccattcacaggttcagggtacaggattgctccctactcttccatcttgcttaaggcaaagccttagaatggcggaggcaagtcattctcaagtaagcacgaataatggtgttgtgatccctaactttccaagctcttagccaactgtactgcaagtatagcaaactttggtatgtgaagtcggaccaacccttgcggaaatcaacggaagccatggtttgctaaaggtatactcatggagaattggagatatggcaaacacatacgcaagtaacctccacacatctaagcaagaagagcctttcattaggggatgcatggctcgaggaaactatatttgcatttggttgattcatttttatttgttgcacatgtcagtatgtcacctgtgtgtgtcaagctcttatttgcttaaaaattggacattcctttgttacatatttgtgttgtactgtgttggagctagcgttcctggtatattgcacgggggtgggaggacgggggacgctttgtcgccgtggtcttaggctaccagcaatggttttctctatatttctgctcctgtatcacttttttgcgtcacattatcaatatttcatcctctacttttttctatctcta

SEQ ID NO: 69243 - DNA, 2940 bp, Zea Mays
tcccttccgcgcgcgctccccaaggtgagatcagcatctccgtctcttccccgccgctcctcactcccctaccgccacccctaaaactagccccattcccttaccagcgtccgatcacactcctcggtcccacgcttggatggattccgtcggtacaaatcggcccccgctgcgccccgttgccgccgcagctactcgacgcagcgcgctcctgcgcccccctagccacctcgggctcggcaatcgttttgcggagactaagcttgggatcgcgtcagggtgtggaggaggaggagggtattttggaaaggtacagggatttgatgccttgcggagtaccacgacgaaagttcagagcgggaaggcggggaggagtgtgaccaaggaaatgggacacacttcatctggcaatgaagtgcccttgaaatattcttcaggcaaagccttccccctaggagtgtcacaagttgacgatgggttaaattttgcaatattctcacaacatgcttcttctgtcaccctttgcttgaattttcctgagagaggcaaccaagatgatgtggacattgtagagtttgctttagaccgccagaagaacaaaactggagatatatggcatgtgtcagtggagggtttgcctgcttctggtgttctttatgggtatcgcattaatggtcctcaagggtggcaacaaggtcatagatttgatgacagcgttattcttctggacccctatgcaaaattagtttatggtcgaaagcactttgctgttgaaaaagagaagccaagccagcttttcggaacatatgatttcgatagctcaccttttgactggggtgacaattataagcttcctaatttgcctgagacagatcttgttatatatgaaatgaatgtccgtgccttcactgccgacgagtcaagcaggcttgctccagctattcgtggaagttaccttggtgtcattgataaaattcctcatttgctggaacttggcgttaatgcagtggaactacttcctgtttttgagttcgatgagctggagttgaagaggttccctaacccaagggaccacatggtaaatacatggggatattctacaatcaacttttttgcgcccatgagtcgttatgctagtgctggtggtggacctgtggctgcttccaaagagctcaaacagatggtcaaggcatttcataattctggaattgaggtctattacatgttagatctcaacaacagtgcacagctgctgaacttctcgggttgcgggaatacactaaactgcaaccatcctgttgtcaaggagcttgtacttgacagtttaagacattgggttaaggagtatcacatagatggatttcggtttgaccttgcgagtgttctttgtcgtggaccagatggcagtcctcttgatgcacctccacttattaaggaaattgccaaagactctgtattgtctagatgtaagatcattgctgaaccttgggactgtggtggcctttatctagtagggaggttccctaattgggacaggtgggctgaatggaacgggaagtacagagatgatattcgaagatttattaagggagatcctggtatgaagggggtgtttgcaactcgcgtttctggttctgcagatctctaccaggtgaacaatcggaagccttaccatagtgtgaactttgtaattgctcatgatggatttactttatgtgaccttgtttcatataactccaagcacaatgatgcaaatggagaaggtggtcgtgatgggtgcaatgacaactacagctggaactgtggcattgaaggagaaacaaatgatttgaatgtgctaagtcttcgttcaaggcaaatgaagaacttccatgtggcattaatgatttcccagggtactccaatgatgctgatgggagatgaatatggtcacacacgttatggaaacaacaatagctatggacatgatactcacataaataattttcagtggggccagttggaagaaaggaaggatggccatttcaggtttttctcagagatgatcaagtttcggcataaccatcctatattgagacgagacaggtttctcaacaaaaatgatgtcacttggcatgaaaatcgttgggagaaccaggacagcaaatttttggcatttacgatacatgatcacagttctggtggagacatctatttggcattcaatgctcatgagtattttgtggatgctgtaattcccccaccaccacaccataaatcttggagtcgtgtggtggataccaacctggaatcaccaaaggatattgtcccagaaggggtgccattcacaggttcagggtacaggattgctccctactcttccatcttgcttaaggcaaagccttagaatggcggaggcaagtcattctcaagtaagcacgaataatggtgttgtgatccctaactttccaagctcttagccaactgtactgcaagtatagcaaactttggtatgtgaagtcggaccaacccttgcggaaatcaacggaagccatggtttgctaaaggtatactcatggagaattggagatatggcaaacacatacgcaagtaacctccacacatctaagcaagaagagcctttcattaggggatgcatggctcgaggaaactatatttgcatttggttgattcatttttatttgttgcacatgtcagtatgtcacctgtgtgtgtcaagctcttatttgcttaaaaattggacattcctttgttacatatttgtgttgtactgtgttggagctagcgttcctggtatattgcacgggggtgggaggacgggggacgctttgtcgccgtggtcttaggctaccagcaatggttttctctatatttctgctcctgtatcacttttttgcgtcacattatcaatatttcatcctctacttttttctatctcta

SEQ ID NO: 69244 - DNA, 3000 bp, Zea Mays
tcccttccgcgcgcgctccccaaggtgagatcagcatctccgtctcttccccgccgctcctcactcccctaccgccacccctaaaactagccccattcccttaccagcgtccgatcacactcctcggtcccacgcttggatggattccgtcggtacaaatcggcccccgctgcgccccgttgccgccgcagctactcgacgcagcgcgctcctgcgcccccctagccacctcgggctcggcaatcgttttgcggagactaagcttgggatcgcgtcagggtgtggaggaggaggagggtattttggaaaggtacagggatttgatgccttgcggagtaccacgacgaaagttcagagcgggaaggcggggaggagtgtgaccaaggaaatgggacacacttcatctggcaatgaagtgcccttgaaatattcttcaggcaaagccttccccctaggagtgtcacaagttgacgatgggttaaattttgcaatattctcacaacatgcttcttctgtcaccctttgcttgaattttcctgagagaggcaaccaagatgatgtggacattgtagagtttgctttagaccgccagaagaacaaaactggagatatatggcatgtgtcagtggagggtttgcctgcttctggtgttctttatgggtatcgcattaatggtcctcaagggtggcaacaaggtcatagatttgatgacagcgttattcttctggacccctatgcaaaattagtttatggtcgaaagcactttgctgttgaaaaagagaagccaagccagcttttcggaacatatgatttcgatagctcaccttttgactggggtgacaattataagcttcctaatttgcctgagacagatcttgttatatatgaaatgaatgtccgtgccttcactgccgacgagtcaagcaggcttgctccagctattcgtggaagttaccttggtgtcattgataaaattcctcatttgctggaacttggcgttaatgcagtggaactacttcctgtttttgagttcgatgagctggagttgaagaggttccctaacccaagggaccacatggtaaatacatggggatattctacaatcaacttttttgcgcccatgagtcgttatgctagtgctggtggtggacctgtggctgcttccaaagagctcaaacagatggtcaaggcatttcataattctggaattgaggttattttggatgtagtttacaaccatacaaatgaagctgatgatgttaacccttacatgacttcctttcgtggtattgataacaaggtctattacatgttagatctcaacaacagtgcacagctgctgaacttctcgggttgcgggaatacactaaactgcaaccatcctgttgtcaaggagcttgtacttgacagtttaagacattgggttaaggagtatcacatagatggatttcggtttgaccttgcgagtgttctttgtcgtggaccagatggcagtcctcttgatgcacctccacttattaaggaaattgccaaagactctgtattgtctagatgtaagatcattgctgaaccttgggactgtggtggcctttatctagtagggaggttccctaattgggacaggtgggctgaatggaacgggaagtacagagatgatattcgaagatttattaagggagatcctggtatgaagggggtgtttgcaactcgcgtttctggttctgcagatctctaccaggtgaacaatcggaagccttaccatagtgtgaactttgtaattgctcatgatggatttactttatgtgaccttgtttcatataactccaagcacaatgatgcaaatggagaaggtggtcgtgatgggtgcaatgacaactacagctggaactgtggcattgaaggagaaacaaatgatttgaatgtgctaagtcttcgttcaaggcaaatgaagaacttccatgtggcattaatgatttcccagggtactccaatgatgctgatgggagatgaatatggtcacacacgttatggaaacaacaatagctatggacatgatactcacataaataattttcagtggggccagttggaagaaaggaaggatggccatttcaggtttttctcagagatgatcaagtttcggcataaccatcctatattgagacgagacaggtttctcaacaaaaatgatgtcacttggcatgaaaatcgttgggagaaccaggacagcaaatttttggcatttacgatacatgatcacagttctggtggagacatctatttggcattcaatgctcatgagtattttgtggatgctgtaattcccccaccaccacaccataaatcttggagtcgtgtggatattgtcccagaaggggtgccattcacaggttcagggtacaggattgctccctactcttccatcttgcttaaggcaaagccttagaatggcggaggcaagtcattctcaagtaagcacgaataatggtgttgtgatccctaactttccaagctcttagccaactgtactgcaagtatagcaaactttggtatgtgaagtcggaccaacccttgcggaaatcaacggaagccatggtttgctaaaggtatactcatggagaattggagatatggcaaacacatacgcaagtaacctccacacatctaagcaagaagagcctttcattaggggatgcatggctcgaggaaactatatttgcatttggttgattcatttttatttgttgcacatgtcagtatgtcacctgtgtgtgtcaagctcttatttgcttaaaaattggacattcctttgttacatatttgtgttgtactgtgttggagctagcgttcctggtatattgcacgggggtgggaggacgggggacgctttgtcgccgtggtcttaggctaccagcaatggttttctctatatttctgctcctgtatcacttttttgcgtcacattatcaatatttcatcctctacttttttctatctcta

SEQ ID NO: 69245 - DNA, 3380 bp, Zea Mays
cgcccatcttgctatcctcccgagcggccgagtctgctccaactccaactccgcgcatggacaaccacgtgtcccggaggcctggagtccccgtccgtcccttccgcgcgcgctccccaaggtgagatcagcatctccgtctcttccccgccgctcctcactcccctaccgccacccctaaaactagccccattcccttaccagcgtccgatcacactcctcggtcccacgcttggatggattccgtcggtacaaatcggcccccgctgcgccccgttgccgccgcagctactcgacgcagcgcgctcctgcgcccccctagccacctcgggctcggcaatcgttttgcggagactaagcttgggatcgcgtcagggtgtggaggaggaggagggtattttggaaaggtacagggatttgatgccttgcggagtaccacgacgaaagttcagagcgggaaggcggggaggagtgtgaccaaggaaatgggacacacttcatctggcaatgaagtgcccttgaaatattcttcaggcaaagccttccccctaggagtgtcacaagttgacgatgggttaaattttgcaatattctcacaacatgcttcttctgtcaccctttgcttgaattttcctgagagaggcaaccaagatgatgtggacattgtagagtttgctttagaccgccagaagaacaaaactggagatatatggcatgtgtcagtggagggtttgcctgcttctggtgttctttatgggtatcgcattaatggtcctcaagggtggcaacaaggtcatagatttgatgacagcgttattcttctggacccctatgcaaaattagtttatggtcgaaagcactttgctgttgaaaaagagaagccaagccagcttttcggaacatatgatttcgatagctcaccttttgactggggtgacaattataagcttcctaatttgcctgagacagatcttgttatatatgaaatgaatgtccgtgccttcactgccgacgagtcaagcaggcttgctccagctattcgtggaagttaccttggtgtcattgataaaattcctcatttgctggaacttggcgttaatgcagtggaactacttcctgtttttgagttcgatgagctggagttgaagaggttccctaacccaagggaccacatggtaaatacatggggatattctacaatcaacttttttgcgcccatgagtcgttatgctagtgctggtggtggacctgtggctgcttccaaagagctcaaacagatggtcaaggcatttcataattctggaattgaggtgattgcagaatacctctttacttgctgttctatcatttaagttccaagtccatggagagacttgtatgatggggtgtcatcaatctctggacgaatttgtgaggaaaacaaattgttgttcttgtaggtctattacatgttagatctcaacaacagtgcacagctgctgaacttctcgggttgcgggaatacactaaactgcaaccatcctgttgtcaaggagcttgtacttgacagtttaagacattgggttaaggagtatcacatagatggatttcggtttgaccttgcgagtgttctttgtcgtggaccagatggcagtcctcttgatgcacctccacttattaaggaaattgccaaagactctgtattgtctagatgtaagatcattgctgaaccttgggactgtggtggcctttatctagtagggaggttccctaattgggacaggtgggctgaatggaacgggaagtacagagatgatattcgaagatttattaagggagatcctggtatgaagggggtgtttgcaactcgcgtttctggttctgcagatctctaccaggtgaacaatcggaagccttaccatagtgtgaactttgtaattgctcatgatggatttactttatgtgaccttgtttcatataactccaagcacaatgatgcaaatggagaaggtggtcgtgatgggtgcaatgacaactacagctggaactgtggcattgaaggagaaacaaatgatttgaatgtgctaagtcttcgttcaaggcaaatgaagaacttccatgtggcattaatgatttcccagggtactccaatgatgctgatgggagatgaatatggtcacacacgttatggaaacaacaatagctatggacatgatactcacataaataattttcagtggggccagttggaagaaaggaaggatggccatttcaggtttttctcagagatgatcaagtttcggcataaccatcctatattgagacgagacaggtttctcaacaaaaatgatgtcacttggcatgaaaatcgttgggagaaccaggacagcaaatttttggcatttacgatacatgatcacagttctggtggagacatctatttggcattcaatgctcatgagtattttgtggatgctgtaattcccccaccaccacaccataaatcttggagtcgtgtggtatggatactgtctgattctgctaacatgtttataccgagtaatttgctgtttagtcctaggatgttcaagtgccaggtatcgtcctgtaaattgtaatagcattgtctacagcaattttgttgtattcgttacttgtgtctggctagcttttgtgctgcttctatcttaacttcccttcagttaccttacaatttctatatcgcctccacaggtggataccaacctggaatcaccaaaggatattgtcccagaaggggtgccattcacaggttcagggtacaggattgctccctactcttccatcttgcttaaggcaaagccttagaatggcggaggcaagtcattctcaagtaagcacgaataatggtgttgtgatccctaactttccaagctcttagccaactgtactgcaagtatagcaaactttggtatgtgaagtcggaccaacccttgcggaaatcaacggaagccatggtttgctaaaggtatactcatggagaattggagatatggcaaacacatacgcaagtaacctccacacatctaagcaagaagagcctttcattaggggatgcatggctcgaggaaactatatttgcatttggttgattcatttttatttgttgcacatgtcagtatgtcacctgtgtgtgtcaagctcttatttgcttaaaaattggacattcctttgttacatatttgtgttgtactgtgttggagctagcgttcctggtatattgcacgggggtgggaggacgggggacgctttgtcgccgtggtcttaggctaccagcaatggttttctctatatttctgctcctgtatcacttttttgcgtcacattatcaatatttcatcctctacttttttctatctcta

SEQ ID NO: 69246 - DNA, 2003 bp, Zea Mays
ttttttatatgatactatgaggatggtgataagagtatctaaggggtacatatttgccctaagatcccaaaagatttgcattccccatgctgattttagctagattgtaaatggttgggagacatcctacaagggttttacaacagttacctaaagaagcttgttcgtgaagaacaggaactacgtctcttgttgtggctccttctggtggtcttctcttccttcttcatcttgcctgcctttttgtcacagttgttagggagcttggtttgttcgtcttgctcatcgctatcttgttcttctatggaattgtctcttttctcatgaattttcttttccttgccattaagcaccttcacttgagctggtcctgtggaagcatcagaagctaatgaatcatagtctccatcatcataatccatgttgtcgtttttgcttctaccattgctacagccactgccaacattactccatttgctgccattggctttgagatcatcactgttcactggggagcccaggtacatcgtccacccagattcattactgttgcactcttcagcattgtccccagtaagctgagaggagtccataacaagagagtgcagggacacagaaagagaggccaaggacaacacaaggaaaggaagatgaaattatgagagaactgactgatggaacacacgctaatacttcttcagagcacctcaacaacccaacttcaaagaaggctttcttgttctcactccttgacctgcagcctgagaagagcatcgaagccctctctctctctggtctctctcttcacagggcagacaatgcagggtaggggcagaattccatgaggctaagaactatgcaaggtggttgcttgtgactgtgtggaagcttgtcatggggctgaagaaacgatggcagtgcctttaaattggaaaggcagcctatccttccaactgttcctcataactttctcaactatttctgtaccttctgttgctaccaaaggcagcggggagaacatttgcttgcaatgcagtgttccaggtatttccacctgtagtccatgtggccttggactctcgcctcatggtggggtcctgtcagaggtatacgtgcatgggttgggccatgatttggtaggattggaaggttagaatgaggctggcatagctcaaaaggtttgttgtcgctgctgtgtctgcctgtcatgcaaatgcgtaacttgtttatgacacatgtcttgcgttacaggaccaggagaacatgtcttttgtttgctttagcatccgcgtgcagacaattaccaattaggctcagccattagattcacgtgccgtattttgttttccagttctatcgtaataatcagtggttgcattctgtttgttaactcctgagactgcagtttgatggttactgacatcccagagacgctgaaagtttgttgtgccacatagctagcagcaggagtatgctggaatctgacaggctactaaacgcaccggttatattttattccgctgacacggttgttttcctgtgtggatcagcggatgccaaacttgagtatgtggcatcctttcctccaagttggagggacgaacaaggctacgactaccgctgcctgcctgaattgatcctgaagctttcaggaagtcagaggctgtcagggacaagtgcttgcggtactggtaagaaaaatgctgagcccagcccagcttgatgcatcttttgatggccatagagcactgaacccctgaaggcctgaacctgctcacgtgcgtctttttactccggccgttcattttttcccctgacgaatgtcagttgtcacaggccattgccaatttgattaaatactctggtccagtttggattatgttcgtagtggcccatgtgttattgatctgagattgttagattcaaacccatttataccttgagatcgttaccttcaaagcgtggcaaaagtgtaggcggtctgcacgatcttggaaaactgg

SEQ ID NO: 69247 - DNA, 1984 bp, Zea Mays
gtctggtgcaggtccagggccaggtggtcgtgtcgccgcctccgctcccgcccctcgccgctccgcgtgtcactcgccgcttctcttccattccaccccgcccccattctccctcctcgcgcgtcgcgatgaaagaggcgcaggcttgagcgagaggaccgcgctggacaccaccgcatgctagggaggcagggaggggagccgagccgaggacgatggcgctgggcgtgttgttccacggcgcacagctagcgctggatctggcggtggccgggatgtcgctggcggtggcgctcgggttcttcgccctcatcactaccttgctctgctccgcggcgttcctccaccactccaagcccgccgcgtagtcatagcctccacagcgaccaacgcgtctcaacctctggggatcgtaatactgttgctggtataattcctccacatcaattgcagaggaggtgctttaatcaactgctttatagcacttacagatgcaaagagtagtcgattgcacacatcagccactgccaacattactccatttgctgccattggctttgagatcatcactgttcactggggagcccagggacacagaaagagaggccaaggacaacacaaggaaaggaagatgaaattatgagagaactgactgatggaacacacgctaatacttcttcagagcacctcaacaacccaacttcaaagaaggctttcttgttctcactccttgacctgcagcctgagaagagcatcgaagccctctctctctctggtctctctcttcacagggcagacaatgcagggtaggggcagaattccatgaggctaagaactatgcaaggtggttgcttgtgactgtgtggaagcttgtcatggggctgaagaaacgatggcagtgcctttaaattggaaaggcagcctatccttccaactgttcctcataactttctcaactatttctgtaccttctgttgctaccaaaggcagcggggagaacatttgcttgcaatgcagtgttccaggtatttccacctgtagtccatgtggccttggactctcgcctcatggtggggtcctgtcagaggtatacgtgcatgggttgggccatgatttggtaggattggaaggttagaatgaggctggcatagctcaaaaggtttgttgtcgctgctgtgtctgcctgtcatgcaaatgcgtaacttgtttatgacacatgtcttgcgttacaggaccaggagaacatgtcttttgtttgctttagcatccgcgtgcagacaattaccaattaggctcagccattagattcacgtgccgtattttgttttccagttctatcgtaataatcagtggttgcattctgtttgttaactcctgagactgcagtttgatggttactgacatcccagagacgctgaaagtttgttgtgccacatagctagcagcaggagtatgctggaatctgacaggctactaaacgcaccggttatattttattccgctgacacggttgttttcctgtgtggatcagcggatgccaaacttgagtatgtggcatcctttcctccaagttggagggacgaacaaggctacgactaccgctgcctgcctgaattgatcctgaagctttcaggaagtcagaggctgtcagggacaagtgcttgcggtactggtaagaaaaatgctgagcccagcccagcttgatgcatcttttgatggccatagagcactgaacccctgaaggcctgaacctgctcacgtgcgtctttttactccggccgttcattttttcccctgacgaatgtcagttgtcacaggccattgccaatttgattaaatactctggtccagtttggattatgttcgtagtggcccatgtgttattgatctgagattgttagattcaaacccatttataccttgagatcgttaccttcaaagcgtggcaaaagtgtaggcggtctgcacgatcttggaaaactgg

SEQ ID NO: 69248 - DNA, 844 bp, Zea Mays
ggacgtctggtgcaggtccagggccaggtggtcgtgtcgccgcctccgctcccgcccctcgccgctccgcgtgtcactcgccgcttctcttccattccaccccgcccccattctccctcctcgcgcgtcgcgatgaaagaggcgcaggcttgagcgagaggaccgcgctggacaccaccgcatgctagggaggcagggaggggagccgagccgaggacgatggcgctgggcgtgttgttccacggcgcacagctagcgctggatctggcggtggccgggatgtcgctggcggtggcgctcgggttcttcgccctcatcactaccttgctctgctccgcggcgttcctccaccactccaagcccgccgcgtagtcatagcctccacagcgaccaacgcgtctcaacctctggggatcgtaatactgttgctggtataattcctccacatcaattgcagaggaggtgctttaatcaactgctttatagcacttacagatgcaaagagtagtcgattgcacacatcaggtgatagctataggctcttgtaccacgtgtatgtttctttatgctggtttgtaaacgagatgtttgtactttgtactatagtttttgtaatcagtctctctttcaagatttacgtctcatataaatagtatgtgcattgtttaattcgcatgtttaacggccagaaatgaacccctggtgtcaattggtttaccctggatgcttaatcggcaaaataaatttctctctttcatagagtttagtagctctttctgttagtaaaattgccactttgcagccatataaaaacatttcaaaccctacacatactgggaagaag

SEQ ID NO: 69249 - DNA, 2588 bp, Zea Mays
cccaagtggaaccaatccagagagggactgagtggatccctcccttgtcactcgaaccgaattaacgccatggagagaaggggcattgaaccttacagtgatacacttgctgctctctcagagggtcatagcaatagtttacagttggatttggctgaggagtttttggaaagaatttcagagataaaaccaaagcatataggttcctttaatgctttgctttctggatgtgcgattatgaatgaaccagaaagagctgtccgcatactagctaaaatgaaacatgtgaacatgaagccaactctcaggacatatgaacttttgttttctctgtttggaaatgtaaatgttccttatgaacaaggagatgtgctctctcatgtcgatgtttccaaaaggataagtatcattgagatggacatgtttaacaatggaatccaacacagctttgtgtccatgaagaacttggataatcaagacccctttttttgagtctgtgggctgtccaacatttattgtttatagcaagccatacaaagaccttacacttaggggctgcccagctcttccaaattcttttccaaggctcaaaggattccgctccaatgtaatacgagcttttggagctgaggggatgatagaggaaatgctgaggtacctgaatatagcagaaaatactctgtggaacataaatcctcatcagaagagtgatctctacagcactgcgttgcatgctctggttgatgtgaaggaaactcacagagcagtaaagatgttcaaaatcatgagatcatgcagtcttccaactaatatttcaatttataataccatgatagagtgctgcaaatggctgccatgcttcaaatcagctagtgctttgctgtctttgatgcttcgagatggtttcaatcctacggttgtgacttttacatcactcctgaaggtaagtctggctaagagtagtacatgtcttttagatcaattatattactgattacatattagttgggttgacttatagggatttgatcgatctcatgcttttttcatggtgtaagataggttgtattagaaaatgataattttgaaggggctctggatctgcttgatatatgcaagattgaaggacttcagcctggcatacagactttcaacacagtactcttacgtgcatatgctagaggtcaaattcatgtccttgaatatattttggagtgtatacatcgatcaaaaatccaacctgatccatcaacactttggtacacgttttgtgcctacgaggagcatgaactgtacaatactgcaattgagtcattgctagtcctcagcatgagaatgatatctgaggatgccggcattcctagtgagaaaagaattgtttttgaagatctaatcctcagtgaagaacctgatgctgaattcaggatcataagggcattccaagcaggcgaagaattccttgcgacagctttactgaacctaagatggtgtgccacaatgggtgccaccgtatcttggtcaccggaggagagtctttgggcaatgaggctggcagcctcgtatgatgctaacaagagaccacatataaacccctcggatgctcccaaatcttggggaaggaatccacttaaccgcccgtattgggaggctaacgggtgattggttgattggttggctacgcttccgttgatcacgcttggcacgtgtttggatggctgcagagcatctctaccgcctgctcccatgcatgcagcgttgattttttcccccactgggtagcctgcatgcgcggaaactcaactccccgtctccccctcgtttccagcggcccaggctggcacgatgctggtgcgagacgcccctacaaccaatcatgcgttaactgaggcagagctggagtctagcgtttcaaatctctctgttgagtatgatgacaatgttgtgttctgttttgctggaagccagtagatgttttgtttacctaactaacatgattgcagtacgatcgggcggcctccctacctgtcgtgaagcttgttccgcatgattgctccaaattggcctcgtaccgttttcaggcttctaggccaacagctctatgttccgattctttacattacttgataggttgctcactttatttacccagttgtaatttctgattatactggctgtcgggagcattagctttgcaaaactgtaggaatatatatgacaacgacgaagatcgagtcgcatggcagtgacagaagaataagaggtgttacgattacaatagctggaaaccaaaacttgctctggttattttgaaggtgtttagattttggaatgacgatgttacaattacactttattctggcaaaggtagattgtagaaggatggatagtgatgcactgttaccgcgtggtactgggttggtctttgtttgttgtacatcagttgttttctggcaggtcgttttgttgacttcgtagctgcccgaataacagaccaattattccatctcagttagagatcatttgtctacggcactcgacattcccttggtttctctcctttctgtctggttttggacttttgtttcagc

SEQ ID NO: 69250 - DNA, 3597 bp, Zea Mays
acacgcttcctccacgccacctcgatctgtgcggcggcaaacccagagatccttgccccgtccgccggcgaaaggcgctcacctcccctcttcgctgtctgcgatgcagaggatactatcgagggccgctcgccggtgcacgaactcctcggcggcgttcaactcacctcacgcgcaggccaatgcagcaagtgttcactctgaagacgccccaacttgttcaaacatgattacagagaacgatgattttacatggaagactagttttgttagacccatgcaatcagaagtcgtcaatgccctccgtagaggtgaccggcagcgagcatcattgattctttcgaactttcatcacactaaggaatcactgaccaaggaagatttttcttatatattggagtattgtgcagaggcacctgatcctttgtttgttatggaaactttggaactcatggaggagaaggccattggcatgagtaaaagtatctacagatatgtcattagagctctgagcagagggggatatgcgaaggaggtacttcactggctggctcttctaggggagaaagaaagcactcatgccactacaccgatttttaatatctttctaaatgcctgtggtagagcaaatctgaaggacgccgaaaactgtctagagatactggaaaatctttttcttgggaagtctgaaataacatactgtgagcttttgaagcttgcagtgttacagggaaatttgcctgcagcttatgatatctggaaggagtgctctaggtattatagcccaagcattgtcacgcaaaggagatttataagggctttaactgcgctaggtgaccttcaatctgcgtatcacatattgcagcatatggtagcccttgctgcacaaagctgtgactatctgagggtgtcttctaaaagaagataccgatcatcgagactagacattcctgtacctgctttgaatgaatttgaagatctcaacctgccatcatgccaagggaagctggctaccggcgaacatttggttgatgctcaacctgagctatttgatgagaaaactcggccaggcaacaatctttcttataaggttgtagtagatgcgagtgttgcaaatacattgaagtctgcaccaagcacagtaaaacaaattttgagatgggcgttcaatgatgttttgcatgcatgtgtaccgttcaacaactgccagttagctgagcatttatttacagagatgcagaaacttggattgcaaccaacaagttatacatatgacggttttattaaaaccgtgatagctgggaaaggaattgcatatgccaacaaagtgattaacgccatggagagaaggggcattgaaccttacagtgatacacttgctgctctctcagagggtcatagcaatagtttacagttggatttggctgaggagtttttggaaagaatttcagagataaaaccaaagcatataggttcctttaatgctttgctttctggatgtgcgattatgaatgaaccagaaagagctgtccgcatactagctaaaatgaaacatgtgaacatgaagccaactctcaggacatatgaacttttgttttctctgtttggaaatgtaaatgttccttatgaacaaggagatgtgctctctcatgtcgatgtttccaaaaggataagtatcattgagatggacatgtttaacaatggaatccaacacagctttgtgtccatgaagaacttgatacgagcttttggagctgaggggatgatagaggaaatgctgaggtacctgaatatagcagaaaatactctgtggaacataaatcctcatcagaagagtgatctctacagcactgcgttgcatgctctggttgatgtgaaggaaactcacagagcagtaaagatgttcaaaatcatgagatcatgcagtcttccaactaatatttcaatttataataccatgatagagtgctgcaaatggctgccatgcttcaaatcagctagtgctttgctgtctttgatgcttcgagatggtttcaatcctacggttgtgacttttacatcactcctgaaggttgtattagaaaatgataattttgaaggggctctggatctgcttgatatatgcaagattgaaggacttcagcctggcatacagactttcaacacagtactcttacgtgcatatgctagaggtcaaattcatgtccttgaatatattttggagtgtatacatcgatcaaaaatccaacctgatccatcaacactttggtacacgttttgtgcctacgaggagcatgaactgtacaatactgcaattgagtcattgctagtcctcagcatgagaatgatatctgaggatgccggcattcctagtgagaaaagaattgtttttgaagatctaatcctcagtgaagaacctgatgctgaattcaggatcataagggcattccaagcaggcgaagaattccttgcgacagctttactgaacctaagatggtgtgccacaatgggtgccaccgtatcttggtcaccggaggagagtctttgggcaatgaggctggcagcctcgtatgatgctaacaagagaccacatataaacccctcggatgctcccaaatcttggggaaggaatccacttaaccgcccgtattgggaggctaacgggtgattggttgattggttggctacgcttccgttgatcacgcttggcacgtgtttggatggctgcagagcatctctaccgcctgctcccatgcatgcagcgttgattttttcccccactgggtagcctgcatgcgcggaaactcaactccccgtctccccctcgtttccagcggcccaggctggcacgatgctggtgcgagacgcccctacaaccaatcatgcgttaactgaggcagagctggagtctagcgtttcaaatctctctgttgagtatgatgacaatgttgtgttctgttttgctggaagccagtagatgttttgtttacctaactaacatgattgcagtacgatcgggcggcctccctacctgtcgtgaagcttgttccgcatgattgctccaaattggcctcgtaccgttttcaggcttctaggccaacagctctatgttccgattctttacattacttgataggttgctcactttatttacccagttgtaatttctgattatactggctgtcgggagcattagctttgcaaaactgtaggaatatatatgacaacgacgaagatcgagtcgcatggcagtgacagaagaataagaggtgttacgattacaatagctggaaaccaaaacttgctctggttattttgaaggtgtttagattttggaatgacgatgttacaattacactttattctggcaaaggtagattgtagaaggatggatagtgatgcactgttaccgcgtggtactgggttggtctttgtttgttgtacatcagttgttttctggcaggtcgttttgttgacttcgtagctgcccgaataacagaccaattattccatctcagttagagatcatttgtctacggcactcgacattcccttggtttctctcctttctgtctggttttggacttttgtttcagc

SEQ ID NO: 69251 - DNA, 3626 bp, Zea Mays
ccacttcacacgcttcctccacgccacctcgatctgtgcggcggcaaacccagagatccttgccccgtccgccggcgaaaggcgctcacctcccctcttcgctgtctgcgatgcagaggatactatcgagggccgctcgccggtgcacgaactcctcggcggcgttcaactcacctcacgcgcaggccaatgcagcaagtgttcactctgaagacgccccaacttgttcaaacatgattacagagaacgatgattttacatggaagactagttttgttagacccatgcaatcagaagtcgtcaatgccctccgtagaggtgaccggcagcgagcatcattgattctttcgaactttcatcacactaaggaatcactgaccaaggaagatttttcttatatattggagtattgtgcagaggcacctgatcctttgcttttccaatacttctagtttgttatggaaactttggaactcatggaggagaaggccattggcatgagtaaaagtatctacagatatgtcattagagctctgagcagagggggatatgcgaaggaggcacttcactggctggctcttctaggggagaaagaaagcactcatgccactacaccgatttttaatatctttctaaatgcctgtggtagagcaaatctgaaggacgccgaaaactgtctagagatactggaaaatctttttcttgggaagtctgaaataacatactgtgagcttttgaagcttgcagtgttacagggaaatttgcctgcagcttatgatatctggaaggagtgctctaggtattatagcccaagcattgtcacgcaaaggagatttataagggctttaactgcgctaggtgaccttcaatctgcgtatcacatattgcagcatatggtagcccttgctgcacaaagctgtgactatctgagggtgtcttctaaaagaagataccgatcatcgagactagacattcctgtacctgctttgaatgaatttgaagatctcaacctgccatcatgccaagggaagctggctaccggcgaacatttggttgatgctcaacctgagctatttgatgagaaaactcggccagctttgttcaggcaacaatctttcttataaggttgtagtagatgcgagtgttgcaaatacattgaagtctgcaccaagcacagtaaaacaaattttgagatgggcgttcaatgatgttttgcatgcatgtgtaccgttcaacaactgccagttagctgagcatttatttacagagaaacttggattgcaaccaacaagttatacatatgacggttttattaaaaccgtgatagctgggaaaggaattgcatatgccaacaaagtgattaacgccatggagagaaggggcattgaaccttacagtgatacacttgctgctctctcagagggtcatagcaatagtttacagttggatttggctgaggagtttttggaaagaatttcagagataaaaccaaagcatataggttcctttaatgctttgctttctggatgtgcgattatgaatgaaccagaaagagctgtccgcatactagctaaaatgaaacatgtgaacatgaagccaactctcaggacatatgaacttttgttttctctgtttggaaatgtaaatgttccttatgaacaaggagatgtgctctctcatgtcgatgtttccaaaaggataagtatcattgagatggacatgtttaacaatggaatccaacacagctttgtgtccatgaagaacttgatacgagcttttggagctgaggggatgatagaggaaatgctgaggtacctgaatatagcagaaaatactctgtggaacataaatcctcatcagaagagtgatctctacagcactgcgttgcatgctctggttgatgtgaaggaaactcacagagcagtaaagatgttcaaaatcatgagatcatgcagtcttccaactaatatttcaatttataataccatgatagagtgctgcaaatggctgccatgcttcaaatcagctagtgctttgctgtctttgatgcttcgagatggtttcaatcctacggttgtgacttttacatcactcctgaaggttgtattagaaaatgataattttgaaggggctctggatctgcttgatatatgcaagattgaaggacttcagcctggcatacagactttcaacacagtactcttacgtgcatatgctagaggtcaaattcatgtccttgaatatattttggagtgtatacatcgatcaaaaatccaacctgatccatcaacactttggtacacgttttgtgcctacgaggagcatgaactgtacaatactgcaattgagtcattgctagtcctcagcatgagaatgatatctgaggatgccggcattcctagtgagaaaagaattgtttttgaagatctaatcctcagtgaagaacctgatgctgaattcaggatcataagggcattccaagcaggcgaagaattccttgcgacagctttactgaacctaagatggtgtgccacaatgggtgccaccgtatcttggtcaccggaggagagtctttgggcaatgaggctggcagcctcgtatgatgctaacaagagaccacatataaacccctcggatgctcccaaatcttggggaaggaatccacttaaccgcccgtattgggaggctaacgggtgattggttgattggttggctacgcttccgttgatcacgcttggcacgtgtttggatggctgcagagcatctctaccgcctgctcccatgcatgcagcgttgattttttcccccactgggtagcctgcatgcgcggaaactcaactccccgtctccccctcgtttccagcggcccaggctggcacgatgctggtgcgagacgcccctacaaccaatcatgcgttaactgaggcagagctggagtctagcgtttcaaatctctctgttgagtatgatgacaatgttgtgttctgttttgctggaagccagtagatgttttgtttacctaactaacatgattgcagtacgatcgggcggcctccctacctgtcgtgaagcttgttccgcatgattgctccaaattggcctcgtaccgttttcaggcttctaggccaacagctctatgttccgattctttacattacttgataggttgctcactttatttacccagttgtaatttctgattatactggctgtcgggagcattagctttgcaaaactgtaggaatatatatgacaacgacgaagatcgagtcgcatggcagtgacagaagaataagaggtgttacgattacaatagctggaaaccaaaacttgctctggttattttgaaggtgtttagattttggaatgacgatgttacaattacactttattctggcaaaggtagattgtagaaggatggatagtgatgcactgttaccgcgtggtactgggttggtctttgtttgttgtacatcagttgttttctggcaggtcgttttgttgacttcgtagctgcccgaataacagaccaattattccatctcagttagagatcatttgtctacggcactcgacattcccttggtttctctcctttctgtctggttttggacttttgtttcagc

SEQ ID NO: 69252 - DNA, 3679 bp, Zea Mays
actgcttccacttcacacgcttcctccacgccacctcgatctgtgcggcggcaaacccagagatccttgccccgtccgccggcgaaaggcgctcacctcccctcttcgctgtctgcgatgcagaggatactatcgagggccgctcgccggtgcacgaactcctcggcggcgttcaactcacctcacgcgcaggccaatgcagcaagtgttcactctgaagacgccccaacttgttcaaacatgattacagagaacgatgattttacatggaagactagttttgttagacccatgcaatcagaagtcgtcaatgccctccgtagaggtgaccggcagcgagcatcattgattctttcgaactttcatcacactaaggaatcactgaccaaggaagatttttcttatatattggagtattgtgcagaggcacctgatcctttgaactccatttggagcttttccaatacttctagtttgttatggaaactttggaactcatggaggagaaggccattggcatgagtaaaagtatctacagatatgtcattagagctctgagcagagggggatatgcgaaggaggcacttcactggctggctcttctaggggagaaagaaagcactcatgccactacaccgatttttaatatctttctaaatgcctgtggtagagcaaatctgaaggacgccgaaaactgtctagagatactggaaaatctttttcttgggaagtctgaaataacatactgtgagcttttgaaggtttgtatgaagaaatgttctttcttcttgcagtgttacagggaaatttgcctgcagcttatgatatctggaaggagtgctctaggtattatagcccaagcattgtcacgcaaaggagatttataagggctttaactgcgctaggtgaccttcaatctgcgtatcacatattgcagcatatggtagcccttgctgcacaaagctgtgactatctgagggtgtcttctaaaagaagataccgatcatcgagactagacattcctgtacctgctttgaatgaatttgaagatctcaacctgccatcatgccaagggaagctggctaccggcgaacatttggttgatgctcaacctgagctatttgatgagaaaactcggccagctttgttcaggcaacaatctttcttataaggttgtagtagatgcgagtgttgcaaatacattgaagtctgcaccaagcacagtaaaacaaattttgagatgggcgttcaatgatgttttgcatgcatgtgtaccgttcaacaactgccagttagctgagcatttatttacagagatgcagaaacttggattgcaaccaacaagttatacatatgacggttttattaaaaccgtgatagctgggaaaggaattgcatatgccaacaaagtgattaacgccatggagagaaggggcattgaaccttacagtgatacacttgctgctctctcagagggtcatagcaatagtttacagttggatttggctgaggagtttttggaaagaatttcagagataaaaccaaagcatataggttcctttaatgctttgctttctggatgtgcgattatgaatgaaccagaaagagctgtccgcatactagctaaaatgaaacatgtgaacatgaagccaactctcaggacatatgaacttttgttttctctgtttggaaatgtaaatgttccttatgaacaaggagatgtgctctctcatgtcgatgtttccaaaaggataagtatcattgagatggacatgtttaacaatggaatccaacacagctttgtgtccatgaagaacttgatacgagcttttggagctgaggggatgatagaggaaatgctgaggtacctgaatatagcagaaaatactctgtggaacataaatcctcatcagaagagtgatctctacagcactgcgttgcatgctctggttgatgtgaaggaaactcacagagcagtaaagatgttcaaaatcatgagatcatgcagtcttccaactaatatttcaatttataataccatgatagagtgctgcaaatggctgccatgcttcaaatcagctagtgctttgctgtctttgatgcttcgagatggtttcaatcctacggttgtgacttttacatcactcctgaaggttgtattagaaaatgataattttgaaggggctctggatctgcttgatatatgcaagattgaaggacttcagcctggcatacagactttcaacacagtactcttacgtgcatatgctagaggtcaaattcatgtccttgaatatattttggagtgtatacatcgatcaaaaatccaacctgatccatcaacactttggtacacgttttgtgcctacgaggagcatgaactgtacaatactgcaattgagtcattgctagtcctcagcatgagaatgatatctgaggatgccggcattcctagtgagaaaagaattgtttttgaagatctaatcctcagtgaagaacctgatgctgaattcaggatcataagggcattccaagcaggcgaagaattccttgcgacagctttactgaacctaagatggtgtgccacaatgggtgccaccgtatcttggtcaccggaggagagtctttgggcaatgaggctggcagcctcgtatgatgctaacaagagaccacatataaacccctcggatgctcccaaatcttggggaaggaatccacttaaccgcccgtattgggaggctaacgggtgattggttgattggttggctacgcttccgttgatcacgcttggcacgtgtttggatggctgcagagcatctctaccgcctgctcccatgcatgcagcgttgattttttcccccactgggtagcctgcatgcgcggaaactcaactccccgtctccccctcgtttccagcggcccaggctggcacgatgctggtgcgagacgcccctacaaccaatcatgcgttaactgaggcagagctggagtctagcgtttcaaatctctctgttgagtatgatgacaatgttgtgttctgttttgctggaagccagtagatgttttgtttacctaactaacatgattgcagtacgatcgggcggcctccctacctgtcgtgaagcttgttccgcatgattgctccaaattggcctcgtaccgttttcaggcttctaggccaacagctctatgttccgattctttacattacttgataggttgctcactttatttacccagttgtaatttctgattatactggctgtcgggagcattagctttgcaaaactgtaggaatatatatgacaacgacgaagatcgagtcgcatggcagtgacagaagaataagaggtgttacgattacaatagctggaaaccaaaacttgctctggttattttgaaggtgtttagattttggaatgacgatgttacaattacactttattctggcaaaggtagattgtagaaggatggatagtgatgcactgttaccgcgtggtactgggttggtctttgtttgttgtacatcagttgttttctggcaggtcgttttgttgacttcgtagctgcccgaataacagaccaattattccatctcagttagagatcatttgtctacggcactcgacattcccttggtttctctcctttctgtctggttttggacttttgtttcagc

SEQ ID NO: 69253 - DNA, 3621 bp, Zea Mays
actgcttccacttcacacgcttcctccacgccacctcgatctgtgcggcggcaaacccagagatccttgccccgtccgccggcgaaaggcgctcacctcccctcttcgctgtctgcgatgcagaggatactatcgagggccgctcgccggtgcacgaactcctcggcggcgttcaactcacctcacgcgcaggccaatgcagcaagtgttcactctgaagacgccccaacttgttcaaacatgattacagagaacgatgattttacatggaagactagttttgttagacccatgcaatcagaagtcgtcaatgccctccgtagaggtgaccggcagcgagcatcattgattctttcgaactttcatcacactaaggaatcactgaccaaggaagatttttcttatatattggagtattgtgcagaggcacctgatcctttgtttgttatggaaactttggaactcatggaggagaaggccattggcatgagtaaaagtatctacagatatgtcattagagctctgagcagagggggatatgcgaaggaggcacttcactggctggctcttctaggggagaaagaaagcactcatgccactacaccgatttttaatatctttctaaatgcctgtggtagagcaaatctgaaggacgccgaaaactgtctagagatactggaaaatctttttcttgggaagtctgaaataacatactgtgagcttttgaagcttgcagtgttacagggaaatttgcctgcagcttatgatatctggaaggagtgctctaggtattatagcccaagcattgtcacgcaaaggagatttataagggctttaactgcgctaggtgaccttcaatctgcgtatcacatattgcagcatatggtagcccttgctgcacaaagctgtgactatctgagggtgtcttctaaaagaagataccgatcatcgagactagacattcctgtacctgctttgaatgaatttgaagatctcaacctgccatcatgccaagggaagctggctaccggcgaacatttggttgatgctcaacctgagctatttgatgagaaaactcggccagctttgttcaggcaacaatctttcttataaggttgtagtagatgcgagtgttgcaaatacattgaagtctgcaccaagcacagtaaaacaaattttgagatgggcgttcaatgatgttttgcatgcatgtgtaccgttcaacaactgccagttagctgagcatttatttacagagatgcagaaacttggattgcaaccaacaagttatacatatgacggttttattaaaaccgtgatagctgggaaaggaattgcatatgccaacaaagtgattaacgccatggagagaaggggcattgaaccttacagtgatacacttgctgctctctcagagggtcatagcaatagtttacagttggatttggctgaggagtttttggaaagaatttcagagataaaaccaaagcatataggttcctttaatgctttgctttctggatgtgcgattatgaatgaaccagaaagagctgtccgcatactagctaaaatgaaacatgtgaacatgaagccaactctcaggacatatgaacttttgttttctctgtttggaaatgtaaatgttccttatgaacaaggagatgtgctctctcatgtcgatgtttccaaaaggataagtatcattgagatggacatgtttaacaatggaatccaacacagctttgtgtccatgaagaacttgatacgagcttttggagctgaggggatgatagaggaaatgctgaggtacctgaatatagcagaaaatactctgtggaacataaatcctcatcagaagagtgatctctacagcactgcgttgcatgctctggttgatgtgaaggaaactcacagagcagtaaagatgttcaaaatcatgagatcatgcagtcttccaactaatatttcaatttataataccatgatagagtgctgcaaatggctgccatgcttcaaatcagctagtgctttgctgtctttgatgcttcgagatggtttcaatcctacggttgtgacttttacatcactcctgaaggttgtattagaaaatgataattttgaaggggctctggatctgcttgatatatgcaagattgaaggacttcagcctggcatacagactttcaacacagtactcttacgtgcatatgctagaggtcaaattcatgtccttgaatatattttggagtgtatacatcgatcaaaaatccaacctgatccatcaacactttggtacacgttttgtgcctacgaggagcatgaactgtacaatactgcaattgagtcattgctagtcctcagcatgagaatgatatctgaggatgccggcattcctagtgagaaaagaattgtttttgaagatctaatcctcagtgaagaacctgatgctgaattcaggatcataagggcattccaagcaggcgaagaattccttgcgacagctttactgaacctaagatggtgtgccacaatgggtgccaccgtatcttggtcaccggaggagagtctttgggcaatgaggctggcagcctcgtatgatgctaacaagagaccacatataaacccctcggatgctcccaaatcttggggaaggaatccacttaaccgcccgtattgggaggctaacgggtgattggttgattggttggctacgcttccgttgatcacgcttggcacgtgtttggatggctgcagagcatctctaccgcctgctcccatgcatgcagcgttgattttttcccccactgggtagcctgcatgcgcggaaactcaactccccgtctccccctcgtttccagcggcccaggctggcacgatgctggtgcgagacgcccctacaaccaatcatgcgttaactgaggcagagctggagtctagcgtttcaaatctctctgttgagtatgatgacaatgttgtgttctgttttgctggaagccagtagatgttttgtttacctaactaacatgattgcagtacgatcgggcggcctccctacctgtcgtgaagcttgttccgcatgattgctccaaattggcctcgtaccgttttcaggcttctaggccaacagctctatgttccgattctttacattacttgataggttgctcactttatttacccagttgtaatttctgattatactggctgtcgggagcattagctttgcaaaactgtaggaatatatatgacaacgacgaagatcgagtcgcatggcagtgacagaagaataagaggtgttacgattacaatagctggaaaccaaaacttgctctggttattttgaaggtgtttagattttggaatgacgatgttacaattacactttattctggcaaaggtagattgtagaaggatggatagtgatgcactgttaccgcgtggtactgggttggtctttgtttgttgtacatcagttgttttctggcaggtcgttttgttgacttcgtagctgcccgaataacagaccaattattccatctcagttagagatcatttgtctacggcactcgacattcccttggtttctctcctttctgtctggttttggacttttgtttcagc

SEQ ID NO: 69254 - DNA, 4499 bp, Zea Mays
atactgcttccacttcacacgcttcctccacgccacctcgatctgtgcggcggcaaacccagagatccttgccccgtccgccggcgaaaggcgctcacctcccctcttcgctgtctgcgatgcagaggatactatcgagggccgctcgccggtgcacgaactcctcggcggcgttcaactcacctcacgcgcaggccaatgcagcaagtgttcactctgaagacgccccaacttgttcaaacatgattacagagaacgatgattttacatggaagactagttttgttagacccatgcaatcagaagtcgtcaatgccctccgtagaggtgaccggcagcgagcatcattgattctttcgaactttcatcacactaaggaatcactgaccaaggaagatttttcttatatattggagtattgtgcagaggcacctgatcctttgtttgttatggaaactttggaactcatggaggagaaggccattggcatgagtaaaagtatctacagatatgtcattagagctctgagcagagggggatatgcgaaggaggtacatagtacttctcttttctcaagttaatagcaatatcagtagcacaccatattcttttgttaaagataaatagaccacaagattgccacaaaacttccattttcttgtgacactagcttggatgtctagtccaaatgccataaatgacgcaccatagataacagacccatgttcgtgatactggttgagtgagtccgttatgttcataaaatcataacttgtccttgctagcccaccttgggactgaaaggctttattgttgctgcttctgttgttgttgccacccttttgtgcaagggtacagctacaaatattttcctgcacactgatagcttgcagggagcttctttgtgtatttttattttttcatttgtaatagaggtgaattggaagttgtaaattctgctgcacaagtgtctcataaaattagctaacaaaaaaaaatgctgatttgcggaaaaaataggtatactgcacactgtatttccattcgaaatataagatagacaggcttaatcacatgcttgtctccacatttaaaggattttgaccctttttagtgtgttacttcgatgagttgatggatattccggtaagtttattactgattttttgacaaattgtgcatgatccagtggaatttaattgcatttatgtgtgctatatgtttgacagcttaatgaatagtttagctccatgcagtctgcaagttcagaatcttctttcctatataggcacttcactggctggctcttctaggggagaaagaaagcactcatgccactacaccgatttttaatatctttctaaatgcctgtggtagagcaaatctgaaggacgccgaaaactgtctagagatactggaaaatctttttcttgggaagtctgaaataacatactgtgagcttttgaagcttgcagtgttacagggaaatttgcctgcagcttatgatatctggaaggagtgctctaggtattatagcccaagcattgtcacgcaaaggagatttataagggctttaactgcgctaggtgaccttcaatctgcgtatcacatattgcagcatatggtagcccttgctgcacaaagctgtgactatctgagggtgtcttctaaaagaagataccgatcatcgagactagacattcctgtacctgctttgaatgaatttgaagatctcaacctgccatcatgccaagggaagctggctaccggcgaacatttggttgatgctcaacctgagctatttgatgagaaaactcggccagctttgttcaggcaacaatctttcttataaggttgtagtagatgcgagtgttgcaaatacattgaagtctgcaccaagcacagtaaaacaaattttgagatgggcgttcaatgatgttttgcatgcatgtgtaccgttcaacaactgccagttagctgagcatttatttacagagatgcagaaacttggattgcaaccaacaagttatacatatgacggttttattaaaaccgtgatagctgggaaaggaattgcatatgccaacaaagtgattaacgccatggagagaaggggcattgaaccttacagtgatacacttgctgctctctcagagggtcatagcaatagtttacagttggatttggctgaggagtttttggaaagaatttcagagataaaaccaaagcatataggttcctttaatgctttgctttctggatgtgcgattatgaatgaaccagaaagagctgtccgcatactagctaaaatgaaacatgtgaacatgaagccaactctcaggacatatgaacttttgttttctctgtttggaaatgtaaatgttccttatgaacaaggagatgtgctctctcatgtcgatgtttccaaaaggataagtatcattgagatggacatgtttaacaatggaatccaacacagctttgtgtccatgaagaacttggataatcaagacccctttttttgagtctgtgggctgtccaacatttattgtttatagcaagccatacaaagaccttacacttaggggctgcccagctcttccaaattcttttccaaggctcaaaggattccgctccaatatacgagcttttggagctgaggggatgatagaggaaatgctgaggtacctgaatatagcagaaaatactctgtggaacataaatcctcatcagaagagtgatctctacagcactgcgttgcatgctctggttgatgtgaaggaaactcacagagcagtaaagatgttcaaaatcatgagatcatgcagtcttccaactaatatttcaatttataataccatgatagagtgctgcaaatggctgccatgcttcaaatcagctagtgctttgctgtctttgatgcttcgagatggtttcaatcctacggttgtgacttttacatcactcctgaaggttgtattagaaaatgataattttgaaggggctctggatctgcttgatatatgcaagattgaaggacttcagcctggcatacagactttcaacacagtactcttacgtgcatatgctagaggtcaaattcatgtccttgaatatattttggagtgtatacatcgatcaaaaatccaacctgatccatcaacactttggtacacgttttgtgcctacgaggagcatgaactgtacaatactgcaattgagtcattgctagtcctcagcatgagaatgatatctgaggatgccggcattcctagtgagaaaagaattgtttttgaagatctaatcctcagtgaagaacctgatgctgaattcaggatcataagggcattccaagcaggcgaagaattccttgcgacagctttactgaacctaagatggtgtgccacaatgggtgccaccgtatcttggtcaccggaggagagtctttgggcaatgaggctggcagcctcgtatgatgctaacaagagaccacatataaacccctcggatgctcccaaatcttggggaaggaatccacttaaccgcccgtattgggaggctaacgggtgattggttgattggttggctacgcttccgttgatcacgcttggcacgtgtttggatggctgcagagcatctctaccgcctgctcccatgcatgcagcgttgattttttcccccactgggtagcctgcatgcgcggaaactcaactccccgtctccccctcgtttccagcggcccaggctggcacgatgctggtgcgagacgcccctacaaccaatcatgcgttaactgaggcagagctggagtctagcgtttcaaatctctctgttgagtatgatgacaatgttgtgttctgttttgctggaagccagtagatgttttgtttacctaactaacatgattgcagtacgatcgggcggcctccctacctgtcgtgaagcttgttccgcatgattgctccaaattggcctcgtaccgttttcaggcttctaggccaacagctctatgttccgattctttacattacttgataggttgctcactttatttacccagttgtaatttctgattatactggctgtcgggagcattagctttgcaaaactgtaggaatatatatgacaacgacgaagatcgagtcgcatggcagtgacagaagaataagaggtgttacgattacaatagctggaaaccaaaacttgctctggttattttgaaggtgtttagattttggaatgacgatgttacaattacactttattctggcaaaggtagattgtagaaggatggatagtgatgcactgttaccgcgtggtactgggttggtctttgtttgttgtacatcagttgttttctggcaggtcgttttgttgacttcgtagctgcccgaataacagaccaattattccatctcagttagagatcatttgtctacggcactcgacattcccttggtttctctcctttctgtctggttttggacttttgtttcagc

SEQ ID NO: 69255 - DNA, 3660 bp, Zea Mays
ggtgtatactgcttccacttcacacgcttcctccacgccacctcgatctgtgcggcggcaaacccagagatccttgccccgtccgccggcgaaaggcgctcacctcccctcttcgctgtctgcgatgcagaggatactatcgagggccgctcgccggtgcacgaactcctcggcggcgttcaactcacctcacgcgcaggccaatgcagcaagtgttcactctgaagacgccccaacttgttcaaacatgattacagagaacgatgattttacatggaagactagttttgttagacccatgcaatcagaagtcgtcaatgccctccgtagaggtgaccggcagcgagcatcattgattctttcgaactttcatcacactaaggaatcactgaccaaggaagatttttcttatatattggagtattgtgcagaggcacctgatcctttgaactccatttggagcttttccaatacttctagtttgttatggaaactttggaactcatggaggagaaggccattggcatgagtaaaagtatctacagatatgtcattagagctctgagcagagggggatatgcgaaggaggcacttcactggctggctcttctaggggagaaagaaagcactcatgccactacaccgatttttaatatctttctaaatgcctgtggtagagcaaatctgaaggacgccgaaaactgtctagagatactggaaaatctttttcttgggaagtctgaaataacatactgtgagcttttgaagcttgcagtgttacagggaaatttgcctgcagcttatgatatctggaaggagtgctctaggtattatagcccaagcattgtcacgcaaaggagatttataagggctttaactgcgctaggtgaccttcaatctgcgtatcacatattgcagcatatggtagcccttgctgcacaaagctgtgactatctgagggtgtcttctaaaagaagataccgatcatcgagactagacattcctgtacctgctttgaatgaatttgaagatctcaacctgccatcatgccaagggaagctggctaccggcgaacatttggttgatgctcaacctgagctatttgatgagaaaactcggccagctttgttcaggcaacaatctttcttataaggttgtagtagatgcgagtgttgcaaatacattgaagtctgcaccaagcacagtaaaacaaattttgagatgggcgttcaatgatgttttgcatgcatgtgtaccgttcaacaactgccagttagctgagcatttatttacagagatgcagaaacttggattgcaaccaacaagttatacatatgacggttttattaaaaccgtgatagctgggaaaggaattgcatatgccaacaaagtgattaacgccatggagagaaggggcattgaaccttacagtgatacacttgctgctctctcagagggtcatagcaatagtttacagttggatttggctgaggagtttttggaaagaatttcagagataaaaccaaagcatataggttcctttaatgctttgctttctggatgtgcgattatgaatgaaccagaaagagctgtccgcatactagctaaaatgaaacatgtgaacatgaagccaactctcaggacatatgaacttttgttttctctgtttggaaatgtaaatgttccttatgaacaaggagatgtgctctctcatgtcgatgtttccaaaaggataagtatcattgagatggacatgtttaacaatggaatccaacacagctttgtgtccatgaagaacttgatacgagcttttggagctgaggggatgatagaggaaatgctgaggtacctgaatatagcagaaaatactctgtggaacataaatcctcatcagaagagtgatctctacagcactgcgttgcatgctctggttgatgtgaaggaaactcacagagcagtaaagatgttcaaaatcatgagatcatgcagtcttccaactaatatttcaatttataataccatgatagagtgctgcaaatggctgccatgcttcaaatcagctagtgctttgctgtctttgatgcttcgagatggtttcaatcctacggttgtgacttttacatcactcctgaaggttgtattagaaaatgataattttgaaggggctctggatctgcttgatatatgcaagattgaaggacttcagcctggcatacagactttcaacacagtactcttacgtgcatatgctagaggtcaaattcatgtccttgaatatattttggagtgtatacatcgatcaaaaatccaacctgatccatcaacactttggtacacgttttgtgcctacgaggagcatgaactgtacaatactgcaattgagtcattgctagtcctcagcatgagaatgatatctgaggatgccggcattcctagtgagaaaagaattgtttttgaagatctaatcctcagtgaagaacctgatgctgaattcaggatcataagggcattccaagcaggcgaagaattccttgcgacagctttactgaacctaagatggtgtgccacaatgggtgccaccgtatcttggtcaccggaggagagtctttgggcaatgaggctggcagcctcgtatgatgctaacaagagaccacatataaacccctcggatgctcccaaatcttggggaaggaatccacttaaccgcccgtattgggaggctaacgggtgattggttgattggttggctacgcttccgttgatcacgcttggcacgtgtttggatggctgcagagcatctctaccgcctgctcccatgcatgcagcgttgattttttcccccactgggtagcctgcatgcgcggaaactcaactccccgtctccccctcgtttccagcggcccaggctggcacgatgctggtgcgagacgcccctacaaccaatcatgcgttaactgaggcagagctggagtctagcgtttcaaatctctctgttgagtatgatgacaatgttgtgttctgttttgctggaagccagtagatgttttgtttacctaactaacatgattgcagtacgatcgggcggcctccctacctgtcgtgaagcttgttccgcatgattgctccaaattggcctcgtaccgttttcaggcttctaggccaacagctctatgttccgattctttacattacttgataggttgctcactttatttacccagttgtaatttctgattatactggctgtcgggagcattagctttgcaaaactgtaggaatatatatgacaacgacgaagatcgagtcgcatggcagtgacagaagaataagaggtgttacgattacaatagctggaaaccaaaacttgctctggttattttgaaggtgtttagattttggaatgacgatgttacaattacactttattctggcaaaggtagattgtagaaggatggatagtgatgcactgttaccgcgtggtactgggttggtctttgtttgttgtacatcagttgttttctggcaggtcgttttgttgacttcgtagctgcccgaataacagaccaattattccatctcagttagagatcatttgtctacggcactcgacattcccttggtttctctcctttctgtctggttttggacttttgtttcagc

SEQ ID NO: 69256 - DNA, 3663 bp, Zea Mays
aggctgcgcggtgtatactgcttccacttcacacgcttcctccacgccacctcgatctgtgcggcggcaaacccagagatccttgccccgtccgccggcgaaaggcgctcacctcccctcttcgctgtctgcgatgcagaggatactatcgagggccgctcgccggtgcacgaactcctcggcggcgttcaactcacctcacgcgcaggccaatgcagcaagtgttcactctgaagacgccccaacttgttcaaacatgattacagagaacgatgattttacatggaagactagttttgttagacccatgcaatcagaagtcgtcaatgccctccgtagaggtgaccggcagcgagcatcattgattctttcgaactttcatcacactaaggaatcactgaccaaggaagatttttcttatatattggagtattgtgcagaggcacctgatcctttgaactccatttggagcttttccaatacttctagtttgttatggaaactttggaactcatggaggagaaggccattggcatgagtaaaagtatctacagatatgtcattagagctctgagcagagggggatatgcgaaggaggcacttcactggctggctcttctaggggagaaagaaagcactcatgccactacaccgatttttaatatctttctaaatgcctgtggtagagcaaatctgaaggacgccgaaaactgtctagagatactggaaaatctttttcttgggaagtctgaaataacatactgtgagcttttgaagcttgcagtgttacagggaaatttgcctgcagcttatgatatctggaaggagtgctctaggtattatagcccaagcattgtcacgcaaaggagatttataagggctttaactgcgctaggtgaccttcaatctgcgtatcacatattgcagcatatggtagcccttgctgcacaaagctgtgactatctgagggtgtcttctaaaagaagataccgatcatcgagactagacattcctgtacctgctttgaatgaatttgaagatctcaacctgccatcatgccaagggaagctggctaccggcgaacatttggttgatgctcaacctgagctatttgatgagaaaactcggccaggcaacaatctttcttataaggttgtagtagatgcgagtgttgcaaatacattgaagtctgcaccaagcacagtaaaacaaattttgagatgggcgttcaatgatgttttgcatgcatgtgtaccgttcaacaactgccagttagctgagcatttatttacagagatgcagaaacttggattgcaaccaacaagttatacatatgacggttttattaaaaccgtgatagctgggaaaggaattgcatatgccaacaaagtgattaacgccatggagagaaggggcattgaaccttacagtgatacacttgctgctctctcagagggtcatagcaatagtttacagttggatttggctgaggagtttttggaaagaatttcagagataaaaccaaagcatataggttcctttaatgctttgctttctggatgtgcgattatgaatgaaccagaaagagctgtccgcatactagctaaaatgaaacatgtgaacatgaagccaactctcaggacatatgaacttttgttttctctgtttggaaatgtaaatgttccttatgaacaaggagatgtgctctctcatgtcgatgtttccaaaaggataagtatcattgagatggacatgtttaacaatggaatccaacacagctttgtgtccatgaagaacttgatacgagcttttggagctgaggggatgatagaggaaatgctgaggtacctgaatatagcagaaaatactctgtggaacataaatcctcatcagaagagtgatctctacagcactgcgttgcatgctctggttgatgtgaaggaaactcacagagcagtaaagatgttcaaaatcatgagatcatgcagtcttccaactaatatttcaatttataataccatgatagagtgctgcaaatggctgccatgcttcaaatcagctagtgctttgctgtctttgatgcttcgagatggtttcaatcctacggttgtgacttttacatcactcctgaagataggttgtattagaaaatgataattttgaaggggctctggatctgcttgatatatgcaagattgaaggacttcagcctggcatacagactttcaacacagtactcttacgtgcatatgctagaggtcaaattcatgtccttgaatatattttggagtgtatacatcgatcaaaaatccaacctgatccatcaacactttggtacacgttttgtgcctacgaggagcatgaactgtacaatactgcaattgagtcattgctagtcctcagcatgagaatgatatctgaggatgccggcattcctagtgagaaaagaattgtttttgaagatctaatcctcagtgaagaacctgatgctgaattcaggatcataagggcattccaagcaggcgaagaattccttgcgacagctttactgaacctaagatggtgtgccacaatgggtgccaccgtatcttggtcaccggaggagagtctttgggcaatgaggctggcagcctcgtatgatgctaacaagagaccacatataaacccctcggatgctcccaaatcttggggaaggaatccacttaaccgcccgtattgggaggctaacgggtgattggttgattggttggctacgcttccgttgatcacgcttggcacgtgtttggatggctgcagagcatctctaccgcctgctcccatgcatgcagcgttgattttttcccccactgggtagcctgcatgcgcggaaactcaactccccgtctccccctcgtttccagcggcccaggctggcacgatgctggtgcgagacgcccctacaaccaatcatgcgttaactgaggcagagctggagtctagcgtttcaaatctctctgttgagtatgatgacaatgttgtgttctgttttgctggaagccagtagatgttttgtttacctaactaacatgattgcagtacgatcgggcggcctccctacctgtcgtgaagcttgttccgcatgattgctccaaattggcctcgtaccgttttcaggcttctaggccaacagctctatgttccgattctttacattacttgataggttgctcactttatttacccagttgtaatttctgattatactggctgtcgggagcattagctttgcaaaactgtaggaatatatatgacaacgacgaagatcgagtcgcatggcagtgacagaagaataagaggtgttacgattacaatagctggaaaccaaaacttgctctggttattttgaaggtgtttagattttggaatgacgatgttacaattacactttattctggcaaaggtagattgtagaaggatggatagtgatgcactgttaccgcgtggtactgggttggtctttgtttgttgtacatcagttgttttctggcaggtcgttttgttgacttcgtagctgcccgaataacagaccaattattccatctcagttagagatcatttgtctacggcactcgacattcccttggtttctctcctttctgtctggttttggacttttgtttcagc

SEQ ID NO: 69257 - DNA, 3543 bp, Zea Mays
cttccattttgtaggctgcgcggtgtatactgcttccacttcacacgcttcctccacgccacctcgatctgtgcggcggcaaacccagagatccttgccccgtccgccggcgaaaggcgctcacctcccctcttcgctgtctgcgatgcagaggatactatcgagggccgctcgccggtgcacgaactcctcggcggcgttcaactcacctcacgcgcaggccaatgcagcaagtgttcactctgaagacgccccaacttgttcaaacatgattacagagaacgatgattttacatggaagactagttttgttagacccatgcaatcagaagtcgtcaatgccctccgtagaggtgaccggcagcgagcatcattgattctttcgaactttcatcacactaaggaatcactgaccaaggaagatttttcttatatattggagtattgtgcagaggcacctgatcctttgtttgttatggaaactttggaactcatggaggagaaggccattggcatgagtaaaagtatctacagatatgtcattagagctctgagcagagggggatatgcgaaggaggcacttcactggctggctcttctaggggagaaagaaagcactcatgccactacaccgatttttaatatctttctaaatgcctgtggtagagcaaatctgaaggacgccgaaaactgtctagagatactggaaaatctttttcttgggaagtctgaaataacatactgtgagcttttgaagcttgcagtgttacagggaaatttgcctgcagcttatgatatctggaaggagtgctctaggtattatagcccaagcattgtcacgcaaaggagatttataagggctttaactgcgctaggtgaccttcaatctgcgtatcacatattgcagcatatggtagcccttgctgcacaaagctgtgactatctgagggtgtcttctaaaagaagataccgatcatcgagactagacattcctgtacctgctttgaatgaatttgaagatctcaacctgccatcatgccaagggaagctggctaccggcgaacatttggttgatgctcaacctgagctatttgatgagaaaactcggccaggcaacaatctttcttataaggttgtagtagatgcgagtgttgcaaatacattgaagtctgcaccaagcacagtaaaacaaattttgagatgggcgttcaatgatgttttgcatgcatgtgtaccgttcaacaactgccagttagctgagcatttatttacagagattaacgccatggagagaaggggcattgaaccttacagtgatacacttgctgctctctcagagggtcatagcaatagtttacagttggatttggctgaggagtttttggaaagaatttcagagataaaaccaaagcatataggttcctttaatgctttgctttctggatgtgcgattatgaatgaaccagaaagagctgtccgcatactagctaaaatgaaacatgtgaacatgaagccaactctcaggacatatgaacttttgttttctctgtttggaaatgtaaatgttccttatgaacaaggagatgtgctctctcatgtcgatgtttccaaaaggataagtatcattgagatggacatgtttaacaatggaatccaacacagctttgtgtccatgaagaacttgatacgagcttttggagctgaggggatgatagaggaaatgctgaggtacctgaatatagcagaaaatactctgtggaacataaatcctcatcagaagagtgatctctacagcactgcgttgcatgctctggttgatgtgaaggaaactcacagagcagtaaagatgttcaaaatcatgagatcatgcagtcttccaactaatatttcaatttataataccatgatagagtgctgcaaatggctgccatgcttcaaatcagctagtgctttgctgtctttgatgcttcgagatggtttcaatcctacggttgtgacttttacatcactcctgaaggttgtattagaaaatgataattttgaaggggctctggatctgcttgatatatgcaagattgaaggacttcagcctggcatacagactttcaacacagtactcttacgtgcatatgctagaggtcaaattcatgtccttgaatatattttggagtgtatacatcgatcaaaaatccaacctgatccatcaacactttggtacacgttttgtgcctacgaggagcatgaactgtacaatactgcaattgagtcattgctagtcctcagcatgagaatgatatctgaggatgccggcattcctagtgagaaaagaattgtttttgaagatctaatcctcagtgaagaacctgatgctgaattcaggatcataagggcattccaagcaggcgaagaattccttgcgacagctttactgaacctaagatggtgtgccacaatgggtgccaccgtatcttggtcaccggaggagagtctttgggcaatgaggctggcagcctcgtatgatgctaacaagagaccacatataaacccctcggatgctcccaaatcttggggaaggaatccacttaaccgcccgtattgggaggctaacgggtgattggttgattggttggctacgcttccgttgatcacgcttggcacgtgtttggatggctgcagagcatctctaccgcctgctcccatgcatgcagcgttgattttttcccccactgggtagcctgcatgcgcggaaactcaactccccgtctccccctcgtttccagcggcccaggctggcacgatgctggtgcgagacgcccctacaaccaatcatgcgttaactgaggcagagctggagtctagcgtttcaaatctctctgttgagtatgatgacaatgttgtgttctgttttgctggaagccagtagatgttttgtttacctaactaacatgattgcagtacgatcgggcggcctccctacctgtcgtgaagcttgttccgcatgattgctccaaattggcctcgtaccgttttcaggcttctaggccaacagctctatgttccgattctttacattacttgataggttgctcactttatttacccagttgtaatttctgattatactggctgtcgggagcattagctttgcaaaactgtaggaatatatatgacaacgacgaagatcgagtcgcatggcagtgacagaagaataagaggtgttacgattacaatagctggaaaccaaaacttgctctggttattttgaaggtgtttagattttggaatgacgatgttacaattacactttattctggcaaaggtagattgtagaaggatggatagtgatgcactgttaccgcgtggtactgggttggtctttgtttgttgtacatcagttgttttctggcaggtcgttttgttgacttcgtagctgcccgaataacagaccaattattccatctcagttagagatcatttgtctacggcactcgacattcccttggtttctctcctttctgtctggttttggacttttgtttcagc

SEQ ID NO: 69258 - DNA, 3564 bp, Zea Mays
gtcgctctcgtctgcttccattttgtaggctgcgcggtgtatactgcttccacttcacacgcttcctccacgccacctcgatctgtgcggcggcaaacccagagatccttgccccgtccgccggcgaaaggcgctcacctcccctcttcgctgtctgcgatgcagaggatactatcgagggccgctcgccggtgcacgaactcctcggcggcgttcaactcacctcacgcgcaggccaatgcagcaagtgttcactctgaagacgccccaacttgttcaaacatgattacagagaacgatgattttacatggaagactagttttgttagacccatgcaatcagaagtcgtcaatgccctccgtagaggtgaccggcagcgagcatcattgattctttcgaactttcatcacactaaggaatcactgaccaaggaagatttttcttatatattggagtattgtgcagaggcacctgatcctttgtttgttatggaaactttggaactcatggaggagaaggccattggcatgagtaaaagtatctacagatatgtcattagagctctgagcagagggggatatgcgaaggagagcaaatctgaaggacgccgaaaactgtctagagatactggaaaatctttttcttgggaagtctgaaataacatactgtgagcttttgaagcttgcagtgttacagggaaatttgcctgcagcttatgatatctggaaggagtgctctaggtattatagcccaagcattgtcacgcaaaggagatttataagggctttaactgcgctaggtgaccttcaatctgcgtatcacatattgcagcatatggtagcccttgctgcacaaagctgtgactatctgagggtgtcttctaaaagaagataccgatcatcgagactagacattcctgtacctgctttgaatgaatttgaagatctcaacctgccatcatgccaagggaagctggctaccggcgaacatttggttgatgctcaacctgagctatttgatgagaaaactcggccaggcaacaatctttcttataaggttgtagtagatgcgagtgttgcaaatacattgaagtctgcaccaagcacagtaaaacaaattttgagatgggcgttcaatgatgttttgcatgcatgtgtaccgttcaacaactgccagttagctgagcatttatttacagagatgcagaaacttggattgcaaccaacaagttatacatatgacggttttattaaaaccgtgatagctgggaaaggaattgcatatgccaacaaagtgattaacgccatggagagaaggggcattgaaccttacagtgatacacttgctgctctctcagagggtcatagcaatagtttacagttggatttggctgaggagtttttggaaagaatttcagagataaaaccaaagcatataggttcctttaatgctttgctttctggatgtgcgattatgaatgaaccagaaagagctgtccgcatactagctaaaatgaaacatgtgaacatgaagccaactctcaggacatatgaacttttgttttctctgtttggaaatgtaaatgttccttatgaacaaggagatgtgctctctcatgtcgatgtttccaaaaggataagtatcattgagatggacatgtttaacaatggaatccaacacagctttgtgtccatgaagaacttgatacgagcttttggagctgaggggatgatagaggaaatgctgaggtacctgaatatagcagaaaatactctgtggaacataaatcctcatcagaagagtgatctctacagcactgcgttgcatgctctggttgatgtgaaggaaactcacagagcagtaaagatgttcaaaatcatgagatcatgcagtcttccaactaatatttcaatttataataccatgatagagtgctgcaaatggctgccatgcttcaaatcagctagtgctttgctgtctttgatgcttcgagatggtttcaatcctacggttgtgacttttacatcactcctgaaggttgtattagaaaatgataattttgaaggggctctggatctgcttgatatatgcaagattgaaggacttcagcctggcatacagactttcaacacagtactcttacgtgcatatgctagaggtcaaattcatgtccttgaatatattttggagtgtatacatcgatcaaaaatccaacctgatccatcaacactttggtacacgttttgtgcctacgaggagcatgaactgtacaatactgcaattgagtcattgctagtcctcagcatgagaatgatatctgaggatgccggcattcctagtgagaaaagaattgtttttgaagatctaatcctcagtgaagaacctgatgctgaattcaggatcataagggcattccaagcaggcgaagaattccttgcgacagctttactgaacctaagatggtgtgccacaatgggtgccaccgtatcttggtcaccggaggagagtctttgggcaatgaggctggcagcctcgtatgatgctaacaagagaccacatataaacccctcggatgctcccaaatcttggggaaggaatccacttaaccgcccgtattgggaggctaacgggtgattggttgattggttggctacgcttccgttgatcacgcttggcacgtgtttggatggctgcagagcatctctaccgcctgctcccatgcatgcagcgttgattttttcccccactgggtagcctgcatgcgcggaaactcaactccccgtctccccctcgtttccagcggcccaggctggcacgatgctggtgcgagacgcccctacaaccaatcatgcgttaactgaggcagagctggagtctagcgtttcaaatctctctgttgagtatgatgacaatgttgtgttctgttttgctggaagccagtagatgttttgtttacctaactaacatgattgcagtacgatcgggcggcctccctacctgtcgtgaagcttgttccgcatgattgctccaaattggcctcgtaccgttttcaggcttctaggccaacagctctatgttccgattctttacattacttgataggttgctcactttatttacccagttgtaatttctgattatactggctgtcgggagcattagctttgcaaaactgtaggaatatatatgacaacgacgaagatcgagtcgcatggcagtgacagaagaataagaggtgttacgattacaatagctggaaaccaaaacttgctctggttattttgaaggtgtttagattttggaatgacgatgttacaattacactttattctggcaaaggtagattgtagaaggatggatagtgatgcactgttaccgcgtggtactgggttggtctttgtttgttgtacatcagttgttttctggcaggtcgttttgttgacttcgtagctgcccgaataacagaccaattattccatctcagttagagatcatttgtctacggcactcgacattcccttggtttctctcctttctgtctggttttggacttttgtttcagc

SEQ ID NO: 69259 - DNA, 3506 bp, Zea Mays
gtcgctctcgtctgcttccattttgtaggctgcgcggtgtatactgcttccacttcacacgcttcctccacgccacctcgatctgtgcggcggcaaacccagagatccttgccccgtccgccggcgaaaggcgctcacctcccctcttcgctgtctgcgatgcagaggatactatcgagggccgctcgccggtgcacgaactcctcggcggcgttcaactcacctcacgcgcaggccaatgcagcaagtgttcactctgaagacgccccaacttgttcaaacaagaacgatgattttacatggaagactagttttgttagacccatgcaatcagaagtcgtcaatgccctccgtagaggtgaccggcagcgagcatcattgattctttcgaactttcatcacactaaggaatcactgaccaaggaagatttttcttatatattggagtattgtgcagaggcacctgatcctttgaactccatttggagcttttccaatacttctagtttgttatggaaactttggaactcatggaggagaaggccattggcatgagtaaaagtatctacagatatgtcattagagctctgagcagagggggatatgcgaaggagcttgcagtgttacagggaaatttgcctgcagcttatgatatctggaaggagtgctctaggtattatagcccaagcattgtcacgcaaaggagatttataagggctttaactgcgctaggtgaccttcaatctgcgtatcacatattgcagcatatggtagcccttgctgcacaaagctgtgactatctgagggtgtcttctaaaagaagataccgatcatcgagactagacattcctgtacctgctttgaatgaatttgaagatctcaacctgccatcatgccaagggaagctggctaccggcgaacatttggttgatgctcaacctgagctatttgatgagaaaactcggccagctttgttcaggcaacaatctttcttataaggttgtagtagatgcgagtgttgcaaatacattgaagtctgcaccaagcacagtaaaacaaattttgagatgggcgttcaatgatgttttgcatgcatgtgtaccgttcaacaactgccagttagctgagcatttatttacagagatgcagaaacttggattgcaaccaacaagttatacatatgacggttttattaaaaccgtgatagctgggaaaggaattgcatatgccaacaaagtgattaacgccatggagagaaggggcattgaaccttacagtgatacacttgctgctctctcagagggtcatagcaatagtttacagttggatttggctgaggagtttttggaaagaatttcagagataaaaccaaagcatataggttcctttaatgctttgctttctggatgtgcgattatgaatgaaccagaaagagctgtccgcatactagctaaaatgaaacatgtgaacatgaagccaactctcaggacatatgaacttttgttttctctgtttggaaatgtaaatgttccttatgaacaaggagatgtgctctctcatgtcgatgtttccaaaaggataagtatcattgagatggacatgtttaacaatggaatccaacacagctttgtgtccatgaagaacttgatacgagcttttggagctgaggggatgatagaggaaatgctgaggtacctgaatatagcagaaaatactctgtggaacataaatcctcatcagaagagtgatctctacagcactgcgttgcatgctctggttgatgtgaaggaaactcacagagcagtaaagatgttcaaaatcatgagatcatgcagtcttccaactaatatttcaatttataataccatgatagagtgctgcaaatggctgccatgcttcaaatcagctagtgctttgctgtctttgatgcttcgagatggtttcaatcctacggttgtgacttttacatcactcctgaaggttgtattagaaaatgataattttgaaggggctctggatctgcttgatatatgcaagattgaaggacttcagcctggcatacagactttcaacacagtactcttacgtgcatatgctagaggtcaaattcatgtccttgaatatattttggagtgtatacatcgatcaaaaatccaacctgatccatcaacactttggtacacgttttgtgcctacgaggagcatgaactgtacaatactgcaattgagtcattgctagtcctcagcatgagaatgatatctgaggatgccggcattcctagtgagaaaagaattgtttttgaagatctaatcctcagtgaagaacctgatgctgaattcaggatcataagggcattccaagcaggcgaagaattccttgcgacagctttactgaacctaagatggtgtgccacaatgggtgccaccgtatcttggtcaccggaggagagtctttgggcaatgaggctggcagcctcgtatgatgctaacaagagaccacatataaacccctcggatgctcccaaatcttggggaaggaatccacttaaccgcccgtattgggaggctaacgggtgattggttgattggttggctacgcttccgttgatcacgcttggcacgtgtttggatggctgcagagcatctctaccgcctgctcccatgcatgcagcgttgattttttcccccactgggtagcctgcatgcgcggaaactcaactccccgtctccccctcgtttccagcggcccaggctggcacgatgctggtgcgagacgcccctacaaccaatcatgcgttaactgaggcagagctggagtctagcgtttcaaatctctctgttgagtatgatgacaatgttgtgttctgttttgctggaagccagtagatgttttgtttacctaactaacatgattgcagtacgatcgggcggcctccctacctgtcgtgaagcttgttccgcatgattgctccaaattggcctcgtaccgttttcaggcttctaggccaacagctctatgttccgattctttacattacttgataggttgctcactttatttacccagttgtaatttctgattatactggctgtcgggagcattagctttgcaaaactgtaggaatatatatgacaacgacgaagatcgagtcgcatggcagtgacagaagaataagaggtgttacgattacaatagctggaaaccaaaacttgctctggttattttgaaggtgtttagattttggaatgacgatgttacaattacactttattctggcaaaggtagattgtagaaggatggatagtgatgcactgttaccgcgtggtactgggttggtctttgtttgttgtacatcagttgttttctggcaggtcgttttgttgacttcgtagctgcccgaataacagaccaattattccatctcagttagagatcatttgtctacggcactcgacattcccttggtttctctcctttctgtctggttttggacttttgtttcagc

SEQ ID NO: 69260 - DNA, 3702 bp, Zea Mays
cgctgaacccctcgtcgccggtgtcgctctcgtctgcttccattttgtaggctgcgcggtgtatactgcttccacttcacacgcttcctccacgccacctcgatctgtgcggcggcaaacccagagatccttgccccgtccgccggcgaaaggcgctcacctcccctcttcgctgtctgcgatgcagaggatactatcgagggccgctcgccggtgcacgaactcctcggcggcgttcaactcacctcacgcgcaggccaatgcagcaagtgttcactctgaagacgccccaacttgttcaaacaagaacgatgattttacatggaagactagttttgttagacccatgcaatcagaagtcgtcaatgccctccgtagaggtgaccggcagcgagcatcattgattctttcgaactttcatcacactaaggaatcactgaccaaggaagatttttcttatatattggagtattgtgcagaggcacctgatcctttgaactccatttggagcttttccaatacttctagtttgttatggaaactttggaactcatggaggagaaggccattggcatgagtaaaagtatctacagatatgtcattagagctctgagcagagggggatatgcgaaggaggcacttcactggctggctcttctaggggagaaagaaagcactcatgccactacaccgatttttaatatctttctaaatgcctgtggtagagcaaatctgaaggacgccgaaaactgtctagagatactggaaaatctttttcttgggaagtctgaaataacatactgtgagcttttgaagcttgcagtgttacagggaaatttgcctgcagcttatgatatctggaaggagtgctctaggtattatagcccaagcattgtcacgcaaaggagatttataagggctttaactgcgctaggtgaccttcaatctgcgtatcacatattgcagcatatggtagcccttgctgcacaaagctgtgactatctgagggtgtcttctaaaagaagataccgatcatcgagactagacattcctgtacctgctttgaatgaatttgaagatctcaacctgccatcatgccaagggaagctggctaccggcgaacatttggttgatgctcaacctgagctatttgatgagaaaactcggccaggcaacaatctttcttataaggttgtagtagatgcgagtgttgcaaatacattgaagtctgcaccaagcacagtaaaacaaattttgagatgggcgttcaatgatgttttgcatgcatgtgtaccgttcaacaactgccagttagctgagcatttatttacagagatgcagaaacttggattgcaaccaacaagttatacatatgacggttttattaaaaccgtgatagctgggaaaggaattgcatatgccaacaaagtgattaacgccatggagagaaggggcattgaaccttacagtgatacacttgctgctctctcagagggtcatagcaatagtttacagttggatttggctgaggagtttttggaaagaatttcagagataaaaccaaagcatataggttcctttaatgctttgctttctggatgtgcgattatgaatgaaccagaaagagctgtccgcatactagctaaaatgaaacatgtgaacatgaagccaactctcaggacatatgaacttttgttttctctgtttggaaatgtaaatgttccttatgaacaaggagatgtgctctctcatgtcgatgtttccaaaaggataagtatcattgagatggacatgtttaacaatggaatccaacacagctttgtgtccatgaagaacttgatacgagcttttggagctgaggggatgatagaggaaatgctgaggtacctgaatatagcagaaaatactctgtggaacataaatcctcatcagaagagtgatctctacagcactgcgttgcatgctctggttgatgtgaaggaaactcacagagcagtaaagatgttcaaaatcatgagatcatgcagtcttccaactaatatttcaatttataataccatgatagagtgctgcaaatggctgccatgcttcaaatcagctagtgctttgctgtctttgatgcttcgagatggtttcaatcctacggttgtgacttttacatcactcctgaagataggttgtattagaaaatgataattttgaaggggctctggatctgcttgatatatgcaagattgaaggacttcagcctggcatacagactttcaacacagtactcttacgtgcatatgctagaggtcaaattcatgtccttgaatatattttggagtgtatacatcgatcaaaaatccaacctgatccatcaacactttggtacacgttttgtgcctacgaggagcatgaactgtacaatactgcaattgagtcattgctagtcctcagcatgagaatgatatctgaggatgccggcattcctagtgagaaaagaattgtttttgaagatctaatcctcagtgaagaacctgatgctgaattcaggatcataagggcattccaagcaggcgaagaattccttgcgacagctttactgaacctaagatggtgtgccacaatgggtgccaccgtatcttggtcaccggaggagagtctttgggcaatgaggctggcagcctcgtatgatgctaacaagagaccacatataaacccctcggatgctcccaaatcttggggaaggaatccacttaaccgcccgtattgggaggctaacgggtgattggttgattggttggctacgcttccgttgatcacgcttggcacgtgtttggatggctgcagagcatctctaccgcctgctcccatgcatgcagcgttgattttttcccccactgggtagcctgcatgcgcggaaactcaactccccgtctccccctcgtttccagcggcccaggctggcacgatgctggtgcgagacgcccctacaaccaatcatgcgttaactgaggcagagctggagtctagcgtttcaaatctctctgttgagtatgatgacaatgttgtgttctgttttgctggaagccagtagatgttttgtttacctaactaacatgattgcagtacgatcgggcggcctccctacctgtcgtgaagcttgttccgcatgattgctccaaattggcctcgtaccgttttcaggcttctaggccaacagctctatgttccgattctttacattacttgataggttgctcactttatttacccagttgtaatttctgattatactggctgtcgggagcattagctttgcaaaactgtaggaatatatatgacaacgacgaagatcgagtcgcatggcagtgacagaagaataagaggtgttacgattacaatagctggaaaccaaaacttgctctggttattttgaaggtgtttagattttggaatgacgatgttacaattacactttattctggcaaaggtagattgtagaaggatggatagtgatgcactgttaccgcgtggtactgggttggtctttgtttgttgtacatcagttgttttctggcaggtcgttttgttgacttcgtagctgcccgaataacagaccaattattccatctcagttagagatcatttgtctacggcactcgacattcccttggtttctctcctttctgtctggttttggacttttgtttcagc

SEQ ID NO: 69261 - DNA, 3674 bp, Zea Mays
agcatcgctgaacccctcgtcgccggtgtcgctctcgtctgcttccattttgtaggctgcgcggtgtatactgcttccacttcacacgcttcctccacgccacctcgatctgtgcggcggcaaacccagagatccttgccccgtccgccggcgaaaggcgctcacctcccctcttcgctgtctgcgatgcagaggatactatcgagggccgctcgccggtgcacgaactcctcggcggcgttcaactcacctcacgcgcaggccaatgcagcaagtgttcactctgaagacgccccaacttgttcaaacatgattacagagaacgatgattttacatggaagactagttttgttagacccatgcaatcagaagtcgtcaatgccctccgtagaggtgaccggcagcgagcatcattgattctttcgaactttcatcacactaaggaatcactgaccaaggaagatttttcttatatattggagtattgtgcagaggcacctgatcctttgtttgttatggaaactttggaactcatggaggagaaggccattggcatgagtaaaagtatctacagatatgtcattagagctctgagcagagggggatatgcgaaggaggcacttcactggctggctcttctaggggagaaagaaagcactcatgccactacaccgatttttaatatctttctaaatgcctgtggtagagcaaatctgaaggacgccgaaaactgtctagagatactggaaaatctttttcttgggaagtctgaaataacatactgtgagcttttgaagcttgcagtgttacagggaaatttgcctgcagcttatgatatctggaaggagtgctctaggtattatagcccaagcattgtcacgcaaaggagatttataagggctttaactgcgctaggtgaccttcaatctgcgtatcacatattgcagcatatggtagcccttgctgcacaaagctgtgactatctgagggtgtcttctaaaagaagataccgatcatcgagactagacattcctgtacctgctttgaatgaatttgaagatctcaacctgccatcatgccaagggaagctggctaccggcgaacatttggttgatgctcaacctgagctatttgatgagaaaactcggccaggcaacaatctttcttataaggttgtagtagatgcgagtgttgcaaatacattgaagtctgcaccaagcacagtaaaacaaattttgagatgggcgttcaatgatgttttgcatgcatgtgtaccgttcaacaactgccagttagctgagcatttatttacagagaaacttggattgcaaccaacaagttatacatatgacggttttattaaaaccgtgatagctgggaaaggaattgcatatgccaacaaagtgattaacgccatggagagaaggggcattgaaccttacagtgatacacttgctgctctctcagagggtcatagcaatagtttacagttggatttggctgaggagtttttggaaagaatttcagagataaaaccaaagcatataggttcctttaatgctttgctttctggatgtgcgattatgaatgaaccagaaagagctgtccgcatactagctaaaatgaaacatgtgaacatgaagccaactctcaggacatatgaacttttgttttctctgtttggaaatgtaaatgttccttatgaacaaggagatgtgctctctcatgtcgatgtttccaaaaggataagtatcattgagatggacatgtttaacaatggaatccaacacagctttgtgtccatgaagaacttgatacgagcttttggagctgaggggatgatagaggaaatgctgaggtacctgaatatagcagaaaatactctgtggaacataaatcctcatcagaagagtgatctctacagcactgcgttgcatgctctggttgatgtgaaggaaactcacagagcagtaaagatgttcaaaatcatgagatcatgcagtcttccaactaatatttcaatttataataccatgatagagtgctgcaaatggctgccatgcttcaaatcagctagtgctttgctgtctttgatgcttcgagatggtttcaatcctacggttgtgacttttacatcactcctgaaggttgtattagaaaatgataattttgaaggggctctggatctgcttgatatatgcaagattgaaggacttcagcctggcatacagactttcaacacagtactcttacgtgcatatgctagaggtcaaattcatgtccttgaatatattttggagtgtatacatcgatcaaaaatccaacctgatccatcaacactttggtacacgttttgtgcctacgaggagcatgaactgtacaatactgcaattgagtcattgctagtcctcagcatgagaatgatatctgaggatgccggcattcctagtgagaaaagaattgtttttgaagatctaatcctcagtgaagaacctgatgctgaattcaggatcataagggcattccaagcaggcgaagaattccttgcgacagctttactgaacctaagatggtgtgccacaatgggtgccaccgtatcttggtcaccggaggagagtctttgggcaatgaggctggcagcctcgtatgatgctaacaagagaccacatataaacccctcggatgctcccaaatcttggggaaggaatccacttaaccgcccgtattgggaggctaacgggtgattggttgattggttggctacgcttccgttgatcacgcttggcacgtgtttggatggctgcagagcatctctaccgcctgctcccatgcatgcagcgttgattttttcccccactgggtagcctgcatgcgcggaaactcaactccccgtctccccctcgtttccagcggcccaggctggcacgatgctggtgcgagacgcccctacaaccaatcatgcgttaactgaggcagagctggagtctagcgtttcaaatctctctgttgagtatgatgacaatgttgtgttctgttttgctggaagccagtagatgttttgtttacctaactaacatgattgcagtacgatcgggcggcctccctacctgtcgtgaagcttgttccgcatgattgctccaaattggcctcgtaccgttttcaggcttctaggccaacagctctatgttccgattctttacattacttgataggttgctcactttatttacccagttgtaatttctgattatactggctgtcgggagcattagctttgcaaaactgtaggaatatatatgacaacgacgaagatcgagtcgcatggcagtgacagaagaataagaggtgttacgattacaatagctggaaaccaaaacttgctctggttattttgaaggtgtttagattttggaatgacgatgttacaattacactttattctggcaaaggtagattgtagaaggatggatagtgatgcactgttaccgcgtggtactgggttggtctttgtttgttgtacatcagttgttttctggcaggtcgttttgttgacttcgtagctgcccgaataacagaccaattattccatctcagttagagatcatttgtctacggcactcgacattcccttggtttctctcctttctgtctggttttggacttttgtttcagc

SEQ ID NO: 69262 - DNA, 3706 bp, Zea Mays
ggattcggcccgaggtccggtggcagcatcgctgaacccctcgtcgccggtgtcgctctcgtctgcttccattttgtaggctgcgcggtgtatactgcttccacttcacacgcttcctccacgccacctcgatctgtgcggcggcaaacccagagatccttgccccgtccgccggcgaaaggcgctcacctcccctcttcgctgtctgcgatgcagaggatactatcgagggccgctcgccggtgcacgaactcctcggcggcgttcaactcacctcacgcgcaggccaatgcagcaagtgttcactctgaagacgccccaacttgttcaaacatgattacagagaacgatgattttacatggaagactagttttgttagacccatgcaatcagaagtcgtcaatgccctccgtagaggtgaccggcagcgagcatcattgattctttcgaactttcatcacactaaggaatcactgaccaaggaagatttttcttatatattggagtattgtgcagaggcacctgatcctttgtttgttatggaaactttggaactcatggaggagaaggccattggcatgagtaaaagtatctacagatatgtcattagagctctgagcagagggggatatgcgaaggaggcacttcactggctggctcttctaggggagaaagaaagcactcatgccactacaccgatttttaatatctttctaaatgcctgtggtagagcaaatctgaaggacgccgaaaactgtctagagatactggaaaatctttttcttgggaagtctgaaataacatactgtgagcttttgaagcttgcagtgttacagggaaatttgcctgcagcttatgatatctggaaggagtgctctaggtattatagcccaagcattgtcacgcaaaggagatttataagggctttaactgcgctaggtgaccttcaatctgcgtatcacatattgcagcatatggtagcccttgctgcacaaagctgtgactatctgagggtgtcttctaaaagaagataccgatcatcgagactagacattcctgtacctgctttgaatgaatttgaagatctcaacctgccatcatgccaagggaagctggctaccggcgaacatttggttgatgctcaacctgagctatttgatgagaaaactcggccaggcaacaatctttcttataaggttgtagtagatgcgagtgttgcaaatacattgaagtctgcaccaagcacagtaaaacaaattttgagatgggcgttcaatgatgttttgcatgcatgtgtaccgttcaacaactgccagttagctgagcatttatttacagagagatgcagaaacttggattgcaaccaacaagttatacatatgacggttttattaaaaccgtgatagctgggaaaggaattgcatatgccaacaaagtgattaacgccatggagagaaggggcattgaaccttacagtgatacacttgctgctctctcagagggtcatagcaatagtttacagttggatttggctgaggagtttttggaaagaatttcagagataaaaccaaagcatataggttcctttaatgctttgctttctggatgtgcgattatgaatgaaccagaaagagctgtccgcatactagctaaaatgaaacatgtgaacatgaagccaactctcaggacatatgaacttttgttttctctgtttggaaatgtaaatgttccttatgaacaaggagatgtgctctctcatgtcgatgtttccaaaaggataagtatcattgagatggacatgtttaacaatggaatccaacacagctttgtgtccatgaagaacttgatacgagcttttggagctgaggggatgatagaggaaatgctgaggtacctgaatatagcagaaaatactctgtggaacataaatcctcatcagaagagtgatctctacagcactgcgttgcatgctctggttgatgtgaaggaaactcacagagcagtaaagatgttcaaaatcatgagatcatgcagtcttccaactaatatttcaatttataataccatgatagagtgctgcaaatggctgccatgcttcaaatcagctagtgctttgctgtctttgatgcttcgagatggtttcaatcctacggttgtgacttttacatcactcctgaaggttgtattagaaaatgataattttgaaggggctctggatctgcttgatatatgcaagattgaaggacttcagcctggcatacagactttcaacacagtactcttacgtgcatatgctagaggtcaaattcatgtccttgaatatattttggagtgtatacatcgatcaaaaatccaacctgatccatcaacactttggtacacgttttgtgcctacgaggagcatgaactgtacaatactgcaattgagtcattgctagtcctcagcatgagaatgatatctgaggatgccggcattcctagtgagaaaagaattgtttttgaagatctaatcctcagtgaagaacctgatgctgaattcaggatcataagggcattccaagcaggcgaagaattccttgcgacagctttactgaacctaagatggtgtgccacaatgggtgccaccgtatcttggtcaccggaggagagtctttgggcaatgaggctggcagcctcgtatgatgctaacaagagaccacatataaacccctcggatgctcccaaatcttggggaaggaatccacttaaccgcccgtattgggaggctaacgggtgattggttgattggttggctacgcttccgttgatcacgcttggcacgtgtttggatggctgcagagcatctctaccgcctgctcccatgcatgcagcgttgattttttcccccactgggtagcctgcatgcgcggaaactcaactccccgtctccccctcgtttccagcggcccaggctggcacgatgctggtgcgagacgcccctacaaccaatcatgcgttaactgaggcagagctggagtctagcgtttcaaatctctctgttgagtatgatgacaatgttgtgttctgttttgctggaagccagtagatgttttgtttacctaactaacatgattgcagtacgatcgggcggcctccctacctgtcgtgaagcttgttccgcatgattgctccaaattggcctcgtaccgttttcaggcttctaggccaacagctctatgttccgattctttacattacttgataggttgctcactttatttacccagttgtaatttctgattatactggctgtcgggagcattagctttgcaaaactgtaggaatatatatgacaacgacgaagatcgagtcgcatggcagtgacagaagaataagaggtgttacgattacaatagctggaaaccaaaacttgctctggttattttgaaggtgtttagattttggaatgacgatgttacaattacactttattctggcaaaggtagattgtagaaggatggatagtgatgcactgttaccgcgtggtactgggttggtctttgtttgttgtacatcagttgttttctggcaggtcgttttgttgacttcgtagctgcccgaataacagaccaattattccatctcagttagagatcatttgtctacggcactcgacattcccttggtttctctcctttctgtctggttttggacttttgtttcagc

SEQ ID NO: 69263 - DNA, 3817 bp, Zea Mays
gccagcccagctccacggcctgcgagaagagccagttgtgtgctggtggcgtctcgtcctttggatcacaacagacggccaggattcggcccgaggtccggtggcagcatcgctgaacccctcgtcgccggtgtcgctctcgtctgcttccattttgtaggctgcgcggtgtatactgcttccacttcacacgcttcctccacgccacctcgatctgtgcggcggcaaacccagagatccttgccccgtccgccggcgaaaggcgctcacctcccctcttcgctgtctgcgatgcagaggatactatcgagggccgctcgccggtgcacgaactcctcggcggcgttcaactcacctcacgcgcaggccaatgcagcaagtgttcactctgaagacgccccaacttgttcaaacatgattacagagaacgatgattttacatggaagactagttttgttagacccatgcaatcagaagtcgtcaatgccctccgtagaggtgaccggcagcgagcatcattgattctttcgaactttcatcacactaaggaatcactgaccaaggaagatttttcttatatattggagtattgtgcagaggcacctgatcctttgaactccatttggagcttttccaatacttctagtttgttatggaaactttggaactcatggaggagaaggccattggcatgagtaaaagtatctacagatatgtcattagagctctgagcagagggggatatgcgaaggaggcacttcactggctggctcttctaggggagaaagaaagcactcatgccactacaccgatttttaatatctttctaaatgcctgtggtagagcaaatctgaaggacgccgaaaactgtctagagatactggaaaatctttttcttgggaagtctgaaataacatactgtgagcttttgaagcttgcagtgttacagggaaatttgcctgcagcttatgatatctggaaggagtgctctaggtattatagcccaagcattgtcacgcaaaggagatttataagggctttaactgcgctaggtgaccttcaatctgcgtatcacatattgcagcatatggtagcccttgctgcacaaagctgtgactatctgagggtgtcttctaaaagaagataccgatcatcgagactagacattcctgtacctgctttgaatgaatttgaagatctcaacctgccatcatgccaagggaagctggctaccggcgaacatttggttgatgctcaacctgagctatttgatgagaaaactcggccaggcaacaatctttcttataaggttgtagtagatgcgagtgttgcaaatacattgaagtctgcaccaagcacagtaaaacaaattttgagatgggcgttcaatgatgttttgcatgcatgtgtaccgttcaacaactgccagttagctgagcatttatttacagagatgcagaaacttggattgcaaccaacaagttatacatatgacggttttattaaaaccgtgatagctgggaaaggaattgcatatgccaacaaagtgattaacgccatggagagaaggggcattgaaccttacagtgatacacttgctgctctctcagagggtcatagcaatagtttacagttggatttggctgaggagtttttggaaagaatttcagagataaaaccaaagcatataggttcctttaatgctttgctttctggatgtgcgattatgaatgaaccagaaagagctgtccgcatactagctaaaatgaaacatgtgaacatgaagccaactctcaggacatatgaacttttgttttctctgtttggaaatgtaaatgttccttatgaacaaggagatgtgctctctcatgtcgatgtttccaaaaggataagtatcattgagatggacatgtttaacaatggaatccaacacagctttgtgtccatgaagaacttgatacgagcttttggagctgaggggatgatagaggaaatgctgaggtacctgaatatagcagaaaatactctgtggaacataaatcctcatcagaagagtgatctctacagcactgcgttgcatgctctggttgatgtgaaggaaactcacagagcagtaaagatgttcaaaatcatgagatcatgcagtcttccaactaatatttcaatttataataccatgatagagtgctgcaaatggctgccatgcttcaaatcagctagtgctttgctgtctttgatgcttcgagatggtttcaatcctacggttgtgacttttacatcactcctgaaggttgtattagaaaatgataattttgaaggggctctggatctgcttgatatatgcaagattgaaggacttcagcctggcatacagactttcaacacagtactcttacgtgcatatgctagaggtcaaattcatgtccttgaatatattttggagtgtatacatcgatcaaaaatccaacctgatccatcaacactttggtacacgttttgtgcctacgaggagcatgaactgtacaatactgcaattgagtcattgctagtcctcagcatgagaatgatatctgaggatgccggcattcctagtgagaaaagaattgtttttgaagatctaatcctcagtgaagaacctgatgctgaattcaggatcataagggcattccaagcaggcgaagaattccttgcgacagctttactgaacctaagatggtgtgccacaatgggtgccaccgtatcttggtcaccggaggagagtctttgggcaatgaggctggcagcctcgtatgatgctaacaagagaccacatataaacccctcggatgctcccaaatcttggggaaggaatccacttaaccgcccgtattgggaggctaacgggtgattggttgattggttggctacgcttccgttgatcacgcttggcacgtgtttggatggctgcagagcatctctaccgcctgctcccatgcatgcagcgttgattttttcccccactgggtagcctgcatgcgcggaaactcaactccccgtctccccctcgtttccagcggcccaggctggcacgatgctggtgcgagacgcccctacaaccaatcatgcgttaactgaggcagagctggagtctagcgtttcaaatctctctgttgagtatgatgacaatgttgtgttctgttttgctggaagccagtagatgttttgtttacctaactaacatgattgcagtacgatcgggcggcctccctacctgtcgtgaagcttgttccgcatgattgctccaaattggcctcgtaccgttttcaggcttctaggccaacagctctatgttccgattctttacattacttgataggttgctcactttatttacccagttgtaatttctgattatactggctgtcgggagcattagctttgcaaaactgtaggaatatatatgacaacgacgaagatcgagtcgcatggcagtgacagaagaataagaggtgttacgattacaatagctggaaaccaaaacttgctctggttattttgaaggtgtttagattttggaatgacgatgttacaattacactttattctggcaaaggtagattgtagaaggatggatagtgatgcactgttaccgcgtggtactgggttggtctttgtttgttgtacatcagttgttttctggcaggtcgttttgttgacttcgtagctgcccgaataacagaccaattattccatctcagttagagatcatttgtctacggcactcgacattcccttggtttctctcctttctgtctggttttggacttttgtttcagc

SEQ ID NO: 69264 - DNA, 3791 bp, Zea Mays
gtgtgtgccagcccagctccacggcctgcgagaagagccagttgtgtgctggtggcgtctcgtcctttggatcacaacagacggccaggattcggcccgaggtccggtggcagcatcgctgaacccctcgtcgccggtgtcgctctcgtctgcttccattttgtaggctgcgcggtgtatactgcttccacttcacacgcttcctccacgccacctcgatctgtgcggcggcaaacccagagatccttgccccgtccgccggcgaaaggcgctcacctcccctcttcgctgtctgcgatgcagaggatactatcgagggccgctcgccggtgcacgaactcctcggcggcgttcaactcacctcacgcgcaggccaatgcagcaagtgttcactctgaagacgccccaacttgttcaaacatgattacagagaacgatgattttacatggaagactagttttgttagacccatgcaatcagaagtcgtcaatgccctccgtagaggtgaccggcagcgagcatcattgattctttcgaactttcatcacactaaggaatcactgaccaaggaagatttttcttatatattggagtattgtgcagaggcacctgatcctttgtttgttatggaaactttggaactcatggaggagaaggccattggcatgagtaaaagtatctacagatatgtcattagagctctgagcagagggggatatgcgaaggaggcacttcactggctggctcttctaggggagaaagaaagcactcatgccactacaccgatttttaatatctttctaaatgcctgtggtagagcaaatctgaaggacgccgaaaactgtctagagatactggaaaatctttttcttgggaagtctgaaataacatactgtgagcttttgaagcttgcagtgttacagggaaatttgcctgcagcttatgatatctggaaggagtgctctaggtattatagcccaagcattgtcacgcaaaggagatttataagggctttaactgcgctaggtgaccttcaatctgcgtatcacatattgcagcatatggtagcccttgctgcacaaagctgtgactatctgagggtgtcttctaaaagaagataccgatcatcgagactagacattcctgtacctgctttgaatgaatttgaagatctcaacctgccatcatgccaagggaagctggctaccggcgaacatttggttgatgctcaacctgagctatttgatgagaaaactcggccaggcaacaatctttcttataaggttgtagtagatgcgagtgttgcaaatacattgaagtctgcaccaagcacagtaaaacaaattttgagatgggcgttcaatgatgttttgcatgcatgtgtaccgttcaacaactgccagttagctgagcatttatttacagagatgcagaaacttggattgcaaccaacaagttatacatatgacggttttattaaaaccgtgatagctgggaaaggaattgcatatgccaacaaagtgattaacgccatggagagaaggggcattgaaccttacagtgatacacttgctgctctctcagagggtcatagcaatagtttacagttggatttggctgaggagtttttggaaagaatttcagagataaaaccaaagcatataggttcctttaatgctttgctttctggatgtgcgattatgaatgaaccagaaagagctgtccgcatactagctaaaatgaaacatgtgaacatgaagccaactctcaggacatatgaacttttgttttctctgtttggaaatgtaaatgttccttatgaacaaggagatgtgctctctcatgtcgatgtttccaaaaggataagtatcattgagatggacatgtttaacaatggaatccaacacagctttgtgtccatgaagaacttgatacgagcttttggagctgaggggatgatagaggaaatgctgaggtacctgaatatagcagaaaatactctgtggaacataaatcctcatcagaagagtgatctctacagcactgcgttgcatgctctggttgatgtgaaggaaactcacagagcagtaaagatgttcaaaatcatgagatcatgcagtcttccaactaatatttcaatttataataccatgatagagtgctgcaaatggctgccatgcttcaaatcagctagtgctttgctgtctttgatgcttcgagatggtttcaatcctacggttgtgacttttacatcactcctgaaggttgtattagaaaatgataattttgaaggggctctggatctgcttgatatatgcaagattgaaggacttcagcctggcatacagactttcaacacagtactcttacgtgcatatgctagaggtcaaattcatgtccttgaatatattttggagtgtatacatcgatcaaaaatccaacctgatccatcaacactttggtacacgttttgtgcctacgaggagcatgaactgtacaatactgcaattgagtcattgctagtcctcagcatgagaatgatatctgaggatgccggcattcctagtgagaaaagaattgtttttgaagatctaatcctcagtgaagaacctgatgctgaattcaggatcataagggcattccaagcaggcgaagaattccttgcgacagctttactgaacctaagatggtgtgccacaatgggtgccaccgtatcttggtcaccggaggagagtctttgggcaatgaggctggcagcctcgtatgatgctaacaagagaccacatataaacccctcggatgctcccaaatcttggggaaggaatccacttaaccgcccgtattgggaggctaacgggtgattggttgattggttggctacgcttccgttgatcacgcttggcacgtgtttggatggctgcagagcatctctaccgcctgctcccatgcatgcagcgttgattttttcccccactgggtagcctgcatgcgcggaaactcaactccccgtctccccctcgtttccagcggcccaggctggcacgatgctggtgcgagacgcccctacaaccaatcatgcgttaactgaggcagagctggagtctagcgtttcaaatctctctgttgagtatgatgacaatgttgtgttctgttttgctggaagccagtagatgttttgtttacctaactaacatgattgcagtacgatcgggcggcctccctacctgtcgtgaagcttgttccgcatgattgctccaaattggcctcgtaccgttttcaggcttctaggccaacagctctatgttccgattctttacattacttgataggttgctcactttatttacccagttgtaatttctgattatactggctgtcgggagcattagctttgcaaaactgtaggaatatatatgacaacgacgaagatcgagtcgcatggcagtgacagaagaataagaggtgttacgattacaatagctggaaaccaaaacttgctctggttattttgaaggtgtttagattttggaatgacgatgttacaattacactttattctggcaaaggtagattgtagaaggatggatagtgatgcactgttaccgcgtggtactgggttggtctttgtttgttgtacatcagttgttttctggcaggtcgttttgttgacttcgtagctgcccgaataacagaccaattattccatctcagttagagatcatttgtctacggcactcgacattcccttggtttctctcctttctgtctggttttggacttttgtttcagc

SEQ ID NO: 69265 - DNA, 1830 bp, Zea Mays
actgcttccacttcacacgcttcctccacgccacctcgatctgtgcggcggcaaacccagagatccttgccccgtccgccggcgaaaggcgctcacctcccctcttcgctgtctgcgatgcagaggatactatcgagggccgctcgccggtgcacgaactcctcggcggcgttcaactcacctcacgcgcaggccaatgcagcaagtgttcactctgaagacgccccaacttgttcaaacatgattacagagaacgatgattttacatggaagactagttttgttagacccatgcaatcagaagtcgtcaatgccctccgtagaggtgaccggcagcgagcatcattgattctttcgaactttcatcacactaaggaatcactgaccaaggaagatttttcttatatattggagtattgtgcagaggcacctgatcctttgtttgttatggaaactttggaactcatggaggagaaggccattggcatgagtaaaagtatctacagatatgtcattagagctctgagcagagggggatatgcgaaggaggcacttcactggctggctcttctaggggagaaagaaagcactcatgccactacaccgatttttaatatctttctaaatgcctgtggtagagcaaatctgaaggacgccgaaaactgtctagagatactggaaaatctttttcttgggaagtctgaaataacatactgtgagcttttgaagcttgcagtgttacagggaaatttgcctgcagcttatgatatctggaaggagtgctctaggtattatagcccaagcattgtcacgcaaaggagatttataagggctttaactgcgctaggtgaccttcaatctgcgtatcacatattgcagcatatggtagcccttgctgcacaaagctgtgactatctgagggtgtcttctaaaagaagataccgatcatcgagactagacattcctgtacctgctttgaatgaatttgaagatctcaacctgccatcatgccaagggaagctggctaccggcgaacatttggttgatgctcaacctgagctatttgatgagaaaactcggccagctttgttcaggcaacaatctttcttataaggttgtagtagatgcgagtgttgcaaatacattgaagtctgcaccaagcacagtaaaacaaattttgagatgggcgttcaatgatgttttgcatgcatgtgtaccgttcaacaactgccagttagctgagcatttatttacagagaaacttggattgcaaccaacaagttatacatatgacggttttattaaaaccgtgatagctgggaaaggaattgcatatgccaacaaagtgattaacgccatggagagaaggggcattgaaccttacagtgatacacttgctgctctctcagagggtcatagcaatagtttacagttggatttggctgaggagtttttggaaagaatttcagagataaaaccaaagcatataggttcctttaatgctttgctttctggatgtgcgattatgaatgaaccagaaagagctgtccgcatactagctaaaatgaaacatgtgaacatgaagccaactctcaggacatatgaacttttgttttctctgtttggaaatgtaaatgttccttatgaacaaggagatgtgctctctcatgtcgatgtttccaaaaggataagtatcattgagatggacatgtttaacaatggaatccaacacagctttgtgtccatgaagaacttggataatcaagacccctttttttgagtctgtgggctgtccaacatttattgtttatagcaagccatacaaagacc

SEQ ID NO: 69266 - DNA, 1873 bp, Zea Mays
ggctgcgcggtgtatactgcttccacttcacacgcttcctccacgccacctcgatctgtgcggcggcaaacccagagatccttgccccgtccgccggcgaaaggcgctcacctcccctcttcgctgtctgcgatgcagaggatactatcgagggccgctcgccggtgcacgaactcctcggcggcgttcaactcacctcacgcgcaggccaatgcagcaagtgttcactctgaagacgccccaacttgttcaaacatgattacagagaacgatgattttacatggaagactagttttgttagacccatgcaatcagaagtcgtcaatgccctccgtagaggtgaccggcagcgagcatcattgattctttcgaactttcatcacactaaggaatcactgaccaaggaagatttttcttatatattggagtattgtgcagaggcacctgatcctttgaactccatttggagcttttccaatacttctagtttgttatggaaactttggaactcatggaggagaaggccattggcatgagtaaaagtatctacagatatgtcattagagctctgagcagagggggatatgcgaaggaggcacttcactggctggctcttctaggggagaaagaaagcactcatgccactacaccgatttttaatatctttctaaatgcctgtggtagagcaaatctgaaggacgccgaaaactgtctagagatactggaaaatctttttcttgggaagtctgaaataacatactgtgagcttttgaagcttgcagtgttacagggaaatttgcctgcagcttatgatatctggaaggagtgctctaggtattatagcccaagcattgtcacgcaaaggagatttataagggctttaactgcgctaggtgaccttcaatctgcgtatcacatattgcagcatatggtagcccttgctgcacaaagctgtgactatctgagggtgtcttctaaaagaagataccgatcatcgagactagacattcctgtacctgctttgaatgaatttgaagatctcaacctgccatcatgccaagggaagctggctaccggcgaacatttggttgatgctcaacctgagctatttgatgagaaaactcggccaggcaacaatctttcttataaggttgtagtagatgcgagtgttgcaaatacattgaagtctgcaccaagcacagtaaaacaaattttgagatgggcgttcaatgatgttttgcatgcatgtgtaccgttcaacaactgccagttagctgagcatttatttacagagatgcagaaacttggattgcaaccaacaagttatacatatgacggttttattaaaaccgtgatagctgggaaaggaattgcatatgccaacaaagtgattaacgccatggagagaaggggcattgaaccttacagtgatacacttgctgctctctcagagggtcatagcaatagtttacagttggatttggctgaggagtttttggaaagaatttcagagataaaaccaaagcatataggttcctttaatgctttgctttctggatgtgcgattatgaatgaaccagaaagagctgtccgcatactagctaaaatgaaacatgtgaacatgaagccaactctcaggacatatgaacttttgttttctctgtttggaaatgtaaatgttccttatgaacaaggagatgtgctctctcatgtcgatgtttccaaaaggataagtatcattgagatggacatgtttaacaatggaatccaacacagctttgtgtccatgaagaacttggataatcaagacccctttttttgagtctgtgggctgtccaacatttattgtttatagcaagccatacaaagacc

SEQ ID NO: 69267 - DNA, 2094 bp, Zea Mays
actgcttccacttcacacgcttcctccacgccacctcgatctgtgcggcggcaaacccagagatccttgccccgtccgccggcgaaaggcgctcacctcccctcttcgctgtctgcgatgcagaggatactatcgagggccgctcgccggtgcacgaactcctcggcggcgttcaactcacctcacgcgcaggccaatgcagcaagtgttcactctgaagacgccccaacttgttcaaacatgattacagagaacgatgattttacatggaagactagttttgttagacccatgcaatcagaagtcgtcaatgccctccgtagagtttgttatggaaactttggaactcatggaggagaaggccattggcatgagtaaaagtatctacagatatgtcattagagctctgagcagagggggatatgcgaaggagcttgcagtgttacagggaaatttgcctgcagcttatgatatctggaaggagtgctctaggtattatagcccaagcattgtcacgcaaaggagatttataagggctttaactgcgctaggtgaccttcaatctgcgtatcacatattgcagcatatggtagcccttgctgcacaaagctgtgactatctgagggtgtcttctaaaagaagataccgatcatcgagactagacattcctgtacctgctttgaatgaatttgaagatctcaacctgccatcatgccaagggaagctggctaccggcgaacatttggttgatgctcaacctgagctatttgatgagaaaactcggccaggcaacaatctttcttataaggttgtagtagatgcgagtgttgcaaatacattgaagtctgcaccaagcacagtaaaacaaattttgagatgggcgttcaatgatgttttgcatgcatgtgtaccgttcaacaactgccagttagctgagcatttatttacagagatgcagaaacttggattgcaaccaacaagttatacatatgacggttttattaaaaccgtgatagctgggaaaggaattgcatatgccaacaaagtggacgactgtatggacgcccgggtcgaccaggacccgattagtcgacctaatcgtcgtcctaatcgtgattagtcgtctggtcgcccaggtggatcgactagcaagtcggccgacttgaaatcattggttagacgtgtgtgtcttaactgtaatgggcttaggccctgacagagtcacgccggagagacaaccacaaccaggttgccggcaagctccaactcccaggtaagtcggacaggtatgtccctcactggttttacacacacgagcacttgaacacaggtatttttgtgcggtcctaatgactgccttttctcagcctctaaggccgtatattaatagtggattacaaggaaacaaaatcaggtttcaatcagacctgatacagacgtccatatctggactgtcaatcacacctgttcatataggaccactacactaccataactgctatttcctaaaacagataagtaaactagcaccaatcaaggattactttcctaacaatctcctcctaagccttgtggtgcaaactacttacatccaccagcccgaccttagaacacatcttctgaaacttggtcttgcctagtggttgtcaggaaatcccccaactgttcctcactcctgatgaaatccaccttgaccagcccattatcagcacactcccggacaaaatgatacttcacctcaatatgcttgctctgaccatgtagcactggattcttgatgagagcaatggctgatttatagtccacgttaagcattggggctttccttgctgctccttgtacttcggccagaacccgtgcaagccataatgcctgaaaagctgcattggcagcagctatgtattctgcttcacaggttgactgagccactactctttgcttcatcaaagtccaggtgattgaactgttgttaaggaagaagactactccagtcgtgctccttctgccatcaatatccccagcataatcactatcaatgtacccgatcagtccagcctcctttcctttattcctaccaaaccacagaccccaatt

SEQ ID NO: 69268 - DNA, 1674 bp, Zea Mays
tattcctagctaagtcatgtcaaatgaggaatccaaaggaagttgagaaaactgagtacaatgaattctacaagaagacatttaatgagtttctggatccgcttgcttacactcacttcaccactgagggagaggtggaatttcggagtgttctctatgtcccagggatggcgcctcttagtaatgaggagataatgaatccaaagaccaaaaacatccgattgtatgtcaaaagagtgttcatatcagatgattttgatggcgagctgtttcccagatacttgagctttgtgaaaggtgtagttgactcaaatgatctccctctcaatgtttctcgtgagatccttcaagaaagtagaattgtcagaattatgcgtaagagacttgttaggaagacatttgacatgattcaagagattgccgagaaggatggcaaagaggactacaacaaattctgggagagctttggcaagttcatgaagcttggttgcatcgaggacacaggaaaccacaagcgtcttgcaccattgctgagattctactcttccaaaaacgagacagatttaataagtctggaccagtatgtagaaaacatgcctgaaaaccagaaggcgatctattatatcgctactgatagtctccagagcgcgaagactgctcctttcttggaaaagctggttcagaaagatattgaggttctttacctcattgagccaattgatgaggttgccattcagaatttacagacatacaaagagaagaagtttgtagatattagcaaagaggatttggaattgggtgatgaagatgaggacaaggagaaagaaagcaagcaggagtatactcttctatgcgactggataaagcagcagcttggcgataaagtcgccaaggtccagatctcgaagcgactcagctcttctccatgtgttcttgtttctggtaaatttggctggtcagccaacatggaaaggctcatgaaggcacagacccttggtgacacatcaagcctggagttcatgagaggtagacgaatttttgagatcaaccctgaccatcctatcatcaaggacctgaacgctgcttgcaaaaacgagcctgaaagtactgaagccaagagggcggcagagttgctatacgaggctgcgctgatctccagtgggtatactgtaagtgcagcaaacccacgcgcttgttgttggcctatctatgactgtgagtacgacgtgattgtccacctctgttatccagcctgacagtccagcggagctgggaggcaagatctacgagatgatgaccatggccctcggcgggagatgggggaggttggagacagaggaggctgaagtcatcgccagcatcgacgacgcggactcgtctgaaggtgccacgaccacgacagaggtagtcgagccctctgaggtcaggacagagagcgacccgtggaaggattagatagttctgtatgcaaggattatgccctggtgtggtgtatgagcactggatgtaacgaaagtacgaaccagagccaggatagaggaatgcagcgtttgataagaacactggtgttaaaagtgtagatctctggtttgggttgtgctgataaatttttgtaggctataaccatccaatgaaaaatgccctctgcgctttcgtgcattctttctagctccg

SEQ ID NO: 69269 - DNA, 2761 bp, Zea Mays
ctcccagtccctgtacctccgtataaaccctagtacctcttatccgttcgtcactccccaagcgtcacaccgaatcaccacagtcgagctcgagcaggaacaagccgtgagcgcctgcccccggtgctcaatatctattccacacctcatggcgccggcgctgagcaggaccctggggccgtcgtcggtggccgcgctgcgcccgagcccgtcgtgccggggtctgttacgggccgcgctcgcgccgcagggcaggggcgcctccgcgaggtgcgcggtaggggtgagatgggaggcagccaggcggaggaggatggccggggtgaggtgcgacgccgccgtcgctgagaagcctgccggcgaggaggagacggccggcgagaagtacgagtaccaggctgaggttacccgcttgatggacttaattgtacacagtttatacagccacaaggaagtatttttacgtgagcttgtaagtaacgcgagtgatgcactggataagctgagattcctcagcgtaactgatccttctgtgttggctgatggcggtgagttggagataaggattaaacccgacctagaggcggggacaatcactatcacagatactggcattggaatgactaaagatgagctcaaagactgtcttggaaccattgcacaaagtggcacctcaaagtttttgaaggctctaaaggagaacaaagaccttggtgcagataatggactcattggtcaattcggtgttgggttctattccgctttccttgttgcagagagggttgtggtgtctactaaaagtccaaaggcagataagcagtatgtgtgggaagcagaggctgacagcagctcgtatgttatcaaggaagaaaatgatcctgagaaaatgctttcacgtggaacagaaattactctttatttgagagatgatgacaaatatgagtttgctgaccctaccaggattcaaggcttagttaagaactactcgcagtttgtctcattccccatatatacatggcaggaaaaatcaagaacagttgaggttgaagaggaggaagaatcaaaaggtgaagaggctactgaagaatcaaaaagtgaagaggctactgagggtgaaaagcagaaaaagaagaaaaccataactgagaagtactgggactgggaattggctaatgaaacgaagcccatatggatgaggaatccaaaggaagttgagaaaactgagtacaatgaattctacaagaagacatttaatgagtttctggatccgcttgcttacactcacttcaccactgagggagaggtggaatttcggagtgttctctatgtcccagggatggcgcctcttagtaatgaggagataatgaatccaaagaccaaaaacatccgattgtatgtcaaaagagtgttcatatcagatgattttgatggcgagctgtttcccagatacttgagctttgtgaaaggtgtagttgactcaaatgatctccctctcaatgtttctcgtgagatccttcaagaaagtagaattgtcagaattatgcgtaagagacttgttaggaagacatttgacatgattcaagagattgccgagaaggatggcaaagaggactacaacaaattctgggagagctttggcaagttcatgaagcttggttgcatcgaggacacaggaaaccacaagcgtcttgcaccattgctgagattctactcttccaaaaacgagacagatttaataagtctggaccagtatgtagaaaacatgcctgaaaaccagaaggcgatctattatatcgctactgatagtctccagagcgcgaagactgctcctttcttggaaaagctggttcagaaagatattgaggttctttacctcattgagccaattgatgaggttgccattcagaatttacagacatacaaagagaagaagtttgtagatattagcaaagaggatttggaattgggtgatgaagatgaggacaaggagaaagaaagcaagcaggagtatactcttctatgcgactggataaagcagcagcttggcgataaagtcgccaaggtccagatctcgaagcgactcagctcttctccatgtgttcttgtttctggtaaatttggctggtcagccaacatggaaaggctcatgaaggcacagacccttggtgacacatcaagcctggagttcatgagaggtagacgaatttttgagatcaaccctgaccatcctatcatcaaggacctgaacgctgcttgcaaaaacgagcctgaaagtactgaagccaagagggcggcagagttgctatacgaggctgcgctgatctccagtgggtatactcctgacagtccagcggagctgggaggcaagatctacgagatgatgaccatggccctcggcgggagatgggggaggttggagacagaggaggctgaagtcatcgccagcatcgacgacgcggactcgtctgaaggtgccacgaccacgacagaggtagtcgagccctctgaggtcaggacagagagcgacccgtggaaggattagatagttctgtatgcaaggattatgccctggtgtggtgtatgagcactggatgtaacgaaagtacgaaccagagccaggatagaggaatgcagcgtttgataagaacactggtgttaaaagtgtagatctctggtttgggttgtgctgataaatttttgtaggctataaccatccaatgaaaaatgccctctgcgctttcgtgcattctttctagctccg

SEQ ID NO: 69270 - DNA, 2750 bp, Zea Mays
ccgcatcgcctccccacccccatgtctcccagtccctgtacctccgtataaaccctagtacctcttatccgttcgtcactccccaagcgtcacaccgaatcaccacagtcgagctcgagcaggaacaagccgtgagcgcctgcccccggtgctcaatatctattccacacctcatggcgccggcgctgagcaggaccctggggccgtcgtcggtggccgcgctgcgcccgagcccgtcgtgccggggtctgttacgggccgcgctcgcgccgcagggcaggggcgcctccgcgaggtgcgcggtaggggtgagatgggaggcagccaggcggaggaggatggccggggtgaggtgcgacgccgccgtcgctgagaagcctgccggcgaggaggagacggccggcgagaagtacgagtaccaggctgcaggttacccgcttgatggacttaattgtacacagtttatacagccacaaggaagtatttttacgtgagcttgtaagtaacgcgagtgatgcactggataagctgagattcctcagcgtaactgatccttctgtgttggctgatggcggtgagttggagataaggattaaacccgacctagaggcggggacaatcactatcacagatactggcattggaatgactaaagatgagctcaaagactgtcttggaaccattgcacaaagtggcacctcaaagtttttgaaggctctaaaggagaacaaagaccttggtgcagataatggactcattggtcaattcggtgttgggttctattccgctttccttgttgcagagagggttgtggtgtctactaaaagtccaaaggcagataagcagtatgtgtgggaagcagaggctgacagcagctcgtatgttatcaaggaagaaaatgatcctgagaaaatgctttcacgtggaacagaaattactctttatttgagagatgatgacaaatatgagtttgctgaccctaccaggattcaaggcttagttaagaactactcgcagtttgtctcattccccatatatacatggcaggaaaaatcaagaacagttgaggttgaagaggaggaagaatcaaaaggtgaagaggctactgaagaatcaaaaagtgaagaggctactgagggtgaaaagcagaaaaagaagaaaaccataactgagaagtactgggactgggaattggctaatgaaacgaagcccatatggatgaggaatccaaaggaagttgagaaaactgagtacaatgaattctacaagaagacatttaatgagtttctggatccgcttgcttacactcacttcaccactgagggatggcgcctcttagtaatgaggagataatgaatccaaagaccaaaaacatccgattgtatgtcaaaagagtgttcatatcagatgattttgatggcgagctgtttcccagatacttgagctttgtgaaaggtgtagttgactcaaatgatctccctctcaatgtttctcgtgagatccttcaagaaagtagaattgtcagaattatgcgtaagagacttgttaggaagacatttgacatgattcaagagattgccgagaaggatggcaaagaggactacaacaaattctgggagagctttggcaagttcatgaagcttggttgcatcgaggacacaggaaaccacaagcgtcttgcaccattgctgagattctactcttccaaaaacgagacagatttaataagtctggaccagtatgtagaaaacatgcctgaaaaccagaaggcgatctattatatcgctactgatagtctccagagcgcgaagactgctcctttcttggaaaagctggttcagaaagatattgaggttctttacctcattgagccaattgatgaggttgccattcagaatttacagacatacaaagagaagaagtttgtagatattagcaaagaggatttggaattgggtgatgaagatgaggacaaggagaaagaaagcaagcaggagtatactcttctatgcgactggataaagcagcagcttggcgataaagtcgccaaggtccagatctcgaagcgactcagctcttctccatgtgttcttgtttctggtaaatttggctggtcagccaacatggaaaggctcatgaaggcacagacccttggtgacacatcaagcctggagttcatgagaggtagacgaatttttgagatcaaccctgaccatcctatcatcaaggacctgaacgctgcttgcaaaaacgagcctgaaagtactgaagccaagagggcggcagagttgctatacgaggctgcgctgatctccagtgggtatactcctgacagtccagcggagctgggaggcaagatctacgagatgatgaccatggccctcggcgggagatgggggaggttggagacagaggaggctgaagtcatcgccagcatcgacgacgcggactcgtctgaaggtgccacgaccacgacagaggtagtcgagccctctgaggtcaggacagagagcgacccgtggaaggattagatagttctgtatgcaaggattatgccctggtgtggtgtatgagcactggatgtaacgaaagtacgaaccagagccaggatagaggaatgcagcgtttgataagaacactggtgttaaaagtgtagatctctggtttgggttgtgctgataaatttttgtaggctataaccatccaatgaaaaatgccctctgcgctttcgtgcattctttctagctccg

SEQ ID NO: 69271 - DNA, 1310 bp, Zea Mays
tcctccgaggaatcaagcttgaattcgttcggagagcagacagaactcattcctattgaccacggaaggagggcggaatgcctagaagacccctacttcgagtggatccactggccgcagtcgtctgttcccttctccgtcgaggagctcgaatacattgcaaaacttgaccctataaaggacgcagagatgctacgcgtggagctacctatgatacgggaggcgtgtctcagggtgctggtgctgtcgacagtgtttctcaaggaagctgcagcgttcggcctctgcctgtctgagataggagacatgatgagcaggcagttcacagcaaaggaagaggaaccaagccagctcgagcttctctgcatggagacgaggaagtgggtcgaggaaagagagttatttcttcccgacgaagccggagttgaagacggcgatgatgacttcacccagttccctctcgacagcgacgccttcgaaccgccagctttctgcaagtttggcagcgtgaagacaagttccaggaatccactatccaagctggacgagtgtgacgaggaagacggagacttgtcggaagaggagggcgagcacggtgacgtcctgaccagtggtgcattgccccagaaggttcctcccatctccaagctgtcgtcgtccatgaaggggcttggcttcatcgggaaatcgaaaccctaccgtacaggtggcgtccccaagggtaaggtgacaggtagaactaactacagtggcaaagccagcgagcatcagtccgggagccggagcgccaacgagctgctcccgcccagcgcgagtttcgtgaagctgtcggacatgagccgcaaggagtggagcgcgttcctcgagaagttccaggagctgctcccgagcgccctccgcacccggaagcacagcgccggcgtcggccagcgcccgatgccgaggctgggcacgtgtatggagccagtagaagaggttgtctgagaataagatcgtcgatggcacagatgagatgagcttggattgcaggagagtggtgtgtttgtgcatagtgttttgacatatgagatgcgttgttcttttctttttttttctttttcttttttgtatatagtgagtactcctgccgcctcgcaacaccgggctcgatctcggccgttacctgatggttggtggtgagtgtgcttggcatcgcctgtgttctgtctttgccgctgtaccattttggagacgcttaccataatatgaacagctgtgatatgatatcgctacagatatatgcataaataacacctgatagtctgcttcag

SEQ ID NO: 69272 - DNA, 1361 bp, Zea Mays
ctgaaaccgaatccgaaaccaggacggatgcccggctcgcgaacaacggcctgcccgtggagatgcagagactgcggtgtcgcgtcaactacaatgccctgagatttacccctgaaatcgaggatctgggcagacgcctggttcgagctcttcgccggaacgggccctttgtggtccttcacttgcggtatgagatggacatgcttgccttctccggatgcacgcacggttgcagcagcatggaggctcaagagctcacgaagatgaggtagagctacatcgtcctcgtgacgtccccctccccaagatttccccaggatatgcctacccatggtggaaggagaaagtgatcgactcggacgccaagaggaaagacgggctgtgtccgttaacgccggaggagaccgcgctggtgctgcaggcgctcggcattgaccgcggctaccagatctacattgccgcaggcgaaatatacggcgggcagagaagaatggctgcgctcacctcggcttatcccaacgtggttagaaaggagacgctgttgccttgggaagtcggcctgttccagaaccactcctcccagatggctgcgctggactacatggtgtccctggagagcgatgtcttcatacccacctacgacggcaacatggccaaggtcgtagaaggccatcgcaggtaggtactgtgtgagactgagactcagactgaggtgccacggcatagctctcgataaaaaaacggtgctgctgacgggaacacacgcacgtcctgttcttgcgagcgcaggtacctggggtttcggaagacggtgctgctggaccggaggcgtatcgtcgagctcgtcgacgagtacaggaacggcacgttgcgctggaccgacttctcgtctgccgtcatggcgtcgcacaccagccgcatgggcgaaccgtccaggaggcagacggttcctgacagacccaaggaagaggactacttctacgcgaacccgcacgagtgcctgcaccagccggaagatgtctccgccttgtgatacccgcgctcccgcggtacaatacagtacagtggatgatgcgcgggctttcggagtccagaaccacatgtatatgtaatagactaatagcgcattcgacagcgttgcgttggcagagggtaaacgtaaacggacgaggagggcctcgcgttcggtccggttgaacgagcatgtgagttaggattcggtacacagattcatggaacggtggttcgccgattcttttttctgttcagaataagcagaccctttcgttgttgttcttgtgtacagcagacgaagtcgtgaagataataacaacagcagcagaatcgtcgtgaaaaagtcg

SEQ ID NO: 69273 - DNA, 1601 bp, Zea Mays
tggtcaggaatttcttggttctgtccttcccctttgagaactttcggtgaatctacaggaacaacggctatctgatggtctcctgcaacggcgggcttaaccagatgcgagcagcaatttgtgacatggtaaccatcgcaaggtatctgaacgttactctcatcgtaccggagttggataaggcttcattttgggctgatcccagcgatttccaagacatatttgacgtggactacttcatagcgtcgctgagagacgaggtccggatcctgaagcagctgcctccgaggctcaagagaagagtggagatgggatccctccggtccctgccaccagtcagctggtccgacatcggctactaccgccgtcaggttcggtcgcgtcctccttaacatcgcgagctgaaaccgaatccgaaaccaggacggatgcccggctcgcgaacaacggcctgcccgtggagatgcagagactgcggtgtcgcgtcaactacaatgccctgagatttacccctgaaatcgaggatctgggcagacgcctggttcgagctcttcgccggaacgggccctttgtggtccttcacttgcggtatgagatggacatgcttgccttctccggatgcacgcacggttgcagcagcatggaggctcaagagctcacgaagatgagatatgcctacccatggtggaaggagaaagtgatcgactcggacgccaagaggaaagacgggctgtgtccgttaacgccggaggagaccgcgctggtgctgcaggcgctcggcattgaccgcggctaccagatctacattgccgcaggcgaaatatacggcgggcagagaagaatggctgcgctcacctcggcttatcccaacgtggttagaaaggagacgctgttgccttgggaagtcggcctgttccagaaccactcctcccagatggctgcgctggactacatggtgtccctggagagcgatgtcttcatacccacctacgacggcaacatggccaaggtcgtagaaggccatcgcaggtacctggggtttcggaagacggtgctgctggaccggaggcgtatcgtcgagctcgtcgacgagtacaggaacggcacgttgcgctggaccgacttctcgtctgccgtcatggcgtcgcacaccagccgcatgggcgaaccgtccaggaggcagacggttcctgacagacccaaggaagaggactacttctacgcgaacccgcacgagtgcctgcaccagccggaagatgtctccgccttgtgatacccgcgctcccgcggtacaatacagtacagtggatgatgcgcgggctttcggagtccagaaccacatgtatatgtaatagactaatagcgcattcgacagcgttgcgttggcagagggtaaacgtaaacggacgaggagggcctcgcgttcggtccggttgaacgagcatgtgagttaggattcggtacacagattcatggaacggtggttcgccgattcttttttctgttcagaataagcagaccctttcgttgttgttcttgtgtacagcagacgaagtcgtgaagataataacaacagcagcagaatcgtcgtgaaaaagtcg

SEQ ID NO: 69274 - DNA, 1647 bp, Zea Mays
cttcttggttcatgttttttttttgtttttggaatcaagcttctcttcttccattggtcaggaatttcttggttctgtccttcccctttgagaactttcggtgaatctacaggaacaacggctatctgatggtctcctgcaacggcgggcttaaccagatgcgagcagcaatttgtgacatggtaaccatcgcaaggtatctgaacgttactctcatcgtaccggagttggataaggcttcattttgggctgatcccagcgatttccaagacatatttgacgtggactacttcatagcgtcgctgagagacgaggtccggatcctgaagcagctgcctccgaggctcaagagaagagtggagatgggatccctccggtccctgccaccagtcagctggtccgacatcggctactaccgccgtcagattctgcctctggtaaagaagtacaaggtcgttcacctgaacaggacggatgcccggctcgcgaacaacggcctgcccgtggagatgcagagactgcggtgtcgcgtcaactacaatgccctgagatttacccctgaaatcgaggatctgggcagacgcctggttcgagctcttcgccggaacgggccctttgtggtccttcacttgcggtatgagatggacatgcttgccttctccggatgcacgcacggttgcagcagcatggaggctcaagagctcacgaagatgagatatgcctacccatggtggaaggagaaagtgatcgactcggacgccaagaggaaagacgggctgtgtccgttaacgccggaggagaccgcgctggtgctgcaggcgctcggcattgaccgcggctaccagatctacattgccgcaggcgaaatatacggcgggcagagaagaatggctgcgctcacctcggcttatcccaacgtggttagaaaggagacgctgttgccttgggaagtcggcctgttccagaaccactcctcccagatggctgcgctggactacatggtgtccctggagagcgatgtcttcatacccacctacgacggcaacatggccaaggtcgtagaaggccatcgcaggtacctggggtttcggaagacggtgctgctggaccggaggcgtatcgtcgagctcgtcgacgagtacaggaacggcacgttgcgctggaccgacttctcgtctgccgtcatggcgtcgcacaccagccgcatgggcgaaccgtccaggaggcagacggttcctgacagacccaaggaagaggactacttctacgcgaacccgcacgagtgcctgcaccagccggaagatgtctccgccttgtgatacccgcgctcccgcggtacaatacagtacagtggatgatgcgcgggctttcggagtccagaaccacatgtatatgtaatagactaatagcgcattcgacagcgttgcgttggcagagggtaaacgtaaacggacgaggagggcctcgcgttcggtccggttgaacgagcatgtgagttaggattcggtacacagattcatggaacggtggttcgccgattcttttttctgttcagaataagcagaccctttcgttgttgttcttgtgtacagcagacgaagtcgtgaagataataacaacagcagcagaatcgtcgtgaaaaagtcg

SEQ ID NO: 69275 - DNA, 2113 bp, Zea Mays
ctctcggctcttgcacacggacaggccccgtgcgcgtacaaataagccaagctgggcggccatccacacgggcgcgaacttgacacgcgccccctgccccgccgccgcagttctcacctctcacggccacgccggcacgtccgctcgcgcgcacactgttttttttttcttggtaagggccggcggccgggccgataatcgtaaaggaaggcgaggcaatacacccaccgagagagaagaactaagctttggacacggaagatcgcaagagcctcaaccacactattcaggtggcctaggactctacgagggacgttcgtcgtgcctcggatgagatgggtggcggcggcggaggaggaggaggcgggaagtccgagaaggcgcggcgttcgtcggcgcgggtgaggttgtgggtcgcgcgcgccagcaccgtgctgctctggacgtgcctcgtccagctcgcggcctaccgggagctctgggcgcccagcgtgctctccaggtggcctggctgcctcaaccagccgcacgtcgtgcagaggccatcggagcgtgtggcggacgccggccagacgcaggcagcgcgcgctttggtggtgctcccacccaaaagaatctacaggaacaacggctatctgatggtctcctgcaacggcgggcttaaccagatgcgagcagcaatttgtgacatggtaaccatcgcaaggtatctgaacgttactctcatcgtaccggagttggataaggcttcattttgggctgatcccagcgatttccaagacatatttgacgtggactacttcatagcgtcgctgagagacgaggtccggatcctgaagcagctgcctccgaggctcaagagaagagtggagatgggatccctccggtccctgccaccagtcagctggtccgacatcggctactaccgccgtcaggacggatgcccggctcgcgaacaacggcctgcccgtggagatgcagagactgcggtgtcgcgtcaactacaatgccctgagatttacccctgaaatcgaggatctgggcagacgcctggttcgagctcttcgccggaacgggccctttgtggtccttcacttgcggtatgagatggacatgcttgccttctccggatgcacgcacggttgcagcagcatggaggctcaagagctcacgaagatgagatatgcctacccatggtggaaggagaaagtgatcgactcggacgccaagaggaaagacgggctgtgtccgttaacgccggaggagaccgcgctggtgctgcaggcgctcggcattgaccgcggctaccagatctacattgccgcaggcgaaatatacggcgggcagagaagaatggctgcgctcacctcggcttatcccaacgtggttagaaaggagacgctgttgccttgggaagtcggcctgttccagaaccactcctcccagatggctgcgctggactacatggtgtccctggagagcgatgtcttcatacccacctacgacggcaacatggccaaggtcgtagaaggccatcgcaggtacctggggtttcggaagacggtgctgctggaccggaggcgtatcgtcgagctcgtcgacgagtacaggaacggcacgttgcgctggaccgacttctcgtctgccgtcatggcgtcgcacaccagccgcatgggcgaaccgtccaggaggcagacggttcctgacagacccaaggaagaggactacttctacgcgaacccgcacgagtgcctgcaccagccggaagatgtctccgccttgtgatacccgcgctcccgcggtacaatacagtacagtggatgatgcgcgggctttcggagtccagaaccacatgtatatgtaatagactaatagcgcattcgacagcgttgcgttggcagagggtaaacgtaaacggacgaggagggcctcgcgttcggtccggttgaacgagcatgtgagttaggattcggtacacagattcatggaacggtggttcgccgattcttttttctgttcagaataagcagaccctttcgttgttgttcttgtgtacagcagacgaagtcgtgaagataataacaacagcagcagaatcgtcgtgaaaaagtcg

SEQ ID NO: 69276 - DNA, 2172 bp, Zea Mays
ctcaggcctccctctcggctcttgcacacggacaggccccgtgcgcgtacaaataagccaagctgggcggccatccacacgggcgcgaacttgacacgcgccccctgccccgccgccgcagttctcacctctcacggccacgccggcacgtccgctcgcgcgcacactgttttttttttcttggtaagggccggcggccgggccgataatcgtaaaggaaggcgaggcaatacacccaccgagagagaagaactaagctttggacacggaagatcgcaagagcctcaaccacactattcaggtggcctaggactctacgagggacgttcgtcgtgcctcggatgagatgggtggcggcggcggaggaggaggaggcgggaagtccgagaaggcgcggcgttcgtcggcgcgggtgaggttgtgggtcgcgcgcgccagcaccgtgctgctctggacgtgcctcgtccagctcgcggcctaccgggagctctgggcgcccagcgtgctctccaggtggcctggctgcctcaaccagccgcacgtcgtgcagaggccatcggagcgtgtggcggacgccggccagacgcaggcagcgcgcgctttggtggtgctcccacccaaaagaatctacaggaacaacggctatctgatggtctcctgcaacggcgggcttaaccagatgcgagcagcaacagatttgtgacatggtaaccatcgcaaggtatctgaacgttactctcatcgtaccggagttggataaggcttcattttgggctgatcccagcgatttccaagacatatttgacgtggactacttcatagcgtcgctgagagacgaggtccggatcctgaagcagctgcctccgaggctcaagagaagagtggagatgggatccctccggtccctgccaccagtcagctggtccgacatcggctactaccgccgtcagattctgcctctggtaaagaagtacaaggtcgttcacctgaacaggacggatgcccggctcgcgaacaacggcctgcccgtggagatgcagagactgcggtgtcgcgtcaactacaatgccctgagatttacccctgaaatcgaggatctgggcagacgcctggttcgagctcttcgccggaacgggccctttgtggtccttcacttgcggtatgagatggacatgcttgccttctccggatgcacgcacggttgcagcagcatggaggctcaagagctcacgaagatgagatatgcctacccatggtggaaggagaaagtgatcgactcggacgccaagaggaaagacgggctgtgtccgttaacgccggaggagaccgcgctggtgctgcaggcgctcggcattgaccgcggctaccagatctacattgccgcaggcgaaatatacggcgggcagagaagaatggctgcgctcacctcggcttatcccaacgtggttagaaaggagacgctgttgccttgggaagtcggcctgttccagaaccactcctcccagatggctgcgctggactacatggtgtccctggagagcgatgtcttcatacccacctacgacggcaacatggccaaggtcgtagaaggccatcgcaggtacctggggtttcggaagacggtgctgctggaccggaggcgtatcgtcgagctcgtcgacgagtacaggaacggcacgttgcgctggaccgacttctcgtctgccgtcatggcgtcgcacaccagccgcatgggcgaaccgtccaggaggcagacggttcctgacagacccaaggaagaggactacttctacgcgaacccgcacgagtgcctgcaccagccggaagatgtctccgccttgtgatacccgcgctcccgcggtacaatacagtacagtggatgatgcgcgggctttcggagtccagaaccacatgtatatgtaatagactaatagcgcattcgacagcgttgcgttggcagagggtaaacgtaaacggacgaggagggcctcgcgttcggtccggttgaacgagcatgtgagttaggattcggtacacagattcatggaacggtggttcgccgattcttttttctgttcagaataagcagaccctttcgttgttgttcttgtgtacagcagacgaagtcgtgaagataataacaacagcagcagaatcgtcgtgaaaaagtcg

SEQ ID NO: 69277 - DNA, 4326 bp, Zea Mays
gcaaaagagcaaactgccaagtgcaaagcgaaaccatcaaaccggtgccgatgctctgccggcgcccgtgccccggcgtgttcctccgcctcttcgccacttcctgccgccgcagctccctccacccctcgcagccgcacctccggacagctacagctctcccgacgctgcctgtggcgaagaaggtccccttcaatgtgtcggcgcacgggaggtcgtggagtgacccgtaccactggatgcgcgacacctccgacccggacctcgcggtcctcctcgccgctgagaacgcgtacgccgacgcgttcgtaggatcggcaggtggcggcggcctccgcgcgcacctcgccgcggagatgcgcgcccggctgcccgcttctactgccacaccgcctcagctctggggaccttggttgtattatcagtatgttccagagggaaaggagtaccctgttttatctaggaagctgaggccctctagtggtctggtaggaactctgcttgattacctttctggttctgagaaggagcaagtgttgcttgattggaacgaggttgcagaaaaaaatggttatgtccacattgggagttgtcgaatctctccagatcataggtttcttgcatatacagttgatacatctgggggtgaactattttcccttgaagtgaaagatctgctgtctgagcatgtcatctttagttcaccagacaagggagtagttagtttagcatggtctggcaacaatgaaagtttattttacactgtctgtgatgagactctacgtcctaaccaggttttctgtaaaaagttgcaatcggatgaagcagggtttctagttttcacggagaaagatgtaaactgttgtgtggatattacaagcacaaaagattttaagtatatgactgtcaattctaacactaggacatcatctgaggtttttgtaattgaatctgataatctaagagaaggattatggcctatacggaaacgtgttgacaaagttcagtactttttggagcaccacaacgggttcttttacattcttaccaatgctcctgtaaatgataccgaaacgacaactgaaggctactatctggccaggtgtagggctgaaaagtcactggtggatagatggcagattgtgacggtacctgactcggactgcaccattcaggatatggacatttttcatgataatttagttctctttcttcgaaagaatggtactcctcttttttgctccatcagtatgccaattgatgttgatgttcaggagccaaaggaacttgatgatctcaacccatggttttttcccataccgtcagagttatgcagcattgttgctggatccaacaatgatttcatgtcatctacttatcagctagttatttcatcacctgtgataccggacttaactgtggactatgatttgagaaaaaagactttcaccatccttcatcaagaggaagtaactaccatctctgcaaatctaggcggcctgggctttcaatccaatgtttcaagcatccaacaaaacatgcagcttgttaaaacctcacaaaattggagtgatctttccaagctattctcatgtgaaagggttgaagttatatcacatgatggtgtttcaatacctttagtgatcctgtattcatggggagcacattgtcatggagaatcacctgggatcttatacggttatggagcttatggagaggatttggacaaaagctggtgttctgagaggttaagcctcctctctcgaggttgggttcttgcatttgcagatgttaggggtggaggggatttatcatggcatatggcaggaaccaaagctaataaaatgcattcaattcaagattttgctgcatgcggcaggcatctcataaagcaaggctttgttcaccaaaatcgcctttgtgctataggctgtagtgctggtggtctgttggtgggtgccgtcattaatatgcttccagacttattttctgctgcagttctcaaggtcccctttcttgatatctgcaacacaatgttggatcctactttacctctcactgtcttggactatgaagaatttggtgaccctaatagcccagatgagtttgaggcgatcagcagttattctccttatgataacttagcacctgatgtgtgctatcctccagtcctggtgactgcctcgtttaatgatacaagggtaggagtttgggaagctgctaagtgggttgcaaaagtaagagatgtcgcgtgcccatcctgttcccagtcagttattctcaaaactaatatgcaaagtggccattttggtgagggtgggcgtttcacgcactgtgatgaaacagcctttgagtatgcatttctcatgaaggccttgggtttggatgacgtagctatgatgtagcgtactcatgcctgaggattttcacggaacagatttttttgtggctctggaagcaaaaactgagataattaccttttgtgatatgctcagggataagattgtatcctcataattattgattaaaagagctcgcaatggaaggtgatgcacccttgaggtgtgttctgtttggcattggcttttaatagtcaagctgtggatttctacatgcatattatcaacttatgctttcaaaaatagcacacttggatgctgctcatcaacagtgcaaaggtggcagatgagatccttattatggtgttcgatatggggcttttgaccaaaggataaatggttgatcatggatgttgattttgacttctacttcatacggcaggaatctacaggaacaacggctatctgatggtctcctgcaacggcgggcttaaccagatgcgagcagcaatttgtgacatggtaaccatcgcaaggtatctgaacgttactctcatcgtaccggagttggataaggcttcattttgggctgatcccagcgatttccaagacatatttgacgtggactacttcatagcgtcgctgagagacgaggtccggatcctgaagcagctgcctccgaggctcaagagaagagtggagatgggatccctccggtccctgccaccagtcagctggtccgacatcggctactaccgccgtcagattctgcctctggtaaagaagtacaaggtcgttcacctgaacaggacggatgcccggctcgcgaacaacggcctgcccgtggagatgcagagactgcggtgtcgcgtcaactacaatgccctgagatttacccctgaaatcgaggatctgggcagacgcctggttcgagctcttcgccggaacgggccctttgtggtccttcacttgcggtatgagatggacatgcttgccttctccggatgcacgcacggttgcagcagcatggaggctcaagagctcacgaagatgagatatgcctacccatggtggaaggagaaagtgatcgactcggacgccaagaggaaagacgggctgtgtccgttaacgccggaggagaccgcgctggtgctgcaggcgctcggcattgaccgcggctaccagatctacattgccgcaggcgaaatatacggcgggcagagaagaatggctgcgctcacctcggcttatcccaacgtggttagaaaggagacgctgttgccttgggaagtcggcctgttccagaaccactcctcccagatggctgcgctggactacatggtgtccctggagagcgatgtcttcatacccacctacgacggcaacatggccaaggtcgtagaaggccatcgcaggtacctggggtttcggaagacggtgctgctggaccggaggcgtatcgtcgagctcgtcgacgagtacaggaacggcacgttgcgctggaccgacttctcgtctgccgtcatggcgtcgcacaccagccgcatgggcgaaccgtccaggaggcagacggttcctgacagacccaaggaagaggactacttctacgcgaacccgcacgagtgcctgcaccagccggaagatgtctccgccttgtgatacccgcgctcccgcggtacaatacagtacagtggatgatgcgcgggctttcggagtccagaaccacatgtatatgtaatagactaatagcgcattcgacagcgttgcgttggcagagggtaaacgtaaacggacgaggagggcctcgcgttcggtccggttgaacgagcatgtgagttaggattcggtacacagattcatggaacggtggttcgccgattcttttttctgttcagaataagcagaccctttcgttgttgttcttgtgtacagcagacgaagtcgtgaagataataacaacagcagcagaatcgtcgtgaaaaagtcg

SEQ ID NO: 69278 - DNA, 4445 bp, Zea Mays
gcaaaagagcaaactgccaagtgcaaagcgaaaccatcaaaccggtgccgatgctctgccggcgcccgtgccccggcgtgttcctccgcctcttcgccacttcctgccgccgcagctccctccacccctcgcagccgcacctccggacagctacagctctcccgacgctgcctgtggcgaagaaggtccccttcaatgtgtcggcgcacgggaggtcgtggagtgacccgtaccactggatgcgcgacacctccgacccggacctcgcggtcctcctcgccgctgagaacgcgtacgccgacgcgttcgtaggatcggcaggtggcggcggcctccgcgcgcacctcgccgcggagatgcgcgcccggctgcccgcttctactgccacaccgcctcagctctggggaccttggttgtattatcagtatgttccagagggaaaggagtaccctgttttatctaggaagctgaggccctctagtggtctggtaggaactctgcttgattacctttctggttctgagaaggagcaagtgttgcttgattggaacgaggttgcagaaaaaaatggttatgtccacattgggagttgtcgaatctctccagatcataggtttcttgcatatacagttgatacatctgggggtgaactattttcccttgaagtgaaagatctgctgtctgagcatgtcatctttagttcaccagacaagggagtagttagtttagcatggtctggcaacaatgaaagtttattttacactgtctgtgatgagactctacgtcctaaccaggttttctgtaaaaagttgcaatcggatgaagcagggtttctagttttcacggagaaagatgtaaactgttgtgtggatattacaagcacaaaagattttaagtatatgactgtcaattctaacactaggacatcatctgaggtttttgtaattgaatctgataatctaagagaaggattatggcctatacggaaacgtgttgacaaagttcagtactttttggagcaccacaacgggttcttttacattcttaccaatgctcctgtaaatgataccgaaacgacaactgaaggctactatctggccaggtgtagggctgaaaagtcactggtggatagatggcagattgtgacggtacctgactcggactgcaccattcaggatatggacatttttcatgataatttagttctctttcttcgaaagaatggtactcctcttttttgctccatcagtatgccaattgatgttgatgttcaggagccaaaggaacttgatgatctcaacccatggttttttcccataccgtcagagttatgcagcattgttgctggatccaacaatgatttcatgtcatctacttatcagctagttatttcatcacctgtgataccggacttaactgtggactatgatttgagaaaaaagactttcaccatccttcatcaagaggaagtaactaccatctctgcaaatctaggcggcctgggctttcaatccaatgtttcaagcatccaacaaaacatgcagcttgttaaaacctcacaaaattggagtgatctttccaagctattctcatgtgaaagggttgaagttatatcacatgatggtgtttcaatacctttagtgatcctgtattcatggggagcacattgtcatggagaatcacctgggatcttatacggttatggagcttatggagaggatttggacaaaagctggtgttctgagaggttaagcctcctctctcgaggttgggttcttgcatttgcagatgttaggggtggaggggatttatcatggcatatggcaggaaccaaagctaataaaatgcattcaattcaagattttgctgcatgcggcaggcatctcataaagcaaggctttgttcaccaaaatcgcctttgtgctataggctgtagtgctggtggtctgttggtgggtgccgtcattaatatgcttccagacttattttctgctgcagttctcaaggtcccctttcttgatatctgcaacacaatgttggatcctactttacctctcactgtcttggactatgaagaatttggtgaccctaatagcccagatgagtttgaggcgatcagcagttattctccttatgataacttagcacctgatgtgtgctatcctccagtcctggtgactgcctcgtttaatgatacaagggtaggagtttgggaagctgctaagtgggttgcaaaagtaagagatgtcgcgtgcccatcctgttcccagtcagttattctcaaaactaatatgcaaagtggccattttggtgagggtgggcgtttcacgcactgtgatgaaacagcctttgagtatgcatttctcatgaaggccttgggtttggatgacgtagctatgatgtagcgtactcatgcctgaggattttcacggaacagatttttttgtggctctggaagcaaaaactgagataattaccttttgtgatatgctcagggataagattgtatcctcataattattgattaaaagagctcgcaatggaaggtgatgcacccttgaggtgtgttctgtttggcattggcttttaatagtcaagctgtggatttctacatgcatattatcaacttatgctttcaaaaatagcacacttggatgctgctcatcaacagtgcaaaggtggcagatgagatccttattatggtgttcgatatggggcttttgaccaaaggataaatggttgatcatggatgttgattttgacttctacttcatacggcaggaatctacaggaacaacggctatctgatggtctcctgcaacggcgggcttaaccagatgcgagcagcaatttgtgacatggtaaccatcgcaaggtatctgaacgttactctcatcgtaccggagttggataaggcttcattttgggctgatcccagcgatttccaagacatatttgacgtggactacttcatagcgtcgctgagagacgaggtccggatcctgaagcagctgcctccgaggctcaagagaagagtggagatgggatccctccggtccctgccaccagtcagctggtccgacatcggctactaccgccgtcaggttcggtcgcgtcctccttaacatcgcgagctgaaaccgaatccgaaaccaggacggatgcccggctcgcgaacaacggcctgcccgtggagatgcagagactgcggtgtcgcgtcaactacaatgccctgagatttacccctgaaatcgaggatctgggcagacgcctggttcgagctcttcgccggaacgggccctttgtggtccttcacttgcggtatgagatggacatgcttgccttctccggatgcacgcacggttgcagcagcatggaggctcaagagctcacgaagatgagatatgcctacccatggtggaaggagaaagtgatcgactcggacgccaagaggaaagacgggctgtgtccgttaacgccggaggagaccgcgctggtgctgcaggcgctcggcattgaccgcggctaccagatctacattgccgcaggcgaaatatacggcgggcagagaagaatggctgcgctcacctcggcttatcccaacgtggttagaaaggagacgctgttgccttgggaagtcggcctgttccagaaccactcctcccagatggctgcgctggactacatggtgtccctggagagcgatgtcttcatacccacctacgacggcaacatggccaaggtcgtagaaggccatcgcaggtaggtactgtgtgagactgagactcagactgaggtgccacggcatagctctcgataaaaaaacggtgctgctgacgggaacacacgcacgtcctgttcttgcgagcgcaggtacctggggtttcggaagacggtgctgctggaccggaggcgtatcgtcgagctcgtcgacgagtacaggaacggcacgttgcgctggaccgacttctcgtctgccgtcatggcgtcgcacaccagccgcatgggcgaaccgtccaggaggcagacggttcctgacagacccaaggaagaggactacttctacgcgaacccgcacgagtgcctgcaccagccggaagatgtctccgccttgtgatacccgcgctcccgcggtacaatacagtacagtggatgatgcgcgggctttcggagtccagaaccacatgtatatgtaatagactaatagcgcattcgacagcgttgcgttggcagagggtaaacgtaaacggacgaggagggcctcgcgttcggtccggttgaacgagcatgtgagttaggattcggtacacagattcatggaacggtggttcgccgattcttttttctgttcagaataagcagaccctttcgttgttgttcttgtgtacagcagacgaagtcgtgaagataataacaacagcagcagaatcgtcgtgaaaaagtcg

SEQ ID NO: 69279 - DNA, 3961 bp, Zea Mays
gcaaaagagcaaactgccaagtgcaaagcgaaaccatcaaaccggtgccgatgctctgccggcgcccgtgccccggcgtgttcctccgcctcttcgccacttcctgccgccgcagctccctccacccctcgcagccgcacctccggacagctacagctctcccgacgctgcctgtggcgaagaaggtccccttcaatgtgtcggcgcacgggaggtcgtggagtgacccgtaccactggatgcgcgacacctccgacccggacctcgcggtcctcctcgccgctgagaacgcgtacgccgacgcgttcgtaggatcggcaggtggcggcggcctccgcgcgcacctcgccgcggagatgcgcgcccggctgcccgcttctactgccacaccgcctcagctctggggaccttggttgtattatcagtatgttccagagggaaaggagtaccctgttttatctaggaagctgaggccctctagtggtctggtaggaactctgcttgattacctttctggttctgagaaggagcaagtgttgcttgattggaacgaggttgcagaaaaaaatggtttttgtaattgaatctgataatctaagagaaggattatggcctatacggaaacgtgttgacaaagttcagtactttttggagcaccacaacgggttcttttacattcttaccaatgctcctgtaaatgataccgaaacgacaactgaaggctactatctggccaggtgtagggctgaaaagtcactggtggatagatggcagattgtgacggtacctgactcggactgcaccattcaggatatggacatttttcatgataatttagttctctttcttcgaaagaatggtactcctcttttttgctccatcagtatgccaattgatgttgatgttcaggagccaaaggaacttgatgatctcaacccatggttttttcccataccgtcagagttatgcagcattgttgctggatccaacaatgatttcatgtcatctacttatcagctagttatttcatcacctgtgataccggacttaactgtggactatgatttgagaaaaaagactttcaccatccttcatcaagaggaagtaactaccatctctgcaaatctaggcggcctgggctttcaatccaatgtttcaagcatccaacaaaacatgcagcttgttaaaacctcacaaaattggagtgatctttccaagctattctcatgtgaaagggttgaagttatatcacatgatggtgtttcaatacctttagtgatcctgtattcatggggagcacattgtcatggagaatcacctgggatcttatacggttatggagcttatggagaggatttggacaaaagctggtgttctgagaggttaagcctcctctctcgaggttgggttcttgcatttgcagatgttaggggtggaggggatttatcatggcatatggcaggaaccaaagctaataaaatgcattcaattcaagattttgctgcatgcggcaggcatctcataaagcaaggctttgttcaccaaaatcgcctttgtgctataggctgtagtgctggtggtctgttggtgggtgccgtcattaatatgcttccagacttattttctgctgcagttctcaaggtcccctttcttgatatctgcaacacaatgttggatcctactttacctctcactgtcttggactatgaagaatttggtgaccctaatagcccagatgagtttgaggcgatcagcagttattctccttatgataacttagcacctgatgtgtgctatcctccagtcctggtgactgcctcgtttaatgatacaagggtaggagtttgggaagctgctaagtgggttgcaaaagtaagagatgtcgcgtgcccatcctgttcccagtcagttattctcaaaactaatatgcaaagtggccattttggtgagggtgggcgtttcacgcactgtgatgaaacagcctttgagtatgcatttctcatgaaggccttgggtttggatgacgtagctatgatgtagcgtactcatgcctgaggattttcacggaacagatttttttgtggctctggaagcaaaaactgagataattaccttttgtgatatgctcagggataagattgtatcctcataattattgattaaaagagctcgcaatggaaggtgatgcacccttgaggtgtgttctgtttggcattggcttttaatagtcaagctgtggatttctacatgcatattatcaacttatgctttcaaaaatagcacacttggatgctgctcatcaacagtgcaaaggtggcagatgagatccttattatggtgttcgatatggggcttttgaccaaaggataaatggttgatcatggatgttgattttgacttctacttcatacggcaggaatctacaggaacaacggctatctgatggtctcctgcaacggcgggcttaaccagatgcgagcagcaatttgtgacatggtaaccatcgcaaggtatctgaacgttactctcatcgtaccggagttggataaggcttcattttgggctgatcccagcgatttccaagacatatttgacgtggactacttcatagcgtcgctgagagacgaggtccggatcctgaagcagctgcctccgaggctcaagagaagagtggagatgggatccctccggtccctgccaccagtcagctggtccgacatcggctactaccgccgtcagattctgcctctggtaaagaagtacaaggtcgttcacctgaacaggacggatgcccggctcgcgaacaacggcctgcccgtggagatgcagagactgcggtgtcgcgtcaactacaatgccctgagatttacccctgaaatcgaggatctgggcagacgcctggttcgagctcttcgccggaacgggccctttgtggtccttcacttgcggtatgagatggacatgcttgccttctccggatgcacgcacggttgcagcagcatggaggctcaagagctcacgaagatgagatatgcctacccatggtggaaggagaaagtgatcgactcggacgccaagaggaaagacgggctgtgtccgttaacgccggaggagaccgcgctggtgctgcaggcgctcggcattgaccgcggctaccagatctacattgccgcaggcgaaatatacggcgggcagagaagaatggctgcgctcacctcggcttatcccaacgtggttagaaaggagacgctgttgccttgggaagtcggcctgttccagaaccactcctcccagatggctgcgctggactacatggtgtccctggagagcgatgtcttcatacccacctacgacggcaacatggccaaggtcgtagaaggccatcgcaggtacctggggtttcggaagacggtgctgctggaccggaggcgtatcgtcgagctcgtcgacgagtacaggaacggcacgttgcgctggaccgacttctcgtctgccgtcatggcgtcgcacaccagccgcatgggcgaaccgtccaggaggcagacggttcctgacagacccaaggaagaggactacttctacgcgaacccgcacgagtgcctgcaccagccggaagatgtctccgccttgtgatacccgcgctcccgcggtacaatacagtacagtggatgatgcgcgggctttcggagtccagaaccacatgtatatgtaatagactaatagcgcattcgacagcgttgcgttggcagagggtaaacgtaaacggacgaggagggcctcgcgttcggtccggttgaacgagcatgtgagttaggattcggtacacagattcatggaacggtggttcgccgattcttttttctgttcagaataagcagaccctttcgttgttgttcttgtgtacagcagacgaagtcgtgaagataataacaacagcagcagaatcgtcgtgaaaaagtcg

SEQ ID NO: 69280 - DNA, 3896 bp, Zea Mays
gcaaaagagcaaactgccaagtgcaaagcgaaaccatcaaaccggtgccgatgctctgccggcgcccgtgccccggcgtgttcctccgcctcttcgccacttcctgccgccgcagctccctccacccctcgcagccgcacctccggacagctacagctctcccgacgctgcctgtggcgaagaaggtccccttcaatgtgtcggcgcacgggaggtcgtggagtgacccgtaccactggatgcgcgacacctccgacccggacctcgcggtcctcctcgccgctgagaacgcgtacgccgacgcgttcgtaggatcggcaggtggcggcggcctccgcgcgcacctcgccgcggagatgcgcgcccggctgcccgcttctactgccacaccgcctcagctctggggaccttggttgtattatcagtatgttccagagggaaaggagtaccctgttttatctaggaagctgaggccctctagtggtctggtaggaactctgcttgattacctttctggttctgagaaggagcaagtgttgcttgattggaacgaggttgcagaaaaaaatggtttttgtaattgaatctgataatctaagagaaggattatggcctatacggaaacgtgttgacaaagttcagtactttttggagcaccacaacgggttcttttacattcttaccaatgctcctgtaaatgataccgaaacgacaactgaaggctactatctggccaggtgtagggctgaaaagtcactggtggatagatggcagattgtgacggtacctgactcggactgcaccattcaggatatggacatttttcatgataatttagttctctttcttcgaaagaatggtactcctcttttttgctccatcagtatgccaattgatgttgatgttcaggagccaaaggaacttgatgatctcaacccatggttttttcccataccgtcagagttatgcagcattgttgctggatccaacaatgatttcatgtcatctacttatcagctagttatttcatcacctgtgataccggacttaactgtggactatgatttgagaaaaaagactttcaccatccttcatcaagaggaagtaactaccatctctgcaaatctaggcggcctgggctttcaatccaatgtttcaagcatccaacaaaacatgcagcttgttaaaacctcacaaaattggagtgatctttccaagctattctcatgtgaaagggttgaagttatatcacatgatggtgtttcaatacctttagtgatcctgtattcatggggagcacattgtcatggagaatcacctgggatcttatacggttatggagcttatggagaggatttggacaaaagctggtgttctgagaggttaagcctcctctctcgaggttgggttcttgcatttgcagatgttagattttgctgcatgcggcaggcatctcataaagcaaggctttgttcaccaaaatcgcctttgtgctataggctgtagtgctggtggtctgttggtgggtgccgtcattaatatgcttccagacttattttctgctgcagttctcaaggtcccctttcttgatatctgcaacacaatgttggatcctactttacctctcactgtcttggactatgaagaatttggtgaccctaatagcccagatgagtttgaggcgatcagcagttattctccttatgataacttagcacctgatgtgtgctatcctccagtcctggtgactgcctcgtttaatgatacaagggtaggagtttgggaagctgctaagtgggttgcaaaagtaagagatgtcgcgtgcccatcctgttcccagtcagttattctcaaaactaatatgcaaagtggccattttggtgagggtgggcgtttcacgcactgtgatgaaacagcctttgagtatgcatttctcatgaaggccttgggtttggatgacgtagctatgatgtagcgtactcatgcctgaggattttcacggaacagatttttttgtggctctggaagcaaaaactgagataattaccttttgtgatatgctcagggataagattgtatcctcataattattgattaaaagagctcgcaatggaaggtgatgcacccttgaggtgtgttctgtttggcattggcttttaatagtcaagctgtggatttctacatgcatattatcaacttatgctttcaaaaatagcacacttggatgctgctcatcaacagtgcaaaggtggcagatgagatccttattatggtgttcgatatggggcttttgaccaaaggataaatggttgatcatggatgttgattttgacttctacttcatacggcaggaatctacaggaacaacggctatctgatggtctcctgcaacggcgggcttaaccagatgcgagcagcaatttgtgacatggtaaccatcgcaaggtatctgaacgttactctcatcgtaccggagttggataaggcttcattttgggctgatcccagcgatttccaagacatatttgacgtggactacttcatagcgtcgctgagagacgaggtccggatcctgaagcagctgcctccgaggctcaagagaagagtggagatgggatccctccggtccctgccaccagtcagctggtccgacatcggctactaccgccgtcagattctgcctctggtaaagaagtacaaggtcgttcacctgaacaggacggatgcccggctcgcgaacaacggcctgcccgtggagatgcagagactgcggtgtcgcgtcaactacaatgccctgagatttacccctgaaatcgaggatctgggcagacgcctggttcgagctcttcgccggaacgggccctttgtggtccttcacttgcggtatgagatggacatgcttgccttctccggatgcacgcacggttgcagcagcatggaggctcaagagctcacgaagatgagatatgcctacccatggtggaaggagaaagtgatcgactcggacgccaagaggaaagacgggctgtgtccgttaacgccggaggagaccgcgctggtgctgcaggcgctcggcattgaccgcggctaccagatctacattgccgcaggcgaaatatacggcgggcagagaagaatggctgcgctcacctcggcttatcccaacgtggttagaaaggagacgctgttgccttgggaagtcggcctgttccagaaccactcctcccagatggctgcgctggactacatggtgtccctggagagcgatgtcttcatacccacctacgacggcaacatggccaaggtcgtagaaggccatcgcaggtacctggggtttcggaagacggtgctgctggaccggaggcgtatcgtcgagctcgtcgacgagtacaggaacggcacgttgcgctggaccgacttctcgtctgccgtcatggcgtcgcacaccagccgcatgggcgaaccgtccaggaggcagacggttcctgacagacccaaggaagaggactacttctacgcgaacccgcacgagtgcctgcaccagccggaagatgtctccgccttgtgatacccgcgctcccgcggtacaatacagtacagtggatgatgcgcgggctttcggagtccagaaccacatgtatatgtaatagactaatagcgcattcgacagcgttgcgttggcagagggtaaacgtaaacggacgaggagggcctcgcgttcggtccggttgaacgagcatgtgagttaggattcggtacacagattcatggaacggtggttcgccgattcttttttctgttcagaataagcagaccctttcgttgttgttcttgtgtacagcagacgaagtcgtgaagataataacaacagcagcagaatcgtcgtgaaaaagtcg

SEQ ID NO: 69281 - DNA, 4068 bp, Zea Mays
gcaaaagagcaaactgccaagtgcaaagcgaaaccatcaaaccggtgccgatgctctgccggcgcccgtgccccggcgtgttcctccgcctcttcgccacttcctgccgccgcagctccctccacccctcgcagccgcacctccggacagctacagctctcccgacgctgcctgtggcgaagaaggtccccttcaatgtgtcggcgcacgggaggtcgtggagtgacccgtaccactggatgcgcgacacctccgacccggacctcgcggtcctcctcgccgctgagaacgcgtacgccgacgcgttcgtaggatcggcaggtggcggcggcctccgcgcgcacctcgccgcggagatgcgcgcccggctgcccgcttctactgccacaccgcctcagctctggggaccttggttgtattatcagtatgttccagagggaaaggagtaccctgttttatctaggaagctgaggccctctagtggtctggtaggaactctgcttgattacctttctggttctgagaaggagcaagtgttgcttgattggaacgaggttgcagaaaaaaatggtttttgtaattgaatctgataatctaagagaaggattatggcctatacggaaacgtgttgacaaagttcagtactttttggagcaccacaacgggttcttttacattcttaccaatgctcctgtaaatgataccgaaacgacaactgaaggctactatctggccaggtgtagggctgaaaagtcactggtggatagatggcagattgtgacggtacctgactcggactgcaccattcaggatatggacatttttcatgataatttagttctctttcttcgaaagaatggtactcctcttttttgctccatcagtatgccaattgatgttgatgttcaggagccaaaggaacttgatgatctcaacccatggttttttcccataccgtcagagttatgcagcattgttgctggatccaacaatgatttcatgtcatctacttatcagctagttatttcatcacctgtgataccggacttaactgtggactatgatttgagaaaaaagactttcaccatccttcatcaagaggaagtaactaccatctctgcaaatctaggcggcctgggctttcaatccaatgtttcaagcatccaacaaaacatgcagcttgttaaaacctcacaaaattggagtgatctttccaagctattctcatgtgaaagggttgaagttatatcacatgatggtgtttcaatacctttagtgatcctgtattcatggggagcacattgtcatggagaatcacctgggatcttatacggttatggagcttatggagaggatttggacaaaagctggtgttctgagaggttaagcctcctctctcgaggttgggttcttgcatttgcagatgttaggggtggaggggatttatcatggcatatggcaggaaccaaagctaataaaatgcattcaattcaagattttgctgcatgcggcaggcatctcataaagcaaggctttgttcaccaaaatcgcctttgtgctataggctgtagtgctggtggtctgttggtgggtgccgtcattaatatgcttccagacttattttctgctgcagttctcaaggtcccctttcttgatatctgcaacacaatgttggatcctactttacctctcactgtcttggactatgaagaatttggtgaccctaatagcccagatgagtttgaggcgatcagcagttattctccttatgataacttagcacctgatgtgtgctatcctccagtcctggtgactgcctcgtttaatgatacaagggtaggagtttgggaagctgctaagtgggttgcaaaagtaagagatgtcgcgtgcccatcctgttcccagtcagttattctcaaaactaatatgcaaagtggccattttggtgagggtgggcgtttcacgcactgtgatgaaacagcctttgagtatgcatttctcatgaaggccttgggtttggatgacgtagctatgatgtagcgtactcatgcctgaggattttcacggaacagatttttttgtggctctggaagcaaaaactgagataattaccttttgtgatatgctcagggataagattgtatcctcataattattgattaaaagagctcgcaatggaaggtgatgcacccttgaggtgtgttctgtttggcattggcttttaatagtcaagctgtggatttctacatgcatattatcaacttatgctttcaaaaatagcacacttggatgctgctcatcaacagtgcaaaggtggcagatgagatccttattatggtgttcgatatggggcttttgaccaaaggataaatggttgatcatggatgttgattttgacttctacttcatacggcaggaatctacaggaacaacggctatctgatggtctcctgcaacggcgggcttaaccagatgcgagcagcaatttgtgacatggtaaccatcgcaaggtatctgaacgttactctcatcgtaccggagttggataaggcttcattttgggctgatcccagcgatttccaagacatatttgacgtggactacttcatagcgtcgctgagagacgaggtccggatcctgaagcagctgcctccgaggctcaagagaagagtggagatgggatccctccggtccctgccaccagtcagctggtccgacatcggctactaccgccgtcaggttcggtcgcgtcctccttaacatcgcgagctgaaaccgaatccgaaaccaggtgaagactgtttgtttcattgggtggtgtggtggtggggaaaaaaaacagattctgcctctggtaaagaagtacaaggtcgttcacctgaacaggacggatgcccggctcgcgaacaacggcctgcccgtggagatgcagagactgcggtgtcgcgtcaactacaatgccctgagatttacccctgaaatcgaggatctgggcagacgcctggttcgagctcttcgccggaacgggccctttgtggtccttcacttgcggtatgagatggacatgcttgccttctccggatgcacgcacggttgcagcagcatggaggctcaagagctcacgaagatgagatatgcctacccatggtggaaggagaaagtgatcgactcggacgccaagaggaaagacgggctgtgtccgttaacgccggaggagaccgcgctggtgctgcaggcgctcggcattgaccgcggctaccagatctacattgccgcaggcgaaatatacggcgggcagagaagaatggctgcgctcacctcggcttatcccaacgtggttagaaaggagacgctgttgccttgggaagtcggcctgttccagaaccactcctcccagatggctgcgctggactacatggtgtccctggagagcgatgtcttcatacccacctacgacggcaacatggccaaggtcgtagaaggccatcgcaggtaggtacctggggtttcggaagacggtgctgctggaccggaggcgtatcgtcgagctcgtcgacgagtacaggaacggcacgttgcgctggaccgacttctcgtctgccgtcatggcgtcgcacaccagccgcatgggcgaaccgtccaggaggcagacggttcctgacagacccaaggaagaggactacttctacgcgaacccgcacgagtgcctgcaccagccggaagatgtctccgccttgtgatacccgcgctcccgcggtacaatacagtacagtggatgatgcgcgggctttcggagtccagaaccacatgtatatgtaatagactaatagcgcattcgacagcgttgcgttggcagagggtaaacgtaaacggacgaggagggcctcgcgttcggtccggttgaacgagcatgtgagttaggattcggtacacagattcatggaacggtggttcgccgattcttttttctgttcagaataagcagaccctttcgttgttgttcttgtgtacagcagacgaagtcgtgaagataataacaacagcagcagaatcgtcgtgaaaaagtcg

SEQ ID NO: 69282 - DNA, 2867 bp, Zea Mays
gcaaaagagcaaactgccaagtgcaaagcgaaaccatcaaaccggtgccgatgctctgccggcgcccgtgccccggcgtgttcctccgcctcttcgccacttcctgccgccgcagctccctccacccctcgcagccgcacctccggacagctacagctctcccgacgctgcctgtggcgaagaaggtccccttcaatgtgtcggcgcacgggaggtcgtggagtgacccgtaccactggatgcgcgacacctccgacccggacctcgcggtcctcctcgccgctgagaacgcgtacgccgacgcgttcgtaggatcggcaggtggcggcggcctccgcgcgcacctcgccgcggagatgcgcgcccggctgcccgcttctactgccacaccgcctcagctctggggaccttggttgtattatcagtatgttccagagggaaaggagtaccctgttttatctaggaagctgaggccctctagtggtctggtaggaactctgcttgattacctttctggttctgagaaggagcaagtgttgcttgattggaacgaggttgcagaaaaaaatggttatgtccacattgggagttgtcgaatctctccagatcataggtttcttgcatatacagttgatacatctgggggtgaactattttcccttgaagtgaaagatctgctgtctgagcatgtcatctttagttcaccagacaagggagtagttagtttagcatggtctggcaacaatgaaagtttattttacactgtctgtgatgagactctacgtcctaaccaggttttctgtaaaaagttgcaatcggatgaagcagggtttctagttttcacggagaaagatgtaaactgttgtgtggatattacaagcacaaaagattttaagtatatgactgtcaattctaacactaggacatcatctgaggtttttgtaattgaatctgataatctaagagaaggattatggcctatacggaaacgtgttgacaaagttcagtactttttggagcaccacaacgggttcttttacattcttaccaatgctcctgtaaatgataccgaaacgacaactgaaggctactatctggccaggtgtagggctgaaaagtcactggtggatagatggcagattgtgacggtacctgactcggactgcaccattcaggatatggacatttttcatgataatttagttctctttcttcgaaagaatggtactcctcttttttgctccatcagtatgccaattgatgttgatgttcaggagccaaaggaacttgatgatctcaacccatggttttttcccataccgtcagagttatgcagcattgttgctggatccaacaatgatttcatgtcatctacttatcagctagttatttcatcacctgtgataccggacttaactgtggactatgatttgagaaaaaagactttcaccatccttcatcaagaggaagtaactaccatctctgcaaatctaggcggcctgggctttcaatccaatgtttcaagcatccaacaaaacatgcagcttgttaaaacctcacaaaattggagtgatctttccaagctattctcatgtgaaagggttgaagttatatcacatgatggtgtttcaatacctttagtgatcctgtattcatggggagcacattgtcatggagaatcacctgggatcttatacggttatggagcttatggagaggatttggacaaaagctggtgttctgagaggttaagcctcctctctcgaggttgggttcttgcatttgcagatgttaggggtggaggggatttatcatggcatatggcaggaaccaaagctaataaaatgcattcaattcaagattttgctgcatgcggcaggcatctcataaagcaaggctttgttcaccaaaatcgcctttgtgctataggctgtagtgctggtggtctgttggtgggtgccgtcattaatatgcttccagacttattttctgctgcagttctcaaggtcccctttcttgatatctgcaacacaatgttggatcctactttacctctcactgtcttggactatgaagaatttggtgaccctaatagcccagatgagtttgaggcgatcagcagttattctccttatgataacttagcacctgatgtgtgctatcctccagtcctggtgactgcctcgtttaatgatacaagggtaggagtttgggaagctgctaagtgggttgcaaaagtaagagatgtcgcgtgcccatcctgttcccagtcagttattctcaaaactaatatgcaaagtggccattttggtgagggtgggcgtttcacgcactgtgatgaaacagcctttgagtatgcatttctcatgaaggccttgggtttggatgacgtagctatgatgtagcgtactcatgcctgaggattttcacggaacagatttttttgtggctctggaagcaaaaactgagataattaccttttgtgatatgctcagggataagattgtatcctcataattattgattaaaagagctcgcaatggaaggtgatgcacccttgaggtgtgttctgtttggcattggcttttaatagtcaagctgtggatttctacatgcatattatcaacttatgctttcaaaaatagcacacttggatgctgctcatcaacagtgcaaaggtggcagatgagatccttattatggtgttcgatatggggcttttgaccaaaggataaatggttgatcatggatgttgattttgacttctacttcatacggcagaaacggcactctaggtggtagagctcgcttgaagggtggctaccaacggggagagtgggggagcaagagcgcgcgtgtcaggttca

SEQ ID NO: 69283 - DNA, 3233 bp, Zea Mays
gcaaaagagcaaactgccaagtgcaaagcgaaaccatcaaaccggtgccgatgctctgccggcgcccgtgccccggcgtgttcctccgcctcttcgccacttcctgccgccgcagctccctccacccctcgcagccgcacctccggacagctacagctctcccgacgctgcctgtggcgaagaaggtccccttcaatgtgtcggcgcacgggaggtcgtggagtgacccgtaccactggatgcgcgacacctccgacccggacctcgcggtcctcctcgccgctgagaacgcgtacgccgacgcgttcgtaggatcggcaggtggcggcggcctccgcgcgcacctcgccgcggagatgcgcgcccggctgcccgcttctactgccacaccgcctcagctctggggaccttggttgtattatcagtatgttccagagggaaaggagtaccctgttttatctaggaagctgaggccctctagtggtctggtaggaactctgcttgattacctttctggttctgagaaggagcaagtgttgcttgattggaacgaggttgcagaaaaaaatggttatgtccacattgggagttgtcgaatctctccagatcataggtttcttgcatatacagttgatacatctgggggtgaactattttcccttgaagtgaaagatctgctgtctgagcatgtcatctttagttcaccagacaagggagtagttagtttagcatggtctggcaacaatgaaagtttattttacactgtctgtgatgagactctacgtcctaaccaggttttctgtaaaaagttgcaatcggatgaagcagggtttctagttttcacggagaaagatgtaaactgttgtgtggatattacaagcacaaaagattttaagtatatgactgtcaattctaacactaggacatcatctgaggtttttgtaattgaatctgataatctaagagaaggattatggcctatacggaaacgtgttgacaaagttcagtactttttggagcaccacaacgggttcttttacattcttaccaatgctcctgtaaatgataccgaaacgacaactgaaggctactatctggccaggtgtagggctgaaaagtcactggtggatagatggcagattgtgacggtacctgactcggactgcaccattcaggatatggacatttttcatgataatttagttctctttcttcgaaagaatggtactcctcttttttgctccatcagtatgccaattgatgttgatgttcaggagccaaaggaacttgatgatctcaacccatggttttttcccataccgtcagagttatgcagcattgttgctggatccaacaatgatttcatgtcatctacttatcagctagttatttcatcacctgtgataccggacttaactgtggactatgatttgagaaaaaagactttcaccatccttcatcaagaggaagtaactaccatctctgcaaatctaggcggcctgggctttcaatccaatgtttcaagcatccaacaaaacatgcagcttgttaaaacctcacaaaattggagtgatctttccaagctattctcatgtgaaagggttgaagttatatcacatgatggtgtttcaatacctttagtgatcctgtattcatggggagcacattgtcatggagaatcacctgggatcttatacggttatggagcttatggagaggatttggacaaaagctggtgttctgagaggttaagcctcctctctcgaggttgggttcttgcatttgcagatgttaggggtggaggggatttatcatggcatatggcaggaaccaaagctaataaaatgcattcaattcaagattttgctgcatgcggcaggcatctcataaagcaaggctttgttcaccaaaatcgcctttgtgctataggctgtagtgctggtggtctgttggtgggtgccgtcattaatatgcttccagacttattttctgctgcagttctcaaggtcccctttcttgatatctgcaacacaatgttggatcctactttacctctcactgtcttggactatgaagaatttggtgaccctaatagcccagatgagtttgaggcgatcagcagttattctccttatgataacttagcacctgatgtgtgctatcctccagtcctggtgactgcctcgtttaatgatacaagggtaggagtttgggaagctgctaagtgggttgcaaaagtaagagatgtcgcgtgcccatcctgttcccagtcagttattctcaaaactaatatgcaaagtggccattttggtgagggtgggcgtttcacgcactgtgatgaaacagcctttgagtatgcatttctcatgaaggccttgggtttggatgacgtagctatgatgtagcgtactcatgcctgaggattttcacggaacagatttttttgtggctctggaagcaaaaactgagataattaccttttgtgatatgctcagggataagattgtatcctcataattattgattaaaagagctcgcaatggaaggtgatgcacccttgaggtgtgttctgtttggcattggcttttaatagtcaagctgtggatttctacatgcatattatcaacttatgctttcaaaaatagcacacttggatgctgctcatcaacagtgcaaaggtggcagatgagatccttattatggtgttcgatatggggcttttgaccaaaggataaatggttgatcatggatgttgattttgacttctacttcatacggcagaaggcgttactttatttgtccgactgctgtgttgagcactgctacacagccagtgcttttgtgttagtacgtctgaggcagaggcagagcaccgcttgcttgctggaaaacgcaggacgccggctgcgttggtttctatgatgacgcgattattgcgtcacctttggaatgcgtggtgattgttctattgctatggtttatttgctcccacctgttgctatagtacgtggattgtctttcaagctccttggtgtcagtgttgatgcattggtgatacagatatagggagtagtgatagtcgtagagtggaagtaaaccaccttagggcctgttcgattctgcaggaacgcaccaagaattgttcctgttgataaaaacttatacaaattagaaaagcaatctggccagtaacagttccggtagtccattccatatcaaccgaacgagccctt

SEQ ID NO: 69284 - DNA, 2868 bp, Zea Mays
gcaaaagagcaaactgccaagtgcaaagcgaaaccatcaaaccggtgccgatgctctgccggcgcccgtgccccggcgtgttcctccgcctcttcgccacttcctgccgccgcagctccctccacccctcgcagccgcacctccggacagctacagctctcccgacgctgcctgtggcgaagaaggtccccttcaatgtgtcggcgcacgggaggtcgtggagtgacccgtaccactggatgcgcgacacctccgacccggacctcgcggtcctcctcgccgctgagaacgcgtacgccgacgcgttcgtaggatcggcaggtggcggcggcctccgcgcgcacctcgccgcggagatgcgcgcccggctgcccgcttctactgccacaccgcctcagctctggggaccttggttgtattatcagtatgttccagagggaaaggagtaccctgttttatctaggaagctgaggccctctagtggtctggtaggaactctgcttgattacctttctggttctgagaaggagcaagtgttgcttgattggaacgaggttgcagaaaaaaatggtttttgtaattgaatctgataatctaagagaaggattatggcctatacggaaacgtgttgacaaagttcagtactttttggagcaccacaacgggttcttttacattcttaccaatgctcctgtaaatgataccgaaacgacaactgaaggctactatctggccaggtgtagggctgaaaagtcactggtggatagatggcagattgtgacggtacctgactcggactgcaccattcaggatatggacatttttcatgataatttagttctctttcttcgaaagaatggtactcctcttttttgctccatcagtatgccaattgatgttgatgttcaggagccaaaggaacttgatgatctcaacccatggttttttcccataccgtcagagttatgcagcattgttgctggatccaacaatgatttcatgtcatctacttatcagctagttatttcatcacctgtgataccggacttaactgtggactatgatttgagaaaaaagactttcaccatccttcatcaagaggaagtaactaccatctctgcaaatctaggcggcctgggctttcaatccaatgtttcaagcatccaacaaaacatgcagcttgttaaaacctcacaaaattggagtgatctttccaagctattctcatgtgaaagggttgaagttatatcacatgatggtgtttcaatacctttagtgatcctgtattcatggggagcacattgtcatggagaatcacctgggatcttatacggttatggagcttatggagaggatttggacaaaagctggtgttctgagaggttaagcctcctctctcgaggttgggttcttgcatttgcagatgttaggggtggaggggatttatcatggcatatggcaggaaccaaagctaataaaatgcattcaattcaagattttgctgcatgcggcaggcatctcataaagcaaggctttgttcaccaaaatcgcctttgtgctataggctgtagtgctggtggtctgttggtgggtgccgtcattaatatgcttccagacttattttctgctgcagttctcaaggtcccctttcttgatatctgcaacacaatgttggatcctactttacctctcactgtcttggactatgaagaatttggtgaccctaatagcccagatgagtttgaggcgatcagcagttattctccttatgataacttagcacctgatgtgtgctatcctccagtcctggtgactgcctcgtttaatgatacaagggtaggagtttgggaagctgctaagtgggttgcaaaagtaagagatgtcgcgtgcccatcctgttcccagtcagttattctcaaaactaatatgcaaagtggccattttggtgagggtgggcgtttcacgcactgtgatgaaacagcctttgagtatgcatttctcatgaaggccttgggtttggatgacgtagctatgatgtagcgtactcatgcctgaggattttcacggaacagatttttttgtggctctggaagcaaaaactgagataattaccttttgtgatatgctcagggataagattgtatcctcataattattgattaaaagagctcgcaatggaaggtgatgcacccttgaggtgtgttctgtttggcattggcttttaatagtcaagctgtggatttctacatgcatattatcaacttatgctttcaaaaatagcacacttggatgctgctcatcaacagtgcaaaggtggcagatgagatccttattatggtgttcgatatggggcttttgaccaaaggataaatggttgatcatggatgttgattttgacttctacttcatacggcagaaggcgttactttatttgtccgactgctgtgttgagcactgctacacagccagtgcttttgtgttagtacgtctgaggcagaggcagagcaccgcttgcttgctggaaaacgcaggacgccggctgcgttggtttctatgatgacgcgattattgcgtcacctttggaatgcgtggtgattgttctattgctatggtttatttgctcccacctgttgctatagtacgtggattgtctttcaagctccttggtgtcagtgttgatgcattggtgatacagatatagggagtagtgatagtcgtagagtggaagtaaaccaccttagggcctgttcgattctgcaggaacgcaccaagaattgttcctgttgataaaaacttatacaaattagaaaagcaatctggccagtaacagttccggtagtccattccatatcaaccgaacgagccctt

SEQ ID NO: 69285 - DNA, 2962 bp, Zea Mays
gcaaaagagcaaactgccaagtgcaaagcgaaaccatcaaaccggtgccgatgctctgccggcgcccgtgccccggcgtgttcctccgcctcttcgccacttcctgccgccgcagctccctccacccctcgcagccgcacctccggacagctacagctctcccgacgctgcctgtggcgaagaaggtccccttcaatgtgtcggcgcacgggaggtcgtggagtgacccgtaccactggatgcgcgacacctccgacccggacctcgcggtcctcctcgccgctgagaacgcgtacgccgacgcgttcgtaggatcggcaggtggcggcggcctccgcgcgcacctcgccgcggagatgcgcgcccggctgcccgcttctactgccacaccgcctcagctctggggaccttggttgtattatcagtatgttccagagggaaaggagtaccctgttttatctaggaagctgaggccctctagtggtctggtaggaactctgcttgattacctttctggttctgagaaggagcaagtgttgcttgattggaacgaggttgcagaaaaaaatggtttttgtaattgaatctgataatctaagagaaggattatggcctatacggaaacgtgttgacaaagttcagtactttttggagcaccacaacgggttcttttacattcttaccaatgctcctgtaaatgataccgaaacgacaactgaaggctactatctggccaggtgtagggctgaaaagtcactggtggatagatggcaggatatggacatttttcatgataatttagttctctttcttcgaaagaatggtactcctcttttttgctccatcagtatgccaattgatgttgatgttcaggagccaaaggaacttgatgatctcaacccatggttttttcccataccgtcagagttatgcagcattgttgctggatccaacaatgatttcatgtcatctacttatcagctagttatttcatcacctgtgataccggacttaactgtggactatgatttgagaaaaaagactttcaccatccttcatcaagaggaagtaactaccatctctgcaaatctaggcggcctgggctttcaatccaatgtttcaagcatccaacaaaacatgcagcttgttaaaacctcacaaaattggagtgatctttccaagctattctcatgtgaaagggttgaagttatatcacatgatggtgtttcaatacctttagtgatcctgtattcatggggagcacattgtcatggagaatcacctgggatcttatacggttatggagcttatggagaggatttggacaaaagctggtgttctgagaggttaagcctcctctctcgaggttgggttcttgcatttgcagatgttaggctgtagtgctggtggtctgttggtgggtgccgtcattaatatgcttccagacttattttctgctgcagttctcaaggtcccctttcttgatatctgcaacacaatgttggatcctactttacctctcactgtcttggactatgaagaatttggtgaccctaatagcccagatgagtttgaggcgatcagcagttattctccttatgataacttagcacctgatgtgtgctatcctccagtcctggtgactgcctcgtttaatgatacaagggtaggagtttgggaagctgctaagtgggttgcaaaagtaagagatgtcgcgtgcccatcctgttcccagtcagttattctcaaaactaatatgcaaagtggccattttggtgagggtgggcgtttcacgcactgtgatgaaacagcctttgagtatgcatttctcatgaaggccttgggtttggatgacgtagctatgatgtagcgtactcatgcctgaggattttcacggaacagatttttttgtggctctggaagcaaaaactgagataattaccttttgtgatatgctcagggataagattgtatcctcataattattgattaaaagagctcgcaatggaaggtgatgcacccttgaggtgtgttctgtttggcattggcttttaatagtcaagctgtggatttctacatgcatattatcaacttatgctttcaaaaatagcacacttggatgctgctcatcaacagtgcaaaggtggcagatgagatccttattatggtgttcgatatggggcttttgaccaaaggataaatggttgatcatggatgttgattttgacttctacttcatacggcaggttggtgcatgttgctttcttctctttgggtcatctggcagatgatgtactctttttacgccatccttaaattaagctcaggttccatgtcacatccttgtgctcatttttttagcgtaatcgtaatcgtcctcggccggtcggccccttgctatgcccacacatactcctatgttcagtgcaacactacaaattaaatgatggcttgctagaacttattgagcacatttctccgagcttatcctaggcaccctttccttccttttttttcgaggatcctagtcaccgtctgtatgtatacttgtgcccactttgcttagtgcagcaatgcaaagtaaatgatgactgtttgaaacgtaccgagcacatttctctctgggctatcctattttaaagatcgcgctttccatagtgattcaattatttaggcttgtagtgcacggtgctcgtgccaataagtaccagttggtgcatatggatctgcgatatataaacaactaccgtaccaagaaatattctatggctaacaaatcccaaggataagtcgcggagttcaaaactgtcctcggttttgtcaatatacgcagtacccgcgtaggctgactgttattacgcatgacctttgcacttgcacatctggtgatatgcatgatatgtaccagccacttgtaccgagtgcttgaaggtgaatctacaataaaatatatggatctgat

SEQ ID NO: 69286 - DNA, 3381 bp, Zea Mays
gcaaaagagcaaactgccaagtgcaaagcgaaaccatcaaaccggtgccgatgctctgccggcgcccgtgccccggcgtgttcctccgcctcttcgccacttcctgccgccgcagctccctccacccctcgcagccgcacctccggacagctacagctctcccgacgctgcctgtggcgaagaaggtccccttcaatgtgtcggcgcacgggaggtcgtggagtgacccgtaccactggatgcgcgacacctccgacccggacctcgcggtcctcctcgccgctgagaacgcgtacgccgacgcgttcgtaggatcggcaggtggcggcggcctccgcgcgcacctcgccgcggagatgcgcgcccggctgcccgcttctactgccacaccgcctcagctctggggaccttggttgtattatcagtatgttccagagggaaaggagtaccctgttttatctaggaagctgaggccctctagtggtctggtaggaactctgcttgattacctttctggttctgagaaggagcaagtgttgcttgattggaacgaggttgcagaaaaaaatggttatgtccacattgggagttgtcgaatctctccagatcataggtttcttgcatatacagttgatacatctgggggtgaactattttcccttgaagtgaaagatctgctgtctgagcatgtcatctttagttcaccagacaagggagtagttagtttagcatggtctggcaacaatgaaagtttattttacactgtctgtgatgagactctacgtcctaaccaggttttctgtaaaaagttgcaatcggatgaagcagggtttctagttttcacggagaaagatgtaaactgttgtgtggatattacaagcacaaaagattttaagtatatgactgtcaattctaacactaggacatcatctgaggtttttgtaattgaatctgataatctaagagaaggattatggcctatacggaaacgtgttgacaaagttcagtactttttggagcaccacaacgggttcttttacattcttaccaatgctcctgtaaatgataccgaaacgacaactgaaggctactatctggccaggtgtagggctgaaaagtcactggtggatagatggcagattgtgacggtacctgactcggactgcaccattcaggatatggacatttttcatgataatttagttctctttcttcgaaagaatggtactcctcttttttgctccatcagtatgccaattgatgttgatgttcaggagccaaaggaacttgatgatctcaacccatggttttttcccataccgtcagagttatgcagcattgttgctggatccaacaatgatttcatgtcatctacttatcagctagttatttcatcacctgtgataccggacttaactgtggactatgatttgagaaaaaagactttcaccatccttcatcaagaggaagtaactaccatctctgcaaatctaggcggcctgggctttcaatccaatgtttcaagcatccaacaaaacatgcagcttgttaaaacctcacaaaattggagtgatctttccaagctattctcatgtgaaagggttgaagttatatcacatgatggtgtttcaatacctttagtgatcctgtattcatggggagcacattgtcatggagaatcacctgggatcttatacggttatggagcttatggagaggatttggacaaaagctggtgttctgagaggttaagcctcctctctcgaggttgggttcttgcatttgcagatgttaggggtggaggggatttatcatggcatatggcaggaaccaaagctaataaaatgcattcaattcaagattttgctgcatgcggcaggcatctcataaagcaaggctttgttcaccaaaatcgcctttgtgctataggctgtagtgctggtggtctgttggtgggtgccgtcattaatatgcttccagacttattttctgctgcagttctcaaggtcccctttcttgatatctgcaacacaatgttggatcctactttacctctcactgtcttggactatgaagaatttggtgaccctaatagcccagatgagtttgaggcgatcagcagttattctccttatgataacttagcacctgatgtgtgctatcctccagtcctggtgactgcctcgtttaatgatacaagggtaggagtttgggaagctgctaagtgggttgcaaaagtaagagatgtcgcgtgcccatcctgttcccagtcagttattctcaaaactaatatgcaaagtggccattttggtgagggtgggcgtttcacgcactgtgatgaaacagcctttgagtatgcatttctcatgaaggccttgggtttggatgacgtagctatgatgtagcgtactcatgcctgaggattttcacggaacagatttttttgtggctctggaagcaaaaactgagataattaccttttgtgatatgctcagggataagattgtatcctcataattattgattaaaagagctcgcaatggaaggtgatgcacccttgaggtggcagatgagatccttattatggtgttcgatatggggcttttgaccaaaggataaatggttgatcatggatgttgattttgacttctacttcatacggcaggttggtgcatgttgctttcttctctttgggtcatctggcagatgatgtactctttttacgccatccttaaattaagctcaggttccatgtcacatccttgtgctcatttttttagcgtaatcgtaatcgtcctcggccggtcggccccttgctatgcccacacatactcctatgttcagtgcaacactacaaattaaatgatggcttgctagaacttattgagcacatttctccgagcttatcctaggcaccctttccttccttttttttcgaggatcctagtcaccgtctgtatgtatacttgtgcccactttgcttagtgcagcaatgcaaagtaaatgatgactgtttgaaacgtaccgagcacatttctctctgggctatcctattttaaagatcgcgctttccatagtgattcaattatttaggcttgtagtgcacggtgctcgtgccaataagtaccagttggtgcatatggatctgcgatatataaacaactaccgtaccaagaaatattctatggctaacaaatcccaaggataagtcgcggagttcaaaactgtcctcggttttgtcaatatacgcagtacccgcgtaggctgactgttattacgcatgacctttgcacttgcacatctggtgatatgcatgatatgtaccagccacttgtaccgagtgcttgaaggtgaatctacaataaaatatatggatctgat

SEQ ID NO: 69287 - DNA, 3363 bp, Zea Mays
gcaaaagagcaaactgccaagtgcaaagcgaaaccatcaaaccggtgccgatgctctgccggcgcccgtgccccggcgtgttcctccgcctcttcgccacttcctgccgccgcagctccctccacccctcgcagccgcacctccggacagctacagctctcccgacgctgcctgtggcgaagaaggtccccttcaatgtgtcggcgcacgggaggtcgtggagtgacccgtaccactggatgcgcgacacctccgacccggacctcgcggtcctcctcgccgctgagaacgcgtacgccgacgcgttcgtaggatcggcaggtggcggcggcctccgcgcgcacctcgccgcggagatgcgcgcccggctgcccgcttctactgccacaccgcctcagctctggggaccttggttgtattatcagtatgttccagagggaaaggagtaccctgttttatctaggaagctgaggccctctagtggtctggtaggaactctgcttgattacctttctggttctgagaaggagcaagtgttgcttgattggaacgaggttgcagaaaaaaatggttatgtccacattgggagttgtcgaatctctccagatcataggtttcttgcatatacagttgatacatctgggggtgaactattttcccttgaagtgaaagatctgctgtctgagcatgtcatctttagttcaccagacaagggagtagttagtttagcatggtctggcaacaatgaaagtttattttacactgtctgtgatgagactctacgtcctaaccaggttttctgtaaaaagttgcaatcggatgaagcagggtttctagttttcacggagaaagatgtaaactgttgtgtggatattacaagcacaaaagattttaagtatatgactgtcaattctaacactaggacatcatctgaggtttttgtaattgaatctgataatctaagagaaggattatggcctatacggaaacgtgttgacaaagttcagtactttttggagcaccacaacgggttcttttacattcttaccaatgctcctgtaaatgataccgaaacgacaactgaaggctactatctggccaggtgtagggctgaaaagtcactggtggatagatggcagattgtgacggtacctgactcggactgcaccattcaggatatggacatttttcatgataatttagttctctttcttcgaaagaatggtactcctcttttttgctccatcagtatgccaattgatgttgatgttcaggagccaaaggaacttgatgatctcaacccatggttttttcccataccgtcagagttatgcagcattgttgctggatccaacaatgatttcatgtcatctacttatcagctagttatttcatcacctgtgataccggacttaactgtggactatgatttgagaaaaaagactttcaccatccttcatcaagaggaagtaactaccatctctgcaaatctaggcggcctgggctttcaatccaatgtttcaagcatccaacaaaacatgcagcttgttaaaacctcacaaaattggagtgatctttccaagctattctcatgtgaaagggttgaagttatatcacatgatggtgtttcaatacctttagtgatcctgtattcatggggagcacattgtcatggagaatcacctgggatcttatacggttatggagcttatggagaggatttggacaaaagctggtgttctgagaggttaagcctcctctctcgaggttgggttcttgcatttgcagatgttaggctgtagtgctggtggtctgttggtgggtgccgtcattaatatgcttccagacttattttctgctgcagttctcaaggtcccctttcttgatatctgcaacacaatgttggatcctactttacctctcactgtcttggactatgaagaatttggtgaccctaatagcccagatgagtttgaggcgatcagcagttattctccttatgataacttagcacctgatgtgtgctatcctccagtcctggtgactgcctcgtttaatgatacaagggtaggagtttgggaagctgctaagtgggttgcaaaagtaagagatgtcgcgtgcccatcctgttcccagtcagttattctcaaaactaatatgcaaagtggccattttggtgagggtgggcgtttcacgcactgtgatgaaacagcctttgagtatgcatttctcatgaaggccttgggtttggatgacgtagctatgatgtagcgtactcatgcctgaggattttcacggaacagatttttttgtggctctggaagcaaaaactgagataattaccttttgtgatatgctcagggataagattgtatcctcataattattgattaaaagagctcgcaatggaaggtgatgcacccttgaggtgtgttctgtttggcattggcttttaatagtcaagctgtggatttctacatgcatattatcaacttatgctttcaaaaatagcacacttggatgctgctcatcaacagtgcaaaggtggcagatgagatccttattatggtgttcgatatggggcttttgaccaaaggataaatggttgatcatggatgttgattttgacttctacttcatacggcaggttggtgcatgttgctttcttctctttgggtcatctggcagatgatgtactctttttacgccatccttaaattaagctcaggttccatgtcacatccttgtgctcatttttttagcgtaatcgtaatcgtcctcggccggtcggccccttgctatgcccacacatactcctatgttcagtgcaacactacaaattaaatgatggcttgctagaacttattgagcacatttctccgagcttatcctaggcaccctttccttccttttttttcgaggatcctagtcaccgtctgtatgtatacttgtgcccactttgcttagtgcagcaatgcaaagtaaatgatgactgtttgaaacgtaccgagcacatttctctctgggctatcctattttaaagatcgcgctttccatagtgattcaattatttaggcttgtagtgcacggtgctcgtgccaataagtaccagttggtgcatatggatctgcgatatataaacaactaccgtaccaagaaatattctatggctaacaaatcccaaggataagtcgcggagttcaaaactgtcctcggttttgtcaatatacgcagtacccgcgtaggctgactgttattacgcatgacctttgcacttgcacatctggtgatatgcatgatatgtaccagccacttgtaccgagtgcttgaaggtgaatctacaataaaatatatggatctgat

SEQ ID NO: 69288 - DNA, 3461 bp, Zea Mays
gcaaaagagcaaactgccaagtgcaaagcgaaaccatcaaaccggtgccgatgctctgccggcgcccgtgccccggcgtgttcctccgcctcttcgccacttcctgccgccgcagctccctccacccctcgcagccgcacctccggacagctacagctctcccgacgctgcctgtggcgaagaaggtccccttcaatgtgtcggcgcacgggaggtcgtggagtgacccgtaccactggatgcgcgacacctccgacccggacctcgcggtcctcctcgccgctgagaacgcgtacgccgacgcgttcgtaggatcggcaggtggcggcggcctccgcgcgcacctcgccgcggagatgcgcgcccggctgcccgcttctactgccacaccgcctcagctctggggaccttggttgtattatcagtatgttccagagggaaaggagtaccctgttttatctaggaagctgaggccctctagtggtctggtaggaactctgcttgattacctttctggttctgagaaggagcaagtgttgcttgattggaacgaggttgcagaaaaaaatggttatgtccacattgggagttgtcgaatctctccagatcataggtttcttgcatatacagttgatacatctgggggtgaactattttcccttgaagtgaaagatctgctgtctgagcatgtcatctttagttcaccagacaagggagtagttagtttagcatggtctggcaacaatgaaagtttattttacactgtctgtgatgagactctacgtcctaaccaggttttctgtaaaaagttgcaatcggatgaagcagggtttctagttttcacggagaaagatgtaaactgttgtgtggatattacaagcacaaaagattttaagtatatgactgtcaattctaacactaggacatcatctgaggtttttgtaattgaatctgataatctaagagaaggattatggcctatacggaaacgtgttgacaaagttcagtactttttggagcaccacaacgggttcttttacattcttaccaatgctcctgtaaatgataccgaaacgacaactgaaggctactatctggccaggtgtagggctgaaaagtcactggtggatagatggcaggatatggacatttttcatgataatttagttctctttcttcgaaagaatggtactcctcttttttgctccatcagtatgccaattgatgttgatgttcaggagccaaaggaacttgatgatctcaacccatggttttttcccataccgtcagagttatgcagcattgttgctggatccaacaatgatttcatgtcatctacttatcagctagttatttcatcacctgtgataccggacttaactgtggactatgatttgagaaaaaagactttcaccatccttcatcaagaggaagtaactaccatctctgcaaatctaggcggcctgggctttcaatccaatgtttcaagcatccaacaaaacatgcagcttgttaaaacctcacaaaattggagtgatctttccaagctattctcatgtgaaagggttgaagttatatcacatgatggtgtttcaatacctttagtgatcctgtattcatggggagcacattgtcatggagaatcacctgggatcttatacggttatggagcttatggagaggatttggacaaaagctggtgttctgagaggttaagcctcctctctcgaggttgggttcttgcatttgcagatgttaggggtggaggggatttatcatggcatatggcaggaaccaaagctaataaaatgcattcaattcaagattttgctgcatgcggcaggcatctcataaagcaaggctttgttcaccaaaatcgcctttgtgctataggctgtagtgctggtggtctgttggtgggtgccgtcattaatatgcttccagacttattttctgctgcagttctcaaggtcccctttcttgatatctgcaacacaatgttggatcctactttacctctcactgtcttggactatgaagaatttggtgaccctaatagcccagatgagtttgaggcgatcagcagttattctccttatgataacttagcacctgatgtgtgctatcctccagtcctggtgactgcctcgtttaatgatacaagggtaggagtttgggaagctgctaagtgggttgcaaaagtaagagatgtcgcgtgcccatcctgttcccagtcagttattctcaaaactaatatgcaaagtggccattttggtgagggtgggcgtttcacgcactgtgatgaaacagcctttgagtatgcatttctcatgaaggccttgggtttggatgacgtagctatgatgtagcgtactcatgcctgaggattttcacggaacagatttttttgtggctctggaagcaaaaactgagataattaccttttgtgatatgctcagggataagattgtatcctcataattattgattaaaagagctcgcaatggaaggtgatgcacccttgaggtgtgttctgtttggcattggcttttaatagtcaagctgtggatttctacatgcatattatcaacttatgctttcaaaaatagcacacttggatgctgctcatcaacagtgcaaaggtggcagatgagatccttattatggtgttcgatatggggcttttgaccaaaggataaatggttgatcatggatgttgattttgacttctacttcatacggcaggttggtgcatgttgctttcttctctttgggtcatctggcagatgatgtactctttttacgccatccttaaattaagctcaggttccatgtcacatccttgtgctcatttttttagcgtaatcgtaatcgtcctcggccggtcggccccttgctatgcccacacatactcctatgttcagtgcaacactacaaattaaatgatggcttgctagaacttattgagcacatttctccgagcttatcctaggcaccctttccttccttttttttcgaggatcctagtcaccgtctgtatgtatacttgtgcccactttgcttagtgcagcaatgcaaagtaaatgatgactgtttgaaacgtaccgagcacatttctctctgggctatcctattttaaagatcgcgctttccatagtgattcaattatttaggcttgtagtgcacggtgctcgtgccaataagtaccagttggtgcatatggatctgcgatatataaacaactaccgtaccaagaaatattctatggctaacaaatcccaaggataagtcgcggagttcaaaactgtcctcggttttgtcaatatacgcagtacccgcgtaggctgactgttattacgcatgacctttgcacttgcacatctggtgatatgcatgatatgtaccagccacttgtaccgagtgcttgaaggtgaatctacaataaaatatatggatctgat

SEQ ID NO: 69289 - DNA, 3132 bp, Zea Mays
gcaaaagagcaaactgccaagtgcaaagcgaaaccatcaaaccggtgccgatgctctgccggcgcccgtgccccggcgtgttcctccgcctcttcgccacttcctgccgccgcagctccctccacccctcgcagccgcacctccggacagctacagctctcccgacgctgcctgtggcgaagaaggtccccttcaatgtgtcggcgcacgggaggtcgtggagtgacccgtaccactggatgcgcgacacctccgacccggacctcgcggtcctcctcgccgctgagaacgcgtacgccgacgcgttcgtaggatcggcaggtggcggcggcctccgcgcgcacctcgccgcggagatgcgcgcccggctgcccgcttctactgccacaccgcctcagctctggggaccttggttgtattatcagtatgttccagagggaaaggagtaccctgttttatctaggaagctgaggccctctagtggtctggtaggaactctgcttgattacctttctggttctgagaaggagcaagtgttgcttgattggaacgaggttgcagaaaaaaatggtttttgtaattgaatctgataatctaagagaaggattatggcctatacggaaacgtgttgacaaagttcagtactttttggagcaccacaacgggttcttttacattcttaccaatgctcctgtaaatgataccgaaacgacaactgaaggctactatctggccaggtgtagggctgaaaagtcactggtggatagatggcagattgtgacggtacctgactcggactgcaccattcaggatatggacatttttcatgataatttagttctctttcttcgaaagaatggtactcctcttttttgctccatcagtatgccaattgatgttgatgttcaggagccaaaggaacttgatgatctcaacccatggttttttcccataccgtcagagttatgcagcattgttgctggatccaacaatgatttcatgtcatctacttatcagctagttatttcatcacctgtgataccggacttaactgtggactatgatttgagaaaaaagactttcaccatccttcatcaagaggaagtaactaccatctctgcaaatctaggcggcctgggctttcaatccaatgtttcaagcatccaacaaaacatgcagcttgttaaaacctcacaaaattggagtgatctttccaagctattctcatgtgaaagggttgaagttatatcacatgatggtgtttcaatacctttagtgatcctgtattcatggggagcacattgtcatggagaatcacctgggatcttatacggttatggagcttatggagaggatttggacaaaagctggtgttctgagaggttaagcctcctctctcgaggttgggttcttgcatttgcagatgttaggggtggaggggatttatcatggcatatggcaggaaccaaagctaataaaatgcattcaattcaagattttgctgcatgcggcaggcatctcataaagcaaggctttgttcaccaaaatcgcctttgtgctataggctgtagtgctggtggtctgttggtgggtgccgtcattaatatgcttccagacttattttctgctgcagttctcaaggtcccctttcttgatatctgcaacacaatgttggatcctactttacctctcactgtcttggactatgaagaatttggtgaccctaatagcccagatgagtttgaggcgatcagcagttattctccttatgataacttagcacctgatgtgtgctatcctccagtcctggtgactgcctcgtttaatgatacaagggtaggagtttgggaagctgctaagtgggttgcaaaagtaagagatgtcgcgtgcccatcctgttcccagtcagttattctcaaaactaatatgcaaagtggccattttggtgagggtgggcgtttcacgcactgtgatgaaacagcctttgagtatgcatttctcatgaaggccttgggtttggatgacgtagctatgatgtagcgtactcatgcctgaggattttcacggaacagatttttttgtggctctggaagcaaaaactgagataattaccttttgtgatatgctcagggataagattgtatcctcataattattgattaaaagagctcgcaatggaaggtgatgcacccttgaggtgtgttctgtttggcattggcttttaatagtcaagctgtggatttctacatgcatattatcaacttatgctttcaaaaatagcacacttggatgctgctcatcaacagtgcaaaggtggcagatgagatccttattatggtgttcgatatggggcttttgaccaaaggataaatggttgatcatggatgttgattttgacttctacttcatacggcaggttggtgcatgttgctttcttctctttgggtcatctggcagatgatgtactctttttacgccatccttaaattaagctcaggttccatgtcacatccttgtgctcatttttttagcgtaatcgtaatcgtcctcggccggtcggccccttgctatgcccacacatactcctatgttcagtgcaacactacaaattaaatgatggcttgctagaacttattgagcacatttctccgagcttatcctaggcaccctttccttccttttttttcgaggatcctagtcaccgtctgtatgtatacttgtgcccactttgcttagtgcagcaatgcaaagtaaatgatgactgtttgaaacgtaccgagcacatttctctctgggctatcctattttaaagatcgcgctttccatagtgattcaattatttaggcttgtagtgcacggtgctcgtgccaataagtaccagttggtgcatatggatctgcgatatataaacaactaccgtaccaagaaatattctatggctaacaaatcccaaggataagtcgcggagttcaaaactgtcctcggttttgtcaatatacgcagtacccgcgtaggctgactgttattacgcatgacctttgcacttgcacatctggtgatatgcatgatatgtaccagccacttgtaccgagtgcttgaaggtgaatctacaataaaatatatggatctgat

SEQ ID NO: 69290 - DNA, 3239 bp, Zea Mays
gcaaaagagcaaactgccaagtgcaaagcgaaaccatcaaaccggtgccgatgctctgccggcgcccgtgccccggcgtgttcctccgcctcttcgccacttcctgccgccgcagctccctccacccctcgcagccgcacctccggacagctacagctctcccgacgctgcctgtggcgaagaaggtccccttcaatgtgtcggcgcacgggaggtcgtggagtgacccgtaccactggatgcgcgacacctccgacccggacctcgcggtcctcctcgccgctgagaacgcgtacgccgacgcgttcgtaggatcggcaggtggcggcggcctccgcgcgcacctcgccgcggagatgcgcgcccggctgcccgcttctactgccacaccgcctcagctctggggaccttggttgtattatcagtatgttccagagggaaaggagtaccctgttttatctaggaagctgaggccctctagtggtctggtaggaactctgcttgattacctttctggttctgagaaggagcaagtgttgcttgattggaacgaggttgcagaaaaaaatggttatgtccacattgggagttgtcgaatctctccagatcataggtttcttgcatatacagttgatacatctgggggtgaactattttcccttgaagtgaaagatctgctgtctgagcatgtcatctttagttcaccagacaagggagtagttagtttagcatggtctggcaacaatgaaagtttattttacactgtctgtgatgagactctacgtcctaaccaggttttctgtaaaaagttgcaatcggatgaagcagggtttctagttttcacggagaaagatgtaaactgttgtgtggatattacaagcacaaaagattttaagtatatgactgtcaattctaacactaggacatcatctgaggtttttgtaattgaatctgataatctaagagaaggattatggcctatacggaaacgtgttgacaaagttcagtactttttggagcaccacaacgggttcttttacattcttaccaatgctcctgtaaatgataccgaaacgacaactgaaggctactatctggccaggtgtagggctgaaaagtcactggtggatagatggcagattgtgacggtacctgactcggactgcaccattcaggatatggacatttttcatgataatttagttctctttcttcgaaagaatggtactcctcttttttgctccatcagtatgccaattgatgttgatgttcaggagccaaaggaacttgatgatctcaacccatggttttttcccataccgtcagagttatgcagcattgttgctggatccaacaatgatttcatgtcatctacttatcagctagttatttcatcacctgtgataccggacttaactgtggactatgatttgagaaaaaagactttcaccatccttcatcaagaggaagtaactaccatctctgcaaatctaggcggcctgggctttcaatccaatgtttcaagcatccaacaaaacatgcagcttgttaaaacctcacaaaattggagtgatctttccaagctattctcatgtgaaagggttgaagttatatcacatgatggtgtttcaatacctttagtgatcctgtattcatggggagcacattgtcatggagaatcacctgggatcttatacggttatggagcttatggagaggatttggacaaaagctggtgttctgagaggttaagcctcctctctcgaggttgggttcttgcatttgcagatgttaggggtggaggggatttatcatggcatatggcaggaaccaaagctaataaaatgcattcaattcaagattttgctgcatgcggcaggcatctcataaagcaaggctttgttcaccaaaatcgcctttgtgctataggctgtagtgctggtggtctgttggtgggtgccgtcattaatatgcttccagacttattttctgctgcagttctcaaggtcccctttcttgatatctgcaacacaatgttggatcctactttacctctcactgtcttggactatgaagaatttggtgaccctaatagcccagatgagtttgaggcgatcagcagttattctccttatgataacttagcacctgatgtgtgctatcctccagtcctggtgactgcctcgtttaatgatacaagggtaggagtttgggaagctgctaagtgggttgcaaaaggataagattgtatcctcataattattgattaaaagagctcgcaatggaaggtgatgcacccttgaggtgtgttctgtttggcattggcttttaatagtcaagctgtggatttctacatgcatattatcaacttatgctttcaaaaatagcacacttggatgctgctcatcaacagtgcaaaggtggcagatgagatccttattatggtgttcgatatggggcttttgaccaaaggataaatggttgatcatggatgttgattttgacttctacttcatacggcaggttggtgcatgttgctttcttctctttgggtcatctggcagatgatgtactctttttacgccatccttaaattaagctcaggttccatgtcacatccttgtgctcatttttttagcgtaatcgtaatcgtcctcggccggtcggccccttgctatgcccacacatactcctatgttcagtgcaacactacaaattaaatgatggcttgctagaacttattgagcacatttctccgagcttatcctaggcaccctttccttccttttttttcgaggatcctagtcaccgtctgtatgtatacttgtgcccactttgcttagtgcagcaatgcaaagtaaatgatgactgtttgaaacgtaccgagcacatttctctctgggctatcctattttaaagatcgcgctttccatagtgattcaattatttaggcttgtagtgcacggtgctcgtgccaataagtaccagttggtgcatatggatctgcgatatataaacaactaccgtaccaagaaatattctatggctaacaaatcccaaggataagtcgcggagttcaaaactgtcctcggttttgtcaatatacgcagtacccgcgtaggctgactgttattacgcatgacctttgcacttgcacatctggtgatatgcatgatatgtaccagccacttgtaccgagtgcttgaaggtgaatctacaataaaatatatggatctgat

SEQ ID NO: 69291 - DNA, 2998 bp, Zea Mays
gcaaaagagcaaactgccaagtgcaaagcgaaaccatcaaaccggtgccgatgctctgccggcgcccgtgccccggcgtgttcctccgcctcttcgccacttcctgccgccgcagctccctccacccctcgcagccgcacctccggacagctacagctctcccgacgctgcctgtggcgaagaaggtccccttcaatgtgtcggcgcacgggaggtcgtggagtgacccgtaccactggatgcgcgacacctccgacccggacctcgcggtcctcctcgccgctgagaacgcgtacgccgacgcgttcgtaggatcggcaggtggcggcggcctccgcgcgcacctcgccgcggagatgcgcgcccggctgcccgcttctactgccacaccgcctcagctctggggaccttggttgtattatcagtatgttccagagggaaaggagtaccctgttttatctaggaagctgaggccctctagtggtctggtaggaactctgcttgattacctttctggttctgagaaggagcaagtgttgcttgattggaacgaggttgcagaaaaaaatggtttttgtaattgaatctgataatctaagagaaggattatggcctatacggaaacgtgttgacaaagttcagtactttttggagcaccacaacgggttcttttacattcttaccaatgctcctgtaaatgataccgaaacgacaactgaaggctactatctggccaggtgtagggctgaaaagtcactggtggatagatggcagattgtgacggtacctgactcggactgcaccattcaggatatggacatttttcatgataatttagttctctttcttcgaaagaatggtactcctcttttttgctccatcagtatgccaattgatgttgatgttcaggagccaaaggaacttgatgatctcaacccatggttttttcccataccgtcagagttatgcagcattgttgctggatccaacaatgatttcatgtcatctacttatcagctagttatttcatcacctgtgataccggacttaactgtggactatgatttgagaaaaaagactttcaccatccttcatcaagaggaagtaactaccatctctgcaaatctaggcggcctgggctttcaatccaatgtttcaagcatccaacaaaacatgcagcttgttaaaacctcacaaaattggagtgatctttccaagctattctcatgtgaaagggttgaagttatatcacatgatggtgtttcaatacctttagtgatcctgtattcatggggagcacattgtcatggagaatcacctgggatcttatacggttatggagcttatggagaggatttggacaaaagctggtgttctgagaggttaagcctcctctctcgaggttgggttcttgcatttgcagatgttaggctgtagtgctggtggtctgttggtgggtgccgtcattaatatgcttccagacttattttctgctgcagttctcaaggtcccctttcttgatatctgcaacacaatgttggatcctactttacctctcactgtcttggactatgaagaatttggtgaccctaatagcccagatgagtttgaggcgatcagcagttattctccttatgataacttagcacctgatgtgtgctatcctccagtcctggtgactgcctcgtttaatgatacaagggtaggagtttgggaagctgctaagtgggttgcaaaagtaagagatgtcgcgtgcccatcctgttcccagtcagttattctcaaaactaatatgcaaagtggccattttggtgagggtgggcgtttcacgcactgtgatgaaacagcctttgagtatgcatttctcatgaaggccttgggtttggatgacgtagctatgatgtagcgtactcatgcctgaggattttcacggaacagatttttttgtggctctggaagcaaaaactgagataattaccttttgtgatatgctcagggataagattgtatcctcataattattgattaaaagagctcgcaatggaaggtgatgcacccttgaggtgtgttctgtttggcattggcttttaatagtcaagctgtggatttctacatgcatattatcaacttatgctttcaaaaatagcacacttggatgctgctcatcaacagtgcaaaggtggcagatgagatccttattatggtgttcgatatggggcttttgaccaaaggataaatggttgatcatggatgttgattttgacttctacttcatacggcaggttggtgcatgttgctttcttctctttgggtcatctggcagatgatgtactctttttacgccatccttaaattaagctcaggttccatgtcacatccttgtgctcatttttttagcgtaatcgtaatcgtcctcggccggtcggccccttgctatgcccacacatactcctatgttcagtgcaacactacaaattaaatgatggcttgctagaacttattgagcacatttctccgagcttatcctaggcaccctttccttccttttttttcgaggatcctagtcaccgtctgtatgtatacttgtgcccactttgcttagtgcagcaatgcaaagtaaatgatgactgtttgaaacgtaccgagcacatttctctctgggctatcctattttaaagatcgcgctttccatagtgattcaattatttaggcttgtagtgcacggtgctcgtgccaataagtaccagttggtgcatatggatctgcgatatataaacaactaccgtaccaagaaatattctatggctaacaaatcccaaggataagtcgcggagttcaaaactgtcctcggttttgtcaatatacgcagtacccgcgtaggctgactgttattacgcatgacctttgcacttgcacatctggtgatatgcatgatatgtaccagccacttgtaccgagtgcttgaaggtgaatctacaataaaatatatggatctgat

SEQ ID NO: 69292 - DNA, 3493 bp, Zea Mays
gcaaaagagcaaactgccaagtgcaaagcgaaaccatcaaaccggtgccgatgctctgccggcgcccgtgccccggcgtgttcctccgcctcttcgccacttcctgccgccgcagctccctccacccctcgcagccgcacctccggacagctacagctctcccgacgctgcctgtggcgaagaaggtccccttcaatgtgtcggcgcacgggaggtcgtggagtgacccgtaccactggatgcgcgacacctccgacccggacctcgcggtcctcctcgccgctgagaacgcgtacgccgacgcgttcgtaggatcggcaggtggcggcggcctccgcgcgcacctcgccgcggagatgcgcgcccggctgcccgcttctactgccacaccgcctcagctctggggaccttggttgtattatcagtatgttccagagggaaaggagtaccctgttttatctaggaagctgaggccctctagtggtctggtaggaactctgcttgattacctttctggttctgagaaggagcaagtgttgcttgattggaacgaggttgcagaaaaaaatggttatgtccacattgggagttgtcgaatctctccagatcataggtttcttgcatatacagttgatacatctgggggtgaactattttcccttgaagtgaaagatctgctgtctgagcatgtcatctttagttcaccagacaagggagtagttagtttagcatggtctggcaacaatgaaagtttattttacactgtctgtgatgagactctacgtcctaaccaggttttctgtaaaaagttgcaatcggatgaagcagggtttctagttttcacggagaaagatgtaaactgttgtgtggatattacaagcacaaaagattttaagtatatgactgtcaattctaacactaggacatcatctgaggtttttgtaattgaatctgataatctaagagaaggattatggcctatacggaaacgtgttgacaaagttcagtactttttggagcaccacaacgggttcttttacattcttaccaatgctcctgtaaatgataccgaaacgacaactgaaggctactatctggccaggtgtagggctgaaaagtcactggtggatagatgattgtgacggtacctgactcggactgcaccattcaggatatggacatttttcatgataatttagttctctttcttcgaaagaatggtactcctcttttttgctccatcagtatgccaattgatgttgatgttcaggagccaaaggaacttgatgatctcaacccatggttttttcccataccgtcagagttatgcagcattgttgctggatccaacaatgatttcatgtcatctacttatcagctagttatttcatcacctgtgataccggacttaactgtggactatgatttgagaaaaaagactttcaccatccttcatcaagaggaagtaactaccatctctgcaaatctaggcggcctgggctttcaatccaatgtttcaagcatccaacaaaacatgcagcttgttaaaacctcacaaaattggagtgatctttccaagctattctcatgtgaaagggttgaagttatatcacatgatggtgtttcaatacctttagtgatcctgtattcatggggagcacattgtcatggagaatcacctgggatcttatacggttatggagcttatggagaggatttggacaaaagctggtgttctgagaggttaagcctcctctctcgaggttgggttcttgcatttgcagatgttaggggtggaggggatttatcatggcatatggcaggaaccaaagctaataaaatgcattcaattcaagattttgctgcatgcggcaggcatctcataaagcaaggctttgttcaccaaaatcgcctttgtgctataggctgtagtgctggtggtctgttggtgggtgccgtcattaatatgcttccagacttattttctgctgcagttctcaaggtcccctttcttgatatctgcaacacaatgttggatcctactttacctctcactgtcttggactatgaagaatttggtgaccctaatagcccagatgagtttgaggcgatcagcagttattctccttatgataacttagcacctgatgtgtgctatcctccagtcctggtgactgcctcgtttaatgatacaagggtaggagtttgggaagctgctaagtgggttgcaaaagtaagagatgtcgcgtgcccatcctgttcccagtcagttattctcaaaactaatatgcaaagtggccattttggtgagggtgggcgtttcacgcactgtgatgaaacagcctttgagtatgcatttctcatgaaggccttgggtttggatgacgtagctatgatgtagcgtactcatgcctgaggattttcacggaacagatttttttgtggctctggaagcaaaaactgagataattaccttttgtgatatgctcagggataagattgtatcctcataattattgattaaaagagctcgcaatggaaggtgatgcacccttgaggtgtgttctgtttggcattggcttttaatagtcaagctgtggatttctacatgcatattatcaacttatgctttcaaaaatagcacacttggatgctgctcatcaacagtgcaaaggtggcagatgagatccttattatggtgttcgatatggggcttttgaccaaaggataaatggttgatcatggatgttgattttgacttctacttcatacggcaggttggtgcatgttgctttcttctctttgggtcatctggcagatgatgtactctttttacgccatccttaaattaagctcaggttccatgtcacatccttgtgctcatttttttagcgtaatcgtaatcgtcctcggccggtcggccccttgctatgcccacacatactcctatgttcagtgcaacactacaaattaaatgatggcttgctagaacttattgagcacatttctccgagcttatcctaggcaccctttccttccttttttttcgaggatcctagtcaccgtctgtatgtatacttgtgcccactttgcttagtgcagcaatgcaaagtaaatgatgactgtttgaaacgtaccgagcacatttctctctgggctatcctattttaaagatcgcgctttccatagtgattcaattatttaggcttgtagtgcacggtgctcgtgccaataagtaccagttggtgcatatggatctgcgatatataaacaactaccgtaccaagaaatattctatggctaacaaatcccaaggataagtcgcggagttcaaaactgtcctcggttttgtcaatatacgcagtacccgcgtaggctgactgttattacgcatgacctttgcacttgcacatctggtgatatgcatgatatgtaccagccacttgtaccgagtgcttgaaggtgaatctacaataaaatatatggatctgat

SEQ ID NO: 69293 - DNA, 4471 bp, Zea Mays
gcaaaagagcaaactgccaagtgcaaagcgaaaccatcaaaccggtgccgatgctctgccggcgcccgtgccccggcgtgttcctccgcctcttcgccacttcctgccgccgcagctccctccacccctcgcagccgcacctccggacagctacagctctcccgacgctgcctgtggcgaagaaggtccccttcaatgtgtcggcgcacgggaggtcgtggagtgacccgtaccactggatgcgcgacacctccgacccggacctcgcggtcctcctcgccgctgagaacgcgtacgccgacgcgttcgtaggatcggcaggtggcggcggcctccgcgcgcacctcgccgcggagatgcgcgcccggctgcccgcttctactgccacaccgcctcagctctggggaccttggttgtattatcagtatgttccagagggaaaggagtaccctgttttatctaggaagctgaggccctctagtggtctggtaggaactctgcttgattacctttctggttctgagaaggagcaagtgttgcttgattggaacgaggttgcagaaaaaaatggttatgtccacattgggagttgtcgaatctctccagatcataggtttcttgcatatacagttgatacatctgggggtgaactattttcccttgaagtgaaagatctgctgtctgagcatgtcatctttagttcaccagacaagggagtagttagtttagcatggtctggcaacaatgaaagtttattttacactgtctgtgatgagactctacgtcctaaccaggttttctgtaaaaagttgcaatcggatgaagcagggtttctagttttcacggagaaagatgtaaactgttgtgtggatattacaagcacaaaagattttaagtatatgactgtcaattctaacactaggacatcatctgaggaaggtttttgtaattgaatctgataatctaagagaaggattatggcctatacggaaacgtgttgacaaagttcagtactttttggagcaccacaacgggttcttttacattcttaccaatgctcctgtaaatgataccgaaacgacaactgaaggctactatctggccaggtgtagggctgaaaagtcactggtggatagatggcagattgtgacggtacctgactcggactgcaccattcaggatatggacatttttcatgataatttagttctctttcttcgaaagaatggtactcctcttttttgctccatcagtatgccaattgatgttgatgttcaggagccaaaggaacttgatgatctcaacccatggttttttcccataccgtcagagttatgcagcattgttgctggatccaacaatgatttcatgtcatctacttatcagctagttatttcatcacctgtgataccggacttaactgtggactatgatttgagaaaaaagactttcaccatccttcatcaagaggaagtaactaccatctctgcaaatctaggcggcctgggctttcaatccaatgtttcaagcatccaacaaaacatgcagcttgttaaaacctcacaaaattggagtgatctttccaagctattctcatgtgaaagggttgaagttatatcacatgatggtgtttcaatacctttagtgatcctgtattcatggggagcacattgtcatggagaatcacctgggatcttatacggttatggagcttatggagaggatttggacaaaagctggtgttctgagaggttaagcctcctctctcgaggttgggttcttgcatttgcagatgttaggtacgtttatgctacagagctgcagtgactgctgtccccatcatattgcagagttttatataaaagtttgtttgacaatcagactatccttcttgcataagtggccaggagttattgcatggcacaaaaaaaggatccatatccatggatccaatgaatcttagggtatgtagcctctggattgttttttagaacaatgaggagaactttgtgtcatttcattaaggaagaaaagaattagttataatgaggggttttaacacccccaggcacacttgaaacacactacacagcaactgaacacaaccaccctagaccacacgtccacacccagcctaaggggcaggagcctcccttaggaggagcttcatgaggttagaagccccagcacatatgggaatcagcggtcacttgagccaaaaccacttgaggctgaggttgagcaccattgaacacgaaagcgtttctgtgcttccacaactcccaagtgaccaagatgaccaaggaattgaaccctttttcaagtataagaggcggttaagagactgcacaatgaggtgtttttaaaattagctacatcataaatgtagtttagaggcaatatgtatgaagagtcgtgtagaaatagaatcttcacgaagagaccgtcttttgtatctttttcatttaaccccttagagacccctcaagaggcggagtattaaatggggttgtacgtgccctgcagtacacaaattttaacttttagtttctgttaaagacataatttgttattttattgggattaatgttgctccattttaggcaaaaacaacacgtgatttactgtcctggcatatgtagttccctattgaacattcccttattacagaggcacttgtgaaactacctactttgcagtcatgaagttctagttttcatccaaagttgctttgtggtctgaacagccaagatactgatatcaggaatgatgtgcgatatgaatagaaaactattctcaattcattttctgttgtgataactgttgtttattttgataacttctttttatatgaggcaccgagttcttgaacctaatcatgtaggggtggaggggatttatcatggcatatggcaggaaccaaagctaataaaatgcattcaattcaagattttgctgcatgcggcaggcatctcataaagcaaggctttgttcaccaaaatcgcctttgtgctataggctgtagtgctggtggtctgttggtgggtgccgtcattaatatgcttccagacttattttctgctgcagttctcaaggtcccctttcttgatatctgcaacacaatgttggatcctactttacctctcactgtcttggactatgaagaatttggtgaccctaatagcccagatgagtttgaggcgatcagcagttattctccttatgataacttagcacctgatgtgtgctatcctccagtcctggtgactgcctcgtttaatgatacaagggtaggagtttgggaagctgctaagtgggttgcaaaagtaagagatgtcgcgtgcccatcctgttcccagtcagttattctcaaaactaatatgcaaagtggccattttggtgagggtgggcgtttcacgcactgtgatgaaacagcctttgagtatgcatttctcatgaaggccttgggtttggatgacgtagctatgatgtagcgtactcatgcctgaggattttcacggaacagatttttttgtggctctggaagcaaaaactgagataattaccttttgtgatatgctcagggataagattgtatcctcataattattgattaaaagagctcgcaatggaaggtgatgcacccttgaggtgtgttctgtttggcattggcttttaatagtcaagctgtggatttctacatgcatattatcaacttatgctttcaaaaatagcacacttggatgctgctcatcaacagtgcaaaggtggcagatgagatccttattatggtgttcgatatggggcttttgaccaaaggataaatggttgatcatggatgttgattttgacttctacttcatacggcagcgtaatcgtaatcgtcctcggccggtcggccccttgctatgcccacacatactcctatgttcagtgcaacactacaaattaaatgatggcttgctagaacttattgagcacatttctccgagcttatcctaggcaccctttccttccttttttttcgaggatcctagtcaccgtctgtatgtatacttgtgcccactttgcttagtgcagcaatgcaaagtaaatgatgactgtttgaaacgtaccgagcacatttctctctgggctatcctattttaaagatcgcgctttccatagtgattcaattatttaggcttgtagtgcacggtgctcgtgccaataagtaccagttggtgcatatggatctgcgatatataaacaactaccgtaccaagaaatattctatggctaacaaatcccaaggataagtcgcggagttcaaaactgtcctcggttttgtcaatatacgcagtacccgcgtaggctgactgttattacgcatgacctttgcacttgcacatctggtgatatgcatgatatgtaccagccacttgtaccgagtgcttgaaggtgaatctacaataaaatatatggatctgat

SEQ ID NO: 69294 - DNA, 842 bp, Zea Mays
gatccttcgacttttatactgtttgtgccatgctatagattgctggcatcatgtggaatcacctcctgcaacctttatttatgcgacataactaaagatcatgctagcagagaagcaggcggcactggagaagttagagtgggaggcaaatgtgtcgagtacaaaggtggaagagctccaagctgatgtagcttctatggatactgaagtttctgctctgatgaagctgttcaggaaaataacagagagtgacagagcccctccacccagggatagaaatgacgatttgtctttggaatgcgagccagttcaccttgatgacacgttagacgacattgaccttgagaagatggagaaggagatgtcagcctacgtctcggctttgtctgccgcgaaggagaaccctacagacgagttcatgagagcagtcgccgatgcaagattaagacttcaagccgttgtactctgaccaagactagagcgttgcgttgtactgtgtaaccaacaggagcaagcaagtcgatagtacgtttgctaatcgctgtgttttgccggtggcccccctcagggccttttctgtgttctttctcctaccttgcatctgatcggcggccgctagtgacagtgagctagcttgatgtaacctgtaacgctatgaaccgtggtgtacctgactgaacctccgtaatagtagatggtatcgtgtacggtgtaccttttttttagcaacaagatggtgcggcctgtcttgacggctgaaagttcttgttttgttgtttagcaacaagataattcactatcttgcttttctgtttgtttgttaccccataaaccgaatcagg

SEQ ID NO: 69295 - DNA, 2254 bp, Zea Mays
aaatgattcatgttgatggtactaacaagtttgtcactgaagacaacatattctcagaagatgaaattaccaattttcagcagcatatattggagataattggaagtactcagatggctggaaggcgttttactcaaaatggatcaagcagtactcagatatacgcacaaatgacgctgccatatgtttcaaaccagggtggatacatggatttgatgatggaacagatacgtaactcgcaaggagaaccagtgagtgaactaggcaatgaaatgcaaagtgccctatgcacacaaaatgaaaccatgaacaaaaacctactagtggccccatgtgagacatacacacagatgattcttgaggaggactcaacgcttgcaaatgcagacatatccaagtttggatacatggatctaatgatggaacagatatataactcgcaaggagaatcagtgagtgaagtaggcaatgaaatgcaaagtggcctatgcacacaaaatgaaacaatgaacaacaacctaataggagcaccatgtgagacatacacacagatgattcttgaggaggactccccgcttgcaaatgcagacatatccaaggagacatttggggaatgcaatgaagctgatacatctaaatatggggaagcagtataccacggggatctctttgagataatgcatgtacaacaactaactgaatgtgcgcaaaatgatgatggaaaagaaactaaaacatcaagagatgaagagttaacagaggatcagattgatgccttcattatgagtgagcagatagctgcaacagaagggaacaatgcatcaatagacagcaaatacacacctcaagttgggatggaatttaagatcaggggagatgcagagcacttcttattcttctatggttttttggctggttttaaaccagcaatcacccacactttcaggacttccaacaaaaaaagaagcaatgaagtaacaaagatatggaaaaggaattataagaacattgaaccacaacaacatacctacacggaagatgatagctatattgtcttatctgagaggagaaatataggaataccagaggactttgaggacatagttaactattcactaactgtatctgaatttgagagggactggaagcaaatggttgaggactaccacctagaaaacaacaagtatttcagcaaaatgtgggaaacaagagccaggttcataccagtatatttcaaaaatgacttcttcccattcttgcaaagcacaggtagaagcgaggggacaaactcaaggtttaaagacaatgtgacttcgacttatagtgtgatcagcttcttgcgtgagtaccaaaggattgtggagcaagtgaatgtgtcagaggagtatgaggataatgaaagcaatcgtaaacgtccaaaagaactaatgtttggatatacaatagagaggcaagcacaagaagtctacaatagaaacatattcaagaaattccagttccagttgcaatcaacaccaaggctaagttacaacagaacatctaatctgcatactttcgaggtgtatccaaaatcaaaccaagaagaaacgccacataaaataaggaggtaccttgttatggctaacctaacatatggaatggaagagttcacttgtgtatgtggcaagtttgacaaggatggcattttatgctcccatatacttaaagtgatcattgaagaagggctcacgaaaatcccagagcaatacatactgaccaggtggaagaaaaaacagaaacaaatagatggaccactgctgcgtgcatcaatgccaacccacccagtgctaagacacaacctattgagccggaaagcagcattactcacatcagcagcagcaaaaacagagaaaactatggagtttatatgtgaagaattagacaaactacaagaaaaggaccttcgacaggacaaggaagacaatgctgcaaaacatacaggaccaatagttgaaaatctgcataaccctgaagcagttaaacagaaaggaaggccaaaaaaacctacaaggttaaagccactagtggaggaaatccgcatcaagatgaagaaggcagagcaaagaaaaacaagaaaacaagcaatgcagcagcaagcccacaaggaaaggagaagaagaagataaaaagaacagcaccttgaagaattactgctcccccctcctaacagaaccacgaacactcacactgaaaaagatgcagaaaaaatagagag

SEQ ID NO: 69296 - DNA, 2591 bp, Zea Mays
ctcggctcatcagtattattattattattattattcggctcctgctcatcagctgcagcagtcgtgctccggaccggagaagtcgaaatggaggagaggctgttcgccacggagaagcacggtggccgggcgctctacaggctccacgccgtcacggtgttcctggggatatgcctgctgctctgctacagggcgacgcacgtcccggctgccggctccggcggcagggcggcgtggctggggatgctcgcggcggagctctggttcggcttctactgggtcatcacgcagtccgtgcgctggtgccccatccgccgccgcaccttccacgacaggctcgccgccaggttcggagagcggctcccctgcgtggacatcttcgtgtgcacagcggacccgcggtcggagccgccgagccttgtcgtggccacggtcctgtcggtgatggcgtacaactacccgcccgcgaagctcaacgtctacctctccgacgacggcggctccatcctcaccttctacgctctgtgggaggcctccgccttcgccaagcactggctcccgttctgcaggaggtacggcgtcgagccacggtcgccggccgcttacttcgcccagtctgatgagaagcctcgtcatgatccgccgcacgccttgcaggagtggacgtccgtcaaaaacctatacgatgaaatgacggagcggattgactccgctgctcggacgggcaatgttcctgaagaaactagagcgaaacacaaagggttttctgagtgggatacgggtattacctcaaaagaccaccacccgatcgttcagatgggaaagacaaggctgtagctgacaacgaaggcaatgtgctgccgacgctggtgtacgtggcacgagagaagaggcctcagtaccaccacaacttcaaagccggggcgatgaacgctctgatccgagtatcgtccgtgataagcaacagccctatcatcctgaacgtggactgcgacatgtattccaacaacagcgacacgatcagagacgcgctgtgcttcttcctcgacgaagaaacgggccacaggatcgcgttcgtgcagtaccctcagaactacaacaacctcaccaagaacaacatatacggcaactccctcaatgtcatcaaccaggtggagctgagcggcctggacgcttggggcggcccgctgtacatcggcacgggatgcttccataggagggagaccctgtgcggcaggaggttcaccgaggactacaaggaagactgggacagaggaaccaaggagcagcagcagcaccgccaccgcgtcgacggcgagaccgaagcgaaggccaagtcgctagcgacctgcgcctacgagcacgacgacgacacgcggtggggagacgaggtggggctcaagtacggctgctcggtggaggacgtcatcacggggctggcgatacactgcagagggtgggagtcggtgtacagcaaccccgcgagagcggcgttcgtcggcgtcgcgccgaccacgctcgcccagaccatactgcagcacaagcggtggagcgagggcaacttcggcatcttcgtttccaggtactgccccttcgtctttggacgacggggcaaaaccaggttgccgcaccagatgggctactccatctacgggctatgggcgcccaactcgctgcctacgctgtactacgctgtcgtcccttcgctgtgcctgctcaagggcacccctctgttccctgagctcacgagtccgtggatcgcgcctttcgtctacgtcgcggtcgccaagaacgtctacagcgcgtgggaggcgctgtggtgcggagacacgctgagagggtggtggaacgggcagaggatgtggctggtccggagaacgacctcgtacctctacggcttcgtcgacaccgtcagggactcgctggggctgtccaagatgggcttcgtggtgtcgtccaaggtgagcgacgaggacgaggccaagaggtacgagcaggagatgatggagttcgggacggcgtcgccggagtacgtgatcgtcgcggccgtcgcgctgctcaacctcgtgtgcctggcagggatggcggcggcactggatgtgttcttcgtccaggtcgctctctgcggggtgctggtgctcctcaacgtcccggtctatgaagccatgttcgtcaggaaggacagggggaggatgccgttcccgatcacgctagcctccgttggctttgtgacgctggccctcattgtgccattcttttgactttgaggtgctaataatacgtgtacgggcacacgcacgttcgcatgtatgacgattatgggcaacaggcgtgtaataccactaatacctattaaacactccagtctccaagtgatccattgctacacgtgtgttcctcctgttctctatatgcatgagctgctgatggtgatacgatactgtcagatactgcaataagacgccaaacaagataagcatcggcaatcgagtggatcctcacaaccacagtggacgctatgcaggtctttggaggcagttgctatgcacactttgattggcgcttcacaaatagactttcgttatgatggc

SEQ ID NO: 69297 - DNA, 598 bp, Zea Mays
ctggcttcccagagggagccagagtctcctgtgatcttctccctgcgcgcgacccagccaggatcacgacggcgcctcagcgccgccgccctggtcgcaccaaatccccaccctacaatctgcgcaatctgcccggtacatacccgtggtggagggagttgatgtgccgctgctggacttctccaccgccattggaagggtggccacttgtgtgcctataattttagcttaggttatgtcatgccaagactcttaacataataactcctcaaatattcggtaaacaattattacatttgctgagcgattcaaacaacagaataccaaaaacacaaggcatcagcaatcaacaatgtatccaagaccaaagaggaaaggcattaaacctatttaaaaccaatttgaagtatgtactgttatatatattttgtatagtgatgagcatcagcaatcaacaatgaaatctgaaacaattaccaaacatgactacatcagtgactgtacatcagtttgttaacactgcatttcttttctacactatagtctgtacaattgtacatcaaccagcaagcggttcacataaatacataaaatgact

SEQ ID NO: 69298 - DNA, 760 bp, Zea Mays
ctggcttcccagagggagccagagtctcctgtgatcttctccctgcgcgcgacccagccaggatcacgacggcgcctcagcgccgccgccctggtcgcaccaaatccccaccctacaatctgcgcaatctgcccggtcaatctgcaacttcattgtcttcacgtcaatgccatgcaaaacagtagctcccaaacttttcagggctgttatattagacttcgctctgcagaatttgttgcccagtgcctctgtaaaagaggattgcccacaagatatagagagaaaatagataagtacaactaaaaaggatcaaaataggacataagttatccccttgatataaggtaagtgggacagcttagcgctacatgtgtcttgaaccaaaaagactgaagcaaataggaaattcagatactacatacaaattttctgggacaattttattaggtagcttgatatacgattatcgatgtcagtgggtggttgagtgagtgcatgcgtgaacaggggcttttaaggcacaataccacaatgatgcagctgtaatctataaagacaaaaacactgtagaagaagtagaagccgttacgtattaaagccaagcgaacagtatgattgttctagctagctattttctttagttttctttccagtctggttaaaaagcaattgatttgctcattttgcccgattattaaacttgatgaagagaagttgtcgatacattgtgttggaggttaacaatgtgcaaacaactggc

SEQ ID NO: 69299 - DNA, 1720 bp, Zea Mays
ctccttctaccccttcctggtgctaacatatggtatcagaaggttcatcctggttcctactctcccaattccgcggcgaccccgatccactgccatggcgcccaccgacgcgtcgttctccaaggtgctcgtcgaattgtagtagatggaacatcggctgaccggcgccatcgagggccactgcggcctcctcgagtgcaacttctacgatcgctgcgtcgccctcggccgccatctcgagcagctgcgacgacctcgcccaccacgtcgaggaggcggagcaacgtgcgaacgcgcgtctgatcacggtggagatggcgcaagcagagttcgaacaatggagtccggcgattgagaaacgcgtctcagatctatcgctggaggtgacgcgggctaggcgcttcatggaacccgagcatcgcgccccagccttccagcaaccgggtcttttcggaccgcacgggtcggcagccgagcgcccacctgccagcttcactgtcgacgggccttttggccaccgcttcgaacaacatcaccgggattgtgagtttggtaccgatcccaaacgcgcgaccccgtcaaggtgcaggaagaagcgaccgatttcactcaatctcggcatccggaggcatcattcaaccggacggctcagaagaccccttatacaattcatgaagcagccaagtccgatcggggccctaaaggcaactatgctattgctaaattcactgatgtgagcaagccctcttcacattcagataaactggcctctcttcgcagttatcggtgagcacgtggtctgtgtggtcgctgcgccgagaagtggtcgcatgggcacatgtgtgcatcatcagttcagcttcatgcattagaggaagtgttggagctggtcagtactgatggtgaagtagaaaatcccagagcctgtttctccttagatcatgatggctttatctcaagcaacatggactggcaccgagggtcctcaaacactgaaactgaagggttccattcagtccacacctctcctaatactggtagactctggcagttctcacacattttttagtacacgattgtcaccttctttgcatggtttctctaccaggccatttcctttatcagttcgactggccaacgaagatgttctctgctgtgaacatcagctattgcaagtggaatggtttatacaagatttcagtttcgtgtcagaccttctgttgttgcctatcacaacttataactggtcgtaggaatggattggcttgaagcacacagtcctatgagaattgattgggcaagcaaattgatggcaataccttataatggctctactgtttttctgcatggtatgcatccaaccgtgcctgttggcactactgtggaagttgtgttactggattccctacctgaaactaacaggtccttggaaggatcagaccaacttcaccctgacatttccaggatgttgaccgaatttgctgaagtcttttctgatccagtgggtcttccacctagccgcagttgtgatcatgctatacctctcatccaaggtagatggagtgttcagtgaaaacaatctcaagcggatcaatactattcttccatatccagtttaacaatatcaattggtatgaaattttgctctctgcactctgttttatcgtcggtgtgctgacggtggtacagtctacaggtgttgtcggttgctataggagcc

SEQ ID NO: 69300 - DNA, 3439 bp, Zea Mays
gcttggcccctgccaaattccaggctgctgcctcactcttgattttggcaatgatttgttggcagctcgagaatctgcgatcaaagattttcgcatttcgttctcgccaaatctcccagtttacaaggatcaatagtgatctgatgccttttctattgcatcccggcaaaaaaaccagtttttcccaccgatgccccagcgaggggggtcgcccccagttagacggcttcaggccctcaacagctacccaaacagcaacttcctcccaaattcttttgatgaaacgacattccacaaaaaggtgaagccccgattcctgggcagcacgacacaagacgcaagttggttcatggggccaattcctagctgaaaaacttgcattttggaggcgcccaattcttccagatgatgaggtcataatttgtgtgaactttaaaagatgaaatagagaaacaggtgtccgacatgctgagccaaggtgttattcaaaatagtaatagcccatttgcgtcaccagtattcttagtaaaaagaaggacaacacctggcatttttttgtcgattatcgctacttgaatgctttgactctgaagggcaaatatccagtaccagttttcgaccaacttatggatgaactatctcaagctcaatggttcagcaagctggatcccaaagctggctaccatcaaatattgttgcaaccgagtgaagaatacaagacaacctttcagacacatatatgtcattttaaatttagagttatggtctttggtttagttggggtttcaaatactttcttccaagctatgaatgaaactctagctctagtccttcgcaaatcagctttggttttctttgatgatattttgatctatagtagatcttttgctgaccatttacaacatttaaagacagtcttacatcttttgcagcaagatcattggaaagtgaagctctctaaatgtgactttgccaaaacagaactcgtctagttaggccgtattatcagccatcagggtattgctacagattctaaaaagatcgctgccattgctaattggccgacacctacttcagtaaaggaactgagaatcttcttgggacttgcaggcttctaccgaaaatttgtgaggcactttgggataatcagaaggccccttatcagacgtttttaagaagcataccatattcatctagacatcaactcaccaacaggatcttgatactttgaaacaagctctgatttttgctcctgtcttggctttacccgattccactcaacctttttgtatctacatagacacatgttccaatggtataggtgtagtcctcatgcagaatggccaccctttagcttacttgagtcgagctcttggaccaaaaactcagggcatatccatctataagaaggaatacctagcaatacttatggcagtcgcgcattggaggtcttatctgcagttagctgagtttgtcattttcaccgaccataagagtttaacccagcttaatgagcaacggctgcataccttgtggcagcaaaaagtttactccaaattagctggtcttcagtacaaaatcatatataaacaacgttgtgagaatgttgcggcagatgccctatcccgacggggccaatctgtggaatgttcgtccatttcacaatatacaccctcttggattcaggaggttattactggatatgctcaagactcttctgcccaagaattgttgtccaagcttgcatgatagtccatacaccttgcatgatagtcttatcctctacaaagggcgtatctggcttgggaataatcgagatctccatctcaaggttatttctgccatgcattcatctgctattgagggacactctgggattctagtcacttatagtcgcctcaaacaactattccattggctaggcatcaagcaaactgttcatgactatatcagatcttgctctatatgtcaacaagctaaacctgatagagtcaaatacccaggtctgcttatgcctcttccagttccaccacatgcttggcacacaatttccatggatttcattgaagaccttcctatgtccaccacttttagctgcaccatggtagttgttgataagtggtctaagtatggtcatttcatacccttggctcacccattctcagcacctaaagtggccaaagtgttcttggataatgtctacaaattacatggactacctgtagtgatcatatcggaccgagataagatcttcacgagtgccttttggcaggaaccattccttttgtcagacaccaaactcaatatgtcatctgcatatcaccctcagtctaacggacaaactgagtgcgttaaccaatgcctcgaaacatttctcaggtgttttgtccatgcttgccccaagaaatggtcccaatggcttgctgtagaagaattctggtacatttcttgtgcgcatgtaggtctgggcaaatctccatttgaggtactctatggtcacacaccgcgccattttggaattactgatgtagctgccatctctattctagatttacagacttggatgcaagaacgtgagcttatgcagaagcttatcaagcaacatctactgcgtgcttaagatcacatgaagaaacaggctgataagaatcattcggagagggtatttgttgtccatgattgggtattcctaaagctccaaccgtatgtgcataccttagtagccactcgtgctcatcacaaattggctttcaaatttttcggcccctttcagatcttcgagcaaatcagcccagtcgccgacaagttgcagttgccaaccatcgcagcaatccaccctatcttccatgtctctcaattgaaagctactgtgggccacaatcagatcgctatttataccttaccaggtggtcattgcaacttgcaagtgcccatccagatcctgaaccaccgtaataccgtatgtttgaacggggtggtactatggtggagcaagtgaaggttgtgtggtctggtctggacaccgcgctagcgagctggaaagacgttgtagccctacgtgatcaatttccccgcgcacctgtttgggacaagcaggtcttgaaggtgagggtgaggtggatgtcaacaacacaaccatcggcgctgaagacacagtcgagagtggcgggaaggcagtaggcacagagaaccaaacgtgtccgtcggccaaattctaagctatatcggccaatgtgggccaaatgagtgggttgcgccgcagtacactgtacatgctcctatataaggaatgtcttgtaataagggagacattattgaactaagaaccaatatactgagacgttgtcgtgctttcatcgcctacctcgaatcttcctttctccctgcccatgccagtacctcccccagtcccccttcctccttcgacccattcttggtg

SEQ ID NO: 69301 - DNA, 2465 bp, Zea Mays
ctagtccctacccggctctctccctcccccctctctctaaaaaaagtagcgcccggagaaccgagaggctggagaaataaaggcggaaagagggagggaaatctcactttgttggggattctttcctccgtttccgactcctttgttctcttaagtgttcttggttagtggaatggaagctcagcagccccatttatgcccccgagagcctcgtcgttcccctcgtgtgtaggtgtagcctttcactcggttggtggaagggcgaggcacagaagaacatcgataaagggtgtgtctattttttagctcttcgtgttcttgtaggaggaattcccgttcacatgatccgtgcctgtacctgacgggccttgtcgcgctctgctgcttcgctttcggggagaggaggactcgactcaaatcacttggtagcggagacgtcgccctttctagttcagtcgagagatatttctggcatggccggcgcaagcaaccatggatccctcaccgacgaatggttgccgccccctacaccaagcccaagaagtctcgtgtcaagctttctgaatgaagaattcagccccgggccattctctggtcttttcagtaaacatggcgccaatagaccccatgatcaatccgaaaagggcagaggagctctgaattcgagcgaggagttccctactcatgctgtcaaagacccatttcaaaagggtttctccctggagccaaatttgttcagtgctaatcatatatcaaactccaatggtggtttggcagagcgcagggctgcaagagcaggtttcagtgtcccgaaaattgatacttctcgagttggttcatcagcagttattcgatctcctgtgtcaattccacctggtctaagtccaactacactactggagtctcctgtttttctttacaataaaatggcacagccttctccaaccactggcacgttgccatttttgacggctacgaatgataagtcgacaataccaccagctaccaagataactgaagattctgcagtttataatgatgtgttttctttccaaccccacttaggttctaaagaaacaggtttctctactgcagaaaaggactatggcgcctatcagcaaaagcattcattgtggaatattcatcagcaggaatccagtcttcagtcaagttttaccgcagtcaaggacaacactagtgcaacaattggtgaaacgaagacatctagctccatgttcagtgatagtcactattcagctgaccaacagcaaggtgaagagacaaacatgaaggagcaaggcaaaggtgtcgaggctagatcagctgcttttcttcctgcaccagtgcataatgatgcatctctcctggattctcaagatgcagttgatgtctcgtcaacgctgtctaatgaagaggacgagagggcaacacatggcactgtttctatagagtgtgagggtgatgaagatgagactgaatctaaaagaaggaagttggaattagatgctttaggagctattgctattgctactacctccaccaccagtaccattgacatgggccctgcatcctcaagagctgtccgggagcctagggttgttgttcagaccacaagtgaggtagacattcttgatgacggttatcggtggcgtaagtatggacagaaggagctactacaagtgtacacaccctggctgttcagtgcgcaagcatgtggaaagagcatcacatgatctgaaatcagtcatcacaacatatgagggaaagcacaaccatgaagttccagcagccagaagtagtgggcaaggcagttctggttctggcagcggtccatctgcaccacaagctggtggttctcaccgtaggcaagaacctgcacaagccagcttcgctcactttggtacatctcctttcagctccttcggtctcgcaccgagcggacagttgggaccaacaactggtaatttccgcttcggcatggttccgccaggcgcgacgatcccaatgccctctctaggatcacttgcccctacaaaaatgattggaaatccatcagctatgcaggggtacccagggcttatgatgccaggagagccaaaggtagagcctttctcgcgaccacacttcccaacgtcaattgcacctccgccagcttaccaacagatactgagcaggcctccttttggtcatcagatgtaaataataggaaggggatagatttgcttcggcttgtatacatgatagctacgctgcaacatggctttgttctagttttgttgatggatcgtccgatttttacttctttttaaattttcagctcacggctcacgcatttctttgaagcaaagatggctgaggatgataccctgtcgtgatgtgtaatcagggaaaggatacttttcgtccttttgatactatcgaaatttgaaaatgatcaatccgattttttagttgtggatacaaat

SEQ ID NO: 69302 - DNA, 2576 bp, Zea Mays
atcccctcctcggtcaaaccgcctcactctcctactcttctctccctagtccctacccggctctctccctcccccctctctctaaaaaaagtagcgcccggagaaccgagaggctggagaaataaaggcggaaagagggagggaaatctcactttgttggggattctttcctccgtttccgactcctttgttctcttaagtgttcttggttagtggaatggaagctcagcagccccatttatgcccccgagagcctcgtcgttcccctcgtgtgtaggtgtagcctttcactcggttggtggaagggcgaggcacagaagaacatcgataaagggtgtgtctattttttagctcttcgtgttcttgtaggaggaattcccgttcacatgatccgtgcctgtacctgacgggccttgtcgcgctctgctgcttcgctttcggggagaggaggactcgactcaaatcacttggtagcggagacgtcgccctttctagttcagtcgagagatatttctggcatggccggcgcaagcaaccatggatccctcaccgacgaatggttgccgccccctacaccaagcccaagaagtctcgtgtcaagctttctgaatgaagaattcagccccgggccattctctggtcttttcagtaaacatggcgccaatagaccccatgatcaatccgaaaagggcagaggagctctgaattcgagcgaggagttccctactcatgctgtcaaagacccatttcaaaagggtttctccctggagccaaatttgttcagtgctaatcatatatcaaactccaatggtggtttggcagagcgcagggctgcaagagcaggtttcagtgtcccgaaaattgatacttctcgagttggttcatcagcagttattcgatctcctgtgtcaattccacctggtctaagtccaactacactactggagtctcctgtttttctttacaataaaatggcacagccttctccaaccactggcacgttgccatttttgacggctacgaatgataagtcgacaataccaccagctaccaagataactgaagattctgcagtttataatgatgtgttttctttccaaccccacttaggttctaaagaaacaggtttctctactgcagaaaaggaatccagtcttcagtcaagttttaccgcagtcaaggacaacactagtgcaacaattggtgaaacgaagacatctagctccatgttcagtgatagtcactattcagctgaccaacagcaaggtgaagagacaaacatgaaggagcaaggcaaaggtgtcgaggctagatcagctgcttttcttcctgcaccagtgcataatgatgcatctctcctggattctcaagatgcagttgatgtctcgtcaacgctgtctaatgaagaggacgagagggcaacacatggcactgtttctatagagtgtgagggtgatgaagatgagactgaatctaaaagaaggaagttggaattagatgctttaggagctattgctattgctactacctccaccaccagtaccattgacatgggccctgcatcctcaagagctgtccgggagcctagggttgttgttcagaccacaagtgaggtagacattcttgatgacggttatcggtggcgtaagtatggacagaaggttgttaagggcaatccaaatccaaggtcacactttcactaccatttcttacactaaatgactaaactgtatccctccatcccctgaagctagtaacattgattcacttgcatgcaggagctactacaagtgtacacaccctggctgttcagtgcgcaagcatgtggaaagagcatcacatgatctgaaatcagtcatcacaacatatgagggaaagcacaaccatgaagttccagcagccagaagtagtgggcaaggcagttctggttctggcagcggtccatctgcaccacaagctggtggttctcaccgtaggcaagaacctgcacaagccagcttcgctcactttggtacatctcctttcagctccttcggtctcgcaccgagcggacagttgggaccaacaactggtaatttccgcttcggcatggttccgccaggcgcgacgatcccaatgccctctctaggatcacttgcccctacaaaaatgattggaaatccatcagctatgcaggggtacccagggcttatgatgccaggagagccaaaggtagagcctttctcgcgaccacacttcccaacgtcaattgcacctccgccagcttaccaacagatactgagcaggcctccttttggtcatcagatgtaaataataggaaggggatagatttgcttcggcttgtatacatgatagctacgctgcaacatggctttgttctagttttgttgatggatcgtccgatttttacttctttttaaattttcagctcacggctcacgcatttctttgaagcaaagatggctgaggatgataccctgtcgtgatgtgtaatcagggaaaggatacttttcgtccttttgatactatcgaaatttgaaaatgatcaatccgattttttagttgtggatacaaat

SEQ ID NO: 69303 - DNA, 2462 bp, Zea Mays
tctgagcacaatacttattactacagtggtatatatgtgctatatgtatcacaagtaataccaatggtcacatcaattagaaatcctaacacagatcaaactcaataacctggtgtgccctcgcccaatgtatatgagcaatgcaaaggacgggagcctaattgataagcaactaacaattatttctagagtgggatgtacgcactacatttgtagtggaaataagattagctcatgtgattccaagtatacaataaaaagaaaaagtatggagaatatcgtaggaaactgtattaaaaacttatcatcggaaacataatagtccaatgcaaagaaagaaaaaccaactaaaactcaacttaatcatgcatatatatatatagttattagcacatatgtacttcactaggagttaaggagaggctcatgcatgatcaccgcctactcgtgcttagcttttgatcattaaaagttatgtaattaaatatttataggaatagtaatttttctaaatgttcaaggaaaaaaataagagcagctagctcctgtctcacgtttcgtcaaacaataaggacaagttcagaagccaaggcatatcatttattctctaagtgacatatacatgtgtagaatggtagcatatattgattggctataatgggtttggccaactaacagtaaagaaatccctatctggagaagcggtagacaaatttcttcattcatgaactcaatttcttcattcatgaactcaattttgcccttagtagttgagtggtcccagaaacaactcaatttgaatactgctcttattgctattattttcaaagcaaaatttacaaaaccaatcaaaagaagaatatagaaaactcaagtgacctgacctacagttggttgcttctaagatagatgtcagaattcagaagcaagttcttcttacctttttcctggcctcagcctcgtccttctctgcttccaaagctttatgtttctcctctaattttgtgtagaactgggtaataacaacactgtcactaccagaccctttttggaacagaagtgcttgctaggagatacctaggtaataacaacactgggtatgaagctacatatatcctcaaaaccacagttacacaatggcgccacatgtttttttccagaaagaatggagggggtattcctgtgtgccatcagacacaaacacattcagataataaactctatcctgcataatggacatctgtttacctttttctgaaatttcagaagcagtgcgagctttgagctgttccataaaattcttcaaatttcttgactgtttctgttcagctagagactggataataatgcaagattgttcttctaaatgtctcttggcagaaccaatttattttcaatttcttgacaatgatgctgcatattcagtttagcagtatcaacaaatgagcaggactcatgaaattttcccagtacaacagtaagaaatatcaaagcttcccaactctccactgtttgtagctcaagggacctataactacccagtaactcattctgcagttgtccgataagaatatctttggattctaaatctgatgggtaaattttgtaaccatccaaagaaaatatttatatggaatgtccggggtttgaattctccatccaagcaacaatctgtacgaactttcgttgattccgttggagcagacattgtatgcctgcaagaaaccaacatacaaaatatttctagaggaactatctttgctattcttggagtgacttttgaagaattcctctttttaccttcctttggggctagcggtggtattcttttagcctggaaaaggcatgtgcaagcaacagggcataacagagtgggctcttattctgtccaattccagcagtcaaatggccaaccttagtggttatccggtgtctatgggcttcgggacattgatgacaagattccattcttccaaaagcaactgctatggtaaaaaaggtttcatttttagtctttttggccaaaattggagggattccaggaagtagtctaggaagcgtgggcatcgggtggtggtagctcctgccccttcctgactcttaagttgaaagccactgcacgtgcccttcagaggtggagtgataaaagaatgccgaggttttggccccagttcattgatttgcttgttggtaccgctattgaccatccaatgcagtgttctcaaggtccaaagtacgtggaccttcagttggtgtaatcagaagcaatatccaagatattcattatgcacttctacaaaatgtaatgtaatcctaagtgttcatccttttatttttcttgagtgaatgaaatgttactaaaattattcattttccagatatttaccatgtgccatattctttttatgttgtgttacttcgtggtagttgcaaagtgtgtctgtgtgtgtggatggtctagg

SEQ ID NO: 69304 - DNA, 3412 bp, Zea Mays
tctgagcacaatacttattactacagtggtatatatgtgctatatgtatcacaagtaataccaatggtcacatcaattagaaatcctaacacagatcaaactcaataacctggtgtgccctcgcccaatgtatatgagcaatgcaaaggacgggagcctaattgataagcaactaacaattatttctagagtgggatgtacgcactacatttgtagtggaaataagattagctcatgtgattccaagtatacaataaaaagaaaaagtatggagaatatcgtaggaaactgtattaaaaacttatcatcggaaacataatagtccaatgcaaagaaagaaaaaccaactaaaactcaacttaatcatgcatatatatatatagttattagcacatatgtacttcactaggagttaaggagaggctcatgcatgatcaccgcctactcgtgcttagcttttgatcattaaaagttatgtaattaaatatttataggaatagtaatttttctaaatgttcaaggaaaaaaataagagcagctagctcctgtctcacgtttcgtcaaacaataaggacaagttcagaagccaaggcatatcatttattctctaagtgacatatacatgtgtagaatggtagcatatattgattggctataatgggtttggccaactaacagtaaagaaatccctatctggagaagcggtagacaaatttcttcattcatgaactcaatttcttcattcatgaactcaattttgcccttagtagttgagtggtcccagaaacaactcaatttgaatactgctcttattgctattattttcaaagcaaaatttacaaaaccaatcaaaagaagaatatagaaaactcaagtgacctgacctacagttggttgcttctaagatagatgtcagaattcagaagcaagttcttcttacctttttcctggcctcagcctcgtccttctctgcttccaaagctttatgtttctcctctaattttgtgtagaactgggtaataacaacactgtcactaccagaccctttttggaacagaagtgcttgctaggagatacctaggtaataacaacactgggtatgaagctacatatatcctcaaaaccacagttacacaatggcgccacatgtttttttccagaaagaatggagggggtattcctgtgtgccatcagacacaaacacattcagataataaactctatcctgcataatggacatctgtttacctttttctgaaatttcagaagcagtgcgagctttgagctgttccataaaattcttcaaatttcttgactgtttctgttcagctagagactggataataatgcaagattgttcttctaaatgtctcttggcagaaccaatttattttcaatttcttgacaatgatgctgcatattcagtttagcagtatcaacaaatgagcaggactcatgaaattttcccagtacaacagtaagaaatatcaaagcttcccaactctccactgtttgtagctcaagggacctataactacccagtaactcattctgcagttgtccgataagaatatctttggattctaaatctgatgggtaaattttgtaaccatccaaagaaaatatttatatggaatgtccggggtttgaattctccatccaagcaacaatctgtacgaactttcgttgattccgttggagcagacattgtatgcctgcaagaaaccaacatacaaaatatttctagaggaactatctttgctattcttggagtgacttttgaagaattcctctttttaccttcctttggggctagcggtggtattcttttagcctggaaaaggcatgtgcaagcaacagggcataacagagtgggctcttattctgtccaattccagcagtcaaatggccaaccttagtggttatccggtgtctatgggcttcgggacattgatgacaagattccattcttccaaaagcaactgctatggtaaaaaaggtttcatttttagtctttttggccaaaattggagggattccaggaagtagtctaggaagcgtgggcatcgggtggtggtagctcctgccccttcctgactcttaagttgaaagccactgcacgtgcccttcagaggtggagtgataaaagaatgccgaggtaagggctgtaatttgtgtgatcgtttttatcactctttttatcgaattgttacatccagagtcatcactgtactctaaggtcccgtttggttcctttagtctagggactaaagtttagttaggagactaaagtttagtcctatcatgtttggttctagggactaaaactattcaaaacacattaaatgaattataaggggattaaaataccccttagcattctcccaccataagtgcagctgaaataaaggaggggcaaaagtggaatttatatggtttagtctcttttagtcaccccttgagggactagagactaaaacagtttagtcccagttttagtcccacactttggcaatttagggactaaatgaggactaaaatagagggactaatctttagtccctcaaaccaaacgaggtctaaaacagtctgaacaatagagtgttttcgcttacacaattacaagtgtactacgagtcatagatagttgtgaaagtgcctgaatgtacttccgaattagtataatggacgtttagcatattatatatgtttctgacttaaaagttattgcaagctgaaataacgaacaaagtgtgtccacccttgtacattgtctgtttctcagcacacatcaagcaacttccatcctcaatctctctgctaagtcaggacgcattaaaagcttgttttttggacaatagccacaaaaccacatgtgaaccgtatattgcctgttagtttatacatgtgaatatataaaatatatgatgcatgtgttactagaattttcttattgtttttagtagcatatagtggtgggtttcgaagaacaatatggttttatggaaccaactcaatagaattaggattagatggattgcggtacgaaatgggagttcatacttcatataactatttcttattcgtgctgatattttttggtgttcatatacctattcattatgcgtcgtttgcttggtacttgcacatgattctgtcgaattgtccgttacatggctcacaggttttggccccagttcattgatttgcttgttggtaccgctattgaccatccaatgcagtgttctcaaggtccaaagtacgtggaccttcagttggtgtaatcagaagcaatatccaagatattcattatgcacttctacaaaatatatttaccatgtgccatattctttttatgttgtgttacttcgtggtagttgcaaagtgtgtctgtgtgtgtggatggtctagg

SEQ ID NO: 69305 - DNA, 573 bp, Zea Mays
gtgtcggatcacagaacatcgggcaagcgcgcctactagctattaacagtaaaagtccacgagaaagggagggaacaaccgcgagcagcgaatcaagccaagggtacatacggcgatggaggcggccaaggagcggcagcagcggaaggccgccggcgagggcgacagcaccacggtgcagctgccgacggagacgagcccgtacgtgcagtacgagggcctcgaggactacaagatgcgcggctacggcgcgcagggccacctccccgtctccgacgtaccccacggcggctccggcactgaggcgcccaccgtccccggcactgccatccccgtggcggagccgaagcgccgcgacgacgtccagcctcagcgagacctgggaggagacggaggagggggcgtccggcgccccggggacacgtccaccgacgccatcaaccgccacggcgtgccgtagctttagcttggctttggctgggtctcgtccgggcgcgcgcgtctccaggagaccaggacacatggccgagcctctcgtcaatgccgtgatcatcatcgacttgccctatcaac

SEQ ID NO: 69306 - DNA, 867 bp, Zea Mays
gatcacagaacatcgggcaagcgcgcctactagctattaacagtaaaagtccacgagaaagggagggaacaaccgcgagcagcgaatcaagccaagggtacatacggcgatggaggcggccaaggagcggcagcagcggaaggccgccggcgagggcgacagcaccacggtgcagctgccgacggagacgagcccgtacgtgcagtacgagggcctcgaggactacaagatgcgcgggtaccccacggcggctccggcactgaggcgcccaccgtccccggcactgccatccccgtggcggagccgaagcgccgcgacgacgtccagcctcagcgagacctgggaggagacggaggagggggcgtccggcgccccggggacacgtccaccgacgccatcaaccgccacggcgtgccgtagctttagcttggctttggctgggtctcgtccgggcgcgcgcgtctccaggagaccaggacacatggccgagcctctcgtcaatgtgagcctgtccgtgtgttggatgtaaaaccatacgcaagttctgtaactaaaaataatgggcgctttatgtcactgcaataacttgatacgagtgactagtgctgggaatatgggctagactttttgggccagtacgaacacggtctaaaaacaggagctcaaagcacagttcgacacgaaataatatgtgtcgcgctaggccggacctcaaatttcgatccgtcaggccccagtatggcccacatagataggccgggtttaggccggcacgacccaattagatctaatttgtttaattttttaattttagtaagatatcgtggagtttatatatggagtttatgtggtcaaatgatgttagaa

SEQ ID NO: 69307 - DNA, 2045 bp, Zea Mays
ctccagcatgctctggagctcaccgtctcaccgagtccaaaacccagaaccccgcggtcccgactctcgccatcggcgactcgccaccgttcatcccgcctcccgaattcgcagcttgtaaatggttaccgcctctctcttctccctcccatcgctccgtgtcctctcccgcacctctgcccatggcccccggttccagatcctcgccgctaggaagccagtggagtcctccaccgccaccagcggcagccgcagaggcggaagcaagggggctgggcttctgtcggtgttggaccgcgcgatggcggacgaggaggagtaccggcgcgcgcgcgcccaggtgcagcgcaagggcgtggaggtggaagggtacgccatcgaagggatctcggtgggcgggcacgagacctgcatcaccgtgccgtcgctgaacgtggcgttcgacatcggccgcgggccgcagttcgccgtcagccaggactatctctttatcacccacgcccacctcgaccacatcggtggtcttccaatgtacatagctacccgtggcctctacaacttgaagcctcctactgtgtttgtaccaccctgcatcagggatgatgtcgaggatctgcttcaagtccatcgtagaacgagtcaaattgagctaaaagttgaattagttgcactagatttgggagagacatatgaaatacgtaatgatcttgttgccaggccatttcaaacgtaccacactatacccagccagggttatgtcatctactctattcgaagaaagttgaaaaaacagtatgctcatttgaagggtagtcaaataatgaaactgaagcaatcaggaaccgagattacggataccatactgtacccagaagttgccttcacaggagatacaaagtctgattttattcttgacccaagaaatgcagatgccttgagagcaaaggttctcataactgaggcaacgttcctagatgaccatgttgatgttgagcatgctagggaacatggccacatgcatctttctgagataatggagcatttccagtggttcaggaacgaaacaatcgtactcactcatttctcaaatcgatatagtcttgaggatattcgccaggctgtttccaggctacaacctaagctaaattcaaagacattctccagtttccaaaacaaggtggaagaaccgtgtattacaatgctttggggaactggacagcgggatacgcaaagtgcatatactcatgctcatggagtcctgcatagaatggaatatgatcgacaggccctgaagtggcatatgggacatccgatcaatggagaagctctccctgacgtttggagagttgttttcgtaagcgcagtccatgttaagtgggcagaccttcggagaatgcctccgaggagatggcgccccaggtgcatcgccatcgatgctctgtggagaatacaggatgtcttcaagagtgccttgccttgcttctgccctgctcctggtcctgaccgtgttggtctcacggcgacgcggcttcccttccaggcacctgggcttcatcctgtccacgatggatctcacatagcaagaaccacagctctgtgagcccatctttttcccctcctatcgtggatgctagatggaactgtatgccttgagcattcgtggcagtgctctcctaaatacatatttataggccatgatgattagagcaaagactcgtgaaagagacagaggtcacttggtttggatgggattcggcaagtccattagtttttaaagtggaaaaattcatacatagttctggtggtgttattggtgtcattgtttgctcccttgatgccacctaggcagtaacggagtatgtagaagagctacttggatctgcgacaagaaaaatgtgtatggtagtggtagtacgcaactatgaaagtttgtcgtttcatgtgtctagcatattgcgattgtatctgtattggaagtccaagtgacgcagggaacccataggatatctccagtttatcccgctgttcctttgcactgcataaag

SEQ ID NO: 69308 - DNA, 2374 bp, Zea Mays
aatacaactcgttatcctccagcatgctctggagctcaccgtctcaccgagtccaaaacccagaaccccgcggtcccgactctcgccatcggcgactcgccaccgttcatcccgcctcccgaattcgcagcttgtaaatggttaccgcctctctcttctccctcccatcgctccgtgtcctctcccgcacctctgcccatggcccccggttccagatcctcgccgctaggaagccagtggagtcctccaccgccaccagcggcagccgcagaggcggaagcaagggggctgggcttctgtcggtgttggaccgcgcgatggcggacgaggaggagtaccggcgcgcgcgcgcccaggtgcagcgcaagggcgtggaggtggaagggtacgccatcgaagggatctcggtgggcgggcacgagacctgcatcaccgtgccgtcgctgaacgtggcgttcgacatcggccgcgggccgcagttcgccgtcagccaggactatctctttatcacccacgcccacctcgaccacatcggtggtcttccaatgtacatagctacccgtggcctctacaacttgaagcctcctactgtgtttgtaccaccctgcatcagggatgatgtcgaggatctgcttcaagtccatcgtagaacgagtcaaattgagctaaaagttgaattagttgcactagatttgggagagacatatgaaatacgtaatgatcttgttgccaggccatttcaaacgtaccacactatacccagccagggttatgtcatctactctattcgaagaaagttgaaaaaacagtatgctcatttgaagggtagtcaaataatgaaactgaagcaatcaggaaccgagattacggataccatactgtacccagaagttgccttcacaggagatacaaagtctgattttattcttgacccaagaaatgcagatgccttgagagcaaaggttctcataactgaggcaacgttcctagatgaccatgttgatgttgagcatgctagggaacatggccacatgcatctttctgagataatggagcatttccagtggttcaggaacgaaacaatcgtactcactcatttctcaaatcgatatagtcttgaggatattcgccaggctgtttccaggctacaacctaagctaaattcaaaggttgttgctctaacagaaggcttcaaatctgattatagataagtgtatataagtagaacagcttgtgtttctctttctagccctgatttactgaatgtatgttaacatcaggaaccgattaatttgttaaagaaaaaaaggtgcctacttaagtacttatagatatgtctgttgtgtgctcaactgtaattccattattatttatctatttatttcctgtccgaagttcagaactttgtacagctaattgaacattttgacaagaaaggtacttgcacaagttggagatctgtaaaacataaaattttctcagacattctccagtttccaaaacaaggtggaagaaccgtgtattacaatgctttggggaactggacagcgggatacgcaaagtgcatatactcatgctcatggagtcctgcatagaatggaatatgatcgacaggccctgaagtggcatatgggacatccgatcaatggagaagctctccctgacgtttggagagttgttttcgtaagcgcagtccatgttaagtgggcagaccttcggagaatgcctccgaggagatggcgccccaggtgcatcgccatcgatgctctgtggagaatacaggatgtcttcaagagtgccttgccttgcttctgccctgctcctggtcctgaccgtgttggtctcacggcgacgcggcttcccttccaggcacctgggcttcatcctgtccacgatggatctcacatagcaagaaccacagctctgtgagcccatctttttcccctcctatcgtggatgctagatggaactgtatgccttgagcattcgtggcagtgctctcctaaatacatatttataggccatgatgattagagcaaagactcgtgaaagagacagaggtcacttggtttggatgggattcggcaagtccattagtttttaaagtggaaaaattcatacatagttctggtggtgttattggtgtcattgtttgctcccttgatgccacctaggcagtaacggagtatgtagaagagctacttggatctgcgacaagaaaaatgtgtatggtagtggtagtacgcaactatgaaagtttgtcgtttcatgtgtctagcatattgcgattgtatctgtattggaagtccaagtgacgcagggaacccataggatatctccagtttatcccgctgttcctttgcactgcataaag

SEQ ID NO: 69309 - DNA, 1644 bp, Zea Mays
ctccagcatgctctggagctcaccgtctcaccgagtccaaaacccagaaccccgcggtcccgactctcgccatcggcgactcgccaccgttcatcccgcctcccgaattcgcagcttgtaaatggttaccgcctctctcttctccctcccatcgctccgtgtcctctcccgcacctctgcccatggcccccggttccagatcctcgccgctaggaagccagtggagtcctccaccgccaccagcggcagccgcagaggcggaagcaagggggctgggcttctgtcggtgttggaccgcgcgatggcggacgaggaggagtaccggcgcgcgcgcgcccaggtgcagcgcaagggcgtggaggtggaagggtacgccatcgaagggatctcggtgggcgggcacgagacctgcatcaccgtgccgtcgctgaacgtggcgttcgacatcggccgcgggccgcagttcgccgtcagccaggactatctctttatcacccacgcccacctcgaccacatcggtggtcttccaatgtacatagctacccgtggcctctacaacttgaagcctcctactgtgtttgtaccaccctgcatcagggatgatgtcgaggatctgcttcaagtccatcgtagaacgagtcaaattgagctaaaagttgaattagttgcactagatttgggagagacatatgaaatacgtaatgatcttgttgccaggccatttcaaacgtaccacactatacccagccagggttatgtcatctactctattcgaagaaagttgaaaaaacagtatgctcatttgaagggtagtcaaataatgaaactgaagcaatcaggaaccgagattacggataccatactgtacccagaagttgccttcacaggagatacaaagtctgattttattcttgacccaagaaatgcagatgccttgagagcaaaggttctcataactgaggcaacgttcctagatgaccatgttgatgttgagcatgctagggaacatggccacatgcatctttctgagataatggagcatttccagtggttcaggaacgaaacaatcgtactcactcatttctcaaatcgatatagtcttgaggatattcgccaggctgtttccaggctacaacctaagctaaattcaaaggttgttgctctaacagaaggcttcaaatctgattatagataagtgtatataagtagaacagcttgtgtttctctttctagccctgatttactgaatgtatgttaacatcaggaaccgattaatttgttaaagaaaaaaaggtgcctacttaagtacttatagatatgtctgttgtgtgctcaactgtaattccattattatttatctatttatttcctgtccgaagttcagaactttgtacagctaattgaacattttgacaagaaaggtacttgcacaagttggagatctgtaaaacataaaattttctcagacattctccagtttccaaaacaaggtggaagaaccgtgtattacaatgctttggggaactggacagcgggatacgcaaagtgcatatactcatgctcatggagtcctgcatagaatggaatatgatcgacaggccctgaagtggcatatggatctttgcgcgccgggatgatgaagac

SEQ ID NO: 69310 - DNA, 1999 bp, Zea Mays
gcgggctgcggcctagccacagccacgtcagcaatgtcgaaagtcgaaaccaaccccactccacgtctcccccaggagaagcgaccattcaaagccgccgggagctcggcgtcaccgccgcgagctcgacacctcgacacctcgtgccgccgcagcgcttgctttcgtcccccttacgccactcccacttggccacttcagccaccatctccctgaagctagtggctaacctcctcaccgccatgggcacccctctcctcatcccccttctcgtcaccctccagctgttcactacctcctcccccgcggtcgcgtcgtcacacatctccgccatcatctcgcagtcgggcctcgacttcgccaaggacctgctcgtatcccatgccgttgcgaccctcacgcccatgaacgtgccggacatcgagaggaccatgagcatacccctcgtgggcaccgtccgcatggccgcatccgggattgtgctccacggcctcgccgtcaccaactccaccgtcgctgtgggggacgcgggtgttgtcgtggccgcctcgttggccagcgcgaacctcaccatggagtggaactactcgtatgacgcctggattgtgaccatatccgacagcgggaatgcttcggtccaggttgaaggaatggaggttggtgtttccatggtcatgaagaatcagaatggatctatcaagctgtctgttacagaatgtagctgttatatggaggacttggacataacactaaatgggggagcatcttggttctatcaagtgtttatagatggtttcagtaatcatatcatatcatcggtggaaaatgcaattaagaacaaagtaatggaaggtgcactgaagcttgattctttcctgggaaacctcccaaagaaaattgatcttgatagtgttgctgcaatgaatgtgactgttgttaatgatccaatattcaagagctcctctgttgagtttgatatagatggcttgtttattccatctgatgaaactgctccgagagacatgcatcttggagatacccaatttgcattacctcttgggagctcctcaaaaatgctttggatttcattggatgaagatgtcttcaactccgtttcagctctctacttcaaggctggtttgctgcaacggatggtggacaagattcctgatcagttttttctgaacactgctagctggagatttttggttcctcgattgtatcgagagtttcctgacgataatatgctactgaatatctctgcagtttcgcctccctctgtgagaattaattcggttgatgtttatggagctgcagcagtatcagagaataatcttgttgggagagtggaattggactatttctcatttaccttaaagtggagcaaagttggcaaactccacaccattctagtgcagactgtgctgaggattttgctgaaaaaattgtttgtaccatatgtgaactcgtatctcaagcatggcttccggttgcccatcatcaagggtttctccgtcacagatgcatatatcctcacttcttactcaagaatgattgttagctgcgatgttgccttcattgagccagaggttctgtctcctgtccaagagtccaacaccaacgaagatttgtcatatgaggttctgtctcctgtccaagagtccaagaccaacgaagagttgaccaacgaagatttgtcatttgaggttctgtccagtttactgcttggatctgccaaaacatcgcaaccaacagcgtaaaattcatgtaaatagtaaagctattcatcagtttattgctttgtaaaatgtgtaaataactgtgtattgtgtgtgtagttttttttaaaaaagtttaccatgtccctacatgagagcacctttctttttctttttcttcagcctcacgatcagacttcttattttgcttcgcttctctatgaatataagattggcagaattcctaccagcacttagaaaaaataaagtttaaacttaac

SEQ ID NO: 69311 - DNA, 2027 bp, Zea Mays
gcgggctgcggcctagccacagccacgtcagcaatgtcgaaagtcgaaaccaaccccactccacgtctcccccaggagaagcgaccattcaaagccgccgggagctcggcgtcaccgccgcgagctcgacacctcgacacctcgtgccgccgcagcgcttgctttcgtcccccttacgccactcccacttggccacttcagccaccatctccctgaagctagtggctaacctcctcaccgccatgggcacccctctcctcatcccccttctcgtcaccctccagctgttcactacctcctcccccgcggtcgcgtcgtcacacatctccgccatcatctcgcagtcgggcctcgacttcgccaaggacctgctcgtatcccatgccgttgcgaccctcacgcccatgaacgtgccggacatcgagaggaccatgagcatacccctcgtgggcaccgtccgcatggccgcatccgggattgtgctccacggcctcgccgtcaccaactccaccgtcgctgtgggggacgcgggtgttgtcgtggccgcctcgttggccagcgcgaacctcaccatggagtggaactactcgtatgacgcctggattgtgaccatatccgacagcgggaatgcttcggtccaggttgaaggaatggaggttggtgtttccatggtcatgaagaatcagaatggatctatcaagctgtctgttacagaatgtagctgttatatggaggacttggacataacactaaatgggggagcatcttggttctatcaagtgtttatagatggtttcagtaatcatatcatatcatcggtggaaaatgcaattaagaacaaagtaatggaaggtgcactgaagcttgattctttcctgggaaacctcccaaagaaaattgatcttgatagtgttgctgcaatgaatgtgactgttgttaatgatccaatattcaagagctcctctgttgagtttgatatagatggcttgtttattccatctgatgaaactgctccgagagacatgcatcttggagatacccaatttgcattacctcttgggagctcctcaaaaatgctttggatttcattggatgaagatgtcttcaactccgtttcagctctctacttcaagctggagatttttggttcctcgattgtatcgagagtttcctgacgataatatgctactgaatatctctgcagtttcgcctccctctgtgagaattaatgtgggtagaattgatgccacagttgacttagatataacggttaatgttttggattttggtgagatagttccagttgcatgcttatcagtgtcggttgatgtttatggagctgcagcagtatcagagaataatcttgttgggagagtggaattggactatttctcatttaccttaaagtggagcaaagttggcaaactccacaccattctagtgcagactgtgctgaggattttgctgaaaaaattgtttgtaccatatgtgaactcgtatctcaagcatggcttccggttgcccatcatcaagggtttctccgtcacagatgcatatatcctcacttcttactcaagaatgattgttagctgcgatgttgccttcattgagccagaggttctgtctcctgtccaagagtccaacaccaacgaagatttgtcatatgaggttctgtctcctgtccaagagtccaagaccaacgaagagttgaccaacgaagatttgtcatttgaggttctgtccagtttactgcttggatctgccaaaacatcgcaaccaacagcgtaaaattcatgtaaatagtaaagctattcatcagtttattgctttgtaaaatgtgtaaataactgtgtattgtgtgtgtagttttttttaaaaaagtttaccatgtccctacatgagagcacctttctttttctttttcttcagcctcacgatcagacttcttattttgcttcgcttctctatgaatataagattggcagaattcctaccagcacttagaaaaaataaagtttaaacttaac

SEQ ID NO: 69312 - DNA, 2088 bp, Zea Mays
gcgggctgcggcctagccacagccacgtcagcaatgtcgaaagtcgaaaccaaccccactccacgtctcccccaggagaagcgaccattcaaagccgccgggagctcggcgtcaccgccgcgagctcgacacctcgacacctcgtgccgccgcagcgcttgctttcgtcccccttacgccactcccacttggccacttcagccaccatctccctgaagctagtggctaacctcctcaccgccatgggcacccctctcctcatcccccttctcgtcaccctccagctgttcactacctcctcccccgcggtcgcgtcgtcacacatctccgccatcatctcgcagtcgggcctcgacttcgccaaggacctgctcgtatcccatgccgttgcgaccctcacgcccatgaacgtgccggacatcgagaggaccatgagcatacccctcgtgggcaccgtccgcatggccgcatccgggattgtgctccacggcctcgccgtcaccaactccaccgtcgctgtgggggacgcgggtgttgtcgtggccgcctcgttggccagcgcgaacctcaccatggagtggaactactcgtatgacgcctggattgtgaccatatccgacagcgggaatgcttcggtccaggttgaaggaatggaggttggtgtttccatggtcatgaagaatcagaatggatctatcaagctgtctgttacagaatgtagctgttatatggaggacttggacataacactaaatgggggagcatcttggttctatcaagtgtttatagatggtttcagtaatcatatcatatcatcggtggaaaatgcaattaagaacaaagtaatggaaggtgcactgaagcttgattctttcctgggaaacctcccaaagaaaattgatcttgatagtgttgctgcaatgaatgtgactgttgttaatgatccaatattcaagagctcctctgttgagtttgatatagatggcttgtttattccatctgatgaaactgctccgagagacatgcatcttggagatacccaatttgcattacctcttgggagctcctcaaaaatgctttggatttcattggatgaagatgtcttcaactccgtttcagctctctacttcaaggctggtttgctgcaacggatggtggacaagattcctgatcagttttttctgaacactgctagctggagatttttggttcctcgattgtatcgagagtttcctgacgataatatgctactgaatatctctgcagtttcgcctccctctgtgagaattaatgtgggtagaattgatgccacagttgacttagatataacggttaatgttttggattttggtgagatagttccagttgcatgcttatcagttcggttgatgtttatggagctgcagcagtatcagagaataatcttgttgggagagtggaattggactatttctcatttaccttaaagtggagcaaagttggcaaactccacaccattctagtgcagactgtgctgaggattttgctgaaaaaattgtttgtaccatatgtgaactcgtatctcaagcatggcttccggttgcccatcatcaagggtttctccgtcacagatgcatatatcctcacttcttactcaagaatgattgttagctgcgatgttgccttcattgagccagaggttctgtctcctgtccaagagtccaacaccaacgaagatttgtcatatgaggttctgtctcctgtccaagagtccaagaccaacgaagagttgaccaacgaagatttgtcatttgaggttctgtccagtttactgcttggatctgccaaaacatcgcaaccaacagcgtaaaattcatgtaaatagtaaagctattcatcagtttattgctttgtaaaatgtgtaaataactgtgtattgtgtgtgtagttttttttaaaaaagtttaccatgtccctacatgagagcacctttctttttctttttcttcagcctcacgatcagacttcttattttgcttcgcttctctatgaatataagattggcagaattcctaccagcacttagaaaaaataaagtttaaacttaac

SEQ ID NO: 69313 - DNA, 1318 bp, Zea Mays
gtgatggagaccattgacagaacaggctcactggtcactagctccggcggaccacgtaatagtcgcatgagcgtcctatcctatagatgcgccgttgagaccaatgacccggcttgacgacatgttggaatgtttgtgtaggaccgagctgctcctagtcctagacctagggtggatccggcgttctgcaacgctggctgctccactttacagtttacacaaagctttgcaggtttgctgatgaacgactggctctattattatataaagaagatcgtatcatcacacaatgacacaaacagaatgcagggaacgtaaccaaagaagacgacccataccatacccaaactgccatgcatgagaatagatagacagaaagaacaggaaccaaccaacacaagacacaacaagctgcagcagcggcaggcatggggcaccgcgccactgacaccgggccccaccaccattaccacccgacgcacactttatttagcccacgtcactcgcagcccgcaccggacacgtccacgcgacagtcactgctagctacgtaccgggctacgtacgagacacacacacacacagagagagacgccagtaataaccgtagcgtactgaacagcaaaatcccgtgtcatactgccatgtacgcgcgcgagcgactaccccgccacgcgcgcacgccgatcccctgggccctggccgccgccgctgcgtgcgcacggcctcactcgctggccttctcgggctcctcaggagcagcaacctcctccgcctcggcggccggctcctggggaccagcaggagcaggagcctccggctcgtccgcggcgagctcctcgggagcagcagcctctgcctcggcgaccggctcggccgcggcgggctcctcggcaccagcaggaggagcagcagcagcctcctcctcggcggctgcctcctgctcggccgcgggagtctcctcgggaccagcaggagctgcaagagtgagcgaccagctgagagtgagatcgatcgagcttggttgtgtgaggcaaatgccgtgagacccgggacgctatatatagaagaggagaggaccgggcgcggcgaggccagaacggggagaacgcaagggctaagcgcagtctgccgggtgggttttttttttctctctctctctctcttttgttaaatccccggccccttgatctgtcgctcgtatcatgatcatgactgggaatcttgaggagctgtacaggtacacacatgaacatgccacgcagtgcaaccaaaaggtggccatgagtcaccctcatgcgtgacacatgggaagggt

SEQ ID NO: 69314 - DNA, 2710 bp, Zea Mays
ctctcagcctgcttcagccgaaagaagagagagaactcctcaagctgctcccccaaattccggtcctcctaaacccccgcccccacctcctcctcaccggcgcgaccccaattccgggacctccccgatccccatgaacccgatctaaacatgtccgccgcgctcgcctgtctccgccgcacctccaagcgccgccgagacgcgcccgatcatgccctccccccattgttgaagcagccgctgatggcccacgccggcgccgaagccgctgagtcgtcttcgtcgtcctcggcctccgcttcgggggtcgatggcgcctctgcggcggcggcggcggcctccgcatcgtcgccctccgcgtcgccccgggtggtgcacttctttgtgcgcgctaccgattccagaaccatcgcgatgcacgcggggtgggacgacaccgtcggcgccgtgctcgaccacctcggcgcctgtgggtacgggcgcgatttgcggctcctctacgcgggacggcagctcgcgctggattccaccctcgctgagctccgcctcccgccggactccacacttcaccttttggcgcgtctcaggtccactcagcaccctcacgcgtggcagctcgcatcgcacatcgccagcactgccgccatcgcggagtccgagccctctaggatgccctccgccgccttctccctcgacgaactagtgaaggagtttatcctccgcgcccaccgcgccaacctgaggctttcccgctacgatcgcgccgctacagtcgaggaccgggccgcggcggaccacaccgccgagtacctcgaaatcttcctccaggccggcgccgccttagcgctggcaggaatgaattactgtatagatcatgtcgtcgtacacttgcctcagctttatccactcgccccaagctacccccttctatgaactcaccaaccaggttgatcgagcaagtcctgccatttgcccgtgaaacagtggatatggtccttgatgggcttgcatcaatgccaatgattatatcgcctagtgatctagatgagttctcaaactttctcaaagtgatgtgccagcaggcacgccgttggatttctgatgaggggccgatacccagtattttttacagcagggagtctcagcatggtgacacatggatatggaggtttcacatcatgtcgatgtacatgttgaaaaggttggatgagtgcttgaagacattggagatggacctgccattgtcatcagagagtatcggggtcatggaaagtcaaaccatatgggctgctcgatcacacatcctggtcatgttgactgaacttgatttcatcgcagcgatttatgaggatgtggggcacaacctacagcttgtgttgctggcacacaaagcaccactcaatgctcttgtccgttgttccaagagaaatgagcgtctacattggctcgtgaagcataagaatcttctctgctttgaggcaagaaggagtttagtcttcatgatgctgcctgaagggaaggatgactttggggagctgcatgagatgttaatcgatcgatcacatttacttgatgaatcctttaattacatcgcacaggcagaacaagctgaacttcacggtgcgctgtttatggagtttaagaacgaggaagctacaggtcctggtgtcctgagggaatggttttgtttagtgtgccaagctcttttcagtccgaagcaagttcttttctcaccttgtcctgaggataaacgaaggttctacttgaacgaaacatctgccgtggatccactgcacctgaagtacttcacttttgcggggcgaataattggattagccttgatgcataaagtgcaagttggagttgttctagaccgtactctgttcttgcatcttgctgggagaagtattacattagaagatatttctgttgcagatcctgtcaaatatgcaagctgtaaaaagattctagagatggatgctgctgaaattgataatctatacctgacattttctcgaggagctcatgagttagctaacccattttgcggaaggatttgctgacatactagttaatccaaaacgccgggaagaactttttgagtgtttagacctcgaagactttgatcgactgttagggggaagcaacaatgcaataaatctgcaagattggaaatcacatactcaatataatggctacaaagaaaaggatcgtcagattaccttgttctggaaggctgttgagcgcatgtcgatcgagagacagaggcagctcctcttcttctggacctcagtgaagtatttaccatcggacggcttctgtgggctgagctccaagctttacatatacaagacgtccgattcacctgaccggctcccgtcgtcgcagacctgcttctaccggctctgcctccctccctatacatctatgaaaatgatggaaaaccagctgcagaagatcacgcaagagcatgtgagctgcagcttcggtgcatggtagttgctgctgttctggattgattctgaacccggtatatactgtacatatggtaggctagtgacaccttagcgtctcgttgagtccgttcctagagcttgaggaggtaatatgttgtctttcttttccttttgtacgtatcgtgggttagtgttccgacactttcatttaattaatctaatgcaaaaggaatggataggaagcaggtttattg

SEQ ID NO: 69315 - DNA, 3018 bp, Zea Mays
taacaagataattatttatttttattattaactattatataaaaacatcagggtaaattttaacgggtctacatagagaacacggtaaatgcttccccatcccgtcatcgtttacccgttagggaagaagggaaaggccacgccagaaggaagccctctcagcctgcttcagccgaaagaagagagagaactcctcaagctgctcccccaaattccggtcctcctaaacccccgcccccacctcctcctcaccggcgcgaccccaattccgggacctccccgatccccatgaacccgatctaaacatgtccgccgcgctcgcctgtctccgccgcacctccaagcgccgccgagacgcgcccgatcatgccctccccccattgttgaagcagccgctgatggcccacgccggcgccgaagccgctgagtcgtcttcgtcgtcctcggcctccgcttcgggggtcgatggcgcctctgcggcggcggcggcggcctccgcatcgtcgccctccgcgtcgccccgggtggtgcacttctttgtgcgcgctaccgattccagaaccatcgcgatgcacgcggggtgggacgacaccgtcggcgccgtgctcgaccacctcggcgcctgtgggtacgggcgcgatttgcggctcctctacgcgggacggcagctcgcgctggattccaccctcgctgagctccgcctcccgccggactccacacttcaccttttggcgcgtctcaggtccactcagcaccctcacgcgtggcagctcgcatcgcacatcgccagcactgccgccatcgcggagtccgagccctctaggatgccctccgccgccttctccctcgacgaactagtgaaggagtttatcctccgcgcccaccgcgccaacctgaggctttcccgctacgatcgcgccgctacagtcgaggaccgggccgcggcggaccacaccgccgagtacctcgaaatcttcctccaggccggcgccgccttagcgctggttcgcctctacctctcaaagtcccccttccgttcttacgccgagagtgccattaaatgctttgtccccacggacccttcgtccttacctatggacttactgatcgtgctgcttgaattctgccgcttgctctccttggctgcaggcaggaatgaattactgtatagatcatgtcgtcgtacacttgcctcagctttatccactcgccccaagctacccccttctatgaactcaccaaccaggttgatcgagcaagtcctgccatttgcccgtgaaacagtggatatggtccttgatgggcttgcatcaatgccaatgattatatcgcctagtgatctagatgagttctcaaactttctcaaagtgatgtgccagcaggcacgccgttggatttctgatgaggggccgatacccagtattttttacagcagggagtctcagcatggtgacacatggatatggaggtttcacatcatgtcgatgtacatgttgaaaaggttggatgagtgcttgaagacattggagatggacctgccattgtcatcagagagtatcggggtcatggaaagtcaaaccatatgggctgctcgatcacacatcctggtcatgttgactgaacttgatttcatcgcagcgatttatgaggatgtggggcacaacctacagcttgtgttgctggcacacaaagcaccactcaatgctcttgtccgttgttccaagagaaatgagcgtctacattggctcgtgaagcataagaatcttctctgctttgaggcaagaaggagtttagtcttcatgatgctgcctgaagggaaggatgactttggggagctgcatgagatgttaatcgatcgatcacatttacttgatgaatcctttaattacatcgcacaggcagaacaagctgaacttcacggtgcgctgtttatggagtttaagaacgaggaagctacaggtcctggtgtcctgagggaatggttttgtttagtgtgccaagctcttttcagtccgaagcaagttcttttctcaccttgtcctgaggataaacgaaggttctacttgaacgaaacatctgccgtggatccactgcacctgaagtacttcacttttgcggggcgaataattggattagccttgatgcataaagtgcaagttggagttgttctagaccgtactctgttcttgcatcttgctgggagaagtattacattagaagatatttctgttgcagatcctgtcaaatatgcaagctgtaaaaagattctagagatggatgctgctgaaattgataatctatacctgacattttctcgaggagctcatgagttaggtactgaaaagattattgatctttgcccaggaggagaggatgtcagtgtgaatatcgggaacagaaagcattacattgatcttcttattaagaatatctttgtggactctatttcatctcagctaacccattttgcggaaggatttgctgacatactagttaatccaaaacgccgggaagaactttttgagtgtttagacctcgaagactttgatcgactgttagggggaagcaacaatgcaataaatctgcaagattggaactcagtgaagtatttaccatcggacggcttctgtgggctgagctccaagctttacatatacaagacgtccgattcacctgaccggctcccgtcgtcgcagacctgcttctaccggctctgcctccctccctatacatctatgaaaatgatggaaaaccagctgcagaagatcacgcaagagcatgtgagctgcagcttcggtgcatggtagttgctgctgttctggattgattctgaacccggtatatactgtacatatggtaggctagtgacaccttagcgtctcgttgagtccgttcctagagcttgaggaggtaatatgttgtctttcttttccttttgtacgtatcgtgggttagtgttccgacactttcatttaattaatctaatgcaaaaggaatggataggaagcaggtttattg

SEQ ID NO: 69316 - DNA, 2082 bp, Zea Mays
gccctctcagcctgcttcagccgaaagaagagagagaactcctcaagctgctcccccaaattccggtcctcctaaacccccgcccccacctcctcctcaccggcgcgaccccaattccgggacctccccgatccccatgaacccgatctaaacatgtccgccgcgctcgcctgtctccgccgcacctccaagcgccgccgagacgcgcccgatcatgccctccccccattgttgaagcagccgctgatggcccacgccggcgccgaagccgctgagtcgtcttcgtcgtcctcggcctccgcttcgggggtcgatggcgcctctgcggcggcggcggcggcctccgcatcgtcgccctccgcgtcgccccgggtggtgcacttctttgtgcgcgctaccgattccagaaccatcgcgatgcacgcggggtgggacgacaccgtcggcgccgtgctcgaccacctcggcgcctgtgggtacgggcgcgatttgcggctcctctacgcgggacggcagctcgcgctggattccaccctcgctgagctccgcctcccgccggactccacacttcaccttttggcgcgtctcaggtccactcagcaccctcacgcgtggcagctcgcatcgcacatcgccagcactgccgccatcgcggagtccgagccctctaggatgccctccgccgccttctccctcgacgaactagtgaaggagtttatcctccgcgcccaccgcgccaacctgaggctttcccgctacgatcgcgccgctacagtcgaggaccgggccgcggcggaccacaccgccgagtacctcgaaatcttcctccaggccggcgccgccttagcgctggttcgcctctacctctcaaagtcccccttccgttcttacgccgagagtgccattaaatgctttgtccccacggacccttcgtccttacctatggacttactgatcgtgctgcttgaattctgccgcttgctctccttggctgcaggcaggaatgaattactgtatagatcatgtcgtcgtacacttgcctcagctttatccactcgccccaagctacccccttctatgaactcaccaaccaggttgatcgagcaagtcctgccatttgcccgtgaaacagtggatatggtccttgatgggcttgcatcaatgccaatgattatatcgcctagtgatctagatgagttctcaaactttctcaaagtgatgtgccagcaggcacgccgttggatttctgatgaggggccgatacccagtattttttacagcagggagtctcagcatggtgacacatggatatggaggtttcacatcatgtcgatgtacatgttgaaaaggttggatgagtgcttgaagacattggagatggacctgccattgtcatcagagagtatcggggtcatggaaagtcaaaccatatgggctgctcgatcacacatcctggtcatgttgactgaacttgatttcatcgcagcgatttatgaggatgtggggcacaacctacagcttgtgttgctggcacacaaagcaccactcaatgctcttgtccgttgttccaagagaaatgagcgtctacattggctcgtgaagcataagaatcttctctgctttgaggcaagaaggagtttagtcttcatgatgctgcctgaagggaaggatgactttggggagctgcatgagatgttaatcgatcgatcacatttacttgatgaatcctttaattacatcgcacaggcagaacaagctgaacttcacggtgcgctgtttatggagtttaagaacgaggaagctacaggtcctggtgtcctgagggaatggttttgtttagtgtgccaagctcttttcagtccgaagcaagttcttttctcaccttgtcctgaggataaacgaaggttctacttgaacgaaagtcaagagcatgtaccacaggatgaggcgcatgaaggatgctgtgatgagttcgtgagtggtctaggccgtcgtctcccagtcaactacggttgctggatcgttgtcttcgtatgatgtaattatttaattattttgtacaaaactccgatatatattaat

SEQ ID NO: 69317 - DNA, 852 bp, Zea Mays
caagacttttggaatttatttagtaaatcattattatgaaaattgtacaatgaacttcaacagtaaaaaatattattagaaaatggacaataaattctaacacactgtgcatcaatcgagcacatattctagctgttgacacacgcatgcccgtgatttatttctcgtgccagggatgagccgtgtgctgcacttaactaggacggagcagacgaagagaaccgactctatatagcagtagcgctacagcagctgcaaaatgaaagaacagcttgataatctgttactatatggtacaacagattttcttttgcacttgcaccagtcggtcggcctactaataagtatatataatattgacctgccggccggctaggaatatagagagctcgatcgatccatagatggcagctgcatggatcggtcacatcgacctggccgccgtggcggcaccgtcgtgctcgacgtcggaaacagcgccgtcatcgtcgtcgtcgagtcccccgccgcacccggcgccaggagggccgccgccgacgaagccgtggccgcggccgaaggcgcgggcgtggtccttgagcgagcgcttgtgcttgaactcggagccgcagaggcagtaccagagcctgccgcagttcttctcgtgcgtgcgccagtcgcccttgacggcgaaggccttgccgcagcggcggcagaggaagggcttgaggccgtgcttgcgcttgtagtgcgtctgcagcgtgcggaagtccttgagcggcttggcgcgcgggtggtcgatgttgttgcggcaccccggcgagcagcagtagcacggcagccgcagcatggccgtcggctggatgccccgca

SEQ ID NO: 69318 - DNA, 2941 bp, Zea Mays
cttattaagttgttatagaattttcaattttgcttgcaagacagaaatcttgctcagctgtccaattcatgatttgagttgctgtcctgtcgcttgttttatgatgtgaacatatgcttgtcaggaccaaagattagaggactcactgtcatgctccgtggtgaatgctttattgtaccaaagttctagtgcatcacaaaggatactgaaatgggtgccaaagagaatggggaagagagagatgatcattcaagtgatgtggaaagagatggtaaacaagggaaggtaactgaatcagactatgaaccagctagaaattccctttcatcaccgggtgaggctaccagtaacgaagacactaaagtgaaaagagtctcaagggttccaaagaagctatcaaggaaagagtctaaagaaaacagcccacgctcagcaagaagcatttccaaaagtcaaatccacactaaactgcagtatatatcgtcaaacagtaaccagaacaaatcacccaaaacaaacaaagcggttaatggtgctaaaactgttgaaattaagaggccagagactccgaaagctccttcttgttcttcatctgagatgtctgaggaaacagatgacaaagctattgaggatagacccacagatgacaaagcaattgagggcagaatcaaggatgatagcgctgttgaaggcagagccaccaatgataaagccgttgatgacaaagcaaagaatgataaagacattgaggacggaatgaaggatgataatgccattgaatgtgaagtcactgatgataagcctattgacagcaaagtaactgatgatattaccattgagggaagagagattgaaggtaaagccattgaagaggcaaaggagattgatatattggatgaagctccaaaatctgatcagagtactggcactgatgatgaaattgttgatactgaagaaaacatagctgataatggcaactcagtttcttataaaattaacgaggaattatattcaaaaattgagaagttggagcaggagctacgtgaagttgctgccctcgaggtttctctctactctgtggtgccagagcacggttgttcatcacataagttgcatacaccagctcgccgtctatctagggtttacattcatgcatcaaaattttggtcctcagataagaaagcttcagttgcaagaaattcagtttctgggcttgtgcttgttgcaaagtcttgtggcaatgatgtttcaaggttgacattttggctatcgaacacagttgtcctgagagaaatcatcgcacaaacatttggtacttcacaacactcaagtccagttaaggttttcagctcaaatggcaatgcaaacaagcctgacaggagtttcacttcatcgcaatggaaaagtaactacaatggcaagtatgtgaaccccaatatcatgcagctgccagatgattggcagaaaactagcacattgctggatgcattggagaagattgaatcttggatcttttctcggattgttgagtctgtgtggtggcaggcaatgacaccccacatgcaaacccctgtagaagatttgtcaactccaaagatagggaggttgttagggcagtctttgggtgatcagcaacatgggagtttttctattgatctctggagaagtgcatttcaagatgcattcagcagaatctgtcctcttcgtgctggtgggcatgagtgtggatgtttaccagtcttggcaaaactggtgatggagcactgcatagcccggttagatattgctatgtttaatgccatccttcgtgaatcagagaatgagatacccactgatcctatatccgacccaattgtggactcaagagttctgccgattccagctggcaacttaagctttggatcaggcgcacagctgaagagctctgttgggaattggtccagatggttgactgatacatttggcatggatgctgctgaatctgaaaagggtggtcaagatgtggaagttaatggcgatgacagaagagacgcagccgaatcaacttgttttaagctacttaacgagttgagtgatcttctgatgctcccgaaggacatgcttctcgagaaagccattaggaaagaggtctgcccttccattggccttccactagtaacaagaatactctgtaacttcactccggacgagttctgccctgatcctgttcctggcatggttctagaggagctgaattctgagagcttgctggatcgatccacagagatagacatggtgagcacgttcccagtgaccgctgctccagtggtgtactgggcccctacgctggaggacgttagggagaaagtggctgacacggcatgtggcaacccagagctggaccggaggggttcaatggtgcagaggaggggctacaccagcgatgacgatctggatgccctggagttcccgctggcgtccctgtacgacaagagcaaccccccgtccccgtgcaacaatggcgtcgcccatttcagcactcggcaggtagcctccatggagaacgtgaggcacgagctcctgcgagaagtatggtgcgagcggctatgatctcgataaatacggcctgtggagcctttttgatctatgtgaacagtggaaatggtgggaaagacgtgaagaaactgcaatcgaaaagcgatgacaaaaatgctattcaattcttcgtgtatatccatccgttccttgtcagcccgtgcattggttgtttccccttttttatatgatatagtagaactgtattgtacagtggctatgaatgaatgtgatgtgatcatgaaagattgggagacatagcatcattttaaccttcattattatacccgtcctcccattttttaccttttttcaaaaggaatattgtgtcagtccttgtgccctgaaagtgatggatcgatttctt

SEQ ID NO: 69319 - DNA, 2795 bp, Zea Mays
ccaagatcagctggagccccatggccatgtaccaaagttctagtgcatcacaaaggatactgaaatgggtgccaaagagaatggggaagagagagatgatcattcaagtgatgtggaaagagatggtaaacaagggaaggtaactgaatcagactatgaaccagctagaaattccctttcatcaccgggtgaggctaccagtaacgaagacactaaagtgaaaagagtctcaagggttccaaagaagctatcaaggaaagagtctaaagaaaacagcccacgctcagcaagaagcatttccaaaagtcaaatccacactaaactgcagtatatatcgtcaaacagtaaccagaacaaatcacccaaaacaaacaaagcggttaatggtgctaaaactgttgaaattaagaggccagagactccgaaagctccttcttgttcttcatctgagatgtctgaggaaacagatgacaaagctattgaggatagacccacagatgacaaagcaattgagggcagaatcaaggatgatagcgctgttgaaggcagagccaccaatgataaagccgttgatgacaaagcaaagaatgataaagacattgaggacggaatgaaggatgataatgccattgaatgtgaagtcactgatgataagcctattgacagcaaagtaactgatgatattaccattgagggaagagagattgaaggtaaagccattgaagaggcaaaggagattgatatattggatgaagctccaaaatctgatcagagtactggcactgatgatgaaattgttgatactgaagaaaacatagctgataatggcaactcagtttcttataaaattaacgaggaattatattcaaaaattgagaagttggagcaggagctacgtgaagttgctgccctcgaggtttctctctactctgtggtgccagagcacggttgttcatcacataagttgcatacaccagctcgccgtctatctagggtttacattcatgcatcaaaattttggtcctcagataagaaagcttcagttgcaagaaattcagtttctgggcttgtgcttgttgcaaagtcttgtggcaatgatgtttcaaggttgacattttggctatcgaacacagttgtcctgagagaaatcatcgcacaaacatttggtacttcacaacactcaagtccagttaaggttttcagctcaaatggcaatgcaaacaagcctgacaggagtttcacttcatcgcaatggaaaagtaactacaatggcaagtatgtgaaccccaatatcatgcagctgccagatgattggcagaaaactagcacattgctggatgcattggagaagattgaatcttggatcttttctcggattgttgagtctgtgtggtggcaggcaatgacaccccacatgcaaacccctgtagaagatttgtcaactccaaagatagggaggttgttagggcagtctttgggtgatcagcaacatgggagtttttctattgatctctggagaagtgcatttcaagatgcattcagcagaatctgtcctcttcgtgctggtgggcatgagtgtggatgtttaccagtcttggcaaaactggtgatggagcactgcatagcccggttagatattgctatgtttaatgccatccttcgtgaatcagagaatgagatacccactgatcctatatccgacccaattgtggactcaagagttctgccgattccagctggcaacttaagctttggatcaggcgcacagctgaagagctctgttgggaattggtccagatggttgactgatacatttggcatggatgctgctgaatctgaaaagggtggtcaagatgtggaagttaatggcgatgacagaagagacgcagccgaatcaacttgttttaagctacttaacgagttgagtgatcttctgatgctcccgaaggacatgcttctcgagaaagccattaggaaagaggtctgcccttccattggccttccactagtaacaagaatactctgtaacttcactccggacgagttctgccctgatcctgttcctggcatggttctagaggagctgaattctgagagcttgctggatcgatccacagagatagacatggtgagcacgttcccagtgaccgctgctccagtggtgtactgggcccctacgctggaggacgttagggagaaagtggctgacacggcatgtggcaacccagagctggaccggaggggttcaatggtgcagaggaggggctacaccagcgatgacgatctggatgccctggagttcccgctggcgtccctgtacgacaagagcaaccccccgtccccgtgcaacaatggcgtcgcccatttcagcactcggcaggtagcctccatggagaacgtgaggcacgagctcctgcgagaagtatggtgcgagcggctatgatctcgataaatacggcctgtggagcctttttgatctatgtgaacagtggaaatggtgggaaagacgtgaagaaactgcaatcgaaaagcgatgacaaaaatgctattcaattcttcgtgtatatccatccgttccttgtcagcccgtgcattggttgtttccccttttttatatgatatagtagaactgtattgtacagtggctatgaatgaatgtgatgtgatcatgaaagattgggagacatagcatcattttaaccttcattattatacccgtcctcccattttttaccttttttcaaaaggaatattgtgtcagtccttgtgccctgaaagtgatggatcgatttctt

SEQ ID NO: 69320 - DNA, 1742 bp, Zea Mays
aattgaagagaaatgaggaaaagagtctagagtctcccgtcatccgtgtccgtgcgatttttctacacaatcgtctcgcaaagattctcgttggtcagtttgagacttagccttggaggagaacagaacagccacgatgacttcgccgattcagctcgcggccgcgcctttgctgctgctagtagtagtggtcgcgggcacacggtcgagccgcatcttttcggtggccgactatggtgcggcgggcgatgggttccgctacgacacggcggcgattcaggccgctgtagacgcctgcgcggcggcgggcgggggccgcgttcttctcccggcgccgggcaactacctgacagcgaccgtccaactccgctcgcgggtggtgctggaggtgccccccggagcgcggcttctgggcgggaccaggcaggcggactacccgcccgagtcgcgccggtggtacgtcgttctggccgagaacaccacgggcgccggcatcacggggggaggcgagatcaacggccagggcggggcatttgttgtcaggcccagcgaggtgaagaacgtcatggtgagctggaatgccaccggcgattgcctgggcgatgagtgccggccgcggcttgttggcttcattgactctaaggatgttaggatccacgacatcacactcaaccagcccgcctactggtggctctacacttgcattgctcgcagtcttcaccttgtcagatgtgacaacacagtcatccacaatgtgtcgatatttggagattttaaaactcccaacaatgatggcattgacattgaggattctaacaacactgtcataactgattgccacatagacaccggagacgatgctataagcccaaagtcgacaactggaccagtttataacttgacggcaacaaactgttggatgcggactaaatcttgtgctatcaagtttggaagtgcaagcttcttcgacttcaaaagactggtttttgacaacattacaatagttgattcacatcgaggacttgggatgcagatccgggatggagggaatgtgaatgatgtggtgttttcaaacattaaaatgaggaccaggtactaccatcctttatggtggggaagagccgaaccaatctatatcacaacttgcccaaggcacccagattcaaaagaaggcgccatttcagacataagattcatcaacatctcatcggtatcagaaaatggagtttttctggctggatctaagcatgggctgctccgcaacctgaaattcaagaacatagaccttacctacaagcgttggacaaactacacgggagggctctatgattacaggcctgggtgccaggagatggtgaagcacaagactggtggcatgatgctggagcatatctccggtctggagattgacaacgtgaggatgagatgggcgagaggaagcctgaagggctggaatgttaaccctatcctcttccggccatcaaccatcgataatctgtctttccatgactggcagtcagtggatgttcagtagatttaagtggcacagttgtattacgtgtgtatctatcagaataaaggggtgattcttttgtgaaatattgaaatgtgttaataataagcaatcccaacagcatttaagcttctgcagggactggtgtggtttgctataataattttataaatctgaattcgtatgtttgattgttcaaatgtggtttgctttgtgattttataatgat

SEQ ID NO: 69321 - DNA, 1804 bp, Zea Mays
aattgaagagaaatgaggaaaagagtctagagtctcccgtcatccgtgtccgtgcgatttttctacacaatcgtctcgcaaagattctcgttggtcagtttgagacttagccttggaggagaacagaacagccacgatgacttcgccgattcagctcgcggccgcgcctttgctgctgctagtagtagtggtcgcgggcacacggtcgagccgcatcttttcggtggccgactatggtgcggcgggcgatgggttccgctacgacacggcggcgattcaggccgctgtagacgcctgcgcggcggcgggcgggggccgcgttcttctcccggcgccgggcaactacctgacagcgaccgtccaactccgctcgcgggtggtgctggaggtgccccccggagcgcggcttctgggcgggaccaggcaggcggactacccgcccgagtcgcgccggtggtacgtcgttctggccgagaacaccacgggcgccggcatcacggggggaggcgagatcaacggccagggcggggcatttgttgtcaggcccagcgaggtgaagaacgtcatggtgagctggaatgccaccggcgattgcctgggcgatgagtgccggccgcggcttgttggcttcattgactctaaggatgttaggatccacgacatcacactcaaccagcccgcctactggtggacatatgatgatcagaagtagacagtgtttatttgtcagtgtactttggcaaaattaacaggctctacacttgcattgctcgcagtcttcaccttgtcagatgtgacaacacagtcatccacaatgtgtcgatatttggagattttaaaactcccaacaatgatggcattgacattgaggattctaacaacactgtcataactgattgccacatagacaccggagacgatgctataagcccaaagtcgacaactggaccagtttataacttgacggcaacaaactgttggatgcggactaaatcttgtgctatcaagtttggaagtgcaagcttcttcgacttcaaaagactggtttttgacaacattacaatagttgattcacatcgaggacttgggatgcagatccgggatggagggaatgtgaatgatgtggtgttttcaaacattaaaatgaggaccaggtactaccatcctttatggtggggaagagccgaaccaatctatatcacaacttgcccaaggcacccagattcaaaagaaggcgccatttcagacataagattcatcaacatctcatcggtatcagaaaatggagtttttctggctggatctaagcatgggctgctccgcaacctgaaattcaagaacatagaccttacctacaagcgttggacaaactacacgggagggctctatgattacaggcctgggtgccaggagatggtgaagcacaagactggtggcatgatgctggagcatatctccggtctggagattgacaacgtgaggatgagatgggcgagaggaagcctgaagggctggaatgttaaccctatcctcttccggccatcaaccatcgataatctgtctttccatgactggcagtcagtggatgttcagtagatttaagtggcacagttgtattacgtgtgtatctatcagaataaaggggtgattcttttgtgaaatattgaaatgtgttaataataagcaatcccaacagcatttaagcttctgcagggactggtgtggtttgctataataattttataaatctgaattcgtatgtttgattgttcaaatgtggtttgctttgtgattttataatgat

SEQ ID NO: 69322 - DNA, 1603 bp, Zea Mays
gtttagcgttggaaacaattgaagagaaatgaggaaaagagtctagagtctcccgtcatccgtgtccgtgcgatttttctacacaatcgtctcgcaaagattctcgttggtcagtttgagacttagccttggaggagaacagaacagccacgatgacttcgccgattcagctcgcggccgcgcctttgctgctgctagtagtagtggtcgcgggcacacggtcgagccgcatcttttcggtggccgactatggtgcggcgggcgatgggttccgctacgacacggcggcgattcaggccgctgtagacgcctgcgcggcggcgggcgggggccgcgttcttctcccggcgccgggcaactacctgacagcgaccgtccaactccgctcgcgggtggtgctggaggtgccccccggagcgcggcttctgggcgggaccaggcaggcggactacccgcccgagtcgcgccggtggtacgtcgttctggccgagaacaccacgggcgccggcatcacggggggaggcgagatcaacggccagggcggggcatttgttgtcaggcccagcgaggtgaagaacgtcatggtgagctggaatgccaccggcgattgcctgggcgatgagtgccggccgcggcttgttggcttcattgactctaaggatgttaggatccacgacatcacactcaaccagcccgcctactggtgacaccggagacgatgctataagcccaaagtcgacaactggaccagtttataacttgacggcaacaaactgttggatgcggactaaatcttgtgctatcaagtttggaagtgcaagcttcttcgacttcaaaagactggtttttgacaacattacaatagttgattcacatcgaggacttgggatgcagatccgggatggagggaatgtgaatgatgtggtgttttcaaacattaaaatgaggaccaggtactaccatcctttatggtggggaagagccgaaccaatctatatcacaacttgcccaaggcacccagattcaaaagaaggcgccatttcagacataagattcatcaacatctcatcggtatcagaaaatggagtttttctggctggatctaagcatgggctgctccgcaacctgaaattcaagaacatagaccttacctacaagcgttggacaaactacacgggagggctctatgattacaggcctgggtgccaggagatggtgaagcacaagactggtggcatgatgctggagcatatctccggtctggagattgacaacgtgaggatgagatgggcgagaggaagcctgaagggctggaatgttaaccctatcctcttccggccatcaaccatcgataatctgtctttccatgactggcagtcagtggatgttcagtagatttaagtggcacagttgtattacgtgtgtatctatcagaataaaggggtgattcttttgtgaaatattgaaatgtgttaataataagcaatcccaacagcatttaagcttctgcagggactggtgtggtttgctataataattttataaatctgaattcgtatgtttgattgttcaaatgtggtttgctttgtgattttataatgat

SEQ ID NO: 69323 - DNA, 2872 bp, Zea Mays
atcctatgttgccggacaaggcacaatgtcacacatcttatgctgtcggaccatacacaggagaatgggaagcagcctcatcgcgagcgtcgtgccaacgtttgtaccagaaggccagagtggtgtaagtgtgtcgctggctgtgggacctagtgttgtgtgtggctgtgatatagggtctagcttgtcagggtggcgtgatggtataaataagagtctgtgtcttgtgaaaggggattatcgaacaaatgaacaaatctctgaaactctgaactacctccgttctactgcctctcttcgtctttgttgtgtacctctcttcctcctgctatcctctggattcccttccccactgctaacaattggtatcagattcctacgttcctcggccctctcatccatgatgtcttcatcaccgattgatgccctaacccaggcgctggagcaccagactcgtgtcatcctcgccgagatcgacaagcgcttcaacgcgattgactacaagtgggagtactacccggttgtcgccgacccactcctgcagggcatccgtggagcggccatctcggtgccgagtgaccttgcccccatcgccggggaggctatggtcgtgatgggcgcggccgcggacgcgggggaccccacgcggctcgacccgcccacgccgctcgacgccaacctcacccgaggcgggccgccctccatcgacggccagtccgcctccctcatcccattcatccatgatgccgccacccagtgctgttaccaggaagtcgaggcacacctcactgcctcgaatgcggctacagacgggcggatccgtcagatcgaggccgataccagcgctcgggcaccatgcgtcagcgcgttggagtcctatgctgccgacgcgaatgtgaacactgactccccgttgcgtcaaatcgaagaagatggtggagttcgtgttgcggcgctggaatctgtcgtccaggtgttcgacgtctggcggccccaggtggactccttcatcgagcatcttcaaacctctgtggcacagatccgtgcgtccctcccctctctggaatcgccatggtcccagtacactcgccgcgatggacccggccacccgaacgcctacggcgccaccagcatcctcgtccccgtcaagtgcgtactccacaaacccccactcggtggctacgacggctccctcgatgacgacccggagttcggtgtcacctacatcgacgcgccactcgaccaagccgtcggttgcgttggccacgcaccagcagcggcggtcgcactccgcaccgatgttgtgggtgtagtaggtcgtgggctactggctcagaggagacgatggaacaaggggcaacgactctacaacctatttttcctgagaagaaatcggtgctcctctcctcatccactgatagtaaactcggaggtctgaaggcctatcatctcgctcgaggcctgtgtgaccgatgtgatgagaaatggcatcggggtcacaagtgcaatgatattgtgcagttacacgccctacaagaggtggccaatggtagtacgatatcctggaccagtgtgctcagtcaagcagcttggaatattcagggttattgttttactcacgacaaatggttatgcatcccatatgagggtatacagattgtgctgcatggttgtgcttcttcacagcatactgatgttcttctgcacattacaccggtggattcttcagattctgctgttaacttaggcattacttcatcaacttgtgttgaaggtattatcctacaaatcttcaatgcaacaagtgtgccttatgatgtggtgtttctatcagctttgtcaatgaaatgtgttgaagggaaatctgggtcacaaccaatgccactaggaattagtggtgccattgttggtccacgaaagctgggttacttgttgcctctgataggagacattgtcacggcactatcttacctagctgatgggggattttcaagctggttttgcatctgcttgtggaaagtcttagggccatctttagttcaacaaattctctggctaatctctaaaaattcagttgggatggatttgtttatatggctacgctttgagctcattagaaaactaaaacaacggatgagtggcagtgatattactggcttattcagaatgctaattcagggagtaatggtccagccttggtggttttcctctcagacctcagtgcaattgttggtccttgtacatctagcacaaacaagtgggaatgctattctctggactatgccatgtccttctttcgccatcagtgttataattacttcagttttgtattgtaacctgttcaagaagcttccatggcagactccaaatcaaggggcagtacaccggcagctatgtgatattttttgtcagctggaaattgtattctatggaaaatataacatatataatcaggatcctttggtgagtcacgatgcaatcaagaacaagttcaccactttcccttggaatcctggtgcttcaaaggttctacatcggcttgggggcaagccgaagcttaaggggaggggaatgtcacacatcctatgttgccggacaaggcacaatgtcacacatcttatgctgtcggaccatacacaggagaatgggaagcagcctcatcgcgagcgtcgtgccaacgtttgtaccagaaggccagagtggtgtaagtgtgtcgctggctgtgggacctagtgttgtgtgtggctgtgatatagggtctagcttgtcagggtggcgtgatggtataaataagagtctgtgtcttgtgaaaggggattatcgaacaaatgaacaaatctctgaaactctgaactacctccgttctactgcc

SEQ ID NO: 69324 - DNA, 1761 bp, Zea Mays
ctcgctttctctctcatgcatgcatagacactcaacatcttcccttcccagcccatgcatgtggagccgtcgccgaagggggagattagtttagtcctgtccccggcgccggtgggatccaagcagcctaggtcaccggaccatcaccatcaccagcaggcggccatggaggagttggcggggagcaggaggcagcaggagcacctccacctgcagcaccaccaaccctttgctgccgctgctgagccagcagcacccgggatgatcaaagatgtcaagccactggccaagaaggatcacaggagaggcacatcgaccgctgaacgcgacccaaaaacgctgagaaggctggcccagaacagggaggctgcaaggaaaagcaggctaaggaagaaggcttacatccagcaactcgagtccagcaggatcagactagctcagctcgaacaagaactgcacactgcaagagctcagggagttttcttccccaacagtggcatcctcgctgaccaaggtgtcgccggcaaaggcgtccccatcggcggcatcgacggcctcagctcagaggcggcgatgttcgacgtggagtacgggcggtggcaggaggagcactaccggctgatgtacgagcttcgggcggcgctgcagcagcacctgccggagggggagctgcagatgtacgtggagagctgcctggctcaccacgacgagatggtgggcatcaaagagggcgccatcaagggcgacgtcttccacctcatctccggcgtctggcggagccccgccgagcgctgcttcctctggctcggcggcttccgcccctccgaagtcatcaagatgctgctgagccacgtagagcccctgaccgaacagcagatcgtgggcgtgtacgggctgcagcagtcggcgctggagacggaggaagcgctgagccagggcctggaggcgctctaccagtcgctgtctgacaccgtggtctccgacgcgctcagctgcccctcgaacgtctccaactacatgggtcagatggccgtcgccatgaacaagctctccacgctcgagggcttcgtcagacaagctgagaaccttcggcagcagacgctgcaccggctgcaccaggtcctgacgacgcggcagatggcgcggtcgctgctggccgtgtcggactacttccaccgcctccgcacgctgagctcgctctgggtcacacgccccagggcaccgcaggagcaataataggtccacagctggtgacggcggcgctgatgaatggcgtgatcgccggccgccgcatacaacggcacacgcgcatgtgtccattcatgcatatatgagtcgtgcatgggcgcatgcatggtgtgtcgttcgtcatcaagaacagagcttgcaggtagagccagttagggccggccgggggagagagagctagtgaggacgagaaaccaaccaaaggataatgttaatcttggcgacgattgtcgtgttggttgctttgtagctatagctaggtgtacttgatcgttcgatcgcgatctatcgatcgatcggctgctgctgtagtcgatgcggtggagtgatgatgttgttctaagttattagttatctctcatgatcaccggacgcatatgcttcgtagtcgtttaatttggagacgtgtgtggggttttaggcaaccgtcataaatctttgatagcatgtaacacatgctaatataagcttgctttgatggtagaagtcaagacggtgatgagtttctcatcc

SEQ ID NO: 69325 - DNA, 2104 bp, Zea Mays
ctcgctttctctctcatgcatgcattacaggcacgccttagctgtggccgctgtgcgaatccctgctgtcccgtatctcccagctttctcgtgctactgactgttgtactagtcctactacactgcacagagcccagctagtatcgccatgattgaatactgcaactcctgctgcgtgctgcatgccacaccagagagcagcgtttcaagctcttccccatagttcagtacttcagtatatatgtgtgtgttgtctgatgagaacgtacatggccctctagctagctccggctccgcccactctctatccagtagctagccacaggctctcatccgcctcttgttccttgtcttgttcatggatgcagagacactcaacatcttcccttcccagcccatgcatgtggagccgtcgccgaagggggagattagtttagtcctgtccccggcgccggtgggatccaagcagcctaggtcaccggaccatcaccatcaccagcaggcggccatggaggagttggcggggagcaggaggcagcaggagcacctccacctgcagcaccaccaaccctttgctgccgctgctgagccagcagcacccgggatgatcaaagatgtcaagccactggccaagaaggatcacaggagaggcacatcgaccgctgaacgcgacccaaaaacgctgagaaggctggcccagaacagggaggctgcaaggaaaagcaggctaaggaagaaggcttacatccagcaactcgagtccagcaggatcagactagctcagctcgaacaagaactgcacactgcaagagctcagggagttttcttccccaacagtggcatcctcgctgaccaaggtgtcgccggcaaaggcgtccccatcggcggcatcgacggcctcagctcagaggcggcgatgttcgacgtggagtacgggcggtggcaggaggagcactaccggctgatgtacgagcttcgggcggcgctgcagcagcacctgccggagggggagctgcagatgtacgtggagagctgcctggctcaccacgacgagatggtgggcatcaaagagggcgccatcaagggcgacgtcttccacctcatctccggcgtctggcggagccccgccgagcgctgcttcctctggctcggcggcttccgcccctccgaagtcatcaagatgctgctgagccacgtagagcccctgaccgaacagcagatcgtgggcgtgtacgggctgcagcagtcggcgctggagacggaggaagcgctgagccagggcctggaggcgctctaccagtcgctgtctgacaccgtggtctccgacgcgctcagctgcccctcgaacgtctccaactacatgggtcagatggccgtcgccatgaacaagctctccacgctcgagggcttcgtcagacaagctgagaaccttcggcagcagacgctgcaccggctgcaccaggtcctgacgacgcggcagatggcgcggtcgctgctggccgtgtcggactacttccaccgcctccgcacgctgagctcgctctgggtcacacgccccagggcaccgcaggagcaataataggtccacagctggtgacggcggcgctgatgaatggcgtgatcgccggccgccgcatacaacggcacacgcgcatgtgtccattcatgcatatatgagtcgtgcatgggcgcatgcatggtgtgtcgttcgtcatcaagaacagagcttgcaggtagagccagttagggccggccgggggagagagagctagtgaggacgagaaaccaaccaaaggataatgttaatcttggcgacgattgtcgtgttggttgctttgtagctatagctaggtgtacttgatcgttcgatcgcgatctatcgatcgatcggctgctgctgtagtcgatgcggtggagtgatgatgttgttctaagttattagttatctctcatgatcaccggacgcatatgcttcgtagtcgtttaatttggagacgtgtgtggggttttaggcaaccgtcataaatctttgatagcatgtaacacatgctaatataagcttgctttgatggtagaagtcaagacggtgatgagtttctcatcc

SEQ ID NO: 69326 - DNA, 1900 bp, Zea Mays
ctctctctctctctccccatgcatcttctcttctccatctctccccctacctccggccggtcggactgtgacatgtaacggactgctcaatgatttccccgcgatcgagctgcatgtgcccgcggcagagcagtacacgcagacgggatcatctccatcggccaagacactcaacatcttcccttcccagcccatgcatgtggagccgtcgccgaagggggagattagtttagtcctgtccccggcgccggtgggatccaagcagcctaggtcaccggaccatcaccatcaccagcaggcggccatggaggagttggcggggagcaggaggcagcaggagcacctccacctgcagcaccaccaaccctttgctgccgctgctgagccagcagcacccgggatgatcaaagatgtcaagccactggccaagaaggatcacaggagaggcacatcgaccgctgaacgcgacccaaaaacgctgagaaggctggcccagaacagggaggctgcaaggaaaagcaggctaaggaagaaggcttacatccagcaactcgagtccagcaggatcagactagctcagctcgaacaagaactgcacactgcaagagctcagggagttttcttccccaacagtggcatcctcgctgaccaaggtgtcgccggcaaaggcgtccccatcggcggcatcgacggcctcagctcagaggcggcgatgttcgacgtggagtacgggcggtggcaggaggagcactaccggctgatgtacgagcttcgggcggcgctgcagcagcacctgccggagggggagctgcagatgtacgtggagagctgcctggctcaccacgacgagatggtgggcatcaaagagggcgccatcaagggcgacgtcttccacctcatctccggcgtctggcggagccccgccgagcgctgcttcctctggctcggcggcttccgcccctccgaagtcatcaagatgctgctgagccacgtagagcccctgaccgaacagcagatcgtgggcgtgtacgggctgcagcagtcggcgctggagacggaggaagcgctgagccagggcctggaggcgctctaccagtcgctgtctgacaccgtggtctccgacgcgctcagctgcccctcgaacgtctccaactacatgggtcagatggccgtcgccatgaacaagctctccacgctcgagggcttcgtcagacaagctgagaaccttcggcagcagacgctgcaccggctgcaccaggtcctgacgacgcggcagatggcgcggtcgctgctggccgtgtcggactacttccaccgcctccgcacgctgagctcgctctgggtcacacgccccagggcaccgcaggagcaataataggtccacagctggtgacggcggcgctgatgaatggcgtgatcgccggccgccgcatacaacggcacacgcgcatgtgtccattcatgcatatatgagtcgtgcatgggcgcatgcatggtgtgtcgttcgtcatcaagaacagagcttgcaggtagagccagttagggccggccgggggagagagagctagtgaggacgagaaaccaaccaaaggataatgttaatcttggcgacgattgtcgtgttggttgctttgtagctatagctaggtgtacttgatcgttcgatcgcgatctatcgatcgatcggctgctgctgtagtcgatgcggtggagtgatgatgttgttctaagttattagttatctctcatgatcaccggacgcatatgcttcgtagtcgtttaatttggagacgtgtgtggggttttaggcaaccgtcataaatctttgatagcatgtaacacatgctaatataagcttgctttgatggtagaagtcaagacggtgatgagtttctcatcc

SEQ ID NO: 69327 - DNA, 1751 bp, Zea Mays
gtcagtcatgtgaggatcaagagagcgcggcgatacgctggcctgcatgcagctgtgcagattctcagggggagattagtttagtcctgtccccggcgccggtgggatccaagcagcctaggtcaccggaccatcaccatcaccagcaggcggccatggaggagttggcggggagcaggaggcagcaggagcacctccacctgcagcaccaccaaccctttgctgccgctgctgagccagcagcacccgggatgatcaaagatgtcaagccactggccaagaaggatcacaggagaggcacatcgaccgctgaacgcgacccaaaaacgctgagaaggctggcccagaacagggaggctgcaaggaaaagcaggctaaggaagaaggcttacatccagcaactcgagtccagcaggatcagactagctcagctcgaacaagaactgcacactgcaagagctcagggagttttcttccccaacagtggcatcctcgctgaccaaggtgtcgccggcaaaggcgtccccatcggcggcatcgacggcctcagctcagaggcggcgatgttcgacgtggagtacgggcggtggcaggaggagcactaccggctgatgtacgagcttcgggcggcgctgcagcagcacctgccggagggggagctgcagatgtacgtggagagctgcctggctcaccacgacgagatggtgggcatcaaagagggcgccatcaagggcgacgtcttccacctcatctccggcgtctggcggagccccgccgagcgctgcttcctctggctcggcggcttccgcccctccgaagtcatcaagatgctgctgagccacgtagagcccctgaccgaacagcagatcgtgggcgtgtacgggctgcagcagtcggcgctggagacggaggaagcgctgagccagggcctggaggcgctctaccagtcgctgtctgacaccgtggtctccgacgcgctcagctgcccctcgaacgtctccaactacatgggtcagatggccgtcgccatgaacaagctctccacgctcgagggcttcgtcagacaagctgagaaccttcggcagcagacgctgcaccggctgcaccaggtcctgacgacgcggcagatggcgcggtcgctgctggccgtgtcggactacttccaccgcctccgcacgctgagctcgctctgggtcacacgccccagggcaccgcaggagcaataataggtccacagctggtgacggcggcgctgatgaatggcgtgatcgccggccgccgcatacaacggcacacgcgcatgtgtccattcatgcatatatgagtcgtgcatgggcgcatgcatggtgtgtcgttcgtcatcaagaacagagcttgcaggtagagccagttagggccggccgggggagagagagctagtgaggacgagaaaccaaccaaaggataatgttaatcttggcgacgattgtcgtgttggttgctttgtagctatagctaggtgtacttgatcgttcgatcgcgatctatcgatcgatcggctgctgctgtagtcgatgcggtggagtgatgatgttgttctaagttattagttatctctcatgatcaccggacgcatatgcttcgtagtcgtttaatttggagacgtgtgtggggttttaggcaaccgtcataaatctttgatagcatgtaacacatgctaatataagcttgctttgatggtagaagtcaagacggtgatgagtttctcatcc

SEQ ID NO: 69328 - DNA, 1920 bp, Zea Mays
ccagatataaatgctacaaggctagagaagattccatattattctcctgttcccatcctgcagaggagcggcaaggaggcgtcaggggcgtatgaccatctgggcgagctggaccaggcgctgttcatgtacctggatcacggcagcagccatggcggcggcgccacgcagcaagagcgaaggcagacactcaacatcttcccttcccagcccatgcatgtggagccgtcgccgaagggggagattagtttagtcctgtccccggcgccggtgggatccaagcagcctaggtcaccggaccatcaccatcaccagcaggcggccatggaggagttggcggggagcaggaggcagcaggagcacctccacctgcagcaccaccaaccctttgctgccgctgctgagccagcagcacccgggatgatcaaagatgtcaagccactggccaagaaggatcacaggagaggcacatcgaccgctgaacgcgacccaaaaacgctgagaaggctggcccagaacagggaggctgcaaggaaaagcaggctaaggaagaaggcttacatccagcaactcgagtccagcaggatcagactagctcagctcgaacaagaactgcacactgcaagagctcagggagttttcttccccaacagtggcatcctcgctgaccaaggtgtcgccggcaaaggcgtccccatcggcggcatcgacggcctcagctcagaggcggcgatgttcgacgtggagtacgggcggtggcaggaggagcactaccggctgatgtacgagcttcgggcggcgctgcagcagcacctgccggagggggagctgcagatgtacgtggagagctgcctggctcaccacgacgagatggtgggcatcaaagagggcgccatcaagggcgacgtcttccacctcatctccggcgtctggcggagccccgccgagcgctgcttcctctggctcggcggcttccgcccctccgaagtcatcaagatgctgctgagccacgtagagcccctgaccgaacagcagatcgtgggcgtgtacgggctgcagcagtcggcgctggagacggaggaagcgctgagccagggcctggaggcgctctaccagtcgctgtctgacaccgtggtctccgacgcgctcagctgcccctcgaacgtctccaactacatgggtcagatggccgtcgccatgaacaagctctccacgctcgagggcttcgtcagacaagctgagaaccttcggcagcagacgctgcaccggctgcaccaggtcctgacgacgcggcagatggcgcggtcgctgctggccgtgtcggactacttccaccgcctccgcacgctgagctcgctctgggtcacacgccccagggcaccgcaggagcaataataggtccacagctggtgacggcggcgctgatgaatggcgtgatcgccggccgccgcatacaacggcacacgcgcatgtgtccattcatgcatatatgagtcgtgcatgggcgcatgcatggtgtgtcgttcgtcatcaagaacagagcttgcaggtagagccagttagggccggccgggggagagagagctagtgaggacgagaaaccaaccaaaggataatgttaatcttggcgacgattgtcgtgttggttgctttgtagctatagctaggtgtacttgatcgttcgatcgcgatctatcgatcgatcggctgctgctgtagtcgatgcggtggagtgatgatgttgttctaagttattagttatctctcatgatcaccggacgcatatgcttcgtagtcgtttaatttggagacgtgtgtggggttttaggcaaccgtcataaatctttgatagcatgtaacacatgctaatataagcttgctttgatggtagaagtcaagacggtgatgagtttctcatcc

SEQ ID NO: 69329 - DNA, 2130 bp, Zea Mays
caaaccgtatttctaggtctctggcagccggctcggcgatatatacacgtactacaccgcctgtgcgcgtatgctgtgtcggcgtgcgcctgcgcccgcaacagcctgtgcttgcagctagcgatccgtccgtcgaccggccggtgcatggtgagcggcggcagcaccaaggagcagcagcacgagatgaacatctccttcgggatgatgaaccagcaccatcagcctccgtcctcctcctcttcctcgtccatgcatgcggccgccgcgagcttcatgagcggcaaggaggcgtcaggggcgtatgaccatctgggcgagctggaccaggcgctgttcatgtacctggatcacggcagcagccatggcggcggcgccacgcagcaagagcgaaggcagacactcaacatcttcccttcccagcccatgcatgtggagccgtcgccgaagggggagattagtttagtcctgtccccggcgccggtgggatccaagcagcctaggtcaccggaccatcaccatcaccagcaggcggccatggaggagttggcggggagcaggaggcagcaggagcacctccacctgcagcaccaccaaccctttgctgccgctgctgagccagcagcacccgggatgatcaaagatgtcaagccactggccaaggatcacaggagaggcacatcgaccgctgaacgcgacccaaaaacgctgagaaggctggcccagaacagggaggctgcaaggaaaagcaggctaaggaagaaggcttacatccagcaactcgagtccagcaggatcagactagctcagctcgaacaagaactgcacactgcaagagctcagggagttttcttccccaacagtggcatcctcgctgaccaaggtgtcgccggcaaaggcgtccccatcggcggcatcgacggcctcagctcagaggcggcgatgttcgacgtggagtacgggcggtggcaggaggagcactaccggctgatgtacgagcttcgggcggcgctgcagcagcacctgccggagggggagctgcagatgtacgtggagagctgcctggctcaccacgacgagatggtgggcatcaaagagggcgccatcaagggcgacgtcttccacctcatctccggcgtctggcggagccccgccgagcgctgcttcctctggctcggcggcttccgcccctccgaagtcatcaagatgctgctgagccacgtagagcccctgaccgaacagcagatcgtgggcgtgtacgggctgcagcagtcggcgctggagacggaggaagcgctgagccagggcctggaggcgctctaccagtcgctgtctgacaccgtggtctccgacgcgctcagctgcccctcgaacgtctccaactacatgggtcagatggccgtcgccatgaacaagctctccacgctcgagggcttcgtcagacaagctgagaaccttcggcagcagacgctgcaccggctgcaccaggtcctgacgacgcggcagatggcgcggtcgctgctggccgtgtcggactacttccaccgcctccgcacgctgagctcgctctgggtcacacgccccagggcaccgcaggagcaataataggtccacagctggtgacggcggcgctgatgaatggcgtgatcgccggccgccgcatacaacggcacacgcgcatgtgtccattcatgcatatatgagtcgtgcatgggcgcatgcatggtgtgtcgttcgtcatcaagaacagagcttgcaggtagagccagttagggccggccgggggagagagagctagtgaggacgagaaaccaaccaaaggataatgttaatcttggcgacgattgtcgtgttggttgctttgtagctatagctaggtgtacttgatcgttcgatcgcgatctatcgatcgatcggctgctgctgtagtcgatgcggtggagtgatgatgttgttctaagttattagttatctctcatgatcaccggacgcatatgcttcgtagtcgtttaatttggagacgtgtgtggggttttaggcaaccgtcataaatctttgatagcatgtaacacatgctaatataagcttgctttgatggtagaagtcaagacggtgatgagtttctcatcc

SEQ ID NO: 69330 - DNA, 3232 bp, Zea Mays
ggtccaacacgaccgaacggagcagaggatccaccgaaacaccaaacggaggcctcgtgtctgctttcgcccatccctgctcttgccccgtttctcccttccatcgtgcttcctcctctctctctctctttttcgctcccgatttccaaatctcaaataataaataaccagaagggaagcgaatcttctccatcaacccagcaaatcgctcgttcgagcgtcccactcgacgagaaattctcacccatcacctccgcgtcgctccccccgttcgccgccaggggcccaatttcgtgtggacaggcacaggctgctgtgatcctttggtggatgggggcagcgcagctagccaccggaggttgcctagtttgaaatttaaccgcgttaccgaagtggtactccgtagttcttatggatcaacttgccctgcttgcgacggagctgggtgactcgtcagactttgaggtggagggcatccagaacctcactgagaacgatgtcagtgacgaggagattgagcccgaggacctggcgcggcgaatgtggaaggacagagtcaggctgaggaggatcaaggagcggcagcacaagcttgccctgcagcaggcagagctgcagaagttgaggcccaagcccatatccgaccaggccatgcgcaagaagatgtcaagggcacacgacgggatcctcaagtatatgctcaagctcatgcaggtgtgcaatgcacgcgggttcgtttatgggatcatcccggacaaggggaagcctgtcagtggcgcttccgataatatcagagcttggtggaaggagaaggtgaagtttgataagaacgggcctgcggcgattgagaaatacgagtctgacaacttagtatccgctactgcccagagtggtggaactaagagccagcacagcttgatggatctccaagatgccactcttggttcactgctttcctcattgatgcagcattgtgatccaccgcagcgcaagtacccattggagaagggtgcttcacccccgtggtggccttcagggaaggaggaatggtggaccgccctgggtcttccaagcggccaagttcctccttacaagaaaccacatgatcttaagaaggtctggaaggctggtgtgcttacaggtgtaatcaagcacatgtctcccaattttgataagataaggaatcatgtacggaaatcaaagtgtttgcaggataaaatgactgcaaaagaaagcctgatttggctgggagttctacagagagaagaaagccttgttcacagaatcgacaatggcgtatcggagattactcagcgcagtatgccagaggagaggattgcagacacaaatagcagcagtaatgagtatgatgtgtatggttttgaggatgctcctgtttctacatcatctaaagatgatgaacaagatctgtctccagttgcacaatctgctgtggagcatgttccgaaaagaggaagggaaagagcttacaataaacgccctaatcaaatcgttcctggtaaggcaaaagaaccaccaaagagaaaaagaacacgccacagctccactgttaccgagccagatgcacacagagttgttgatgcaccagaaaactcaagaaatttgatccctgatatgaatagattggatcaagtagaaatcccaggcacgtcaaaccagattgtcacctttgaccatgggggcaccacaactgaagctttacaacacagaggagatgctcaagtacaggtccatcctcctggtgctgaggttaatagcttctatagtgctccaactgcaaaccctactcctataagcatatatatgggtgaccagcctataccttatcaaaataatgacagcacaaggccgagatctgaaaatagttttcctgtagatgctcatactggtttaaataatcttcccagcagttatcagaacttacctccgaaacaatcactaccacttcccatgatggatcatcatgtggttcccatgggtatcagggcacctactgatagcattccttacggtgatcatatactaggtggtggaaattcaacttctgttcctggagatatgcagcaactcatagattttcctttctatgctgaacaagataagtttgttggcagttcctttgaggggttgcctttagactatatcagtatcagtagtccaatcccagatattgatgacttgctgcatgatgatgatttaatggaatacttgggaacataacattcggaagtctgtcacatgcgcggcaggcctggagcatctcaagagatcgtcagggattcagagaattcagaaagactgggaccagacaaaaaaaaaaagagctctggcgagcagaatatctagctgtgactgtgaaacggggtgtcaggcacccgtttgacttttatcggcaaatgttgtactgcactggcttgcgtcgacagccgtcgttacatgcatgtgtgttttatgtttgcactggaagtctggaaccttttttcgcctccagtgacgcaagttgtattgtggaaatcgaacacgcaccggcaggcggcacccgagcatgtaactgctcaggcttcaatgtttctttgtaactgctcaggcttcaatgtttctttgtaactgctccgtgcttcactgagccagttacaggtttcgcaatagaaatgagcatggtcaggtcagtctctgatcctttctagctatgattagacatggtgcaaactttggaaaactctttccagccggcaccaaccaaaaaaatgccgtgaacacaatggcagcaagttgacgagcctgtttgtgaccacacatcggactgacggactgtcgcaagtctcctctccccgctgacatgggcagcaaccattcaaccgactgagaaaaggttcaattctctacaccagtcgaagaataaattgtagccgcagaggagttggcatctcgagatcgccaatgtcaagatgtcatgcgccccattaaattccttcagaattcctcctctcgctcatcagttctcatcatcccatgtatgccagggaaaatacttctaagtatggatccattcgcattgtaccgatgtttcagcatatgatctaccagattatgtaatccagcttaaataatctagatgagaaacaaggagacaaattattaggacagatcatataatctggatgccggattatcataatactataaactgctcaacaaatgcttatttcag

SEQ ID NO: 69331 - DNA, 2619 bp, Zea Mays
acacgaccgaacggagcagaggatccaccgaaacaccaaacggaggcctcgtgtctgctttcgcccatccctgctcttgccccgtttctcccttccatcgtgcttcctcctctctctctctctttttcgctcccgatttccaaatctcaaataataaataaccagaagggaagcgaatcttctccatcaacccagcaaatcgctcgttcgagcgtcccactcgacgagaaattctcacccatcacctccgcgtcgctccccccgttcgccgccaggggcccaatttcgtgtggacaggcacaggctgctgtgatcctttggtggatgggggcagcgcagctagccaccggaggttgcctagtttgaaatttaaccgcgttaccgaagtggtactccgtagttcttatggatcaacttgccctgcttgcgacggagctgggtgactcgtcagactttgaggtggagggcatccagaacctcactgagaacgatgtcagtgacgaggagattgagcccgaggacctggcgcggcgaatgtggaaggacagagtcaggctgaggaggatcaaggagcggcagcacaagcttgccctgcagcaggcagagctgcagaagttgaggcccaagcccatatccgaccaggccatgcgcaagaagatgtcaagggcacacgacgggatcctcaagtatatgctcaagctcatgcaggtgtgcaatgcacgcgggttcgtttatgggatcatcccggacaaggggaagcctgtcagtggcgcttccgataatatcagagcttggtggaaggagaaggtgaagtttgataagaacgggcctgcggcgattgagaaatacgagtctgacaacttagtatccgctactgcccagagtggtggaactaagagccagcacagcttgatggatctccaagatgccactcttggttcactgctttcctcattgatgcagcattgtgatccaccgcagcgcaagtacccattggagaagggtgcttcacccccgtggtggccttcagggaaggaggaatggtggaccgccctgggtcttccaagcggccaagttcctccttacaagaaaccacatgatcttaagaaggtctggaaggctggtgtgcttacaggtgtaatcaagcacatgtctcccaattttgataagataaggaatcatgtacggaaatcaaagtgtttgcaggataaaatgactgcaaaagaaagcctgatttggctgggagttctacagagagaagaaagccttgttcacagaatcgacaatggcgtatcggagattactcagcgcagtatgccagaggagaggattgcagacacaaatagcagcagtaatgagtatgatgtgtatggttttgaggatgctcctgtttctacatcatctaaagatgatgaacaagatctgtctccagttgcacaatctgctgtggagcatgttccgaaaagaggaagggaaagagcttacaataaacgccctaatcaaatcgttcctggtaaggcaaaagaaccaccaaagagaaaaagaacacgccacagctccactgttaccgagccagatgcacacagagttgttgatgcaccagaaaactcaagaaatttgatccctgatatgaatagattggatcaagtagaaatcccaggcacgtcaaaccagattgtcacctttgaccatgggggcaccacaactgaagctttacaacacagaggagatgctcaagtacaggtccatcctcctggtgctgaggttaatagcttctatagtgctccaactgcaaaccctactcctataagcatatatatgggtgaccagcctataccttatcaaaataatgacagcacaaggccgagatctgaaaatagttttcctgtagatgctcatactggtttaaataatcttcccagcagttatcagaacttacctccgaaacaatcactaccacttcccatgatggatcatcatgtggttcccatgggtatcagggcacctactgatagcattccttacggtgatcatatactaggtggtggaaattcaacttctgttcctggagatatgcagcaactcatagattttcctttctatgctgaacaagataagtttgttggcagttcctttgaggggttgcctttagactatatcagtatcagtagtccaatcccagatattgatgacttgctgcatgatgatgatttaatggaatacttgggaacataacattcggtcaggatgagtctgctagcatttgttttcatccattttagtctcactggagtcatcatcctaacttaagtatggagggctaaacttctcattttgttgccggtcttgtcattggagaccaaccatctgttgtatgctgagtgatgacttgtattctttggcaataatgtgtcatacagtgacacaattgcacatgtggaaggaagtctgtcacatgcgcggcaggcctggagcatctcaagagatcgtcagggattcagagaattcagaaagactgggaccagacaaaaaaaaaaagagctctggcgagcagaatatctagctgtgactgtgaaacggggtgtcaggcacccgtttgacttttatcggcaaatgttg

SEQ ID NO: 69332 - DNA, 3139 bp, Zea Mays
acacgaccgaacggagcagaggatccaccgaaacaccaaacggaggcctcgtgtctgctttcgcccatccctgctcttgccccgtttctcccttccatcgtgcttcctcctctctctctctctttttcgctcccgatttccaaatctcaaataataaataaccagaagggaagcgaatcttctccatcaacccagcaaatcgctcgttcgagcgtcccactcgacgagaaattctcacccatcacctccgcgtcgctccccccgttcgccgccaggggcccaatttcgtgtggacaggcacaggctgctgtgatcctttggtggatgggggcagcgcagctagccaccggaggttgcctagtttgaaatttaaccgcgttaccgaagtggtactccgtagttcttatggatcaacttgccctgcttgcgacggagctgggtgactcgtcagactttgaggtggagggcatccagaacctcactgagaacgatgtcagtgacgaggagattgagcccgaggacctggcgcggcgaatgtggaaggacagagtcaggctgaggaggatcaaggagcggcagcacaagcttgccctgcagcaggcagagctgcagaagttgaggcccaagcccatatccgaccaggccatgcgcaagaagatgtcaagggcacacgacgggatcctcaagtatatgctcaagctcatgcaggtgtgcaatgcacgcgggttcgtttatgggatcatcccggacaaggggaagcctgtcagtggcgcttccgataatatcagagcttggtggaaggagaaggtgaagtttgataagaacgggcctgcggcgattgagaaatacgagtctgacaacttagtatccgctactgcccagagtggtggaactaagagccagcacagcttgatggatctccaagatgccactcttggttcactgctttcctcattgatgcagcattgtgatccaccgcagcgcaagtacccattggagaagggtgcttcacccccgtggtggccttcagggaaggaggaatggtggaccgccctgggtcttccaagcggccaagttcctccttacaagaaaccacatgatcttaagaaggtctggaaggctggtgtgcttacaggtgtaatcaagcacatgtctcccaattttgataagataaggaatcatgtacggaaatcaaagtgtttgcaggataaaatgactgcaaaagaaagcctgatttggctgggagttctacagagagaagaaagccttgttcacagaatcgacaatggcgtatcggagattactcagcgcagtatgccagaggagaggattgcagacacaaatagcagcagtaatgagtatgatgtgtatggttttgaggatgctcctgtttctacatcatctaaagatgatgaacaagatctgtctccagttgcacaatctgctgtggagcatgttccgaaaagaggaagggaaagagcttacaataaacgccctaatcaaatcgttcctggtaaggcaaaagaaccaccaaagagaaaaagaacacgccacagctccactgttaccgagccagatgcacacagagttgttgatgcaccagaaaactcaagaaatttgatccctgatatgaatagattggatcaagtagaaatcccaggcacgtcaaaccagattgtcacctttgaccatgggggcaccacaactgaagctttacaacacagaggagatgctcaagtacaggtccatcctcctggtgctgaggttaatagcttctatagtgctccaactgcaaaccctactcctataagcatatatatgggtgaccagcctataccttatcaaaataatgacagcacaaggccgagatctgaaaatagttttcctgtagatgctcatactggtttaaataatcttcccagcagttatcagaacttacctccgaaacaatcactaccacttcccatgatggatcatcatgtggttcccatgggtatcagggcacctactgatagcattccttacggtgatcatatactaggtggtggaaattcaacttctgttcctggagatatgcagcaactcatagattttcctttctatgctgaacaagataagtttgttggcagttcctttgaggggttgcctttagactatatcagtatcagtagtccaatcccagatattgatgacttgctgcatgatgatgatttaatggaatacttgggaacataacattcggacccaatcgcaaggaaatgatgatgtgttctgtgaatggtggttgagaaccagtttgatcaaactggaaacggggtctcaactcgctgatgactttaggggcctggatgttgtggaagcatcagaatggctgtttttaagggtgctgcacccagtgtccagcttgtccttggatgaatttgggagtaagaataccgctaatgcatgactggagctaggtgcttggagcagcttatgactgctgccacgtatacatataataggttcatccgctagtgtgttcctgaacaattagtgggtgtgtgttgtggttgggcttttttttttgtaaatatgttttcttaatagaaagatatgcagagaaaattaaaagggacccataccaactgttttacattcaaaggatgtgcatgcagactatctcacactcagaagccctaagaatattattaaatgtcagattcttttcttatttctcaatgtgagacacttccacaccagaatttgaagttctttttatccctctgtgttactgctgttggtaatttgtgatacggagactggaaccagttctgttccttttgctatgttcttttgtgtgaaagatacaaggttcatatctcttggcgcgggagttgttgggctgtgggctgctgcctccttgtgcgcaaattggcaggagccaatacttgtggggtcctctaatcataaccccttcgcaggaagtctgtcacatgcgcggcaggcctggagcatctcaagagatcgtcagggattcagagaattcagaaagactgggaccagacaaaaaaaaaaagagctctggcgagcagaatatctagctgtgactgtgaaacggggtgtcaggcacccgtttgacttttatcggcaaatgttg

SEQ ID NO: 69333 - DNA, 2841 bp, Zea Mays
cagcccaacacactacacattcgacacatatggtccaacacgaccgaacggagcagaggatccaccgaaacaccaaacggaggcctcgtgtctgctttcgcccatccctgctcttgccccgtttctcccttccatcgtgcttcctcctctctctctctctttttcgctcccgatttccaaatctcaaataataaataaccagaagggaagcgaatcttctccatcaacccagcaaatcgctcgttcgagcgtcccactcgacgagaaattctcacccatcacctccgcgtcgctccccccgttcgccgccaggggcccaatttcgtgtggacaggcacaggctgctgtgatcctttggtggatgggggcagcgcagctagccaccggaggttgcctagtttgaaatttaaccgcgttaccgaagtggtactccgtagttcttatggatcaacttgccctgcttgcgacggagctgggtgactcgtcagactttgaggtggagggcatccagaacctcactgagaacgatgtcagtgacgaggagattgagcccgaggacctggcgcggcgaatgtggaaggacagagtcaggctgaggaggatcaaggagcggcagcacaagcttgccctgcagcaggcagagctgcagaagttgaggcccaagcccatatccgaccaggccatgcgcaagaagatgtcaagggcacacgacgggatcctcaagtatatgctcaagctcatgcaggtgtgcaatgcacgcgggttcgtttatgggatcatcccggacaaggggaagcctgtcagtggcgcttccgataatatcagagcttggtggaaggagaaggtgaagtttgataagaacgggcctgcggcgattgagaaatacgagtctgacaacttagtatccgctactgcccagagtggtggaactaagagccagcacagcttgatggatctccaagatgccactcttggttcactgctttcctcattgatgcagcattgtgatccaccgcagcgcaagtacccattggagaagggtgcttcacccccgtggtggccttcagggaaggaggaatggtggaccgccctgggtcttccaagcggccaagttcctccttacaagaaaccacatgatcttaagaaggtctggaaggctggtgtgcttacaggtgtaatcaagcacatgtctcccaattttgataagataaggaatcatgtacggaaatcaaagtgtttgcaggataaaatgactgcaaaagaaagcctgatttggctgggagttctacagagagaagaaagccttgttcacagaatcgacaatggcgtatcggagattactcagcgcagtatgccagaggagaggattgcagacacaaatagcagcagtaatgagtatgatgtgtatggttttgaggatgctcctgtttctacatcatctaaagatgatgaacaagatctgtctccagttgcacaatctgctgtggagcatgttccgaaaagaggaagggaaagagcttacaataaacgccctaatcaaatcgttcctggtaaggcaaaagaaccaccaaagagaaaaagaacacgccacagctccactgttaccgagccagatgcacacagagttgttgatgcaccagaaaactcaagaaatttgatccctgatatgaatagattggatcaagtagaaatcccaggcacgtcaaaccagattgtcacctttgaccatgggggcaccacaactgaagctttacaacacagaggagatgctcaagtacaggtccatcctcctggtgctgaggttaatagcttctatagtgctccaactgcaaaccctactcctataagcatatatatgggtgaccagcctataccttatcaaaataatgacagcacaaggccgagatctgaaaatagttttcctgtagatgctcatactggtttaaataatcttcccagcagttatcagaacttacctccgaaacaatcactaccacttcccatgatggatcatcatgtggttcccatgggtatcagggcacctactgatagcattccttacggtgatcatatactaggtggtggaaattcaacttctgttcctggagatatgcagcaactcatagattttcctttctatgctgaacaagataagtttgttggcagttcctttgaggggttgcctttagactatatcagtatcagtagtccaatcccagatattgatgacttgctgcatgatgatgatttaatggaatacttgggaacataacattcggtcaggatgagtctgctagcatttgttttcatccattttagtctcactggagtcatcatcctaacttaagtatggagggctaaacttctcattttgttgccggtcttgtcattggagaccaaccatctgttgtatgctgagtgatgacttgtattctttggcaataatgtgtcatacagtgacacaattgcacatgtggaaggacccaatcgcaaggaaatgatgatgtgttctgtgaatggtggttgagaaccagtttgatcaaactggaaacggggtctcaactcgctgatgactttaggggcctggatgttgtggaagcatcagaatggctgtttttaagggtgctgcacccagtgtccagcttgtccttggatgaatttgggagaagtctgtcacatgcgcggcaggcctggagcatctcaagagatcgtcagggattcagagaattcagaaagactgggaccagacaaaaaaaaaaagagctctggcgagcagaatatctagctgtgactgtgaaacggggtgtcaggcacccgtttgacttttatcggcaaatgttg

SEQ ID NO: 69334 - DNA, 2626 bp, Zea Mays
cacatatggtccaacacgaccgaacggagcagaggatccaccgaaacaccaaacggaggcctcgtgtctgctttcgcccatccctgctcttgccccgtttctcccttccatcgtgcttcctcctctctctctctctttttcgctcccgatttccaaatctcaaataataaataaccagaagggaagcgaatcttctccatcaacccagcaaatcgctcgttcgagcgtcccactcgacgagaaattctcacccatcacctccgcgtcgctccccccgttcgccgccaggggcccaatttcgtgtggacaggcacaggctgctgtgatcctttggtggatgggggcagcgcagctagccaccggaggttgcctagtttgaaatttaaccgcgttaccgaagtggtactccgtagttcttatggatcaacttgccctgcttgcgacggagctgggtgactcgtcagactttgaggtggagggcatccagaacctcactgagaacgatgtcagtgacgaggagattgagcccgaggacctggcgcggcgaatgtggaaggacagagtcaggctgaggaggatcaaggagcggcagcacaagcttgccctgcagcaggcagagctgcagaagttgaggcccaagcccatatccgaccaggccatgcgcaagaagatgtcaagggcacacgacgggatcctcaagtatatgctcaagctcatgcaggtgtgcaatgcacgcgggttcgtttatgggatcatcccggacaaggggaagcctgtcagtggcgcttccgataatatcagagcttggtggaaggagaaggtgaagtttgataagaacgggcctgcggcgattgagaaatacgagtctgacaacttagtatccgctactgcccagagtggtggaactaagagccagcacagcttgatggatctccaagatgccactcttggttcactgctttcctcattgatgcagcattgtgatccaccgcagcgcaagtacccattggagaagggtgcttcacccccgtggtggccttcagggaaggaggaatggtggaccgccctgggtcttccaagcggccaagttcctccttacaagaaaccacatgatcttaagaaggtctggaaggctggtgtgcttacaggtgtaatcaagcacatgtctcccaattttgataagataaggaatcatgtacggaaatcaaagtgtttgcaggataaaatgactgcaaaagaaagcctgatttggctgggagttctacagagagaagaaagccttgttcacagaatcgacaatggcgtatcggagattactcagcgcagtatgccagaggagaggattgcagacacaaatagcagcagtaatgagtatgatgtgtatggttttgaggatgctcctgtttctacatcatctaaagatgatgaacaagatctgtctccagttgcacaatctgctgtggagcatgttccgaaaagaggaagggaaagagcttacaataaacgccctaatcaaatcgttcctggtaaggcaaaagaaccaccaaagagaaaaagaacacgccacagctccactgttaccgagccagatgcacacagagttgttgatgcaccagaaaactcaagaaatttgatccctgatatgaatagattggatcaagtagaaatcccaggcacgtcaaaccagattgtcacctttgaccatgggggcaccacaactgaagctttacaacacagaggagatgctcaagtacaggtccatcctcctggtgctgaggttaatagcttctatagtgctccaactgcaaaccctactcctataagcatatatatgggtgaccagcctataccttatcaaaataatgacagcacaaggccgagatctgaaaatagttttcctgtagatgctcatactggtttaaataatcttcccagcagttatcagaacttacctccgaaacaatcactaccacttcccatgatggatcatcatgtggttcccatgggtatcagggcacctactgatagcattccttacggtgatcatatactaggtggtggaaattcaacttctgttcctggagatatgcagcaactcatagattttcctttctatgctgaacaagataagtttgttggcagttcctttgaggggttgcctttagactatatcagtatcagtagtccaatcccagatattgatgacttgctgcatgatgatgatttaatggaatacttgggaacataacattcggtcaggatgagtctgctagcatttgttttcatccattttagtctcactggagtcatcatcctaacttaatgacacaattgcacatgtggaaggtgaacatggcctaagttaaatatgatatctttctggagataatatctgttgaagaaagggctagatttttttttatagttttagaatccttgagatatgattgttttcctctgtcatcctatctttgtctatggcttttgccatctacaaaaacatcgggaatccaacactgtatatgcaataaagaaatgaaaaaaatgattttgccatcctctctgttgtgtttgttttttatttcaatgtcccctaagaatgctgttgttgcataacaaagtccac

SEQ ID NO: 69335 - DNA, 1021 bp, Zea Mays
caggaactgaccaacaccaccgagacctaaacctaatcccctcccagcagctagcatccccactcggccactctcttgctcgcagccgccgcccaccgtaagtcacaccgagtgaccgcgccaccgcggtcagtcgtcgtcgacccaccgtccaggcgtccacgcctacgccggaggcccaccgtccacgccagcgccggaggtcgtccaacagcacatcagagtcggaggtcgcccactcgcttgttgccggttggccgctgacctcgtcgacggccgatctgctgcccagccacgcgctggaggtcgcccgcgccataggtctctcaccagcctgcgccaagcactgatgtgcatgcaagtgtggtcacgtgctgacatgctaggtgataaatcttgctttattaatgcattgatgacttgtttggaagatgaggaggatgaaatggatgatcctaatagtatgataactgactgaaaattggaaagcaagcaacaagtcaacaatctacattcaggtcacctagagctggagtgtattgtggactgttgttgctgctatgcttgaagtatgggtgtatctgtgtatgatgcctgaagcagaaactctctgtgtttgtggggtgtggacagtggagagtggactgctgcagtgctgctgctattgtgcttgttgtgtcttatttcatccaagcgaccaagccaattagccaagcactcaactgctatgtttgtggacaactacctgtaacctgtgtgactgtctttgtgaaatgtgaactcttttatgtattatctgtcttcagtctgtgtttaattgttttattagtggactcgcctgctgtcttcagtctgtgtttaattgtttactaggggagtgtccgtgcgttgcaacggaaacatataatagttaagtgctcgtacgctgtgacttttttaggagttacaaaatcaggttgtctattctcgatgtattagcgtaaccatggttatcatgaagatgctttatataataccatca

SEQ ID NO: 69336 - DNA, 995 bp, Zea Mays
aacggatcaagttgtgtacactggaacatttgataacgatacagatatgattgccttctcatgttgtgtatatgatggtggtgatgaggagaaggaaatggatgcagccagagaaataggttggagagggaaatttactaagagaggacgtgtaataagaccaggaattattagaatgagtggaaaatgtcctcttacacctttggaggttgggttaatgcttcgtggaatggatttcagcaataagactgcaatctttttggcatctggaaagatttacaaagcagagaagaacatggcttctcttcttgaaatgtttcctctcctacagacaaaagagacactggcatcagaagaggaacttgctccattcaagatggctgctgttgactatagtatttgtgcccaaagtgaagtttttgtgaccacacaaggtggaaatcccgcattttttatgggtcacaggagatacttgtatggtgggcattcaaaaacaattaaaccagacaaaagaaggcttgctgtactcttcaataatccacgtatagggtggacggcattgaagcggcacttgcttaatatgagagcatacagtgatgtcaaggggatcgaaatgaaaagaccaaacgaatctatatataccttcccgtgtcctgactgcatgtgccgcttgaacagaacagaacactcgaaatccaaacagagtagatagtatatttcgtatgtagaccaaatggctaaaaccatccaatattttcatagactgaaaatgcagagaaagcaacaaaggtgtatcaatacagtcgtacaagcttagtatcggatggtttttaatttgtatagcaaagcacgggcacatacctatatatcttttaatgtatgtaaatattcttaacctttaaaagatactaacaagcaggtataacgataattaatgtttctatatcttaatatattttatcattatatgttgattccgtagcaacgcacggtca

SEQ ID NO: 69337 - DNA, 1063 bp, Zea Mays
cccacccctccttccatcctcgccccgcgcgctccgcacgcgttccatccatgctagcctacagcaacagatgaaattaaaagactttcatgattggatatgattgccttctcatgttgtgtatatgatggtggtgatgaggagaaggaaatggatgcagccagagaaataggttggagagggaaatttactaagagaggacgtgtaataagaccaggaattattagaatgagtggaaaatgtcctcttacacctttggaggttgggttaatgcttcgtggaatggatttcagcaataagactgcaatctttttggcatctggaaagatttacaaagcagagaagaacatggcttctcttcttgaaatgtttcctctcctacagacaaaagagacactggcatcagaagaggaacttgctccattcaagaatttctccttctagatggctgctgttgactatagtatttgtgcccaaagtgaagtttttgtgaccacacaaggtggaaatcccgcattttttatgggtcacaggagatacttgtatggtgggcattcaaaaacaattaaaccagacaaaagaaggcttgctgtactcttcaataatccacgtatagggtggacggcattgaagcggcacttgcttaatatgagagcatacagtgatgtcaaggggatcgaaatgaaaagaccaaacgaatctatatataccttcccgtgtcctgactgcatgtgccgcttgaacagaacagaacactcgaaatccaaacagagtagatagtatatttcgtatgtagaccaaatggctaaaaccatccaatattttcatagactgaaaatgcagagaaagcaacaaaggtgtatcaatacagtcgtacaagcttagtatcggatggtttttaatttgtatagcaaagcacgggcacatacctatatatcttttaatgtatgtaaatattcttaacctttaaaagatactaacaagcaggtataacgataattaatgtttctatatcttaatatattttatcattatatgttgattccgtagcaacgcacggtca

SEQ ID NO: 69338 - DNA, 3375 bp, Zea Mays
ccccgttcgacatcagcgctcctccccccgaccaccgtcgatttggtgtctgagccctcgctagatctcgcaccctcaccgaagccctcattggattcgacgccctcactggaggttgcaccgcgatgggatctaggaaccgtagatggcctcgaccacccacgtgggttgttgcctctgcggatgagacgcagcgccaaggggccagaggaaacgacgtgatggacctcatatcacagctcatgtcatggttcatgcctctcatcgcctcccgccgtggttcgccgaggccgccccatgctgcacgccatgggcagcgatgtcgccttcacgaagctcggcatggagtgctaccccaaggaggccaccgctgttggggtcaagggattccccgacatggaaaaataaccgacgacgagatcaatgccgcctccgtcacttgctgccgcatctacctcaggtccgagtctgaacctggtatatcgcaagttcttcggcgggtactgcaactgctcataccatgattgcagagctgagaacaccttgaagctaggagatgtcatccagtaccatgaatgtggttaccgcattctctataagaagcgggcaccgatccatgtgtagtaccagcaaacttcccattttctatgactccaaggccttatgtcatccagcaatggcagttgccgttcagtttggactatagaattcaattatgagttcagtttgttgatattaaaggaaagatacaggattcatacttaaatacttaacaaggattcatacttaaatttatctgatgcaatttttcaactgaacgtgaacttggcaggggtgagtacggagtagtgtacaagcgagttctgcattgagctgtcgtagagagcgtagacagacactctagccaacgttgttggctgggattggaacacaaaagcgagacaagggatgagaagcacaggaggagccaggtgaggtgaggtggcgacacacaggagtcgggcaagctcagctcatctcatctcatgctctactaaaaaggattagcccatctcaagagaaaagagtaacattgtcagcccactgcaataaccacactattaccagtcttgaaattcactttttgtttgtttgtcatagaaccagggattcatgacaggaaatgatctccttctcaagataagaaaattgcatttaagttactaatcagtgtatggtttactagtttggcggaggcctcaatccgggtctagaccaaggtcatggtggcgacgaaggtggaggccgaggtggagggtgatgcttccactctcagtcttggggtggggtcgtggggatgacatatgagagtggggtgcagtggtggctcgtcgacatcagccattggcacccttcccctgcccagttcgatgatgcaccctccctcctactacttcacgatggcaccaccatctccaggtaccgtgccgatggaggaaaggagaaacaaggtattttgaagattaagagtgatgccacatacttagcgatggggtgcttgatatcctagatattgtactagcttcagacctcgccgaattgacaccttcgaagaaatgaagtcgccagattggtaggctttgagtgtttcaccagaggaagtatgtagtgcagttaaggaaggaaatgaacttccatcagacttgatagacacactactaaagtggatcccaagcaatgatgaggagcttaggcttcgactgtcctcccatagcaccgccacaccgcatgcgtccgcggcggcgtccgcctcggcgccggtctcgcacaccgctccctagctggggaagttcatcgcctccgagcccttcaacgtggggggattcgattgggcgatctacttctaccccgatgggaagagcggcgaggatggcgttgtctacgtctcgctcttcatagccctggccagcgaaggcaccgatgtgcgcgcgctgttcgaggtcacgctcgtcgaccagagcggcaaggggcaagacaaggtgcatacccactttgggaggtctctcgagagcgacccatacaccctcaagtaccgcgacagcatgtgatgagtctatgtacaggttgtttcctacggtatgcttatctatggtggaaagaaaaagtgattgactcatacttgaaaagaaaagatggcctttgcccattgacgcctgagacaaccagaaatttgccatgacctcgttcctgaccaagaaaaactgtcaagcacagaatcacagttgatatattgggattccaaggtatcagaggctgatatggatgcaatgtggaaacatcctgatgtgtataaggagtggataaaatctggtgagagacgtggaaatgtacgattctcccatgatgcaaagaacatgccttacctttctcgcgtcgaggtgaaggatatgattgccttctcatgttgtgtatatgatggtggtgatgaggagaaggaaatggatgcagccagagaaataggttggagagggaaatttactaagagaggacgtgtaataagaccaggaattattagaatgagtggaaaatgtcctcttacacctttggaggttgggttaatgcttcgtggaatggatttcagcaataagactgcaatctttttggcatctggaaagatttacaaagcagagaagaacatggcttctcttcttgaaatgtttcctctcctacagacaaaagagacactggcatcagaagaggaacttgctccattcaagatggctgctgttgactatagtatttgtgcccaaagtgaagtttttgtgaccacacaaggtggaaatcccgcattttttatgggtcacaggagatacttgtatggtgggcattcaaaaacaattaaaccagacaaaagaaggcttgctgtactcttcaataatccacgtatagggtggacggcattgaagcggcacttgcttaatatgagagcatacagtgatgtcaaggggatcgaaatgaaaagaccaaacgaatctatatataccttcccgtgtcctgactgcatgtgccgcttgaacagaacagaacactcgaaatccaaacagagtagatagtatatttcgtatgtagaccaaatggctaaaaccatccaatattttcatagactgaaaatgcagagaaagcaacaaaggtgtatcaatacagtcgtacaagcttagtatcggatggtttttaatttgtatagcaaagcacgggcacatacctatatatcttttaatgtatgtaaatattcttaacctttaaaagatactaacaagcaggtataacgataattaatgtttctatatcttaatatattttatcattatatgttgattccgtagcaacgcacggtca

SEQ ID NO: 69339 - DNA, 3438 bp, Zea Mays
ccccgttcgacatcagcgctcctccccccgaccaccgtcgatttggtgtctgagccctcgctagatctcgcaccctcaccgaagccctcattggattcgacgccctcactggaggttgcaccgcgatgggatctaggaaccgtagatggcctcgaccacccacgtgggttgttgcctctgcggatgagacgcagcgccaaggggccagaggaaacgacgtgatggacctcatatcacagctcatgtcatggttcatgcctctcatcgcctcccgccgtggttcgccgaggccgccccatgctgcacgccatgggcagcgatgtcgccttcacgaagctcggcatggagtgctaccccaaggaggccaccgctgttggggtcaagggattccccgacatggaaaaataaccgacgacgagatcaatgccgcctccgtcacttgctgccgcatctacctcaggtccgagtctgaacctgattgcagagctgagaacaccttgaagctaggagatgtcatccagtaccatgaatgtggttaccgcattctctataagaagcgggcaccgatccatgtgtagtaccagcaaacttcccattttctatgactccaagcaatggcagttgccgttcagtttggactatagaattcaattatgagttcagtttgttgatattaaaggaaagatacaggtcagcctcttttacttaacaaggtaagagctctaaatttatgttagtatagtagaagtttttttgttgtaaatatcacttgcatatacgccagctagatgctcactatttgtcctctctcaaggtctcaatctgtctgatgtttattcaaccgattagctatcatcataaacctgaataacattttgctttgttcatgttcaggattcatacttaaatacttaacaaggtaagagctctaaatttatgttagtatagtagaagttttttttgttgttgtaaatatcacttgcatatacgccagctagatgctcactatttgtcctctctcaaggtctgaatctgtctgatgttttattcaactgattaactatcatcataaacctgaataacattttgctttgttcatgttcaggattcatacttaaatttatctgatgcaatttttcaactgaacgtgaacttggcaggggtgagtacggagtagtgtacaagcgagttctgcattgagctgtcgtagagagcgtagacagacactctagccaacgttgttggctgggattggaacacaaaagcgagacaagggatgagaagcacaggaggagccagtttggcggaggcctcaatccgggtctagaccaaggtcatggtggcgacgaaggtggaggccgaggtggagggtgatgcttccactctcagtcttggggtggggtcgtggggatgacatatgagagtggggtgcagtggtggctcgtcgacatcagccattggcacccttcccctgcccagttcgatgatgcaccctccctcctactacttcacgatggcaccaccatctccaggtaccgtgccgatggaggaaaggagaaacaagattaagagtgatgccacatacttagcgatggggtgcttgatatcctagatattgtactagcttcagacctcgccgaattgacaccttcgaagaaatgaagtcgccagattggtaggctttgagtgtttcaccagaggaagtatgtagtgcagttaaggaaggaaatgaacttccatcagacttgatagacacactactaaagtggatcccaagcaatgatgaggagcttaggcttcgactgtcctcccatagcaccgccacaccgcatgcgtccgcggcggcgtccgcctcggcgccggtctcgcacaccgctccctagctggggaagttcatcgcctccgagcccttcaacgtggggggattcgattgggcgatctacttctaccccgatgggaagagcggcgaggatggcgttgtctacgtctcgctcttcatagccctggccagcgaaggcaccgatgtgcgcgcgctgttcgaggtcacgctcgtcgaccagagcggcaaggggcaagacaaggtgcatacccactttgggaggtctctcgagagcgacccatacaccctcaagtaccgcgacagcatgtgatgagtctatgtacaggttgtttcctacggtatgcttatctatggtggaaagaaaaagtgattgactcatacttgaaaagaaaagatggcctttgcccattgacgcctgagacaaccagaaatttgccatgacctcgttcctgaccaagaaaaactgtcaagcacagaatcacagttgatatattgggattccaaggtatcagaggctgatatggatgcaatgtggaaacatcctgatgtgtataaggagtggataaaatctggtgagagacgtggaaatgtacgattctcccatgatgcaaagaacatgccttacctttctcgcgtcgaggtgaaggatatgattgccttctcatgttgtgtatatgatggtggtgatgaggagaaggaaatggatgcagccagagaaataggttggagagggaaatttactaagagaggacgtgtaataagaccaggaattattagaatgagtggaaaatgtcctcttacacctttggaggttgggttaatgcttcgtggaatggatttcagcaataagactgcaatctttttggcatctggaaagatttacaaagcagagaagaacatggcttctcttcttgaaatgtttcctctcctacagacaaaagagacactggcatcagaagaggaacttgctccattcaagatggctgctgttgactatagtatttgtgcccaaagtgaagtttttgtgaccacacaaggtggaaatcccgcattttttatgggtcacaggagatacttgtatggtgggcattcaaaaacaattaaaccagacaaaagaaggcttgctgtactcttcaataatccacgtatagggtggacggcattgaagcggcacttgcttaatatgagagcatacagtgatgtcaaggggatcgaaatgaaaagaccaaacgaatctatatataccttcccgtgtcctgactgcatgtgccgcttgaacagaacagaacactcgaaatccaaacagagtagatagtatatttcgtatgtagaccaaatggctaaaaccatccaatattttcatagactgaaaatgcagagaaagcaacaaaggtgtatcaatacagtcgtacaagcttagtatcggatggtttttaatttgtatagcaaagcacgggcacatacctatatatcttttaatgtatgtaaatattcttaacctttaaaagatactaacaagcaggtataacgataattaatgtttctatatcttaatatattttatcattatatgttgattccgtagcaacgcacggtca

SEQ ID NO: 69340 - DNA, 3406 bp, Zea Mays
ccccgttcgacatcagcgctcctccccccgaccaccgtcgatttggtgtctgagccctcgctagatctcgcaccctcaccgaagccctcattggattcgacgccctcactggaggttgcaccgcgatgggatctaggaaccgtagatggcctcgaccacccacgtgggttgttgcctctgcggatgagacgcagcgccaaggggccagaggaaacgacgtgatggacctcatatcacagctcatgtcatggttcatgcctctcatcgcctcccgccgtggttcgccgaggccgccccatgctgcacgccatgggcagcgatgtcgccttcacgaagctcggcatggagtgctaccccaaggaggccaccgctgttggggtcaagggattccccgacatggaaaaataaccgacgacgagatcaatgccgcctccgtcacttgctgccgcatctacctcagattgcagagctgagaacaccttgaagctaggagatgtcatccagtaccatgaatgtggttaccgcattctctataagaagcgggcaccgatccatgtgtagtaccagcaaacttcccattttctatgactccaagcaatggcagttgccgttcagtttggactatagaattcaattatgagttcagtttgttgatattaaaggaaagatacaggtcagcctcttttacttaacaaggattcatacttaaatacttaacaaggattcatacttaaatttatctgatgcaatttttcaactgaacgtgaacttggcaggggtgagtacggagtagtgtacaaggtatgtccattcttctatcgctccaattttcaactgatggaaacagtaacagataattaatggctcacctacttgcaatgaagcgagttctgcattgagctgtcgtagagagcgtagacagacactctagccaacgttgttggctgggattggaacacaaaagcgagacaagggatgagaagcacaggaggagccaggtgaggtgaggtggcgacacacaggagtcgggcaagctcagctcatctcatctcatgctctactaaaaaggattagcccatctcaagagaaaagagtaacattgtcagcccactgcaataaccacactattaccagtcttgaaattcactttttgtttgtttgtcatagaaccagggattcatgacaggaaatgatctccttctcaagataagaaaattgcatttaagttactaatcagtgtatggtttactagtttggcggaggcctcaatccgggtctagaccaaggtcatggtggcgacgaaggtggaggccgaggtggagggtgatgcttccactctcagtcttggggtggggtcgtggggatgacatatgagagtggggtgcagtggtggctcgtcgacatcagccattggcacccttcccctgcccagttcgatgatgcaccctccctcctactacttcacgatggcaccaccatctccaggtaccgtgccgatggaggaaaggagaaacaagattaagagtgatgccacatacttagcgatggggtgcttgatatcctagatattgtactagcttcagacctcgccgaattgacaccttcgaagaaatgaagtcgccagattggtaggctttgagtgtttcaccagaggaagtatgtagtgcagttaaggaaggaaatgaacttccatcagacttgatagacacactactaaagtggatcccaagcaatgatgaggagcttaggcttcgactgtcctcccatagcaccgccacaccgcatgcgtccgcggcggcgtccgcctcggcgccggtctcgcacaccgctccctagctggggaagttcatcgcctccgagcccttcaacgtggggggattcgattgggcgatctacttctaccccgatgggaagagcggcgaggatggcgttgtctacgtctcgctcttcatagccctggccagcgaaggcaccgatgtgcgcgcgctgttcgaggtcacgctcgtcgaccagagcggcaaggggcaagacaaggtgcatacccactttgggaggtctctcgagagcgacccatacaccctcaagtaccgcgacagcatgtgatgagtctatgtacaggttgtttcctacggtatgcttatctatggtggaaagaaaaagtgattgactcatacttgaaaagaaaagatggcctttgcccattgacgcctgagacaaccagaaatttgccatgacctcgttcctgaccaagaaaaactgtcaagcacagaatcacagttgatatattgggattccaaggtatcagaggctgatatggatgcaatgtggaaacatcctgatgtgtataaggagtggataaaatctggtgagagacgtggaaatgtacgattctcccatgatgcaaagaacatgccttacctttctcgcgtcgaggtgaaggatatgattgccttctcatgttgtgtatatgatggtggtgatgaggagaaggaaatggatgcagccagagaaataggttggagagggaaatttactaagagaggacgtgtaataagaccaggaattattagaatgagtggaaaatgtcctcttacacctttggaggttgggttaatgcttcgtggaatggatttcagcaataagactgcaatctttttggcatctggaaagatttacaaagcagagaagaacatggcttctcttcttgaaatgtttcctctcctacagacaaaagagacactggcatcagaagaggaacttgctccattcaagaatttctccttctagatggctgctgttgactatagtatttgtgcccaaagtgaagtttttgtgaccacacaaggtggaaatcccgcattttttatgggtcacaggagatacttgtatggtgggcattcaaaaacaattaaaccagacaaaagaaggcttgctgtactcttcaataatccacgtatagggtggacggcattgaagcggcacttgcttaatatgagagcatacagtgatgtcaaggggatcgaaatgaaaagaccaaacgaatctatatataccttcccgtgtcctgactgcatgtgccgcttgaacagaacagaacactcgaaatccaaacagagtagatagtatatttcgtatgtagaccaaatggctaaaaccatccaatattttcatagactgaaaatgcagagaaagcaacaaaggtgtatcaatacagtcgtacaagcttagtatcggatggtttttaatttgtatagcaaagcacgggcacatacctatatatcttttaatgtatgtaaatattcttaacctttaaaagatactaacaagcaggtataacgataattaatgtttctatatcttaatatattttatcattatatgttgattccgtagcaacgcacggtca

SEQ ID NO: 69341 - DNA, 3460 bp, Zea Mays
ccccgttcgacatcagcgctcctccccccgaccaccgtcgatttggtgtctgagccctcgctagatctcgcaccctcaccgaagccctcattggattcgacgccctcactggaggttgcaccgcgatgggatctaggaaccgtagatggcctcgaccacccacgtgggttgttgcctctgcggatgagacgcagcgccaaggggccagaggaaacgacgtgatggacctcatatcacagctcatgtcatggttcatgcctctcatcgcctcccgccgtggttcgccgaggccgccccatgctgcacgccatgggcagcgatgtcgccttcacgaagctcggcatggagtgctaccccaaggaggccaccgctgttggggtcaagggattccccgacatggaaaaataaccgacgacgagatcaatgccgcctccgtcacttgctgccgcatctacctcaggtccgagtctgaacctggtatatcgcaagttcttcggcgggtactgcaactgctcataccatgattgcagagctgagaacaccttgaagctaggagatgtcatccagtaccatgaatgtggttaccgcattctctataagaagcgggcaccgatccatgtgtagtaccagcaaacttcccattttctatgactccaaggccttatgtcatccagcaatggcagttgccgttcagtttggactatagaattcaattatgagttcagtttgttgatattaaaggaaagatacaggtcagcctcttttacttaacaaggattcatacttaaatttatctgatgcaatttttcaactgaacgtgaacttggcaggggtgagtacggagtagtgtacaaggtatgtccattcttctatcgctccaattttcaactgatggaaacagtaacagataattaatggctcacctacttgcaatgaagcgagttctgcattgagctgtcgtagagagcgtagacagacactctagccaacgttgttggctgggattggaacacaaaagcgagacaagggatgagaagcacaggaggagccaggtgaggtgaggtggcgacacacaggagtcgggcaagctcagctcatctcatctcatgctctactaaaaaggattagcccatctcaagagaaaagagtaacattgtcagcccactgcaataaccacactattaccagtcttgaaattcactttttgtttgtttgtcatagaaccagggattcatgacaggaaatgatctccttctcaagataagaaaattgcatttaagttactaatcagtgtatggtttactagtttggcggaggcctcaatccgggtctagaccaaggtcatggtggcgacgaaggtggaggccgaggtggagggtgatgcttccactctcagtcttggggtggggtcgtggggatgacatatgagagtggggtgcagtggtggctcgtcgacatcagccattggcacccttcccctgcccagttcgatgatgcaccctccctcctactacttcacgatggcaccaccatctccaggtaccgtgccgatggaggaaaggagaaacaagattaagagtgatgccacatacttagcgatggggtgcttgatatcctagatattgtactagcttcagacctcgccgaattgacaccttcgaagaaatgaagtcgccagattggtaggctttgagtgtttcaccagaggaagtatgtagtgcagttaaggaaggaaatgaacttccatcagacttgatagacacactactaaagtggatcccaagcaatgatgaggagcttaggcttcgactgtcctcccatagcaccgccacaccgcatgcgtccgcggcggcgtccgcctcggcgccggtctcgcacaccgctccctagctggggaagttcatcgcctccgagcccttcaacgtggggggattcgattgggcgatctacttctaccccgatgggaagagcggcgaggatggcgttgtctacgtctcgctcttcatagccctggccagcgaaggcaccgatgtgcgcgcgctgttcgaggtcacgctcgtcgaccagagcggcaaggggcaagacaaggtgcatacccactttgggaggtctctcgagagcgacccatacaccctcaagtaccgcgacagcatgtgatgagtctatgtacaggttgtttcctacggtatgcttatctatggtggaaagaaaaagtgattgactcatacttgaaaagaaaagatggcctttgcccattgacgcctgagacaaccagaaatttgccatgacctcgttcctgaccaagaaaaactgtcaagcacagaatcacagttgatatattgggattccaaggtatcagaggctgatatggatgcaatgtggaaacatcctgatgtgtataaggagtggataaaatctggtgagagacgtggaaatgtacgattctcccatgatgcaaagaacatgccttacctttctcgcgtcgaggtgaaggatatgattgccttctcatgttgtgtatatgatggtggtgatgaggagaaggaaatggatgcagccagagaaataggttggagagggaaatttactaagagaggacgtgtaataagaccaggaattattagaatgagtggaaaatgtcctcttacacctttggaggttgggttaatgcttcgtggaatggatttcagcaataagactgcaatctttttggcatctggaaagatttacaaagcagagaagaacatggcttctcttcttgaaatgtttcctctcctacagacaaaagagacactggcatcagaagaggaacttgctccattcaagaatttctccttctagatggctgctgttgactatagtatttgtgcccaaagtgaagtttttgtgaccacacaaggtggaaatcccgcattttttatgggtcacaggagatacttgtatggtgggcattcaaaaacaattaaaccagacaaaagaaggcttgctgtactcttcaataatccacgtatagggtggacggcattgaagcggcacttgcttaatatgagagcatacagtgatgtcaaggggatcgaaatgaaaagaccaaacgaatctatatataccttcccgtgtcctgactgcatgtgccgcttgaacagaacagaacactcgaaatccaaacagagtagatagtatatttcgtatgtagaccaaatggctaaaaccatccaatattttcatagactgaaaatgcagagaaagcaacaaaggtgtatcaatacagtcgtacaagcttagtatcggatggtttttaatttgtatagcaaagcacgggcacatacctatatatcttttaatgtatgtaaatattcttaacctttaaaagatactaacaagcaggtataacgataattaatgtttctatatcttaatatattttatcattatatgttgattccgtagcaacgcacggtca

SEQ ID NO: 69342 - DNA, 3327 bp, Zea Mays
ccccgttcgacatcagcgctcctccccccgaccaccgtcgatttggtgtctgagccctcgctagatctcgcaccctcaccgaagccctcattggattcgacgccctcactggaggttgcaccgcgatgggatctaggaaccgtagatggcctcgaccacccacgtgggttgttgcctctgcggatgagacgcagcgccaaggggccagaggaaacgacgtgatggacctcatatcacagctcatgtcatggttcatgcctctcatcgcctcccgccgtggttcgccgaggccgccccatgctgcacgccatgggcagcgatgtcgccttcacgaagctcggcatggagtgctaccccaaggaggccaccgctgttggggtcaagggattccccgacatggaaaaataaccgacgacgagatcaatgccgcctccgtcacttgctgccgcatctacctcaggtccgagtctgaacctgattgcagagctgagaacaccttgaagctaggagatgtcatccagtaccatgaatgtggttaccgcattctctataagaagcgggcaccgatccatgtgtagtaccagcaaacttcccattttctatgactccaaggccttatgtcatccagcaatggcagttgccgttcagtttggactatagaattcaattatgagttcagtttgttgatattaaaggaaagatacaggtcagcctcttttacttaacaaggattcatacttaaatttatctgatgcaatttttcaactgaacgtgaacttggcaggggtgagtacggagtagtgtacaagcgagttctgcattgagctgtcgtagagagcgtagacagacactctagccaacgttgttggctgggattggaacacaaaagcgagacaagggatgagaagcacaggaggagccaggtgaggtgaggtggcgacacacaggagtcgggcaagctcagctcatctcatctcatgctctactaaaaaggattagcccatctcaagagaaaagagtaacattgtcagcccactgcaataaccacactattaccagtcttgaaattcactttttgtttgtttgtcatagaaccagggattcatgacaggaaatgatctccttctcaagataagaaaattgcatttaagttactaatcagtgtatggtttactagtttggcggaggcctcaatccgggtctagaccaaggtcatggtggcgacgaaggtggaggccgaggtggagggtgatgcttccactctcagtcttggggtggggtcgtggggatgacatatgagagtggggtgcagtggtggctcgtcgacatcagccattggcacccttcccctgcccagttcgatgatgcaccctccctcctactacttcacgatggcaccaccatctccaggtaccgtgccgatggaggaaaggagaaacaaggtattttgaagattaagagtgatgccacatacttagcgatggggtgcttgatatcctagatattgtactagcttcagacctcgccgaattgacaccttcgaagaaatgaagtcgccagattggtaggctttgagtgtttcaccagaggaagtatgtagtgcagttaaggaaggaaatgaacttccatcagacttgatagacacactactaaagtggatcccaagcaatgatgaggagcttaggcttcgactgtcctcccatagcaccgccacaccgcatgcgtccgcggcggcgtccgcctcggcgccggtctcgcacaccgctccctagctggggaagttcatcgcctccgagcccttcaacgtggggggattcgattgggcgatctacttctaccccgatgggaagagcggcgaggatggcgttgtctacgtctcgctcttcatagccctggccagcgaaggcaccgatgtgcgcgcgctgttcgaggtcacgctcgtcgaccagagcggcaaggggcaagacaaggtgcatacccactttgggaggtctctcgagagcgacccatacaccctcaagtaccgcgacagcatgtgatgagtctatgtacaggttgtttcctacggtatgcttatctatggtggaaagaaaaagtgattgactcatacttgaaaagaaaagatggcctttgcccattgacgcctgagacaaccagaaatttgccatgacctcgttcctgaccaagaaaaactgtcaagcacagaatcacagttgatatattgggattccaaggtatcagaggctgatatggatgcaatgtggaaacatcctgatgtgtataaggagtggataaaatctggtgagagacgtggaaatgtacgattctcccatgatgcaaagaacatgccttacctttctcgcgtcgaggtgaaggatatgattgccttctcatgttgtgtatatgatggtggtgatgaggagaaggaaatggatgcagccagagaaataggttggagagggaaatttactaagagaggacgtgtaataagaccaggaattattagaatgagtggaaaatgtcctcttacacctttggaggttgggttaatgcttcgtggaatggatttcagcaataagactgcaatctttttggcatctggaaagatttacaaagcagagaagaacatggcttctcttcttgaaatgtttcctctcctacagacaaaagagacactggcatcagaagaggaacttgctccattcaagatggctgctgttgactatagtatttgtgcccaaagtgaagtttttgtgaccacacaaggtggaaatcccgcattttttatgggtcacaggagatacttgtatggtgggcattcaaaaacaattaaaccagacaaaagaaggcttgctgtactcttcaataatccacgtatagggtggacggcattgaagcggcacttgcttaatatgagagcatacagtgatgtcaaggggatcgaaatgaaaagaccaaacgaatctatatataccttcccgtgtcctgactgcatgtgccgcttgaacagaacagaacactcgaaatccaaacagagtagatagtatatttcgtatgtagaccaaatggctaaaaccatccaatattttcatagactgaaaatgcagagaaagcaacaaaggtgtatcaatacagtcgtacaagcttagtatcggatggtttttaatttgtatagcaaagcacgggcacatacctatatatcttttaatgtatgtaaatattcttaacctttaaaagatactaacaagcaggtataacgataattaatgtttctatatcttaatatattttatcattatatgttgattccgtagcaacgcacggtca

SEQ ID NO: 69343 - DNA, 3062 bp, Zea Mays
ccccgttcgacatcagcgctcctccccccgaccaccgtcgatttggtgtctgagccctcgctagatctcgcaccctcaccgaagccctcattggattcgacgccctcactggaggttgcaccgcgatgggatctaggaaccgtagatggcctcgaccacccacgtgggttgttgcctctgcggatgagacgcagcgccaaggggccagaggaaacgacgtgatggacctcatatcacagctcatgtcatggttcatgcctctcatcgcctcccgccgtggttcgccgaggccgccccatgctgcacgccatgggcagcgatgtcgccttcacgaagctcggcatggagtgctaccccaaggaggccaccgctgttggggtcaagggattccccgacatggaaaaataaccgacgacgagatcaatgccgcctccgtcacttgctgccgcatctacctcaggtccgagtctgaacctgattgcagagctgagaacaccttgaagctaggagatgtcatccagtaccatgaatgtggttaccgcattctctataagaagcgggcaccgatccatgtgtagtaccagcaaacttcccattttctatgactccaaggccttatgtcatccagcaatggcagttgccgttcagtttggactatagaattcaattatgagttcagtttgttgatattaaaggaaagatacaggtcagcctcttttacttaacaaggattcatacttaaatttatctgatgcaatttttcaactgaacgtgaacttggcaggggtgagtacggagtagtgtacaagcgagttctgcattgagctgtcgtagagagcgtagacagacactctagccaacgttgttggctgggattggaacacaaaagcgagacaagggatgagaagcacaggaggagccagtttggcggaggcctcaatccgggtctagaccaaggtcatggtggcgacgaaggtggaggccgaggtggagggtgatgcttccactctcagtcttggggtggggtcgtggggatgacatatgagagtggggtgcagtggtggctcgtcgacatcagccattggcacccttcccctgcccagttcgatgatgcaccctccctcctactacttcacgatggcaccaccatctccaggtaccgtgccgatggaggaaaggagaaacaagattaagagtgatgccacatacttagcgatggggtgcttgatatcctagatattgtactagcttcagacctcgccgaattgacaccttcgaagaaatgaagtcgccagattggtaggctttgagtgtttcaccagaggaagtatgtagtgcagttaaggaaggaaatgaacttccatcagacttgatagacacactactaaagtggatcccaagcaatgatgaggagcttaggcttcgactgtcctcccatagcaccgccacaccgcatgcgtccgcggcggcgtccgcctcggcgccggtctcgcacaccgctccctagctggggaagttcatcgcctccgagcccttcaacgtggggggattcgattgggcgatctacttctaccccgatgggaagagcggcgaggatggcgttgtctacgtctcgctcttcatagccctggccagcgaaggcaccgatgtgcgcgcgctgttcgaggtcacgctcgtcgaccagagcggcaaggggcaagacaaggtgcatacccactttgggaggtctctcgagagcgacccatacaccctcaagtaccgcgacagcatgtgatgagtctatgtacaggttgtttcctacggtatgcttatctatggtggaaagaaaaagtgattgactcatacttgaaaagaaaagatggcctttgcccattgacgcctgagacaaccagaaatttgccatgacctcgttcctgaccaagaaaaactgtcaagcacagaatcacagttgatatattgggattccaaggtatcagaggctgatatggatgcaatgtggaaacatcctgatgtgtataaggagtggataaaatctggtgagagacgtggaaatgtacgattctcccatgatgcaaagaacatgccttacctttctcgcgtcgaggtgaaggatatgattgccttctcatgttgtgtatatgatggtggtgatgaggagaaggaaatggatgcagccagagaaataggttggagagggaaatttactaagagaggacgtgtaataagaccaggaattattagaatgagtggaaaatgtcctcttacacctttggaggttgggttaatgcttcgtggaatggatttcagcaataagactgcaatctttttggcatctggaaagatttacaaagcagagaagaacatggcttctcttcttgaaatgtttcctctcctacagacaaaagagacactggcatcagaagaggaacttgctccattcaagatggctgctgttgactatagtatttgtgcccaaagtgaagtttttgtgaccacacaaggtggaaatcccgcattttttatgggtcacaggagatacttgtatggtgggcattcaaaaacaattaaaccagacaaaagaaggcttgctgtactcttcaataatccacgtatagggtggacggcattgaagcggcacttgcttaatatgagagcatacagtgatgtcaaggggatcgaaatgaaaagaccaaacgaatctatatataccttcccgtgtcctgactgcatgtgccgcttgaacagaacagaacactcgaaatccaaacagagtagatagtatatttcgtatgtagaccaaatggctaaaaccatccaatattttcatagactgaaaatgcagagaaagcaacaaaggtgtatcaatacagtcgtacaagcttagtatcggatggtttttaatttgtatagcaaagcacgggcacatacctatatatcttttaatgtatgtaaatattcttaacctttaaaagatactaacaagcaggtataacgataattaatgtttctatatcttaatatattttatcattatatgttgattccgtagcaacgcacggtca

SEQ ID NO: 69344 - DNA, 3383 bp, Zea Mays
cgacacccgtgaccctgcccccgttcgacatcagcgctcctccccccgaccaccgtcgatttggtgtctgagccctcgctagatctcgcaccctcaccgaagccctcattggattcgacgccctcactggaggttgcaccgcgatgggatctaggaaccgtagatggcctcgaccacccacgtgggttgttgcctctgcggatgagacgcagcgccaaggggccagaggaaacgacgtgatggacctcatatcacagctcatgtcatggttcatgcctctcatcgcctcccgccgtggttcgccgaggccgccccatgctgcacgccatgggcagcgatgtcgccttcacgaagctcggcatggagtgctaccccaaggaggccaccgctgttggggtcaagggattccccgacatggaaaaataaccgacgacgagatcaatgccgcctccgtcacttgctgccgcatctacctcaggtatatcgcaagttcttcggcgggtactgcaactgctcataccatgattgcagagctgagaacaccttgaagctaggagatgtcatccagtaccatgaatgtggttaccgcattctctataagaagcgggcaccgatccatgtgtagtaccagcaaacttcccattttctatgactccaagcaatggcagttgccgttcagtttggactatagaattcaattatgagttcagtttgttgatattaaaggaaagatacaggtcagcctcttttacttaacaaggattcatacttaaatacttaacaaggattcatacttaaatttatctgatgcaatttttcaactgaacgtgaacttggcaggggtgagtacggagtagtgtacaagcgagttctgcattgagctgtcgtagagagcgtagacagacactctagccaacgttgttggctgggattggaacacaaaagcgagacaagggatgagaagcacaggaggagccaggtgaggtgaggtggcgacacacaggagtcgggcaagctcagctcatctcatctcatgctctactaaaaaggattagcccatctcaagagaaaagagtaacattgtcagcccactgcaataaccacactattaccagtcttgaaattcactttttgtttgtttgtcatagaaccagggattcatgacaggaaatgatctccttctcaagataagaaaattgcatttaagttactaatcagtgtatggtttactagtttggcggaggcctcaatccgggtctagaccaaggtcatggtggcgacgaaggtggaggccgaggtggagggtgatgcttccactctcagtcttggggtggggtcgtggggatgacatatgagagtggggtgcagtggtggctcgtcgacatcagccattggcacccttcccctgcccagttcgatgatgcaccctccctcctactacttcacgatggcaccaccatctccaggtaccgtgccgatggaggaaaggagaaacaaggtattttgaagattaagagtgatgccacatacttagcgatggggtgcttgatatcctagatattgtactagcttcagacctcgccgaattgacaccttcgaagaaatgaagtcgccagattggtaggctttgagtgtttcaccagaggaagtatgtagtgcagttaaggaaggaaatgaacttccatcagacttgatagacacactactaaagtggatcccaagcaatgatgaggagcttaggcttcgactgtcctcccatagcaccgccacaccgcatgcgtccgcggcggcgtccgcctcggcgccggtctcgcacaccgctccctagctggggaagttcatcgcctccgagcccttcaacgtggggggattcgattgggcgatctacttctaccccgatgggaagagcggcgaggatggcgttgtctacgtctcgctcttcatagccctggccagcgaaggcaccgatgtgcgcgcgctgttcgaggtcacgctcgtcgaccagagcggcaaggggcaagacaaggtgcatacccactttgggaggtctctcgagagcgacccatacaccctcaagtaccgcgacagcatgtgatgagtctatgtacaggttgtttcctacggtatgcttatctatggtggaaagaaaaagtgattgactcatacttgaaaagaaaagatggcctttgcccattgacgcctgagacaaccagaaatttgccatgacctcgttcctgaccaagaaaaactgtcaagcacagaatcacagttgatatattgggattccaaggtatcagaggctgatatggatgcaatgtggaaacatcctgatgtgtataaggagtggataaaatctggtgagagacgtggaaatgtacgattctcccatgatgcaaagaacatgccttacctttctcgcgtcgaggtgaaggatatgattgccttctcatgttgtgtatatgatggtggtgatgaggagaaggaaatggatgcagccagagaaataggttggagagggaaatttactaagagaggacgtgtaataagaccaggaattattagaatgagtggaaaatgtcctcttacacctttggaggttgggttaatgcttcgtggaatggatttcagcaataagactgcaatctttttggcatctggaaagatttacaaagcagagaagaacatggcttctcttcttgaaatgtttcctctcctacagacaaaagagacactggcatcagaagaggaacttgctccattcaagatggctgctgttgactatagtatttgtgcccaaagtgaagtttttgtgaccacacaaggtggaaatcccgcattttttatgggtcacaggagatacttgtatggtgggcattcaaaaacaattaaaccagacaaaagaaggcttgctgtactcttcaataatccacgtatagggtggacggcattgaagcggcacttgcttaatatgagagcatacagtgatgtcaaggggatcgaaatgaaaagaccaaacgaatctatatataccttcccgtgtcctgactgcatgtgccgcttgaacagaacagaacactcgaaatccaaacagagtagatagtatatttcgtatgtagaccaaatggctaaaaccatccaatattttcatagactgaaaatgcagagaaagcaacaaaggtgtatcaatacagtcgtacaagcttagtatcggatggtttttaatttgtatagcaaagcacgggcacatacctatatatcttttaatgtatgtaaatattcttaacctttaaaagatactaacaagcaggtataacgataattaatgtttctatatcttaatatattttatcattatatgttgattccgtagcaacgcacggtca

SEQ ID NO: 69345 - DNA, 3463 bp, Zea Mays
gggggcgacacccgtgaccctgcccccgttcgacatcagcgctcctccccccgaccaccgtcgatttggtgtctgagccctcgctagatctcgcaccctcaccgaagccctcattggattcgacgccctcactggaggttgcaccgcgatgggatctaggaaccgtagatggcctcgaccacccacgtgggttgttgcctctgcggatgagacgcagcgccaaggggccagaggaaacgacgtgatggacctcatatcacagctcatgtcatggttcatgcctctcatcgcctcccgccgtggttcgccgaggccgccccatgctgcacgccatgggcagcgatgtcgccttcacgaagctcggcatggagtgctaccccaaggaggccaccgctgttggggtcaagggattccccgacatggaaaaataaccgacgacgagatcaatgccgcctccgtcacttgctgccgcatctacctcaggtccgagtctgaacctggtatatcgcaagttcttcggcgggtactgcaactgctcataccatgattgcagagctgagaacaccttgaagctaggagatgtcatccagtaccatgaatgtggttaccgcattctctataagaagcgggcaccgatccatgtgtagtaccagcaaacttcccattttctatgactccaagcaatggcagttgccgttcagtttggactatagaattcaattatgagttcagtttgttgatattaaaggaaagatacaggtcagcctcttttacttaacaaggattcatacttaaatttatctgatgcaatttttcaactgaacgtgaacttggcaggggtgagtacggagtagtgtacaaggtatgtccattcttctatcgctccaattttcaactgatggaaacagtaacagataattaatggctcacctacttgcaatgaagcgagttctgcattgagctgtcgtagagagcgtagacagacactctagccaacgttgttggctgggattggaacacaaaagcgagacaagggatgagaagcacaggaggagccaggtgaggtgaggtggcgacacacaggagtcgggcaagctcagctcatctcatctcatgctctactaaaaaggattagcccatctcaagagaaaagagtaacattgtcagcccactgcaataaccacactattaccagtcttgaaattcactttttgtttgtttgtcatagaaccagggattcatgacaggaaatgatctccttctcaagataagaaaattgcatttaagttactaatcagtgtatggtttactagtttggcggaggcctcaatccgggtctagaccaaggtcatggtggcgacgaaggtggaggccgaggtggagggtgatgcttccactctcagtcttggggtggggtcgtggggatgacatatgagagtggggtgcagtggtggctcgtcgacatcagccattggcacccttcccctgcccagttcgatgatgcaccctccctcctactacttcacgatggcaccaccatctccaggtaccgtgccgatggaggaaaggagaaacaaggtattttgaagattaagagtgatgccacatacttagcgatggggtgcttgatatcctagatattgtactagcttcagacctcgccgaattgacaccttcgaagaaatgaagtcgccagattggtaggctttgagtgtttcaccagaggaagtatgtagtgcagttaaggaaggaaatgaacttccatcagacttgatagacacactactaaagtggatcccaagcaatgatgaggagcttaggcttcgactgtcctcccatagcaccgccacaccgcatgcgtccgcggcggcgtccgcctcggcgccggtctcgcacaccgctccctagctggggaagttcatcgcctccgagcccttcaacgtggggggattcgattgggcgatctacttctaccccgatgggaagagcggcgaggatggcgttgtctacgtctcgctcttcatagccctggccagcgaaggcaccgatgtgcgcgcgctgttcgaggtcacgctcgtcgaccagagcggcaaggggcaagacaaggtgcatacccactttgggaggtctctcgagagcgacccatacaccctcaagtaccgcgacagcatgtgatgagtctatgtacaggttgtttcctacggtatgcttatctatggtggaaagaaaaagtgattgactcatacttgaaaagaaaagatggcctttgcccattgacgcctgagacaaccagaaatttgccatgacctcgttcctgaccaagaaaaactgtcaagcacagaatcacagttgatatattgggattccaaggtatcagaggctgatatggatgcaatgtggaaacatcctgatgtgtataaggagtggataaaatctggtgagagacgtggaaatgtacgattctcccatgatgcaaagaacatgccttacctttctcgcgtcgaggtgaaggatatgattgccttctcatgttgtgtatatgatggtggtgatgaggagaaggaaatggatgcagccagagaaataggttggagagggaaatttactaagagaggacgtgtaataagaccaggaattattagaatgagtggaaaatgtcctcttacacctttggaggttgggttaatgcttcgtggaatggatttcagcaataagactgcaatctttttggcatctggaaagatttacaaagcagagaagaacatggcttctcttcttgaaatgtttcctctcctacagacaaaagagacactggcatcagaagaggaacttgctccattcaagatggctgctgttgactatagtatttgtgcccaaagtgaagtttttgtgaccacacaaggtggaaatcccgcattttttatgggtcacaggagatacttgtatggtgggcattcaaaaacaattaaaccagacaaaagaaggcttgctgtactcttcaataatccacgtatagggtggacggcattgaagcggcacttgcttaatatgagagcatacagtgatgtcaaggggatcgaaatgaaaagaccaaacgaatctatatataccttcccgtgtcctgactgcatgtgccgcttgaacagaacagaacactcgaaatccaaacagagtagatagtatatttcgtatgtagaccaaatggctaaaaccatccaatattttcatagactgaaaatgcagagaaagcaacaaaggtgtatcaatacagtcgtacaagcttagtatcggatggtttttaatttgtatagcaaagcacgggcacatacctatatatcttttaatgtatgtaaatattcttaacctttaaaagatactaacaagcaggtataacgataattaatgtttctatatcttaatatattttatcattatatgttgattccgtagcaacgcacggtca

SEQ ID NO: 69346 - DNA, 3313 bp, Zea Mays
gggggcgacacccgtgaccctgcccccgttcgacatcagcgctcctccccccgaccaccgtcgatttggtgtctgagccctcgctagatctcgcaccctcaccgaagccctcattggattcgacgccctcactggaggttgcaccgcgatgggatctaggaaccgtagatggcctcgaccacccacgtgggttgttgcctctgcggatgagacgcagcgccaaggggccagaggaaacgacgtgatggacctcatatcacagctcatgtcatggttcatgcctctcatcgcctcccgccgtggttcgccgaggccgccccatgctgcacgccatgggcagcgatgtcgccttcacgaagctcggcatggagtgctaccccaaggaggccaccgctgttggggtcaagggattccccgacatggaaaaataaccgacgacgagatcaatgccgcctccgtcacttgctgccgcatctacctcaggtatatcgcaagttcttcggcgggtactgcaactgctcataccatgattgcagagctgagaacaccttgaagctaggagatgtcatccagtaccatgaatgtggttaccgcattctctataagaagcgggcaccgatccatgtgtagtaccagcaaacttcccattttctatgactccaaggccttatgtcatccagcaatggcagttgccgttcagtttggactatagaattcaattatgagttcagtttgttgatattaaaggaaagatacaggattcatacttaaatacttaacaaggtaagagctctaaatttatgttagtatagtagaagttttttttgttgttgtaaatatcacttgcatatacgccagctagatgctcactatttgtcctctctcaaggtctgaatctgtctgatgttttattcaactgattaactatcatcataaacctgaataacattttgctttgttcatgttcaggattcatacttaaatttatctgatgcaatttttcaactgaacgtgaacttggcaggggtgagtacggagtagtgtacaagcgagttctgcattgagctgtcgtagagagcgtagacagacactctagccaacgttgttggctgggattggaacacaaaagcgagacaagggatgagaagcacaggaggagccagtttggcggaggcctcaatccgggtctagaccaaggtcatggtggcgacgaaggtggaggccgaggtggagggtgatgcttccactctcagtcttggggtggggtcgtggggatgacatatgagagtggggtgcagtggtggctcgtcgacatcagccattggcacccttcccctgcccagttcgatgatgcaccctccctcctactacttcacgatggcaccaccatctccaggtaccgtgccgatggaggaaaggagaaacaaggtattttgaagattaagagtgatgccacatacttagcgatggggtgcttgatatcctagatattgtactagcttcagacctcgccgaattgacaccttcgaagaaatgaagtcgccagattggtaggctttgagtgtttcaccagaggaagtatgtagtgcagttaaggaaggaaatgaacttccatcagacttgatagacacactactaaagtggatcccaagcaatgatgaggagcttaggcttcgactgtcctcccatagcaccgccacaccgcatgcgtccgcggcggcgtccgcctcggcgccggtctcgcacaccgctccctagctggggaagttcatcgcctccgagcccttcaacgtggggggattcgattgggcgatctacttctaccccgatgggaagagcggcgaggatggcgttgtctacgtctcgctcttcatagccctggccagcgaaggcaccgatgtgcgcgcgctgttcgaggtcacgctcgtcgaccagagcggcaaggggcaagacaaggtgcatacccactttgggaggtctctcgagagcgacccatacaccctcaagtaccgcgacagcatgtgatgagtctatgtacaggttgtttcctacggtatgcttatctatggtggaaagaaaaagtgattgactcatacttgaaaagaaaagatggcctttgcccattgacgcctgagacaaccagaaatttgccatgacctcgttcctgaccaagaaaaactgtcaagcacagaatcacagttgatatattgggattccaaggtatcagaggctgatatggatgcaatgtggaaacatcctgatgtgtataaggagtggataaaatctggtgagagacgtggaaatgtacgattctcccatgatgcaaagaacatgccttacctttctcgcgtcgaggtgaaggatatgattgccttctcatgttgtgtatatgatggtggtgatgaggagaaggaaatggatgcagccagagaaataggttggagagggaaatttactaagagaggacgtgtaataagaccaggaattattagaatgagtggaaaatgtcctcttacacctttggaggttgggttaatgcttcgtggaatggatttcagcaataagactgcaatctttttggcatctggaaagatttacaaagcagagaagaacatggcttctcttcttgaaatgtttcctctcctacagacaaaagagacactggcatcagaagaggaacttgctccattcaagatggctgctgttgactatagtatttgtgcccaaagtgaagtttttgtgaccacacaaggtggaaatcccgcattttttatgggtcacaggagatacttgtatggtgggcattcaaaaacaattaaaccagacaaaagaaggcttgctgtactcttcaataatccacgtatagggtggacggcattgaagcggcacttgcttaatatgagagcatacagtgatgtcaaggggatcgaaatgaaaagaccaaacgaatctatatataccttcccgtgtcctgactgcatgtgccgcttgaacagaacagaacactcgaaatccaaacagagtagatagtatatttcgtatgtagaccaaatggctaaaaccatccaatattttcatagactgaaaatgcagagaaagcaacaaaggtgtatcaatacagtcgtacaagcttagtatcggatggtttttaatttgtatagcaaagcacgggcacatacctatatatcttttaatgtatgtaaatattcttaacctttaaaagatactaacaagcaggtataacgataattaatgtttctatatcttaatatattttatcattatatgttgattccgtagcaacgcacggtca

SEQ ID NO: 69347 - DNA, 3738 bp, Zea Mays
cgtccacagggggcgacacccgtgaccctgcccccgttcgacatcagcgctcctccccccgaccaccgtcgatttggtgtctgagccctcgctagatctcgcaccctcaccgaagccctcattggattcgacgccctcactggaggttgcaccgcgatgggatctaggaaccgtagatggcctcgaccacccacgtgggttgttgcctctgcggatgagacgcagcgccaaggggccagaggaaacgacgtgatggacctcatatcacagctcatgtcatggttcatgcctctcatcgcctcccgccgtggttcgccgaggccgccccatgctgcacgccatgggcagcgatgtcgccttcacgaagctcggcatggagtgctaccccaaggaggccaccgctgttggggtcaagggattccccgacatggaaaaataaccgacgacgagatcaatgccgcctccgtcacttgctgccgcatctacctcaggtccgagtctgaacctgattgcagagctgagaacaccttgaagctaggagatgtcatccagtaccatgaatgtggttaccgcattctctataagaagcgggcaccgatccatgtgtagtaccagcaaacttcccattttctatgactccaagcaatggcagttgccgttcagtttggactatagaattcaattatgagttcagtttgttgatattaaaggaaagatacaggtcagcctcttttacttaacaaggtaagagctctaaatttatgttagtatagtagaagtttttttgttgtaaatatcacttgcatatacgccagctagatgctcactatttgtcctctctcaaggtctcaatctgtctgatgtttattcaaccgattagctatcatcataaacctgaataacattttgctttgttcatgttcaggattcatacttaaatacttaacaaggtaagagctctaaatttatgttagtatagtagaagttttttttgttgttgtaaatatcacttgcatatacgccagctagatgctcactatttgtcctctctcaaggtctgaatctgtctgatgttttattcaactgattaactatcatcataaacctgaataacattttgctttgttcatgttcaggattcatacttaaatttatctgatgcaatttttcaactgaacgtgaacttggcaggggtgagtacggagtagtgtacaagcgagttctgcattgagctgtcgtagagagcgtagacagacactctagccaacgttgttggctgggattggaacacaaaagcgagacaagggatgagaagcacaggaggagccaggtgaggtgaggtggcgacacacaggagtcgggcaagctcagctcatctcatctcatgctctactaaaaaggattagcccatctcaagagaaaagagtaacattgtcagcccactgcaataaccacactattaccagtcttgaaattcactttttgtttgtttgtcatagaaccagggattcatgacaggaaatgatctccttctcaagataagaaaattgcatttaagttactaatcagtgtatggtttactagtttggcggaggcctcaatccgggtctagaccaaggtcatggtggcgacgaaggtggaggccgaggtggagggtgatgcttccactctcagtcttggggtggggtcgtggggatgacatatgagagtggggtgcagtggtggctcgtcgacatcagccattggcacccttcccctgcccagttcgatgatgcaccctccctcctactacttcacgatggcaccaccatctccaggtaccgtgccgatggaggaaaggagaaacaagattaagagtgatgccacatacttagcgatggggtgcttgatatcctagatattgtactagcttcagacctcgccgaattgacaccttcgaagaaatgaagtcgccagattggtaggctttgagtgtttcaccagaggaagtatgtagtgcagttaaggaaggaaatgaacttccatcagacttgatagacacactactaaagtggatcccaagcaatgatgaggagcttaggcttcgactgtcctcccatagcaccgccacaccgcatgcgtccgcggcggcgtccgcctcggcgccggtctcgcacaccgctccctagctggggaagttcatcgcctccgagcccttcaacgtggggggattcgattgggcgatctacttctaccccgatgggaagagcggcgaggatggcgttgtctacgtctcgctcttcatagccctggccagcgaaggcaccgatgtgcgcgcgctgttcgaggtcacgctcgtcgaccagagcggcaaggggcaagacaaggtgcatacccactttgggaggtctctcgagagcgacccatacaccctcaagtaccgcgacagcatgtgatgagtctatgtacaggttgtttcctacggtatgcttatctatggtggaaagaaaaagtgattgactcatacttgaaaagaaaagatggcctttgcccattgacgcctgagacaaccagaaatttgccatgacctcgttcctgaccaagaaaaactgtcaagcacagaatcacagttgatatattgggattccaaggtatcagaggctgatatggatgcaatgtggaaacatcctgatgtgtataaggagtggataaaatctggtgagagacgtggaaatgtacgattctcccatgatgcaaagaacatgccttacctttctcgcgtcgaggtgaaggatatgattgccttctcatgttgtgtatatgatggtggtgatgaggagaaggaaatggatgcagccagagaaataggttggagagggaaatttactaagagaggacgtgtaataagaccaggaattattagaatgagtggaaaatgtcctcttacacctttggaggttgggttaatgcttcgtggaatggatttcagcaataagactgcaatctttttggcatctggaaagatttacaaagcagagaagaacatggcttctcttcttgaaatgtttcctctcctacagacaaaagagacactggcatcagaagaggaacttgctccattcaagaatttctccttctagatggctgctgttgactatagtatttgtgcccaaagtgaagtttttgtgaccacacaaggtggaaatcccgcattttttatgggtcacaggagatacttgtatggtgggcattcaaaaacaattaaaccagacaaaagaaggcttgctgtactcttcaataatccacgtatagggtggacggcattgaagcggcacttgcttaatatgagagcatacagtgatgtcaaggggatcgaaatgaaaagaccaaacgaatctatatataccttcccgtgtcctgactgcatgtgccgcttgaacagaacagaacactcgaaatccaaacagagtagatagtatatttcgtatgtagaccaaatggctaaaaccatccaatattttcatagactgaaaatgcagagaaagcaacaaaggtgtatcaatacagtcgtacaagcttagtatcggatggtttttaatttgtatagcaaagcacgggcacatacctatatatcttttaatgtatgtaaatattcttaacctttaaaagatactaacaagcaggtataacgataattaatgtttctatatcttaatatattttatcattatatgttgattccgtagcaacgcacggtca

SEQ ID NO: 69348 - DNA, 3531 bp, Zea Mays
cgtccacagggggcgacacccgtgaccctgcccccgttcgacatcagcgctcctccccccgaccaccgtcgatttggtgtctgagccctcgctagatctcgcaccctcaccgaagccctcattggattcgacgccctcactggaggttgcaccgcgatgggatctaggaaccgtagatggcctcgaccacccacgtgggttgttgcctctgcggatgagacgcagcgccaaggggccagaggaaacgacgtgatggacctcatatcacagctcatgtcatggttcatgcctctcatcgcctcccgccgtggttcgccgaggccgccccatgctgcacgccatgggcagcgatgtcgccttcacgaagctcggcatggagtgctaccccaaggaggccaccgctgttggggtcaagggattccccgacatggaaaaataaccgacgacgagatcaatgccgcctccgtcacttgctgccgcatctacctcaggtccgagtctgaacctggtatatcgcaagttcttcggcgggtactgcaactgctcataccatgattgcagagctgagaacaccttgaagctaggagatgtcatccagtaccatgaatgtggttaccgcattctctataagaagcgggcaccgatccatgtgtagtaccagcaaacttcccattttctatgactccaagcaatggcagttgccgttcagtttggactatagaattcaattatgagttcagtttgttgatattaaaggaaagatacaggtcagcctcttttacttaacaaggtaagagctctaaatttatgttagtatagtagaagtttttttgttgtaaatatcacttgcatatacgccagctagatgctcactatttgtcctctctcaaggtctcaatctgtctgatgtttattcaaccgattagctatcatcataaacctgaataacattttgctttgttcatgttcaggattcatacttaaatacttaacaaggtaagagctctaaatttatgttagtatagtagaagttttttttgttgttgtaaatatcacttgcatatacgccagctagatgctcactatttgtcctctctcaaggtctgaatctgtctgatgttttattcaactgattaactatcatcataaacctgaataacattttgctttgttcatgttcaggattcatacttaaatttatctgatgcaatttttcaactgaacgtgaacttggcaggggtgagtacggagtagtgtacaagcgagttctgcattgagctgtcgtagagagcgtagacagacactctagccaacgttgttggctgggattggaacacaaaagcgagacaagggatgagaagcacaggaggagccaggtgagtttggcggaggcctcaatccgggtctagaccaaggtcatggtggcgacgaaggtggaggccgaggtggagggtgatgcttccactctcagtcttggggtggggtcgtggggatgacatatgagagtggggtgcagtggtggctcgtcgacatcagccattggcacccttcccctgcccagttcgatgatgcaccctccctcctactacttcacgatggcaccaccatctccaggtaccgtgccgatggaggaaaggagaaacaaggtattttgaagattaagagtgatgccacatacttagcgatggggtgcttgatatcctagatattgtactagcttcagacctcgccgaattgacaccttcgaagaaatgaagtcgccagattggtaggctttgagtgtttcaccagaggaagtatgtagtgcagttaaggaaggaaatgaacttccatcagacttgatagacacactactaaagtggatcccaagcaatgatgaggagcttaggcttcgactgtcctcccatagcaccgccacaccgcatgcgtccgcggcggcgtccgcctcggcgccggtctcgcacaccgctccctagctggggaagttcatcgcctccgagcccttcaacgtggggggattcgattgggcgatctacttctaccccgatgggaagagcggcgaggatggcgttgtctacgtctcgctcttcatagccctggccagcgaaggcaccgatgtgcgcgcgctgttcgaggtcacgctcgtcgaccagagcggcaaggggcaagacaaggtgcatacccactttgggaggtctctcgagagcgacccatacaccctcaagtaccgcgacagcatgtgatgagtctatgtacaggttgtttcctacggtatgcttatctatggtggaaagaaaaagtgattgactcatacttgaaaagaaaagatggcctttgcccattgacgcctgagacaaccagaaatttgccatgacctcgttcctgaccaagaaaaactgtcaagcacagaatcacagttgatatattgggattccaaggtatcagaggctgatatggatgcaatgtggaaacatcctgatgtgtataaggagtggataaaatctggtgagagacgtggaaatgtacgattctcccatgatgcaaagaacatgccttacctttctcgcgtcgaggtgaaggatatgattgccttctcatgttgtgtatatgatggtggtgatgaggagaaggaaatggatgcagccagagaaataggttggagagggaaatttactaagagaggacgtgtaataagaccaggaattattagaatgagtggaaaatgtcctcttacacctttggaggttgggttaatgcttcgtggaatggatttcagcaataagactgcaatctttttggcatctggaaagatttacaaagcagagaagaacatggcttctcttcttgaaatgtttcctctcctacagacaaaagagacactggcatcagaagaggaacttgctccattcaagatggctgctgttgactatagtatttgtgcccaaagtgaagtttttgtgaccacacaaggtggaaatcccgcattttttatgggtcacaggagatacttgtatggtgggcattcaaaaacaattaaaccagacaaaagaaggcttgctgtactcttcaataatccacgtatagggtggacggcattgaagcggcacttgcttaatatgagagcatacagtgatgtcaaggggatcgaaatgaaaagaccaaacgaatctatatataccttcccgtgtcctgactgcatgtgccgcttgaacagaacagaacactcgaaatccaaacagagtagatagtatatttcgtatgtagaccaaatggctaaaaccatccaatattttcatagactgaaaatgcagagaaagcaacaaaggtgtatcaatacagtcgtacaagcttagtatcggatggtttttaatttgtatagcaaagcacgggcacatacctatatatcttttaatgtatgtaaatattcttaacctttaaaagatactaacaagcaggtataacgataattaatgtttctatatcttaatatattttatcattatatgttgattccgtagcaacgcacggtca

SEQ ID NO: 69349 - DNA, 3148 bp, Zea Mays
cgtccacagggggcgacacccgtgaccctgcccccgttcgacatcagcgctcctccccccgaccaccgtcgatttggtgtctgagccctcgctagatctcgcaccctcaccgaagccctcattggattcgacgccctcactggaggttgcaccgcgatgggatctaggaaccgtagatggcctcgaccacccacgtgggttgttgcctctgcggatgagacgcagcgccaaggggccagaggaaacgacgtgatggacctcatatcacagctcatgtcatggttcatgcctctcatcgcctcccgccgtggttcgccgaggccgccccatgctgcacgccatgggcagcgatgtcgccttcacgaagctcggcatggagtgctaccccaaggaggccaccgctgttggggtcaagggattccccgacatggaaaaataaccgacgacgagatcaatgccgcctccgtcacttgctgccgcatctacctcaggtccgagtctgaacctggtatatcgcaagttcttcggcgggtactgcaactgctcataccatgattgcagagctgagaacaccttgaagctaggagatgtcatccagtaccatgaatgtggttaccgcattctctataagaagcgggcaccgatccatgtgtagtaccagcaaacttcccattttctatgactccaagcaatggcagttgccgttcagtttggactatagaattcaattatgagttcagtttgttgatattaaaggaaagatacaggtcagcctcttttacttaacaaggattcatacttaaatacttaacaaggattcatacttaaatttatctgatgcaatttttcaactgaacgtgaacttggcaggggtgagtacggagtagtgtacaagcgagttctgcattgagctgtcgtagagagcgtagacagacactctagccaacgttgttggctgggattggaacacaaaagcgagacaagggatgagaagcacaggaggagccagtttggcggaggcctcaatccgggtctagaccaaggtcatggtggcgacgaaggtggaggccgaggtggagggtgatgcttccactctcagtcttggggtggggtcgtggggatgacatatgagagtggggtgcagtggtggctcgtcgacatcagccattggcacccttcccctgcccagttcgatgatgcaccctccctcctactacttcacgatggcaccaccatctccaggtaccgtgccgatggaggaaaggagaaacaagattaagagtgatgccacatacttagcgatggggtgcttgatatcctagatattgtactagcttcagacctcgccgaattgacaccttcgaagaaatgaagtcgccagattggtaggctttgagtgtttcaccagaggaagtatgtagtgcagttaaggaaggaaatgaacttccatcagacttgatagacacactactaaagtggatcccaagcaatgatgaggagcttaggcttcgactgtcctcccatagcaccgccacaccgcatgcgtccgcggcggcgtccgcctcggcgccggtctcgcacaccgctccctagctggggaagttcatcgcctccgagcccttcaacgtggggggattcgattgggcgatctacttctaccccgatgggaagagcggcgaggatggcgttgtctacgtctcgctcttcatagccctggccagcgaaggcaccgatgtgcgcgcgctgttcgaggtcacgctcgtcgaccagagcggcaaggggcaagacaaggtgcatacccactttgggaggtctctcgagagcgacccatacaccctcaagtaccgcgacagcatgtgatgagtctatgtacaggttgtttcctacggtatgcttatctatggtggaaagaaaaagtgattgactcatacttgaaaagaaaagatggcctttgcccattgacgcctgagacaaccagaaatttgccatgacctcgttcctgaccaagaaaaactgtcaagcacagaatcacagttgatatattgggattccaaggtatcagaggctgatatggatgcaatgtggaaacatcctgatgtgtataaggagtggataaaatctggtgagagacgtggaaatgtacgattctcccatgatgcaaagaacatgccttacctttctcgcgtcgaggtgaaggatatgattgccttctcatgttgtgtatatgatggtggtgatgaggagaaggaaatggatgcagccagagaaataggttggagagggaaatttactaagagaggacgtgtaataagaccaggaattattagaatgagtggaaaatgtcctcttacacctttggaggttgggttaatgcttcgtggaatggatttcagcaataagactgcaatctttttggcatctggaaagatttacaaagcagagaagaacatggcttctcttcttgaaatgtttcctctcctacagacaaaagagacactggcatcagaagaggaacttgctccattcaagatggctgctgttgactatagtatttgtgcccaaagtgaagtttttgtgaccacacaaggtggaaatcccgcattttttatgggtcacaggagatacttgtatggtgggcattcaaaaacaattaaaccagacaaaagaaggcttgctgtactcttcaataatccacgtatagggtggacggcattgaagcggcacttgcttaatatgagagcatacagtgatgtcaaggggatcgaaatgaaaagaccaaacgaatctatatataccttcccgtgtcctgactgcatgtgccgcttgaacagaacagaacactcgaaatccaaacagagtagatagtatatttcgtatgtagaccaaatggctaaaaccatccaatattttcatagactgaaaatgcagagaaagcaacaaaggtgtatcaatacagtcgtacaagcttagtatcggatggtttttaatttgtatagcaaagcacgggcacatacctatatatcttttaatgtatgtaaatattcttaacctttaaaagatactaacaagcaggtataacgataattaatgtttctatatcttaatatattttatcattatatgttgattccgtagcaacgcacggtca

SEQ ID NO: 69350 - DNA, 3541 bp, Zea Mays
cgtccacagggggcgacacccgtgaccctgcccccgttcgacatcagcgctcctccccccgaccaccgtcgatttggtgtctgagccctcgctagatctcgcaccctcaccgaagccctcattggattcgacgccctcactggaggttgcaccgcgatgggatctaggaaccgtagatggcctcgaccacccacgtgggttgttgcctctgcggatgagacgcagcgccaaggggccagaggaaacgacgtgatggacctcatatcacagctcatgtcatggttcatgcctctcatcgcctcccgccgtggttcgccgaggccgccccatgctgcacgccatgggcagcgatgtcgccttcacgaagctcggcatggagtgctaccccaaggaggccaccgctgttggggtcaagggattccccgacatggaaaaataaccgacgacgagatcaatgccgcctccgtcacttgctgccgcatctacctcaggtccgagtctgaacctggtatatcgcaagttcttcggcgggtactgcaactgctcataccatgattgcagagctgagaacaccttgaagctaggagatgtcatccagtaccatgaatgtggttaccgcattctctataagaagcgggcaccgatccatgtgtagtaccagcaaacttcccattttctatgactccaagcaatggcagttgccgttcagtttggactatagaattcaattatgagttcagtttgttgatattaaaggaaagatacaggtcagcctcttttacttaacaaggtaagagctctaaatttatgttagtatagtagaagtttttttgttgtaaatatcacttgcatatacgccagctagatgctcactatttgtcctctctcaaggtctcaatctgtctgatgtttattcaaccgattagctatcatcataaacctgaataacattttgctttgttcatgttcaggattcatacttaaatacttaacaaggtaagagctctaaatttatgttagtatagtagaagttttttttgttgttgtaaatatcacttgcatatacgccagctagatgctcactatttgtcctctctcaaggtctgaatctgtctgatgttttattcaactgattaactatcatcataaacctgaataacattttgctttgttcatgttcaggattcatacttaaatttatctgatgcaatttttcaactgaacgtgaacttggcaggggtgagtacggagtagtgtacaagcgagttctgcattgagctgtcgtagagagcgtagacagacactctagccaacgttgttggctgggattggaacacaaaagcgagacaagggatgagaagcacaggaggagccagtttggcggaggcctcaatccgggtctagaccaaggtcatggtggcgacgaaggtggaggccgaggtggagggtgatgcttccactctcagtcttggggtggggtcgtggggatgacatatgagagtggggtgcagtggtggctcgtcgacatcagccattggcacccttcccctgcccagttcgatgatgcaccctccctcctactacttcacgatggcaccaccatctccaggtaccgtgccgatggaggaaaggagaaacaaggtattttgaagattaagagtgatgccacatacttagcgatggggtgcttgatatcctagatattgtactagcttcagacctcgccgaattgacaccttcgaagaaatgaagtcgccagattggtaggctttgagtgtttcaccagaggaagtatgtagtgcagttaaggaaggaaatgaacttccatcagacttgatagacacactactaaagtggatcccaagcaatgatgaggagcttaggcttcgactgtcctcccatagcaccgccacaccgcatgcgtccgcggcggcgtccgcctcggcgccggtctcgcacaccgctccctagctggggaagttcatcgcctccgagcccttcaacgtggggggattcgattgggcgatctacttctaccccgatgggaagagcggcgaggatggcgttgtctacgtctcgctcttcatagccctggccagcgaaggcaccgatgtgcgcgcgctgttcgaggtcacgctcgtcgaccagagcggcaaggggcaagacaaggtgcatacccactttgggaggtctctcgagagcgacccatacaccctcaagtaccgcgacagcatgtgatgagtctatgtacaggttgtttcctacggtatgcttatctatggtggaaagaaaaagtgattgactcatacttgaaaagaaaagatggcctttgcccattgacgcctgagacaaccagaaatttgccatgacctcgttcctgaccaagaaaaactgtcaagcacagaatcacagttgatatattgggattccaaggtatcagaggctgatatggatgcaatgtggaaacatcctgatgtgtataaggagtggataaaatctggtgagagacgtggaaatgtacgattctcccatgatgcaaagaacatgccttacctttctcgcgtcgaggtgaaggatatgattgccttctcatgttgtgtatatgatggtggtgatgaggagaaggaaatggatgcagccagagaaataggttggagagggaaatttactaagagaggacgtgtaataagaccaggaattattagaatgagtggaaaatgtcctcttacacctttggaggttgggttaatgcttcgtggaatggatttcagcaataagactgcaatctttttggcatctggaaagatttacaaagcagagaagaacatggcttctcttcttgaaatgtttcctctcctacagacaaaagagacactggcatcagaagaggaacttgctccattcaagaatttctccttctagatggctgctgttgactatagtatttgtgcccaaagtgaagtttttgtgaccacacaaggtggaaatcccgcattttttatgggtcacaggagatacttgtatggtgggcattcaaaaacaattaaaccagacaaaagaaggcttgctgtactcttcaataatccacgtatagggtggacggcattgaagcggcacttgcttaatatgagagcatacagtgatgtcaaggggatcgaaatgaaaagaccaaacgaatctatatataccttcccgtgtcctgactgcatgtgccgcttgaacagaacagaacactcgaaatccaaacagagtagatagtatatttcgtatgtagaccaaatggctaaaaccatccaatattttcatagactgaaaatgcagagaaagcaacaaaggtgtatcaatacagtcgtacaagcttagtatcggatggtttttaatttgtatagcaaagcacgggcacatacctatatatcttttaatgtatgtaaatattcttaacctttaaaagatactaacaagcaggtataacgataattaatgtttctatatcttaatatattttatcattatatgttgattccgtagcaacgcacggtca

SEQ ID NO: 69351 - DNA, 3159 bp, Zea Mays
cgtccacagggggcgacacccgtgaccctgcccccgttcgacatcagcgctcctccccccgaccaccgtcgatttggtgtctgagccctcgctagatctcgcaccctcaccgaagccctcattggattcgacgccctcactggaggttgcaccgcgatgggatctaggaaccgtagatggcctcgaccacccacgtgggttgttgcctctgcggatgagacgcagcgccaaggggccagaggaaacgacgtgatggacctcatatcacagctcatgtcatggttcatgcctctcatcgcctcccgccgtggttcgccgaggccgccccatgctgcacgccatgggcagcgatgtcgccttcacgaagctcggcatggagtgctaccccaaggaggccaccgctgttggggtcaagggattccccgacatggaaaaataaccgacgacgagatcaatgccgcctccgtcacttgctgccgcatctacctcaggtccgagtctgaacctggtatatcgcaagttcttcggcgggtactgcaactgctcataccatgattgcagagctgagaacaccttgaagctaggagatgtcatccagtaccatgaatgtggttaccgcattctctataagaagcgggcaccgatccatgtgtagtaccagcaaacttcccattttctatgactccaagcaatggcagttgccgttcagtttggactatagaattcaattatgagttcagtttgttgatattaaaggaaagatacaggtcagcctcttttacttaacaaggattcatacttaaatacttaacaaggattcatacttaaatttatctgatgcaatttttcaactgaacgtgaacttggcaggggtgagtacggagtagtgtacaagcgagttctgcattgagctgtcgtagagagcgtagacagacactctagccaacgttgttggctgggattggaacacaaaagcgagacaagggatgagaagcacaggaggagccagtttggcggaggcctcaatccgggtctagaccaaggtcatggtggcgacgaaggtggaggccgaggtggagggtgatgcttccactctcagtcttggggtggggtcgtggggatgacatatgagagtggggtgcagtggtggctcgtcgacatcagccattggcacccttcccctgcccagttcgatgatgcaccctccctcctactacttcacgatggcaccaccatctccaggtaccgtgccgatggaggaaaggagaaacaaggtattttgaagattaagagtgatgccacatacttagcgatggggtgcttgatatcctagatattgtactagcttcagacctcgccgaattgacaccttcgaagaaatgaagtcgccagattggtaggctttgagtgtttcaccagaggaagtatgtagtgcagttaaggaaggaaatgaacttccatcagacttgatagacacactactaaagtggatcccaagcaatgatgaggagcttaggcttcgactgtcctcccatagcaccgccacaccgcatgcgtccgcggcggcgtccgcctcggcgccggtctcgcacaccgctccctagctggggaagttcatcgcctccgagcccttcaacgtggggggattcgattgggcgatctacttctaccccgatgggaagagcggcgaggatggcgttgtctacgtctcgctcttcatagccctggccagcgaaggcaccgatgtgcgcgcgctgttcgaggtcacgctcgtcgaccagagcggcaaggggcaagacaaggtgcatacccactttgggaggtctctcgagagcgacccatacaccctcaagtaccgcgacagcatgtgatgagtctatgtacaggttgtttcctacggtatgcttatctatggtggaaagaaaaagtgattgactcatacttgaaaagaaaagatggcctttgcccattgacgcctgagacaaccagaaatttgccatgacctcgttcctgaccaagaaaaactgtcaagcacagaatcacagttgatatattgggattccaaggtatcagaggctgatatggatgcaatgtggaaacatcctgatgtgtataaggagtggataaaatctggtgagagacgtggaaatgtacgattctcccatgatgcaaagaacatgccttacctttctcgcgtcgaggtgaaggatatgattgccttctcatgttgtgtatatgatggtggtgatgaggagaaggaaatggatgcagccagagaaataggttggagagggaaatttactaagagaggacgtgtaataagaccaggaattattagaatgagtggaaaatgtcctcttacacctttggaggttgggttaatgcttcgtggaatggatttcagcaataagactgcaatctttttggcatctggaaagatttacaaagcagagaagaacatggcttctcttcttgaaatgtttcctctcctacagacaaaagagacactggcatcagaagaggaacttgctccattcaagatggctgctgttgactatagtatttgtgcccaaagtgaagtttttgtgaccacacaaggtggaaatcccgcattttttatgggtcacaggagatacttgtatggtgggcattcaaaaacaattaaaccagacaaaagaaggcttgctgtactcttcaataatccacgtatagggtggacggcattgaagcggcacttgcttaatatgagagcatacagtgatgtcaaggggatcgaaatgaaaagaccaaacgaatctatatataccttcccgtgtcctgactgcatgtgccgcttgaacagaacagaacactcgaaatccaaacagagtagatagtatatttcgtatgtagaccaaatggctaaaaccatccaatattttcatagactgaaaatgcagagaaagcaacaaaggtgtatcaatacagtcgtacaagcttagtatcggatggtttttaatttgtatagcaaagcacgggcacatacctatatatcttttaatgtatgtaaatattcttaacctttaaaagatactaacaagcaggtataacgataattaatgtttctatatcttaatatattttatcattatatgttgattccgtagcaacgcacggtca

SEQ ID NO: 69352 - DNA, 3755 bp, Zea Mays
tggaggcgtccacagggggcgacacccgtgaccctgcccccgttcgacatcagcgctcctccccccgaccaccgtcgatttggtgtctgagccctcgctagatctcgcaccctcaccgaagccctcattggattcgacgccctcactggaggttgcaccgcgatgggatctaggaaccgtagatggcctcgaccacccacgtgggttgttgcctctgcggatgagacgcagcgccaaggggccagaggaaacgacgtgatggacctcatatcacagctcatgtcatggttcatgcctctcatcgcctcccgccgtggttcgccgaggccgccccatgctgcacgccatgggcagcgatgtcgccttcacgaagctcggcatggagtgctaccccaaggaggccaccgctgttggggtcaagggattccccgacatggaaaaataaccgacgacgagatcaatgccgcctccgtcacttgctgccgcatctacctcaggtccgagtctgaacctgattgcagagctgagaacaccttgaagctaggagatgtcatccagtaccatgaatgtggttaccgcattctctataagaagcgggcaccgatccatgtgtagtaccagcaaacttcccattttctatgactccaagcaatggcagttgccgttcagtttggactatagaattcaattatgagttcagtttgttgatattaaaggaaagatacaggtcagcctcttttacttaacaaggtaagagctctaaatttatgttagtatagtagaagtttttttgttgtaaatatcacttgcatatacgccagctagatgctcactatttgtcctctctcaaggtctcaatctgtctgatgtttattcaaccgattagctatcatcataaacctgaataacattttgctttgttcatgttcaggattcatacttaaatacttaacaaggtaagagctctaaatttatgttagtatagtagaagttttttttgttgttgtaaatatcacttgcatatacgccagctagatgctcactatttgtcctctctcaaggtctgaatctgtctgatgttttattcaactgattaactatcatcataaacctgaataacattttgctttgttcatgttcaggattcatacttaaatttatctgatgcaatttttcaactgaacgtgaacttggcaggggtgagtacggagtagtgtacaagcgagttctgcattgagctgtcgtagagagcgtagacagacactctagccaacgttgttggctgggattggaacacaaaagcgagacaagggatgagaagcacaggaggagccaggtgaggtgaggtggcgacacacaggagtcgggcaagctcagctcatctcatctcatgctctactaaaaaggattagcccatctcaagagaaaagagtaacattgtcagcccactgcaataaccacactattaccagtcttgaaattcactttttgtttgtttgtcatagaaccagggattcatgacaggaaatgatctccttctcaagataagaaaattgcatttaagttactaatcagtgtatggtttactagtttggcggaggcctcaatccgggtctagaccaaggtcatggtggcgacgaaggtggaggccgaggtggagggtgatgcttccactctcagtcttggggtggggtcgtggggatgacatatgagagtggggtgcagtggtggctcgtcgacatcagccattggcacccttcccctgcccagttcgatgatgcaccctccctcctactacttcacgatggcaccaccatctccaggtaccgtgccgatggaggaaaggagaaacaaggtattttgaagattaagagtgatgccacatacttagcgatggggtgcttgatatcctagatattgtactagcttcagacctcgccgaattgacaccttcgaagaaatgaagtcgccagattggtaggctttgagtgtttcaccagaggaagtatgtagtgcagttaaggaaggaaatgaacttccatcagacttgatagacacactactaaagtggatcccaagcaatgatgaggagcttaggcttcgactgtcctcccatagcaccgccacaccgcatgcgtccgcggcggcgtccgcctcggcgccggtctcgcacaccgctccctagctggggaagttcatcgcctccgagcccttcaacgtggggggattcgattgggcgatctacttctaccccgatgggaagagcggcgaggatggcgttgtctacgtctcgctcttcatagccctggccagcgaaggcaccgatgtgcgcgcgctgttcgaggtcacgctcgtcgaccagagcggcaaggggcaagacaaggtgcatacccactttgggaggtctctcgagagcgacccatacaccctcaagtaccgcgacagcatgtgatgagtctatgtacaggttgtttcctacggtatgcttatctatggtggaaagaaaaagtgattgactcatacttgaaaagaaaagatggcctttgcccattgacgcctgagacaaccagaaatttgccatgacctcgttcctgaccaagaaaaactgtcaagcacagaatcacagttgatatattgggattccaaggtatcagaggctgatatggatgcaatgtggaaacatcctgatgtgtataaggagtggataaaatctggtgagagacgtggaaatgtacgattctcccatgatgcaaagaacatgccttacctttctcgcgtcgaggtgaaggatatgattgccttctcatgttgtgtatatgatggtggtgatgaggagaaggaaatggatgcagccagagaaataggttggagagggaaatttactaagagaggacgtgtaataagaccaggaattattagaatgagtggaaaatgtcctcttacacctttggaggttgggttaatgcttcgtggaatggatttcagcaataagactgcaatctttttggcatctggaaagatttacaaagcagagaagaacatggcttctcttcttgaaatgtttcctctcctacagacaaaagagacactggcatcagaagaggaacttgctccattcaagaatttctccttctagatggctgctgttgactatagtatttgtgcccaaagtgaagtttttgtgaccacacaaggtggaaatcccgcattttttatgggtcacaggagatacttgtatggtgggcattcaaaaacaattaaaccagacaaaagaaggcttgctgtactcttcaataatccacgtatagggtggacggcattgaagcggcacttgcttaatatgagagcatacagtgatgtcaaggggatcgaaatgaaaagaccaaacgaatctatatataccttcccgtgtcctgactgcatgtgccgcttgaacagaacagaacactcgaaatccaaacagagtagatagtatatttcgtatgtagaccaaatggctaaaaccatccaatattttcatagactgaaaatgcagagaaagcaacaaaggtgtatcaatacagtcgtacaagcttagtatcggatggtttttaatttgtatagcaaagcacgggcacatacctatatatcttttaatgtatgtaaatattcttaacctttaaaagatactaacaagcaggtataacgataattaatgtttctatatcttaatatattttatcattatatgttgattccgtagcaacgcacggtca

SEQ ID NO: 69353 - DNA, 3382 bp, Zea Mays
gcgctggaggcgtccacagggggcgacacccgtgaccctgcccccgttcgacatcagcgctcctccccccgaccaccgtcgatttggtgtctgagccctcgctagatctcgcaccctcaccgaagccctcattggattcgacgccctcactggaggttgcaccgcgatgggatctaggaaccgtagatggcctcgaccacccacgtgggttgttgcctctgcggatgagacgcagcgccaaggggccagaggaaacgacgtgatggacctcatatcacagctcatgtcatggttcatgcctctcatcgcctcccgccgtggttcgccgaggccgccccatgctgcacgccatgggcagcgatgtcgccttcacgaagctcggcatggagtgctaccccaaggaggccaccgctgttggggtcaagggattccccgacatggaaaaataaccgacgacgagatcaatgccgcctccgtcacttgctgccgcatctacctcaggtccgagtctgaacctgattgcagagctgagaacaccttgaagctaggagatgtcatccagtaccatgaatgtggttaccgcattctctataagaagcgggcaccgatccatgtgtagtaccagcaaacttcccattttctatgactccaaggccttatgtcatccagcaatggcagttgccgttcagtttggactatagaattcaattatgagttcagtttgttgatattaaaggaaagatacaggtcagcctcttttacttaacaaggattcatacttaaatacttaacaaggattcatacttaaatttatctgatgcaatttttcaactgaacgtgaacttggcaggggtgagtacggagtagtgtacaagcgagttctgcattgagctgtcgtagagagcgtagacagacactctagccaacgttgttggctgggattggaacacaaaagcgagacaagggatgagaagcacaggaggagccaggtgaggtgaggtggcgacacacaggagtcgggcaagctcagctcatctcatctcatgctctactaaaaaggattagcccatctcaagagaaaagagtaacattgtcagcccactgcaataaccacactattaccagtcttgaaattcactttttgtttgtttgtcatagaaccagggattcatgacaggaaatgatctccttctcaagataagaaaattgcatttaagttactaatcagtgtatggtttactagtttggcggaggcctcaatccgggtctagaccaaggtcatggtggcgacgaaggtggaggccgaggtggagggtgatgcttccactctcagtcttggggtggggtcgtggggatgacatatgagagtggggtgcagtggtggctcgtcgacatcagccattggcacccttcccctgcccagttcgatgatgcaccctccctcctactacttcacgatggcaccaccatctccaggtaccgtgccgatggaggaaaggagaaacaagattaagagtgatgccacatacttagcgatggggtgcttgatatcctagatattgtactagcttcagacctcgccgaattgacaccttcgaagaaatgaagtcgccagattggtaggctttgagtgtttcaccagaggaagtatgtagtgcagttaaggaaggaaatgaacttccatcagacttgatagacacactactaaagtggatcccaagcaatgatgaggagcttaggcttcgactgtcctcccatagcaccgccacaccgcatgcgtccgcggcggcgtccgcctcggcgccggtctcgcacaccgctccctagctggggaagttcatcgcctccgagcccttcaacgtggggggattcgattgggcgatctacttctaccccgatgggaagagcggcgaggatggcgttgtctacgtctcgctcttcatagccctggccagcgaaggcaccgatgtgcgcgcgctgttcgaggtcacgctcgtcgaccagagcggcaaggggcaagacaaggtgcatacccactttgggaggtctctcgagagcgacccatacaccctcaagtaccgcgacagcatgtgatgagtctatgtacaggttgtttcctacggtatgcttatctatggtggaaagaaaaagtgattgactcatacttgaaaagaaaagatggcctttgcccattgacgcctgagacaaccagaaatttgccatgacctcgttcctgaccaagaaaaactgtcaagcacagaatcacagttgatatattgggattccaaggtatcagaggctgatatggatgcaatgtggaaacatcctgatgtgtataaggagtggataaaatctggtgagagacgtggaaatgtacgattctcccatgatgcaaagaacatgccttacctttctcgcgtcgaggtgaaggatatgattgccttctcatgttgtgtatatgatggtggtgatgaggagaaggaaatggatgcagccagagaaataggttggagagggaaatttactaagagaggacgtgtaataagaccaggaattattagaatgagtggaaaatgtcctcttacacctttggaggttgggttaatgcttcgtggaatggatttcagcaataagactgcaatctttttggcatctggaaagatttacaaagcagagaagaacatggcttctcttcttgaaatgtttcctctcctacagacaaaagagacactggcatcagaagaggaacttgctccattcaagatggctgctgttgactatagtatttgtgcccaaagtgaagtttttgtgaccacacaaggtggaaatcccgcattttttatgggtcacaggagatacttgtatggtgggcattcaaaaacaattaaaccagacaaaagaaggcttgctgtactcttcaataatccacgtatagggtggacggcattgaagcggcacttgcttaatatgagagcatacagtgatgtcaaggggatcgaaatgaaaagaccaaacgaatctatatataccttcccgtgtcctgactgcatgtgccgcttgaacagaacagaacactcgaaatccaaacagagtagatagtatatttcgtatgtagaccaaatggctaaaaccatccaatattttcatagactgaaaatgcagagaaagcaacaaaggtgtatcaatacagtcgtacaagcttagtatcggatggtttttaatttgtatagcaaagcacgggcacatacctatatatcttttaatgtatgtaaatattcttaacctttaaaagatactaacaagcaggtataacgataattaatgtttctatatcttaatatattttatcattatatgttgattccgtagcaacgcacggtca

SEQ ID NO: 69354 - DNA, 3775 bp, Zea Mays
gcgctggaggcgtccacagggggcgacacccgtgaccctgcccccgttcgacatcagcgctcctccccccgaccaccgtcgatttggtgtctgagccctcgctagatctcgcaccctcaccgaagccctcattggattcgacgccctcactggaggttgcaccgcgatgggatctaggaaccgtagatggcctcgaccacccacgtgggttgttgcctctgcggatgagacgcagcgccaaggggccagaggaaacgacgtgatggacctcatatcacagctcatgtcatggttcatgcctctcatcgcctcccgccgtggttcgccgaggccgccccatgctgcacgccatgggcagcgatgtcgccttcacgaagctcggcatggagtgctaccccaaggaggccaccgctgttggggtcaagggattccccgacatggaaaaataaccgacgacgagatcaatgccgcctccgtcacttgctgccgcatctacctcaggtccgagtctgaacctgattgcagagctgagaacaccttgaagctaggagatgtcatccagtaccatgaatgtggttaccgcattctctataagaagcgggcaccgatccatgtgtagtaccagcaaacttcccattttctatgactccaaggccttatgtcatccagcaatggcagttgccgttcagtttggactatagaattcaattatgagttcagtttgttgatattaaaggaaagatacaggtcagcctcttttacttaacaaggtaagagctctaaatttatgttagtatagtagaagtttttttgttgtaaatatcacttgcatatacgccagctagatgctcactatttgtcctctctcaaggtctcaatctgtctgatgtttattcaaccgattagctatcatcataaacctgaataacattttgctttgttcatgttcaggattcatacttaaatacttaacaaggtaagagctctaaatttatgttagtatagtagaagttttttttgttgttgtaaatatcacttgcatatacgccagctagatgctcactatttgtcctctctcaaggtctgaatctgtctgatgttttattcaactgattaactatcatcataaacctgaataacattttgctttgttcatgttcaggattcatacttaaatttatctgatgcaatttttcaactgaacgtgaacttggcaggggtgagtacggagtagtgtacaagcgagttctgcattgagctgtcgtagagagcgtagacagacactctagccaacgttgttggctgggattggaacacaaaagcgagacaagggatgagaagcacaggaggagccaggtgaggtgaggtggcgacacacaggagtcgggcaagctcagctcatctcatctcatgctctactaaaaaggattagcccatctcaagagaaaagagtaacattgtcagcccactgcaataaccacactattaccagtcttgaaattcactttttgtttgtttgtcatagaaccagggattcatgacaggaaatgatctccttctcaagataagaaaattgcatttaagttactaatcagtgtatggtttactagtttggcggaggcctcaatccgggtctagaccaaggtcatggtggcgacgaaggtggaggccgaggtggagggtgatgcttccactctcagtcttggggtggggtcgtggggatgacatatgagagtggggtgcagtggtggctcgtcgacatcagccattggcacccttcccctgcccagttcgatgatgcaccctccctcctactacttcacgatggcaccaccatctccaggtaccgtgccgatggaggaaaggagaaacaaggtattttgaagattaagagtgatgccacatacttagcgatggggtgcttgatatcctagatattgtactagcttcagacctcgccgaattgacaccttcgaagaaatgaagtcgccagattggtaggctttgagtgtttcaccagaggaagtatgtagtgcagttaaggaaggaaatgaacttccatcagacttgatagacacactactaaagtggatcccaagcaatgatgaggagcttaggcttcgactgtcctcccatagcaccgccacaccgcatgcgtccgcggcggcgtccgcctcggcgccggtctcgcacaccgctccctagctggggaagttcatcgcctccgagcccttcaacgtggggggattcgattgggcgatctacttctaccccgatgggaagagcggcgaggatggcgttgtctacgtctcgctcttcatagccctggccagcgaaggcaccgatgtgcgcgcgctgttcgaggtcacgctcgtcgaccagagcggcaaggggcaagacaaggtgcatacccactttgggaggtctctcgagagcgacccatacaccctcaagtaccgcgacagcatgtgatgagtctatgtacaggttgtttcctacggtatgcttatctatggtggaaagaaaaagtgattgactcatacttgaaaagaaaagatggcctttgcccattgacgcctgagacaaccagaaatttgccatgacctcgttcctgaccaagaaaaactgtcaagcacagaatcacagttgatatattgggattccaaggtatcagaggctgatatggatgcaatgtggaaacatcctgatgtgtataaggagtggataaaatctggtgagagacgtggaaatgtacgattctcccatgatgcaaagaacatgccttacctttctcgcgtcgaggtgaaggatatgattgccttctcatgttgtgtatatgatggtggtgatgaggagaaggaaatggatgcagccagagaaataggttggagagggaaatttactaagagaggacgtgtaataagaccaggaattattagaatgagtggaaaatgtcctcttacacctttggaggttgggttaatgcttcgtggaatggatttcagcaataagactgcaatctttttggcatctggaaagatttacaaagcagagaagaacatggcttctcttcttgaaatgtttcctctcctacagacaaaagagacactggcatcagaagaggaacttgctccattcaagaatttctccttctagatggctgctgttgactatagtatttgtgcccaaagtgaagtttttgtgaccacacaaggtggaaatcccgcattttttatgggtcacaggagatacttgtatggtgggcattcaaaaacaattaaaccagacaaaagaaggcttgctgtactcttcaataatccacgtatagggtggacggcattgaagcggcacttgcttaatatgagagcatacagtgatgtcaaggggatcgaaatgaaaagaccaaacgaatctatatataccttcccgtgtcctgactgcatgtgccgcttgaacagaacagaacactcgaaatccaaacagagtagatagtatatttcgtatgtagaccaaatggctaaaaccatccaatattttcatagactgaaaatgcagagaaagcaacaaaggtgtatcaatacagtcgtacaagcttagtatcggatggtttttaatttgtatagcaaagcacgggcacatacctatatatcttttaatgtatgtaaatattcttaacctttaaaagatactaacaagcaggtataacgataattaatgtttctatatcttaatatattttatcattatatgttgattccgtagcaacgcacggtca

SEQ ID NO: 69355 - DNA, 3490 bp, Zea Mays
gcgctggaggcgtccacagggggcgacacccgtgaccctgcccccgttcgacatcagcgctcctccccccgaccaccgtcgatttggtgtctgagccctcgctagatctcgcaccctcaccgaagccctcattggattcgacgccctcactggaggttgcaccgcgatgggatctaggaaccgtagatggcctcgaccacccacgtgggttgttgcctctgcggatgagacgcagcgccaaggggccagaggaaacgacgtgatggacctcatatcacagctcatgtcatggttcatgcctctcatcgcctcccgccgtggttcgccgaggccgccccatgctgcacgccatgggcagcgatgtcgccttcacgaagctcggcatggagtgctaccccaaggaggccaccgctgttggggtcaagggattccccgacatggaaaaataaccgacgacgagatcaatgccgcctccgtcacttgctgccgcatctacctcaggtccgagtctgaacctgattgcagagctgagaacaccttgaagctaggagatgtcatccagtaccatgaatgtggttaccgcattctctataagaagcgggcaccgatccatgtgtagtaccagcaaacttcccattttctatgactccaagcaatggcagttgccgttcagtttggactatagaattcaattatgagttcagtttgttgatattaaaggaaagatacaggtcagcctcttttacttaacaaggtaagagctctaaatttatgttagtatagtagaagtttttttgttgtaaatatcacttgcatatacgccagctagatgctcactatttgtcctctctcaaggtctcaatctgtctgatgtttattcaaccgattagctatcatcataaacctgaataacattttgctttgttcatgttcaggattcatacttaaatacttaacaaggtaagagctctaaatttatgttagtatagtagaagttttttttgttgttgtaaatatcacttgcatatacgccagctagatgctcactatttgtcctctctcaaggtctgaatctgtctgatgttttattcaactgattaactatcatcataaacctgaataacattttgctttgttcatgttcaggattcatacttaaatttatctgatgcaatttttcaactgaacgtgaacttggcaggggtgagtacggagtagtgtacaagcgagttctgcattgagctgtcgtagagagcgtagacagacactctagccaacgttgttggctgggattggaacacaaaagcgagacaagggatgagaagcacaggaggagccagtttggcggaggcctcaatccgggtctagaccaaggtcatggtggcgacgaaggtggaggccgaggtggagggtgatgcttccactctcagtcttggggtggggtcgtggggatgacatatgagagtggggtgcagtggtggctcgtcgacatcagccattggcacccttcccctgcccagttcgatgatgcaccctccctcctactacttcacgatggcaccaccatctccaggtaccgtgccgatggaggaaaggagaaacaaggtattttgaagattaagagtgatgccacatacttagcgatggggtgcttgatatcctagatattgtactagcttcagacctcgccgaattgacaccttcgaagaaatgaagtcgccagattggtaggctttgagtgtttcaccagaggaagtatgtagtgcagttaaggaaggaaatgaacttccatcagacttgatagacacactactaaagtggatcccaagcaatgatgaggagcttaggcttcgactgtcctcccatagcaccgccacaccgcatgcgtccgcggcggcgtccgcctcggcgccggtctcgcacaccgctccctagctggggaagttcatcgcctccgagcccttcaacgtggggggattcgattgggcgatctacttctaccccgatgggaagagcggcgaggatggcgttgtctacgtctcgctcttcatagccctggccagcgaaggcaccgatgtgcgcgcgctgttcgaggtcacgctcgtcgaccagagcggcaaggggcaagacaaggtgcatacccactttgggaggtctctcgagagcgacccatacaccctcaagtaccgcgacagcatgtgatgagtctatgtacaggttgtttcctacggtatgcttatctatggtggaaagaaaaagtgattgactcatacttgaaaagaaaagatggcctttgcccattgacgcctgagacaaccagaaatttgccatgacctcgttcctgaccaagaaaaactgtcaagcacagaatcacagttgatatattgggattccaaggtatcagaggctgatatggatgcaatgtggaaacatcctgatgtgtataaggagtggataaaatctggtgagagacgtggaaatgtacgattctcccatgatgcaaagaacatgccttacctttctcgcgtcgaggtgaaggatatgattgccttctcatgttgtgtatatgatggtggtgatgaggagaaggaaatggatgcagccagagaaataggttggagagggaaatttactaagagaggacgtgtaataagaccaggaattattagaatgagtggaaaatgtcctcttacacctttggaggttgggttaatgcttcgtggaatggatttcagcaataagactgcaatctttttggcatctggaaagatttacaaagcagagaagaacatggcttctcttcttgaaatgtttcctctcctacagacaaaagagacactggcatcagaagaggaacttgctccattcaagatggctgctgttgactatagtatttgtgcccaaagtgaagtttttgtgaccacacaaggtggaaatcccgcattttttatgggtcacaggagatacttgtatggtgggcattcaaaaacaattaaaccagacaaaagaaggcttgctgtactcttcaataatccacgtatagggtggacggcattgaagcggcacttgcttaatatgagagcatacagtgatgtcaaggggatcgaaatgaaaagaccaaacgaatctatatataccttcccgtgtcctgactgcatgtgccgcttgaacagaacagaacactcgaaatccaaacagagtagatagtatatttcgtatgtagaccaaatggctaaaaccatccaatattttcatagactgaaaatgcagagaaagcaacaaaggtgtatcaatacagtcgtacaagcttagtatcggatggtttttaatttgtatagcaaagcacgggcacatacctatatatcttttaatgtatgtaaatattcttaacctttaaaagatactaacaagcaggtataacgataattaatgtttctatatcttaatatattttatcattatatgttgattccgtagcaacgcacggtca

SEQ ID NO: 69356 - DNA, 3495 bp, Zea Mays
gcgctggaggcgtccacagggggcgacacccgtgaccctgcccccgttcgacatcagcgctcctccccccgaccaccgtcgatttggtgtctgagccctcgctagatctcgcaccctcaccgaagccctcattggattcgacgccctcactggaggttgcaccgcgatgggatctaggaaccgtagatggcctcgaccacccacgtgggttgttgcctctgcggatgagacgcagcgccaaggggccagaggaaacgacgtgatggacctcatatcacagctcatgtcatggttcatgcctctcatcgcctcccgccgtggttcgccgaggccgccccatgctgcacgccatgggcagcgatgtcgccttcacgaagctcggcatggagtgctaccccaaggaggccaccgctgttggggtcaagggattccccgacatggaaaaataaccgacgacgagatcaatgccgcctccgtcacttgctgccgcatctacctcaggtccgagtctgaacctgattgcagagctgagaacaccttgaagctaggagatgtcatccagtaccatgaatgtggttaccgcattctctataagaagcgggcaccgatccatgtgtagtaccagcaaacttcccattttctatgactccaaggccttatgtcatccagcaatggcagttgccgttcagtttggactatagaattcaattatgagttcagtttgttgatattaaaggaaagatacaggtcagcctcttttacttaacaaggtaagagctctaaatttatgttagtatagtagaagtttttttgttgtaaatatcacttgcatatacgccagctagatgctcactatttgtcctctctcaaggtctcaatctgtctgatgtttattcaaccgattagctatcatcataaacctgaataacattttgctttgttcatgttcaggattcatacttaaatacttaacaaggtaagagctctaaatttatgttagtatagtagaagttttttttgttgttgtaaatatcacttgcatatacgccagctagatgctcactatttgtcctctctcaaggtctgaatctgtctgatgttttattcaactgattaactatcatcataaacctgaataacattttgctttgttcatgttcaggattcatacttaaatttatctgatgcaatttttcaactgaacgtgaacttggcaggggtgagtacggagtagtgtacaagcgagttctgcattgagctgtcgtagagagcgtagacagacactctagccaacgttgttggctgggattggaacacaaaagcgagacaagggatgagaagcacaggaggagccagtttggcggaggcctcaatccgggtctagaccaaggtcatggtggcgacgaaggtggaggccgaggtggagggtgatgcttccactctcagtcttggggtggggtcgtggggatgacatatgagagtggggtgcagtggtggctcgtcgacatcagccattggcacccttcccctgcccagttcgatgatgcaccctccctcctactacttcacgatggcaccaccatctccaggtaccgtgccgatggaggaaaggagaaacaagattaagagtgatgccacatacttagcgatggggtgcttgatatcctagatattgtactagcttcagacctcgccgaattgacaccttcgaagaaatgaagtcgccagattggtaggctttgagtgtttcaccagaggaagtatgtagtgcagttaaggaaggaaatgaacttccatcagacttgatagacacactactaaagtggatcccaagcaatgatgaggagcttaggcttcgactgtcctcccatagcaccgccacaccgcatgcgtccgcggcggcgtccgcctcggcgccggtctcgcacaccgctccctagctggggaagttcatcgcctccgagcccttcaacgtggggggattcgattgggcgatctacttctaccccgatgggaagagcggcgaggatggcgttgtctacgtctcgctcttcatagccctggccagcgaaggcaccgatgtgcgcgcgctgttcgaggtcacgctcgtcgaccagagcggcaaggggcaagacaaggtgcatacccactttgggaggtctctcgagagcgacccatacaccctcaagtaccgcgacagcatgtgatgagtctatgtacaggttgtttcctacggtatgcttatctatggtggaaagaaaaagtgattgactcatacttgaaaagaaaagatggcctttgcccattgacgcctgagacaaccagaaatttgccatgacctcgttcctgaccaagaaaaactgtcaagcacagaatcacagttgatatattgggattccaaggtatcagaggctgatatggatgcaatgtggaaacatcctgatgtgtataaggagtggataaaatctggtgagagacgtggaaatgtacgattctcccatgatgcaaagaacatgccttacctttctcgcgtcgaggtgaaggatatgattgccttctcatgttgtgtatatgatggtggtgatgaggagaaggaaatggatgcagccagagaaataggttggagagggaaatttactaagagaggacgtgtaataagaccaggaattattagaatgagtggaaaatgtcctcttacacctttggaggttgggttaatgcttcgtggaatggatttcagcaataagactgcaatctttttggcatctggaaagatttacaaagcagagaagaacatggcttctcttcttgaaatgtttcctctcctacagacaaaagagacactggcatcagaagaggaacttgctccattcaagatggctgctgttgactatagtatttgtgcccaaagtgaagtttttgtgaccacacaaggtggaaatcccgcattttttatgggtcacaggagatacttgtatggtgggcattcaaaaacaattaaaccagacaaaagaaggcttgctgtactcttcaataatccacgtatagggtggacggcattgaagcggcacttgcttaatatgagagcatacagtgatgtcaaggggatcgaaatgaaaagaccaaacgaatctatatataccttcccgtgtcctgactgcatgtgccgcttgaacagaacagaacactcgaaatccaaacagagtagatagtatatttcgtatgtagaccaaatggctaaaaccatccaatattttcatagactgaaaatgcagagaaagcaacaaaggtgtatcaatacagtcgtacaagcttagtatcggatggtttttaatttgtatagcaaagcacgggcacatacctatatatcttttaatgtatgtaaatattcttaacctttaaaagatactaacaagcaggtataacgataattaatgtttctatatcttaatatattttatcattatatgttgattccgtagcaacgcacggtca

SEQ ID NO: 69357 - DNA, 3486 bp, Zea Mays
aggcgctggaggcgtccacagggggcgacacccgtgaccctgcccccgttcgacatcagcgctcctccccccgaccaccgtcgatttggtgtctgagccctcgctagatctcgcaccctcaccgaagccctcattggattcgacgccctcactggaggttgcaccgcgatgggatctaggaaccgtagatggcctcgaccacccacgtgggttgttgcctctgcggatgagacgcagcgccaaggggccagaggaaacgacgtgatggacctcatatcacagctcatgtcatggttcatgcctctcatcgcctcccgccgtggttcgccgaggccgccccatgctgcacgccatgggcagcgatgtcgccttcacgaagctcggcatggagtgctaccccaaggaggccaccgctgttggggtcaagggattccccgacatggaaaaataaccgacgacgagatcaatgccgcctccgtcacttgctgccgcatctacctcaggtccgagtctgaacctgattgcagagctgagaacaccttgaagctaggagatgtcatccagtaccatgaatgtggttaccgcattctctataagaagcgggcaccgatccatgtgtagtaccagcaaacttcccattttctatgactccaagcaatggcagttgccgttcagtttggactatagaattcaattatgagttcagtttgttgatattaaaggaaagatacaggtcagcctcttttacttaacaaggtaagagctctaaatttatgttagtatagtagaagtttttttgttgtaaatatcacttgcatatacgccagctagatgctcactatttgtcctctctcaaggtctcaatctgtctgatgtttattcaaccgattagctatcatcataaacctgaataacattttgctttgttcatgttcaggattcatacttaaatacttaacaaggtaagagctctaaatttatgttagtatagtagaagttttttttgttgttgtaaatatcacttgcatatacgccagctagatgctcactatttgtcctctctcaaggtctgaatctgtctgatgttttattcaactgattaactatcatcataaacctgaataacattttgctttgttcatgttcaggattcatacttaaatttatctgatgcaatttttcaactgaacgtgaacttggcaggggtgagtacggagtagtgtacaagcgagttctgcattgagctgtcgtagagagcgtagacagacactctagccaacgttgttggctgggattggaacacaaaagcgagacaagggatgagaagcacaggaggagccaggtgagtttggcggaggcctcaatccgggtctagaccaaggtcatggtggcgacgaaggtggaggccgaggtggagggtgatgcttccactctcagtcttggggtggggtcgtggggatgacatatgagagtggggtgcagtggtggctcgtcgacatcagccattggcacccttcccctgcccagttcgatgatgcaccctccctcctactacttcacgatggcaccaccatctccaggtaccgtgccgatggaggaaaggagaaacaagattaagagtgatgccacatacttagcgatggggtgcttgatatcctagatattgtactagcttcagacctcgccgaattgacaccttcgaagaaatgaagtcgccagattggtaggctttgagtgtttcaccagaggaagtatgtagtgcagttaaggaaggaaatgaacttccatcagacttgatagacacactactaaagtggatcccaagcaatgatgaggagcttaggcttcgactgtcctcccatagcaccgccacaccgcatgcgtccgcggcggcgtccgcctcggcgccggtctcgcacaccgctccctagctggggaagttcatcgcctccgagcccttcaacgtggggggattcgattgggcgatctacttctaccccgatgggaagagcggcgaggatggcgttgtctacgtctcgctcttcatagccctggccagcgaaggcaccgatgtgcgcgcgctgttcgaggtcacgctcgtcgaccagagcggcaaggggcaagacaaggtgcatacccactttgggaggtctctcgagagcgacccatacaccctcaagtaccgcgacagcatgtgatgagtctatgtacaggttgtttcctacggtatgcttatctatggtggaaagaaaaagtgattgactcatacttgaaaagaaaagatggcctttgcccattgacgcctgagacaaccagaaatttgccatgacctcgttcctgaccaagaaaaactgtcaagcacagaatcacagttgatatattgggattccaaggtatcagaggctgatatggatgcaatgtggaaacatcctgatgtgtataaggagtggataaaatctggtgagagacgtggaaatgtacgattctcccatgatgcaaagaacatgccttacctttctcgcgtcgaggtgaaggatatgattgccttctcatgttgtgtatatgatggtggtgatgaggagaaggaaatggatgcagccagagaaataggttggagagggaaatttactaagagaggacgtgtaataagaccaggaattattagaatgagtggaaaatgtcctcttacacctttggaggttgggttaatgcttcgtggaatggatttcagcaataagactgcaatctttttggcatctggaaagatttacaaagcagagaagaacatggcttctcttcttgaaatgtttcctctcctacagacaaaagagacactggcatcagaagaggaacttgctccattcaagatggctgctgttgactatagtatttgtgcccaaagtgaagtttttgtgaccacacaaggtggaaatcccgcattttttatgggtcacaggagatacttgtatggtgggcattcaaaaacaattaaaccagacaaaagaaggcttgctgtactcttcaataatccacgtatagggtggacggcattgaagcggcacttgcttaatatgagagcatacagtgatgtcaaggggatcgaaatgaaaagaccaaacgaatctatatataccttcccgtgtcctgactgcatgtgccgcttgaacagaacagaacactcgaaatccaaacagagtagatagtatatttcgtatgtagaccaaatggctaaaaccatccaatattttcatagactgaaaatgcagagaaagcaacaaaggtgtatcaatacagtcgtacaagcttagtatcggatggtttttaatttgtatagcaaagcacgggcacatacctatatatcttttaatgtatgtaaatattcttaacctttaaaagatactaacaagcaggtataacgataattaatgtttctatatcttaatatattttatcattatatgttgattccgtagcaacgcacggtca

SEQ ID NO: 69358 - DNA, 3414 bp, Zea Mays
aggcgctggaggcgtccacagggggcgacacccgtgaccctgcccccgttcgacatcagcgctcctccccccgaccaccgtcgatttggtgtctgagccctcgctagatctcgcaccctcaccgaagccctcattggattcgacgccctcactggaggttgcaccgcgatgggatctaggaaccgtagatggcctcgaccacccacgtgggttgttgcctctgcggatgagacgcagcgccaaggggccagaggaaacgacgtgatggacctcatatcacagctcatgtcatggttcatgcctctcatcgcctcccgccgtggttcgccgaggccgccccatgctgcacgccatgggcagcgatgtcgccttcacgaagctcggcatggagtgctaccccaaggaggccaccgctgttggggtcaagggattccccgacatggaaaaataaccgacgacgagatcaatgccgcctccgtcacttgctgccgcatctacctcaggtccgagtctgaacctggtatatcgcaagttcttcggcgggtactgcaactgctcataccatgattgcagagctgagaacaccttgaagctaggagatgtcatccagtaccatgaatgtggttaccgcattctctataagaagcgggcaccgatccatgtgtagtaccagcaaacttcccattttctatgactccaagcaatggcagttgccgttcagtttggactatagaattcaattatgagttcagtttgttgatattaaaggaaagatacaggtcagcctcttttacttaacaaggattcatacttaaatacttaacaaggattcatacttaaatttatctgatgcaatttttcaactgaacgtgaacttggcaggggtgagtacggagtagtgtacaagcgagttctgcattgagctgtcgtagagagcgtagacagacactctagccaacgttgttggctgggattggaacacaaaagcgagacaagggatgagaagcacaggaggagccaggtgaggtgaggtggcgacacacaggagtcgggcaagctcagctcatctcatctcatgctctactaaaaaggattagcccatctcaagagaaaagagtaacattgtcagcccactgcaataaccacactattaccagtcttgaaattcactttttgtttgtttgtcatagaaccagggattcatgacaggaaatgatctccttctcaagataagaaaattgcatttaagttactaatcagtgtatggtttactagtttggcggaggcctcaatccgggtctagaccaaggtcatggtggcgacgaaggtggaggccgaggtggagggtgatgcttccactctcagtcttggggtggggtcgtggggatgacatatgagagtggggtgcagtggtggctcgtcgacatcagccattggcacccttcccctgcccagttcgatgatgcaccctccctcctactacttcacgatggcaccaccatctccaggtaccgtgccgatggaggaaaggagaaacaagattaagagtgatgccacatacttagcgatggggtgcttgatatcctagatattgtactagcttcagacctcgccgaattgacaccttcgaagaaatgaagtcgccagattggtaggctttgagtgtttcaccagaggaagtatgtagtgcagttaaggaaggaaatgaacttccatcagacttgatagacacactactaaagtggatcccaagcaatgatgaggagcttaggcttcgactgtcctcccatagcaccgccacaccgcatgcgtccgcggcggcgtccgcctcggcgccggtctcgcacaccgctccctagctggggaagttcatcgcctccgagcccttcaacgtggggggattcgattgggcgatctacttctaccccgatgggaagagcggcgaggatggcgttgtctacgtctcgctcttcatagccctggccagcgaaggcaccgatgtgcgcgcgctgttcgaggtcacgctcgtcgaccagagcggcaaggggcaagacaaggtgcatacccactttgggaggtctctcgagagcgacccatacaccctcaagtaccgcgacagcatgtgatgagtctatgtacaggttgtttcctacggtatgcttatctatggtggaaagaaaaagtgattgactcatacttgaaaagaaaagatggcctttgcccattgacgcctgagacaaccagaaatttgccatgacctcgttcctgaccaagaaaaactgtcaagcacagaatcacagttgatatattgggattccaaggtatcagaggctgatatggatgcaatgtggaaacatcctgatgtgtataaggagtggataaaatctggtgagagacgtggaaatgtacgattctcccatgatgcaaagaacatgccttacctttctcgcgtcgaggtgaaggatatgattgccttctcatgttgtgtatatgatggtggtgatgaggagaaggaaatggatgcagccagagaaataggttggagagggaaatttactaagagaggacgtgtaataagaccaggaattattagaatgagtggaaaatgtcctcttacacctttggaggttgggttaatgcttcgtggaatggatttcagcaataagactgcaatctttttggcatctggaaagatttacaaagcagagaagaacatggcttctcttcttgaaatgtttcctctcctacagacaaaagagacactggcatcagaagaggaacttgctccattcaagatggctgctgttgactatagtatttgtgcccaaagtgaagtttttgtgaccacacaaggtggaaatcccgcattttttatgggtcacaggagatacttgtatggtgggcattcaaaaacaattaaaccagacaaaagaaggcttgctgtactcttcaataatccacgtatagggtggacggcattgaagcggcacttgcttaatatgagagcatacagtgatgtcaaggggatcgaaatgaaaagaccaaacgaatctatatataccttcccgtgtcctgactgcatgtgccgcttgaacagaacagaacactcgaaatccaaacagagtagatagtatatttcgtatgtagaccaaatggctaaaaccatccaatattttcatagactgaaaatgcagagaaagcaacaaaggtgtatcaatacagtcgtacaagcttagtatcggatggtttttaatttgtatagcaaagcacgggcacatacctatatatcttttaatgtatgtaaatattcttaacctttaaaagatactaacaagcaggtataacgataattaatgtttctatatcttaatatattttatcattatatgttgattccgtagcaacgcacggtca

SEQ ID NO: 69359 - DNA, 3679 bp, Zea Mays
aggcgctggaggcgtccacagggggcgacacccgtgaccctgcccccgttcgacatcagcgctcctccccccgaccaccgtcgatttggtgtctgagccctcgctagatctcgcaccctcaccgaagccctcattggattcgacgccctcactggaggttgcaccgcgatgggatctaggaaccgtagatggcctcgaccacccacgtgggttgttgcctctgcggatgagacgcagcgccaaggggccagaggaaacgacgtgatggacctcatatcacagctcatgtcatggttcatgcctctcatcgcctcccgccgtggttcgccgaggccgccccatgctgcacgccatgggcagcgatgtcgccttcacgaagctcggcatggagtgctaccccaaggaggccaccgctgttggggtcaagggattccccgacatggaaaaataaccgacgacgagatcaatgccgcctccgtcacttgctgccgcatctacctcagagctgagaacaccttgaagctaggagatgtcatccagtaccatgaatgtggttaccgcattctctataagaagcgggcaccgatccatgtgtagtaccagcaaacttcccattttctatgactccaagcaatggcagttgccgttcagtttggactatagaattcaattatgagttcagtttgttgatattaaaggaaagatacaggtcagcctcttttacttaacaaggtaagagctctaaatttatgttagtatagtagaagtttttttgttgtaaatatcacttgcatatacgccagctagatgctcactatttgtcctctctcaaggtctcaatctgtctgatgtttattcaaccgattagctatcatcataaacctgaataacattttgctttgttcatgttcaggattcatacttaaatacttaacaaggtaagagctctaaatttatgttagtatagtagaagttttttttgttgttgtaaatatcacttgcatatacgccagctagatgctcactatttgtcctctctcaaggtctgaatctgtctgatgttttattcaactgattaactatcatcataaacctgaataacattttgctttgttcatgttcaggattcatacttaaatttatctgatgcaatttttcaactgaacgtgaacttggcaggggtgagtacggagtagtgtacaagcgagttctgcattgagctgtcgtagagagcgtagacagacactctagccaacgttgttggctgggattggaacacaaaagcgagacaagggatgagaagcacaggaggagccaggtgaggtgaggtggcgacacacaggagtcgggcaagctcagctcatctcatctcatgctctactaaaaaggattagcccatctcaagagaaaagagtaacattgtcagcccactgcaataaccacactattaccagtcttgaaattcactttttgtttgtttgtcatagaaccagggattcatgacaggaaatgatctccttctcaagataagaaaattgcatttaagttactaatcagtgtatggtttactagtttggcggaggcctcaatccgggtctagaccaaggtcatggtggcgacgaaggtggaggccgaggtggagggtgatgcttccactctcagtcttggggtggggtcgtggggatgacatatgagagtggggtgcagtggtggctcgtcgacatcagccattggcacccttcccctgcccagttcgatgatgcaccctccctcctactacttcacgatggcaccaccatctccagattaagagtgatgccacatacttagcgatggggtgcttgatatcctagatattgtactagcttcagacctcgccgaattgacaccttcgaagaaatgaagtcgccagattggtaggctttgagtgtttcaccagaggaagtatgtagtgcagttaaggaaggaaatgaacttccatcagacttgatagacacactactaaagtggatcccaagcaatgatgaggagcttaggcttcgactgtcctcccatagcaccgccacaccgcatgcgtccgcggcggcgtccgcctcggcgccggtctcgcacaccgctccctagctggggaagttcatcgcctccgagcccttcaacgtggggggattcgattgggcgatctacttctaccccgatgggaagagcggcgaggatggcgttgtctacgtctcgctcttcatagccctggccagcgaaggcaccgatgtgcgcgcgctgttcgaggtcacgctcgtcgaccagagcggcaaggggcaagacaaggtgcatacccactttgggaggtctctcgagagcgacccatacaccctcaagtaccgcgacagcatgtgatgagtctatgtacaggttgtttcctacggtatgcttatctatggtggaaagaaaaagtgattgactcatacttgaaaagaaaagatggcctttgcccattgacgcctgagacaaccagaaatttgccatgacctcgttcctgaccaagaaaaactgtcaagcacagaatcacagttgatatattgggattccaaggtatcagaggctgatatggatgcaatgtggaaacatcctgatgtgtataaggagtggataaaatctggtgagagacgtggaaatgtacgattctcccatgatgcaaagaacatgccttacctttctcgcgtcgaggtgaaggatatgattgccttctcatgttgtgtatatgatggtggtgatgaggagaaggaaatggatgcagccagagaaataggttggagagggaaatttactaagagaggacgtgtaataagaccaggaattattagaatgagtggaaaatgtcctcttacacctttggaggttgggttaatgcttcgtggaatggatttcagcaataagactgcaatctttttggcatctggaaagatttacaaagcagagaagaacatggcttctcttcttgaaatgtttcctctcctacagacaaaagagacactggcatcagaagaggaacttgctccattcaagatggctgctgttgactatagtatttgtgcccaaagtgaagtttttgtgaccacacaaggtggaaatcccgcattttttatgggtcacaggagatacttgtatggtgggcattcaaaaacaattaaaccagacaaaagaaggcttgctgtactcttcaataatccacgtatagggtggacggcattgaagcggcacttgcttaatatgagagcatacagtgatgtcaaggggatcgaaatgaaaagaccaaacgaatctatatataccttcccgtgtcctgactgcatgtgccgcttgaacagaacagaacactcgaaatccaaacagagtagatagtatatttcgtatgtagaccaaatggctaaaaccatccaatattttcatagactgaaaatgcagagaaagcaacaaaggtgtatcaatacagtcgtacaagcttagtatcggatggtttttaatttgtatagcaaagcacgggcacatacctatatatcttttaatgtatgtaaatattcttaacctttaaaagatactaacaagcaggtataacgataattaatgtttctatatcttaatatattttatcattatatgttgattccgtagcaacgcacggtca

SEQ ID NO: 69360 - DNA, 3781 bp, Zea Mays
caggcgctggaggcgtccacagggggcgacacccgtgaccctgcccccgttcgacatcagcgctcctccccccgaccaccgtcgatttggtgtctgagccctcgctagatctcgcaccctcaccgaagccctcattggattcgacgccctcactggaggttgcaccgcgatgggatctaggaaccgtagatggcctcgaccacccacgtgggttgttgcctctgcggatgagacgcagcgccaaggggccagaggaaacgacgtgatggacctcatatcacagctcatgtcatggttcatgcctctcatcgcctcccgccgtggttcgccgaggccgccccatgctgcacgccatgggcagcgatgtcgccttcacgaagctcggcatggagtgctaccccaaggaggccaccgctgttggggtcaagggattccccgacatggaaaaataaccgacgacgagatcaatgccgcctccgtcacttgctgccgcatctacctcaggtatatcgcaagttcttcggcgggtactgcaactgctcataccatgattgcagagctgagaacaccttgaagctaggagatgtcatccagtaccatgaatgtggttaccgcattctctataagaagcgggcaccgatccatgtgtagtaccagcaaacttcccattttctatgactccaaggccttatgtcatccagcaatggcagttgccgttcagtttggactatagaattcaattatgagttcagtttgttgatattaaaggaaagatacaggtcagcctcttttacttaacaaggtaagagctctaaatttatgttagtatagtagaagtttttttgttgtaaatatcacttgcatatacgccagctagatgctcactatttgtcctctctcaaggtctcaatctgtctgatgtttattcaaccgattagctatcatcataaacctgaataacattttgctttgttcatgttcaggattcatacttaaatacttaacaaggtaagagctctaaatttatgttagtatagtagaagttttttttgttgttgtaaatatcacttgcatatacgccagctagatgctcactatttgtcctctctcaaggtctgaatctgtctgatgttttattcaactgattaactatcatcataaacctgaataacattttgctttgttcatgttcaggattcatacttaaatttatctgatgcaatttttcaactgaacgtgaacttggcaggggtgagtacggagtagtgtacaagcgagttctgcattgagctgtcgtagagagcgtagacagacactctagccaacgttgttggctgggattggaacacaaaagcgagacaagggatgagaagcacaggaggagccaggtgaggtgaggtggcgacacacaggagtcgggcaagctcagctcatctcatctcatgctctactaaaaaggattagcccatctcaagagaaaagagtaacattgtcagcccactgcaataaccacactattaccagtcttgaaattcactttttgtttgtttgtcatagaaccagggattcatgacaggaaatgatctccttctcaagataagaaaattgcatttaagttactaatcagtgtatggtttactagtttggcggaggcctcaatccgggtctagaccaaggtcatggtggcgacgaaggtggaggccgaggtggagggtgatgcttccactctcagtcttggggtggggtcgtggggatgacatatgagagtggggtgcagtggtggctcgtcgacatcagccattggcacccttcccctgcccagttcgatgatgcaccctccctcctactacttcacgatggcaccaccatctccaggtaccgtgccgatggaggaaaggagaaacaagattaagagtgatgccacatacttagcgatggggtgcttgatatcctagatattgtactagcttcagacctcgccgaattgacaccttcgaagaaatgaagtcgccagattggtaggctttgagtgtttcaccagaggaagtatgtagtgcagttaaggaaggaaatgaacttccatcagacttgatagacacactactaaagtggatcccaagcaatgatgaggagcttaggcttcgactgtcctcccatagcaccgccacaccgcatgcgtccgcggcggcgtccgcctcggcgccggtctcgcacaccgctccctagctggggaagttcatcgcctccgagcccttcaacgtggggggattcgattgggcgatctacttctaccccgatgggaagagcggcgaggatggcgttgtctacgtctcgctcttcatagccctggccagcgaaggcaccgatgtgcgcgcgctgttcgaggtcacgctcgtcgaccagagcggcaaggggcaagacaaggtgcatacccactttgggaggtctctcgagagcgacccatacaccctcaagtaccgcgacagcatgtgatgagtctatgtacaggttgtttcctacggtatgcttatctatggtggaaagaaaaagtgattgactcatacttgaaaagaaaagatggcctttgcccattgacgcctgagacaaccagaaatttgccatgacctcgttcctgaccaagaaaaactgtcaagcacagaatcacagttgatatattgggattccaaggtatcagaggctgatatggatgcaatgtggaaacatcctgatgtgtataaggagtggataaaatctggtgagagacgtggaaatgtacgattctcccatgatgcaaagaacatgccttacctttctcgcgtcgaggtgaaggatatgattgccttctcatgttgtgtatatgatggtggtgatgaggagaaggaaatggatgcagccagagaaataggttggagagggaaatttactaagagaggacgtgtaataagaccaggaattattagaatgagtggaaaatgtcctcttacacctttggaggttgggttaatgcttcgtggaatggatttcagcaataagactgcaatctttttggcatctggaaagatttacaaagcagagaagaacatggcttctcttcttgaaatgtttcctctcctacagacaaaagagacactggcatcagaagaggaacttgctccattcaagatggctgctgttgactatagtatttgtgcccaaagtgaagtttttgtgaccacacaaggtggaaatcccgcattttttatgggtcacaggagatacttgtatggtgggcattcaaaaacaattaaaccagacaaaagaaggcttgctgtactcttcaataatccacgtatagggtggacggcattgaagcggcacttgcttaatatgagagcatacagtgatgtcaaggggatcgaaatgaaaagaccaaacgaatctatatataccttcccgtgtcctgactgcatgtgccgcttgaacagaacagaacactcgaaatccaaacagagtagatagtatatttcgtatgtagaccaaatggctaaaaccatccaatattttcatagactgaaaatgcagagaaagcaacaaaggtgtatcaatacagtcgtacaagcttagtatcggatggtttttaatttgtatagcaaagcacgggcacatacctatatatcttttaatgtatgtaaatattcttaacctttaaaagatactaacaagcaggtataacgataattaatgtttctatatcttaatatattttatcattatatgttgattccgtagcaacgcacggtca

SEQ ID NO: 69361 - DNA, 3736 bp, Zea Mays
caggcgctggaggcgtccacagggggcgacacccgtgaccctgcccccgttcgacatcagcgctcctccccccgaccaccgtcgatttggtgtctgagccctcgctagatctcgcaccctcaccgaagccctcattggattcgacgccctcactggaggttgcaccgcgatgggatctaggaaccgtagatggcctcgaccacccacgtgggttgttgcctctgcggatgagacgcagcgccaaggggccagaggaaacgacgtgatggacctcatatcacagctcatgtcatggttcatgcctctcatcgcctcccgccgtggttcgccgaggccgccccatgctgcacgccatgggcagcgatgtcgccttcacgaagctcggcatggagtgctaccccaaggaggccaccgctgttggggtcaagggattccccgacatggaaaaataaccgacgacgagatcaatgccgcctccgtcacttgctgccgcatctacctcaggtccgagtctgaacctgattgcagagctgagaacaccttgaagctaggagatgtcatccagtaccatgaatgtggttaccgcattctctataagaagcgggcaccgatccatgtgtagtaccagcaaacttcccattttctatgactccaagcaatggcagttgccgttcagtttggactatagaattcaattatgagttcagtttgttgatattaaaggaaagatacaggtcagcctcttttacttaacaaggtaagagctctaaatttatgttagtatagtagaagtttttttgttgtaaatatcacttgcatatacgccagctagatgctcactatttgtcctctctcaaggtctcaatctgtctgatgtttattcaaccgattagctatcatcataaacctgaataacattttgctttgttcatgttcaggattcatacttaaatacttaacaaggtaagagctctaaatttatgttagtatagtagaagttttttttgttgttgtaaatatcacttgcatatacgccagctagatgctcactatttgtcctctctcaaggtctgaatctgtctgatgttttattcaactgattaactatcatcataaacctgaataacattttgctttgttcatgttcaggattcatacttaaatttatctgatgcaatttttcaactgaacgtgaacttggcaggggtgagtacggagtagtgtacaagcgagttctgcattgagctgtcgtagagagcgtagacagacactctagccaacgttgttggctgggattggaacacaaaagcgagacaagggatgagaagcacaggaggagccaggtgaggtgaggtggcgacacacaggagtcgggcaagctcagctcatctcatctcatgctctactaaaaaggattagcccatctcaagagaaaagagtaacattgtcagcccactgcaataaccacactattaccagtcttgaaattcactttttgtttgtttgtcatagaaccagggattcatgacaggaaatgatctccttctcaagataagaaaattgcatttaagttactaatcagtgtatggtttactagtttggcggaggcctcaatccgggtctagaccaaggtcatggtggcgacgaaggtggaggccgaggtggagggtgatgcttccactctcagtcttggggtggggtcgtggggatgacatatgagagtggggtgcagtggtggctcgtcgacatcagccattggcacccttcccctgcccagttcgatgatgcaccctccctcctactacttcacgatggcaccaccatctccaggtaccgtgccgatggaggaaaggagaaacaagattaagagtgatgccacatacttagcgatggggtgcttgatatcctagatattgtactagcttcagacctcgccgaattgacaccttcgaagaaatgaagtcgccagattggtaggctttgagtgtttcaccagaggaagtatgtagtgcagttaaggaaggaaatgaacttccatcagacttgatagacacactactaaagtggatcccaagcaatgatgaggagcttaggcttcgactgtcctcccatagcaccgccacaccgcatgcgtccgcggcggcgtccgcctcggcgccggtctcgcacaccgctccctagctggggaagttcatcgcctccgagcccttcaacgtggggggattcgattgggcgatctacttctaccccgatgggaagagcggcgaggatggcgttgtctacgtctcgctcttcatagccctggccagcgaaggcaccgatgtgcgcgcgctgttcgaggtcacgctcgtcgaccagagcggcaaggggcaagacaaggtgcatacccactttgggaggtctctcgagagcgacccatacaccctcaagtaccgcgacagcatgtgatgagtctatgtacaggttgtttcctacggtatgcttatctatggtggaaagaaaaagtgattgactcatacttgaaaagaaaagatggcctttgcccattgacgcctgagacaaccagaaatttgccatgacctcgttcctgaccaagaaaaactgtcaagcacagaatcacagttgatatattgggattccaaggtatcagaggctgatatggatgcaatgtggaaacatcctgatgtgtataaggagtggataaaatctggtgagagacgtggaaatgtacgattctcccatgatgcaaagaacatgccttacctttctcgcgtcgaggtgaaggatatgattgccttctcatgttgtgtatatgatggtggtgatgaggagaaggaaatggatgcagccagagaaataggttggagagggaaatttactaagagaggacgtgtaataagaccaggaattattagaatgagtggaaaatgtcctcttacacctttggaggttgggttaatgcttcgtggaatggatttcagcaataagactgcaatctttttggcatctggaaagatttacaaagcagagaagaacatggcttctcttcttgaaatgtttcctctcctacagacaaaagagacactggcatcagaagaggaacttgctccattcaagatggctgctgttgactatagtatttgtgcccaaagtgaagtttttgtgaccacacaaggtggaaatcccgcattttttatgggtcacaggagatacttgtatggtgggcattcaaaaacaattaaaccagacaaaagaaggcttgctgtactcttcaataatccacgtatagggtggacggcattgaagcggcacttgcttaatatgagagcatacagtgatgtcaaggggatcgaaatgaaaagaccaaacgaatctatatataccttcccgtgtcctgactgcatgtgccgcttgaacagaacagaacactcgaaatccaaacagagtagatagtatatttcgtatgtagaccaaatggctaaaaccatccaatattttcatagactgaaaatgcagagaaagcaacaaaggtgtatcaatacagtcgtacaagcttagtatcggatggtttttaatttgtatagcaaagcacgggcacatacctatatatcttttaatgtatgtaaatattcttaacctttaaaagatactaacaagcaggtataacgataattaatgtttctatatcttaatatattttatcattatatgttgattccgtagcaacgcacggtca

SEQ ID NO: 69362 - DNA, 3427 bp, Zea Mays
gcaggcgctggaggcgtccacagggggcgacacccgtgaccctgcccccgttcgacatcagcgctcctccccccgaccaccgtcgatttggtgtctgagccctcgctagatctcgcaccctcaccgaagccctcattggattcgacgccctcactggaggttgcaccgcgatgggatctaggaaccgtagatggcctcgaccacccacgtgggttgttgcctctgcggatgagacgcagcgccaaggggccagaggaaacgacgtgatggacctcatatcacagctcatgtcatggttcatgcctctcatcgcctcccgccgtggttcgccgaggccgccccatgctgcacgccatgggcagcgatgtcgccttcacgaagctcggcatggagtgctaccccaaggaggccaccgctgttggggtcaagggattccccgacatggaaaaataaccgacgacgagatcaatgccgcctccgtcacttgctgccgcatctacctcaggtccgagtctgaacctggtatatcgcaagttcttcggcgggtactgcaactgctcataccatgattgcagagctgagaacaccttgaagctaggagatgtcatccagtaccatgaatgtggttaccgcattctctataagaagcgggcaccgatccatgtgtagtaccagcaaacttcccattttctatgactccaagcaatggcagttgccgttcagtttggactatagaattcaattatgagttcagtttgttgatattaaaggaaagatacaggtcagcctcttttacttaacaaggattcatacttaaatacttaacaaggattcatacttaaatttatctgatgcaatttttcaactgaacgtgaacttggcaggggtgagtacggagtagtgtacaagcgagttctgcattgagctgtcgtagagagcgtagacagacactctagccaacgttgttggctgggattggaacacaaaagcgagacaagggatgagaagcacaggaggagccaggtgaggtgaggtggcgacacacaggagtcgggcaagctcagctcatctcatctcatgctctactaaaaaggattagcccatctcaagagaaaagagtaacattgtcagcccactgcaataaccacactattaccagtcttgaaattcactttttgtttgtttgtcatagaaccagggattcatgacaggaaatgatctccttctcaagataagaaaattgcatttaagttactaatcagtgtatggtttactagtttggcggaggcctcaatccgggtctagaccaaggtcatggtggcgacgaaggtggaggccgaggtggagggtgatgcttccactctcagtcttggggtggggtcgtggggatgacatatgagagtggggtgcagtggtggctcgtcgacatcagccattggcacccttcccctgcccagttcgatgatgcaccctccctcctactacttcacgatggcaccaccatctccaggtaccgtgccgatggaggaaaggagaaacaaggtattttgaagattaagagtgatgccacatacttagcgatggggtgcttgatatcctagatattgtactagcttcagacctcgccgaattgacaccttcgaagaaatgaagtcgccagattggtaggctttgagtgtttcaccagaggaagtatgtagtgcagttaaggaaggaaatgaacttccatcagacttgatagacacactactaaagtggatcccaagcaatgatgaggagcttaggcttcgactgtcctcccatagcaccgccacaccgcatgcgtccgcggcggcgtccgcctcggcgccggtctcgcacaccgctccctagctggggaagttcatcgcctccgagcccttcaacgtggggggattcgattgggcgatctacttctaccccgatgggaagagcggcgaggatggcgttgtctacgtctcgctcttcatagccctggccagcgaaggcaccgatgtgcgcgcgctgttcgaggtcacgctcgtcgaccagagcggcaaggggcaagacaaggtgcatacccactttgggaggtctctcgagagcgacccatacaccctcaagtaccgcgacagcatgtgatgagtctatgtacaggttgtttcctacggtatgcttatctatggtggaaagaaaaagtgattgactcatacttgaaaagaaaagatggcctttgcccattgacgcctgagacaaccagaaatttgccatgacctcgttcctgaccaagaaaaactgtcaagcacagaatcacagttgatatattgggattccaaggtatcagaggctgatatggatgcaatgtggaaacatcctgatgtgtataaggagtggataaaatctggtgagagacgtggaaatgtacgattctcccatgatgcaaagaacatgccttacctttctcgcgtcgaggtgaaggatatgattgccttctcatgttgtgtatatgatggtggtgatgaggagaaggaaatggatgcagccagagaaataggttggagagggaaatttactaagagaggacgtgtaataagaccaggaattattagaatgagtggaaaatgtcctcttacacctttggaggttgggttaatgcttcgtggaatggatttcagcaataagactgcaatctttttggcatctggaaagatttacaaagcagagaagaacatggcttctcttcttgaaatgtttcctctcctacagacaaaagagacactggcatcagaagaggaacttgctccattcaagatggctgctgttgactatagtatttgtgcccaaagtgaagtttttgtgaccacacaaggtggaaatcccgcattttttatgggtcacaggagatacttgtatggtgggcattcaaaaacaattaaaccagacaaaagaaggcttgctgtactcttcaataatccacgtatagggtggacggcattgaagcggcacttgcttaatatgagagcatacagtgatgtcaaggggatcgaaatgaaaagaccaaacgaatctatatataccttcccgtgtcctgactgcatgtgccgcttgaacagaacagaacactcgaaatccaaacagagtagatagtatatttcgtatgtagaccaaatggctaaaaccatccaatattttcatagactgaaaatgcagagaaagcaacaaaggtgtatcaatacagtcgtacaagcttagtatcggatggtttttaatttgtatagcaaagcacgggcacatacctatatatcttttaatgtatgtaaatattcttaacctttaaaagatactaacaagcaggtataacgataattaatgtttctatatcttaatatattttatcattatatgttgattccgtagcaacgcacggtca

SEQ ID NO: 69363 - DNA, 3557 bp, Zea Mays
cgcaggcgctggaggcgtccacagggggcgacacccgtgaccctgcccccgttcgacatcagcgctcctccccccgaccaccgtcgatttggtgtctgagccctcgctagatctcgcaccctcaccgaagccctcattggattcgacgccctcactggaggttgcaccgcgatgggatctaggaaccgtagatggcctcgaccacccacgtgggttgttgcctctgcggatgagacgcagcgccaaggggccagaggaaacgacgtgatggacctcatatcacagctcatgtcatggttcatgcctctcatcgcctcccgccgtggttcgccgaggccgccccatgctgcacgccatgggcagcgatgtcgccttcacgaagctcggcatggagtgctaccccaaggaggccaccgctgttggggtcaagggattccccgacatggaaaaataaccgacgacgagatcaatgccgcctccgtcacttgctgccgcatctacctcaggtccgagtctgaacctggtatatcgcaagttcttcggcgggtactgcaactgctcataccatgattgcagagctgagaacaccttgaagctaggagatgtcatccagtaccatgaatgtggttaccgcattctctataagaagcgggcaccgatccatgtgtagtaccagcaaacttcccattttctatgactccaaggccttatgtcatccagcaatggcagttgccgttcagtttggactatagaattcaattatgagttcagtttgttgatattaaaggaaagatacaggtcagcctcttttacttaacaaggtaagagctctaaatttatgttagtatagtagaagtttttttgttgtaaatatcacttgcatatacgccagctagatgctcactatttgtcctctctcaaggtctcaatctgtctgatgtttattcaaccgattagctatcatcataaacctgaataacattttgctttgttcatgttcaggattcatacttaaatacttaacaaggtaagagctctaaatttatgttagtatagtagaagttttttttgttgttgtaaatatcacttgcatatacgccagctagatgctcactatttgtcctctctcaaggtctgaatctgtctgatgttttattcaactgattaactatcatcataaacctgaataacattttgctttgttcatgttcaggattcatacttaaatttatctgatgcaatttttcaactgaacgtgaacttggcaggggtgagtacggagtagtgtacaagcgagttctgcattgagctgtcgtagagagcgtagacagacactctagccaacgttgttggctgggattggaacacaaaagcgagacaagggatgagaagcacaggaggagccagtttggcggaggcctcaatccgggtctagaccaaggtcatggtggcgacgaaggtggaggccgaggtggagggtgatgcttccactctcagtcttggggtggggtcgtggggatgacatatgagagtggggtgcagtggtggctcgtcgacatcagccattggcacccttcccctgcccagttcgatgatgcaccctccctcctactacttcacgatggcaccaccatctccaggtaccgtgccgatggaggaaaggagaaacaaggtattttgaagattaagagtgatgccacatacttagcgatggggtgcttgatatcctagatattgtactagcttcagacctcgccgaattgacaccttcgaagaaatgaagtcgccagattggtaggctttgagtgtttcaccagaggaagtatgtagtgcagttaaggaaggaaatgaacttccatcagacttgatagacacactactaaagtggatcccaagcaatgatgaggagcttaggcttcgactgtcctcccatagcaccgccacaccgcatgcgtccgcggcggcgtccgcctcggcgccggtctcgcacaccgctccctagctggggaagttcatcgcctccgagcccttcaacgtggggggattcgattgggcgatctacttctaccccgatgggaagagcggcgaggatggcgttgtctacgtctcgctcttcatagccctggccagcgaaggcaccgatgtgcgcgcgctgttcgaggtcacgctcgtcgaccagagcggcaaggggcaagacaaggtgcatacccactttgggaggtctctcgagagcgacccatacaccctcaagtaccgcgacagcatgtgatgagtctatgtacaggttgtttcctacggtatgcttatctatggtggaaagaaaaagtgattgactcatacttgaaaagaaaagatggcctttgcccattgacgcctgagacaaccagaaatttgccatgacctcgttcctgaccaagaaaaactgtcaagcacagaatcacagttgatatattgggattccaaggtatcagaggctgatatggatgcaatgtggaaacatcctgatgtgtataaggagtggataaaatctggtgagagacgtggaaatgtacgattctcccatgatgcaaagaacatgccttacctttctcgcgtcgaggtgaaggatatgattgccttctcatgttgtgtatatgatggtggtgatgaggagaaggaaatggatgcagccagagaaataggttggagagggaaatttactaagagaggacgtgtaataagaccaggaattattagaatgagtggaaaatgtcctcttacacctttggaggttgggttaatgcttcgtggaatggatttcagcaataagactgcaatctttttggcatctggaaagatttacaaagcagagaagaacatggcttctcttcttgaaatgtttcctctcctacagacaaaagagacactggcatcagaagaggaacttgctccattcaagatggctgctgttgactatagtatttgtgcccaaagtgaagtttttgtgaccacacaaggtggaaatcccgcattttttatgggtcacaggagatacttgtatggtgggcattcaaaaacaattaaaccagacaaaagaaggcttgctgtactcttcaataatccacgtatagggtggacggcattgaagcggcacttgcttaatatgagagcatacagtgatgtcaaggggatcgaaatgaaaagaccaaacgaatctatatataccttcccgtgtcctgactgcatgtgccgcttgaacagaacagaacactcgaaatccaaacagagtagatagtatatttcgtatgtagaccaaatggctaaaaccatccaatattttcatagactgaaaatgcagagaaagcaacaaaggtgtatcaatacagtcgtacaagcttagtatcggatggtttttaatttgtatagcaaagcacgggcacatacctatatatcttttaatgtatgtaaatattcttaacctttaaaagatactaacaagcaggtataacgataattaatgtttctatatcttaatatattttatcattatatgttgattccgtagcaacgcacggtca

SEQ ID NO: 69364 - DNA, 3577 bp, Zea Mays
cgcaggcgctggaggcgtccacagggggcgacacccgtgaccctgcccccgttcgacatcagcgctcctccccccgaccaccgtcgatttggtgtctgagccctcgctagatctcgcaccctcaccgaagccctcattggattcgacgccctcactggaggttgcaccgcgatgggatctaggaaccgtagatggcctcgaccacccacgtgggttgttgcctctgcggatgagacgcagcgccaaggggccagaggaaacgacgtgatggacctcatatcacagctcatgtcatggttcatgcctctcatcgcctcccgccgtggttcgccgaggccgccccatgctgcacgccatgggcagcgatgtcgccttcacgaagctcggcatggagtgctaccccaaggaggccaccgctgttggggtcaagggattccccgacatggaaaaataaccgacgacgagatcaatgccgcctccgtcacttgctgccgcatctacctcaggtccgagtctgaacctggtatatcgcaagttcttcggcgggtactgcaactgctcataccatgattgcagagctgagaacaccttgaagctaggagatgtcatccagtaccatgaatgtggttaccgcattctctataagaagcgggcaccgatccatgtgtagtaccagcaaacttcccattttctatgactccaaggccttatgtcatccagcaatggcagttgccgttcagtttggactatagaattcaattatgagttcagtttgttgatattaaaggaaagatacaggtcagcctcttttacttaacaaggtaagagctctaaatttatgttagtatagtagaagtttttttgttgtaaatatcacttgcatatacgccagctagatgctcactatttgtcctctctcaaggtctcaatctgtctgatgtttattcaaccgattagctatcatcataaacctgaataacattttgctttgttcatgttcaggattcatacttaaatacttaacaaggtaagagctctaaatttatgttagtatagtagaagttttttttgttgttgtaaatatcacttgcatatacgccagctagatgctcactatttgtcctctctcaaggtctgaatctgtctgatgttttattcaactgattaactatcatcataaacctgaataacattttgctttgttcatgttcaggattcatacttaaatttatctgatgcaatttttcaactgaacgtgaacttggcaggggtgagtacggagtagtgtacaagcgagttctgcattgagctgtcgtagagagcgtagacagacactctagccaacgttgttggctgggattggaacacaaaagcgagacaagggatgagaagcacaggaggagccaggtgagtttggcggaggcctcaatccgggtctagaccaaggtcatggtggcgacgaaggtggaggccgaggtggagggtgatgcttccactctcagtcttggggtggggtcgtggggatgacatatgagagtggggtgcagtggtggctcgtcgacatcagccattggcacccttcccctgcccagttcgatgatgcaccctccctcctactacttcacgatggcaccaccatctccaggtaccgtgccgatggaggaaaggagaaacaaggtattttgaagattaagagtgatgccacatacttagcgatggggtgcttgatatcctagatattgtactagcttcagacctcgccgaattgacaccttcgaagaaatgaagtcgccagattggtaggctttgagtgtttcaccagaggaagtatgtagtgcagttaaggaaggaaatgaacttccatcagacttgatagacacactactaaagtggatcccaagcaatgatgaggagcttaggcttcgactgtcctcccatagcaccgccacaccgcatgcgtccgcggcggcgtccgcctcggcgccggtctcgcacaccgctccctagctggggaagttcatcgcctccgagcccttcaacgtggggggattcgattgggcgatctacttctaccccgatgggaagagcggcgaggatggcgttgtctacgtctcgctcttcatagccctggccagcgaaggcaccgatgtgcgcgcgctgttcgaggtcacgctcgtcgaccagagcggcaaggggcaagacaaggtgcatacccactttgggaggtctctcgagagcgacccatacaccctcaagtaccgcgacagcatgtgatgagtctatgtacaggttgtttcctacggtatgcttatctatggtggaaagaaaaagtgattgactcatacttgaaaagaaaagatggcctttgcccattgacgcctgagacaaccagaaatttgccatgacctcgttcctgaccaagaaaaactgtcaagcacagaatcacagttgatatattgggattccaaggtatcagaggctgatatggatgcaatgtggaaacatcctgatgtgtataaggagtggataaaatctggtgagagacgtggaaatgtacgattctcccatgatgcaaagaacatgccttacctttctcgcgtcgaggtgaaggatatgattgccttctcatgttgtgtatatgatggtggtgatgaggagaaggaaatggatgcagccagagaaataggttggagagggaaatttactaagagaggacgtgtaataagaccaggaattattagaatgagtggaaaatgtcctcttacacctttggaggttgggttaatgcttcgtggaatggatttcagcaataagactgcaatctttttggcatctggaaagatttacaaagcagagaagaacatggcttctcttcttgaaatgtttcctctcctacagacaaaagagacactggcatcagaagaggaacttgctccattcaagaatttctccttctagatggctgctgttgactatagtatttgtgcccaaagtgaagtttttgtgaccacacaaggtggaaatcccgcattttttatgggtcacaggagatacttgtatggtgggcattcaaaaacaattaaaccagacaaaagaaggcttgctgtactcttcaataatccacgtatagggtggacggcattgaagcggcacttgcttaatatgagagcatacagtgatgtcaaggggatcgaaatgaaaagaccaaacgaatctatatataccttcccgtgtcctgactgcatgtgccgcttgaacagaacagaacactcgaaatccaaacagagtagatagtatatttcgtatgtagaccaaatggctaaaaccatccaatattttcatagactgaaaatgcagagaaagcaacaaaggtgtatcaatacagtcgtacaagcttagtatcggatggtttttaatttgtatagcaaagcacgggcacatacctatatatcttttaatgtatgtaaatattcttaacctttaaaagatactaacaagcaggtataacgataattaatgtttctatatcttaatatattttatcattatatgttgattccgtagcaacgcacggtca

SEQ ID NO: 69365 - DNA, 3444 bp, Zea Mays
cgcaggcgctggaggcgtccacagggggcgacacccgtgaccctgcccccgttcgacatcagcgctcctccccccgaccaccgtcgatttggtgtctgagccctcgctagatctcgcaccctcaccgaagccctcattggattcgacgccctcactggaggttgcaccgcgatgggatctaggaaccgtagatggcctcgaccacccacgtgggttgttgcctctgcggatgagacgcagcgccaaggggccagaggaaacgacgtgatggacctcatatcacagctcatgtcatggttcatgcctctcatcgcctcccgccgtggttcgccgaggccgccccatgctgcacgccatgggcagcgatgtcgccttcacgaagctcggcatggagtgctaccccaaggaggccaccgctgttggggtcaagggattccccgacatggaaaaataaccgacgacgagatcaatgccgcctccgtcacttgctgccgcatctacctcaggtccgagtctgaacctggtatatcgcaagttcttcggcgggtactgcaactgctcataccatgattgcagagctgagaacaccttgaagctaggagatgtcatccagtaccatgaatgtggttaccgcattctctataagaagcgggcaccgatccatgtgtagtaccagcaaacttcccattttctatgactccaaggccttatgtcatccagcaatggcagttgccgttcagtttggactatagaattcaattatgagttcagtttgttgatattaaaggaaagatacaggtcagcctcttttacttaacaaggattcatacttaaatacttaacaaggattcatacttaaatttatctgatgcaatttttcaactgaacgtgaacttggcaggggtgagtacggagtagtgtacaagcgagttctgcattgagctgtcgtagagagcgtagacagacactctagccaacgttgttggctgggattggaacacaaaagcgagacaagggatgagaagcacaggaggagccaggtgaggtgaggtggcgacacacaggagtcgggcaagctcagctcatctcatctcatgctctactaaaaaggattagcccatctcaagagaaaagagtaacattgtcagcccactgcaataaccacactattaccagtcttgaaattcactttttgtttgtttgtcatagaaccagggattcatgacaggaaatgatctccttctcaagataagaaaattgcatttaagttactaatcagtgtatggtttactagtttggcggaggcctcaatccgggtctagaccaaggtcatggtggcgacgaaggtggaggccgaggtggagggtgatgcttccactctcagtcttggggtggggtcgtggggatgacatatgagagtggggtgcagtggtggctcgtcgacatcagccattggcacccttcccctgcccagttcgatgatgcaccctccctcctactacttcacgatggcaccaccatctccaggtaccgtgccgatggaggaaaggagaaacaaggtattttgaagattaagagtgatgccacatacttagcgatggggtgcttgatatcctagatattgtactagcttcagacctcgccgaattgacaccttcgaagaaatgaagtcgccagattggtaggctttgagtgtttcaccagaggaagtatgtagtgcagttaaggaaggaaatgaacttccatcagacttgatagacacactactaaagtggatcccaagcaatgatgaggagcttaggcttcgactgtcctcccatagcaccgccacaccgcatgcgtccgcggcggcgtccgcctcggcgccggtctcgcacaccgctccctagctggggaagttcatcgcctccgagcccttcaacgtggggggattcgattgggcgatctacttctaccccgatgggaagagcggcgaggatggcgttgtctacgtctcgctcttcatagccctggccagcgaaggcaccgatgtgcgcgcgctgttcgaggtcacgctcgtcgaccagagcggcaaggggcaagacaaggtgcatacccactttgggaggtctctcgagagcgacccatacaccctcaagtaccgcgacagcatgtgatgagtctatgtacaggttgtttcctacggtatgcttatctatggtggaaagaaaaagtgattgactcatacttgaaaagaaaagatggcctttgcccattgacgcctgagacaaccagaaatttgccatgacctcgttcctgaccaagaaaaactgtcaagcacagaatcacagttgatatattgggattccaaggtatcagaggctgatatggatgcaatgtggaaacatcctgatgtgtataaggagtggataaaatctggtgagagacgtggaaatgtacgattctcccatgatgcaaagaacatgccttacctttctcgcgtcgaggtgaaggatatgattgccttctcatgttgtgtatatgatggtggtgatgaggagaaggaaatggatgcagccagagaaataggttggagagggaaatttactaagagaggacgtgtaataagaccaggaattattagaatgagtggaaaatgtcctcttacacctttggaggttgggttaatgcttcgtggaatggatttcagcaataagactgcaatctttttggcatctggaaagatttacaaagcagagaagaacatggcttctcttcttgaaatgtttcctctcctacagacaaaagagacactggcatcagaagaggaacttgctccattcaagatggctgctgttgactatagtatttgtgcccaaagtgaagtttttgtgaccacacaaggtggaaatcccgcattttttatgggtcacaggagatacttgtatggtgggcattcaaaaacaattaaaccagacaaaagaaggcttgctgtactcttcaataatccacgtatagggtggacggcattgaagcggcacttgcttaatatgagagcatacagtgatgtcaaggggatcgaaatgaaaagaccaaacgaatctatatataccttcccgtgtcctgactgcatgtgccgcttgaacagaacagaacactcgaaatccaaacagagtagatagtatatttcgtatgtagaccaaatggctaaaaccatccaatattttcatagactgaaaatgcagagaaagcaacaaaggtgtatcaatacagtcgtacaagcttagtatcggatggtttttaatttgtatagcaaagcacgggcacatacctatatatcttttaatgtatgtaaatattcttaacctttaaaagatactaacaagcaggtataacgataattaatgtttctatatcttaatatattttatcattatatgttgattccgtagcaacgcacggtca

SEQ ID NO: 69366 - DNA, 3583 bp, Zea Mays
cgcaggcgctggaggcgtccacagggggcgacacccgtgaccctgcccccgttcgacatcagcgctcctccccccgaccaccgtcgatttggtgtctgagccctcgctagatctcgcaccctcaccgaagccctcattggattcgacgccctcactggaggttgcaccgcgatgggatctaggaaccgtagatggcctcgaccacccacgtgggttgttgcctctgcggatgagacgcagcgccaaggggccagaggaaacgacgtgatggacctcatatcacagctcatgtcatggttcatgcctctcatcgcctcccgccgtggttcgccgaggccgccccatgctgcacgccatgggcagcgatgtcgccttcacgaagctcggcatggagtgctaccccaaggaggccaccgctgttggggtcaagggattccccgacatggaaaaataaccgacgacgagatcaatgccgcctccgtcacttgctgccgcatctacctcaggtccgagtctgaacctgattgcagagctgagaacaccttgaagctaggagatgtcatccagtaccatgaatgtggttaccgcattctctataagaagcgggcaccgatccatgtgtagtaccagcaaacttcccattttctatgactccaaggccttatgtcatccagcaatggcagttgccgttcagtttggactatagaattcaattatgagttcagtttgttgatattaaaggaaagatacaggtcagcctcttttacttaacaaggtaagagctctaaatttatgttagtatagtagaagtttttttgttgtaaatatcacttgcatatacgccagctagatgctcactatttgtcctctctcaaggtctcaatctgtctgatgtttattcaaccgattagctatcatcataaacctgaataacattttgctttgttcatgttcaggattcatacttaaatacttaacaaggattcatacttaaatttatctgatgcaatttttcaactgaacgtgaacttggcaggggtgagtacggagtagtgtacaagcgagttctgcattgagctgtcgtagagagcgtagacagacactctagccaacgttgttggctgggattggaacacaaaagcgagacaagggatgagaagcacaggaggagccaggtgaggtgaggtggcgacacacaggagtcgggcaagctcagctcatctcatctcatgctctactaaaaaggattagcccatctcaagagaaaagagtaacattgtcagcccactgcaataaccacactattaccagtcttgaaattcactttttgtttgtttgtcatagaaccagggattcatgacaggaaatgatctccttctcaagataagaaaattgcatttaagttactaatcagtgtatggtttactagtttggcggaggcctcaatccgggtctagaccaaggtcatggtggcgacgaaggtggaggccgaggtggagggtgatgcttccactctcagtcttggggtggggtcgtggggatgacatatgagagtggggtgcagtggtggctcgtcgacatcagccattggcacccttcccctgcccagttcgatgatgcaccctccctcctactacttcacgatggcaccaccatctccaggtaccgtgccgatggaggaaaggagaaacaagattaagagtgatgccacatacttagcgatggggtgcttgatatcctagatattgtactagcttcagacctcgccgaattgacaccttcgaagaaatgaagtcgccagattggtaggctttgagtgtttcaccagaggaagtatgtagtgcagttaaggaaggaaatgaacttccatcagacttgatagacacactactaaagtggatcccaagcaatgatgaggagcttaggcttcgactgtcctcccatagcaccgccacaccgcatgcgtccgcggcggcgtccgcctcggcgccggtctcgcacaccgctccctagctggggaagttcatcgcctccgagcccttcaacgtggggggattcgattgggcgatctacttctaccccgatgggaagagcggcgaggatggcgttgtctacgtctcgctcttcatagccctggccagcgaaggcaccgatgtgcgcgcgctgttcgaggtcacgctcgtcgaccagagcggcaaggggcaagacaaggtgcatacccactttgggaggtctctcgagagcgacccatacaccctcaagtaccgcgacagcatgtgatgagtctatgtacaggttgtttcctacggtatgcttatctatggtggaaagaaaaagtgattgactcatacttgaaaagaaaagatggcctttgcccattgacgcctgagacaaccagaaatttgccatgacctcgttcctgaccaagaaaaactgtcaagcacagaatcacagttgatatattgggattccaaggtatcagaggctgatatggatgcaatgtggaaacatcctgatgtgtataaggagtggataaaatctggtgagagacgtggaaatgtacgattctcccatgatgcaaagaacatgccttacctttctcgcgtcgaggtgaaggatatgattgccttctcatgttgtgtatatgatggtggtgatgaggagaaggaaatggatgcagccagagaaataggttggagagggaaatttactaagagaggacgtgtaataagaccaggaattattagaatgagtggaaaatgtcctcttacacctttggaggttgggttaatgcttcgtggaatggatttcagcaataagactgcaatctttttggcatctggaaagatttacaaagcagagaagaacatggcttctcttcttgaaatgtttcctctcctacagacaaaagagacactggcatcagaagaggaacttgctccattcaagaatttctccttctagatggctgctgttgactatagtatttgtgcccaaagtgaagtttttgtgaccacacaaggtggaaatcccgcattttttatgggtcacaggagatacttgtatggtgggcattcaaaaacaattaaaccagacaaaagaaggcttgctgtactcttcaataatccacgtatagggtggacggcattgaagcggcacttgcttaatatgagagcatacagtgatgtcaaggggatcgaaatgaaaagaccaaacgaatctatatataccttcccgtgtcctgactgcatgtgccgcttgaacagaacagaacactcgaaatccaaacagagtagatagtatatttcgtatgtagaccaaatggctaaaaccatccaatattttcatagactgaaaatgcagagaaagcaacaaaggtgtatcaatacagtcgtacaagcttagtatcggatggtttttaatttgtatagcaaagcacgggcacatacctatatatcttttaatgtatgtaaatattcttaacctttaaaagatactaacaagcaggtataacgataattaatgtttctatatcttaatatattttatcattatatgttgattccgtagcaacgcacggtca

SEQ ID NO: 69367 - DNA, 3748 bp, Zea Mays
cgcaggcgctggaggcgtccacagggggcgacacccgtgaccctgcccccgttcgacatcagcgctcctccccccgaccaccgtcgatttggtgtctgagccctcgctagatctcgcaccctcaccgaagccctcattggattcgacgccctcactggaggttgcaccgcgatgggatctaggaaccgtagatggcctcgaccacccacgtgggttgttgcctctgcggatgagacgcagcgccaaggggccagaggaaacgacgtgatggacctcatatcacagctcatgtcatggttcatgcctctcatcgcctcccgccgtggttcgccgaggccgccccatgctgcacgccatgggcagcgatgtcgccttcacgaagctcggcatggagtgctaccccaaggaggccaccgctgttggggtcaagggattccccgacatggaaaaataaccgacgacgagatcaatgccgcctccgtcacttgctgccgcatctacctcagattgcagagctgagaacaccttgaagctaggagatgtcatccagtaccatgaatgtggttaccgcattctctataagaagcgggcaccgatccatgtgtagtaccagcaaacttcccattttctatgactccaaggccttatgtcatccagcaatggcagttgccgttcagtttggactatagaattcaattatgagttcagtttgttgatattaaaggaaagatacaggtcagcctcttttacttaacaaggtaagagctctaaatttatgttagtatagtagaagtttttttgttgtaaatatcacttgcatatacgccagctagatgctcactatttgtcctctctcaaggtctcaatctgtctgatgtttattcaaccgattagctatcatcataaacctgaataacattttgctttgttcatgttcaggattcatacttaaatacttaacaaggtaagagctctaaatttatgttagtatagtagaagttttttttgttgttgtaaatatcacttgcatatacgccagctagatgctcactatttgtcctctctcaaggtctgaatctgtctgatgttttattcaactgattaactatcatcataaacctgaataacattttgctttgttcatgttcaggattcatacttaaatttatctgatgcaatttttcaactgaacgtgaacttggcaggggtgagtacggagtagtgtacaagcgagttctgcattgagctgtcgtagagagcgtagacagacactctagccaacgttgttggctgggattggaacacaaaagcgagacaagggatgagaagcacaggaggagccaggtgaggtgaggtggcgacacacaggagtcgggcaagctcagctcatctcatctcatgctctactaaaaaggattagcccatctcaagagaaaagagtaacattgtcagcccactgcaataaccacactattaccagtcttgaaattcactttttgtttgtttgtcatagaaccagggattcatgacaggaaatgatctccttctcaagataagaaaattgcatttaagttactaatcagtgtatggtttactagtttggcggaggcctcaatccgggtctagaccaaggtcatggtggcgacgaaggtggaggccgaggtggagggtgatgcttccactctcagtcttggggtggggtcgtggggatgacatatgagagtggggtgcagtggtggctcgtcgacatcagccattggcacccttcccctgcccagttcgatgatgcaccctccctcctactacttcacgatggcaccaccatctccaggtaccgtgccgatggaggaaaggagaaacaaggtattttgaagattaagagtgatgccacatacttagcgatggggtgcttgatatcctagatattgtactagcttcagacctcgccgaattgacaccttcgaagaaatgaagtcgccagattggtaggctttgagtgtttcaccagaggaagtatgtagtgcagttaaggaaggaaatgaacttccatcagacttgatagacacactactaaagtggatcccaagcaatgatgaggagcttaggcttcgactgtcctcccatagcaccgccacaccgcatgcgtccgcggcggcgtccgcctcggcgccggtctcgcacaccgctccctagctggggaagttcatcgcctccgagcccttcaacgtggggggattcgattgggcgatctacttctaccccgatgggaagagcggcgaggatggcgttgtctacgtctcgctcttcatagccctggccagcgaaggcaccgatgtgcgcgcgctgttcgaggtcacgctcgtcgaccagagcggcaaggggcaagacaaggtgcatacccactttgggaggtctctcgagagcgacccatacaccctcaagtaccgcgacagcatgtgatgagtctatgtacaggttgtttcctacggtatgcttatctatggtggaaagaaaaagtgattgactcatacttgaaaagaaaagatggcctttgcccattgacgcctgagacaaccagaaatttgccatgacctcgttcctgaccaagaaaaactgtcaagcacagaatcacagttgatatattgggattccaaggtatcagaggctgatatggatgcaatgtggaaacatcctgatgtgtataaggagtggataaaatctggtgagagacgtggaaatgtacgattctcccatgatgcaaagaacatgccttacctttctcgcgtcgaggtgaaggatatgattgccttctcatgttgtgtatatgatggtggtgatgaggagaaggaaatggatgcagccagagaaataggttggagagggaaatttactaagagaggacgtgtaataagaccaggaattattagaatgagtggaaaatgtcctcttacacctttggaggttgggttaatgcttcgtggaatggatttcagcaataagactgcaatctttttggcatctggaaagatttacaaagcagagaagaacatggcttctcttcttgaaatgtttcctctcctacagacaaaagagacactggcatcagaagaggaacttgctccattcaagatggctgctgttgactatagtatttgtgcccaaagtgaagtttttgtgaccacacaaggtggaaatcccgcattttttatgggtcacaggagatacttgtatggtgggcattcaaaaacaattaaaccagacaaaagaaggcttgctgtactcttcaataatccacgtatagggtggacggcattgaagcggcacttgcttaatatgagagcatacagtgatgtcaaggggatcgaaatgaaaagaccaaacgaatctatatataccttcccgtgtcctgactgcatgtgccgcttgaacagaacagaacactcgaaatccaaacagagtagatagtatatttcgtatgtagaccaaatggctaaaaccatccaatattttcatagactgaaaatgcagagaaagcaacaaaggtgtatcaatacagtcgtacaagcttagtatcggatggtttttaatttgtatagcaaagcacgggcacatacctatatatcttttaatgtatgtaaatattcttaacctttaaaagatactaacaagcaggtataacgataattaatgtttctatatcttaatatattttatcattatatgttgattccgtagcaacgcacggtca

SEQ ID NO: 69368 - DNA, 3382 bp, Zea Mays
cgcaggcgctggaggcgtccacagggggcgacacccgtgaccctgcccccgttcgacatcagcgctcctccccccgaccaccgtcgatttggtgtctgagccctcgctagatctcgcaccctcaccgaagccctcattggattcgacgccctcactggaggttgcaccgcgatgggatctaggaaccgtagatggcctcgaccacccacgtgggttgttgcctctgcggatgagacgcagcgccaaggggccagaggaaacgacgtgatggacctcatatcacagctcatgtcatggttcatgcctctcatcgcctcccgccgtggttcgccgaggccgccccatgctgcacgccatgggcagcgatgtcgccttcacgaagctcggcatggagtgctaccccaaggaggccaccgctgttggggtcaagggattccccgacatggaaaaataaccgacgacgagatcaatgccgcctccgtcacttgctgccgcatctacctcaggtccgagtctgaacctgattgcagagctgagaacaccttgaagctaggagatgtcatccagtaccatgaatgtggttaccgcattctctataagaagcgggcaccgatccatgtgtagtaccagcaaacttcccattttctatgactccaagcaatggcagttgccgttcagtttggactatagaattcaattatgagttcagtttgttgatattaaaggaaagatacaggtcagcctcttttacttaacaaggattcatacttaaatacttaacaaggattcatacttaaatttatctgatgcaatttttcaactgaacgtgaacttggcaggggtgagtacggagtagtgtacaagcgagttctgcattgagctgtcgtagagagcgtagacagacactctagccaacgttgttggctgggattggaacacaaaagcgagacaagggatgagaagcacaggaggagccaggtgaggtgaggtggcgacacacaggagtcgggcaagctcagctcatctcatctcatgctctactaaaaaggattagcccatctcaagagaaaagagtaacattgtcagcccactgcaataaccacactattaccagtcttgaaattcactttttgtttgtttgtcatagaaccagggattcatgacaggaaatgatctccttctcaagataagaaaattgcatttaagttactaatcagtgtatggtttactagtttggcggaggcctcaatccgggtctagaccaaggtcatggtggcgacgaaggtggaggccgaggtggagggtgatgcttccactctcagtcttggggtggggtcgtggggatgacatatgagagtggggtgcagtggtggctcgtcgacatcagccattggcacccttcccctgcccagttcgatgatgcaccctccctcctactacttcacgatggcaccaccatctccaggtaccgtgccgatggaggaaaggagaaacaaggtattttgaagattaagagtgatgccacatacttagcgatggggtgcttgatatcctagatattgtactagcttcagacctcgccgaattgacaccttcgaagaaatgaagtcgccagattggtaggctttgagtgtttcaccagaggaagtatgtagtgcagttaaggaaggaaatgaacttccatcagacttgatagacacactactaaagtggatcccaagcaatgatgaggagcttaggcttcgactgtcctcccatagcaccgccacaccgcatgcgtccgcggcggcgtccgcctcggcgccggtctcgcacaccgctccctagctggggaagttcatcgcctccgagcccttcaacgtggggggattcgattgggcgatctacttctaccccgatgggaagagcggcgaggatggcgttgtctacgtctcgctcttcatagccctggccagcgaaggcaccgatgtgcgcgcgctgttcgaggtcacgctcgtcgaccagagcggcaaggggcaagacaaggtgcatacccactttgggaggtctctcgagagcgacccatacaccctcaagtaccgcgacagcatgtgatgagtctatgtacaggttgtttcctacggtatgcttatctatggtggaaagaaaaagtgattgactcatacttgaaaagaaaagatggcctttgcccattgacgcctgagacaaccagaaatttgccatgacctcgttcctgaccaagaaaaactgtcaagcacagaatcacagttgatatattgggattccaaggtatcagaggctgatatggatgcaatgtggaaacatcctgatgtgtataaggagtggataaaatctggtgagagacgtggaaatgtacgattctcccatgatgcaaagaacatgccttacctttctcgcgtcgaggtgaaggatatgattgccttctcatgttgtgtatatgatggtggtgatgaggagaaggaaatggatgcagccagagaaataggttggagagggaaatttactaagagaggacgtgtaataagaccaggaattattagaatgagtggaaaatgtcctcttacacctttggaggttgggttaatgcttcgtggaatggatttcagcaataagactgcaatctttttggcatctggaaagatttacaaagcagagaagaacatggcttctcttcttgaaatgtttcctctcctacagacaaaagagacactggcatcagaagaggaacttgctccattcaagatggctgctgttgactatagtatttgtgcccaaagtgaagtttttgtgaccacacaaggtggaaatcccgcattttttatgggtcacaggagatacttgtatggtgggcattcaaaaacaattaaaccagacaaaagaaggcttgctgtactcttcaataatccacgtatagggtggacggcattgaagcggcacttgcttaatatgagagcatacagtgatgtcaaggggatcgaaatgaaaagaccaaacgaatctatatataccttcccgtgtcctgactgcatgtgccgcttgaacagaacagaacactcgaaatccaaacagagtagatagtatatttcgtatgtagaccaaatggctaaaaccatccaatattttcatagactgaaaatgcagagaaagcaacaaaggtgtatcaatacagtcgtacaagcttagtatcggatggtttttaatttgtatagcaaagcacgggcacatacctatatatcttttaatgtatgtaaatattcttaacctttaaaagatactaacaagcaggtataacgataattaatgtttctatatcttaatatattttatcattatatgttgattccgtagcaacgcacggtca

SEQ ID NO: 69369 - DNA, 3645 bp, Zea Mays
cgcaggcgctggaggcgtccacagggggcgacacccgtgaccctgcccccgttcgacatcagcgctcctccccccgaccaccgtcgatttggtgtctgagccctcgctagatctcgcaccctcaccgaagccctcattggattcgacgccctcactggaggttgcaccgcgatgggatctaggaaccgtagatggcctcgaccacccacgtgggttgttgcctctgcggatgagacgcagcgccaaggggccagaggaaacgacgtgatggacctcatatcacagctcatgtcatggttcatgcctctcatcgcctcccgccgtggttcgccgaggccgccccatgctgcacgccatgggcagcgatgtcgccttcacgaagctcggcatggagtgctaccccaaggaggccaccgctgttggggtcaagggattccccgacatggaaaaataaccgacgacgagatcaatgccgcctccgtcacttgctgccgcatctacctcaggtccgagtctgaacctggtatatcgcaagttcttcggcgggtactgcaactgctcataccatgattgcagagctgagaacaccttgaagctaggagatgtcatccagtaccatgaatgtggttaccgcattctctataagaagcgggcaccgatccatgtgtagtaccagcaaacttcccattttctatgactccaaggccttatgtcatccagcaatggcagttgccgttcagtttggactatagaattcaattatgagttcagtttgttgatattaaaggaaagatacaggtcagcctcttttacttaacaaggattcatacttaaatacttaacaaggtaagagctctaaatttatgttagtatagtagaagttttttttgttgttgtaaatatcacttgcatatacgccagctagatgctcactatttgtcctctctcaaggtctgaatctgtctgatgttttattcaactgattaactatcatcataaacctgaataacattttgctttgttcatgttcaggattcatacttaaatttatctgatgcaatttttcaactgaacgtgaacttggcaggggtgagtacggagtagtgtacaagcgagttctgcattgagctgtcgtagagagcgtagacagacactctagccaacgttgttggctgggattggaacacaaaagcgagacaagggatgagaagcacaggaggagccaggtgaggtgaggtggcgacacacaggagtcgggcaagctcagctcatctcatctcatgctctactaaaaaggattagcccatctcaagagaaaagagtaacattgtcagcccactgcaataaccacactattaccagtcttgaaattcactttttgtttgtttgtcatagaaccagggattcatgacaggaaatgatctccttctcaagataagaaaattgcatttaagttactaatcagtgtatggtttactagtttggcggaggcctcaatccgggtctagaccaaggtcatggtggcgacgaaggtggaggccgaggtggagggtgatgcttccactctcagtcttggggtggggtcgtggggatgacatatgagagtggggtgcagtggtggctcgtcgacatcagccattggcacccttcccctgcccagttcgatgatgcaccctccctcctactacttcacgatggcaccaccatctccaggtaccgtgccgatggaggaaaggagaaacaaggtattttgaagattaagagtgatgccacatacttagcgatggggtgcttgatatcctagatattgtactagcttcagacctcgccgaattgacaccttcgaagaaatgaagtcgccagattggtaggctttgagtgtttcaccagaggaagtatgtagtgcagttaaggaaggaaatgaacttccatcagacttgatagacacactactaaagtggatcccaagcaatgatgaggagcttaggcttcgactgtcctcccatagcaccgccacaccgcatgcgtccgcggcggcgtccgcctcggcgccggtctcgcacaccgctccctagctggggaagttcatcgcctccgagcccttcaacgtggggggattcgattgggcgatctacttctaccccgatgggaagagcggcgaggatggcgttgtctacgtctcgctcttcatagccctggccagcgaaggcaccgatgtgcgcgcgctgttcgaggtcacgctcgtcgaccagagcggcaaggggcaagacaaggtgcatacccactttgggaggtctctcgagagcgacccatacaccctcaagtaccgcgacagcatgtgatgagtctatgtacaggttgtttcctacggtatgcttatctatggtggaaagaaaaagtgattgactcatacttgaaaagaaaagatggcctttgcccattgacgcctgagacaaccagaaatttgccatgacctcgttcctgaccaagaaaaactgtcaagcacagaatcacagttgatatattgggattccaaggtatcagaggctgatatggatgcaatgtggaaacatcctgatgtgtataaggagtggataaaatctggtgagagacgtggaaatgtacgattctcccatgatgcaaagaacatgccttacctttctcgcgtcgaggtgaaggatatgattgccttctcatgttgtgtatatgatggtggtgatgaggagaaggaaatggatgcagccagagaaataggttggagagggaaatttactaagagaggacgtgtaataagaccaggaattattagaatgagtggaaaatgtcctcttacacctttggaggttgggttaatgcttcgtggaatggatttcagcaataagactgcaatctttttggcatctggaaagatttacaaagcagagaagaacatggcttctcttcttgaaatgtttcctctcctacagacaaaagagacactggcatcagaagaggaacttgctccattcaagaatttctccttctagatggctgctgttgactatagtatttgtgcccaaagtgaagtttttgtgaccacacaaggtggaaatcccgcattttttatgggtcacaggagatacttgtatggtgggcattcaaaaacaattaaaccagacaaaagaaggcttgctgtactcttcaataatccacgtatagggtggacggcattgaagcggcacttgcttaatatgagagcatacagtgatgtcaaggggatcgaaatgaaaagaccaaacgaatctatatataccttcccgtgtcctgactgcatgtgccgcttgaacagaacagaacactcgaaatccaaacagagtagatagtatatttcgtatgtagaccaaatggctaaaaccatccaatattttcatagactgaaaatgcagagaaagcaacaaaggtgtatcaatacagtcgtacaagcttagtatcggatggtttttaatttgtatagcaaagcacgggcacatacctatatatcttttaatgtatgtaaatattcttaacctttaaaagatactaacaagcaggtataacgataattaatgtttctatatcttaatatattttatcattatatgttgattccgtagcaacgcacggtca

SEQ ID NO: 69370 - DNA, 3247 bp, Zea Mays
cgcaggcgctggaggcgtccacagggggcgacacccgtgaccctgcccccgttcgacatcagcgctcctccccccgaccaccgtcgatttggtgtctgagccctcgctagatctcgcaccctcaccgaagccctcattggattcgacgccctcactggaggttgcaccgcgatgggatctaggaaccgtagatggcctcgaccacccacgtgggttgttgcctctgcggatgagacgcagcgccaaggggccagaggaaacgacgtgatggacctcatatcacagctcatgtcatggttcatgcctctcatcgcctcccgccgtggttcgccgaggccgccccatgctgcacgccatgggcagcgatgtcgccttcacgaagctcggcatggagtgctaccccaaggaggccaccgctgttggggtcaagggattccccgacatggaaaaataaccgacgacgagatcaatgccgcctccgtcacttgctgccgcatctacctcaggtccgagtctgaacctgattgcagagctgagaacaccttgaagctaggagatgtcatccagtaccatgaatgtggttaccgcattctctataagaagcgggcaccgatccatgtgtagtaccagcaaacttcccattttctatgactccaaggccttatgtcatccagcaatggcagttgccgttcagtttggactatagaattcaattatgagttcagtttgttgatattaaaggaaagatacaggtcagcctcttttacttaacaaggattcatacttaaatacttaacaaggattcatacttaaatttatctgatgcaatttttcaactgaacgtgaacttggcaggggtgagtacggagtagtgtacaagcgagttctgcattgagctgtcgtagagagcgtagacagacactctagccaacgttgttggctgggattggaacacaaaagcgagacaagggatgagaagcacaggaggagccaggtgaggtgaggtggcgacacacaggagtcgggcaagctcagctcatctcatctcatgctctactaaaaaggattagcccatctcaagagaaaagagtaacatttttggcggaggcctcaatccgggtctagaccaaggtcatggtggcgacgaaggtggaggccgaggtggagggtgatgcttccactctcagtcttggggtggggtcgtggggatgacatatgagagtggggtgcagtggtggctcgtcgacatcagccattggcacccttcccctgcccagttcgatgatgcaccctccctcctactacttcacgatggcaccaccatctccaggtaccgtgccgatggaggaaaggagaaacaaggtattttgaagattaagagtgatgccacatacttagcgatggggtgcttgatatcctagatattgtactagcttcagacctcgccgaattgacaccttcgaagaaatgaagtcgccagattggtaggctttgagtgtttcaccagaggaagtatgtagtgcagttaaggaaggaaatgaacttccatcagacttgatagacacactactaaagtggatcccaagcaatgatgaggagcttaggcttcgactgtcctcccatagcaccgccacaccgcatgcgtccgcggcggcgtccgcctcggcgccggtctcgcacaccgctccctagctggggaagttcatcgcctccgagcccttcaacgtggggggattcgattgggcgatctacttctaccccgatgggaagagcggcgaggatggcgttgtctacgtctcgctcttcatagccctggccagcgaaggcaccgatgtgcgcgcgctgttcgaggtcacgctcgtcgaccagagcggcaaggggcaagacaaggtgcatacccactttgggaggtctctcgagagcgacccatacaccctcaagtaccgcgacagcatgtgatgagtctatgtacaggttgtttcctacggtatgcttatctatggtggaaagaaaaagtgattgactcatacttgaaaagaaaagatggcctttgcccattgacgcctgagacaaccagaaatttgccatgacctcgttcctgaccaagaaaaactgtcaagcacagaatcacagttgatatattgggattccaaggtatcagaggctgatatggatgcaatgtggaaacatcctgatgtgtataaggagtggataaaatctggtgagagacgtggaaatgtacgattctcccatgatgcaaagaacatgccttacctttctcgcgtcgaggtgaaggatatgattgccttctcatgttgtgtatatgatggtggtgatgaggagaaggaaatggatgcagccagagaaataggttggagagggaaatttactaagagaggacgtgtaataagaccaggaattattagaatgagtggaaaatgtcctcttacacctttggaggttgggttaatgcttcgtggaatggatttcagcaataagactgcaatctttttggcatctggaaagatttacaaagcagagaagaacatggcttctcttcttgaaatgtttcctctcctacagacaaaagagacactggcatcagaagaggaacttgctccattcaagatggctgctgttgactatagtatttgtgcccaaagtgaagtttttgtgaccacacaaggtggaaatcccgcattttttatgggtcacaggagatacttgtatggtgggcattcaaaaacaattaaaccagacaaaagaaggcttgctgtactcttcaataatccacgtatagggtggacggcattgaagcggcacttgcttaatatgagagcatacagtgatgtcaaggggatcgaaatgaaaagaccaaacgaatctatatataccttcccgtgtcctgactgcatgtgccgcttgaacagaacagaacactcgaaatccaaacagagtagatagtatatttcgtatgtagaccaaatggctaaaaccatccaatattttcatagactgaaaatgcagagaaagcaacaaaggtgtatcaatacagtcgtacaagcttagtatcggatggtttttaatttgtatagcaaagcacgggcacatacctatatatcttttaatgtatgtaaatattcttaacctttaaaagatactaacaagcaggtataacgataattaatgtttctatatcttaatatattttatcattatatgttgattccgtagcaacgcacggtca

SEQ ID NO: 69371 - DNA, 3526 bp, Zea Mays
ggcgcaggcgctggaggcgtccacagggggcgacacccgtgaccctgcccccgttcgacatcagcgctcctccccccgaccaccgtcgatttggtgtctgagccctcgctagatctcgcaccctcaccgaagccctcattggattcgacgccctcactggaggttgcaccgcgatgggatctaggaaccgtagatggcctcgaccacccacgtgggttgttgcctctgcggatgagacgcagcgccaaggggccagaggaaacgacgtgatggacctcatatcacagctcatgtcatggttcatgcctctcatcgcctcccgccgtggttcgccgaggccgccccatgctgcacgccatgggcagcgatgtcgccttcacgaagctcggcatggagtgctaccccaaggaggccaccgctgttggggtcaagggattccccgacatggaaaaataaccgacgacgagatcaatgccgcctccgtcacttgctgccgcatctacctcaggtatatcgcaagttcttcggcgggtactgcaactgctcataccatgattgcagagctgagaacaccttgaagctaggagatgtcatccagtaccatgaatgtggttaccgcattctctataagaagcgggcaccgatccatgtgtagtaccagcaaacttcccattttctatgactccaagcaatggcagttgccgttcagtttggactatagaattcaattatgagttcagtttgttgatattaaaggaaagatacaggtcagcctcttttacttaacaaggtaagagctctaaatttatgttagtatagtagaagtttttttgttgtaaatatcacttgcatatacgccagctagatgctcactatttgtcctctctcaaggtctcaatctgtctgatgtttattcaaccgattagctatcatcataaacctgaataacattttgctttgttcatgttcaggattcatacttaaatacttaacaaggtaagagctctaaatttatgttagtatagtagaagttttttttgttgttgtaaatatcacttgcatatacgccagctagatgctcactatttgtcctctctcaaggtctgaatctgtctgatgttttattcaactgattaactatcatcataaacctgaataacattttgctttgttcatgttcaggattcatacttaaatttatctgatgcaatttttcaactgaacgtgaacttggcaggggtgagtacggagtagtgtacaagcgagttctgcattgagctgtcgtagagagcgtagacagacactctagccaacgttgttggctgggattggaacacaaaagcgagacaagggatgagaagcacaggaggagccagtttggcggaggcctcaatccgggtctagaccaaggtcatggtggcgacgaaggtggaggccgaggtggagggtgatgcttccactctcagtcttggggtggggtcgtggggatgacatatgagagtggggtgcagtggtggctcgtcgacatcagccattggcacccttcccctgcccagttcgatgatgcaccctccctcctactacttcacgatggcaccaccatctccaggtaccgtgccgatggaggaaaggagaaacaaggtattttgaagattaagagtgatgccacatacttagcgatggggtgcttgatatcctagatattgtactagcttcagacctcgccgaattgacaccttcgaagaaatgaagtcgccagattggtaggctttgagtgtttcaccagaggaagtatgtagtgcagttaaggaaggaaatgaacttccatcagacttgatagacacactactaaagtggatcccaagcaatgatgaggagcttaggcttcgactgtcctcccatagcaccgccacaccgcatgcgtccgcggcggcgtccgcctcggcgccggtctcgcacaccgctccctagctggggaagttcatcgcctccgagcccttcaacgtggggggattcgattgggcgatctacttctaccccgatgggaagagcggcgaggatggcgttgtctacgtctcgctcttcatagccctggccagcgaaggcaccgatgtgcgcgcgctgttcgaggtcacgctcgtcgaccagagcggcaaggggcaagacaaggtgcatacccactttgggaggtctctcgagagcgacccatacaccctcaagtaccgcgacagcatgtgatgagtctatgtacaggttgtttcctacggtatgcttatctatggtggaaagaaaaagtgattgactcatacttgaaaagaaaagatggcctttgcccattgacgcctgagacaaccagaaatttgccatgacctcgttcctgaccaagaaaaactgtcaagcacagaatcacagttgatatattgggattccaaggtatcagaggctgatatggatgcaatgtggaaacatcctgatgtgtataaggagtggataaaatctggtgagagacgtggaaatgtacgattctcccatgatgcaaagaacatgccttacctttctcgcgtcgaggtgaaggatatgattgccttctcatgttgtgtatatgatggtggtgatgaggagaaggaaatggatgcagccagagaaataggttggagagggaaatttactaagagaggacgtgtaataagaccaggaattattagaatgagtggaaaatgtcctcttacacctttggaggttgggttaatgcttcgtggaatggatttcagcaataagactgcaatctttttggcatctggaaagatttacaaagcagagaagaacatggcttctcttcttgaaatgtttcctctcctacagacaaaagagacactggcatcagaagaggaacttgctccattcaagatggctgctgttgactatagtatttgtgcccaaagtgaagtttttgtgaccacacaaggtggaaatcccgcattttttatgggtcacaggagatacttgtatggtgggcattcaaaaacaattaaaccagacaaaagaaggcttgctgtactcttcaataatccacgtatagggtggacggcattgaagcggcacttgcttaatatgagagcatacagtgatgtcaaggggatcgaaatgaaaagaccaaacgaatctatatataccttcccgtgtcctgactgcatgtgccgcttgaacagaacagaacactcgaaatccaaacagagtagatagtatatttcgtatgtagaccaaatggctaaaaccatccaatattttcatagactgaaaatgcagagaaagcaacaaaggtgtatcaatacagtcgtacaagcttagtatcggatggtttttaatttgtatagcaaagcacgggcacatacctatatatcttttaatgtatgtaaatattcttaacctttaaaagatactaacaagcaggtataacgataattaatgtttctatatcttaatatattttatcattatatgttgattccgtagcaacgcacggtca

SEQ ID NO: 69372 - DNA, 3811 bp, Zea Mays
ggcgcaggcgctggaggcgtccacagggggcgacacccgtgaccctgcccccgttcgacatcagcgctcctccccccgaccaccgtcgatttggtgtctgagccctcgctagatctcgcaccctcaccgaagccctcattggattcgacgccctcactggaggttgcaccgcgatgggatctaggaaccgtagatggcctcgaccacccacgtgggttgttgcctctgcggatgagacgcagcgccaaggggccagaggaaacgacgtgatggacctcatatcacagctcatgtcatggttcatgcctctcatcgcctcccgccgtggttcgccgaggccgccccatgctgcacgccatgggcagcgatgtcgccttcacgaagctcggcatggagtgctaccccaaggaggccaccgctgttggggtcaagggattccccgacatggaaaaataaccgacgacgagatcaatgccgcctccgtcacttgctgccgcatctacctcaggtatatcgcaagttcttcggcgggtactgcaactgctcataccatgattgcagagctgagaacaccttgaagctaggagatgtcatccagtaccatgaatgtggttaccgcattctctataagaagcgggcaccgatccatgtgtagtaccagcaaacttcccattttctatgactccaaggccttatgtcatccagcaatggcagttgccgttcagtttggactatagaattcaattatgagttcagtttgttgatattaaaggaaagatacaggtcagcctcttttacttaacaaggtaagagctctaaatttatgttagtatagtagaagtttttttgttgtaaatatcacttgcatatacgccagctagatgctcactatttgtcctctctcaaggtctcaatctgtctgatgtttattcaaccgattagctatcatcataaacctgaataacattttgctttgttcatgttcaggattcatacttaaatacttaacaaggtaagagctctaaatttatgttagtatagtagaagttttttttgttgttgtaaatatcacttgcatatacgccagctagatgctcactatttgtcctctctcaaggtctgaatctgtctgatgttttattcaactgattaactatcatcataaacctgaataacattttgctttgttcatgttcaggattcatacttaaatttatctgatgcaatttttcaactgaacgtgaacttggcaggggtgagtacggagtagtgtacaagcgagttctgcattgagctgtcgtagagagcgtagacagacactctagccaacgttgttggctgggattggaacacaaaagcgagacaagggatgagaagcacaggaggagccaggtgaggtgaggtggcgacacacaggagtcgggcaagctcagctcatctcatctcatgctctactaaaaaggattagcccatctcaagagaaaagagtaacattgtcagcccactgcaataaccacactattaccagtcttgaaattcactttttgtttgtttgtcatagaaccagggattcatgacaggaaatgatctccttctcaagataagaaaattgcatttaagttactaatcagtgtatggtttactagtttggcggaggcctcaatccgggtctagaccaaggtcatggtggcgacgaaggtggaggccgaggtggagggtgatgcttccactctcagtcttggggtggggtcgtggggatgacatatgagagtggggtgcagtggtggctcgtcgacatcagccattggcacccttcccctgcccagttcgatgatgcaccctccctcctactacttcacgatggcaccaccatctccaggtaccgtgccgatggaggaaaggagaaacaaggtattttgaagattaagagtgatgccacatacttagcgatggggtgcttgatatcctagatattgtactagcttcagacctcgccgaattgacaccttcgaagaaatgaagtcgccagattggtaggctttgagtgtttcaccagaggaagtatgtagtgcagttaaggaaggaaatgaacttccatcagacttgatagacacactactaaagtggatcccaagcaatgatgaggagcttaggcttcgactgtcctcccatagcaccgccacaccgcatgcgtccgcggcggcgtccgcctcggcgccggtctcgcacaccgctccctagctggggaagttcatcgcctccgagcccttcaacgtggggggattcgattgggcgatctacttctaccccgatgggaagagcggcgaggatggcgttgtctacgtctcgctcttcatagccctggccagcgaaggcaccgatgtgcgcgcgctgttcgaggtcacgctcgtcgaccagagcggcaaggggcaagacaaggtgcatacccactttgggaggtctctcgagagcgacccatacaccctcaagtaccgcgacagcatgtgatgagtctatgtacaggttgtttcctacggtatgcttatctatggtggaaagaaaaagtgattgactcatacttgaaaagaaaagatggcctttgcccattgacgcctgagacaaccagaaatttgccatgacctcgttcctgaccaagaaaaactgtcaagcacagaatcacagttgatatattgggattccaaggtatcagaggctgatatggatgcaatgtggaaacatcctgatgtgtataaggagtggataaaatctggtgagagacgtggaaatgtacgattctcccatgatgcaaagaacatgccttacctttctcgcgtcgaggtgaaggatatgattgccttctcatgttgtgtatatgatggtggtgatgaggagaaggaaatggatgcagccagagaaataggttggagagggaaatttactaagagaggacgtgtaataagaccaggaattattagaatgagtggaaaatgtcctcttacacctttggaggttgggttaatgcttcgtggaatggatttcagcaataagactgcaatctttttggcatctggaaagatttacaaagcagagaagaacatggcttctcttcttgaaatgtttcctctcctacagacaaaagagacactggcatcagaagaggaacttgctccattcaagaatttctccttctagatggctgctgttgactatagtatttgtgcccaaagtgaagtttttgtgaccacacaaggtggaaatcccgcattttttatgggtcacaggagatacttgtatggtgggcattcaaaaacaattaaaccagacaaaagaaggcttgctgtactcttcaataatccacgtatagggtggacggcattgaagcggcacttgcttaatatgagagcatacagtgatgtcaaggggatcgaaatgaaaagaccaaacgaatctatatataccttcccgtgtcctgactgcatgtgccgcttgaacagaacagaacactcgaaatccaaacagagtagatagtatatttcgtatgtagaccaaatggctaaaaccatccaatattttcatagactgaaaatgcagagaaagcaacaaaggtgtatcaatacagtcgtacaagcttagtatcggatggtttttaatttgtatagcaaagcacgggcacatacctatatatcttttaatgtatgtaaatattcttaacctttaaaagatactaacaagcaggtataacgataattaatgtttctatatcttaatatattttatcattatatgttgattccgtagcaacgcacggtca

SEQ ID NO: 69373 - DNA, 3347 bp, Zea Mays
gtggcgcaggcgctggaggcgtccacagggggcgacacccgtgaccctgcccccgttcgacatcagcgctcctccccccgaccaccgtcgatttggtgtctgagccctcgctagatctcgcaccctcaccgaagccctcattggattcgacgccctcactggaggttgcaccgcgatgggatctaggaaccgtagatggcctcgaccacccacgtgggttgttgcctctgcggatgagacgcagcgccaaggggccagaggaaacgacgtgatggacctcatatcacagctcatgtcatggttcatgcctctcatcgcctcccgccgtggttcgccgaggccgccccatgctgcacgccatgggcagcgatgtcgccttcacgaagctcggcatggagtgctaccccaaggaggccaccgctgttggggtcaagggattccccgacatggaaaaataaccgacgacgagatcaatgccgcctccgtcacttgctgccgcatctacctcaggtatatcgcaagttcttcggcgggtactgcaactgctcataccatgattgcagagctgagaacaccttgaagctaggagatgtcatccagtaccatgaatgtggttaccgcattctctataagaagcgggcaccgatccatgtgtagtaccagcaaacttcccattttctatgactccaagcaatggcagttgccgttcagtttggactatagaattcaattatgagttcagtttgttgatattaaaggaaagatacaggtcagcctcttttacttaacaaggtaagagctctaaatttatgttagtatagtagaagtttttttgttgtaaatatcacttgcatatacgccagctagatgctcactatttgtcctctctcaaggtctcaatctgtctgatgtttattcaaccgattagctatcatcataaacctgaataacattttgctttgttcatgttcaggattcatacttaaatacttaacaaggattcatacttaaatttatctgatgcaatttttcaactgaacgtgaacttggcaggggtgagtacggagtagtgtacaagcgagttctgcattgagctgtcgtagagagcgtagacagacactctagccaacgttgttggctgggattggaacacaaaagcgagacaagggatgagaagcacaggaggagccaggtgagtttggcggaggcctcaatccgggtctagaccaaggtcatggtggcgacgaaggtggaggccgaggtggagggtgatgcttccactctcagtcttggggtggggtcgtggggatgacatatgagagtggggtgcagtggtggctcgtcgacatcagccattggcacccttcccctgcccagttcgatgatgcaccctccctcctactacttcacgatggcaccaccatctccaggtaccgtgccgatggaggaaaggagaaacaaggtattttgaagattaagagtgatgccacatacttagcgatggggtgcttgatatcctagatattgtactagcttcagacctcgccgaattgacaccttcgaagaaatgaagtcgccagattggtaggctttgagtgtttcaccagaggaagtatgtagtgcagttaaggaaggaaatgaacttccatcagacttgatagacacactactaaagtggatcccaagcaatgatgaggagcttaggcttcgactgtcctcccatagcaccgccacaccgcatgcgtccgcggcggcgtccgcctcggcgccggtctcgcacaccgctccctagctggggaagttcatcgcctccgagcccttcaacgtggggggattcgattgggcgatctacttctaccccgatgggaagagcggcgaggatggcgttgtctacgtctcgctcttcatagccctggccagcgaaggcaccgatgtgcgcgcgctgttcgaggtcacgctcgtcgaccagagcggcaaggggcaagacaaggtgcatacccactttgggaggtctctcgagagcgacccatacaccctcaagtaccgcgacagcatgtgatgagtctatgtacaggttgtttcctacggtatgcttatctatggtggaaagaaaaagtgattgactcatacttgaaaagaaaagatggcctttgcccattgacgcctgagacaaccagaaatttgccatgacctcgttcctgaccaagaaaaactgtcaagcacagaatcacagttgatatattgggattccaaggtatcagaggctgatatggatgcaatgtggaaacatcctgatgtgtataaggagtggataaaatctggtgagagacgtggaaatgtacgattctcccatgatgcaaagaacatgccttacctttctcgcgtcgaggtgaaggatatgattgccttctcatgttgtgtatatgatggtggtgatgaggagaaggaaatggatgcagccagagaaataggttggagagggaaatttactaagagaggacgtgtaataagaccaggaattattagaatgagtggaaaatgtcctcttacacctttggaggttgggttaatgcttcgtggaatggatttcagcaataagactgcaatctttttggcatctggaaagatttacaaagcagagaagaacatggcttctcttcttgaaatgtttcctctcctacagacaaaagagacactggcatcagaagaggaacttgctccattcaagatggctgctgttgactatagtatttgtgcccaaagtgaagtttttgtgaccacacaaggtggaaatcccgcattttttatgggtcacaggagatacttgtatggtgggcattcaaaaacaattaaaccagacaaaagaaggcttgctgtactcttcaataatccacgtatagggtggacggcattgaagcggcacttgcttaatatgagagcatacagtgatgtcaaggggatcgaaatgaaaagaccaaacgaatctatatataccttcccgtgtcctgactgcatgtgccgcttgaacagaacagaacactcgaaatccaaacagagtagatagtatatttcgtatgtagaccaaatggctaaaaccatccaatattttcatagactgaaaatgcagagaaagcaacaaaggtgtatcaatacagtcgtacaagcttagtatcggatggtttttaatttgtatagcaaagcacgggcacatacctatatatcttttaatgtatgtaaatattcttaacctttaaaagatactaacaagcaggtataacgataattaatgtttctatatcttaatatattttatcattatatgttgattccgtagcaacgcacggtca

SEQ ID NO: 69374 - DNA, 1763 bp, Zea Mays
aggcgctggaggcgtccacagggggcgacacccgtgaccctgcccccgttcgacatcagcgctcctccccccgaccaccgtcgatttggtgtctgagccctcgctagatctcgcaccctcaccgaagccctcattggattcgacgccctcactggaggttgcaccgcgatgggatctaggaaccgtagatggcctcgaccacccacgtgggttgttgcctctgcggatgagacgcagcgccaaggggccagaggaaacgacgtgatggacctcatatcacagctcatgtcatggttcatgcctctcatcgcctcccgccgtggttcgccgaggccgccccatgctgcacgccatgggcagcgatgtcgccttcacgaagctcggcatggagtgctaccccaaggaggccaccgctgttggggtcaagggattccccgacatggaaaaataaccgacgacgagatcaatgccgcctccgtcacttgctgccgcatctacctcaggtccgagtctgaacctggtatatcgcaagttcttcggcgggtactgcaactgctcataccatgattgcagagctgagaacaccttgaagctaggagatgtcatccagtaccatgaatgtggttaccgcattctctataagaagcgggcaccgatccatgtgtagtaccagcaaacttcccattttctatgactccaagcaatggcagttgccgttcagtttggactatagaattcaattatgagttcagtttgttgatattaaaggaaagatacaggtcagcctcttttacttaacaaggattcatacttaaatacttaacaaggattcatacttaaatttatctgatgcaatttttcaactgaacgtgaacttggcaggggtgagtacggagtagtgtacaagcgagttctgcattgagctgtcgtagagagcgtagacagacactctagccaacgttgttggctgggattggaacacaaaagcgagacaagggatgagaagcacaggaggagccaggtgaggtgaggtggcgacacacaggagtcgggcaagctcagctcatctcatctcatgctctactaaaaaggattagcccatctcaagagaaaagagtaacattgtcagcccactgcaataaccacactattaccagtcttgaaattcactttttgtttgtttgtcatagaaccagggattcatgacaggaaatgatctccttctcaagataagaaaattgcatttaagttactaatcagtgtatggtttactagtttggcggaggcctcaatccgggtctagaccaaggtcatggtggcgacgaaggtggaggccgaggtggagggtgatgcttccactctcagtcttggggtggggtcgtggggatgacatatgagagtggggtgcagtggtggctcgtcgacatcagccattggcacccttcccctgcccagttcgatgatgcaccctccctcctactacttcacgatggcaccaccatctccaggtaccgtgccgatggaggaaaggagaaacaaggtattttgaagattaagagtgatgccacatacttagcgatggggtgcttgatatcctagatattgtactagcttcagacctcgccgaattgacaccttcgaagaaatgaagtcgccagattggtaggctttgagtgtttcaccagaggaagtatgtagtgcagttaaggaagcttctcttgtaacattggatataatgacgctgctacatgactattattttg

SEQ ID NO: 69375 - DNA, 825 bp, Zea Mays
gcgtaacgtgtgctctcaccgtgagatgaccgcgcgtctcacctcacacatgacacatgtaattgcttgaaaatctatggctcacacatgacacatgtaattgcttgaaaatctatggtttagaaagagggaatcagggaagtgaactagcggtccacgatactccgacgcccactttgctacctcggaaccctagccgccgcccatggatatcgccggagaccggcgccggtagcgatacgcaaaaggagtggccgagatcgcacggcaagaagccaggctgaagatggaaaaggagaatttagagaaggaaaaaagcgtcctcatgggaacagcatcgagccaagacaaccaagatggagcccttgagatcactgtcagtggtgagaagtacaggtgcctccgcttctccaaggcgaagaaatgagaaatggactggcactgaactggaccaacacatgctctgtagtcagctaaatctagccacctagtcttgcaagacccttattttgattcaaattgcattctcttttcttgtacaggaaatcctggaatgccgttaatagaatagcggatacttatgccaggactgtcttgtttataaaaaaaccgggctgctagagcagctgcaatggggagttaatgatgactgaaggttgttgacagttgtgatgtcctgttcttgctgatatgtttacagatcagctcaatgctggctctaaaatatgagttcagagttggtataaatggacaggtgctctgcaatggcctggatggtctatcagattttgccgtcgttcgagctgattggattgagctgtcaac

SEQ ID NO: 69376 - DNA, 1535 bp, Zea Mays
gtccttttataacggactttaaatatattctatattatactgggcacacctcacacgagcagcagcggacgataagagatgtgctgaagctgaacggtggccatgtccaccggacgcacagaggaggccgccgggagcgcggagacggcgtgcgtgacgggcgccggcgggtacatcgcctcgtggctcgtcaagctcctcctctcccgtggctacaccgtccacggcaccgtccgcgacctcagtgacaataaaaccgctcatctgaagcggttagagaatgcttccgaaaacctcaagcttttcaaggctgatgtccttgactacgacgctatggcgggtgcagtcgcagggtgccagggagtctttcatgtcgccactcctgtgccttcagggaagatcaccgatccagagcgagagatgctgggtcctgctgttaccggcaccataaacgcactcaaggctgcgtctgctgcaaatgctcgtcgagtggtcgtcgtttcatccatggttgccgttgagatcaacccgaaagactggcccagagacaagatcaaagatgagaactgctggtcagataaagagttctgcaggaacgaagagaactggtattctgtcgccaagatctcgtcagaagaggccgcacttgaatacgcgaagcagaccgggctggatgttgtgacggtcaatccagctgtggtctttggccctcttctgcagccgacgctcaacacgagctgccagttcctcgtctacttcctgaaaggaggacctgatcgaatgagggacaagctttggcacatcgtcgacgtcagggacactgccgatgctctcctgcttgtgtacgagacaccacaagcctccggcaggcacatctgcgctcctcatttcatcagcgcgcgtgacctgctggagctgctgaagacgatgtaccctgatgattaccctttcattagcaaggagagcatctacgacatggagcacccagctccaatgacgtccgacaagctcaagaaactgggatggaaggtcaggccgctgaaggaaacaattgcggaaaccgttgagttctgccagcatgctgggtttctcgaggacgtggagggattccgttttcctcccctgtacaacataatctagtttacaataacgtcagtagtgtaagagcaactccaacggaatccgtaaaatttacacaaaaactttgatttggaggctctctaaaataaatagctcgctggaaagcaagctctgatagatccgtcatttatcgctgttttttttttaatcccgcggcaaggaagatgcaggttctgtttgattgccctagaccagctaggtatggctaggccaggatcctgttcgtttcccaataaagctttatttaggtaatctagtattaacccaatccacttgttgagctggattaggtgtaaattagcttaagcacctcaatacgtacctatgtattgagctcaatactacaatttcagcaacgagcgccaagagcctttttttgcatggatagcagtggg

SEQ ID NO: 69377 - DNA, 1421 bp, Zea Mays
atggtaaaaccgccactccctaggcgacgcacggcgtgcgtgacgggcgccggcgggtacatcgcctcgtggctcgtcaagctcctcctctcccgtggctacaccgtccacggcaccgtccgcgacctcagtgacaataaaaccgctcatctgaagcggttagagaatgcttccgaaaacctcaagcttttcaaggctgatgtccttgactacgacgctatggcgggtgcagtcgcagggtgccagggagtctttcatgtcgccactcctgtgccttcagggaagatcaccgatccagagcgagagatgctgggtcctgctgttaccggcaccataaacgcactcaaggctgcgtctgctgcaaatgctcgtcgagtggtcgtcgtttcatccatggttgccgttgagatcaacccgaaagactggcccagagacaagatcaaagatgagaactgctggtcagataaagagttctgcaggaacgaagagaactggtattctgtcgccaagatctcgtcagaagaggccgcacttgaatacgcgaagcagaccgggctggatgttgtgacggtcaatccagctgtggtctttggccctcttctgcagccgacgctcaacacgagctgccagttcctcgtctacttcctgaaaggaggacctgatcgaatgagggacaagctttggcacatcgtcgacgtcagggacactgccgatgctctcctgcttgtgtacgagacaccacaagcctccggcaggcacatctgcgctcctcatttcatcagcgcgcgtgacctgctggagctgctgaagacgatgtaccctgatgattaccctttcattagcaaggagagcatctacgacatggagcacccagctccaatgacgtccgacaagctcaagaaactgggatggaaggtcaggccgctgaaggaaacaattgcggaaaccgttgagttctgccagcatgctgggtttctcgaggacgtggagggattccgttttcctcccctgtacaacataatctagtttacaataacgtcagtagtgtaagagcaactccaacggaatccgtaaaatttacacaaaaactttgatttggaggctctctaaaataaatagctcgctggaaagcaagctctgatagatccgtcatttatcgctgttttttttttaatcccgcggcaaggaagatgcaggttctgtttgattgccctagaccagctaggtatggctaggccaggatcctgttcgtttcccaataaagctttatttaggtaatctagtattaacccaatccacttgttgagctggattaggtgtaaattagcttaagcacctcaatacgtacctatgtattgagctcaatactacaatttcagcaacgagcgccaagagcctttttttgcatggatagcagtggg

SEQ ID NO: 69378 - DNA, 1364 bp, Zea Mays
tggcaatatacggacaagccgtggcgggtatatacggacgaagaggaggaccggaggaggaagcttcagtgaggccctgcactgcagcgggatggcgtcgccgccgccaccacgcgtatgcgtaaccggtggcggcgggtacgtcgcctcatggctcgtcaagctcctgctctcccgcggctacgccgtgcacgccactgtccgcgacccaagtgatcccaagaacgcccacctgcaacagctggacggggcccgggagaggttgcgcctgttcaaggccgacgtgctcgaccgcgacgccctggcgaccgcggtcgtcgcgtgcgagggcgtcttccacgtcgcctcccctgtgcccgcggacaaagtcctcgatcccgagtccgaggtgctgtctcctgctgtcaagggcactctgaacgtcctccaggcctgctcggcaaacaacgttcagaaagttgtcgtggtttcgtccacggctgccgtttactttaacccgagctggccccaaggtagaaccaaagacgagagttgctggtcagacagagatttatgcattaagaacgagaactggtactgtgctgccaagacgattgctgaagaaactgcagtggagtatggagagaagaacgggctgattgttgtcacggtctgcccttgtatcgttttaggcccactcctgcagccgctgatcaatgccagcagcgaactcctcgtctacattataaaaggaggtcctagggtgctgaaaaacctcccctggaacatagtcgacgtccgtgacgtagctgatgctttgctcctagtatacgagaaagtggaatcatccgggagatacatctgtgcgcctaatcggatcagcacaaacaacatggtgaacttgtttaagaagtcctaccctaactacaattatgtgaactgcgacaacaaggactatgaatctgaaatctcaccagttacatcggagaaacttaagagtctaggctggaacccaaggacaatggagaaaactttgttggacaacattgagtatttcgagaaggcagggtttttgcgtgatggagagggttatccttgtcgtctacctcatatttttcatttcgcttctgactaatgaaatatattctgtaaaacaattacgacaactactataactgtcttcggacaatttatttctcttctctgtcgtgtttgtttttagatgttctgcacacgcttttacagattgaaccggataacaacaagccttcattataacaaaagtggtagccctaaaaccacatcctcagggtgagatgttgtgatatacgttgaatattacccgaattctaatgcgggttatgagaacgcctagaggacgtgcg

SEQ ID NO: 69379 - DNA, 1448 bp, Zea Mays
cggccggctctttctgcgtgttcttcttcttgtcgatttccgtcttgtgtatatactatatactatgctgctggtgctgggttgcaagcaagtggcaactggcaatatacggacaagccgtggcgggtatatacggacgaagaggaggaccggaggaggaagcttcagtgaggccctgcactgcagcgggatggcgtcgccgccgccaccacgcgtatgcgtaaccggtggcggcgggtacgtcgcctcatggctcgtcaagctcctgctctcccgcggctacgccgtgcacgccactgtccgcgacccaagtgatcccaagaacgcccacctgcaacagctggacggggcccgggagaggttgcgcctgttcaaggccgacgtgctcgaccgcgacgccctggcgaccgcggtcgtcgcgtgcgagggcgtcttccacgtcgcctcccctgtgcccgcggacaaatccgaggtgctgtctcctgctgtcaagggcactctgaacgtcctccaggcctgctcggcaaacaacgttcagaaagttgtcgtggtttcgtccacggctgccgtttactttaacccgagctggccccaaggtagaaccaaagacgagagttgctggtcagacagagatttatgcattaagaacgagaactggtactgtgctgccaagacgattgctgaagaaactgcagtggagtatggagagaagaacgggctgattgttgtcacggtctgcccttgtatcgttttaggcccactcctgcagccgctgatcaatgccagcagcgaactcctcgtctacattataaaaggaggtcctagggtgctgaaaaacctcccctggaacatagtcgacgtccgtgacgtagctgatgctttgctcctagtatacgagaaagtggaatcatccgggagatacatctgtgcgcctaatcggatcagcacaaacaacatggtgaacttgtttaagaagtcctaccctaactacaattatgtgaactgcgacaacaaggactatgaatctgaaatctcaccagttacatcggagaaacttaagagtctaggctggaacccaaggacaatggagaaaactttgttggacaacattgagtatttcgagaaggcagggtttttgcgtgatggagagggttatccttgtcgtctacctcatatttttcatttcgcttctgactaatgaaatatattctgtaaaacaattacgacaactactataactgtcttcggacaatttatttctcttctctgtcgtgtttgtttttagatgttctgcacacgcttttacagattgaaccggataacaacaagccttcattataacaaaagtggtagccctaaaaccacatcctcagggtgagatgttgtgatatacgttgaatattacccgaattctaatgcgggttatgagaacgcctagaggacgtgcg

SEQ ID NO: 69380 - DNA, 636 bp, Zea Mays
agatgaacccacggggcccaacttttcctgctgcatgaacgtgagatcgtctggccctgcggtcctgccgtcctggtggactcctaccagccatgccgtcttccttggccggcgcggcggcgcctatcggcggccgcgttgcggggctgtcctgatggagacgtcaatccccacccgagagttcatggatcgccgataatgaatgcctcatggctgcagaggctggtgacgtcgactctgcgaggttatccaaacaatgcccatttgaaggagctggagaaggccccagagaatctgtatctgttcaaggctgacgagccagaccacgacacgctaacagctgcagttgagggatgcgaggggatcttccatctcgccactccggcggtgcctgaagataagattgttgatcctgagcgtggatcgttaacatgtcagaagctgatggatctggctgggaaccaaggaaacggtcttggacacagcgttgagcgctctgaaaaaggcatggcttctccaggctgtggccgggcgtccctgccgccttccccatctcttccgtcgatctgtcatgtgacgatataggagattgatcagttgcaatcatggtgaaaatttgattgtagtattggtttt

SEQ ID NO: 69381 - DNA, 587 bp, Zea Mays
agatgaacccacggggcccaacttttcctgctgcatgaacgtgagatcgtctggccctgcggtcctgccgtcctggtggactcctaccagccatgccgtcttccttggccggcgcggcggcgcctatcggcggccgcgttgcggggctgtcctgatggagacgtcaatccccacccgagagttcatggatcgccgataatgaatgcctcatggctgcagaggctggtgacgtcgactctgcgaggttatccaaacaatgcccatttgaaggagctggagaaggccccagagaatctgtatctgttcaaggctgacgagccagaccacgacacgctaacagctgcagttgagggatgcgaggggatcttccatctcgccactccggcggtgcctgaagataagattgttgatcctgagtcagaagtactagaaactgccgtgaaaggtaccttaatgtgctaaagatctgctccgatgcgaaggttcaaaaacttgttgggatatcctccaacgctcctgtgggttttaaaccgaattggcctcaggataactcaaagatcagagttgctggtcagacaaggaattat

SEQ ID NO: 69382 - DNA, 2840 bp, Zea Mays
atcctcttcaccagtgtgctgcttgcttatctcgttctgtcgttcactcgacgcgttctccgctactcctcgtcctcctgccgaggaaaattttgcagcgggagctactactagctagagctagcatgggaggtacaagcgccgcagtcccgagccacggcctcgcctgcgcgcccccggcagccgtcactctgaatccgcgggcgcggcggcggcgcgcttcctcgggcagcggcggccacaggagcagcccccagcagccactgaggagcgacctgctacccccggctaccgtcgcctgccgagctcgctctcagtctgcttcctcgtctaatgtgaactttgggagaggggatgacgcggacaagttgctcgaggatttgctcaaacagcatggcgaggtggtgtacagctccggtggacctccggatcccaccgttgaggccgacgacgatgccgagtgcttgtcctttgccgtctcgttggctaaagctgcaagtgagataaaggctactgatatccgtgtactttgtgtgaggcggcttgtctactggactaggttcttcatcatcctcactgccttctcaaatgctcagatagatgctatcagttccaaaatgagggatattggtgagaagcagtttagcaaagttgcatctggtgatacaaaaccgaattcttggacattactggattttggtgatgttgtggtccatatattccttccgcagcagcgagcattctacaacctggaagagttctacggcaacgctacacccatcgaactcccttttgacacccaacggcagtgatcgttgatcgttacatccgagccagcgctaggaagcatcccagtgaaaagtgagattttttcgtgaagccagccagaagacattgttaccggcatctcactagtcatcagatgtggtgagctgcccagagaaaagaaacctgcggtgcgaggtcgcaactgacaaaacgcttcctacaaccgaagcggcgcgctgctcgcagcctccgatgcagtgctgaaacggcaacttgatgcgaaaattctaggtttctgttgtgtcatgtcatgctctgcataccctgtgtgaactatcgaataatgttggcaaccgcaccgcaccgcacttggcttcccatgaccgggaggatcagtgtgtcgatccagaaattgttcactggctcctggctcgctaatattaacaccatctgactgatctgacagcttgtaaaatttcactgctggtttacgcaaggctgcactgaacaagcttgctagaagaggcaagttaaagcactaattagtctacaaattagtgactcgtctcggcggtcaactgaacggtaaacagtggaaagtggatgatctttctctgcaatccgtaaagcggtcaactacaccgacggtagcattgttttgcacaccaacttatcacctacaaaagcgacgcgtcctggatcgattgcaaatctacccccaaccaacccagctttgtatctgctaactgtgatcaccaaagttgtgctgatacgatgtgcaattctcgctctttcttctctagaatgttcctgccgatgctttataagagaaggttggtcagcatatcgatctctgccagtgtctagctgagaacatggtgacctcaagcaagggcaaggtatgtgtaaccggggcctcaggctttgttgcctcttggcttatcaaacggctcctcgagtctggatatcatgtggtagggactgtcagggacccaggaaatcaccaaaaaacagcccacctttggaaattacctggcgctaaagagaggctgcaaatcgtgcgagctgatctgttggaagaagggagcttcgacagcgccgtgatggcctgtgagggtgtattccacactgcatcccccgtcctcgctaaaccagactctactagcaaggaggaaacgctcgttcctgcggtgaacggtactctgaacgtgctgagatcgtgcaagaagaaccccttcctgaaaagggtcgtccttacgtcttcgtcgtctgcggtgaggatcagggacgacggccagtccagcagtaacatctcgctggacgaaacggcatggagctccgtgccactctgcgagaagatgcatctatggtatgccctagccaaggtatttgcagagaaagcggcgtgggagttcgccaaggagaacggcatcgaccttgtgactgtcctcccgtcgttcgtgatcgggcccagtttgtcccacgagctatgcgttaccgcttcagacgtcctaggcctattccaaggcgacacggcaaggttcagctcgtacggaagaatgggatacgtccacatcgacgacgttgcgagcagccacatcctggtgtacgaggccccccaggccgccgggaggtacctgtgcagctcagtggtgctggacaacgacgagctggtctcctcgctcgcgaaacgctacccgatattccccataccccggaggctgaacagcccctacggcaagcagtcgtaccagctgaacacgtcgaagctgcaggggctgggcttcaagttcagaggggtgcaggagatgttcgacgactgcgtacagtcgctcaaagaccagggacacctgctggagtgccccctgtgaactgcgatggggtgcctccgcctgtgaacgcgccggttgggttgcgtcccgaacccgctgttaattcgtttttttttcttcaataattccacgtcatgtcacggtgtcctcgcgcagactgctactgtcagggcgtcatagctcacgggctctccggctacatgaataaaaatgtcacgctcgtcatttgctttgcctttt

SEQ ID NO: 69383 - DNA, 2247 bp, Zea Mays
atcgggttgacccggcagacgacacgccaccagcaccaaccatccggcgagagcgagatggagaccccgccgcggggccggtggccgccaggcttccgcttcagccccaccgacgaggagcttgttctctacttcctgaagcgccggatcgcctccggccgcccctctccctacgtcgccgacgtcgaagtgtacaagtcacacccctcccacctccccgagaggtcggcgctgcagacgggggacaggcagtggttcttcttcagccggatggaccgcaagtaccccaacggctcgcgcgccagccgcaccactggcgacggctactggaaggccacggggaaggaccgcttcatctgcggcggcggccgggcggttggcaacaagaagacgctggtgtaccaccatggccgcgccccgcgcggggagcgtacggactgggtcatgcacgagtataccctacttgccgatgcgctcccgcctgctgcgcagggtcgggagttctacgcgctttataagctgttccagaagagcggggccgggccaaagaacggcgaacagtacggtgctccctttcgagaggaggattggttggatgacgacgatgagagagtgattgcgggtgcagccgctaatcctgttcctaacaccaacagcccaccatctacaatggaggagcatgcaattactgaccgtgagcttccgattgagggtcttgatcaaccactgtcagattttggaaatgatccggagttgttttctgaagcacagcctgtttcttcccatggtcaaggtcagggttggctcagtgaggggggtgacaaagctgagttccagtgcgatgatcgtcaggtttggcttgatgccgaaatgggacatgaagtttatgctgcggatcctactgccagcagtggtgctgttgtaactgcagaatgcactgtcacagaacttccacttggagatcttgaagggcttctgctgcaaatagccaatgaccagcacatggtcgaatcccaatcagatctttctgcaccaactccacatcataacttcaatcaggctgacattggggatttacatgaatctcatggtgctcgggttggtaatctttcttgtatagttcaggaaagcacattttgtgaaccacggactgaaccaagtgatcaatttccacagtctaatgtaaccaatttgccatttagcggagaagcaaattcttctgaagggaccagtgtggcacattctgtgtcaggtttgatcagttaccacagtcaagatgctgatgaagagttccttgaaatcaacgatttctttgatctggaggatgtaggtcagaatgcaaattgtatgacaactgagtacatgatgtctgcaacaaatgggatgtttgacaatttggaatactctgatgcttcttcgtttctacctgggtcatttgacacagttggattggtagctgaaaatcaatattttgataccgattacagtggaattcaaaaccagggatatcaaaatacaaccgaagtaaggacatataatcaggctgctcttactgtgcggagccatatgaagcatgatcatgtagtcttatcctcgcatgcatcaggcactctgaatatccatgcggcaaatgagctacataaccagagctccacatcttcacaatcatggttcaatgcggctctatcagccttgttggactctgtacctagtagtccagcattagctgctgaaatcgaaaacactgttatcaacagaacactccagcgcatctctagcttcaggtcacagcaagcaacaggggaagaaccaggcacccctagtattcaggttaccagaggtggcaggctgatgttcatatctctactggttatacttgcttctgttatatggacctttacttcaggctccgccctcaacttttgcaagggtttatggaaatcctcttctacgtgacagattaagtgggaacctggtgaccttgtcctctgtaaattttttggtcctcggtaccatttatggtttgaatatcatttccctttcaaaagggtgaagaggtagaaacattttgagggtggtaatatgattataggttgtagagcctatttaaaacggtaaaatgcaagggggaaaagcatatctgatggtaatatttgaaactaatgggttactgttctcatttgtattttgacagatatatgtactgaatgcaattaacctattaatatagcttcagtttctgtgcat

SEQ ID NO: 69384 - DNA, 2450 bp, Zea Mays
cagccccttgagatgtctttagcataagtagccggagcatcgggttgacccggcagacgacacgccaccagcaccaaccatccggcgagagcgagatggagaccccgccgcggggccggtggccgccaggcttccgcttcagccccaccgacgaggagcttgttctctacttcctgaagcgccggatcgcctccggccgcccctctccctacgtcgccgacgtcgaagtgtacaagtcacacccctcccacctccccgagaggtcggcgctgcagacgggggacaggcagtggttcttcttcagccggatggaccgcaagtaccccaacggctcgcgcgccagccgcaccactggcgacggctactggaaggccacggggaaggaccgcttcatctgcggcggcggccgggcggttggcaacaagaagacgctggtgtaccaccatggccgcgccccgcgcggggagcgtacggactgggtcatgcacgagtataccctacttgccgatgcgctcccgcctgctgcgcagggtcgggagttctacgcgctttataagctgttccagaagagcggggccgggccaaagaacggcgaacagtacggtgctccctttcgagaggaggattggttggatgacgacgatgagagagtgattgcgggtgcagccgctaatcctgttcctaacaccaacagcccaccatctacaatggaggagcatgcaattactgaccgtgagcttccgattgagggtcttgatcaaccactgtcagattttggaaatgatccggagttgttttctgaagcacagcctgtttcttcccatggtcaaggtcagggttggctcagtgaggggggtgacaaagctgaggtcgtggatgcttccattagcaatgatgttgtggtagtagcagagaacacctgcactgatatctctcttggggatattgagcagtttctcatgcaaatatctgatgatcagcaaaacgatgaattgttctcagatttatcaacaccacttccaaaattgcagttccagtgcgatgatcgtcaggtttggcttgatgccgaaatgggacatgaagtttatgctgcggatcctactgccagcagtggtgctgttgtaactgcagaatgcactgtcacagaacttccacttggagatcttgaagggcttctgctgcaaatagccaatgaccagcacatggtcgaatcccaatcagatctttctgcaccaactccacatcataacttcaatcaggaaagcacattttgtgaaccacggactgaaccaagtgatcaatttccacagtctaatgtaaccaatttgccatttagcggagaagcaaattcttctgaagggaccagtgtggcacattctgtgtcaggtttgatcagttaccacagtcaagatgctgatgaagagttccttgaaatcaacgatttctttgatctggaggatgtaggtcagaatgcaaattgtatgacaactgagtacatgatgtctgcaacaaatgggatgtttgacaatttggaatactctgatgcttcttcgtttctacctgggtcatttgacacagttggattggtagctgaaaatcaatattttgataccgattacagtggaattcaaaaccagggatatcaaaatacaaccgaagtaaggacatataatcaggctgctcttactgtgcggagccatatgaagcatgatcatgtagtcttatcctcgcatgcatcaggcactctgaatatccatgcggcaaatgagctacataaccagagctccacatcttcacaatcatggttcaatgcggctctatcagccttgttggactctgtacctagtagtccagcattagctgctgaaatcgaaaacactgttatcaacagaacactccagcgcatctctagcttccgaccacatcaaactgcaggtgaagaaaacacttttatcaacagaacacttcagcacatctctagcttcaggtcacagcaagcaacaggggaagaaccaggcacccctagtattcaggttaccagaggtggcaggctgatgttcatatctctactggttatacttgcttctgttatatggacctttacttcaggctccgccctcaacttttgcaagggtttatggaaatcctcttctacgtgacagattaagtgggaacctggtgaccttgtcctctgtaaattttttggtcctcggtaccatttatggtttgaatatcatttccctttcaaaagggtgaagaggtagaaacattttgagggtggtaatatgattataggttgtagagcctatttaaaacggtaaaatgcaagggggaaaagcatatctgatggtaatatttgaaactaatgggttactgttctcatttgtattttgacagatatatgtactgaatgcaattaacctattaatatagcttcagtttctgtgcat

SEQ ID NO: 69385 - DNA, 2479 bp, Zea Mays
caccgggaagccacgcagaaccggcagccccttgagatgtctttagcataagtagccggagcatcgggttgacccggcagacgacacgccaccagcaccaaccatccggcgagagcgagatggagaccccgccgcggggccggtggccgccaggcttccgcttcagccccaccgacgaggagcttgttctctacttcctgaagcgccggatcgcctccggccgcccctctccctacgtcgccgacgtcgaagtgtacaagtcacacccctcccacctccccgagaggtcggcgctgcagacgggggacaggcagtggttcttcttcagccggatggaccgcaagtaccccaacggctcgcgcgccagccgcaccactggcgacggctactggaaggccacggggaaggaccgcttcatctgcggcggcggccgggcggttggcaacaagaagacgctggtgtaccaccatggccgcgccccgcgcggggagcgtacggactgggtcatgcacgagtataccctacttgccgatgcgctcccgcctgctgcgcagggtcgggagttctacgcgctttataagctgttccagaagagcggggccgggccaaagaacggcgaacagtacggtgctccctttcgagaggaggattggttggatgacgacgatgagagagtgattgcgggtgcagccgctaatcctgttcctaacaccaacagcccaccatctacaatggaggagcatgcaattactgaccgtgagcttccgattgagggtcttgatcaaccactgtcagattttggaaatgatccggagttgttttctgaagcacagcctgtttcttcccatggtcaaggtcagggttggctcagtgaggggggtgacaaagctgaggtcgtggatgcttccattagcaatgatgttgtggtagtagcagagaacacctgcactgatatctctcttggggatattgagcagtttctcatgcaaatatctgatgatcagcaaaacgatgaattgttctcagatttatcaacaccacttccaaaattgcagttccagtgcgatgatcgtcaggtttggcttgatgccgaaatgggacatgaagtttatgctgcggatcctactgccagcagtggtgctgttgtaactgcagaatgcactgtcacagaacttccacttggagatcttgaagggcttctgctgcaaatagccaatgaccagcacatggtcgaatcccaatcagatctttctgcaccaactccacatcataacttcaatcagttcaggaaagcacattttgtgaaccacggactgaaccaagtgatcaatttccacagtctaatgtaaccaatttgccatttagcggagaagcaaattcttctgaagggaccagtgtggcacattctgtgtcaggtttgatcagttaccacagtcaagatgctgatgaagagttccttgaaatcaacgatttctttgatctggaggatgtaggtcagaatgcaaattgtatgacaactgagtacatgatgtctgcaacaaatgggatgtttgacaatttggaatactctgatgcttcttcgtttctacctgggtcatttgacacagttggattggtagctgaaaatcaatattttgataccgattacagtggaattcaaaaccagggatatcaaaatacaaccgaagtaaggacatataatcaggctgctcttactgtgcggagccatatgaagcatgatcatgtagtcttatcctcgcatgcatcaggcactctgaatatccatgcggcaaatgagctacataaccagagctccacatcttcacaatcatggttcaatgcggctctatcagccttgttggactctgtacctagtagtccagcattagctgctgaaatcgaaaacactgttatcaacagaacactccagcgcatctctagcttccgaccacatcaaactgcaggtgaagaaaacacttttatcaacagaacacttcagcacatctctagcttcaggtcacagcaagcaacaggggaagaaccaggcacccctagtattcaggttaccagaggtggcaggctgatgttcatatctctactggttatacttgcttctgttatatggacctttacttcaggctccgccctcaacttttgcaagggtttatggaaatcctcttctacgtgacagattaagtgggaacctggtgaccttgtcctctgtaaattttttggtcctcggtaccatttatggtttgaatatcatttccctttcaaaagggtgaagaggtagaaacattttgagggtggtaatatgattataggttgtagagcctatttaaaacggtaaaatgcaagggggaaaagcatatctgatggtaatatttgaaactaatgggttactgttctcatttgtattttgacagatatatgtactgaatgcaattaacctattaatatagcttcagtttctgtgcat

SEQ ID NO: 69386 - DNA, 2647 bp, Zea Mays
ctggccggtcgcgctgcgctccatctttggtgcgcttgtcccgaggcgccgccgcataaactagcagccccacttccgcggcggcggcgcactcacggtccctcgtcgcacggaagcctcaaaggagagagccaggattcgcccatgctcggtggccgcgatcctctggccccgttcctcgtcgcttccttgaagcgtgcggcgcgcctccgctgcggcgagcagctgcacgcgctcgctgccaagtctggccttctcgcctccaacgtcttcgttcgcaactctgtcctctcctcgtactcccgcctcccgtcctcacttgccagcgccctccagctgttcgacgaaacacccccgccactccgcgacgccaccgcgccagcatgctctccgagaatgttgttcccaacgaggcgactctggctggtgcgatcacggcgttcgctcgctgtggggcaccggcaacagtggggatgatccatggttttgctctgcagcgggcgttggatggcttcgtcattgtagccaccaacctggttcatgcatatgcaggggtgttagagctttgttctgcccgtgccttgtttgatgggatgacgtataggaacacagtcacttggaatgtaatgctcaatggatatgtgaaggcaaagatgatagacatggctgcggaagtgttctggaggatcccagagcgagatgaggtatcttggttgacattgattgatggatatatctgtgcagatctgatatcagacgcaatgaaggcatatgttcaaatggtgggtgaagttggtgcaaacgactacgaggtattgcttgttgatttgatgaaggcgtgtgctcggtactctgctgttacagaaggccaacagctgcatacagttattctgaagaatggttttgatgcccatgcatttgtgcaagcgaccctggtccatttttatgggtgttgtggtcttattggccttgcacagatgacattcagattgtcagacaagtcccacacagcatcatggaacgctctcttggctgctctactgaggaatggcctaattcgtgaagcaagggagctgtttgatgatatgcctgaaagggacactgtttcttggagtacaatgatttctgggtatgtgcagacaggacgttcagacatggctttgaagctattctattcaatgttgaatacgagcattgaaccaaatgaggtcacgttggccagtgctctatctgcaattgctgattctggcacattggaccaaggtaaatggatccatgactatataatgaacagaccagtccagcttactgataacctgagttctgggttgatagatatgtatgccaagtgtggcagtattgctgatgcagtgcagtttttcaatcgcgtcaacgataagttctcttccgtttcaccatggaacgctatgatttgtagtttagccatacatggttatgcacatatgtcgcttgacctgttttcacaattacagaggactagtattaagcccaattcaatcacattcataggtgttttaagtgcatgttgtcatgctggcacggtaaccaagggaaaatattattttgagtccatgacgagggaatatgggatccagccaacgatcaagcactacggttgcatggttgatctcctcggtcgagctggatacttggaagaggctgaacagcttgtttcaatgatgcctatgaaaccagatgttgtaatttggggcagcatcctttcagcatcaagggcacaaggaaatgtcgcattaggtgaaagagccgctgaagaattggcaaagcttgatcaaacccatggtgcatccaaaatagccttgtctaacatctatgctgatgctggtcactggatcaatgtttcagttgtgaggaaggaactccaggatgcaaatcttgagaggctaactggaagaagtggcattgtacagtaataggatagatcttttctcagttagctataatgggcaagtgatgatgagaagcccttcctttctttctgtattctattttctgaagatgccgtgaccattgttttctcttcaaacaaaagcaggcgcgaacatgatgtgatggcggaaatataatttcttttgtggtcctcattcatctttgatggatggcgatattgatatttcattatacaccagaaaattctctactgcaggacagagctgtgccgtttcagtgctgataagatgtagtgatgtaccctgggaagcatcagatttatccgtgcagatttacaggtgttcctattttcgaacacgaagtgcaaacactacttccagaaccgcctcaagccatccaatctcacatggacagccatgtacatgaaggctgaagcagcacaagaagcatgctgcatgtatcgtgaaaatggaccgtctcctttttctgcaacttttgactctgatgactggaatgtctgaccacacatcaccttgcacgcgctctactgtttcaacttttttcccggcgtggactctatgcctactgtttacttgcaatcattaaaggattggcatgtgcagttgtgcactattggcctcgaccgggtgtttcgtcactgaacagtcggacaagtcacaagtgaccgtgggctagttgctcagctactagggccttg

SEQ ID NO: 69387 - DNA, 1861 bp, Zea Mays
atacggtggaggagaggggaggcggggaaaaagcatgcgaattattcgaggcggctttatggtcggacggatcacccccagcaaggagccgccacccgccactccgccagagcattgcagcgccagccacctcgccccctctcgctgtcccgcaccacccgctccgagggaaggagaggtaaccggtggcgggcgcggcggcgagcggagatcccgggaactccgatcgagcgcaagcggcgggacctgcgggagcagagagcgcgcagggaggagaagtgagtagcgtggttcgatggtaagggagacgggatactacgacgtgctggaagtgagcccgacggcctccgaggccgagatcaagaaggcatactacgtcaaggcgaggcaggtccatccggacaagaacccagatgatccgcttgcggcggcgaggttccaggaattgggggaggcataccaagtgctcagtaatcccaagcagcgtgaagactatgacttacatgggaaacctgggaagcgataattgatcctgcagcaatttttgcgatgctgttcggtagcgagctttttgaggactacattggtcagctggcgatggcatccatggcttcacttgatggttttactgaaaacgaacagatcgatccaagaaggttgcaagagcaaatgcgagttgtacaaaaagaaagagaggagaaacttgcagaggcactaaaagataggttgcatctttatgttcaaggaaacaaagaggaatttatccagtatgctgatgctgaggttactagactctctaatgccgcatacggtgttgatatgttgagtactattggttatgtgtattcgagacaagcttctaaggagcttggaaagcaagctaaatatcttggtgttccatttattgctgaatggttcagaaacaaagggcattctattaaatcccaaataactgctgcaacaggtgcattagctcttatgcagctgcaggaagactggagaaagcatctcagtgatgagtgccactacaatgaagaggaactggaggcttacatgctgacacataagagtgttatggtggactcgttatggaagcttaatgttgctgatatagaggaaaccctgtcacatgtgtgtcaaatggtgcttcatgacagcagtgccaggaaagaggaactgcgagttcgagctaaaggattgaaaactttaggcaaaatattccatcaagccaagcttagcactgctgagggagatccagcagcaatgaataatacaataaataacttggatgagaatgatgatagttcaccggagtcatctccaagatctcccagggaccaaatgttcgatacaaacccaccttattcccagagtccatacgtggaggcccctgagttgggcgggtatttttccttcgacttcccaatgcctatcgctccgcctggcgcgcagagggaccctattccgtgaccgccgtgagtgcggcggctctgttttgtgtggatcgtcattttgtacaatattgcctgtgtaaatcatttttatctgtaacattagtagcagtagtgtgagacagcagcttggcacccattgcatcttttcttttctttttcttcgtgtaatcaatcaatcaagcatgcgacgacggcagccttgtgttgttcgtagggcttggtctgcttctggccacgggtcagccattggtgtacatgaactaccacctctttgtttcttgtgtttatcagtttatgggtgcataattgttttagcctatgggcccatctgggcaaacaacacttgcttgtgctaagctttgctcgaacttcgtctcgtgaaatttgatcatctcctgttcctgcaa

SEQ ID NO: 69388 - DNA, 1925 bp, Zea Mays
cggggaacacgattttgattttgactagcgaggaagagctccatgtcaatgtgactcatccccgcattataatacggtggaggagaggggaggcggggaaaaagcatgcgaattattcgaggcggctttatggtcggacggatcacccccagcaaggagccgccacccgccactccgccagagcattgcagcgccagccacctcgccccctctcgctgtcccgcaccacccgctccgagggaaggagaggtaaccggtggcgggcgcggcggcgagcggagatcccgggaactccgatcgagcgcaagcggcgggacctgcgggagcagagagcgcgcagggaggagaagtgagtagcgtggttcgatggtaagggagacgggatactacgacgtgctggaagtgagcccgacggcctccgaggccgagatcaagaaggcatactacgtcaaggcgaggcaggtccatccggacaagaacccagatgatccgcttgcggcggcgaggttccaggaattgggggaggcataccaagtgctcagtaatcccaagcagcgtgaagactatgacttacatgggaaacctggtatttcaacggaagcgataattgatcctgcagcaatttttgcgatgctgttcggtagcgagctttttgaggactacattggtcagctggcgatggcatccatggcttcacttgatggttttactgaaaacgaacagatcgatccaagaaggttgcaagagcaaatgcgagttgtacaaaaagaaagagaggagaaacttgcagaggcactaaaagataggttgcatctttatgttcaaggaaacaaagaggaatttatccagtatgctgatgctgaggttactagactctctaatgccgcatacggtgttgatatgttgagtactattggttatgtgtattcgagacaagcttctaaggagcttggaaagcaagctaaatatcttggtgttccatttattgctgaatggttcagaaacaaagggcattctattaaatcccaaataactgctgcaacaggtgcattagctcttatgcagctgcaggaagactggagaaagcatctcagtgatgagtgccactacaatgaagaggaactggaggcttacatgctgacacataagagtgttatggtggactcgttatggaagcttaatgttgctgatatagaggaaaccctgtcacatgtgtgtcaaatgtgccaggaaagaggaactgcgagttcgagctaaaggattgaaaactttaggcaaaatattccatcaagccaagcttagcactgctgagggagatccagcagcaatgaataatacaataaataacttggatgagaatgatgatagttcaccggagtcatctccaagatctcccagggaccaaatgttcgatacaaacccaccttattcccagagtccatacgtggaggcccctgagttgggcgggtatttttccttcgacttcccaatgcctatcgctccgcctggcgcgcagagggaccctattccgtgaccgccgtgagtgcggcggctctgttttgtgtggatcgtcattttgtacaatattgcctgtgtaaatcatttttatctgtaacattagtagcagtagtgtgagacagcagcttggcacccattgcatcttttcttttctttttcttcgtgtaatcaatcaatcaagcatgcgacgacggcagccttgtgttgttcgtagggcttggtctgcttctggccacgggtcagccattggtgtacatgaactaccacctctttgtttcttgtgtttatcagtttatgggtgcataattgttttagcctatgggcccatctgggcaaacaacacttgcttgtgctaagctttgctcgaacttcgtctcgtgaaatttgatcatctcctgttcctgcaa

SEQ ID NO: 69389 - DNA, 1753 bp, Zea Mays
aagtttactggtcagcccaaggagttgaagcgagcctcagtttgcagggtgcccgcacgaggcacgaggcacgaggcaggcctccattcggaccagaacccgatcggggccattggggacggggcggagaacgcgagtaagcactaccctcctcaactcctaccctccgccgtaaaccccgctgttctttgccggagcacccactccccgtccccagccccagtctcggtccccccggacttcgatatcttcggagaccgcctgcatgctcaaatcgtagacactctgggtaggcgcagggtggagatccgtccgggctcggatcaatttcttcgttcgctggctctaatatttttacaaaatcgatggaaagttctaaatctcctcagtcatcaaaaaacagtcggattgtggtgccttctgatagcaatcgctcccgatttgacaatgacggtttttcttcagaaactgcatcaaatcaaatggttgtgttcaactctgaagcagcagatgaactgggagaaaaccgtttgcagaagtcagtgataacaaaggggatatcaccatctattggagcattcactgtccaatgtgctaaatgttttaaatggaggcttattccaacaaaagagaaatacgaagaaattcgtgaacgtattatacaggaaccttttgtatgcaaaagagctcgtgaatggagacctgatataacatgcaatgacccagaagatatatctcaggacggtagcaggctttgggctattgacaaacccaatattgcacaaccccctcatggatgggaaaggcagattaggataagaggtgaagggggtaccaaatttgctgatgtatactatacctctcctactggaaggaaacttaggtctctggttgaagtcgataggttcctccaagagaatccagagcatgttgcacagggtgtaactttagctcagttttcgttccagatacctagacctttgcggcaggactatgtcaaaaagaaaccaaagttgataaatgcaagtgatgaagcaagtacaattacctctaagtcttctgaaccagaagaagtgaaccctatagcctgggcagttcctacaaaacatgagggtgatgccagtgaagaagcttctttcgccgatgagacacttgcatcagaagtagtgctaacccggaagaggaaaataggaagctctttgtcagtagagccaaaccatctctctgatgaacttgaaccaaagttggaggatgcttagaacggggagacttctaactgaaaagtaaaagtgggcagcgtcgtgatgccaacttacccccctgccatggttttattggtcctctgcttgtttctcgttttccttgggagtcagcttctctgttttatgtggtcgcacacggccttatttgtagtattacaccacagaagctggctgacccaaaaaccgacattttgggggcagctacttaacgaaatgtttgcacgagagtttagagccctatggaacttgtttggataaatatgtttattacgttgtagtacttagctaggaacctgcttatgtaagatgatctttctttatgtaagattaagaactgtcagcggcctagttctgctgcacctcggatctaatctcatgttctttgttagacggaccagcagccaaggttctgaaatgtcgtaaagtttatatgctagtactgcgctattgctattgtaattctctgtgcacgtttttgatttgatattgtg

SEQ ID NO: 69390 - DNA, 1567 bp, Zea Mays
aagtttactggtcagcccaaggagttgaagcgagcctcagtttgcagggtgcccgcacgaggcacgaggcacgaggcaggcctccattcggaccagaacccgatcggggccattggggacggggcggagaacgcgagtactcaggctctaatatttttacaaaatcgatggaaagttctaaatctcctcagtcatcaaaaaacagtcggattgtggtgccttctgatagcaatcgctcccgatttgacaatgacggtttttcttcagaaactgcatcaaatcaaatggttgtgttcaactctgaagcagcagatgaactgggagaaaaccgtttgcagaagtcagtgataacaaaggggatatcaccatctattggagcattcactgtccaatgtgctaaatgttttaaatggaggcttattccaacaaaagagaaatacgaagaaattcgtgaacgtattatacaggaaccttttgtatgcaaaagagctcgtgaatggagacctgatataacatgcaatgacccagaagatatatctcaggacggtagcaggctttgggctattgacaaacccaatattgcacaaccccctcatggatgggaaaggcagattaggataagaggtgaagggggtaccaaatttgctgatgtatactatacctctcctactggaaggaaacttaggtctctggttgaagtcgataggttcctccaagagaatccagagcatgttgcacagggtgtaactttagctcagttttcgttccagatacctagacctttgcggcaggactatgtcaaaaagaaaccaaagttgataaatgcaagtgatgaagcaagtacaattacctctaagtcttctgaaccagaagaaggtctctaattcgtgaaccctatagcctgggcagttcctacaaaacatgagggtgatgccagtgaagaagcttctttcgccgatgagacacttgcatcagaagtagtgctaacccggaagaggaaaataggaagctctttgtcagtagagccaaaccatctctctgatgaacttgaaccaaagttggaggatgcttagaacggggagacttctaactgaaaagtaaaagtgggcagcgtcgtgatgccaacttacccccctgccatggttttattggtcctctgcttgtttctcgttttccttgggagtcagcttctctgttttatgtggtcgcacacggccttatttgtagtattacaccacagaagctggctgacccaaaaaccgacattttgggggcagctacttaacgaaatgtttgcacgagagtttagagccctatggaacttgtttggataaatatgtttattacgttgtagtacttagctaggaacctgcttatgtaagatgatctttctttatgtaagattaagaactgtcagcggcctagttctgctgcacctcggatctaatctcatgttctttgttagacggaccagcagccaaggttctgaaatgtcgtaaagtttatatgctagtactgcgctattgctattgtaattctctgtgcacgtttttgatttgatattgtg

SEQ ID NO: 69391 - DNA, 1770 bp, Zea Mays
ggagttcttctccatcgctaaggccagcgagcggctcgtttgctccgccgcaacgacggtcatggatgcgcacttcttctcgaacacgcacgacctgtgcgatagtgcgagtgccaccccggacgtggtgctcatggcctccaccgcgacaagctctttgccaacgtgttgttcgtgaaggagttccccaagcgtctcctcctgagcgtgctcccgaagaagatggacatcatctgcaagcacctgatgttcgggccggagtcgacgcgcagcggctgggcgaacctccccttcgtgttcaacaagcgctacgagcgaggagcttcctgcgttccgtacgtgggcaagaaggtactcaggctctaatatttttacaaaatcgatggaaagttctaaatctcctcagtcatcaaaaaacagtcggattgtggtgccttctgatagcaatcgctcccgatttgacaatgacggtttttcttcagaaactgcatcaaatcaaatggttgtgttcaactctgaagcagcagatgaactgggagaaaaccgtttgcagaagtcagtgataacaaaggggatatcaccatctattggagcattcactgtccaatgtgctaaatgttttaaatggaggcttattccaacaaaagagaaatacgaagaaattcgtgaacgtattatacaggaaccttttgtatgcaaaagagctcgtgaatggagacctgatataacatgcaatgacccagaagatatatctcaggacggtagcaggctttgggctattgacaaacccaatattgcacaaccccctcatggatgggaaaggcagattaggataagaggtgaagggggtaccaaatttgctgatgtatactatacctctcctactggaaggaaacttaggtctctggttgaagtcgataggttcctccaagagaatccagagcatgttgcacagggtgtaactttagctcagttttcgttccagatacctagacctttgcggcaggactatgtcaaaaagaaaccaaagttgataaatgcaagtgatgaagcaagtacaattacctctaagtcttctgaaccagaagaagtgaaccctatagcctgggcagttcctacaaaacatgagggtgatgccagtgaagaagcttctttcgccgatgagacacttgcatcagaagtagtgctaacccggaagaggaaaataggaagctctttgtcagtagagccaaaccatctctctgatgaacttgaaccaaagttggaggatgcttagaacggggagacttctaactgaaaagtaaaagtgggcagcgtcgtgatgccaacttacccccctgccatggttttattggtcctctgcttgtttctcgttttccttgggagtcagcttctctgttttatgtggtcgcacacggccttatttgtagtattacaccacagaagctggctgacccaaaaaccgacattttgggggcagctacttaacgaaatgtttgcacgagagtttagagccctatggaacttgtttggataaatatgtttattacgttgtagtacttagctaggaacctgcttatgtaagatgatctttctttatgtaagattaagaactgtcagcggcctagttctgctgcacctcggatctaatctcatgttctttgttagacggaccagcagccaaggttctgaaatgtcgtaaagtttatatgctagtactgcgctattgctattgtaattctctgtgcacgtttttgatttgatattgtg

SEQ ID NO: 69392 - DNA, 5792 bp, Zea Mays
atggcagacgttggacggctggagcacttggagcagagacgtcggcaaaaaccagagaggacagaggagagaattagggtttactggcggctgggagggtttctggcgggtttgtggttagccattcatgtcatgacacaaattgaacatcgtgggcttcaaaagcagtggacttgggaaccaatgatgggagaaagtttgatcttggcgctagtcgataataatgatgatgtgcggcaagttggaagagctctcttggaacatgtatctcaagcacggggtttgacttctgggcttcaatttctgtgctcgagtgcatcttcactcactgctgtttttctgggtctaagatatgtagttcaactggtgggaacaagatcagttttggcagattttagtagttttcatcacttgttttttgtcatatgcaaactacttaaggaggttgtcgttcaaagaccccaaattgcacagccagcgaaacctccagaagggggtttcttgcgacaaccctattcaagtgtcctagctagtccaccagaacatgctgtggatgttagtaactgggagaagttctgcactttgctttctgcaactctctggcctttcatttccacatgcctaagagaaggaaaggagctaataggtctcaaacagtgtcagatatcttgcgtccgtttgcttgagttgcttcctctggtctatgagagggtcaactcaaattgccgcaccctatcttgcagtacgacgacagtgtttcagaatcctatggatatttcatggtttattcatttggttcactggggaaaatcatctctccttgtgattatcagacattggaaacaatgcatgctctctttattgaaagaactaaaatgttcacatagcggtaccattcaatgctacattgaagatcttgacaatatcatttcacatgatgcagtaaatatcaatgaacttgaagagagagtttcaaatcttgaacttgtactgtccaaggaggttgccacaaaaattgaaaggagagggttagctgacttaccaatgtttaaagaaccaattgttagtgttccctctccagttcatgagagacattctggcatggacagttttgtggatgttgaaagcacaaagtcctcccatccaccagatgttcatgaaataattctcctttcagacagtgaggataatttactggcacctgacgtgtccagtgaggaggttttgtcatcagttatggagaatgatgcatccactgcttccaatatgttgaaagatgctacacctctagaacaaagtacgctgaacgacaatagacactcacctttagaaccacagatatgtcatcctgttagtaatattagtgcctcttctaaacctgtatcaacagatagtagggacaacattgctgccacaaaaggattacttcgaatgaaaaaaccgagaccgccaatgaacacaaataataattccacttcacccaaaatggttaaatcatctgttactggcacttctcaacaactgcatcctaaattgttgtcagatacagaaaaatttaaatccatcttcagggatatatctgatgatgaagatgatcctttagaccatgcacttgataattaccggaggccacaggttctttcaagaaagccttgtatattagttcccaagagacaagttgttcagcttccagtgcctgttggaagaaaaccaggttctggcagtagggttacaagtactcgacgacttcaaccacctaaactgggtagctggtttagaaacatattggaaatggactacttcgctgttgttgggttatcttctcctgagatagtaagaaaacctgctttaaaagaagttccggtatgttttgattcaccagctcaatatgttgaaattttccagccattagttctagaagagttcaaggctcagttgcaaaatgcttatgttgagactccccctgatgacatgatgtgtggatgcgtatctattctcgcagttgaaagagttgatgatttccttattgtccgtgcccgtcctgagcatagccagtcgatcaaattcagaggttgcacagagaatgatttagtactactcaccaaagatccactgaagaaccaaggacaacaagtccatgtgcttgggaaggtggagcggcgtgagagtgataaaaataaggcattgatttttgtgatgaagttctttctttctagtgacaatgcacgcctaaataaagtgaaacggtttcttgtggaaagcattagagtcatcatacaatgatagccagctccaagctctaagcattgccattggaccaacaagctctaaagcaaattttgatctgtcccttattcagggacctccaggtaaaacaagaacaatcgtagcaattgtaagtgcattgctatctttacatgcaggtgacccttacaagtcacagagaaatgagtacgtcggtagtactgattttacaaagccaagagcaaagattagccaatctgctgcagtaattagagcttggcaggatgcagcccttgctaaacaactggaaaaggattctcagaaagaatgtcctcgaacaacagagcggtttgtgaagggaagggctttagtttgtgcgcagtcaaatgctgcagttgatgagcttgtgtcaaggctcagtgagggattgtacagtgctgatggaaagctgtataagccttacatagtgagggttggtaatgcaaagacggtccattctaattcgttgcctttcttcattgacacacttgttgagcaaagattatcagatcagttgaacattaataatgatggcaaaaaatcatctgatgctgaatcctctagttcacttaggtctaaattggagaagattgtggacagaattagatattatgagtcaaggcaaaaactaattgagtctgataaaagtgaagatggttcttctgtacctggtgaaggtgaggcagatgaagtttccgatgaagcacttggtggaaagcttaactttttgtatgcacagaaaagggtagtttctgcagaactggccactgctcatgcccgtgaaaaagaaaatagctgatgaaaacaagtttctgaagcacaaggtacggaagtcgattcttggagaggcagaaataatcgtgactacacttagtgggtgtggaggtgacatttatggagtttgctcggaaactgcttcatctaataaatatggtactttttcggagcatgcactgtttgatgttgttattattgatgaagctgcacaggccctggagccagcgaccctaattccccttcagattctgaaatcgagaggaactaaatgtataatggttggtgatccaaagcaactacctgccactgtgatgtctggattggctagcaagtttctttatgagtgcagcatgtttgaacgactacaaagagctggttacccagtgattatgctcactaaacagtatcgcatgcatccagagattagcaggtttccatctttacatttctacgaaaataaactgcttgatggtgtggaggtggctgataaatcagcttcatttcattttcatgagtgtcttggtccatacatgttttttgatattgctgacggacgtgaacattgtggaagaaatgctgctacacagtcactctgtaatgattttgaagctgatgcagctcttgaaatactgtcatttctaaataacagatatccattggagttcacctctaggaaaataggaatcattactccatacagaagccaactctctatactccgttcaaagttcacttcctcttttgggcctgagattgttgccgagatggaaataaacactgttgatggatttcaaggtcgtgaagttgatatcttgctgttgtcaactgttagagcctcaaattcttcagatgatagccatcgcactggtgaagcacgcagcattgggtttgttgcagatgttagacgtatgaatgtcgcactaacacgtgccaggctttctctatggattgttggaaatgcaagaactttgcggattaattcacactggaattccttagtatgtgacgctgaagaacggaatctgtttgtctcaattaaacggccatatggtttgatgtttgaaaagggccaacctcattccagaaatactcataggtacactagtcatcttaagcagaaggataacaaaaaagctgctttgatgagctcaaagagagttggtgttaaattccaggagcaaccaacacatgctataaggaatgtagaaaaagaaagtctatcaaaagaacaatcaaaatggacatcattatgggaccaaaagattcctggaactcaagagtccgttatgagatctagtgaagacaagtcacagaagcatagtggtaatatgagagtcaccaagtgttcactgcaagaaaacatggatcaggattttgttatcagaaaacaaatggatgataaaaaattggctgtacataatgataaacatctggggctttctaaaggcttggttaaacgaggtgatgatggctctattgtcacaatgaagacagaattgaatatgactgtggagcagaatctttgtaaggaaactaataaagcttcaactgaccaagagttgtttcagaattcaaaggtgaggacatgtaataaaaagagtgccagcgaaaacagcaagaaaaatgatgtttctccaccggcagttcctggtcagcagaagttgatacaaaagtcaaaagcaccaaggacggtttctgagaagcctagatgtgataatttaaatcatgaaaattatgatccagcgaataagaatgatggtgcttatccaccaacagaccctgatatgaagaaagctaataaggctagaggagctaggaagttttctgagcaaccaagacctgggaatttaactcaagtggatcttgcacgtccatctcattttgatgaagcaagtagccatgtgccagaactcaagaaaagccgatccagcaagttaactagtcaaaaagatttggttgcagaaagaaaacgacaacgcgaggatattgacactctgctttcgtcatctcttatatcatctacgaaaccttcctcaagtcgtaatactaagaaacagaaatgagaagactccagcaaagcttttgtgaagcaattttggtagcaatggtgcttggatcacgagtttccatcttccgaagcaagtagaggaaagctaactgcctgtaatctgggagctgtatgtgcagcaactgacaaacatccagtggacccaaggagccctccctccatacggttgcaaaagtgctggaattttttggacggctgttaatggtttattacgtcattttatttcccattttcatccgtttggatgcgagcaaaatgagaccatacagacaaatagagcaatcatactgcttgttgaggcgcaagccaattttgcagtgtacataactgtaagtagcacccttgtagcaagaaggcagattagcatttgaacatgcctggtggtgtccttaaaatgaaatgtagcatgtgtggtgtgcagccaaattacagccgaagctctttggccctcacgtctgtctccatggggttcagttgcttctgttggtgaatgatgatgactttggacgtgacgacgcgtgaggttctcattgggatcatcgataacacgagaaagttggagagaagagaggaaaaaaaaactgttgaatttgtgttacctacgtgttataagccaaatttgatgcacgctggggattcagtgagccatcctggcggggtgaat

SEQ ID NO: 69393 - DNA, 5685 bp, Zea Mays
atggcagacgttggacggctggagcacttggagcagagacgtcggcaaaaaccagagaggacagaggagagaattagggtttactggcggctgggagggtttctggcgggtttgtggttagccattcatgtcatgacacaaattgaacatcgtgggcttcaaaagcagtggacttgggaaccaatgatgggagaaagtttgatcttggcgctagtcgataataatgatgatgtgcggcaagttggaagagctctcttggaacatgtatctcaagcacggggtttgacttctgggcttcaatttctgtgctcgagtgcatcttcactcactgctgtttttctgggtctaagatatgtagttcaactggtgggaacaagatcagttttggcagattttagtagttttcatcacttgttttttgtcatatgcaaactacttaaggaggttgtcgttcaaagaccccaaattgcacagccagcgaaacctccagaagggggtttcttgcgacaaccctattcaagtgtcctagctagtccaccagaacatgctgtggatgttagtaactgggagaagttctgcactttgctttctgcaactctctggcctttcatttccacatgcctaagagaaggaaaggagctaataggtctcaaacagtgtcagatatcttgcgtccgtttgcttgagttgcttcctctggtctatgagagggtcaactcaaattgccgcaccctatcttgcagtacgacgacagtgtttcagaatcctatggatatttcatggtttattcatttggttcactggggaaaatcatctctccttgtgattatcagacattggaaacaatgcatgctctctttattgaaagaactaaaatgttcacatagcggtaccattcaatgctacattgaagatcttgacaatatcatttcacatgatgcagtaaatatcaatgaacttgaagagagagtttcaaatcttgaacttgtactgtccaaggaggttgccacaaaaattgaaaggagagggttagctgacttaccaatgtttaaagaaccaattgttagtgttccctctccagttcatgagagacattctggcatggacagttttgtggatgttgaaagcacaaagtcctcccatccaccagatgttcatgaaataattctcctttcagacagtgaggataatttactggcacctgacgtgtccagtgaggaggttttgtcatcagttatggagaatgatgcatccactgcttccaatatgttgaaagatgctacacctctagaacaaagtacgctgaacgacaatagacactcacctttagaaccacagatatgtcatcctgttagtaatattagtgcctcttctaaacctgtatcaacagatagtagggacaacattgctgccacaaaaggattacttcgaatgaaaaaaccgagaccgccaatgaacacaaataataattccacttcacccaaaatggttaaatcatctgttactggcacttctcaacaactgcatcctaaattgttgtcagatacagaaaaatttaaatccatcttcagggatatatctgatgatgaagatgatcctttagaccatgcacttgataattaccggaggccacaggttctttcaagaaagccttgtatattagttcccaagagacaagttgttcagcttccagtgcctgttggaagaaaaccaggttctggcagtagggttacaagtactcgacgacttcaaccacctaaactgggtagctggtttagaaacatattggaaatggactacttcgctgttgttgggttatcttctcctgagatagtaagaaaacctgctttaaaagaagttccggttgaaagagttgatgatttccttattgtccgtgcccgtcctgagcatagccagtcgatcaaattcagaggttgcacagagaatgatttagtactactcaccaaagatccactgaagaaccaaggacaacaagtccatgtgcttgggaaggtggagcggcgtgagagtgataaaaataaggcattgatttttgtgatgaagttctttctttctagtgacaatgcacgcctaaataaagtgaaacggtttcttgtggaaagcattagagtcatcatacaatgatagccagctccaagctctaagcattgccattggaccaacaagctctaaagcaaattttgatctgtcccttattcagggacctccaggtacaggtaaaacaagaacaatcgtagcaattgtaagtgcattgctatctttacatgcaggtgacccttacaagtcacagagaaatgagtacgtcggtagtactgattttacaaagccaagagcaaagattagccaatctgctgcagtaattagagcttggcaggatgcagcccttgctaaacaactggaaaaggattctcagaaagaatgtcctcgaacaacagagcggtttgtgaagggaagggctttagtttgtgcgcagtcaaatgctgcagttgatgagcttgtgtcaaggctcagtgagggattgtacagtgctgatggaaagctgtataagccttacatagtgagggttggtaatgcaaagacggtccattctaattcgttgcctttcttcattgacacacttgttgagcaaagattatcagatcagttgaacattaataatgatggcaaaaaatcatctgatgctgaatcctctagttcacttaggtctaaattggagaagattgtggacagaattagatattatgagtcaaggcaaaaactaattgagtctgataaaagtgaagatggttcttctgtacctggtgaaggtgaggcagatgaagtttccgatgaagcacttggtggaaagcttaactttttgtatgcacagaaaagggtagtttctgcagaactggccactgctcatgcccgtgaaaaagaaaatagctgatgaaaacaagtttctgaagcacaaggtacggaagtcgattcttggagaggcagaaataatcgtgactacacttagtgggtgtggaggtgacatttatggagtttgctcggaaactgcttcatctaataaatatggtactttttcggagcatgcactgtttgatgttgttattattgatgaagctgcacaggccctggagccagcgaccctaattccccttcagattctgaaatcgagaggaactaaatgtataatggttggtgatccaaagcaactacctgccactgtgatgtctggattggctagcaagtttctttatgagtgcagcatgtttgaacgactacaaagagctggttacccagtgattatgctcactaaacagtatcgcatgcatccagagattagcaggtttccatctttacatttctacgaaaataaactgcttgatggtgtggaggtggctgataaatcagcttcatttcattttcatgagtgtcttggtccatacatgttttttgatattgctgacggacgtgaacattgtggaagaaatgctgctacacagtcactctgtaatgattttgaagctgatgcagctcttgaaatactgtcatttctaaataacagatatccattggagttcacctctaggaaaataggaatcattactccatacagaagccaactctctatactccgttcaaagttcacttcctcttttgggcctgagattgttgccgagatggaaataaacactgttgatggatttcaaggtcgtgaagttgatatcttgctgttgtcaactgttagagcctcaaattcttcagatgatagccatcgcactggtgaagcacgcagcattgggtttgttgcagatgttagacgtatgaatgtcgcactaacacgtgccaggctttctctatggattgttggaaatgcaagaactttgcggattaattcacactggaattccttagtatgtgacgctgaagaacggaatctgtttgtctcaattaaacggccatatggtttgatgtttgaaaagggccaacctcattccagaaatactcataggtacactagtcatcttaagcagaaggataacaaaaaagctgctttgatgagctcaaagagagttggtgttaaattccaggagcaaccaacacatgctataaggaatgtagaaaaagaaagtctatcaaaagaacaatcaaaatggacatcattatgggaccaaaagattcctggaactcaagagtccgttatgagatctagtgaagacaagtcacagaagcatagtggtaatatgagagtcaccaagtgttcactgcaagaaaacatggatcaggattttgttatcagaaaacaaatggatgataaaaaattggctgtacataatgataaacatctggggctttctaaaggcttggttaaacgaggtgatgatggctctattgtcacaatgaagacagaattgaatatgactgtggagcagaatctttgtaaggaaactaataaagcttcaactgaccaagagttgtttcagaattcaaaggtgaggacatgtaataaaaagagtgccagcgaaaacagcaagaaaaatgatgtttctccaccggcagttcctggtcagcagaagttgatacaaaagtcaaaagcaccaaggacggtttctgagaagcctagatgtgataatttaaatcatgaaaattatgatccagcgaataagaatgatggtgcttatccaccaacagaccctgatatgaagaaagctaataaggctagaggagctaggaagttttctgagcaaccaagacctgggaatttaactcaagtggatcttgcacgtccatctcattttgatgaagcaagtagccatgtgccagaactcaagaaaagccgatccagcaagttaactagtcaaaaagatttggttgcagaaagaaaacgacaacgcgaggatattgacactctgctttcgtcatctcttatatcatctacgaaaccttcctcaagtcgtaatactaagaaacagaaatgagaagactccagcaaaggtggctaatgtcatgggtatggcagcttttgtgaagcaattttggtagcaatggtgcttggatcacgagtttccatcttccgaagcaagtagaggaaagctaactgcctgtaatctgggagctgtatgtgcagcaactgacaaacatccagtggacccaaggagccctccctccatacggttgcaaaagtgctggaattttttggacggctgttaatggtttattacgtcattttatttcccattttcatccgtttggatgcgagcaaaatgagaccatacagacaaatagagcaatcatactgcttgttgaggcgcaagccaattttgcagtgtacataactgtaagtagcacccttgtagcaagaaggcagattagcatttgaacatgcctggtggtgtccttaaaatgaaatgtagcatgtgtggtgtgcagccaaattacagccgaagctctttggccctcacgtctgtctccatggggttcagttgcttctgttggtgaatgatgatgactttggacgtgacgacgcgtgaggttctcattgggatcatcgataacacgagaaagttggagagaagagaggaaaaaaaaactgttgaatttgtgttacctacgtgttataagccaaatttgatgcacgctggggattcagtgagccatcctggcggggtgaat

SEQ ID NO: 69394 - DNA, 5686 bp, Zea Mays
atggcagacgttggacggctggagcacttggagcagagacgtcggcaaaaaccagagaggacagaggagagaattagggtttactggcggctgggagggtttctggcgggtttgtggttagccattcatgtcatgacacaaattgaacatcgtgggcttcaaaagcagtggacttgggaaccaatgatgggagaaagtttgatcttggcgctagtcgataataatgatgatgtgcggcaagttggaagagctctcttggaacatgtatctcaagcacggggtttgacttctgggcttcaatttctgtgctcgagtgcatcttcactcactgctgtttttctgggtctaagatatgtagttcaactggtgggaacaagatcagttttggcagattttagtagttttcatcacttgttttttgtcatatgcaaactacttaaggaggttgtcgttcaaagaccccaaattgcacagccagcgaaacctccagaagggggtttcttgcgacaaccctattcaagtgtcctagctagtccaccagaacatgctgtggatgttagtaactgggagaagttctgcactttgctttctgcaactctctggcctttcatttccacatgcctaagagaaggaaaggagctaataggtctcaaacagtgtcagatatcttgcgtccgtttgcttgagttgcttcctctggtctatgagagggtcaactcaaattgccgcaccctatcttgcagtacgacgacagtgtttcagaatcctatggatatttcatggtttattcatttggttcactggggaaaatcatctctccttgtgattatcagacattggaaacaatgcatgctctctttattgaaagaactaaaatgttcacatagcggtaccattcaatgctacattgaagatcttgacaatatcatttcacatgatgcagtaaatatcaatgaacttgaagagagagtttcaaatcttgaacttgtactgtccaaggaggttgccacaaaaattgaaaggagagggttagctgacttaccaatgtttaaagaaccaattgttagtgttccctctccagttcatgagagacattctggcatggacagttttgtggatgttgaaagcacaaagtcctcccatccaccagatgttcatgaaataattctcctttcagacagtgaggataatttactggcacctgacgtgtccagtgaggaggttttgtcatcagttatggagaatgatgcatccactgcttccaatatgttgaaagatgctacacctctagaacaaagtacgctgaacgacaatagacactcacctttagaaccacagatatgtcatcctgttagtaatattagtgcctcttctaaacctgtatcaacagatagtagggacaacattgctgccacaaaaggattacttcgaatgaaaaaaccgagaccgccaatgaacacaaataataattccacttcacccaaaatggttaaatcatctgttactggcacttctcaacaactgcatcctaaattgttgtcagatacagaaaaatttaaatccatcttcagggatatatctgatgatgaagatgatcctttagaccatgcacttgataattaccggaggccacaggttctttcaagaaagccttgtatattagttcccaagagacaagttgttcagcttccagtgcctgttggaagaaaaccaggttctggcagtagggttacaagtactcgacgacttcaaccacctaaactgggtagctggtttagaaacatattggaaatggactacttcgctgttgttgggttatcttctcctgagatagtaagaaaacctgctttaaaagaagttccgttgaaagagttgatgatttccttattgtccgtgcccgtcctgagcatagccagtcgatcaaattcagaggttgcacagagaatgatttagtactactcaccaaagatccactgaagaaccaaggacaacaagtccatgtgcttgggaaggtggagcggcgtgagagtgataaaaataaggcattgatttttgtgatgaagttctttctttctagtgacaatgcacgcctaaataaagtgaaacggtttcttgtggaaagaacattagagtcatcatacaatgatagccagctccaagctctaagcattgccattggaccaacaagctctaaagcaaattttgatctgtcccttattcagggacctccaggtacaggtaaaacaagaacaatcgtagcaattgtaagtgcattgctatctttacatgcaggtgacccttacaagtcacagagaaatgagtacgtcggtagtactgattttacaaagccaagagcaaagattagccaatctgctgcagtaattagagcttggcaggatgcagcccttgctaaacaactggaaaaggattctcagaaagaatgtcctcgaacaacagagcggtttgtgaagggaagggctttagtttgtgcgcagtcaaatgctgcagttgatgagcttgtgtcaaggctcagtgagggattgtacagtgctgatggaaagctgtataagccttacatagtgagggttggtaatgcaaagacggtccattctaattcgttgcctttcttcattgacacacttgttgagcaaagattatcagatcagttgaacattaataatgatggcaaaaaatcatctgatgctgaatcctctagttcacttaggtctaaattggagaagattgtggacagaattagatattatgagtcaaggcaaaaactaattgagtctgataaaagtgaagatggttcttctgtacctggtgaaggtgaggcagatgaagtttccgatgaagcacttggtggaaagcttaactttttgtatgcacagaaaagggtagtttctgcagaactggccactgctcatgcccgtgaaaaagaaaatagctgatgaaaacaagtttctgaagcacaaggtacggaagtcgattcttggagaggcagaaataatcgtgactacacttagtgggtgtggaggtgacatttatggagtttgctcggaaactgcttcatctaataaatatggtactttttcggagcatgcactgtttgatgttgttattattgatgaagctgcacaggccctggagccagcgaccctaattccccttcagattctgaaatcgagaggaactaaatgtataatggttggtgatccaaagcaactacctgccactgtgatgtctggattggctagcaagtttctttatgagtgcagcatgtttgaacgactacaaagagctggttacccagtgattatgctcactaaacagtatcgcatgcatccagagattagcaggtttccatctttacatttctacgaaaataaactgcttgatggtgtggaggtggctgataaatcagcttcatttcattttcatgagtgtcttggtccatacatgttttttgatattgctgacggacgtgaacattgtggaagaaatgctgctacacagtcactctgtaatgattttgaagctgatgcagctcttgaaatactgtcatttctaaataacagatatccattggagttcacctctaggaaaataggaatcattactccatacagaagccaactctctatactccgttcaaagttcacttcctcttttgggcctgagattgttgccgagatggaaataaacactgttgatggatttcaaggtcgtgaagttgatatcttgctgttgtcaactgttagagcctcaaattcttcagatgatagccatcgcactggtgaagcacgcagcattgggtttgttgcagatgttagacgtatgaatgtcgcactaacacgtgccaggctttctctatggattgttggaaatgcaagaactttgcggattaattcacactggaattccttagtatgtgacgctgaagaacggaatctgtttgtctcaattaaacggccatatggtttgatgtttgaaaagggccaacctcattccagaaatactcataggtacactagtcatcttaagcagaaggataacaaaaaagctgctttgatgagctcaaagagagttggtgttaaattccaggagcaaccaacacatgctataaggaatgtagaaaaagaaagtctatcaaaagaacaatcaaaatggacatcattatgggaccaaaagattcctggaactcaagagtccgttatgagatctagtgaagacaagtcacagaagcatagtggtaatatgagagtcaccaagtgttcactgcaagaaaacatggatcaggattttgttatcagaaaacaaatggatgataaaaaattggctgtacataatgataaacatctggggctttctaaaggcttggttaaacgaggtgatgatggctctattgtcacaatgaagacagaattgaatatgactgtggagcagaatctttgtaaggaaactaataaagcttcaactgaccaagagttgtttcagaattcaaaggtgaggacatgtaataaaaagagtgccagcgaaaacagcaagaaaaatgatgtttctccaccggcagttcctggtcagcagaagttgatacaaaagtcaaaagcaccaaggacggtttctgagaagcctagatgtgataatttaaatcatgaaaattatgatccagcgaataagaatgatggtgcttatccaccaacagaccctgatatgaagaaagctaataaggctagaggagctaggaagttttctgagcaaccaagacctgggaatttaactcaagtggatcttgcacgtccatctcattttgatgaagcaagtagccatgtgccagaactcaagaaaagccgatccagcaagttaactagtcaaaaagatttggttgcagaaagaaaacgacaacgcgaggatattgacactctgctttcgtcatctcttatatcatctacgaaaccttcctcaagtcgtaatactaagaaacagaaatgagaagactccagcaaaggtggctaatgtcatgggtatggcagcttttgtgaagcaattttggtagcaatggtgcttggatcacgagtttccatcttccgaagcaagtagaggaaagctaactgcctgtaatctgggagctgtatgtgcagcaactgacaaacatccagtggacccaaggagccctccctccatacggttgcaaaagtgctggaattttttggacggctgttaatggtttattacgtcattttatttcccattttcatccgtttggatgcgagcaaaatgagaccatacagacaaatagagcaatcatactgcttgttgaggcgcaagccaattttgcagtgtacataactgtaagtagcacccttgtagcaagaaggcagattagcatttgaacatgcctggtggtgtccttaaaatgaaatgtagcatgtgtggtgtgcagccaaattacagccgaagctctttggccctcacgtctgtctccatggggttcagttgcttctgttggtgaatgatgatgactttggacgtgacgacgcgtgaggttctcattgggatcatcgataacacgagaaagttggagagaagagaggaaaaaaaaactgttgaatttgtgttacctacgtgttataagccaaatttgatgcacgctggggattcagtgagccatcctggcggggtgaat

SEQ ID NO: 69395 - DNA, 5792 bp, Zea Mays
atggcagacgttggacggctggagcacttggagcagagacgtcggcaaaaaccagagaggacagaggagagaattagggtttactggcggctgggagggtttctggcgggtttgtggttagccattcatgtcatgacacaaattgaacatcgtgggcttcaaaagcagtggacttgggaaccaatgatgggagaaagtttgatcttggcgctagtcgataataatgatgatgtgcggcaagttggaagagctctcttggaacatgtatctcaagcacggggtttgacttctgggcttcaatttctgtgctcgagtgcatcttcactcactgctgtttttctgggtctaagatatgtagttcaactggtgggaacaagatcagttttggcagattttagtagttttcatcacttgttttttgtcatatgcaaactacttaaggaggttgtcgttcaaagaccccaaattgcacagccagcgaaacctccagaagggggtttcttgcgacaaccctattcaagtgtcctagctagtccaccagaacatgctgtggatgttagtaactgggagaagttctgcactttgctttctgcaactctctggcctttcatttccacatgcctaagagaaggaaaggagctaataggtctcaaacagtgtcagatatcttgcgtccgtttgcttgagttgcttcctctggtctatgagagggtcaactcaaattgccgcaccctatcttgcagtacgacgacagtgtttcagaatcctatggatatttcatggtttattcatttggttcactggggaaaatcatctctccttgtgattatcagacattggaaacaatgcatgctctctttattgaaagaactaaaatgttcacatagcggtaccattcaatgctacattgaagatcttgacaatatcatttcacatgatgcagtaaatatcaatgaacttgaagagagagtttcaaatcttgaacttgtactgtccaaggaggttgccacaaaaattgaaaggagagggttagctgacttaccaatgtttaaagaaccaattgttagtgttccctctccagttcatgagagacattctggcatggacagttttgtggatgttgaaagcacaaagtcctcccatccaccagatgttcatgaaataattctcctttcagacagtgaggataatttactggcacctgacgtgtccagtgaggaggttttgtcatcagttatggagaatgatgcatccactgcttccaatatgttgaaagatgctacacctctagaacaaagtacgctgaacgacaatagacactcacctttagaaccacagatatgtcatcctgttagtaatattagtgcctcttctaaacctgtatcaacagatagtagggacaacattgctgccacaaaaggattacttcgaatgaaaaaaccgagaccgccaatgaacacaaataataattccacttcacccaaaatggttaaatcatctgttactggcacttctcaacaactgcatcctaaattgttgtcagatacagaaaaatttaaatccatcttcagggatatatctgatgatgaagatgatcctttagaccatgcacttgataattaccggaggccacaggttctttcaagaaagccttgtatattagttcccaagagacaagttgttcagcttccagtgcctgttggaagaaaaccaggttctggcagtagggttacaagtactcgacgacttcaaccacctaaactgggtagctggtttagaaacatattggaaatggactacttcgctgttgttgggttatcttctcctgagatagtaagaaaacctgctttaaaagaagttccggtatgttttgattcaccagctcaatatgttgaaattttccagccattagttctagaagagttcaaggctcagttgcaaaatgcttatgttgagactccccctgatgacatgatgtgtggatgcgtatctattctcgcagttgaaagagttgatgatttccttattgtccgtgcccgtcctgagcatagccagtcgatcaaattcagaggttgcacagagaatgatttagtactactcaccaaagatccactgaagaaccaaggacaacaagtccatgtgcttgggaaggtggagcggcgtgagagtgataaaaataaggcattgatttttgtgatgaagttctttctttctagtgacaatgcacgcctaaataaagtgaaacggtttcttgtggaaagaacattagagtcatcatacaatgatagccagctccaagctctaagcattgccattggaccaacaagctctaaagcaaattttgatctgtcccttattcagggacctccaggtacaggtaaaacaagaacaatcgtagcaattgtaagtgcattgctatctttacatgcaggtgacccttacaagtcacagagaaatgagtacgtcggtagtactgattttacaaagccaagagcaaagattagccaatctgctgcagtaattagagcttggcaggatgcagcccttgctaaacaactggaaaaggattctcagaaagaatgtcctcgaacaacagagcggtttgtgaagggaagggctttagtttgtgcgcagtcaaatgctgcagttgatgagcttgtgtcaaggctcagtgagggattgtacagtgctgatggaaagctgtataagccttacatagtgagggttggtaatgcaaagacggtccattctaattcgttgcctttcttcattgacacacttgttgagcaaagattatcagatcagttgaacattaataatgatggcaaaaaatcatctgatgctgaatcctctagttcacttaggtctaaattggagaagattgtggacagaattagatattatgagtcaaggcaaaaactaattgagtctgataaaagtgaagatggttcttctgtacctggtgaaggtgaggcagatgaagtttccgatgaagcacttggtggaaagcttaactttttgtatgcacagaaaagggtagtttctgcagaactggccactgctcatgcccgtgaaaaagaaaatagctgatgaaaacaagtttctgaagcacaaggtacggaagtcgattcttggagaggcagaaataatcgtgactacacttagtgggtgtggaggtgacatttatggagtttgctcggaaactgcttcatctaataaatatggtactttttcggagcatgcactgtttgatgttgttattattgatgaagctgcacaggccctggagccagcgaccctaattccccttcagattctgaaatcgagaggaactaaatgttggtgatccaaagcaactacctgccactgtgatgtctggattggctagcaagtttctttatgagtgcagcatgtttgaacgactacaaagagctggttacccagtgattatgctcactaaacagtatcgcatgcatccagagattagcaggtttccatctttacatttctacgaaaataaactgcttgatggtgtggaggtggctgataaatcagcttcatttcattttcatgagtgtcttggtccatacatgttttttgatattgctgacggacgtgaacattgtggaagaaatgctgctacacagtcactctgtaatgattttgaagctgatgcagctcttgaaatactgtcatttctaaataacagatatccattggagttcacctctaggaaaataggaatcattactccatacagaagccaactctctatactccgttcaaagttcacttcctcttttgggcctgagattgttgccgagatggaaataaacactgttgatggatttcaaggtcgtgaagttgatatcttgctgttgtcaactgttagagcctcaaattcttcagatgatagccatcgcactggtgaagcacgcagcattgggtttgttgcagatgttagacgtatgaatgtcgcactaacacgtgccaggctttctctatggattgttggaaatgcaagaactttgcggattaattcacactggaattccttagtatgtgacgctgaagaacggaatctgtttgtctcaattaaacggccatatggtttgatgtttgaaaagggccaacctcattccagaaatactcataggtacactagtcatcttaagcagaaggataacaaaaaagctgctttgatgagctcaaagagagttggtgttaaattccaggagcaaccaacacatgctataaggaatgtagaaaaagaaagtctatcaaaagaacaatcaaaatggacatcattatgggaccaaaagattcctggaactcaagagtccgttatgagatctagtgaagacaagtcacagaagcatagtggtaatatgagagtcaccaagtgttcactgcaagaaaacatggatcaggattttgttatcagaaaacaaatggatgataaaaaattggctgtacataatgataaacatctggggctttctaaaggcttggttaaacgaggtgatgatggctctattgtcacaatgaagacagaattgaatatgactgtggagcagaatctttgtaaggaaactaataaagcttcaactgaccaagagttgtttcagaattcaaaggtgaggacatgtaataaaaagagtgccagcgaaaacagcaagaaaaatgatgtttctccaccggcagttcctggtcagcagaagttgatacaaaagtcaaaagcaccaaggacggtttctgagaagcctagatgtgataatttaaatcatgaaaattatgatccagcgaataagaatgatggtgcttatccaccaacagaccctgatatgaagaaagctaataaggctagaggagctaggaagttttctgagcaaccaagacctgggaatttaactcaagtggatcttgcacgtccatctcattttgatgaagcaagtagccatgtgccagaactcaagaaaagccgatccagcaagttaactagtcaaaaagatttggttgcagaaagaaaacgacaacgcgaggatattgacactctgctttcgtcatctcttatatcatctacgaaaccttcctcaagtcgtaatactaagaaacagaaatgagaagactccagcaaagcttttgtgaagcaattttggtagcaatggtgcttggatcacgagtttccatcttccgaagcaagtagaggaaagctaactgcctgtaatctgggagctgtatgtgcagcaactgacaaacatccagtggacccaaggagccctccctccatacggttgcaaaagtgctggaattttttggacggctgttaatggtttattacgtcattttatttcccattttcatccgtttggatgcgagcaaaatgagaccatacagacaaatagagcaatcatactgcttgttgaggcgcaagccaattttgcagtgtacataactgtaagtagcacccttgtagcaagaaggcagattagcatttgaacatgcctggtggtgtccttaaaatgaaatgtagcatgtgtggtgtgcagccaaattacagccgaagctctttggccctcacgtctgtctccatggggttcagttgcttctgttggtgaatgatgatgactttggacgtgacgacgcgtgaggttctcattgggatcatcgataacacgagaaagttggagagaagagaggaaaaaaaaactgttgaatttgtgttacctacgtgttataagccaaatttgatgcacgctggggattcagtgagccatcctggcggggtgaat

SEQ ID NO: 69396 - DNA, 5995 bp, Zea Mays
cgactaatcggtcctggtcgacctctggtcgtcctatagatttaaggacatatgtatatgtatataactatatattaactatataagcactgcatttctgcaataatataggcataattagtagcagactagcagtaatttctgcaataatatagactgctcaaacagaggtctgcaggtgcaccttcagatgacgagctaccagtggtaatagagggaagggagaccgggagataatcagagaagggagagcaggtgctaccttcagatgacgagctcatcttcaattcttgactaggtgacaaacatcggagcactgtagtactggacgccgatggcagacgttggacggctggagcacttggagcagagacgtcggcaaaaaccagagaggacagaggagagaattagggtttactggcggctgggagggtttctggcgggtttgtggttagccattcatgtcatgacacaaattgaacatcgtgggcttcaaaagcagtggacttgggaaccaatgatgggagaaagtttgatcttggcgctagtcgataataatgatgatgtgcggcaagttggaagagctctcttggaacatgtatctcaagcacggggtttgacttctgggcttcaatttctgtgctcgagtgcatcttcactcactgctgtttttctgggtctaagatatgtagttcaactggtgggaacaagatcagttttggcagattttagtagttttcatcacttgttttttgtcatatgcaaactacttaaggaggttgtcgttcaaagaccccaaattgcacagccagcgaaacctccagaagggggtttcttgcgacaaccctattcaagtgtcctagctagtccaccagaacatgctgtggatgttagtaactgggagaagttctgcactttgctttctgcaactctctggcctttcatttccacatgcctaagagaaggaaaggagctaataggtctcaaacagtgtcagatatcttgcgtccgtttgcttgagttgcttcctctggtctatgagagggtcaactcaaattgccgcaccctatcttgcagtacgacgacagtgtttcagaatcctatggatatttcatggtttattcatttggttcactggggaaaatcatctctccttgtgattatcagacattggaaacaatgcatgctctctttattgaaagaactaaaatgttcacatagcggtaccattcaatgctacattgaagatcttgacaatatcatttcacatgatgcagtaaatatcaatgaacttgaagagagagtttcaaatcttgaacttgtactgtccaaggaggttgccacaaaaattgaaaggagagggttagctgacttaccaatgtttaaagaaccaattgttagtgttccctctccagttcatgagagacattctggcatggacagttttgtggatgttgaaagcacaaagtcctcccatccaccagatgttcatgaaataattctcctttcagacagtgaggataatttactggcacctgacgtgtccagtgaggaggttttgtcatcagttatggagaatgatgcatccactgcttccaatatgttgaaagatgctacacctctagaacaaagtacgctgaacgacaatagacactcacctttagaaccacagatatgtcatcctgttagtaatattagtgcctcttctaaacctgtatcaacagatagtagggacaacattgctgccacaaaaggattacttcgaatgaaaaaaccgagaccgccaatgaacacaaataataattccacttcacccaaaatggttaaatcatctgttactggcacttctcaacaactgcatcctaaattgttgtcagatacagaaaaatttaaatccatcttcagggatatatctgatgatgaagatgatcctttagaccatgcacttgataattaccggaggccacaggttctttcaagaaagccttgtatattagttcccaagagacaagttgttcagcttccagtgcctgttggaagaaaaccaggttctggcagtagggttacaagtactcgacgacttcaaccacctaaactgggtagctggtttagaaacatattggaaatggactacttcgctgttgttgggttatcttctcctgagatagtaagaaaacctgctttaaaagaagttccgttgaaagagttgatgatttccttattgtccgtgcccgtcctgagcatagccagtcgatcaaattcagaggttgcacagagaatgatttagtactactcaccaaagatccactgaagaaccaaggacaacaagtccatgtgcttgggaaggtggagcggcgtgagagtgataaaaataaggcattgatttttgtgatgaagttctttctttctagtgacaatgcacgcctaaataaagtgaaacggtttcttgtggaaagaacattagagtcatcatacaatgatagccagctccaagctctaagcattgccattggaccaacaagctctaaagcaaattttgatctgtcccttattcagggacctccaggtacaggtaaaacaagaacaatcgtagcaattgtaagtgcattgctatctttacatgcaggtgacccttacaagtcacagagaaatgagtacgtcggtagtactgattttacaaagccaagagcaaagattagccaatctgctgcagtaattagagcttggcaggatgcagcccttgctaaacaactggaaaaggattctcagaaagaatgtcctcgaacaacagagcggtttgtgaagggaagggctttagtttgtgcgcagtcaaatgctgcagttgatgagcttgtgtcaaggctcagtgagggattgtacagtgctgatggaaagctgtataagccttacatagtgagggttggtaatgcaaagacggtccattctaattcgttgcctttcttcattgacacacttgttgagcaaagattatcagatcagttgaacattaataatgatggcaaaaaatcatctgatgctgaatcctctagttcacttaggtctaaattggagaagattgtggacagaattagatattatgagtcaaggcaaaaactaattgagtctgataaaagtgaagatggttcttctgtacctggtgaaggtgaggcagatgaagtttccgatgaagcacttggtggaaagcttaactttttgtatgcacagaaaagggtagtttctgcagaactggccactgctcatgcccgtgaaaaagaaaatagctgatgaaaacaagtttctgaagcacaaggtacggaagtcgattcttggagaggcagaaataatcgtgactacacttagtgggtgtggaggtgacatttatggagtttgctcggaaactgcttcatctaataaatatggtactttttcggagcatgcactgtttgatgttgttattattgatgaagctgcacaggccctggagccagcgaccctaattccccttcagattctgaaatcgagaggaactaaatgtataatggttggtgatccaaagcaactacctgccactgtgatgtctggattggctagcaagtttctttatgagtgcagcatgtttgaacgactacaaagagctggttacccagtgattatgctcactaaacagtatcgcatgcatccagagattagcaggtttccatctttacatttctacgaaaataaactgcttgatggtgtggaggtggctgataaatcagcttcatttcattttcatgagtgtcttggtccatacatgttttttgatattgctgacggacgtgaacattgtggaagaaatgctgctacacagtcactctgtaatgattttgaagctgatgcagctcttgaaatactgtcatttctaaataacagatatccattggagttcacctctaggaaaataggaatcattactccatacagaagccaactctctatactccgttcaaagttcacttcctcttttgggcctgagattgttgccgagatggaaataaacactgttgatggatttcaaggtcgtgaagttgatatcttgctgttgtcaactgttagagcctcaaattcttcagatgatagccatcgcactggtgaagcacgcagcattgggtttgttgcagatgttagacgtatgaatgtcgcactaacacgtgccaggctttctctatggattgttggaaatgcaagaactttgcggattaattcacactggaattccttagtatgtgacgctgaagaacggaatctgtttgtctcaattaaacggccatatggtttgatgtttgaaaagggccaacctcattccagaaatactcataggtacactagtcatcttaagcagaaggataacaaaaaagctgctttgatgagctcaaagagagttggtgttaaattccaggagcaaccaacacatgctataaggaatgtagaaaaagaaagtctatcaaaagaacaatcaaaatggacatcattatgggaccaaaagattcctggaactcaagagtccgttatgagatctagtgaagacaagtcacagaagcatagtggtaatatgagagtcaccaagtgttcactgcaagaaaacatggatcaggattttgttatcagaaaacaaatggatgataaaaaattggctgtacataatgataaacatctggggctttctaaaggcttggttaaacgaggtgatgatggctctattgtcacaatgaagacagaattgaatatgactgtggagcagaatctttgtaaggaaactaataaagcttcaactgaccaagagttgtttcagaattcaaaggtgaggacatgtaataaaaagagtgccagcgaaaacagcaagaaaaatgatgtttctccaccggcagttcctggtcagcagaagttgatacaaaagtcaaaagcaccaaggacggtttctgagaagcctagatgtgataatttaaatcatgaaaattatgatccagcgaataagaatgatggtgcttatccaccaacagaccctgatatgaagaaagctaataaggctagaggagctaggaagttttctgagcaaccaagacctgggaatttaactcaagtggatcttgcacgtccatctcattttgatgaagcaagtagccatgtgccagaactcaagaaaagccgatccagcaagttaactagtcaaaaagatttggttgcagaaagaaaacgacaacgcgaggatattgacactctgctttcgtcatctcttatatcatctacgaaaccttcctcaagtcgtaatactaagaaacagaaatgagaagactccagcaaagcttttgtgaagcaattttggtagcaatggtgcttggatcacgagtttccatcttccgaagcaagtagaggaaagctaactgcctgtaatctgggagctgtatgtgcagcaactgacaaacatccagtggacccaaggagccctccctccatacggttgcaaaagtgctggaattttttggacggctgttaatggtttattacgtcattttatttcccattttcatccgtttggatgcgagcaaaatgagaccatacagacaaatagagcaatcatactgcttgttgaggcgcaagccaattttgcagtgtacataactgtaagtagcacccttgtagcaagaaggcagattagcatttgaacatgcctggtggtgtccttaaaatgaaatgtagcatgtgtggtgtgcagccaaattacagccgaagctctttggccctcacgtctgtctccatggggttcagttgcttctgttggtgaatgatgatgactttggacgtgacgacgcgtgaggttctcattgggatcatcgataacacgagaaagttggagagaagagaggaaaaaaaaactgttgaatttgtgttacctacgtgttataagccaaatttgatgcacgctggggattcagtgagccatcctggcggggtgaat

SEQ ID NO: 69397 - DNA, 1500 bp, Zea Mays
  misc_feature (1499)..(1500): n is a, c, g, or t
atggcggcggcgcggcggatcgacctggccgaccgttggcgcaggatgcaggaggacgaggacgccgatgacggcggcgagtcgtccgccgccaagcaccggcgactcatccgcgccaaggaggagtggttttcacattgctatacctttctgataaatttaccaaaagaagatcatatttggtgtggatatgctgatatcatgagccccttcatggagacattccatggcttctttgatgatgaagatgagaactcatctcttcgaataatgtggacaagagtttcccgagaaatgggcatttgcacacaatgtgtatgtgaacaccaccaggcacaaggatttttcaataccgaatatcagtcagatactgttgatccccttctgaaagtattgcggcttcttgatgaagagaggataacaggacatcttatacatatcaacacaaagcttcagctcaaagaatatgacccttcatgccatggtgcagaagttgttagcataatgtttgaagttctgatgtatcctgttctgttggatgaccaatcattggctaatcaatttcagatgttcattgaaaaaattgatgagacgtacgaagtgagcctttcaactaatcagcaataccccggtgtctatgccctacttttcttcaaaagctgtaaagctcgggctattgggcttcgattagctcgatccatggggaagctgaggagggcagttgatttggagccattgcaacccttattacaaaagtatattatctttttggaagcggaagtccttccatctacttcagaacattcgagacctagggtgcagctcaaaagagccgatgtatggcttggatttaaatcactgtatccttggatttcttgaggctccagcttttgaagatggaattctggaaaagtacccattcctgaatattgtacttaaccatgtcagtgatgacacatctgatttgtcgtgtgctgtaagttgcctcaaggcatcatttgaaatgctcggttgcaagctttggctgagaacaacactatcacctagtgttatgcggaacacattattgggtcactgttttcatacgcataccgagaaaagtcacaaagaaatttttgatcttttcctcccatttcttcagtcacttgaagcgctacaagacggtgaacatgaaaagcaaaggaggaacattttgtattttcttcttcatcaagttactcggagtagtaatttcagtgccttgatgagaaaaactgcgactaagattgcacttcttattgtacaaagaggctacacaatgaaccctccatgcccaccttccgaatgcgcccatatgtggggcccatctttgatcagttcggtagaggatacatccttacatgtttcattgcggcagcctgcacttgttctcatttatattatcataatttctgatgcttctgcgttgatttactataaattgaaatatggagctgttcaaaaggtcaatgtaagcaatnn

SEQ ID NO: 69398 - DNA, 2595 bp, Zea Mays
  misc_feature (2594)..(2595): n is a, c, g, or t
atggcggcggcgcggcggatcgacctggccgaccgttggcgcaggatgcaggaggacgaggacgccgatgacggcggcgagtcgtccgccgccaagcaccggcgactcatccgcgccaaggaggagtggttttcacattgctatacctttctgataaatttaccaaaagaagatcatatttggtgtggatatgctgatatcatgagccccttcatggagacattccatggcttctttgatgatgaagatgagaactcatctcttcgaataatgtggacaagagtttcccgagaaatgggcatttgcacacaatgtgtatgtgaacaccaccaggcacaaggatttttcaataccgaatatcagtcagatactgttgatccccttctgaaagtattgcggcttcttgatgaagagaggataacaggacatcttatacatatcaacacaaagcttcagctcaaagaatatgacccttcatgccatggtgcagaagttgttagcataatgtttgaagttctgatgtatcctgttctgttggatgaccaatcattggctaatcaatttcagatgttcattgaaaaaattgatgagacgtacgaagtgagcctttcaactaatcagcaataccccggtgtctatgccctacttttcttcaaaagctgtaaagctcgggctattgggcttcgattagctcgatccatggggaagctgaggagggcagttgatttggagccattgcaacccttattacaaaagtatattatctttttggaagcggaagtccttccatctacttcagaacattcgagacctagggtgcagctcaaaagagccgatgtatggcttggatttaaatcactgtatccttggatttcttgaggctccagcttttgaagatggaattctggaaaagtacccattcctgaatattgtacttaaccatgtcagtgatgacacatctgatttgtcgtgtgctgtaagttgcctcaaggcatcatttgaaatgctcggttgcaagctttggctgagaacaacactatcacctagtgttatgcggaacacattattgggtcactgttttcatacgcataccgagaaaagtcacaaagaaatttttgatcttttcctcccatttcttcagtcacttgaagcgctacaagacggtgaacatgaaaagcaaaggaggaacattttgtattttcttcttcatcaagttactcggagtagtaatttcagtgccttgatgagaaaaactgcgactaagattgcacttcttattgtacaaagaggctacacaatgaaccctccatgcccaccttccgaatgcgcccatatgtggtaatgaacacagatgcttattctgacaatagtttatgcattggattgctcattatgatgtattgaggtcatctgtaatagttcatggtgatgctatttagtcgaagcagaaaggaaaccaatgatttgttgcccacataatttctcattcatagcagatatgctattaatgtttcttggattgttatgtcgagaaaggagcctcacgttcttctcaaattggatatctctaaggcgtttgattctgtcttggccttttctcatagaggtcttgagacacttgggattcgagccctgttggcgcaacttggtttgcctcctgtcaacatcatcaactaagatccttataaatggtgagcctggctgtagcatttcccatctcaagggcctccgtcagggagatcctttgtcaccgatgctcttcattctagtcatggatgtactgaactccctatttaattgtgctgtccaagaaggtctcttgcagccacttgcagttcagcagtgccaacatcggatttcattctatggggatgacgtggttttatttctacgacctattgagagtgaacccttattggttaaggaacttctgaaggtttttggtcaggcaacaggtctggtcacaaatatagctaaaagctcagccacacctattcagtgcaacgtggaggaacgatctctgattactaacaccctggagtgtgacatcaaggattttccttgtaattatttaggccttccattgagcgttcataaactcccaaggtctgaacttcacaagctggttgacaaggttgcaaataatctcccaaattggaagggagttctcatgaataagtttgtcgattggtcacggtcaaggctgtcctatccgcccttaatatttatcatatgactgctcttgacttacctaagtgggtgttcaaagcaattgacaagaagtgcagaggctttctttgggtcggtaaagaggaagctaagggaggaaattgtttgatttattgggattcggtgcaacgtggcctccgggcaagatggctttggcttcaaaaaactgaaccttgcaggccttggagtggactgccaggtgccgggcccatctttgatcagttcggtagaggatacatccttacatgtttcattgcggcagcctgcacttgttctcatttatattatcataatttctgatgcttctgcgttgatttactataaattgaaatatggagctgttcaaaaggtcaatgtaagcaatnn

SEQ ID NO: 69399 - DNA, 1657 bp, Zea Mays
  misc_feature (1656)..(1657): n is a, c, g, or t
gcccggcagataccataccattcgcaaatccttccgttccgaaaccgcactcccgcgctctcgcattcacgtctctatcccgcgcgctcgctcgccgtcttgccgaaaccctagaaccacgccgggccggcaccgatcacggaccggcgccgtccgcggcgatggcggcggcgcggcggatcgacctggccgaccgttggcgcaggatgcaggaggacgaggacgccgatgacggcggcgagtcgtccgccgccaagcaccggcgactcatccgcgccaaggaggagtggttttcacattgctatacctttctgataaatttaccaaaagaagatcatatttggtgtggatatgctgatatcatgagccccttcatggagacattccatggcttctttgatgatgaagatgagaactcatctcttcgaataatgtggacaagagtttcccgagaaatgggcatttgcacacaatgtgtatgtgaacaccaccaggcacaaggatttttcaataccgaatatcagtcagatactgttgatccccttctgaaagtattgcggcttcttgatgaagagaggataacaggacatcttatacatatcaacacaaagcttcagctcaaagaatatgacccttcatgccatggtgcagaagttgttagcataatgtttgaagttctgatgtatcctgttctgttggatgaccaatcattggctaatcaatttcagatgttcattgaaaaaattgatgagacgtacgaagtgagcctttcaactaatcagcaataccccggtgtctatgccctacttttcttcaaaagctgtaaagctcgggctattgggcttcgattagctcgatccatggggaagctgaggagggcagttgatttggagccattgcaacccttattacaaaagtatattatctttttggaagcggaagtccttccatctacttcagaacattcgagacctagggtgcagctcaaaagagccgatgtatggcttggatttaaatcactccttggatttcttgaggctccagcttttgaagatggaattctggaaaagtacccattcctgaatattgtacttaaccatgtcagtgatgacacatctgatttgtcgtgtgctgtaagttgcctcaaggcatcatttgaaatgctcggttgcaagctttggctgagaacaacactatcacctagtgttatgcggaacacattattgggtcactgttttcatacgcataccgagaaaagtcacaaagaaatttttgatcttttcctcccatttcttcagtcacttgaagcgctacaagacggtgaacatgaaaagcaaaggaggaacattttgtattttcttcttcatcaagttactcggagtagtaatttcagtgccttgatgagaaaaactgcgactaagattgcacttcttattgtacaaagaggctacacaatgaaccctccatgcccaccttccgaatgcgcccatatgtggggcccatctttgatcagttcggtagaggatacatccttacatgtttcattgcggcagcctgcacttgttctcatttatattatcataatttctgatgcttctgcgttgatttactataaattgaaatatggagctgttcaaaaggtcaatgtaagcaatnn

SEQ ID NO: 69400 - DNA, 2747 bp, Zea Mays
  misc_feature (2746)..(2747): n is a, c, g, or t
gcccggcagataccataccattcgcaaatccttccgttccgaaaccgcactcccgcgctctcgcattcacgtctctatcccgcgcgctcgctcgccgtcttgccgaaaccctagaaccacgccgggccggcaccgatcacggaccggcgccgtccgcggcgatggcggcggcgcggcggatcgacctggccgaccgttggcgcaggatgcaggaggacgaggacgccgatgacggcggcgagtcgtccgccgccaagcaccggcgactcatccgcgccaaggaggagtggttttcacattgctatacctttctgataaatttaccaaaagaagatcatatttggtgtggatatgctgatatcatgagccccttcatggagacattccatggcttctttgatgatgaagatgagaactcatctcttcgaataatgtggacaagagtttcccgagaaatgggcatttgcacacaatgtgtatgtgaacaccaccaggcacaaggatttttcaataccgaatatcagtcagatactgttgatccccttctgaaagtattgcggcttcttgatgaagagaggataacaggacatcttatacatatcaacacaaagcttcagctcaaagaatatgacccttcatgccatggtgcagaagttgttagcataatgtttgaagttctgatgtatcctgttctgttggatgaccaatcattggctaatcaatttcagatgttcattgaaaaaattgatgagacgtacgaagtgagcctttcaactaatcagcaataccccggtgtctatgccctacttttcttcaaaagctgtaaagctcgggctattgggcttcgattagctcgatccatggggaagctgaggagggcagttgatttggagccattgcaacccttattacaaaagtatattatctttttggaagcggaagtccttccatctacttcagaacattcgagacctagggtgcagctcaaaagagccgatgtatggcttggatttaaatcactccttggatttcttgaggctccagcttttgaagatggaattctggaaaagtacccattcctgaatattgtacttaaccatgtcagtgatgacacatctgatttgtcgtgtgctgtaagttgcctcaaggcatcatttgaaatgctcggttgcaagctttggctgagaacaacactatcacctagtgttatgcggaacacattattgggtcactgttttcatacgcataccgagaaaagtcacaaagaaatttttgatcttttcctcccatttcttcagtcacttgaagcgctacaagacggtgaacatgaaaagcaaaggaggaacattttgtattttcttcttcatcaagttactcggagtagtaatttcagtgccttgatgagaaaaactgcgactaagattgcacttcttattgtacaaagaggctacacaatgaaccctccatgcccaccttccgaatgcgcccatatgtggtaatgaacacagatgcttattctgacaatagtttatgcattggattgctcattatgatgtattgaggtcatctgtaatagttcatggtgatgctatttagtcgaagcagaaaggaaaccaatgatttgttgcccacataatttctcattcatagcagatatgctattaatgtttcttggattgttatgtcgagaaaggagcctcacgttcttctcaaattggatatctctaaggcgtttgattctgtcttggccttttctcatagaggtcttgagacacttgggattcgagccctgttggcgcaacttggtttgcctcctgtcaacatcatcaactaagatccttataaatggtgagcctggctgtagcatttcccatctcaagggcctccgtcagggagatcctttgtcaccgatgctcttcattctagtcatggatgtactgaactccctatttaattgtgctgtccaagaaggtctcttgcagccacttgcagttcagcagtgccaacatcggatttcattctatggggatgacgtggttttatttctacgacctattgagagtgaacccttattggttaaggaacttctgaaggtttttggtcaggcaacaggtctggtcacaaatatagctaaaagctcagccacacctattcagtgcaacgtggaggaacgatctctgattactaacaccctggagtgtgacatcaaggattttccttgtaattatttaggccttccattgagcgttcataaactcccaaggtctgaacttcacaagctggttgacaaggttgcaaataatctcccaaattggaagggagttctcatgaataagtttgtcgattggtcacggtcaaggctgtcctatccgcccttaatatttatcatatgactgctcttgacttacctaagtgggtgttcaaagcaattgacaagaagtgcagaggctttctttgggtcggtaaagaggaagctaagggaggaaattgtttgatttattgggattcggtgcaacgtggcctccgggcaagatggctttggcttcaaaaaactgaaccttgcaggccttggagtggactgccaggggcccatctttgatcagttcggtagaggatacatccttacatgtttcattgcggcagcctgcacttgttctcatttatattatcataatttctgatgcttctgcgttgatttactataaattgaaatatggagctgttcaaaaggtcaatgtaagcaatnn

SEQ ID NO: 69401 - DNA, 1648 bp, Zea Mays
  misc_feature (1647)..(1648): n is a, c, g, or t
gaaaacaacacgaaattcggctactgcgccgggcgcgagaacgcgcagcgtacttcccccaaagtggcgggcacggaggagcggttccgggcaaggggccgccattgcctataacctcgcccggcagataccataccattcgcaaatccttccgttccgaaaccgcactcccgcgctctcgcattcacgtctctatcccgcgcgctcgctcgccgtcttgccgaaaccctagaaccacgccgggccggcaccgatcacggaccggcgccgtccgcggcgatggcggcggcgcggcggatcgacctggccgaccgttggcgcaggatgcaggaggacgaggacgccgatgacggcggcgagtcgtccgccgccaagcaccggcgactcatccgcgccaaggaggagtggttttcacattgctatacctttctgataaatttaccaaaagaagatcatatttggtgtggatatgctgatatcatgagccccttcatggagacattccatggcttctttgatgatgaagatgagaactcatctcttcgaataatgtggacaagagtttcccgagaaatgggcatttgcacacaatgtgtatgtgaacaccaccaggcacaaggatttttcaataccgaatatcagtcagatactgttgatccccttctgaaagtattgcggcttcttgatgaagagaggataacaggacatcttatacatatcaacacaaagcttcagctcaaagaatatgacccttcatgccatggtgcagaagttgttagcataatgtttgaagttctgatgtatcctgttctgttggatgaccaatcattggctaatcaatttcagatgttcattgaaaaaattgatgagacgtacgaagtgagcctttcaactaatcagcaataccccggtgtctatgccctacttttcttcaaaagctgtaaagctcgggctattgggcttcgattagctcgatccatggggaagctgaggagggcagttgatttggagccattgcaacccttattacaaaagtatattatctttttggaagcggaagtccttccatctacttcagaacattcgagacctagggtgcagctcaaaagagccgatgtatggcttggatttaaatcactgtatccttggatttcttgaggctccagcttttgaagatggaattctggaaaagtacccattcctgaatattgtacttaaccatgtcagtgatgacacatctgatttgtcgtgtgctgtaagttgcctcaaggcatcatttgaaatgctcgtcacttgaagcgctacaagacggtgaacatgaaaagcaaaggaggaacattttgtattttcttcttcatcaagttactcggagtagtaatttcagtgccttgatgagaaaaactgcgactaagattgcacttcttattgtacaaagaggctacacaatgaaccctccatgcccaccttccgaatgcgcccatatgtggggcccatctttgatcagttcggtagaggatacatccttacatgtttcattgcggcagcctgcacttgttctcatttatattatcataatttctgatgcttctgcgttgatttactataaattgaaatatggagctgttcaaaaggtcaatgtaagcaatnn

SEQ ID NO: 69402 - DNA, 5189 bp, Zea Mays
aaacaaagaaaaaaaggacgaggctctcctctggagagttccataacttccatctgagatctgacactttgcctttggatgcttctggcttcctccgcccccggtcctcttctagtcgcttcgtcttccatcgctttcctcatctctgcatcattctttcttagttgctttgtctttcgtcgccttccttatctactttgcttcagcctaaacgctttgtctactgccgccttactcatccgctctgattgtttagtgagatacatatttttcccactccttgctggtccgatccgttttggtggatatgttatgaggtttccatgtgcccatttttacacctgcttcgtttctatcagtttctttgccgtctcagcttcctcgtcaagttttttttccaatgtttcttttttccaagttatttacttccgccatattcgctatccggcgtatcctagcttggggattattgattcggctttatccggtgtcttccacttccacaatattctctacactcacgtttcctttatgtgctcgaagtatgtttattttttcgtcgagctgcgtcctttcgaccatgtcaagcgtcttctagcctagagcttgcttcgaccatgtctggcgtcttccagttccacgacattctcttcaattgtgtttttccgtgcttctatcgcttgctcggtgaagcttgtatgcatttctattttggagcatgaatggtgtggtcctacttattgatattcgtctggtaacacaatcgggaaggtgactttccatttggcatgcctttattatttcacaggcatccccttctttgcagacctccatttttggctgcctccaatgtcactatgacgtgttattttgttgttttcctttgggcgctgcattccatctctctatccttcatattgcttctttgttttctttacaatttttaagttactcttggtttttacccttcgatcctttctgtgctctaatgtatgaggtggaaaggcttgtcactactagatttgtttaggttttttcctacagcatgggaggcttccatatcttgatttgcaacatggaagtgtgtgtttcttgtttagtctactttatatggaaatagagtctggaaaagtcaattttttcctttgggtgccccttcaacattgtgctccccactcttgttcctttttatggctttgaatctatgatgtgcagagtttattttctttttcagtgtttcagcattttttaaaatagaaaactcgctgcattcccttgggccaatcgattctacattcgattcctctatgatttacaatctaagctaggatgtgcatattttggttttctttttccctagattttttcataagcctcgctgcattccctctgggcaatagagcggctgttgtagtgataaacctccaaatacatgacctgttaggattgtttctaattatttgtagccacgctattcttcaactttcgattctttcaattcgtcagagggcaagtttgctatttttccttcttttttatatgtaacttagatcagtttatggaaacaaatcagcagaaaagggtgacacgaccacctcattgacaaagaaagattcattttggaacggtgctgggtagtaccatgctcctagacaacaccaacgtggttcacaactgaaactatatatggtaccatcaaaacatgttttcacgatgttatgaggtcagattacaaatagaccatgttagcccaagcatgaaaagaaaggcgagtgtaaactgtaacctggtcacgggctcagggccgcgcccgaacttcacacgaccggaccaattcgcatcggcatcgaacacctctgccctctgtaaggagacccaaccccaccgcgcgcatccatgcccccaacgacggcggtgcgtcgggctccctcgccgcacgccgcgggcggagcgaggctcaccgcggagcaagcctctggtccgtgagaagcatgtctccgcaggaggcacggcaacgcgatcggtagattgcaacggcgaagaggaggttattgtgctgttccatatggctgattatggaagttaatggtggttgagtgcaagaaaagaagtataactaacactgtaacgatcaaggtatacagaaacagagctattagcactagtgatgaaaacagtctcatgagtcgtgaaagatttacgtgaggaacgtggacattgagctatattatagttggaatcttcatgtttaatccttttacttaatccaacatgatgctatcttgtagaaggaagttctcattagtggatgacaaatgatcgcaagagtttcttgtggctggcgccactgtgtgtcccaggttcagggtgcttttatgttttgtgcaacagttttgggttgtagttggtgtttcttggtgcctaaacatggggctgttgtaacatttaaactttattccttattgaatgaatacgcagagcttctgacttcctgccgtctattttcgaaggaaaaatatattctttattctaaaatccttgacagatatagatgtaggttacaatttctttctttttagtatatatcactgggatatagtttgaatagtggtatttcacaatgctgatttcgtagtactttgagctattctagttacccaaatagttgtatttgttcaaaaggtggacaaaaagggtgctcatgcagtcatgtgactcaccatgatagatttttttagcttgctgaggtgctaattgctatggggtgtcgatcccattacctatggaaacacataatcatgtatttatgtagcttctcggcataagattcttcccatttgacattttgaacattgactataattttttacgcggtaacaattttttatatggctcaatgaattcagcagttatgatccaaaccttttgggcatctttttaaagcatctctgaaaaaccagcaagcagcagtggtgcagaatttactggactaattagagatatgacattattgtggacaaagtgttatgaattttaatttgggttactggaatgacaaaaaaaaattgcactcattggatcagctgaaaccttgttacaatagatggttgatttttcagaatatttttttccatttgagttgctttgcctgattctgtatgtgatttttctgtcagtaggaaaagcattggtataatactctagcaaaaacaaggaagattcagttatgctgcatatgtgttatctatattaattttatgttgtacatagtattacttacttagttataatctattgcttgccttaaacactagagacagctgtcagttctttttaaaagtttgcatttggtggcctaataattgatcagccaactaaacgactttctgtcttcagcttgatggtcactgcttgctgactggtttcagactgttgggtgctccaagggcagcaatagggcttgtctagaaagtgaggtacagacgtaaggcaacctctcattcctgatcaggcaggaaaagcatgtctctgaccaaacataatcgcttggagtgactagcggagaggtaaggtaaagctatatgctcactccagccgccagagaccagcaccaatgtttctctacgagctgcctttctgccgttccgctggctcgacccgatctttctggcatgacaccagtcaccagggggttgctgtcgtttaaactcgtctggatgcaatgttcaccaaaacgcaaaaccgtaaacaacaagctatacggccatttaaacgagcaatatggccgatttaaaataagaacatatacttttactaaataaaaatatacctttgcaaatatttctgaattaatttgacattttgactggctatggttgatgtgattcttctcttttgcttgatttgggtgattgagtgcgctaagtttttttttaaaaaaaaatatgtttatatccaatcctttccacaatttgtttagacttttcttgcattttcctcacttcttttctagagattaatctaatttctagatgctctaaaatccctttgcttgatctccaaatacttaatttggattcatcatcgatcaatcttatattgatacttttttcttgatttttagagttttagaaatatttttggagatttcaaatgattttagctttttctagaattgttttttgaactaaaaacagattttagatgaataaaagattgataagtacataaatatttctaagttcacgatagttcatagtttttaggtcaatgtgtggttattgcactcagtggaccctgttgatagcaatagtaaggtcttgttcagttcttcctattcgacatgaatttgataggattgaaaaaaaatatgaagaactttgacttactatgtatttaaactcattcaatcatgctcaatttatatggattgtgatcgaaacgagcatgccctaagtaggaataggcttaggcaaaataaaccaaaaccgaagaaccaaacctaactaatggaaaccaaaaccaaagtaattgaaacctaattaatcattagaaatttttgttccatgttttagaaaaccaaaagaaccgagataattttggttctagaacttagaagactggattaatcgaaaaaattgaaatgtaatagaagcacaatagactaatagaattttaggcatatctcaatatagttttcccaaatcctaagtgtataagcatacaacctcttcaaatcaatccatccctaatcctaattcttcatcctatcatctacgtacttttgctaaactctaaaattatactgtttttctatatttgctaaacttcggtctattcggttagaaactaaaactgaactattcggtttcgcctgtgaaatggaaatgtgcctttggtccatttctataatgttttgatgattaagtgtccaacacatactaagtgagttaattatgtgccaaataagcaagaagtgcaaatcatgtaacaatgtacatttctagacttagtacattgttttgtgtactaacatatattgtctaagtgctagaaacagagaaaagaagagaagaaaagaattgcaaatgacttggcttggtgcagctaaagtctagctcggtctagtgcaccggacagtgtccggtgcgccaggccagcctccggtgaacagaccactctcgggaaaa

SEQ ID NO: 69403 - DNA, 3837 bp, Zea Mays
aaacaaagaaaaaaaggacgaggctctcctctggagagttccataacttccatctgagatctgacactttgcctttggatgcttctggcttcctccgcccccggtcctcttctagtcgcttcgtcttccatcgctttcctcatctctgcatcattctttcttagttgctttgtctttcgtcgccttccttatctactttgcttcagcctaaacgctttgtctactgccgccttactcatccgctctgattgtttagtgagatacatatttttcccactccttgctggtccgatccgttttggtggatatgttatgaggtttccatgtgcccatttttacacctgcttcgtttctatcagtttctttgccgtctcagcttcctcgtcaagttttttttccaatgtttcttttttccaagttatttacttccgccatattcgctatccggcgtatcctagcttggggattattgattcggctttatccggtgtcttccacttccacaatattctctacactcacgtttcctttatgtgctcgaagtatgtttattttttcgtcgagctgcgtcctttcgaccatgtcaagcgtcttctagcctagagcttgcttcgaccatgtctggcgtcttccagttccacgacattctcttcaattgtgtttttccgtgcttctatcgcttgctcggtgaagcttgtatgcatttctattttggagcatgaatggtgtggtcctacttattgatattcgtctggtaacacaatcgggaaggtgactttccatttggcatgcctttattatttcacaggcatccccttctttgcagacctccatttttggctgcctccaatgtcactatgacgtgttattttgttgttttcctttgggcgctgcattccatctctctatccttcatattgcttctttgttttctttacaatttttaagttactcttggtttttacccttcgatcctttctgtgctctaatgtatgaggtggaaaggcttgtcactactagatttgtttaggttttttcctacagcatgggaggcttccatatcttgatttgcaacatggaagtgtgtgtttcttgtttagtctactttatatggaaatagagtctggaaaagtcaattttttcctttgggtgccccttcaacattgtgctccccactcttgttcctttttatggctttgaatctatgatgtgcagagtttattttctttttcagtgtttcagcattttttaaaatagaaaactcgctgcattcccttgggccaatcgattctacattcgattcctctatgatttacaatctaagctaggatgtgcatattttggttttctttttccctagattttttcataagcctcgctgcattccctctgggcaatagagcggctgttgtagtgataaacctccaaatacatgacctgttaggattgtttctaattatttgtagccacgctattcttcaactttcgattctttcaattcgtcagagggcaagtttgctatttttccttcttttttatatgtaacttagatcagtttatggaaacaaatcagcagaaaagggtgacacgaccacctcattgacaaagaaagattcattttggaacggtgctgggtagtaccatgctcctagacaacaccaacgtggttcacaactgaaactatatatggtaccatcaaaacatgttttcacgatgttatgaggtcagattacaaatagaccatgttagcccaagcatgaaaagaaaggcgagtgtaaactgtaacctggtcacgggctcagggccgcgcccgaacttcacacgaccggaccaattcgcatcggcatcgaacacctctgccctctgtaaggagacccaaccccaccgcgcgcatccatgcccccaacgacggcggtgcgtcgggctccctcgccgcacgccgcgggcggagcgaggctcaccgcggagcaagcctctggtccgtgagaagcatgtctccgcaggaggcacggcaacgcgatcggtagattgcaacggcgaagagcttgatggtcactgcttgctgactggtttcagactgttgggtgctccaagggcagcaatagggcttgtctagaaagtgaggtacagacgtaaggcaacctctcattcctgatcaggcaggaaaagcatgtctctgaccaaacataatcgcttggagtgactagcggagaggtaaggtaaagctatatgctcactccagccgccagagaccagcaccaatgtttctctacgagctgcctttctgccgttccgctggctcgacccgatctttctggcatgacaccagtcaccagggggttgctgtcgtttaaactcgtctggatgcaatgttcaccaaaacgcaaaaccgtaaacaacaagctatacggccatttaaacgagcaatatggccgatttaaaataagaacatatacttttactaaataaaaatatacctttgcaaatatttctgaattaatttgacattttgactggctatggttgatgtgattcttctcttttgcttgatttgggtgattgagtgcgctaagtttttttttaaaaaaaaatatgtttatatccaatcctttccacaatttgtttagacttttcttgcattttcctcacttcttttctagagattaatctaatttctagatgctctaaaatccctttgcttgatctccaaatacttaatttggattcatcatcgatcaatcttatattgatacttttttcttgatttttagagttttagaaatatttttggagatttcaaatgattttagctttttctagaattgttttttgaactaaaaacagattttagatgaataaaagattgataagtacataaatatttctaagttcacgatagttcatagtttttaggtcaatgtgtggttattgcactcagtggaccctgttgatagcaatagtaaggtcttgttcagttcttcctattcgacatgaatttgataggattgaaaaaaaatatgaagaactttgacttactatgtatttaaactcattcaatcatgctcaatttatatggattgtgatcgaaacgagcatgccctaagtaggaataggcttaggcaaaataaaccaaaaccgaagaaccaaacctaactaatggaaaccaaaaccaaagtaattgaaacctaattaatcattagaaatttttgttccatgttttagaaaaccaaaagaaccgagataattttggttctagaacttagaagactggattaatcgaaaaaattgaaatgtaatagaagcacaatagactaatagaattttaggcatatctcaatatagttttcccaaatcctaagtgtataagcatacaacctcttcaaatcaatccatccctaatcctaattcttcatcctatcatctacgtacttttgctaaactctaaaattatactgtttttctatatttgctaaacttcggtctattcggttagaaactaaaactgaactattcggtttcgcctgtgaaatggaaatgtgcctttggtccatttctataatgttttgatgattaagtgtccaacacatactaagtgagttaattatgtgccaaataagcaagaagtgcaaatcatgtaacaatgtacatttctagacttagtacattgttttgtgtactaacatatattgtctaagtgctagaaacagagaaaagaagagaagaaaagaattgcaaatgacttggcttggtgcagctaaagtctagctcggtctagtgcaccggacagtgtccggtgcgccaggccagcctccggtgaacagaccactctcgggaaaa

SEQ ID NO: 69404 - DNA, 3459 bp, Zea Mays
aaacaaagaaaaaaaggacgaggctctcctctggagagttccataacttccatctgagatctgacactttgcctttggatgcttctggcttcctccgcccccggtcctcttctagtcgcttcgtcttccatcgctttcctcatctctgcatcattctttcttagttgctttgtctttcgtcgccttccttatctactttgcttcagcctaaacgctttgtctactgccgccttactcatccgctctgattgtttagtgagatacatatttttcccactccttgctggtccgatccgttttggtggatatgttatgaggtttccatgtgcccatttttacacctgcttcgtttctatcagtttctttgccgtctcagcttcctcgtcaagttttttttccaatgtttcttttttccaagttatttacttccgccatattcgctatccggcgtatcctagcttggggattattgattcggctttatccggtgtcttccacttccacaatattctctacactcacgtttcctttatgtgctcgaagtatgtttattttttcgtcgagctgcgtcctttcgaccatgtcaagcgtcttctagcctagagcttgcttcgaccatgtctggcgtcttccagttccacgacattctcttcaattgtgtttttccgtgcttctatcgcttgctcggtgaagcttgtatgcatttctattttggagcatgaatggtgtggtcctacttattgatattcgtctggtaacacaatcgggaaggtgactttccatttggcatgcctttattatttcacaggcatccccttctttgcagacctccatttttggctgcctccaatgtcactatgacgtgttattttgttgttttcctttgggcgctgcattccatctctctatccttcatattgcttctttgttttctttacaatttttaagttactcttggtttttacccttcgatcctttctgtgctctaatgtatgaggtggaaaggcttgtcactactagatttgtttaggttttttcctacagcatgggaggcttccatatcttgatttgcaacatggaagtgtgtgtttcttgtttagtctactttatatggaaatagagtctggaaaagtcaattttttcctttgggtgccccttcaacattgtgctccccactcttgttcctttttatggctttgaatctatgatgtgcagagtttattttctttttcagtgtttcagcattttttaaaatagaaaactcgctgcattcccttgggccaatcgattctacattcgattcctctatgatttacaatctaagctaggatgtgcatattttggttttctttttccctagattttttcataagcctcgctgcattccctctgggcaatagagcggctgttgtagtgataaacctccaaatacatgacctgttaggattgtttctaattatttgtagccacgctattcttcaactttcgattctttcaattcgtcagagggcaagtttgctatttttccttcttttttatatgtaacttagatcagtttatggaaacaaatcagcagaaaagggtgacacgaccacctcattgacaaagaaagattcattttggaacggtgctgggtagtaccatgctcctagacaacaccaacgtgcttgatggtcactgcttgctgactggtttcagactgttgggtgctccaagggcagcaatagggcttgtctagaaagtgaggtacagacgtaaggcaacctctcattcctgatcaggcaggaaaagcatgtctctgaccaaacataatcgcttggagtgactagcggagaggtaaggtaaagctatatgctcactccagccgccagagaccagcaccaatgtttctctacgagctgcctttctgccgttccgctggctcgacccgatctttctggcatgacaccagtcaccagggggttgctgtcgtttaaactcgtctggatgcaatgttcaccaaaacgcaaaaccgtaaacaacaagctatacggccatttaaacgagcaatatggccgatttaaaataagaacatatacttttactaaataaaaatatacctttgcaaatatttctgaattaatttgacattttgactggctatggttgatgtgattcttctcttttgcttgatttgggtgattgagtgcgctaagtttttttttaaaaaaaaatatgtttatatccaatcctttccacaatttgtttagacttttcttgcattttcctcacttcttttctagagattaatctaatttctagatgctctaaaatccctttgcttgatctccaaatacttaatttggattcatcatcgatcaatcttatattgatacttttttcttgatttttagagttttagaaatatttttggagatttcaaatgattttagctttttctagaattgttttttgaactaaaaacagattttagatgaataaaagattgataagtacataaatatttctaagttcacgatagttcatagtttttaggtcaatgtgtggttattgcactcagtggaccctgttgatagcaatagtaaggtcttgttcagttcttcctattcgacatgaatttgataggattgaaaaaaaatatgaagaactttgacttactatgtatttaaactcattcaatcatgctcaatttatatggattgtgatcgaaacgagcatgccctaagtaggaataggcttaggcaaaataaaccaaaaccgaagaaccaaacctaactaatggaaaccaaaaccaaagtaattgaaacctaattaatcattagaaatttttgttccatgttttagaaaaccaaaagaaccgagataattttggttctagaacttagaagactggattaatcgaaaaaattgaaatgtaatagaagcacaatagactaatagaattttaggcatatctcaatatagttttcccaaatcctaagtgtataagcatacaacctcttcaaatcaatccatccctaatcctaattcttcatcctatcatctacgtacttttgctaaactctaaaattatactgtttttctatatttgctaaacttcggtctattcggttagaaactaaaactgaactattcggtttcgcctgtgaaatggaaatgtgcctttggtccatttctataatgttttgatgattaagtgtccaacacatactaagtgagttaattatgtgccaaataagcaagaagtgcaaatcatgtaacaatgtacatttctagacttagtacattgttttgtgtactaacatatattgtctaagtgctagaaacagagaaaagaagagaagaaaagaattgcaaatgacttggcttggtgcagctaaagtctagctcggtctagtgcaccggacagtgtccggtgcgccaggccagcctccggtgaacagaccactctcgggaaaa

SEQ ID NO: 69405 - DNA, 1317 bp, Zea Mays
caaagttccacgtccctccgtgtcgttaccgtgcgttgtcttgtctttctcactctcccactcatatacacacactacacactccctcgcacagcacagccacgcacaggggtcaggtcagtcgcctacgaaattcaatagcacagcgagagccaaggaagaagaagaagcaagcggagcgccatggcggcgtccaacggcgagggccacggccggttcgacgtgatcgtggtgggcgcgggcatcatgggcagctgcgccgcctacgcggcgtcctctcgtggcgcgcgcgtgctgctcctggagcggttcgacctgctccaccaccggggctcctcgcacggcgagtcgcgcaccatccgcgccgtcctcagggacaggactgaggtggtggacatcacctcctccaagcgaggtgaaggagaggggtcaatcatctcggtgaggacgtccagcggcgaggagttccacggcacgaaatgcatagtgacagtgggcgcatggacgagcaagctgatcaagtcggtgaccggcctggagctgccggtgcagccggtgcacacgctcatctgctactggaaggtgaggcccgggcgcgagcaggagctcaccccggaggccgggttcccgacgttcgccagctacggcgacccctacatctacagcacgccgtcgatggagttcccggggctgatcaagattgccatgcacggcggcccgccgtgcgacccggacggcagggactggtccacgggcgcgggcgacctggtggagccggtggcccggtggatcgacgccgtcatgccgggccacgtcgacaccaccggcgggcccgtcgtccgccagtgctgcatgtactccgtgacccccgacgacgactacgtcgtcgacttcctcggcggggagttcgggaaggacgtcgtcatcggcgcggggttctctggccacggcttcaagatgggcccggccgtcgggaggatcctggccgagatggccttggacggggaggcgagcacggcggccgaggccggagtagacctccgccccctaacgatcggccggttcgcgggaaatcccaaaggaaacctgtctgccagccaaggctgatcggcgacggggctctgtttcatggtttgatgtcaaagtgtgtgctctgcttgccaacttgtctgttaagtgtcttttgggttgttggatttaaaaaacaaaagtgcgcgcatctcctcagtgttttctgcaggctgcagtaataaactggtttggtcagttctattgataatgacagcaataataagttcgttattgtgcagatccctc

SEQ ID NO: 69406 - DNA, 1539 bp, Zea Mays
atttgagatagctccctcagtctctgtctctccatcggaagaacaaactggagatgggcttgaaggcaacaggtgcgcgatccaacacaatgaagcttgataacaatgctgaaatgaacagtgtcgatatggctggagtggaggacctgatggacactatcgaggaagttaaaccttgctggaccaaaccaagtccaaaaaatcagccatctaatggttttgttacattctccttgactatgggccctgaatatcacatctcacagatcacagatgctgtggttgttgcgaggtatctaggtgcaacatttgtactcccagacatcagaggaaatgaattaggaaataagcgaaaattccaagacatgtacaatgtggataaattcgtgaggagcctagatggtgttgtcgaagtaatagatgaaatacctgatgaagtgagtgctaagaagccagcagttatcagagtaccaaaccgtgtgactgaaagcttcatcatggacaccatccagcccatctttaaaaaaaacaagtacttaagacttgcggtcattttctcttcagtaagtttaaggccaaaggagacgagtaacaaggacttggatgcgactgcttgccttgcaatgttcagtggcctcgaactgaagcatgaatattctgaagtcgccagaaaaatgttggataggcttcaagaattaagcaagaaatcagatgggaaggtcttggcaatcgatttgcggaccgacttgctggaaaagaagagttgcaagacaaccagtggcgctcgaagaaaaggctgctataaccctaatgaggtcctggctttcctgaggagtgttggcttctctgctaatactaccatctacttgacagagacatggtggcacaaaggcctgaatgatctgaaggaggaatttccaaatacttataccaaggatgacattatgccagctgagaacaaaggtgaattcctgaaatccagcaatgcagacctagcaagcgctttggaccttgagatctgctcgcagagtgacgtgttcatccctgctgtcgctggcctgttctacgggcatgtcacaggtaagaggattgcatctggtcgtacccagatcattgtgccttctcagtccagcacctcgactcatgcttcagatttcacctccacctacatctccaacaagaaccacctagcctacacatgctactgttagcatgcttttgtactgccattaataagatcagctgaagtgagccgcagggtagtgctctgggtgcatatacaagtacctctcgttagtcgttaacatgctgttgtacactggttgatgttatgttatgaggaataaatattagcatatgttgtgtgttgtttacttgtttggatattaaactttggaacaacagcaaggagcataatgactgcttgtatgctgtaaaatgaacccgaggttaggcgtgtgaaaagagtttgcttcatgtaccttgattcatcaccttctgtctgctcaccaattgatgtagtaattgctccggaagtct

SEQ ID NO: 69407 - DNA, 1520 bp, Zea Mays
atccaatgctgaaggcggatctttcactgttgagatgggcttgaaggcaacaggtgcgcgatccaacacaatgaagcttgataacaatgctgaaatgaacagtgtcgatatggctggagtggaggacctgatggacactatcgaggaagttaaaccttgctggaccaaaccaagtccaaaaaatcagccatctaatggttttgttacattctccttgactatgggccctgaatatcacatctcacagatcacagatgctgtggttgttgcgaggtatctaggtgcaacatttgtactcccagacatcagaggaaatgaattaggaaataagcgaaaattccaagacatgtacaatgtggataaattcgtgaggagcctagatggtgttgtcgaagtaatagatgaaatacctgatgaagtgagtgctaagaagccagcagttatcagagtaccaaaccgtgtgactgaaagcttcatcatggacaccatccagcccatctttaaaaaaaacaagtacttaagacttgcggtcattttctcttcagtaagtttaaggccaaaggagacgagtaacaaggacttggatgcgactgcttgccttgcaatgttcagtggcctcgaactgaagcatgaatattctgaagtcgccagaaaaatgttggataggcttcaagaattaagcaagaaatcagatgggaaggtcttggcaatcgatttgcggaccgacttgctggaaaagaagagttgcaagacaaccagtggcgctcgaagaaaaggctgctataaccctaatgaggtcctggctttcctgaggagtgttggcttctctgctaatactaccatctacttgacagagacatggtggcacaaaggcctgaatgatctgaaggaggaatttccaaatacttataccaaggatgacattatgccagctgagaacaaaggtgaattcctgaaatccagcaatgcagacctagcaagcgctttggaccttgagatctgctcgcagagtgacgtgttcatccctgctgtcgctggcctgttctacgggcatgtcacaggtaagaggattgcatctggtcgtacccagatcattgtgccttctcagtccagcacctcgactcatgcttcagatttcacctccacctacatctccaacaagaaccacctagcctacacatgctactgttagcatgcttttgtactgccattaataagatcagctgaagtgagccgcagggtagtgctctgggtgcatatacaagtacctctcgttagtcgttaacatgctgttgtacactggttgatgttatgttatgaggaataaatattagcatatgttgtgtgttgtttacttgtttggatattaaactttggaacaacagcaaggagcataatgactgcttgtatgctgtaaaatgaacccgaggttaggcgtgtgaaaagagtttgcttcatgtaccttgattcatcaccttctgtctgctcaccaattgatgtagtaattgctccggaagtct

SEQ ID NO: 69408 - DNA, 1013 bp, Zea Mays
ctcgttcagattatccatcttctggttcgtccatcaacatcatcttgcggattcgcccacgcttggagtcgacttgggttgtcttccacatcacgtagtcaataaacgtacctaaatgatttgcataatgcacatgaatgcatagcactgacttcactgtacaaataaaactcttcgcataaaatatcgatagcgcctaccggcaaggcactaaaattactaagaaaaataaattcaacttaccagcatcaaacatgactcactactcacaagaatgctgataaatcctggctcgagcatgtcgttgaacacctgacggtgtggtgcggcttcactttcttctccatatcttatggtaatttctctcaaaccagcgatgattgacgaggattgcgaatgtgatgagagggcgaaaatcatttatcacaataactttctctaccccgcaaacaacatctaaaacagccatatgaagcagtgttgagatcttccgcccccatgacccagatggggctgaccacgaggtgaaacatgacaagacgcgtatcggaagagttactgggattaaagatgacgacacgcatcaaagcgaggcggcataggacggggaaaagtaggaacggacgacgacgagggagcagcacggttgcgtgggacttggcgagctggaggtgtgtagctgagtaacgatggcagagcttgctagttcgacacggggaggaccaacaaggtcgacagccagtgtggctagataatggagcatagtccagcaccaaactgacgacggccaccagaagggcaaagacgaggtcgagcaaggtaaaacgggttcaacggctcgacgacaaacgcgagcacgcgtgaagcccgatggacgaagagcgagcgcgacgcaataacaacgagcaggcgcgcgagtgttaacgcgagccagcggcaagcacgagtgctgaggtacaaccgacaacactcgacgagcacgcagcgaagcatacaacagtgacgacagtcga

SEQ ID NO: 69409 - DNA, 795 bp, Zea Mays
cttctgtccccctccaccgccccctcacccccccgtaggcactgcatccacgttcacgtcgcttgaggaggtgagcagtcggatctggctaggtgctgcaagcgagaccgtgccatgttccacctccgcgcacttttctcgtgagcgccctctaccatcccgcctcctcctggtaacgcgctgctcaaggttactagatctggtgagtcaccgttcagagttgggttcctgttcctggggcgcttcttcttacgttcgcaggcggagcgtccgtggaggaggcagcggggtattgatggaagtggtacccttgatggacagcagcaagggaagaaaacttgacggttaatcctggaagatggcgagtgctctatcttggagacttggaagatggcgaatcttggaagaacaatcaaaagaatggaaacaccttgccacagtaatagcgccagaacagtcgtcgatggcttcaagctcctacttgtgtttccggtgtttggctgttgcggctgtaaaaggctggagtcagcatgtacggctgtaccatgctggattcaggcggcggctgtaccctgctggactaggcggcggctgtactaggacctaaattgatgttagtcggtgggctgtaccatgctgatttgtacctcacgtgtgtatggacctggtcgatgtgggcttttttgggcaaaatagatttcaacatgacatgggtctagacatatatggatctagacattatattatatattatatttattattcatgtttatattatatattataattattctt

SEQ ID NO: 69410 - DNA, 913 bp, Zea Mays
cccagatccactgtcgcgcgcccttgccgctcaatctccgctcacatccacccagaagcacttctgtccccctccaccgccccctcacccccccgtaggcactgcatccacgttcacgtcgcttgaggaggtgagcagtcggatctggctaggtgctgcaagcgagaccgtgccatgttccacctccgcgcacttttctcgtgagcgccctctaccatcccgcctcctcctggtaacgcgctgctcaaggttactagatctggtgagtcaccgttcagagttgggttcctgttcctggggcgcttcttcttacgttcgcaggcggagcgtccgtggaggaggcagcggggtattgatggaagtggtacccttgatggacagacactggttccccttggctggacagatttcaaactgaatatgaggttgtctctatcagcagcaagggaagaaaacttgacggttaatcctggaagatggcgagtgctctatcttggagacttggaagatggcgaatcttggaagaacaatcaaaagaatggtaagaccttgccacagtaatagcgccagaacagtcgtcgatggcttcaagctcctacttgtgtttccggtgtttggctgttgcggctgtaaaaggctggagtcagcatgtacggctgtaccatgctggattcaggcggcggctgtaccctgctggactaggcggcggctgtactaggacctaaattgatgttagtcggtgggctgtaccatgctgatttgtacctcacgtgtgtatggacctggtcgatgtgggcttttttgggcaaaatagatttcaacatgacatgggtctagacatatatggatctagacattatattatatattatatttattattcatgtttatattatatattataattattctt

SEQ ID NO: 69411 - DNA, 986 bp, Zea Mays
agcacttctgtcccccaccgccccctataggattcaggaaccttcttcttcactggaccgatgcgagttgttccccagatccactgtcgcgcgcccttgccgctcaatctccgctcacatccacccagaagcacttctgtccccctccaccgccccctcacccccccgtaggcactgcatccacgttcacgtcgcttgaggaggtgagcagtcggatctggctaggtgctgcaagcgagaccgtgccatgttccacctccgcgcacttttctcgtgagcgccctctaccatcccgcctcctcctggtaacgcgctgctcaaggttactagatctggtgagtcaccgttcagagttgggttcctgttcctggggcgcttcttcttacgttcgcaggcggagcgtccgtggaggaggcagcggggtattgatggaagtggtacccttgatggacagacactggttccccttggctggacagatttcaaactgaatatgaggttgtctctatcagcagcaagggaagaaaacttgacggttaatcctggaagatggcgagtgctctatcttggagacttggaagatggcgaatcttggaagaacaatcaaaagaatggaaacaccttgccacagtaatagcgccagaacagtcgtcgatggcttcaagctcctacttgtgtttccggtgtttggctgttgcggctgtaaaaggctggagtcagcatgtacggctgtaccatgctggattcaggcggcggctgtaccctgctggactaggcggcggctgtactaggacctaaattgatgttagtcggtgggctgtaccatgctgatttgtacctcacgtgtgtatggacctggtcgatgtgggcttttttgggcaaaatagatttcaacatgacatgggtctagacatatatggatctagacattatattatatattatatttattattcatgtttatattatatattataattattctt

SEQ ID NO: 69412 - DNA, 848 bp, Zea Mays
gatctggtgagtcaccgttcagagttgggttcctgttcctggggcgcttcttcttacgttcgcaggcggagcgtccgtggaggaggcagcggggtattgatggaagtggtacccttgatggacaggttagtctcgatttctgtcatttgcataaccacagtaacttgtagctgccagcaaaatacacaaacactagtcgtttgtttctgggattcaaagtcaaatataggtagtgttgaatgcgttgggtatatatatatatggatatatttataagaaatccaatttgtttataggattcaaagtcaaacatggttagtgtcgaatgtgttgaatatttatatatatgacatatatgtatcataaatccaataatgaatatttacatacacaactgcatatgctctctctagattcactggttgccggcctattttaagcaaattctatcaccacaagcatctaaagagattttcccctatatttattaggcctttataaaaactttgcctatattggtctcttaagtaatgttagtgaccacttagtagcagtagcaaccagattgttttgttggaatctgtgttgattattcatcatgctactcatcgtcgctatcatcatcttcgccgttatggattgttctctcttcattatcactagcatattgcagaaatgtttcatcttcttcatcttcaaataaatcttcaggttcatcctccctttgtctatgaaggtcttcaactatacttgcatgaacagtaaaagaattttcaccgcccaacgcatcaatgtccatattgacatcataatcttgaatatgaaaatcaacacactcatcatcttgg

SEQ ID NO: 69413 - DNA, 2208 bp, Zea Mays
aggaactaggctatattggcgccacaagctacaagaaacacaaccagtgaccacaaggcatgagccaaggtccagcaatctggagttctggacactgagtccttggagcttcgaagcccctgctgaacaccagaggttcagaccattcgccaaggctatctatctaagagatcttcaaacttgagaggtgattggaaaaggaggttctttgtcctcgacagtcgaggaatgttgtactattatcgcaagcagaacagtagaccatctagtggatattctaaccaaagaactagcattccctcagaacatggttctgggttgctcagcagatggttctcttctcattatcatggaggcgtgcatgatgagaaatcggttgcacgtcatactgtaaacttgctaacatcgaccattaaagttgatgcagaccaatcagatctgcggttctgcttcagaataatttctcccacaaagaactacacgttgcaggcagagagtgcaatggatcagatggattggattgaaaaaattaccggcgtcattgcttctttgctgagctcccagtctcctgaacgacatcttatatcaagtcctaagggcagcagtcatcatcgaactgccagctcaagcagttcattcagtagctcaacagaacttgaacattcaataagtgaagattgtatgctggaaaaaaactcaggaagtggttatttcgagcattctgcaagagttgcacagcatcaccgaacaagcatgatgaaacctgacaagccaattgacttgcttaggaaggtggctggcaataattgctgtgctgattgtggtgcttcggagcctgattgggcatccctgaaccttggaattcttttatgcatagagtgttcgggggtacacagaaatatgggtgtgcatatatctaaggtaagatccctgacgcttgatgtcagggtttgggagcaatctgtaatcaatctctttcagtcaataggcaacacttttgccaattctgtctgggaagaaatgttaccttcatcaagctgtgttgaccatggtgatatttcaagggctgatggattagaaaacatgtcgcatggctttgcacccaagaagcctaaacaatctgattctattgcagtgaaggagaaatttattcatgccaagtatgctgagaaggatttcgtgcggaaacataacatggatgggattcaacttgcagaacagatgtgggacaatgtaagttcgaacaacaagaagggggtgtacagcttgatcgtggggtcaaatgccgacgtaaatttttcctatggtcatacatcattcaattcggctttgactctgggaaaagctctcctcctacaagagcaatcagcctctccatctaacggaagctctagatgttttgaccgcaatccactcgagaagggttgtaccggggattctgtttctcctgccagcacaagcgcccgtatagacgggccggacgattatgttgaaggattatctttgctccatctagcatgccgcgccgcggacctgggcatggttgagctgctcttgcagtacggcgccaatgtaaactccacagattcaagagggcggacgccgcttcatcacagcatcatgaaagggcgacatgtgtacgccaagctactgctttccaggggcgccgattctcaagccgcggatcgagatggtaggacagcgttacagtatgcaatcgacagcggaaccatagaggacgaagagatccttgttttgctagaggacccaagtagataaatcacgtaggtgtagtagtccaagtctcgagttcctgccgtcctgcggtggtgcattgtggctgccttttgcagtcacctggcacacacagggtccgaggatgccttgctagtattcagtctctgcctttgtggcaagaggaagttatagtttttctaggtctgtctgcggttttggtcgcgcttagggtaaaagtggcctgtttgtcgtggatgcagtttgcaagttgttggtttgcctttgtttgcagatgtcgcagtgtacacttgggaagtggctgccattgttgcgactgatgtacatatagcgatgtctgatacaggttatttatgcaagaatttagatcggtgaaaaaaatgtggctggctgtctgcctgtctcgagtcttgatcgatcaggtacaaagagtatgcatgcctaatacagcgc

SEQ ID NO: 69414 - DNA, 3198 bp, Zea Mays
ctgccctgtcgccgagccattcgattcctctccgctgcccccaagcgagtcgccgccatttcgccgattcccggccgctgcctagggttttggtgccagcgcggtcggagggttgtgcctgtgggtcgcgttcccagtgtcgcgcgcggtggccgaaggtggagggaggagcggttctccggagaggaggtggaggtggtggctgcggagtgcggtctccacggagcgagtctaccagatgccgccgcggtctttgaggaggtagtgtggccgtgtggagtgaataggtggtggtggtggtggcggcggcggcagcgggactggcggaggcagccatgtttttcagcaggctcgatgactcgcccatgttcaggaagcagatgcaatcacttgaagaaggtgctgaattgctacgagagagatgtttaaagtttcacaaaggttgtcgaaaatacacggaaggactaggggaagcatatgatggagatattgcattcgcaagctcacttgaaacatttggaggggggcataatgatccaatcagtgtcacatttggagggcctgtcatgaccaaatttacaattgctttaagagaaattggaacatacaaggaagtattgcgctcccaggttgagcacatgctaaatgacaagctgctccagtttgtggacattgatttacatgaaatgaaggatgctaggaaacgttttgacaaggctacccttctttatgaccaggcacgtgaaaagtatttgtccttgaagaaaggtacaaggactgacgtagcaactgcagtagaggatgagcttcacagtgctaggtctttatttgagcaagctcgtttcaatctggtgactgcactttcaaatatcgaggctaagaaaaggtttgaatttttggaggctgttagtgggacaatggatgctcatcttcgttatttcaaacaaggatatgaactactacatcagatggaaccgtatatcaatcaagttcttgcttttgcacaacaatcaagagaaaggtctaactatgagcaggctgctcttcttgagaggatgcaagagttcaaacgacaaattgatcgtgaaagtcggtggtcaccaaatggaatgaatgattctcctaacggtgatggaatacaaacaataggtagaagttcacataagatgattgaggaagcaatgcagtcagcttcaaagggcaaggttcagaccattcgccaaggctatctatctaagagatcttcaaacttgagagagtggatattctaaccaaagaactagcattccctcagaacatggttctgggttgctcagcagatggttctcttctcattatcatggaggcgtgcatgatgagaaatcggttgcacgtcatactgtaaacttgctaacatcgaccattaaagttgatgcagaccaatcagatctgcggttctgcttcagaataatttctcccacaaagaactacacgttgcaggcagagagtgcaatggatcagatggattggattgaaaaaattaccggcgtcattgcttctttgctgagctcccagtctcctgaacgacatcttatatcaagtcctaagggcagcagtcatcatcgaactgccagctcaagcagttcattcagtagctcaacagaacttgaacattcaataagtgaagattgtatgctggaaaaaaactcaggaagtggttatttcgagcattctgcaagagttgcacagcatcaccgaacaagcatgatgaaacctgacaagccaattgacttgcttaggaaggtggctggcaataattgctgtgctgattgtggtgcttcggagcctgattgggcatccctgaaccttggaattcttttatgcatagagtgttcgggggtacacagaaatatgggtgtgcatatatctaaggtaagatccctgacgcttgatgtcagggtttgggagcaatctgtaatcaatctctttcagtcaataggcaacacttttgccaattctgtctgggaagaaatgttaccttcatcaagctgtgttgaccatggtgatatttcaagggctgatggattagaaaacatgtcgcatggctttgcacccaagaagcctaaacaatctgattctattgcagtgaaggagaaatttattcatgccaagtatgctgagaaggatttcgtgcggaaacataacatggatgggattcaacttgcagaacagatgtgggacaatgtaagttcgaacaacaagaagggggtgtacagcttgatcgtggggtcaaatgccgacgtaaatttttcctatggtcatacatcattcaattcggctttgactctgggaaaagctctcctcctacaagagcaatcagcctctccatctaacggaagctctagatgttttgaccgcaatccactcgagaagggttgtaccggggattctgtttctcctgccagcacaagcgcccgtatagacgggccggacgattatgttgaaggattatctttgctccatctagcatgccgcgccgcggacctgggcatggttgagctgctcttgcagtacggcgccaatgtaaactccacagattcaagagggcggacgccgcttcatcacagcatcatgaaagggcgacatgtgtacgccaagctactgctttccaggggcgccgattctcaagccgcggatcgagatggtaggacagcgttacagtatgcaatcgacagcggaaccatagaggacgaagagatccttgttttgctagaggacccaagtagataaatcacgtaggtgtagtagtccaagtctcgagttcctgccgtcctgcggtggtgcattgtggctgccttttgcagtcacctggcacacacagggtccgaggatgccttgctagtattcagtctctgcctttgtggcaagaggaagttatagtttttctaggtctgtctgcggttttggtcgcgcttagggtaaaagtggcctgtttgtcgtggatgcagtttgcaagttgttggtttgcctttgtttgcagatgtcgcagtgtacacttgggaagtggctgccattgttgcgactgatgtacatatagcgatgtctgatacaggttatttatgcaagaatttagatcggtgaaaaaaatgtggctggctgtctgcctgtctcgagtcttgatcgatcaggtacaaagagtatgcatgcctaatacagcgc

SEQ ID NO: 69415 - DNA, 3256 bp, Zea Mays
ctcctccctgtctccccccgctgcgtgtcccctgccctgtcgccgagccattcgattcctctccgctgcccccaagcgagtcgccgccatttcgccgattcccggccgctgcctagggttttggtgccagcgcggtcggagggttgtgcctgtgggtcgcgttcccagtgtcgcgcgcggtggccgaaggtggagggaggagcggttctccggagaggaggtggaggtggtggctgcggagtgcggtctccacggagcgagtctaccagatgccgccgcggtctttgaggaggtagtgtggccgtgtggagtgaataggtggtggtggtggtggcggcggcggcagcgggactggcggaggcagccatgtttttcagcaggctcgatgactcgcccatgttcaggaagcagatgcaatcacttgaagaaggtgctgaattgctacgagagagatgtttaaagtttcacaaaggttgtcgaaaatacacgactaggggaagcatatgatggagatattgcattcgcaagctcacttgaaacatttggaggggggcataatgatccaatcagtgtcacatttggagggcctgtcatgaccaaatttacaattgctttaagagaaattggaacatacaaggaagtattgcgctcccaggttgagcacatgctaaatgacaagctgctccagtttgtggacattgatttacatgaaatgaaggatgctaggaaacgttttgacaaggctacccttctttatgaccaggcacgtgaaaagtatttgtccttgaagaaaggtacaaggactgacgtagcaactgcagtagaggatgtgactgcactttcaaatatcgaggctaagaaaaggtttgaatttttggaggctgttagtgggacaatggatgctcatcttcgttatttcaaacaaggatatgaactactacatcagatggaaccgtatatcaatcaagttcttgcttttgcacaacaatcaagagaaaggtctaactatgagcaggctgctcttcttgagaggatgcaagagttcaaacgacaaattgatcgtgaaagtcggtggtcaccaaatggaatgaatgattctcctaacggtgatggaatacaaacaataggtagaagttcacataagatgattgaggaagcaatgcagtcagcttcaaagggcaaggttcagaccattcgccaaggctatctatctaagagatcttcaaacttgagaggtgattggaaaaggaggttctttgtcctcgacagtcgaggaatgttgtactattatcgcaagcagaacagtagaccatctagtggatattctaaccaaagaactagcattccctcagaacatggttctgggttgctcagcagatggttctcttctcattatcatggaggcgtgcatgatgagaaatcggttgcacgtcatactgtaaacttgctaacatcgaccattaaagttgatgcagaccaatcagatctgcggttctgcttcagaataatttctcccacaaagaactacacgttgcaggcagagagtgcaatggatcagatggattggattgaaaaaattaccggcgtcattgcttctttgctgagctcccagtctcctgaacgacatcttatatcaagtcctaagggcagcagtcatcatcgaactgccagctcaagcagttcattcagtagctcaacagaacttgaacattcaataagtgaagattgtatgctggaaaaaaactcaggaagtggttatttcgagcattctgcaagagttgcacagcatcaccgaacaagcatgatgaaacctgacaagccaattgacttgcttaggaaggtggctggcaataattgctgtgctgattgtggtgcttcggagcctgattgggcatccctgaaccttggaattcttttatgcatagagtgttcgggggtacacagaaatatgggtgtgcatatatctaaggtaagatccctgacgcttgatgtcagggtttgggagcaatctgtaatcaatctctttcagtcaataggcaacacttttgccaattctgtctgggaagaaatgttaccttcatcaagctgtgttgaccatggtgatatttcaagggctgatggattagaaaacatgtcgcatggctttgcacccaagaagcctaaacaatctgattctattgcagtgaaggagaaatttattcatgccaagtatgctgagaaggatttcgtgcggaaacataacatggatgggattcaacttgcagaacagatgtgggacaatgtaagttcgaacaacaagaagggggtgtacagcttgatcgtggggtcaaatgccgacgtaaatttttcctatggtcatacatcattcaattcggctttgactctgggaaaagctctcctcctacaagagcaatcagcctctccatctaacggaagctctagatgttttgaccgcaatccactcgagaagggttgtaccggggattctgtttctcctgccagcacaagcgcccgtatagacgggccggacgattatgttgaaggattatctttgctccatctagcatgccgcgccgcggacctgggcatggttgagctgctcttgcagtacggcgccaatgtaaactccacagattcaagagggcggacgccgcttcatcacagcatcatgaaagggcgacatgtgtacgccaagctactgctttccaggggcgccgattctcaagccgcggatcgagatggtaggacagcgttacagtatgcaatcgacagcggaaccatagaggacgaagagatccttgttttgctagaggacccaagtagataaatcacgtaggtgtagtagtccaagtctcgagttcctgccgtcctgcggtggtgcattgtggctgccttttgcagtcacctggcacacacagggtccgaggatgccttgctagtattcagtctctgcctttgtggcaagaggaagttatagtttttctaggtctgtctgcggttttggtcgcgcttagggtaaaagtggcctgtttgtcgtggatgcagtttgcaagttgttggtttgcctttgtttgcagatgtcgcagtgtacacttgggaagtggctgccattgttgcgactgatgtacatatagcgatgtctgatacaggttatttatgcaagaatttagatcggtgaaaaaaatgtggctggctgtctgcctgtctcgagtcttgatcgatcaggtacaaagagtatgcatgcctaatacagcgc

SEQ ID NO: 69416 - DNA, 1087 bp, Zea Mays
tatacctaatgaaattcgttttcttggcaaaagttgggtgtagacatatgctttactggtttaattgatctacaagcttcagaacatgttcaagaatacatttcagtctgggttcctgtccattctttatagcctcgggaccaagccattgcagatatgggataaggaagttgtgaatgggcacattaaacgaccccaagatgaagatatccaatctaatgtacttgaaattgttggaacaaatgtacagtcaacttacatcacatgcccagctgatccttctgctactcttgggattaagcttccatttctggctattattgtgaaaaatcttaagaaatacttcacgtttgagatccaagttctggatgacaagaatgtccgacgtcgatttcgagcatcaaattttcaatctgtcacaagggtgaagccatatatctgcacgatgccgttgaaactcgacgatggctggaacaacatccagttgaaccttgctgatctgacaaaaagggcgtacggcacaaattacgtcgagacgctgcgggtgcaagttcatgcgaactgccggctccgcagaatctacttctctgaccgcctctactcggaggaggagctgccgcctgagttcaagctctaccttccaatccagaaatcataggatcccgagggcgtggagagactctggtgaccgggagacttatatcgtaccattgtgaggataacctagctgcacatctgcgccttcctgagatacagaaaaaaaatgtaccagaatgtttctgttagttttctgattgttgtgcgatgaatgattaggctgttctgttttcatagcaagggcgagtagccttagttggggctgttacccagtgacccctttgtgtgaacgagtagtcaatgttattagtccggaccctttggctactggtccttctggtccaaagcaaaacgtaccgttactgctcactgcctggtcatttaacgtgcttcttccatggttgtaccgtctctatgatagtatcatgtggccgctgatctattggatacatgttacgcgtgactcgcattaaaagcttcacttctcttt

SEQ ID NO: 69417 - DNA, 1219 bp, Zea Mays
cctcgctgaacacgaacgggcgtggcgaccgcccatgccgaaaacgcccacaaaaaattagggagttttcttctcccgtccaccttgcgtgctcgcgcgcgagctctcgtggcgcagccacaactaggcgaccgccgccgcccctacgccacgtgctcgagtctagcctcgtcgattgcttccccagtttaattgatctacaagcttcagaacatgttcaagaatacatttcagtctgggttcctgtccattctttatagcctcgggaccaagccattgcagatatgggataaggaagttgtgaatgggcacattaaacgaccccaagatgaagatatccaatctaatgtacttgaaattgttggaacaaatgtacagtcaacttacatcacatgcccagctgatccttctgctactcttgggattaagcttccatttctggctattattgtgaaaaatcttaagaaatacttcacgtttgagatccaagttctggatgacaagaatgtccgacgtcgatttcgagcatcaaattttcaagtgttctgtcacaagggtgaagccatatatctgcacgatgccgttgaaactcgacgatggctggaacaacatccagttgaaccttgctgatctgacaaaaagggcgtacggcacaaattacgtcgagacgctgcgggtgcaagttcatgcgaactgccggctccgcagaatctacttctctgaccgcctctactcggaggaggagctgccgcctgagttcaagctctaccttccaatccagaaatcataggatcccgagggcgtggagagactctggtgaccgggagacttatatcgtaccattgtgaggataacctagctgcacatctgcgccttcctgagatacagaaaaaaaatgtaccagaatgtttctgttagttttctgattgttgtgcgatgaatgattaggctgttctgttttcatagcaagggcgagtagccttagttggggctgttacccagtgacccctttgtgtgaacgagtagtcaatgttattagtccggaccctttggctactggtccttctggtccaaagcaaaacgtaccgttactgctcactgcctggtcatttaacgtgcttcttccatggttgtaccgtctctatgatagtatcatgtggccgctgatctattggatacatgttacgcgtgactcgcattaaaagcttcacttctcttt

SEQ ID NO: 69418 - DNA, 1823 bp, Zea Mays
acctgggaccggggcacggggacgattcgtggacgacgcagcagacctcgctgaacacgaacgggcgtggcgaccgcccatgccgaaaacgtacgtggcgagcgcccatgccgaaaacgtacgtaacccgccaaacgcgggcgtgcgagcaaacggcttcaggttttaagactttagattcagccttgttacaggcccacaaaaaattagggagttttcttctcccgtccaccttgcgtgctcgcgcgcgagctctcgtggcgcagccacaactaggcgaccgccgccgcccctacgccacgtgctcgagtctagcctcgtcgattgcttccccagtttaattgatctacaagcttcagaacatgttcaagaatacatttcagtctgggttcctgtccattctttatagcctcgggaccaagccattgcagatatgggataaggaaggtttgccatcttcttgatgtgtcctctttaatgctcaaatactgatttcctttgttccattttgttctgctgagtgctgacacgaaataagagcatcgattaatttggttaggattcgagctttcagttgctaaagcattatctgcttctgatgctgcctttcttaacttttgtttactttgtgtgtgggatagattatgaaaattgaaaaacatgaacttcatcagctagaatatcattggataattggattgttattgatcgttggcttccagcagcaatgttaaatcttcatgaaatatttgacatgaaagtgtaaacttgtccatcagcacatacactgcaacctgctagtttagctttttctgggacctaaacaataaatacatatgtgcttcattctcacgaacctgtgtcaaatgtaccatttccgtttcttaatgttttatccgtttgcagttgtgaatgggcacattaaacgaccccaagatgaagatatccaatctaatgtacttgaaattgttggaacaaatgtacagtcaacttacatcacatgcccagctgatccttctgctactcttgggattaagcttccatttctggctattattgtgaaaaatcttaagaaatacttcacgtttgagatccaagttctggatgacaagaatgtccgacgtcgatttcgagcatcaaattttcaatctgtcacaagggtgaagccatatatctgcacgatgccgttgaaactcgacgatggctggaacaacatccagttgaaccttgctgatctgacaaaaagggcgtacggcacaaattacgtcgagacgctgcgggtgcaagttcatgcgaactgccggctccgcagaatctacttctctgaccgcctctactcggaggaggagctgccgcctgagttcaagctctaccttccaatccagaaatcataggatcccgagggcgtggagagactctggtgaccgggagacttatatcgtaccattgtgaggataacctagctgcacatctgcgccttcctgagatacagaaaaaaaatgtaccagaatgtttctgttagttttctgattgttgtgcgatgaatgattaggctgttctgttttcatagcaagggcgagtagccttagttggggctgttacccagtgacccctttgtgtgaacgagtagtcaatgttattagtccggaccctttggctactggtccttctggtccaaagcaaaacgtaccgttactgctcactgcctggtcatttaacgtgcttcttccatggttgtaccgtctctatgatagtatcatgtggccgctgatctattggatacatgttacgcgtgactcgcattaaaagcttcacttctcttt

SEQ ID NO: 69419 - DNA, 1563 bp, Zea Mays
cttatctcgtggtaaacagtgcagccgtgtatgttctgttaaattaatggattgtagcacattttagatatgtttctatttcattcctgtatagcataataaatttcgtttcggttcttctctttaattgcagagatcagtattaacttttgggtattcagaaatatcttagttggattacaaattatactgcaaagtacaactatctaatctcaccaaagtccaaagtaccactaaactgctaagtgcgccactaatctaacctctgcagtacaccagagataaaccaaaccacgtgtgttccaggaagcaaagaagaacgcacactaagcagaggactaagatgcggaagcaagcgtagttagccaaacaaacctacgaccacgaccgcctccacccgagctaggtcacgaacggcatcagtgcaacaggcaatcccagcggcgtcggcaagaaatcagatctggaagacaaggaagacggaggaaggagatccgaaaaatgcgaggcagagacggggaagacgaggaaggagtttaattgatctacaagcttcagaacatgttcaagaatacatttcagtctgggttcctgtccattctttatagcctcgggaccaagccattgcagatatgggataaggaagttgtgaatgggcacattaaacgaccccaagatgaagatatccaatctaatgtacttgaaattgttggaacaaatgtacagtcaacttacatcacatgcccagctgatccttctgctactcttgggattaagcttccatttctggctattattgtgaaaaatcttaagaaatacttcacgtttgagatccaagttctggatgacaagaatgtccgacgtcgatttcgagcatcaaattttcaatctgtcacaagggtgaagccatatatctgcacgatgccgttgaaactcgacgatggctggaacaacatccagttgaaccttgctgatctgacaaaaagggcgtacggcacaaattacgtcgagacgctgcgggtgcaagttcatgcgaactgccggctccgcagaatctacttctctgaccgcctctactcggaggaggagctgccgcctgagttcaagctctaccttccaatccagaaatcataggatcccgagggcgtggagagactctggtgaccgggagacttatatcgtaccattgtgaggataacctagctgcacatctgcgccttcctgagatacagaaaaaaaatgtaccagaatgtttctgttagttttctgattgttgtgcgatgaatgattaggctgttctgttttcatagcaagggcgagtagccttagttggggctgttacccagtgacccctttgtgtgaacgagtagtcaatgttattagtccggaccctttggctactggtccttctggtccaaagcaaaacgtaccgttactgctcactgcctggtcatttaacgtgcttcttccatggttgtaccgtctctatgatagtatcatgtggccgctgatctattggatacatgttacgcgtgactcgcattaaaagcttcacttctcttt

SEQ ID NO: 69420 - DNA, 547 bp, Zea Mays
aataatgtgatgtattgctatgaactgcaaaaaaaaagtcttatcctgtgtgtcatgatagtcttgactaggttgtgttatgtgcttctcttatcttgctatctaggtggctttgcaattgttcaacccttttgtaaaaaaaagttgcttgttttgcccataaaaaaaaagagacccccttctccaaacaatctagtggttccctagtgaaacctttaaaaaaatcatatgcttatgttagtttttctaacccttgtgtgttttacccttgaatttacacctgcacagtttgtaggaccctgtagcttgaccgctagaccagcccaagtctccttgtatactggttgtgtcaaaaaaaaacatcgtttggtgtctagttgcgcaaaccatgaccaagccatgtttctttccataaatccttgcccctaaaacttcatagcgtttctgtcgatcatcctagctgatcctgtttgcctacctctcctttcgctgggatctggcaatccttcttctagtgaatcatgtttgctttatcgtccgaatctcg

SEQ ID NO: 69421 - DNA, 244 bp, Zea Mays
atttaggaccgagagatgacgctcatgcaagtggtgtggtgccaaccacaagatgccgcggtggacgacctgaaggatggacataaccagtggatgctcgccaagcgagtgccaccccagcaaacactatctaagtgttaaaataaaggcaagccccggttttatgcataaccgtttatatatgctattttactacacttaatgtttgtaggcttgtattgtgcacttaagtgtaggagttgat

SEQ ID NO: 69422 - DNA, 2577 bp, Zea Mays
gtccattttgttctcccgttccgcatagcgtacgctcgctccctctctatctctctctctcggttctcccgttcccccgcgcggcgatctctctcgtggcgaccagcgggcgaccgccgcacgcccaggtcgtcattggctcctcagccaggtgctgttcgggcccctaaactgggcgccggcgacgagcacgcgccaggactgtaatctgatctcgtggtggtatggttcgtcctaggattctcgtggcttgttcatgctccgagactccgagttgtgctttacctcgaattgctgcagtatccgtagggggcatgattgatggtggaacatcctcaccagtgtcagaaatgtcaatgtagctctaacgttcatttctcagtttgctgaagtaaacgatttcgggatgggtttgcctcaaattcctgtggttaaggaggaagagcctactgaagtgagtacacctgccggttctagtttcagtgtcgatggcccctgcgattcgggtaaacttctcgagggaagctcaagtggaagttggtttcagaacccatccatcagcgacttcaagagaaaatttgcaccaggtgctgcttcgaatggattaaatagtcagttcagaactagacatgccgttgatgatcctgcgggctaccaaagcctgaatcctaaaccaagagatccaaattatagatcatgcactaaaatcaaatctactctacatatacctgcaatgagggttgttgggtttgattcaggaactgatggttctaccgggggccctgatataatggtatctcacaaaatgcattcatctttagtcattggtaattgtgattcatcagttgtacatcacgaagttcaggcaaggaaaagggtgttgtcaccattaactaatgcgcttcctgctggacagttctatgggaatgcgctgaatattggttccggcgatgaaaaagttcagaaccctcgttgtgttagacagctctcttattctggcttccatgacagtaaaaaagctaacactggagctcttgattcctttcagccatctactaggtcagaattgagatactccgattggagtacagggcaggggttctgtaagtttagttctaacacattcactgatggtcctttgcttgagggtagggaattattttcatgctcagatcaacctggagttgaagggattatgaaccttgcaaaggtgcctgcaagattgtcacattctcctccacccactctttctccactccgtccaaaatggatgcatagaatgaaggctgcaagagctcagagggatttgacgggacgaattgaaaatgacatcattgatttgaaggaaatgggaaggtcaaattttgacgattattcagaatatgtcggtacgataaggatgggtgatatactagaagaaaccagtattttgcatgatggatttgatacaatgatccctaagagaaattttcataggagataccggtgcttgggtccagaatctgcccctgtgtctacacacattgaatgtattaatagctcgaacctcctccctgtaaggaggtcattagttggctcctttgaggaatctctcttatctggtcgctattcatgtggaaaagacaatcagagtattgatggttttctggctattcttaatgtgactggcggtagtttttctcccccaactcagaagtttccgtttacagtgagcagcattgatgaagatagctccctgttgtactactcgtcgattgatcttgcggggaggttgcctacaaacaataccaaaggcccaaaacttaaaagaagcctcagtagcagtgattcacggtcaacaaatagccgattacgcattcccgtgaaaggccgcatacaactggtggttagtaacccagagaagacaccacttcacacctttttctgtacctatgatttgagtgacatgcctgctggaaccaagactttcatgcggcaaaagatcactctatcctctgcttctccctctcatccgaccagagaagaaagcaaggccagtgatgtaaaggtcgagtcagtccagtgtggaagtgaacttagagagttcggggctctattttctgaatgttctgacaatgggcatgagttggaaaagggacgttctgcagatatggaatgtttctccatggaatgtgacgttagagaaccaaatgaaaatggtacttcggggaattcagaaaatgatgctaatgctgaggggtgctgctgtcaaataaactcatgtgaaggtggaaagatatatttcaacagatctcccaaggtcaatgatattccagctggaggggttctgcggtatgctttgcacttacgttttctgagccccttctccaagaagtcatcaaagtcaaggtatcattgcaaattggatatgtcatcacaaccacacagtcgcagtaggactgaggaagagagaagattttatctttacaatgatattagagttgtctttcctcagaggcactcagactctgacgaaggcgagattaacccatctctgccactaactgaaaatgctggtcgtagatggatggagtaaag

SEQ ID NO: 69423 - DNA, 2615 bp, Zea Mays
gtccattttgttctcccgttccgcatagcgtacgctcgctccctctctatctctctctctcggttctcccgttcccccgcgcggcgatctctctcgtggcgaccagcgggcgaccgccgcacgcccaggtcgtcattggctcctcagccaggtgctgttcgggcccctaaactgggcgccggcgacgagcacgcgccaggactgtaatctgatctcgtggtggtatggttcgtcctaggattctcgtggcttgttcatgctccgagactccgagttgtgctttacctcgaattgctgcagtatccgtagggggcatgattgatggtggaacatcctcaccagtgtcagaaatgtcaatgtagctctaacgttcatttctcagtttgctgaagtaaacgatttcgggatgggtttgcctcaaattcctgtggttaaggaggaagagcctactgaagtgagtacacctgccggttctagtttcagtgtcgatggcccctgcgattcgggtaaacttctcgagggaagctcaagtggaagttggtttcagaacccatccatcagcgacttcaagagaaaatttgcaccaggtgctgcttcgaatggattaaatagtcagttcagaactagacatgccgttgatgatcctgcgggctaccaaagcctgaatcctaaaccaagagatccaaattatagatcatgcactaaaatcaaatctactctacatatacctgcaatgagggttgttgggtttgattcaggaactgatggttctaccgggggccctgatataatggtatctcacaaaatgcattcatctttagtcattggtaattgtgattcatcagttgtacatcacgaagttcaggcaaggaaaagggtgttgtcaccattaactaatgcgcttcctgctggacagttctatgggaatgcgctgaatattggttccggcgatgaaaaagttcagaaccctcgttgtgttagacagctctcttattctggcttccatgacagtaaaaaagctaacactggagctcttgattcctttcagccatctactaggtcagaattgagatactccgattggagtacagggcaggggttctgtaagtttagttctaacacattcactgatggtcctttgcttgagggtagggaattattttcatgctcagatcaacctggagttgaagggattatgaaccttgcaaaggtgcctgcaagattgtcacattctcctccacccactctttctccactccgtccaaaatggatgcatagaatgaaggctgcaagagctcagagggatttgacgggacgaattgaaaatgacatcattgatttgaaggaaatgggaaggtcaaattttgacgattattcagaatatgtcggtacgataaggatgggtgatatactagaagaaaccagtattttgcatgatggatttgatacaatgatccctaagagaaattttcataggagataccggtgcttgggtccagaatctgcccctgtgtctacacacattgaatgtattaatagctcgaacctcctccctgtaaggaggtcattagttggctcctttgaggaatctctcttatctggtcgctattcatgtggaaaagacaatcagagtattgatggttttctggctattcttaatgtgactggcggtagtttttctcccccaactcagaagtttccgtttacagtgagcagcattgatgaagatagctccctgttgtactactcgtcgattgatcttgcggggaggttgcctacaaacaataccaaaggcccaaaacttaaaagaagcctcagtagcagtgattcacggtcaacaaatagccgattacgcattcccgtgaaaggccgcatacaactggtggttagtaacccagagaagacaccacttcacacctttttctgtacctatgatttgagtgacatgcctgctggaaccaaggttctgacaatgggcatgagttggaaaagggacgttctgcagatatggaatgtttctccatggaatgtgacgttagagaaccaaatgaaaatggtacttcggggaattcagaaaatgatgctaatgctgaggggtgctgctgtcaaataaactcatgtgaaggtggaaagatatatttcaacagatctcccaaggtcaatgatattccagctggaggggttctgcggtatgctttgcacttacgttttctgagccccttctccaagaagtcatcaaagtcaaggtatcattgcaaattggatatgtcatcacaaccacacagtcgcagtaggactgaggaagagagaagattttatctttacaatgatattagagttgtctttcctcagaggcactcagactctgacgaaggcgaggaagcgaagaattataagaagcatatctgacagcaaagggacgaatgcgtcttatacactgaagaaacagacaatgcctgagtctcatccatctttttttttgggcaaaagtacttgcctcccaagtaaatcaaagaagaattcctcaaaaaatagtttttggtgtacaaaccctaagaaagtaatgtagagaagtaaaaaaaaaggaaaagaaaacctgtcagaaaatttagcag

SEQ ID NO: 69424 - DNA, 2849 bp, Zea Mays
gtccattttgttctcccgttccgcatagcgtacgctcgctccctctctatctctctctctcggttctcccgttcccccgcgcggcgatctctctcgtggcgaccagcgggcgaccgccgcacgcccaggtcgtcattggctcctcagccaggtgctgttcgggcccctaaactgggcgccggcgacgagcacgcgccaggactgtaatctgatctcgtggtggtatggttcgtcctaggattctcgtggcttgttcatgctccgagactccgagttgtgctttacctcgaattgctgcagtatccgtagggggcatgattgatggtggaacatcctcaccagtgtcagaaatgtcaatgtagctctaacgttcatttctcagtttgctgaagtaaacgatttcgggatgggtttgcctcaaattcctgtggttaaggaggaagagcctactgaagtgagtacacctgccggttctagtttcagtgtcgatggcccctgcgattcgggtaaacttctcgagggaagctcaagtggaagttggtttcagaacccatccatcagcgacttcaagagaaaatttgcaccaggtgctgcttcgaatggattaaatagtcagttcagaactagacatgccgttgatgatcctgcgggctaccaaagcctgaatcctaaaccaagagatccaaattatagatcatgcactaaaatcaaatctactctacatatacctgcaatgagggttgttgggtttgattcaggaactgatggttctaccgggggccctgatataatggtatctcacaaaatgcattcatctttagtcattggtaattgtgattcatcagttgtacatcacgaagttcaggcaaggaaaagggtgttgtcaccattaactaatgcgcttcctgctggacagttctatgggaatgcgctgaatattggttccggcgatgaaaaagttcagaaccctcgttgtgttagacagctctcttattctggcttccatgacagtaaaaaagctaacactggagctcttgattcctttcagccatctactaggtcagaattgagatactccgattggagtacagggcaggggttctgtaagtttagttctaacacattcactgatggtcctttgcttgagggtagggaattattttcatgctcagatcaacctggagttgaagggattatgaaccttgcaaaggtgcctgcaagattgtcacattctcctccacccactctttctccactccgtccaaaatggatgcatagaatgaaggctgcaagagctcagagggatttgacgggacgaattgaaaatgacatcattgatttgaaggaaatgggaaggtcaaattttgacgattattcagaatatgtcggtacgataaggatgggtgatatactagaagaaaccagtattttgcatgatggatttgatacaatgatccctaagagaaattttcataggagataccggtgcttgggtccagaatctgcccctgtgtctacacacattgaatgtattaatagctcgaacctcctccctgtaaggaggtcattagttggctcctttgaggaatctctcttatctggtcgctattcatgtggaaaagacaatcagagtattgatggttttctggctattcttaatgtgactggcggtagtttttctcccccaactcagaagtttccgtttacagtgagcagcattgatgaagatagctccctgttgtactactcgtcgattgatcttgcggggaggttgcctacaaacaataccaaaggcccaaaacttaaaagaagcctcagtagcagtgattcacggtcaacaaatagccgattacgcattcccgtgaaaggccgcatacaactggtggttagtaacccagagaagacaccacttcacacctttttctgtacctatgatttgagtgacatgcctgctggaaccaagactttcatgcggcaaaagatcactctatcctctgcttctccctctcatccgaccagagaagaaagcaaggccagtgatgtaaaggttctgacaatgggcatgagttggaaaagggacgttctgcagatatggaatgtttctccatggaatgtgacgttagagaaccaaatgaaaatggtacttcggggaattcagaaaatgatgctaatgctgaggggtgctgctgtcaaataaactcatgtgaaggtggaaagatatatttcaacagatctcccaaggtcaatgatattccagctggaggggttctgcggtatgctttgcacttacgttttctgagccccttctccaagaagtcatcaaagtcaaggtatcattgcaaattggatatgtcatcacaaccacacagtcgcagtaggactgaggaagagagaagattttatctttacaatgatattagagttgtctttcctcagaggcactcagactctgacgaaggcgagctgcgggttgagcatgacttcccagcaaatcccaagtattttgacataagcaactaagaactccttgcacactcgtgaagctgcagataaaatttgtacataccatttcgtcactaatcaatctttactgcttattaccatcgatgtacagactaaccttgcaatgaaattatttacttcatgtatctatatattttttatgtataaggtagtgcttgtggcttccactagctggtagtagaggtttggttatatcggcttgtgagaccgtcgaagctgattgatcgcgggctgtttgggtaccaggttagaatctactaggatcattctgaatgattacggggaggctacgctagcgcaaaacaaaatttttaaccccataaaac

SEQ ID NO: 69425 - DNA, 2686 bp, Zea Mays
gtccattttgttctcccgttccgcatagcgtacgctcgctccctctctatctctctctctcggttctcccgttcccccgcgcggcgatctctctcgtggcgaccagcgggcgaccgccgcacgcccaggtcgtcattggctcctcagccaggtgctgttcgggcccctaaactgggcgccggcgacgagcacgcgccaggactgtaatctgatctcgtggtggtatggttcgtcctaggattctcgtggcttgttcatgctccgagactccgagttgtgctttacctcgaattgctgcagtatccgtagggggcatgattgatggtggaacatcctcaccagtgtcagaaatgtcaatgtagctctaacgttcatttctcagtttgctgaagtaaacgatttcgggatgggtttgcctcaaattcctgtggttaaggaggaagagcctactgaagtgagtacacctgccggttctagtttcagtgtcgatggcccctgcgattcgggtaaacttctcgagggaagctcaagtggaagttggtttcagaacccatccatcagcgacttcaagagaaaatttgcaccaggtgctgcttcgaatggattaaatagtcagttcagaactagacatgccgttgatgatcctgcgggctaccaaagcctgaatcctaaaccaagagatccaaattatagatcatgcactaaaatcaaatctactctacatatacctgcaatgagggttgttgggtttgattcaggaactgatggttctaccgggggccctgatataatggtatctcacaaaatgcattcatctttagtcattggtaattgtgattcatcagttgtacatcacgaagttcaggcaaggaaaagggtgttgtcaccattaactaatgcgcttcctgctggacagttctatgggaatgcgctgaatattggttccggcgatgaaaaagttcagaaccctcgttgtgttagacagctctcttattctggcttccatgacagtaaaaaagctaacactggagctcttgattcctttcagccatctactaggtcagaattgagatactccgattggagtacagggcaggggttctgtaagtttagttctaacacattcactgatggtcctttgcttgagggtagggaattattttcatgctcagatcaacctggagttgaagggattatgaaccttgcaaaggtgcctgcaagattgtcacattctcctccacccactctttctccactccgtccaaaatggatgcatagaatgaaggctgcaagagctcagagggatttgacgggacgaattgaaaatgacatcattgatttgaaggaaatgggaaggtcaaattttgacgattattcagaatatgtcggtacgataaggatgggtgatatactagaagaaaccagtattttgcatgatggatttgatacaatgatccctaagagaaattttcataggagataccggtgcttgggtccagaatctgcccctgtgtctacacacattgaatgtattaatagctcgaacctcctccctgtaaggaggtcattagttggctcctttgaggaatctctcttatctggtcgctattcatgtggaaaagacaatcagtgagcagcattgatgaagatagctccctgttgtactactcgtcgattgatcttgcggggaggttgcctacaaacaataccaaaggcccaaaacttaaaagaagcctcagtagcagtgattcacggtcaacaaatagccgattacgcattcccgtgaaaggccgcatacaactggtggttagtaacccagagaagacaccacttcacacctttttctgtacctatgatttgagtgacatgcctgctggaaccaaggttctgacaatgggcatgagttggaaaagggacgttctgcagatatggaatgtttctccatggaatgtgacgttagagaaccaaatgaaaatggtacttcggggaattcagaaaatgatgctaatgctgaggggtgctgctgtcaaataaactcatgtgaaggtggaaagatatatttcaacagatctcccaaggtcaatgatattccagctggaggggttctgcggtatgctttgcacttacgttttctgagccccttctccaagaagtcatcaaagtcaaggtatcattgcaaattggatatgtcatcacaaccacacagtcgcagtaggactgaggaagagagaagattttatctttacaatgatattagagttgtctttcctcagaggcactcagactctgacgaaggcgagctgcgggttgagcatgacttcccagcaaatcccaagtattttgacataagcaactaagaactccttgcacactcgtgaagctgcagataaaatttgtacataccatttcgtcactaatcaatctttactgcttattaccatcgatgtacagactaaccttgcaatgaaattatttacttcatgtatctatatattttttatgtataaggtagtgcttgtggcttccactagctggtagtagaggtttggttatatcggcttgtgagaccgtcgaagctgattgatcgcgggctgtttgggtaccaggttagaatctactaggatcattctgaatgattacggggaggctacgctagcgcaaaacaaaatttttaaccccataaaac

SEQ ID NO: 69426 - DNA, 2899 bp, Zea Mays
gtccattttgttctcccgttccgcatagcgtacgctcgctccctctctatctctctctctcggttctcccgttcccccgcgcggcgatctctctcgtggcgaccagcgggcgaccgccgcacgcccaggtcgtcattggctcctcagccaggtgctgttcgggcccctaaactgggcgccggcgacgagcacgcgccaggactgtaatctgatctcgtggtggtatggttcgtcctaggattctcgtggcttgttcatgctccgagactccgagttgtgctttacctcgaattgctgcagtatccgtagggggcatgattgatggtggaacatcctcaccagtgtcagaaatgtcaatgtagctctaacgttcatttctcagtttgctgaagtaaacgatttcgggatgggtttgcctcaaattcctgtggttaaggaggaagagcctactgaagtgagtacacctgccggttctagtttcagtgtcgatggcccctgcgattcgggtaaacttctcgagggaagctcaagtggaagttggtttcagaacccatccatcagcgacttcaagagaaaatttgcaccaggtgctgcttcgaatggattaaatagtcagttcagaactagacatgccgttgatgatcctgcgggctaccaaagcctgaatcctaaaccaagagatccaaattatagatcatgcactaaaatcaaatctactctacatatacctgcaatgagggttgttgggtttgattcaggaactgatggttctaccgggggccctgatataatggtatctcacaaaatgcattcatctttagtcattggtaattgtgattcatcagttgtacatcacgaagttcaggcaaggaaaagggtgttgtcaccattaactaatgcgcttcctgctggacagttctatgggaatgcgctgaatattggttccggcgatgaaaaagttcagaaccctcgttgtgttagacagctctcttattctggcttccatgacagtaaaaaagctaacactggagctcttgattcctttcagccatctactaggtcagaattgagatactccgattggagtacagggcaggggttctgtaagtttagttctaacacattcactgatggtcctttgcttgagggtagggaattattttcatgctcagatcaacctggagttgaagggattatgaaccttgcaaaggtgcctgcaagattgtcacattctcctccacccactctttctccactccgtccaaaatggatgcatagaatgaaggctgcaagagctcagagggatttgacgggacgaattgaaaatgacatcattgatttgaaggaaatgggaaggtcaaattttgacgattattcagaatatgtcggtacgataaggatgggtgatatactagaagaaaccagtattttgcatgatggatttgatacaatgatccctaagagaaattttcataggagataccggtgcttgggtccagaatctgcccctgtgtctacacacattgaatgtattaatagctcgaacctcctccctgtaaggaggtcattagttggctcctttgaggaatctctcttatctggtcgctattcatgtggaaaagacaatcagagtattgatggttttctggctattcttaatgtgactggcggtagtttttctcccccaactcagaagtttccgtttacagtgagcagcattgatgaagatagctccctgttgtactactcgtcgattgatcttgcggggaggttgcctacaaacaataccaaaggcccaaaacttaaaagaagcctcagtagcagtgattcacggtcaacaaatagccgattacgcattcccgtgaaaggccgcatacaactgtaacccagagaagacaccacttcacacctttttctgtacctatgatttgagtgacatgcctgctggaaccaagactttcatgcggcaaaagatcactctatcctctgcttctccctctcatccgaccagagaagaaagcaaggccagtgatgtaaaggtcgagtcagtccagtgtggaagtgaacttagagagttcggggctctattttctgaatgttctgacaatgggcatgagttggaaaagggacgttctgcagatatggaatgtttctccatggaatgtgacgttagagaaccaaatgaaaatggtacttcggggaattcagaaaatgatgctaatgctgaggggtgctgctgtcaaataaactcatgtgaaggtggaaagatatatttcaacagatctcccaaggtcaatgatattccagctggaggggttctgcggtatgctttgcacttacgttttctgagccccttctccaagaagtcatcaaagtcaaggtatcattgcaaattggatatgtcatcacaaccacacagtcgcagtaggactgaggaagagagaagattttatctttacaatgatattagagttgtctttcctcagaggcactcagactctgacgaaggcgagctgcgggttgagcatgacttcccagcaaatcccaagtattttgacataagcaactaagaactccttgcacactcgtgaagctgcagataaaatttgtacataccatttcgtcactaatcaatctttactgcttattaccatcgatgtacagactaaccttgcaatgaaattatttacttcatgtatctatatattttttatgtataaggtagtgcttgtggcttccactagctggtagtagaggtttggttatatcggcttgtgagaccgtcgaagctgattgatcgcgggctgtttgggtaccaggttagaatctactaggatcattctgaatgattacggggaggctacgctagcgcaaaacaaaatttttaaccccataaaac

SEQ ID NO: 69427 - DNA, 2828 bp, Zea Mays
gtccattttgttctcccgttccgcatagcgtacgctcgctccctctctatctctctctctcggttctcccgttcccccgcgcggcgatctctctcgtggcgaccagcgggcgaccgccgcacgcccaggtcgtcattggctcctcagccaggtgctgttcgggcccctaaactgggcgccggcgacgagcacgcgccaggactgtaatctgatctcgtggtggtatggttcgtcctaggattctcgtggcttgttcatgctccgagactccgagttgtgctttacctcgaattgctgcagtatccgtagggggcatgattgatggtggaacatcctcaccagtgtcagaaatgtcaatgtagctctaacgttcatttctcagtttgctgaagtaaacgatttcgggatgggtttgcctcaaattcctgtggttaaggaggaagagcctactgaagtgagtacacctgccggttctagtttcagtgtcgatggcccctgcgattcgggtaaacttctcgagggaagctcaagtggaagttggtttcagaacccatccatcagcgacttcaagagaaaatttgcaccaggtgctgcttcgaatggattaaatagtcagttcagaactagacatgccgttgatgatcctgcgggctaccaaagcctgaatcctaaaccaagagatccaaattatagatcatgcactaaaatcaaatctactctacatatacctgcaatgagggttgttgggtttgattcaggaactgatggttctaccgggggccctgatataatggtatctcacaaaatgcattcatctttagtcattggtaattgtgattcatcagttgtacatcacgaagttcaggcaaggaaaagggtgttgtcaccattaactaatgcgcttcctgctggacagttctatgggaatgcgctgaatattggttccggcgatgaaaaagttcagaaccctcgttgtgttagacagctctcttattctggcttccatgacagtaaaaaagctaacactggagctcttgattcctttcagccatctactaggtcagaattgagatactccgattggagtacagggcaggggttctgtaagtttagttctaacacattcactgatggtcctttgcttgagggtagggaattattttcatgctcagatcaacctggagttgaagggattatgaaccttgcaaaggtgcctgcaagattgtcacattctcctccacccactctttctccactccgtccaaaatggatgcatagaatgaaggctgcaagagctcagagggatttgacgggacgaattgaaaatgacatcattgatttgaaggaaatgggaaggtcaaattttgacgattattcagaatatgtcggtacgataaggatgggtgatatactagaagaaaccagtattttgcatgatggatttgatacaatgatccctaagagaaattttcataggagataccggtgcttgggtccagaatctgcccctgtgtctacacacattgaatgtattaatagctcgaacctcctccctgtaaggaggtcattagttggctcctttgaggaatctctcttatctggtcgctattcatgtggaaaagacaatcagtgagcagcattgatgaagatagctccctgttgtactactcgtcgattgatcttgcggggaggttgcctacaaacaataccaaaggcccaaaacttaaaagaagcctcagtagcagtgattcacggtcaacaaatagccgattacgcattcccgtgaaaggccgcatacaactggtggttagtaacccagagaagacaccacttcacacctttttctgtacctatgatttgagtgacatgcctgctggaaccaagactttcatgcggcaaaagatcactctatcctctgcttctccctctcatccgaccagagaagaaagcaaggccagtgatgtaaaggtcgagtcagtccagtgtggaagtgaacttagagagttcggggctctattttctgaatgttctgacaatgggcatgagttggaaaagggacgttctgcagatatggaatgtttctccatggaatgtgacgttagagaaccaaatgaaaatggtacttcggggaattcagaaaatgatgctaatgctgaggggtgctgctgtcaaataaactcatgtgaaggtggaaagatatatttcaacagatctcccaaggtcaatgatattccagctggaggggttctgcggtatgctttgcacttacgttttctgagccccttctccaagaagtcatcaaagtcaaggtatcattgcaaattggatatgtcatcacaaccacacagtcgcagtaggactgaggaagagagaagattttatctttacaatgatattagagttgtctttcctcagaggcactcagactctgacgaaggcgagctgcgggttgagcatgacttcccagcaaatcccaagtattttgacataagcaactaagaactccttgcacactcgtgaagctgcagataaaatttgtacataccatttcgtcactaatcaatctttactgcttattaccatcgatgtacagactaaccttgcaatgaaattatttacttcatgtatctatatattttttatgtataaggtagtgcttgtggcttccactagctggtagtagaggtttggttatatcggcttgtgagaccgtcgaagctgattgatcgcgggctgtttgggtaccaggttagaatctactaggatcattctgaatgattacggggaggctacgctagcgcaaaacaaaatttttaaccccataaaac

SEQ ID NO: 69428 - DNA, 2788 bp, Zea Mays
ctttcgtctgttttcctacggtcgtccattttgttctcccgttccgcatagcgtacgctcgctccctctctatctctctctctcggttctcccgttcccccgcgcggcgatctctctcgtggcgaccagcgggcgaccgccgcacgcccaggtcgtcattggctcctcagccaggtgctgttcgggcccctaaactgggcgccggcgacgagcacgcgccaggactgtaatctgatctcgtggtggtatggttcgtcctaggattctcgtggcttgttcatgctccgagactccgagttgtgctttacctcgaattgctgcagtatccgtagggggcatgattgatggtggaacatcctcaccagtgtcagaaatgtcaatgtagctctaacgttcatttctcagtttgctgaagtaaacgatttcgggatgggtttgcctcaaattcctgtggttaaggaggaagagcctactgaagtgagtacacctgccggttctagtttcagtgtcgatggcccctgcgattcgggtaaacttctcgagggaagctcaagtggaagttggtttcagaacccatccatcagcgacttcaagagaaaatttgcaccaggtgctgcttcgaatggattaaatagtcagttcagaactagacatgccgttgatgatcctgcgggctaccaaagcctgaatcctaaaccaagagatccaaattatagatcatgcactaaaatcaaatctactctacatatacctgcaatgagggttgttgggtttgattcaggaactgatggttctaccgggggccctgatataatggtatctcacaaaatgcattcatctttagtcattggtaattgtgattcatcagttgtacatcacgaagttcaggcaaggaaaagggtgttgtcaccattaactaatgcgcttcctgctggacagttctatgggaatgcgctgaatattggttccggcgatgaaaaagttcagaaccctcgttgtgttagacagctctcttattctggcttccatgacagtaaaaaagctaacactggagctcttgattcctttcagccatctactaggtcagaattgagatactccgattggagtacagggcaggggttctgtaagtttagttctaacacattcactgatggtcctttgcttgagggtagggaattattttcatgctcagatcaacctggagttgaagggattatgaaccttgcaaaggtgcctgcaagattgtcacattctcctccacccactctttctccactccgtccaaaatggatgcatagaatgaaggctgcaagagctcagagggatttgacgggacgaattgaaaatgacatcattgatttgaaggaaatgggaaggtcaaattttgacgattattcagaatatgtcggtacgataaggatgggtgatatactagaagaaaccagtattttgcatgatggatttgatacaatgatccctaagagaaattttcataggagataccggtgcttgggtccagaatctgcccctgtgtctacacacattgaatgtattaatagctcgaacctcctccctgtaaggaggtcattagttggctcctttgaggaatctctcttatctggtcgctattcatgtggaaaagacaatcagagtattgatggttttctggctattcttaatgtgactggcggtagtttttctcccccaactcagaagtttccgtttacagtgagcagcattgatgaagatagctccctgttgtactactcgtcgattgatcttgcggggaggttgcctacaaacaataccaaaggcccaaaacttaaaagaagcctcagtagcagtgattcacggtcaacaaatagccgattacgcattcccgtgaaaggccgcatacaactggtggttagtaacccagagaagacaccacttcacacctttttctgtacctatgatttgagtgacatgcctgctggaaccaaggttctgacaatgggcatgagttggaaaagggacgttctgcagatatggaatgtttctccatggaatgtgacgttagagaaccaaatgaaaatggtacttcggggaattcagaaaatgatgctaatgctgaggggtgctgctgtcaaataaactcatgtgaaggtggaaagatatatttcaacagatctcccaaggtcaatgatattccagctggaggggttctgcggtatgctttgcacttacgttttctgagccccttctccaagaagtcatcaaagtcaaggtatcattgcaaattggatatgtcatcacaaccacacagtcgcagtaggactgaggaagagagaagattttatctttacaatgatattagagttgtctttcctcagaggcactcagactctgacgaaggcgagctgcgggttgagcatgacttcccagcaaatcccaagtattttgacataagcaactaagaactccttgcacactcgtgaagctgcagataaaatttgtacataccatttcgtcactaatcaatctttactgcttattaccatcgatgtacagactaaccttgcaatgaaattatttacttcatgtatctatatattttttatgtataaggtagtgcttgtggcttccactagctggtagtagaggtttggttatatcggcttgtgagaccgtcgaagctgattgatcgcgggctgtttgggtaccaggttagaatctactaggatcattctgaatgattacggggaggctacgctagcgcaaaacaaaatttttaaccccataaaac

SEQ ID NO: 69429 - DNA, 2968 bp, Zea Mays
ccccccaaagtatgtgagacattcagacatgccctttcctttcgtctgttttcctacggtcgtccattttgttctcccgttccgcatagcgtacgctcgctccctctctatctctctctctcggttctcccgttcccccgcgcggcgatctctctcgtggcgaccagcgggcgaccgccgcacgcccaggtcgtcattggctcctcagccaggtgctgttcgggcccctaaactgggcgccggcgacgagcacgcgccaggactgtaatctgatctcgtggtggtatggttcgtcctaggattctcgtggcttgttcatgctccgagactccgagttgtgctttacctcgaattgctgcagtatccgtagggggcatgattgatggtggaacatcctcaccagtgtcagaaatgtcaatgtagctctaacgttcatttctcagtttgctgaagtaaacgatttcgggatgggtttgcctcaaattcctgtggttaaggaggaagagcctactgaagtgagtacacctgccggttctagtttcagtgtcgatggcccctgcgattcgggtaaacttctcgagggaagctcaagtggaagttggtttcagaacccatccatcagcgacttcaagagaaaatttgcaccaggtgctgcttcgaatggattaaatagtcagttcagaactagacatgccgttgatgatcctgcgggctaccaaagcctgaatcctaaaccaagagatccaaattatagatcatgcactaaaatcaaatctactctacatatacctgcaatgagggttgttgggtttgattcaggaactgatggttctaccgggggccctgatataatggtatctcacaaaatgcattcatctttagtcattggtaattgtgattcatcagttgtacatcacgaagttcaggcaaggaaaagggtgttgtcaccattaactaatgcgcttcctgctggacagttctatgggaatgcgctgaatattggttccggcgatgaaaaagttcagaaccctcgttgtgttagacagctctcttattctggcttccatgacagtaaaaaagctaacactggagctcttgattcctttcagccatctactaggtcagaattgagatactccgattggagtacagggcaggggttctgtaagtttagttctaacacattcactgatggtcctttgcttgagggtagggaattattttcatgctcagatcaacctggagttgaagggattatgaaccttgcaaaggtgcctgcaagattgtcacattctcctccacccactctttctccactccgtccaaaatggatgcatagaatgaaggctgcaagagctcagagggatttgacgggacgaattgaaaatgacatcattgatttgaaggaaatgggaaggtcaaattttgacgattattcagaatatgtcggtacgataaggatgggtgatatactagaagaaaccagtattttgcatgatggatttgatacaatgatccctaagagaaattttcataggagataccggtgcttgggtccagaatctgcccctgtgtctacacacattgaatgtattaatagctcgaacctcctccctgtaaggaggtcattagttggctcctttgaggaatctctcttatctggtcgctattcatgtggaaaagacaatcagagtattgatggttttctggctattcttaatgtgactggcggtagtttttctcccccaactcagaagtttccgtttacagtgagcagcattgatgaagatagctccctgttgtactactcgtcgattgatcttgcggggaggttgcctacaaacaataccaaaggcccaaaacttaaaagaagcctcagtagcagtgattcacggtcaacaaatagccgattacgcattcccgtgaaaggccgcatacaactggtggttagtaacccagagaagacaccacttcacacctttttctgtacctatgatttgagtgacatgcctgctggaaccaagactttcatgcggcaaaagatcactctatcctctgcttctccctctcatccgaccagagaagaaagcaaggccagtgatgtaaaggtcgagtcagtccagtgtggaagtgaacttagagagttcggggctctattttctgaatgttctgacaatgggcatgagttggaaaagggacgttctgcagatatggaatgtttctccatggaatgtgacgttagagaaccaaatgaaaatggtacttcggggaattcagaaaatgatgctaatgctgaggggtgctgctgtcaaataaactcatgtgaaggtggaaagatatatttcaacagatctcccaaggtcaatgatattccagctggaggggttctgcggtatgctttgcacttacgttttctgagccccttctccaagaagtcatcaaagtcaaggtatcattgcaaattggatatgtcatcacaaccacacagtcgcagtaggactgaggaagagagaagattttatctttacaatgatattagagttgtctttcctcagaggcactcagactctgacgaaggcgagctgcgggttgagcatgacttcccagcaaatcccaagtattttgacataagcaactaagaactccttgcacactcgtgaagctgcagataaaatttgtacataccatttcgtcactaatcaatctttactgcttattaccatcgatgtacagactaaccttgcaatgaaattatttacttcatgtatctatatattttttatgtataaggtagtgcttgtggcttccactagctggtagtagaggtttggttatatcggcttgtgagaccgtcgaagctgattgatcgcgggctgtttgggtaccaggttagaatctactaggatcattctgaatgattacggggaggctacgctagcgcaaaacaaaatttttaaccccataaaac

SEQ ID NO: 69430 - DNA, 2502 bp, Zea Mays
gtccattttgttctcccgttccgcatagcgtacgctcgctccctctctatctctctctctcggttctcccgttcccccgcgcggcgatctctctcgtggcgaccagcgggcgaccgccgcacgcccaggtcgtcattggctcctcagccaggtgctgttcgggcccctaaactgggcgccggcgacgagcacgcgccaggactgtaatctgatctcgtggtggtatggttcgtcctaggattctcgtggcttgttcatgctccgagactccgagttgtgctttacctcgaattgctgcagtatccgtagggggcatgattgatggtggaacatcctcaccagtgtcagaaatgtcaatgtagctctaacgttcatttctcagtttgctgaagtaaacgatttcgggatgggtttgcctcaaattcctgtggttaaggaggaagagcctactgaagtgagtacacctgccggttctagtttcagtgtcgatggcccctgcgattcgggtaaacttctcgagggaagctcaagtggaagttggtttcagaacccatccatcagcgacttcaagagaaaatttgcaccaggtgctgcttcgaatggattaaatagtcagttcagaactagacatgccgttgatgatcctgcgggctaccaaagcctgaatcctaaaccaagagatccaaattatagatcatgcactaaaatcaaatctactctacatatacctgcaatgagggttgttgggtttgattcaggaactgatggttctaccgggggccctgatataatggtatctcacaaaatgcattcatctttagtcattggtaattgtgattcatcagttgtacatcacgaagttcaggcaaggaaaagggtgttgtcaccattaactaatgcgcttcctgctggacagttctatgggaatgcgctgaatattggttccggcgatgaaaaagttcagaaccctcgttgtgttagacagctctcttattctggcttccatgacagtaaaaaagctaacactggagctcttgattcctttcagccatctactaggtcagaattgagatactccgattggagtacagggcaggggttctgtaagtttagttctaacacattcactgatggtcctttgcttgagggtagggaattattttcatgctcagatcaacctggagttgaagggattatgaaccttgcaaaggtgcctgcaagattgtcacattctcctccacccactctttctccactccgtccaaaatggatgcatagaatgaaggctgcaagagctcagagggatttgacgggacgaattgaaaatgacatcattgatttgaaggaaatgggaaggtcaaattttgacgattattcagaatatgtcggtacgataaggatgggtgatatactagaagaaaccagtattttgcatgatggatttgatacaatgatccctaagagaaattttcataggagataccggtgcttgggtccagaatctgcccctgtgtctacacacattgaatgtattaatagctcgaacctcctccctgtaaggaggtcattagttggctcctttgaggaatctctcttatctggtcgctattcatgtggaaaagacaatcagtgagcagcattgatgaagatagctccctgttgtactactcgtcgattgatcttgcggggaggttgcctacaaacaataccaaaggcccaaaacttaaaagaagcctcagtagcagtgattcacggtcaacaaatagccgattacgcattcccgtgaaaggccgcatacaactggtggttagtaacccagagaagacaccacttcacacctttttctgtacctatgatttgagtgacatgcctgctggaaccaagactttcatgcggcaaaagatcactctatcctctgcttctccctctcatccgaccagagaagaaagcaaggccagtgatgtaaaggtcgagtcagtccagtgtggaagtgaacttagagagttcggggctctattttctgaatgttctgacaatgggcatgagttggaaaagggacgttctgcagatatggaatgtttctccatggaatgtgacgttagagaaccaaatgaaaatggtacttcggggaattcagaaaatgatgctaatgctgaggggtgctgctgtcaaataaactcatgtgaaggtggaaagatatatttcaacagatctcccaaggtcaatgatattccagctggaggggttctgcggtatgctttgcacttacgttttctgagccccttctccaagaagtcatcaaagtcaaggtatcattgcaaattggatatgtcatcacaaccacacagtcgcagtaggactgaggaagagagaagattttatctttacaatgatattagagttgtctttcctcagaggcactcagactctgacgaaggcgagtggtcggttcttactgtgaaggcgcgccccaagagatagggacgctagtgacgcactgcc

SEQ ID NO: 69431 - DNA, 2423 bp, Zea Mays
gggctctcgaaaagcagggaaaaagaattctccatttccccactcgccctcgctccctccctctcccgctcccgctcgccagtgggagtgtgcggggctagcagctagggtttccgcgagcacaccgccggccagccgcgggcgatctcgggttcgcgggggcgcccgccccgactcgggttcgcgggggcgcggacatgaagtcgtcgctgcggaagctgcggggcttcgcgctgcagcgccacgagcagcgggtggaccgggaccgcggccgcggccactccaccacggcggcggaggagctcctcgctgctgcccaggatatgacagatatgaggagctgttacgataacttgctttctgttgctgcagcaattgcaaatagtgcatacgagttctctgaagcacttcaagacatgggggcttgtttgcttaaaagaattacaccaaataaagatggaatcaatgcgtgtgcatgttcttaatacgatcaccactccatcactgtcgcttcttaatgagcttcaaaccgtggaggaaatgaagcgccaatgtgatgaaaaaagagaattgtacgaattcatgctaaatgctcagaaagaaaagggaagatctaagaatgctaaaggtgataatgtagcatcagaacaattgaaacaagctcaggaagattatcaagaggaagcgactcttttcctattccggttgaagtcattgaagcaaggacagttccgaagtcttttcacacaagctgctcggcatcatgctgcacagctaaatttgttcagaaagggggtcaagtcccttgaggctgtagagccacatgttaggctcgctgctgagcagcaacacattgatcatcagtttagcgcacttgaggaagaggattatgttgttgaggatgagaatgatgacgagtacaacgacagtcatgatggagagttgtcttttgattatggagaaaataaggaaactgagaaatctggtatcgcttctaggaatcatacagaggatttttttaacagcagcaaagaagattattcttctgttccacatgaaagacagagaattgaaagtcagtcagcaccgctttttcctgggaaaaaggtcaatacagaagagagaataaaagatttgcggcgttctgcgacaaggaagttaaatacttatgttttgcctaccccaaatgatgttcgagctacttctcagatagcatcaggaaatcctatttctggacctctcgagagcaaaggtgccttccattcatctccactccacccttctgcagacataagagatttgagagacaataaactacctagtcctgcaagattgtctaatgtacagtctgtgctgaaagagagcaataccaatacagcagaaacaaggaaagtactcccagtgggtgatctcgctttacctggctattatgacctgaagactctcgacaacaacaaagtgaaaagagggtcattttctggcccaatagcttctagaccacggccaacagagaacaatgatgttatttctgcagcacccaggcatagctctgcacatcagccagtgcacatgagagtatcccccggcaactcgccgccacccatttcctcaccgaagatcaaggagcttcatgagcttcctcgaccgcctgttaatacatcaaaaaacacaacatttcccagtttggttgcccactcggccccattggtagcaaatcctgcatctctgacacccaaagttcaagaccattttagggcaagacaaatgcttcccagtactgcttcacctttaccaactccaccgcctggatccatatcccgcagtttttctataccttctagggggagaacaggttcagacggtaaggagatagaagatcagcaagacaagggagctgccagaatgagcctttcttctcttccttcagctcaaacattgttggaagatcgtcagccattgtcagcagctgctggatcggttagcaaaacataggagtattcactgcgaaggtggattactatcattatcaagcggcttgctgagcccttcctggaagaatgctgtacatattagcatgtgagccctggccagtatcgcggaagtagtaggttgtttctcgtgccctttggctaaggtgtagtctgcagatagtgggtttgcggaaataaattcccccaattttctcaccgcttggttgattgacgcgagatttgctgttgcgcgagcttgtttgcttgccttgaagcgaggtcggagtgccatctgttttctgcagcttctgtaattatcacctggtttcgtttcctgtggttatgtaattaccatccgcttcacccccgatcaaaaccacctgtggtaaggggaaaaaaaaggcaagaagcgctgtgttgtcgtattggcactctacatttaaagccccgggt

SEQ ID NO: 69432 - DNA, 2399 bp, Zea Mays
gggctctcgaaaagcagggaaaaagaattctccatttccccactcgccctcgctccctccctctcccgctcccgctcgccagtgggagtgtgcggggctagcagctagggtttccgcgagcacaccgccggccagccgcgggcgatctcgggttcgcgggggcgcccgccccgactcgggttcgcgggggcgcggacatgaagtcgtcgctgcggaagctgcggggcttcgcgctgcagcgccacgagcagcgggtggaccgggaccgcggccgcggccactccaccacggcggcggaggagctcctcgctgctgcccaggatatgacagatatgaggagctgttacgataacttgctttctgttgctgcagcaattgcaaatagtgcatacgagttctctgaagcacttcaagacatgggggcttgtttgcttaaaagaattacaccaaataaagatggaatcaatgataaagttttgctgttgcttgggaaatcacaatttgaacttcggaaacttgtagatagttatcgtgtgcatgttcttaatacgatcaccactccatcactgtcgcttcttaatgagcttcaaaccgtggaggaaatgaagcgccaatgtgatgaaaaaagagaattgtacgaattcatgctaaatgctcagaaagaaaagggaagatctaagaatgctaaaggtgataatgtagcatcagaacaattgaaacaagctcaggaagattatcaagaggaagcgactcttttcctattccggttgaagtcattgaagcaaggacagttccgaagtcttttcacacaagctgctcggcatcatgctgcacagctaaatttgttcagaaagggggtcaagtcccttgaggctgtagagccacatgttaggctcgctgctgagcagcaacacattgatcatcagtttagcgcacttgaggaagaggattatgttgttgaggatgagaatgatgacgagtacaacgacagtcatgatggagagttgtcttttgattatggagaaaataaggaaactgagaaatctggtatcgcttctaggaatcatacagaggatttttttaacagcagcaaagaagattattcttctgttccacatgaaagacagagaattgaaagtcagtcagcaccgctttttcctgggaaaaaggtcaatacagaagagagaataaaagatttgcggcgttctgcgacaaggaagttaaatacttatgttttgcctaccccaaatgatgttcgagctacttctcagatagcatcaggaaatcctatttctggacctctcgagagcaaaggtgccttccattcatctccactccacccttctgcagacataagagatttgagagacaataaactacctagtcctgcaagattgtctaatgtacagtctgtgctgaaagagagcaataccaatacagcagaaacaaggaaagtactcccagtgggtgatctcgctttacctggctattatgacctgaagactctcgacaacaacaaagtgaaaagagggtcattttctggcccaatagcttctagaccacggccaacagagaacaatgatgttatttctgcagcacccaggcatagctctgcacatcagccagtgcacatgagagtatcccccggcaactcgccgccacccatttcctcaccgaagatcaaggagcttcatgagcttcctcgaccgcctgttaatacatcaaaaaacacaacatttcccagtttggttgcccactcggccccattggtagcaaatcctgcatctctgacacccaaagttcaagaccattttaggggggagaacaggttcagacggtaaggagatagaagatcagcaagacaagggagctgccagaatgagcctttcttctcttccttcagctcaaacattgttggaagatcgtcagccattgtcagcagctgctggatcggttagcaaaacataggagtattcactgcgaaggtggattactatcattatcaagcggcttgctgagcccttcctggaagaatgctgtacatattagcatgtgagccctggccagtatcgcggaagtagtaggttgtttctcgtgccctttggctaaggtgtagtctgcagatagtgggtttgcggaaataaattcccccaattttctcaccgcttggttgattgacgcgagatttgctgttgcgcgagcttgtttgcttgccttgaagcgaggtcggagtgccatctgttttctgcagcttctgtaattatcacctggtttcgtttcctgtggttatgtaattaccatccgcttcacccccgatcaaaaccacctgtggtaaggggaaaaaaaaggcaagaagcgctgtgttgtcgtattggcactctacatttaaagccccgggt

SEQ ID NO: 69433 - DNA, 2475 bp, Zea Mays
gggctctcgaaaagcagggaaaaagaattctccatttccccactcgccctcgctccctccctctcccgctcccgctcgccagtgggagtgtgcggggctagcagctagggtttccgcgagcacaccgccggccagccgcgggcgatctcgggttcgcgggggcgcccgccccgactcgggttcgcgggggcgcggacatgaagtcgtcgctgcggaagctgcggggcttcgcgctgcagcgccacgagcagcgggtggaccgggaccgcggccgcggccactccaccacggcggcggaggagctcctcgctgctgcccagatatgaggagctgttacgataacttgctttctgttgctgcagcaattgcaaatagtgcatacgagttctctgaagcacttcaagacatgggggcttgtttgcttaaaagaattacaccaaataaagatggaatcaatgataaagttttgctgttgcttgggaaatcacaatttgaacttcggaaacttgtagatagttatcgtgtgcatgttcttaatacgatcaccactccatcactgtcgcttcttaatgagcttcaaaccgtggaggaaatgaagcgccaatgtgatgaaaaaagagaattgtacgaattcatgctaaatgctcagaaagaaaagggaagatctaagaatgctaaaggtgataatgtagcatcagaacaattgaaacaagctcaggaagattatcaagaggaagcgactcttttcctattccggttgaagtcattgaagcaaggacagttccgaagtcttttcacacaagctgctcggcatcatgctgcacagctaaatttgttcagaaagggggtcaagtcccttgaggctgtagagccacatgttaggctcgctgctgagcagcaacacattgatcatcagtttagcgcacttgaggaagaggattatgttgttgaggatgagaatgatgacgagtacaacgacagtcatgatggagagttgtcttttgattatggagaaaataaggaaactgagaaatctggtatcgcttctaggaatcatacagaggatttttttaacagcagcaaagaagattattcttctgttccacatgaaagacagagaattgaaagtcagtcagcaccgctttttcctgggaaaaaggtcaatacagaagagagaataaaagatttgcggcgttctgcgacaaggaagttaaatacttatgttttgcctaccccaaatgatgttcgagctacttctcagatagcatcaggaaatcctatttctggacctctcgagagcaaaggtgccttccattcatctccactccacccttctgcagacataagagatttgagagacaataaactacctagtcctgcaagattgtctaatgtacagtctgtgctgaaagagagcaataccaatacagcagaaacaaggaaagtactcccagtgggtgatctcgctttacctggctattatgacctgaagactctcgacaacaacaaagtgaaaagagggtcattttctggcccaatagcttctagaccacggccaacagagaacaatgatgttatttctgcagcacccaggcatagctctgcacatcagccagtgcacatgagagtatcccccggcaactcgccgccacccatttcctcaccgaagatcaaggagcttcatgagcttcctcgaccgcctgttaatacatcaaaaaacacaacatttcccagtttggttgcccactcggccccattggtagcaaatcctgcatctctgacacccaaagttcaagaccattttagggcaagacaaatgcttcccagtactgcttcacctttaccaactccaccgcctggatccatatcccgcagtttttctataccttctagggggagaacaggttcagacggtaaggagatagaagatcagcaagacaagggagctgccagaatgagcctttcttctcttccttcagctcaaacattgttggaagatcgtcagccattgtcagcagctgctggatcggttagcaaaacataggagtattcactgcgaaggtggattactatcattatcaagcggcttgctgagcccttcctggaagaatgctgtacatattagcatgtgagccctggccagtatcgcggaagtagtaggttgtttctcgtgccctttggctaaggtgtagtctgcagatagtgggtttgcggaaataaattcccccaattttctcaccgcttggttgattgacgcgagatttgctgttgcgcgagcttgtttgcttgccttgaagcgaggtcggagtgccatctgttttctgcagcttctgtaattatcacctggtttcgtttcctgtggttatgtaattaccatccgcttcacccccgatcaaaaccacctgtggtaaggggaaaaaaaaggcaagaagcgctgtgttgtcgtattggcactctacatttaaagccccgggt

SEQ ID NO: 69434 - DNA, 2248 bp, Zea Mays
gggctctcgaaaagcagggaaaaagaattctccatttccccactcgccctcgctccctccctctcccgctcccgctcgccagtgggagtgtgcggggctagcagctagggtttccgcgagcacaccgccggccagccgcgggcgatctcgggttcgcgggggcgcccgccccgactcgggttcgcgggggcgcggacatgaagtcgtcgctgcggaagctgcggggcttcgcgctgcagcgccacgagcagcgggtggaccgggaccgcggccgcggccactccaccacggcggcggaggagctcctcgctgctgcccaggatatgacagatatgaggagctgttacgataacttgctttctgttgctgcagcaattgcaaatagtgcatacgagttctctgaagcacttcaagacatgggggcttgtttgcttaaaagaattacaccaaataaagatggaatcaatgataaagttttgctgttgcttgggaaatcacaatttgaacttcggaaacttgtagatagttatcgtgtgcatgttcttaatacgatcaccactccatcactgtcgcttcttaatgagcttcaaaccgtggaggaaatgaagcgccaatgtgatgaaaaaagagaattgtacgaattcatgctaaatgctcagaaagaaaagggaagatctaagaatgctaaaggtgataatgtagcatcagaacaattgaaacaagctcaggaagattatcaagaggaagcgactcttttcctattccggttgaagtcattgaagcaaggacagttccgaagtcttttcacacaagctgctcggcatcatgctgcacaggatttttttaacagcagcaaagaagattattcttctgttccacatgaaagacagagaattgaaagtcagtcagcaccgctttttcctgggaaaaaggtcaatacagaagagagaataaaagatttgcggcgttctgcgacaaggaagttaaatacttatgttttgcctaccccaaatgatgttcgagctacttctcagatagcatcaggaaatcctatttctggacctctcgagagcaaaggtgccttccattcatctccactccacccttctgcagacataagagatttgagagacaataaactacctagtcctgcaagattgtctaatgtacagtctgtgctgaaagagagcaataccaatacagcagaaacaaggaaagtactcccagtgggtgatctcgctttacctggctattatgacctgaagactctcgacaacaacaaagtgaaaagagggtcattttctggcccaatagcttctagaccacggccaacagagaacaatgatgttatttctgcagcacccaggcatagctctgcacatcagccagtgcacatgagagtatcccccggcaactcgccgccacccatttcctcaccgaagatcaaggagcttcatgagcttcctcgaccgcctgttaatacatcaaaaaacacaacatttcccagtttggttgcccactcggccccattggtagcaaatcctgcatctctgacacccaaagttcaagaccattttagggcaagacaaatgcttcccagtactgcttcacctttaccaactccaccgcctggatccatatcccgcagtttttctataccttctagggggagaacaggttcagacggtaaggagatagaagatcagcaagacaagggagctgccagaatgagcctttcttctcttccttcagctcaaacattgttggaagatcgtcagccattgtcagcagctgctggatcggttagcaaaacataggagtattcactgcgaaggtggattactatcattatcaagcggcttgctgagcccttcctggaagaatgctgtacatattagcatgtgagccctggccagtatcgcggaagtagtaggttgtttctcgtgccctttggctaaggtgtagtctgcagatagtgggtttgcggaaataaattcccccaattttctcaccgcttggttgattgacgcgagatttgctgttgcgcgagcttgtttgcttgccttgaagcgaggtcggagtgccatctgttttctgcagcttctgtaattatcacctggtttcgtttcctgtggttatgtaattaccatccgcttcacccccgatcaaaaccacctgtggtaaggggaaaaaaaaggcaagaagcgctgtgttgtcgtattggcactctacatttaaagccccgggt

SEQ ID NO: 69435 - DNA, 2238 bp, Zea Mays
gggctctcgaaaagcagggaaaaagaattctccatttccccactcgccctcgctccctccctctcccgctcccgctcgccagtgggagtgtgcggggctagcagctagggtttccgcgagcacaccgccggccagccgcgggcgatctcgggttcgcgggggcgcccgccccgactcgggttcgcgggggcgcggacatgaagtcgtcgctgcggaagctgcggggcttcgcgctgcagcgccacgagcagcgggtggaccgggaccgcggccgcggccactccaccacggcggcggaggagctcctcgctgctgcccagatatgaggagctgttacgataacttgctttctgttgctgcagcaattgcaaatagtgcatacgagttctctgaagcacttcaagacatgggggcttgtttgcttaaaagaattacaccaaataaagatggaatcaatgataaagttttgctgttgcttgggaaatcacaatttgaacttcggaaacttgtagatagttatcgtgtgcatgttcttaatacgatcaccactccatcactgtcgcttcttaatgagcttcaaaccgtggaggaaatgaagcgccaatgtgatgaaaaaagagaattgtacgaattcatgctaaatgctcagaaagaaaagggaagatctaagaatgctaaaggtgataatgtagcatcagaacaattgaaacaagctcaggaagattatcaagaggaagcgactcttttcctattccggttgaagtcattgaagcaaggacagttccgaagtcttttcacacaagctgctcggcatcatgctgcacaggatttttttaacagcagcaaagaagattattcttctgttccacatgaaagacagagaattgaaagtcagtcagcaccgctttttcctgggaaaaaggtcaatacagaagagagaataaaagatttgcggcgttctgcgacaaggaagttaaatacttatgttttgcctaccccaaatgatgttcgagctacttctcagatagcatcaggaaatcctatttctggacctctcgagagcaaaggtgccttccattcatctccactccacccttctgcagacataagagatttgagagacaataaactacctagtcctgcaagattgtctaatgtacagtctgtgctgaaagagagcaataccaatacagcagaaacaaggaaagtactcccagtgggtgatctcgctttacctggctattatgacctgaagactctcgacaacaacaaagtgaaaagagggtcattttctggcccaatagcttctagaccacggccaacagagaacaatgatgttatttctgcagcacccaggcatagctctgcacatcagccagtgcacatgagagtatcccccggcaactcgccgccacccatttcctcaccgaagatcaaggagcttcatgagcttcctcgaccgcctgttaatacatcaaaaaacacaacatttcccagtttggttgcccactcggccccattggtagcaaatcctgcatctctgacacccaaagttcaagaccattttagggcaagacaaatgcttcccagtactgcttcacctttaccaactccaccgcctggatccatatcccgcagtttttctataccttctagggggagaacaggttcagacggtaaggagatagaagatcagcaagacaagggagctgccagaatgagcctttcttctcttccttcagctcaaacattgttggaagatcgtcagccattgtcagcagctgctggatcggttagcaaaacataggagtattcactgcgaaggtggattactatcattatcaagcggcttgctgagcccttcctggaagaatgctgtacatattagcatgtgagccctggccagtatcgcggaagtagtaggttgtttctcgtgccctttggctaaggtgtagtctgcagatagtgggtttgcggaaataaattcccccaattttctcaccgcttggttgattgacgcgagatttgctgttgcgcgagcttgtttgcttgccttgaagcgaggtcggagtgccatctgttttctgcagcttctgtaattatcacctggtttcgtttcctgtggttatgtaattaccatccgcttcacccccgatcaaaaccacctgtggtaaggggaaaaaaaaggcaagaagcgctgtgttgtcgtattggcactctacatttaaagccccgggt

SEQ ID NO: 69436 - DNA, 2454 bp, Zea Mays
gggctctcgaaaagcagggaaaaagaattctccatttccccactcgccctcgctccctccctctcccgctcccgctcgccagtgggagtgtgcggggctagcagctagggtttccgcgagcacaccgccggccagccgcgggcgatctcgggttcgcgggggcgcccgccccgactcgggttcgcgggggcgcggacatgaagtcgtcgctgcggaagctgcggggcttcgcgctgcagcgccacgagcagcgggtggaccgggaccgcggccgcggccactccaccacggcggcggaggagctcctcgctgctgcccaggatatgacagatatgaggagctgttacgataacttgctttctgttgctgcagcaattgcaaatagtgcatacgagttctctgaagcacttcaagacatgggggcttgtttgcttaaaagaattacaccaaataaagatggaatcaatgataaagttttgctgttgcttgggaaatcacaatttgaacttcggaaacttgtagatagttatcgtgtgcatgttcttaatacgatcaccactccatcactgtcgcttcttaatgagcttcaaaccgtggaggaaatgaagcgccaatgtgatgaaaaaagaaagaaaagggaagatctaagaatgctaaaggtgataatgtagcatcagaacaattgaaacaagctcaggaagattatcaagaggaagcgactcttttcctattccggttgaagtcattgaagcaaggacagttccgaagtcttttcacacaagctgctcggcatcatgctgcacagctaaatttgttcagaaagggggtcaagtcccttgaggctgtagagccacatgttaggctcgctgctgagcagcaacacattgatcatcagtttagcgcacttgaggaagaggattatgttgttgaggatgagaatgatgacgagtacaacgacagtcatgatggagagttgtcttttgattatggagaaaataaggaaactgagaaatctggtatcgcttctaggaatcatacagaggatttttttaacagcagcaaagaagattattcttctgttccacatgaaagacagagaattgaaagtcagtcagcaccgctttttcctgggaaaaaggtcaatacagaagagagaataaaagatttgcggcgttctgcgacaaggaagttaaatacttatgttttgcctaccccaaatgatgttcgagctacttctcagatagcatcaggaaatcctatttctggacctctcgagagcaaaggtgccttccattcatctccactccacccttctgcagacataagagatttgagagacaataaactacctagtcctgcaagattgtctaatgtacagtctgtgctgaaagagagcaataccaatacagcagaaacaaggaaagtactcccagtgggtgatctcgctttacctggctattatgacctgaagactctcgacaacaacaaagtgaaaagagggtcattttctggcccaatagcttctagaccacggccaacagagaacaatgatgttatttctgcagcacccaggcatagctctgcacatcagccagtgcacatgagagtatcccccggcaactcgccgccacccatttcctcaccgaagatcaaggagcttcatgagcttcctcgaccgcctgttaatacatcaaaaaacacaacatttcccagtttggttgcccactcggccccattggtagcaaatcctgcatctctgacacccaaagttcaagaccattttagggcaagacaaatgcttcccagtactgcttcacctttaccaactccaccgcctggatccatatcccgcagtttttctataccttctagggggagaacaggttcagacggtaaggagatagaagatcagcaagacaagggagctgccagaatgagcctttcttctcttccttcagctcaaacattgttggaagatcgtcagccattgtcagcagctgctggatcggttagcaaaacataggagtattcactgcgaaggtggattactatcattatcaagcggcttgctgagcccttcctggaagaatgctgtacatattagcatgtgagccctggccagtatcgcggaagtagtaggttgtttctcgtgccctttggctaaggtgtagtctgcagatagtgggtttgcggaaataaattcccccaattttctcaccgcttggttgattgacgcgagatttgctgttgcgcgagcttgtttgcttgccttgaagcgaggtcggagtgccatctgttttctgcagcttctgtaattatcacctggtttcgtttcctgtggttatgtaattaccatccgcttcacccccgatcaaaaccacctgtggtaaggggaaaaaaaaggcaagaagcgctgtgttgtcgtattggcactctacatttaaagccccgggt

SEQ ID NO: 69437 - DNA, 1154 bp, Zea Mays
ctgttcctattgtttttagaggaccaaatggagctgctgctggagttggtgctcaacactcacaggacttaaggttctcacaccatactcttcagaagatgcccgaggcttgcttaaagctgctattagggatcctgatcctgttattttcttggaaaatgaattgctttatggagaatctttcccagtttctgctgaagtgcttgattctagtttttgcctaccgattggcaaagctaagatagaacgtgggggtaaagatgttaccattactgcgttctccaagatggttggctatgctctccaggctgcagagatactgtccaaggaaggaatcagtgctgaggtgatcaaccttcgatcgatcagaccacttgatagagctgctattaatgcatctgttaggaaaaccaaccgattggtgactgttgaagaagggttccctcaacatgggattggtgccgagatatgcatgtctgttgtagaagaaagctttgagtaccttgatgccccagttgagaggatcgctggagctgatgtacctatgccctatgctgccaaccttgagagaatggctgttccacaggtcgatgacattgtgcgggcagcaaagcgggcctgctacagggcagtaccaatggccgcagctgcctgattggtgtacaggcctttctatttttctcccccctcagttttcgctctcgggcagcaagaaacatgtagtattcataaggtgccggcaaattggccggaccccagactccaagcgagctagtttttgtagatctgctatggtgtgctttattctgttagtcgatatatgttgcattgtttctagtttcaaagcccatttatttacttatctatgatttctacacacggcctaataatcttgctaaggccctgattgaatggaaaatatttttttgggagttttaggaaaatactacaattttgtgaaataccttggttttggagtaacatgaagatgatgtttggttagaagaaccaatccattctaaatatggtggtgtatcacgaccaatgttttcgagtcgagaagtcgaagttgactagttgaatatacattgatgaatatagttttatcatctaactgtcccacctcttatcaataatagattacttcatcaatt

SEQ ID NO: 69438 - DNA, 1181 bp, Zea Mays
ctgttcctattgtttttagaggaccaaatggagctgctgctggagttggtgctcaacactcacagtgttatgcagtttggtttgcacatgttccaggacttaaggttctcacaccatactcttcagaagatgcccgaggcttgcttaaagctgctattagggatcctgatcctgttattttcttggaaaatgaattgctttatggagaatctttcccagtttctgctgaagtgcttgattctagtttttgcctaccgattggcaaagctaagaacgtgggggtaaagatgttaccattactgcgttctccaagatggttggctatgctctccaggctgcagagatactgtccaaggaaggaatcagtgctgaggtgatcaaccttcgatcgatcagaccacttgatagagctgctattaatgcatctgttaggaaaaccaaccgattggtgactgttgaagaagggttccctcaacatgggattggtgccgagatatgcatgtctgttgtagaagaaagctttgagtaccttgatgccccagttgagaggatcgctggagctgatgtacctatgccctatgctgccaaccttgagagaatggctgttccacaggtcgatgacattgtgcgggcagcaaagcgggcctgctacagggcagtaccaatggccgcagctgcctgattggtgtacaggcctttctatttttctcccccctcagttttcgctctcgggcagcaagaaacatgtagtattcataaggtgccggcaaattggccggaccccagactccaagcgagctagtttttgtagatctgctatggtgtgctttattctgttagtcgatatatgttgcattgtttctagtttcaaagcccatttatttacttatctatgatttctacacacggcctaataatcttgctaaggccctgattgaatggaaaatatttttttgggagttttaggaaaatactacaattttgtgaaataccttggttttggagtaacatgaagatgatgtttggttagaagaaccaatccattctaaatatggtggtgtatcacgaccaatgttttcgagtcgagaagtcgaagttgactagttgaatatacattgatgaatatagttttatcatctaactgtcccacctcttatcaataatagattacttcatcaatt

SEQ ID NO: 69439 - DNA, 1284 bp, Zea Mays
ctgttcctattgtttttagaggaccaaatggagctgctgctggagttggtgctcaacactcacagtgttatgcagtttggtttgcacatgttccaggacttaaggttctcacaccatactcttcagaagatgcccgaggcttgcttaaagctgctattagggatcctgatcctgttattttcttggaaaatgaattgctttatggagaatctttcccagtttctgctgaagtgcttgattctagtttttgcctaccgattggcaaagctaagatagaacgtgggggtaaagatgttaccattactgcgttctccaagatggttggctatgctctccagggatttggatgtactgcatcaatgcacttttgttagtcgttaaactgatctacaagtgggctgttattttggtgcattctcatgctaagtttgcttcaggctgcagagatactgtccaaggaaggaatcagtgctgaggtgatcaaccttcgatcgatcagaccacttgatagagctgctattaatgcatctgttaggaaaaccaaccgattggtgactgttgaagaagggttccctcaacatgggattggtgccgagatatgcatgtctgttgtagaagaaagctttgagtaccttgatgccccagttgagaggatcgctggagctgatgtacctatgccctatgctgccaaccttgagagaatggctgttccacaggtcgatgacattgtgcgggcagcaaagcgggcctgctacagggcagtaccaatggccgcagctgcctgattggtgtacaggcctttctatttttctcccccctcagttttcgctctcgggcagcaagaaacatgtagtattcataaggtgccggcaaattggccggaccccagactccaagcgagctagtttttgtagatctgctatggtgtgctttattctgttagtcgatatatgttgcattgtttctagtttcaaagcccatttatttacttatctatgatttctacacacggcctaataatcttgctaaggccctgattgaatggaaaatatttttttgggagttttaggaaaatactacaattttgtgaaataccttggttttggagtaacatgaagatgatgtttggttagaagaaccaatccattctaaatatggtggtgtatcacgaccaatgttttcgagtcgagaagtcgaagttgactagttgaatatacattgatgaatatagttttatcatctaactgtcccacctcttatcaataatagattacttcatcaatt

SEQ ID NO: 69440 - DNA, 1177 bp, Zea Mays
tactgttcctattgtttttagaggaccaaatggagctgctgctggagttggtgctcaacactcacagtttggtttgcacatgttccaggacttaaggttctcacaccatactcttcagaagatgcccgaggcttgcttaaagctgctattagggatcctgatcctgttattttcttggaaaatgaattgctttatggagaatctttcccagtttctgctgaagtgcttgattctagtttttgcctaccgattggcaaagctaagatagaacgtgggggtaaagatgttaccattactgcgttctccaagatggttggctatgctctccaggctgcagagatactgtccaaggaaggaatcagtgctgaggtgatcaaccttcgatcgatcagaccacttgatagagctgctattaatgcatctgttaggaaaaccaaccgattggtgactgttgaagaagggttccctcaacatgggattggtgccgagatatgcatgtctgttgtagaagaaagctttgagtaccttgatgccccagttgagaggatcgctggagctgatgtacctatgccctatgctgccaaccttgagagaatggctgttccacaggtcgatgacattgtgcgggcagcaaagcgggcctgctacagggcagtaccaatggccgcagctgcctgattggtgtacaggcctttctatttttctcccccctcagttttcgctctcgggcagcaagaaacatgtagtattcataaggtgccggcaaattggccggaccccagactccaagcgagctagtttttgtagatctgctatggtgtgctttattctgttagtcgatatatgttgcattgtttctagtttcaaagcccatttatttacttatctatgatttctacacacggcctaataatcttgctaaggccctgattgaatggaaaatatttttttgggagttttaggaaaatactacaattttgtgaaataccttggttttggagtaacatgaagatgatgtttggttagaagaaccaatccattctaaatatggtggtgtatcacgaccaatgttttcgagtcgagaagtcgaagttgactagttgaatatacattgatgaatatagttttatcatctaactgtcccacctcttatcaataatagattacttcatcaatt

SEQ ID NO: 69441 - DNA, 689 bp, Zea Mays
gatactgttcctattgtttttagaggaccaaatggagctgctgctggagttggtgctcaacactcacagtgttatgcagtttggtttgcacatgttccaggacttaaggttctcacaccatactcttcagaagatgcccgaggcttgcttaaagctgctattagggatcctgatcctgttattttcttggaaaatgaattgctttatggagaatctttcccagtttctgctgaagtgcttgattctagtttttgcctaccgattggcaaagctaagatagaacgtgggggtaaagatgttaccattactgcgttctccaagatggttggctatgctctccaggctgcagagatactgtccaaggaaggaatcagtgctgaggtgatcaaccttcgatcgatcagaccacttgatagagctgctattaatgcatctgttaggaaaaccaaccgattggtgactgttgaagaagggttccctcaacatgggattggtgccgagatatgcatgtctgttgtagaagaaagctttgagtaccttgatgccccagttgagaggatcgctggagctgatgtacctatgccctatgctgccaaccttgagagaatggctgttccacagctgttatccaccagctggatatacctggaggattgtcctgccatgttaaggagtacggtggtttcttt

SEQ ID NO: 69442 - DNA, 1609 bp, Zea Mays
ctctctcgctcgctctccaggctccagctagactgtcctgctctgcttcggtgctactcactgtgcagtgtgcacagccagccagcttcagcagagtccggctcggctgtcggctgcgagtcctgctcctgcaggaatggacaggcctgcgcaggcgcccacgcagctgccgccggggttccggttccaccctaccgacgaggagctggtcgtgctgtacctccgccggaaggccctggctcgcccgctgccggccgccgtcatccccgtcgtccacgacgtcgccaggctcgatccgtgggacgtcactggggcgagcgaaggggagggctacttcttcagcctgcggcgagcgccggcgaccggccgcaggaggagggctgggagcgggtactggaaggccacggggaaggagaagccggtgttcctgcagtgcggcggcgagcagaggcagctgctcgtgggcgtcaagacggcgctcgccttccaccgccgtgagccgccgccgccgtcgtcgcggacaggctgggtcatgcatgagtaccggctcgccgtgccccgcggcgtggccgaccagaggaagaagaatgcgagacatggctgcgttgctgagccaggggagtgggtcgtgtgccgggtcttcctgaagaacaggccgaaccgggacgccggcagcaaaactctgcgacacggcgcctccgctcggcggcggcggcggcagcagcagccggaagacgtgagaggacagcagccgttgccattctcggcgccacagccgtcgtcctccagctgtgttaccgacgtcaccgactgcttgtctgacgaagacgaagacgaagccagcagcggcagcacagcccgagctgcccctcaaagagaggcctaaggatatatatactctatatagtactccctgtagcgttttcccctctatcttgccccattgcccgtacttttcctggatcctggcatcatataatcaggtatagggcatgtccagctcaagggtgatccccagatatatttggcagtcctgaatcaggaacaatacggcatctgtgaagcagcatgcatttcgataatcaggtatagggcatgttcagctctttgtgtgcatcctccgacgaagcgcctcgctgtgcagcttctgccgtcatcgttcagatcagccggtcgttatcctccacccgatgagaagcgcagagcgatggcctccgcgtgcttgccgtggcctctgagttgactgcctggacatcgatggcgctttacgaattaaccttcccaagattgatatcgcacgcggtggcgtctgtgccttcttccctcggcgtgccttggcgttgtgtggtgcagtgcagccctgcctgccttcgcaggtggtcgcggcacccaaggcttcattcggttgaatgggaatgattcccagtcaaacagtttgtttcgacaaattctgctagcgcgaaacggttccgagatggaaaaaagggcagcaactccaacaaatcccaatatctaatttgtaaaccatattataaggagaaaaaagaatgaaaaacagagctccaataggcaatagctctctagtcttcaattgtgtagctcgtgtaaa

SEQ ID NO: 69443 - DNA, 1197 bp, Zea Mays
gtgtccggagagcaacagagattccatcgtccctgaacatccgcactgaccattcattcacacaggggatatgattgggccggctcgacttcccgctacatgctcataaaagtgaatagaaagcccgcgcgactccgttccaacacagtgcaaatctgaagggcgtgaagaaactagaatcgcgaaagccaaacatgacaaatcttctctgcaggcaattccgatttgcaaagatacatatatacagtggataatccaaacaacagggggagttaaggggctcttctgttatttttgcttaaaacaccaaacgggaagcaaaccatcagaactgatgcgctctcaggacaactgagtaagaaagcactgcagacgtatatcctaggtggagtggagtgaaagcacatgtgcacagagagcgcccaaaggtcgcttcttcgttggtggtatcaggcaggtttcacaagaagatgcgtcaaagacgtggcgtagcttgctagtgagctccactggttgtgccatgggcactgctaatggagccccagtgagaatctccggtccccatctgcacagcaatgctgtccacggactccgaggtcccgcttctgtgaccccaacttgatcgcctcgaatgcataccagccctcccttccacaagctcaggaagggcatctctgctcagatccggggacgcatgggctatcctgccttctttctcgtccagtagaccccctagaccaacctccaagtccctgatatcagctgctgaccgaggttcatcccatgatactggcttcctactcaattcgaagtccccaacaggtttatccatgtttagactcatgaaaccccttgctggcgcacgcgattgctgtaaaccttgctctactgggaccctggctcggaagttgttcttggaaggagggactgcggtgcagaatatctccatgaagttgttcaagatccctatgttgtacgggttggcccgccgatcatagcgatatctgaagttctcataggttgtctgcgtagtataggaaaagtgattacaaattcctagcaatatgcttacaggtaaaaccaattatattaaaaagttgacagggtgccaacctggttggtgctcatgagatagaaatggaaaacagacagaccacccacaaaccacacacagatgaagcagtatatgatcagaac

SEQ ID NO: 69444 - DNA, 988 bp, Zea Mays
gtcaagcactcgacaagcaaactgcaaacagcaagccccagctcgctctcccaaaaccccaagcgccaagccccaacccgcgccgccgccgccgctggctctccgctcggacctcggacgctcggtcggcgctcgctctcccaaaaccccaagcgccagtccccaactccccatgctgagtcgctgagacgctgagcggctgaggcatcctgctcctgcctccagcagtccagcggtccaccctcctgcagtcctcctcggctgctcctgcatccatggcggtgaccaatgacaccacaaacgacgacggccgggatgccgctgccacttcgaccgagcaccgcctgccggatccgaaggacaagagcaacaacggcgatggagacccaaaagcacctgccgggtatgggttacccgtcgggtaacaatatccacttgggtacaggcatgggtaaacatttctacccgaaccgggtatgggtattgtgccgggtacatttttttgtcgcaggtgcgagtatgaaaagataatatccggcgggtacgtacccgttgccatctctaaccagaagccaccgacaacatatgcgctgcgccagtgggtcacaattcacaaagtagtagtagcttaaagagcgtgcacccttcttttatgaggacatatctggtgcacatggaggattggtgcacatggtgcacatattaaatcaccatcactcattttaaatctaatgtctctagttgatcattcaatttacaaataacaccttccaccattacacaccaccacgttggagggtgtccttagcaaaatataccaaacaactagagacgttagatctaaaattagtggtgatgatttaatatgtgcatcatgtacaccaatcttccatgtgcattagatatgttctcttcttttattgcacaacccaccagattaatttatccatctccaatacaagcaagcttatatatagctatatataat

SEQ ID NO: 69445 - DNA, 1814 bp, Zea Mays
atgtgctgcgtggaggccccgaggcccgggacgttgcaggcggcggaggagctccggacgagcgtggcgcggcacgccgaccggagctcgtggccctcgcggcactcgaagccgtccacggggggcacgtccagcttgtacacgccgtgctggtcggtggtgcgctccgcttccagggacagctcttcggacgacgtcgagttcaccttgaagctgcacttgatcagcaccctggcccctgcatacgcattgcaaaaccaccatgccgccgttagcccgatcgtgttttgagctatcgccagatgtcagggacggtaataaaggtgtcatttttgtacacgccatggccacagaatgtaaaattaattcatcactggttgtactgttttccttcccaaaaaaaacagcggttttattggagtatatctttaaaaatctgaaaaaggtacgttgctctagaagtcttgttttttttaaaaaaaaagtgcactcagacacacaaactgcccataaagctatttagagtctaacagtaaataatttgattacaagacggtcaggacaatgcttagatcttagtttaatgtaaagatgaaagccatggtaatctagtgctggacttctggtaatctggttataggcttgccatgctttgacgacagttcatctgcacatgctactgaatggcgactgacataacacccgactgtgagggcccatttcagctcgaagcagtatcacccgtaaattccagtgcataatgaacttgggcaacacatactgttcagaatagatgaagtaaataagcaatgaagaatgacggagcttgtcgctgggggaaaaaatttgtgaattgcatctcaagttctacttgtactgtatcgcaatggcaaatgagctccgaagtcatctgggaattgacaatttgtttgtgagacacgtatgcctcagaggaatcttcggttacagaaacatcacgtacagaggtctgtacgagccaaaagcccaggagctaaactacaattgcggggatggccttataggagtggatgcagaaatgagccaaagcaaacaacaaagccttatgcccatatttgtcaaacctagtttgtcctgactagccacatagcagatggatgcaaaatgtttattacctacctcctcagtacatacacaaattttgaaaacattcttgtggcaatgctgagaactaaagggcactgtaacacctgaacatctcaggaaaaaaaggacagaaaacagatactgacggtcctccaaaatgtgtcaatttaagaacttgtaaatctactgcagagaacgacatagaatgcccagactgatgtaaaaaaaagtttctctagcacatttcaggactaaggctatgtttgtttccttcagaattatataattcagattatgaattatataagcacataataacctacttattgattatcatattctaagtatctaggctctatttgtttaccctctaaattatataatctagcttaaataagttaatagacaaacaaacaacacagattattatgtggattatataagtcaggtacctagattatgataatccataagaaactcattatatgcttatataatctataagctagattatatagtccctaagaaaacagggcctaaggaatgttctgcggcaatgcagcatcttttttgtaaaaaaagaaaaactaccattgttggggagaaaaaaaaaagcaatgcaggacgaggcaaggatcgttaatggcaacgcagaaattgtatagcatctgcactggcctttcaggaag

SEQ ID NO: 69446 - DNA, 597 bp, Zea Mays
tggccccagcagtatttcaacagcaacagcgcccatgttcccttcaatgcttccaatccttggtctccagctccgcctcgcgtcttcctttccgctgcaggaaagtgcaaacccccactcaactaaaaaaagccgcaaggcaaagagaaaaagcaacgcgaagcaaaccaccatttcggcctccccacccccatcccatctcatcccctccgaggctccagggacggcgtgatgaggccagcggcgccggctgcggcggcggacgcgcaccagtcgcggctgctctacgagctctgcgcgctcctgctgaccgtcctcggaggtgtatagaaacaggggaattcgagcagactgttttgtctttggcagcctatattttccttcctggacaaccttttcttttttaccatgtaacgccgcagcaagtttggaaatggttttatactgtggggctaggaggatacttgtctgtacatacggaaaagatgatctggtctaaacatcacgtggagcttgtaattgtttcagaaacgttgttccttggcaaagaaaacgagaggtcccgtatcgctgttccaccaaaaaaaaacagaatag

SEQ ID NO: 69447 - DNA, 1502 bp, Zea Mays
aacccaatcgtctctccaccacccaactcctcctgcctgtgctctcctcctttttctccactccgcttttgcttggttccatcgggccggagaggagaagctagctaactagcagcagctctgttggtgtgtgtgtgtgtggagggtagctgcagctggggctagctggaaaggtcgggagccatggggaggggccgggtggagctgaagcggatcgagaacaagatcaaccgccaggtcaccttcgccaagcgccgcaacggcctgctcaagaaggcgtacgagctctccgtgctctgcgacgccgaagtcgcgctcatcgtcttctccaaccgcggcaagctatacgagttctgtagcggaccgagcatcacgagaacacttgagaggtacgaaaaaaacagttatgcaggcccagatactgctgtacagaacaaagagaacgagttagtccagaacagccgcaatgagtaccttaaactgaaagcaaaggtggataatttacagaggactcagaggaatttgcttggtgaagatctgggttcacttggtgtcaaagagcttgatcagcttgagaagcaaattgattcatccttaagtcacataagatccacaagggtgactcgttgaacaaactatttcctaatgcgttaaaatatagtttttggacgaagctagtgttgacaacactgccctccatatttataattaatgaaccactttgaatatagagtactcttatacacgtgaccgtctgccaagaagacccagccatatataatctcctatattttccgtgactaatcttccttaattatgtaggggtgacatctgaaatatgtcgaatgatcatcattcatctcatataggcatgaatgatttagtattttgtatctttcaaatgttgatcaaacaattttctcattttgcagacacagcatatgcttgatcagctcactgatcttcagaggagggagcaaatgatgtgtgaagcaaataagtgccttagaagaaagctggaggagaccagcaaccaggtgcatggccaagtgtgggagcacggtgccaacttattactcggctacgagcggcactcttcaccacagcaagccccatcacatgttggcaatggattattctttcatcccctggaagctgcagcagagccaaccctgcagatcgggttcgctcccgagcatatgaataatttcatgccggcatggctaccctgaagatggatctttgaggcaaagggaataaataaagatgcgatgcatgtcagaatcatattgtactgcaagagtgacaattgtgtgttccactcacatatatgacctagttttgtgtgtctatatgtcgaaaccatatgtctgtgattttattatatgtaatgtaagcacagatgaaacatgcagggctagttgcttttgcttgtctatgtatctgtatctggctgtgcgccactggatatgcgtcctagaacaccgcctccaggcttcaat

SEQ ID NO: 69448 - DNA, 2577 bp, Zea Mays
catgcatccatccactgatccacgccctcatcagttgaggtctgaaagctgagctgagctctagctgatagaggtagccctccacaccacaccactcgcaatccacacaactacactgatacacctgcgctgcacttgcctctgcgagcacgtactggctgtggctgtgcctggcctcctcttcctcggtggtggtggtggtggtggtgcactggtgctggtcttgcgcctgcttgttcggttgttcctcacttccacttccacggctcccctcccaccaagcagactgcagtagcacatccccctccgcgcaccactcgcttcgacaccaccgggcaccgcccggcatctagctctagcggcagctcatctccctccctctggctggctgtttgtttctctctctctctcctccccatcaggataagctcagcagccccccctgctgatctgcggcatttgccctgttcccgtgctcgatttgttcgcttctgtgcgcgcgcggtggtgcccaggcaataactcccctcggtgtctggctggctcgttgccaccctccccgcggcagagcggcctataggatgagagggacaggggaacccaacaaaccggccgcggcactgtcctggccgtgaaagacacgcacacagagctccagctcggccacgggcacgggcacgggcacgggcacgcggcgcctagctctgcactggccgacggggaaacggtcgagcttgctatccatcgcccgcgccgttcccattcatggattgggatctcaagatgccggtttcctgggacctgcccgacctggagcacgacgccgtgccgccgcccatcgccgccgccgcctccgccgcgccttcccccgcggcggcgtcgggcattgccgccgcagctgctgggcctccccccgcggcggcaccgcgcggggcgccgagccgggcggagtgctccgtggacctcaagctcggcgggctcggcgagttcggggctgcggacgggacgaaggagccggtagtggcagcggccgcggccgcggccgcggcgccgccgtccgctagcccgatgaagcgcccgcgctcggggcccggtggcgccgccggggcgcagtgcccgtcgtgcgcggtggacggctgcaaggccgacctcagcaagtgtcgcgactaccaccgccgccacaaggtctgcgaggcgcactccaagacgcccgtcgtcgccgtcgccggccgcgagatgcgcttctgccagcagtgcagcaggtttcacttgctcgcggagtttgacgaggccaagcgcagctgtagaaagaggctcgatgggcacaaccggcgtcgcaggaagccgcagccagataccatgagctctgggagctttatgacgagtcaacaagggacgaggttctcgtcgttcccggttccaaggccggagccgagctggcccggagtcatcaaatccgaggacagcggctcatactacgcgcaccagcgccacccggtcctaagcagcaggccgcacttcgccggcgggggctccacgccgccggcctactcgtccaaggaaggccggcgcttcccgttcctccaggacggctgcgaccagcagcaggtcggcggcttcagcgcgggcgcgggggcgcagcagctcgaggtctcttccacgtccacggtgtgccagcccctcctcaaggccgccgccgccgccgccccaccgccgccgccagagagcagcagcagcaacaagatgttctccgacgggctcgcccccgccgtgctcgactcggattgtgctctctctcttctgtcatcccccgccaactcctccagcgtcgacgtgggccggatggtcgtccaccagcccgcggagcacatccccatggcgcagcccctcgtccccggcggcctccagcagcagcagcagcaccacccgttcggcggctcccccgcctggttcgcctgctcccaggccggctccagcgccgtctccgccggcggtttcgcctgccccccgggcgtggagagcgagcagctcaacaccgtgctggtgccgagctccgacggtggcggccacgacatgaacatgaactaccacggcatattccacgtcggcggcgacggctcctccgacgggacgtccccttcgctcccgttctcgtggcagtagctagctttccaattcaagcgtccagcagtctatcgtttcagctgtactagtggtcgttttatttatttattcgctgctccctcgctccgttttaacttgtcctgtcgtttgctcgtttcttcgttttgcatgcctgatgcatatgcggcctggaaaaaaaactcgcataaaattactgagaccgtccgtgtgtctggttctggaagcgtacctgtctccatcaaccgaatcgagacaagtttgctgcacgggcaacactgcaacaggcttgtcatttgcactaggactatagccagatcattgttgtttccttgatctttgccattcacgcatacattcgtaaccatccatctttgtcgttggtgtgccagggaggcagggagactagcgaggtcagggatctttgccattcac

SEQ ID NO: 69449 - DNA, 2079 bp, Zea Mays
ttgcttatgctttgcgtcggatactcggattccagctggatcggcgtgcgccaagcgttccgcgaatcggccattggctcgtcctgcccacgaccccggagcccaaacgttcagagttcagacgcacaaacgccgggagccaccgcaatgcccgccacacgtcggccgccgccgagttggagtactgcgagttgtgccgccatcaccacgaccatggtcggcgccatcgctacatcatgaagcacatgtgaaatctcaacgacgcgctcacctccttctgctccaatctctccgacctccgctgtgccttcctccatggctccccctcttcccagccgccgcgggcccgtcattggtgtcccttctgctccactgacatcgtcgacctcgacagccgctccgctggtaacaatgccatttaccatatggcaagcagtcagcacctgaagggtgtgaataatttcctgcagaagcatgggggaaggatgaggtggacttgcttaggatttcagaggaagtgcttgccaagtgggagaaaggctttggatccttgagcacacgagcgaagacaatgtggcatatgaccctattagtacagcgtgtcatcgagcttccagttctggaagtgccccttattcttctccatatggagcttgtggtctgcccatcacacattggggatcggccgaaacacataagcagcagggtatgctgtctgcaaactggtttcacagcagcggtcctgcaactaaaggtcatcaatctaccgtccttgtaaatgacacaaggcaattgatttcttgtactgatcatgctcaagcaaatgtacatacgggtgctcctcctcggttaaaagctaacggacatgatctaaagaatttgtcactcagaagctgtggtcttccttctcggaaaggaaatttgaggaaactcaatccaaagagggttggtgctgcatgggcagaaaaaagaagagctgagcttgaaatggagaaggaaggtgaaattgttccaataacatctgattctagttggctacctaattttggtagtgtctggcaatcaggcacaaggaaggaatcaaggaaagaattcgagaaaaaccacaagtttcatgacacgaagagcaacatgacttatccttggagataaaaccatatatcagcaaacggatgcgcatagccacctaccacagtaaacagatgtacaacacttcgccagatgttggtatggatcttattacactcgccactcggtaaaagaaaggttcaggtttagcaattaccagccacttttaaggcttgcatattaattaatcgcaagatagagatctatatatgcgaacgtttgtcagtaataggcgaaccacagctacagcaatttctgattacacacttcaatgtccccagcaatgaatatgatacgggtgacgggggttggggcaatagtagtagtactacctgggctagctcgcaggactcctggaatggatgctggcccagggggcggcttgattggcgattggttccctgccaactcgtctaggaggcccggttataggccgcttgtaccgaatttaaagccaatctttgacagctacgcagtcaatatttttttgttctggtcacgaagccgtttgatgttcgtactgagaagcttgtgccggtatcggttgctgctttgtgcgtcgctttaaacaatgtgcatcaactggtagttctgtgttctcatgatctcatcagagcagccgtatgcggtttggtcactggcatgacataaaattgacttcgtctctttctgcttctttgtccctgtttgtttaaccgcgctttgagcgaaagctggtttcttccacaactggcttcgagaacaatctcaggaacacgtttactgtttgccatcctgattataagctgtgttagggtttatctcatccggtttggtcaagggactaagtcggactctggtgctctgatgggtgcaacaaccttacaattgtggtccttttttctcatatcgtgtatataaacaagagagacggcaaccaacgtttatcttagctcctaatagtgagatttg

SEQ ID NO: 69450 - DNA, 1662 bp, Zea Mays
cactcgcaccgcacaccgcacaccgcacgcgaaatccagtcggcgcgacgacatcaccaccgccgtagagttgtggaccaccaccggcgcatgcacagggtccagagatttccttgttccttccttttccccaccgccagcacgtcgtccagcacgtcctcgttcctatcgccccgtgcgcccggtccaccgcccgccaccgtccctggcccctttttcatatccactgtgcagtgcccggctgcccgccgcgccaaccccaccccgctccgcccgtgtaaaccaaaccccgcttcggcggcggcggcgactggcccacgagccttctcgaaccgacgcatccgccacccatgctgcgctgccacacgccaccgcaatgcgcccgcgcgccgctccgccaccacggaaggtgggagtcgcctccggcggcggcgcccgcggtggtagtgcggtgcgcgcggggtgcgccgcaggtgtccgggatcgaggcggcttcgccgggccacgcggctgtcacggcggcgttagctaaggcggaagggggtgacgcgcggcccagcctggccgagcggctgcggttggggaacctcctggaggacgggctatcgtacaaggagagtttcatcgtgcgctgctacgaggtggggatcaacaagacggccaccgttgagaccatcgccaatctcctccaggaggtaggatgtaaccatgcacaaagtgttgggttctccactgatggcttcgccacgaccactacaatgagaaaacttggacttatttgggtgacgaacagaatgcacattgagatctacaagtacccagcttggggtgatgttgttgagatcgaaacatggtgccaagaagatggaagaattggtacccgtcgtgattggatcctcaaggacctagctaatggtgaagttattggcagagctaccagcaagtgggtcatgatgaaccaaaatacacggagacttcagcgggtcagtgatgacgtgagggatgaggtgtttatgcactgtccaaaggctccaagattagcattcccagaggaaaataatggcagtttgaagaagattccgaatctttcagaccctgcagaatattcaagacttggactagtgccaagaagagctgacctggacatgaaccaacatgtcaataatgttacttacataggttggagtatacctcaagatataattgatacacacgagttacaaacaatcactctcgactacagaagggagtgtcaacaggatgatatagttgattctcttacttgcatagaggaaggagaggagaaaagcatgaacggctctgcttctgcagcagcgcctcacaaagaagagcggcagcagttcctgcattgcttgagatttgcagccaacggacacgagatcaaccgtggccgtaccgtgtggaggaagctagctagataaaagtgttctttcgtcataaatgatctcctccatttctctgctcacggctggcggcccttgtaccacaattttgtgatgtattgttgccctttggaatgtactcagccatgtatcggtgccgatttgtgacatttcttggagctgtagctgtctgtccgttttgtaccagtggacaatgtttgtgacatgcaataaactgcgtttctccggcaactctcaa

SEQ ID NO: 69451 - DNA, 1659 bp, Zea Mays
cactcgcaccgcacaccgcacaccgcacgcgaaatccagtcggcgcgacgacatcaccaccgccgtagagttgtggaccaccaccggcgcatgcacagggtccagagatttccttgttccttccttttccccaccgccagcacgtcgtccagcacgtcctcgttcctatcgccccgtgcgcccggtccaccgcccgccaccgtccctggcccctttttcatatccactgtgcagtgcccggctgcccgccgcgccaaccccaccccgctccgcccgtgtaaaccaaaccccgcttcggcggcggcggcgactggcccacgagccttctcgaaccgacgcatccgccacccatgctgcgctgccacacgccaccgcaatgcgcccgcgcgccgctccgccaccacggaaggtgggagtcgcctccggcggcggcgcccgcggtggtagtgcggtgcgcgcggggtgcgccgcaggtgtccgggatcgaggcggcttcgccgggccacgcggctgtcacggcggcgttagctaaggcggaagggggtgacgcgcggcccagcctggccgagcggctgcggttggggaacctcctggaggacgggctatcgtacaaggagagtttcatcgtgcgctgctacgaggtggggatcaacaagacggccaccgttgagaccatcgccaatctcctccaggaggtaggatgtaaccatgcacaaagtgttgggttctccactgatggcttcgccacgaccactacaatgagaaaacttggacttatttgggtgacgaacagaatgcacattgagatctacaagggtgatgttgttgagatcgaaacatggtgccaagaagatggaagaattggtacccgtcgtgattggatcctcaaggacctagctaatggtgaagttattggcagagctaccagcaagtgggtcatgatgaaccaaaatacacggagacttcagcgggtcagtgatgacgtgagggatgaggtgtttatgcactgtccaaaggctccaagattagcattcccagaggaaaataatggcagtttgaagaagattccgaatctttcagaccctgcagaatattcaagacttggactagtgccaagaagagctgacctggacatgaaccaacatgtcaataatgttacttacataggttgggtcctcgaaagtatacctcaagatataattgatacacacgagttacaaacaatcactctcgactacagaagggagtgtcaacaggatgatatagttgattctcttacttgcatagaggaaggagaggagaaaagcatgaacggctctgcttctgcagcagcgcctcacaaagaagagcggcagcagttcctgcattgcttgagatttgcagccaacggacacgagatcaaccgtggccgtaccgtgtggaggaagctagctagataaaagtgttctttcgtcataaatgatctcctccatttctctgctcacggctggcggcccttgtaccacaattttgtgatgtattgttgccctttggaatgtactcagccatgtatcggtgccgatttgtgacatttcttggagctgtagctgtctgtccgttttgtaccagtggacaatgtttgtgacatgcaataaactgcgtttctccggcaactctcaa

SEQ ID NO: 69452 - DNA, 1657 bp, Zea Mays
cactcgcaccgcacaccgcacaccgcacgcgaaatccagtcggcgcgacgacatcaccaccgccgtagagttgtggaccaccaccggcgcatgcacagggtccagagatttccttgttccttccttttccccaccgccagcacgtcgtccagcacgtcctcgttcctatcgccccgtgcgcccggtccaccgcccgccaccgtccctggcccctttttcatatccactgtgcagtgcccggctgcccgccgcgccaaccccaccccgctccgcccgtgtaaaccaaaccccgcttcggcggcggcggcgactggcccacgagccttctcgaaccgacgcatccgccacccatgctgcgctgccacacgccaccgcaatgcgcccgcgcgccgctccgccaccacggaaggtgggagtcgcctccggcggcggcgcccgcggtggtagtgcggtgcgcgcggggtgcgccgcaggtgtccgggatcgaggcggcttcgccgggccacgcggctgtcacggcggcgttagctaaggcggaagggggtgacgcgcggcccagcctggccgagcggctgcggttggggaacctcctggaggacgggctatcgtacaaggagagtttcatcgtgcgctgctacgaggtggggatcaacaagacggccaccgttgagaccatcgccaatctcctccaggaggtaggatgtaaccatgcacaaagtgttgggttctccactgatggcttcgccacgaccactacaatgagaaaacttggacttatttgggtgacgaacagaatgcacattgagatctacaagtacccagcttggggtgatgttgttgagatcgaaacatggtgccaagaagatggaagaattggtacccgtcgtgattggatcctcaaggacctagctaatggtgaagttattggcagagctaccagcaagtgggtcatgatgaaccaaaatacacggagacttcagcgggtcagtgatgacgtgagggatgaggtgtttatgcactgtccaaaggctccaagattagcattcccagaggaaaataatggcagtttgaagaagattccgaatctttcagaccctgcagaatattcaagacttggactagtgccaagaagagctgacctggacatgaaccaacatgtcaataatgttacttacatagagtatacctcaagatataattgatacacacgagttacaaacaatcactctcgactacagaagggagtgtcaacaggatgatatagttgattctcttacttgcatagaggaaggagaggagaaaagcatgaacggctctgcttctgcagcagcgcctcacaaagaagagcggcagcagttcctgcattgcttgagatttgcagccaacggacacgagatcaaccgtggccgtaccgtgtggaggaagctagctagataaaagtgttctttcgtcataaatgatctcctccatttctctgctcacggctggcggcccttgtaccacaattttgtgatgtattgttgccctttggaatgtactcagccatgtatcggtgccgatttgtgacatttcttggagctgtagctgtctgtccgttttgtaccagtggacaatgtttgtgacatgcaataaactgcgtttctccggcaactctcaa

SEQ ID NO: 69453 - DNA, 1551 bp, Zea Mays
cactcgcaccgcacaccgcacaccgcacgcgaaatccagtcggcgcgacgacatcaccaccgccgtagagttgtggaccaccaccggcgcatgcacagggtccagagatttccttgttccttccttttccccaccgccagcacgtcgtccagcacgtcctcgttcctatcgccccgtgcgcccggtccaccgcccgccaccgtccctggcccctttttcatatccactgtgcagtgcccggctgcccgccgcgccaaccccaccccgctccgcccgtgtaaaccaaaccccgcttcggcggcggcggcgactggcccacgagccttctcgaaccgacgcatccgccacccatgctgcgctgccacacgccaccgcaatgcgcccgcgcgccgctccgccaccacggaaggtgggagtcgcctccggcggcggcgcccgcggtggtagtgcggtgcgcgcggggtgcgccgcaggtgtccgggatcgaggcggcttcgccgggccacgcggctgtcacggcggcgttagctaaggcggaagggggtgacgcgcggcccagcctggccgagcggctgcggttggggaacctcctggaggacgggctatcgtacaaggagagtttcatcgtgcgctgctacgaggtggggatcaacaagacggccaccgttgagaccatcgccaatctcctccaggaggtaggatgtaaccatgcacaaagtgttgggttctccactgatggcttcgccacgaccactacaatgagaaaacttggacttatttgggtgacgaacagaatgcacattgagatctacaagtacccagcttggggtgatgttgttgagatcgaaacatggtgccaagaagatggaagaattggtacccgtcgtgattggatcctcaaggacctagctaatggtgaagttattggcagagctaccagcaagtgggtcatgatgaaccaaaatacacggagacttcagcgggtcagtgatgacgtgagggatgaggtgtttatgcactgtccaaaggctccaagattagcattcccagaggaaaataatggcagtttgaagaagattccgaatctttcagaccctgcagaatattcaagacttggactagtgccaagaagagctgacctggacatgaaccaacatgtcaataatgttacttacatagaggaaggagaggagaaaagcatgaacggctctgcttctgcagcagcgcctcacaaagaagagcggcagcagttcctgcattgcttgagatttgcagccaacggacacgagatcaaccgtggccgtaccgtgtggaggaagctagctagataaaagtgttctttcgtcataaatgatctcctccatttctctgctcacggctggcggcccttgtaccacaattttgtgatgtattgttgccctttggaatgtactcagccatgtatcggtgccgatttgtgacatttcttggagctgtagctgtctgtccgttttgtaccagtggacaatgtttgtgacatgcaataaactgcgtttctccggcaactctcaa

SEQ ID NO: 69454 - DNA, 880 bp, Zea Mays
aacacatgctagctaatattgttatattctttctgttttctatacatagcttttgctgtaggcactgaccctctggtacttatttcacagatgttacttgatgttgtgtctatatacaataaggtcactgatcttactgaaaggaagcaggctgttaagattagcatcagtggagtgcagagagtactacccctctatgaatgatgcatgtacagttctggagtgtgtatggataaaagataaattcgttttgcatgaaaaggttaaagatatctctcaggagacccaagttgagaatcagaagtgccgcgatcctgaatctacagtccagtatgaaacgcttgcactgattagtgaaggttaaaatgctttatcttctatttgtcacaataaatgcatgatgatccattgatcttgaatttttttttgttgcctttgtcagaattagctgacatgcccatgaatcatgagaatccttggtgctttgttgctgatttggtttgaaaaacaagcactttgtagtgtattgcattgttaagagcatagctcaaattaaatattaagatattttgaattgtttttctatacccatggttcccaagctagctacgaactaccaaggcgagagtatcacttttgacgttagtccatcaatctttggaagtatgtcacattagagtgtatattaaacagttacagttcacacattatggcatgatttatggtgatttggcagacgcgtgttctaatgctaacctcacaacctacttgaatgataagctaacatggttctgactgacacgcaccaggttttgcatgttactacaggtatatatggagcaacatttgattagttatttatataactttaattttgaag

SEQ ID NO: 69455 - DNA, 994 bp, Zea Mays
  misc_feature (993)..(994): n is a, c, g, or t
ttcttgccttcttggcttcttgtatgcatgtgcccgtccaggtccaggcatccaggctcagcgtctagggaccagccccagccctggcggccggcgtggcggcacacagtgcccggcgcctccgtccacttcccggcccggcgcgacgttggccccggcgcctcgctcatccgctttcgtcttccggtgcagcacaggcgagtagcgcttgcgacgacccggcccgtcggtctccgctcccttccatcaaggcaagcagtcaggaagacatctgaccgggtcagacgatacagcccatatacgtacgtcgagtcctcaaagttcgattctacgaccatcgcacccatcttggcccaaagtacttccgcgccgcgctacgaacgaggccatccgccgccacacgccgtaggccatgccgctgaggtcggagaccggcactgctggggagggcgatgaggagcagcggttgcgggctgctctgcgtcacctgcaggcggaggcgggggtgctggagcgcctggtgtacaagcaccggaaccagcaccgtggcgccgcctatttccaatacctcctcaaggtgaggagggacctcaagcttctgctcggcgccggcctcgcggaggtcctcaacgccgtgttcccagttctcgcatgccgcaagccggccaacacgatcctcgtccccaacaagcagactaagaagaaacctggtgcaaaccacagccatcaccagaggcttttgggtgtagcccgcttgttatcccagatgtctgaacctgttatgaaggcagcaatgtatcctttttattctgcttgctacatcatgcttctgtttagtttcttaggtaacaaataggactagttgtgcacttgcacttgcacttggcttgcattaaactatactggtgtgtttggtttgtggaatcatcccatgcttcatgagtgcatcccatggatttttgtggaatcaagtaatcatcccattcctggagnn

SEQ ID NO: 69456 - DNA, 759 bp, Zea Mays
ttcttgccttcttggcttcttgtatgcatgtgcccgtccaggtccaggcatccaggctcagcgtctagggaccagccccagccctggcggccggcgtggcggcacacagtgcccggcgcctccgtccacttcccggcccggcgcgacgttggccccggcgcctcgctcatccgctttcgtcttccggtgcagcacaggcgagtagcgcttgcgacgacccggcccgtcggtctccgctcccttccatcaaggcaagcagtcaggaagacatctgaccgggtcagacgatacagcccatatacgtacgtcgagtcctcaaagttcgattctacgaccatcgcacccatcttggcccaaagtacttccgcgccgcgctacgaacgaggccatccgccgccacacgccgtaggccatgccgctgaggtcggagaccggcactgctggggagggcgatgaggagcagcggttgcgggctgctctgcgtcacctgcaggcggaggcgggggtgctggagcgcctggtgtacaagcaccggaaccagcaccgtggcgccgcctatttccaatacctcctcaaggtgaggagggacctcaagcttctgctcggcgccggcctcgcggaggtcctcaacgccgtgttcccagttctcgcatgccgcaagccggccaacacgatcctcgtccccaacaaactaagaagaaacctggtgcaaaccacagccatcaccagaggcttttgggtgtagcccgcttgttatcc

SEQ ID NO: 69457 - DNA, 2504 bp, Zea Mays
tcgaattccccgaggcggcccataatgctggctgggtcgtcctgaccaattgatggttctgcttctgctttaccactcaatcttgttgagagtcgccggcgccggcgattcctcctccaccgattcgcccggcgggagtctccgcagggctcaccgggaccgcgggtccacgatggccgccaacttctggacgtcgtcgcactgcaagcagctgctggaccccgaggacgtggacctggtgccggcggcggaccgggagcgaggcatcacgccggaagagttccgcctcatcaagatccatatgtcgttccatatctggaggctagcacagcaggttaaagttaggcaaaggttaggccttgtttgcataacctgatttatttgcttcttttgtgatgctaaaaggaacgtgtttgctatcttgattacttactatattttgcacttcgcatgtttccttctacatcttgtaacttatatagatggtaaaagaattagagatcacatcatataggttgttggtttattaactgaaaatcagcacacagagatatttagttggtgtttggcgagtggaaaatgatgactgtggatgggatatgaggaatcggttatatctaaaccccaaatttgcatagcgtgaaagggatgtgctgtagaatcgtgaatgggaaatgaggagcttttatccaccgatctaaagaggcgagggaggtgggttttgggtggggcccttttaatcttatacagtagattcacaattctatttgcttggctactggggacacaacttactggttggatctatgttcacttgttttgtcacttcttttttgtatgcttctttggagcaattatttgcagttccaggttgaagaacgcttcagagatgtcatgaagagaatcttcagatttcgcaacaagatttgttttgctgtggtcatacttaaattttctttctgacttaatgaggagcatctttattattaaagattgttcctaatctaaaaacccagtgcagaacattggaaaagtacaggatactatccttctcaaaacccatcttttaatatcccagtcccagtccatatcacaaacccatggtgcatccaaagttccaaacgccaccttagtgtttgttcctcccccatcattttgttgctgatgttcctactccaggtgcaataataagggggtgtttgaatgcactataactaatagttagttggctaaaaattgatagtaaaattagctagctaacaaagacctacctgactattaactaatttaccaaaaatagctagtagctgaactattagctaggttgtttggatgtctcaactaattttagccactaactattagctttagttcattcaaacaccccacaaaatgttggcatctttaagagaaagatgagtttgtcaaatagaattcttatgttactgtatgctcatcgaccatatgagtgcaacagtacttacaggattacagtaaaaagtaatattgagtgcatctcaagtctcaacaaatgaagtttttacataacatgcatgttatatcctgtctttagcttgtctgccaagatgtgatctttgtgaccttaaactgttgttatttcagagttgtagctacagcaatagcttacttcaggcgtgtgtatacaaggaagagcatgtcagactatgatcctcgtttggttgcacctacttgtttgtatttggcatctaaggtggaggagagtacagtgcaagcccgacttcttgtattttatataaaaaagatgtgtggttccgatgataagtatcggtttgaaattaaggatattcttgaaatggaaatgaagctcctggaagctctcgactattatttggttgttttccatccatatcgtcctctcttacagttgttgcaggatgctggcataacagacctgacacaatttgcctggggccttgttaatgatacatacaagatggaccttatcctcatataccctccctacatgattgcactggcctgcatatacatagcgagtgttttgaaagataaggacaccacagcatggtttgaagagctccgtgttgacatgaacatagttaagaatatctctatggaaatattagacttctatgacacctacaagattgatcctcaaaggggcatccctgaggataagataagccccgtgatgaacaagttgccggcaaaggcttaactcagatttggcgagcttaggagttgtaaactagtagtaaactacatcatacttccaccatgtgtgtactcagcctgcactgtcgcttgagacgtgttgatgaactacttgatagattcgatgcaaaaaccccatggaattgtttgtgtatgctgctggagtttattcaagttagtagcatctgcatctattaactatttattacgattgttattccagggttcttgacattaatatgaaaggtgctactttgttttacccgaagatgttttcaagcttttggctg

SEQ ID NO: 69458 - DNA, 1174 bp, Zea Mays
tcgaattccccgaggcggcccataatgctggctgggtcgtcctgaccaattgatggttctgcttctgctttaccactcaatcttgttgagagtcgccggcgccggcgattcctcctccaccgattcgcccggcgggagtctccgcagggctcaccgggaccgcgggtccacgatggccgccaacttctggacgtcgtcgcactgcaagcagctgctggaccccgaggacgtggacctggtgccggcggcggaccgggagcgaggcatcacgccggaagagttccgcctcatcaagatccatatgtcgttccatatctggaggctagcacagcaggttaaagttaggcaaagagttgtagctacagcaatagcttacttcaggcgtgtgtatacaaggaagagcatgtcagactatgatcctcgtttggttgcacctacttgtttgtatttggcatctaaggttccgatgataagtatcggtttgaaattaaggatattcttgaaatggaaatgaagctcctggaagctctcgactattatttggttgttttccatccatatcgtcctctcttacagttgttgcaggatgctggcataacagacctgacacaatttgcctggggccttgttaatgatacatacaagatggaccttatcctcatataccctccctacatgattgcactggcctgcatatacatagcgagtgttttgaaagataaggacaccacagcatggtttgaagagctccgtgttgacatgaacatagttaagaatatctctatggaaatattagacttctatgacacctacaagattgatcctcaaaggggcatccctgaggataagataagccccgtgatgaacaagttgccggcaaaggcttaactcagatttggcgagcttaggagttgtaaactagtagtaaactacatcatacttccaccatgtgtgtactcagcctgcactgtcgcttgagacgtgttgatgaactacttgatagattcgatgcaaaaaccccatggaattgtttgtgtatgctgctggagtttattcaagttagtagcatctgcatctattaactatttattacgattgttattccagggttcttgacattaatatgaaaggtgctactttgttttacccgaagatgttttcaagcttttggctg

SEQ ID NO: 69459 - DNA, 2499 bp, Zea Mays
tcgaattccccgaggcggcccataatgctggctgggtcgtcctgaccaattgatggttctgcttctgctttaccactcaatcttgttgagagtcgccggcgccggcgattcctcctccaccgattcgcccggcgggagtctccgcagggctcaccgggaccgcgggtccacgatggccgccaacttctggacgtcgtcgcactgcaagcagctgctggaccccgaggacgtggacctggtgccggcggcggaccgggagcgaggcatcacgccggaagagttccgcctcatcaagatccatatgtcatatctggaggctagcacagcaggttaaagttaggcaaaggttaggccttgtttgcataacctgatttatttgcttcttttgtgatgctaaaaggaacgtgtttgctatcttgattacttactatattttgcacttcgcatgtttccttctacatcttgtaacttatatagatggtaaaagaattagagatcacatcatataggttgttggtttattaactgaaaatcagcacacagagatatttagttggtgtttggcgagtggaaaatgatgactgtggatgggatatgaggaatcggttatatctaaaccccaaatttgcatagcgtgaaagggatgtgctgtagaatcgtgaatgggaaatgaggagcttttatccaccgatctaaagaggcgagggaggtgggttttgggtggggcccttttaatcttatacagtagattcacaattctatttgcttggctactggggacacaacttactggttggatctatgttcacttgttttgtcacttcttttttgtatgcttctttggagcaattatttgcagttccaggttgaagaacgcttcagagatgtcatgaagagaatcttcagatttcgcaacaagatttgttttgctgtggtcatacttaaattttctttctgacttaatgaggagcatctttattattaaagattgttcctaatctaaaaacccagtgcagaacattggaaaagtacaggatactatccttctcaaaacccatcttttaatatcccagtcccagtccatatcacaaacccatggtgcatccaaagttccaaacgccaccttagtgtttgttcctcccccatcattttgttgctgatgttcctactccaggtgcaataataagggggtgtttgaatgcactataactaatagttagttggctaaaaattgatagtaaaattagctagctaacaaagacctacctgactattaactaatttaccaaaaatagctagtagctgaactattagctaggttgtttggatgtctcaactaattttagccactaactattagctttagttcattcaaacaccccacaaaatgttggcatctttaagagaaagatgagtttgtcaaatagaattcttatgttactgtatgctcatcgaccatatgagtgcaacagtacttacaggattacagtaaaaagtaatattgagtgcatctcaagtctcaacaaatgaagtttttacataacatgcatgttatatcctgtctttagcttgtctgccaagatgtgatctttgtgaccttaaactgttgttatttcagagttgtagctacagcaatagcttacttcaggcgtgtgtatacaaggaagagcatgtcagactatgatcctcgtttggttgcacctacttgtttgtatttggcatctaaggtggaggagagtacagtgcaagcccgacttcttgtattttatataaaaaagatgtgtggttccgatgataagtatcggtttgaaattaaggatattcttgaaatggaaatgaagctcctggaagctctcgactattatttggttgttttccatccatatcgtcctctcttacagttgttgcaggatgctggcataacagacctgacacaatttgcctggggccttgttaatgatacatacaagatggaccttatcctcatataccctccctacatgattgcactggcctgcatatacatagcgagtgttttgaaagataaggacaccacagcatggtttgaagagctccgtgttgacatgaacatagttaagaatatctctatggaaatattagacttctatgacacctacaagattgatcctcaaaggggcatccctgaggataagataagccccgtgatgaacaagttgccggcaaaggcttaactcagatttggcgagcttaggagttgtaaactagtagtaaactacatcatacttccaccatgtgtgtactcagcctgcactgtcgcttgagacgtgttgatgaactacttgatagattcgatgcaaaaaccccatggaattgtttgtgtatgctgctggagtttattcaagttagtagcatctgcatctattaactatttattacgattgttattccagggttcttgacattaatatgaaaggtgctactttgttttacccgaagatgttttcaagcttttggctg

SEQ ID NO: 69460 - DNA, 1881 bp, Zea Mays
tcgaattccccgaggcggcccataatgctggctgggtcgtcctgaccaattgatggttctgcttctgctttaccactcaatcttgttgagagtcgccggcgccggcgattcctcctccaccgattcgcccggcgggagtctccgcagggctcaccgggaccgcgggtccacgatggccgccaacttctggacgtcgtcgcactgcaagcagctgctggaccccgaggacgtggacctggtgccggcggcggaccgggagcgaggcatcacgccggaagagttccgcctcatcaagatccatatgtcgttccgtgagctcctatcctcgctagtcttttcctgacaccttgcattatcatttcccgatgtgaatcagctttagattctacactgcttctgtattgtgcactaaaaaagatcataccaaactctgagctgttagatgttggaactgctaatcttttatgatattagacgcatcaaatgcagactgatctgatgttcaaacgattgctggttttccacgactgtgacaagtaacttgtgtatatgtagttagacccacgagcatcctgctatgtgcctttatatcatgggtttttatgtgacgctaagatcaaacgtctgcctgccatttcagttgagaaagaaagaaaaatacgatgtttttcttgttttcaccctactgatttcaaacaaacaagttcatagtccttggttgtgttattgtgcctttttgcaatccttgcttttattaattcagtgcagtcttaattcatagtattagtgtatcgctaaattagactccatgtttttaaggaaaccaaacacatagttcattttcatacatttacatccatcacagtatctcacattttcacattattgatgtccattttgcattaggacacctggtgtatttttgaatgccttatcaatacaagcatttgatgatttcagatatctggaggctagcacagcaggttaaagttaggcaaagagttgtagctacagcaatagcttacttcaggcgtgtgtatacaaggaagagcatgtcagactatgatcctcgtttggttgcacctacttgtttgtatttggcatctaaggtggaggagagtacagtgcaagcccgacttcttgtattttatataaaaaagatgtgtggttccgatgataagtatcggtttgaaattaaggatattcttgaaatggaaatgaagctcctggaagctctcgactattatttggttgttttccatccatatcgtcctctcttacagttgttgcaggatgctggcataacagacctgacacaatttgcctggggccttgttaatgatacatacaagatggaccttatcctcatataccctccctacatgattgcactggcctgcatatacatagcgagtgttttgaaagataaggacaccacagcatggtttgaagagctccgtgttgacatgaacatagttaagaatatctctatggaaatattagacttctatgacacctacaagattgatcctcaaaggggcatccctgaggataagataagccccgtgatgaacaagttgccggcaaaggcttaactcagatttggcgagcttaggagttgtaaactagtagtaaactacatcatacttccaccatgtgtgtactcagcctgcactgtcgcttgagacgtgttgatgaactacttgatagattcgatgcaaaaaccccatggaattgtttgtgtatgctgctggagtttattcaagttagtagcatctgcatctattaactatttattacgattgttattccagggttcttgacattaatatgaaaggtgctactttgttttacccgaagatgttttcaagcttttggctg

SEQ ID NO: 69461 - DNA, 2499 bp, Zea Mays
tcgaattccccgaggcggcccataatgctggctgggtcgtcctgaccaattgatggttctgcttctgctttaccactcaatcttgttgagagtcgccggcgccggcgattcctcctccaccgattcgcccggcgggagtctccgcagggctcaccgggaccgcgggtccacgatggccgccaacttctggacgtcgtcgcactgcaagcagctgctggaccccgaggacgtggacctggtgccggcggcggaccgggagcgaggcatcacgccggaagagttccgcctcatcaagatccatatgtcgttccatatctggaggctagcacagcaggttaaagttaggcaaaggttaggccttgtttgcataacctgatttatttgcttcttttgtgatgctaaaaggaacgtgtttgctatcttgattacttactatattttgcacttcgcatgtttccttctacatcttgtaacttatatagatggtaaaagaattagagatcacatcatataggttgttggtttattaactgaaaatcagcacacagagatatttagttggtgtttggcgagtggaaaatgatgactgtggatgggatatgaggaatcggttatatctaaaccccaaatttgcatagcgtgaaagggatgtgctgtagaatcgtgaatgggaaatgaggagcttttatccaccgatctaaagaggcgagggaggtgggttttgggtggggcccttttaatcttatacagtagattcacaattctatttgcttggctactggggacacaacttactggttggatctatgttcacttgttttgtcacttcttttttgtatgcttctttggagcaattatttgcagttccaggttgaagaacgcttcagagatgtcatgaagagaatcttcagatttcgcaacaagatttgttttgctgtggtcatacttaaattttctttctgacttaatgaggagcatctttattattaaagattgttcctaatctaaaaacccagtgcagaacattggaaaagtacaggatactatccttctcaaaacccatcttttaatatcccagtcccagtccatatcacaaacccatggtgcatccaaagttccaaacgccaccttagtgtttgttcctcccccatcattttgttgctgatgttcctactccaggtgcaataataagggggtgtttgaatgcactataactaatagttagttggctaaaaattgatagtaaaattagctagctaacaaagacctacctgactattaactaatttaccaaaaatagctagtagctgaactattagctaggttgtttggatgtctcaactaattttagccactaactattagctttagttcattcaaacaccccacaaaatgttggcatctttaagagaaagatgagtttgtcaaatagaattcttatgttactgtatgctcatcgaccatatgagtgcaacagtacttacaggattacagtaaaaagtaatattgagtgcatctcaagtctcaacaaatgaagtttttacataacatgcatgttatatcctgtctttagcttgtctgccaagatgtgatctttgtgaccttaaactgttgttatttcagagttgtagctacagcaatagcttacttcaggcgtgtgtatacaaggaagagcatgtcagactatgatcctcgtttggttgcacctacttgtttgtatttggcatctaaggtggaggagagtacagtgcaagcccgacttcttgtattttatataaaaaagatgttccgatgataagtatcggtttgaaattaaggatattcttgaaatggaaatgaagctcctggaagctctcgactattatttggttgttttccatccatatcgtcctctcttacagttgttgcaggatgctggcataacagacctgacacaatttgcctggggccttgttaatgatacatacaagatggaccttatcctcatataccctccctacatgattgcactggcctgcatatacatagcgagtgttttgaaagataaggacaccacagcatggtttgaagagctccgtgttgacatgaacatagttaagaatatctctatggaaatattagacttctatgacacctacaagattgatcctcaaaggggcatccctgaggataagataagccccgtgatgaacaagttgccggcaaaggcttaactcagatttggcgagcttaggagttgtaaactagtagtaaactacatcatacttccaccatgtgtgtactcagcctgcactgtcgcttgagacgtgttgatgaactacttgatagattcgatgcaaaaaccccatggaattgtttgtgtatgctgctggagtttattcaagttagtagcatctgcatctattaactatttattacgattgttattccagggttcttgacattaatatgaaaggtgctactttgttttacccgaagatgttttcaagcttttggctg

SEQ ID NO: 69462 - DNA, 1128 bp, Zea Mays
ggctgatcttctctcttctaacctatcaagacaccaataacgaagcgcgattgtgaactcaaacccagagcgcagaattccatcttgcaaatcagctcaaacggtaggaaacaagtggaatcgcagtgtcttaccctctctgcgaggctgtggctgtcagtcgcctgccctcgccgcgcccggacatggacgtagtccttgggcggttcgactgccggcttggcggtcttccccttgcccttcttctgcgctttgagttcaaccgaggcgtcgctcgccgccacctcctctaccttcggcttcaccgggctgtcgctgccgcccactctgcacctcttcccgtccggacccttggcctccgcagcctgcaaaccaatattcagaacggcaccagcgcatcaagaaccagcaagctaaattcgaagcgctcggtatctgaagaatccagtctgcgctggtcgtttccgcaccttgcccgggcaggcttccttgccgccggcggaccccgtgggcggcgccttgcgcttcctgacattgtcatcgcccctggcgcgcgcccacgccgggtcggacaccgacgacccctccggggacacgccgccacacccggcccccgcggcgaccccggacaccccgaagaggccgccgccgccgccgcagagcgtttcgaggaacccggcgtccagcgcggcgaagtcgagcgcaggggcggatgagcccatgcccatgagcaggctggcaacgtagtcgctgtccattgaaagagagaaaggcgctgccgcaggaattgcgcaggaagcaaaggggggtgagaaagtcttgggtcgtctcgtctcctctcctccgagctcgagcccgcggtggatttgggggaaagcgaagcgaacgaggccgcggagccggtaggtggggggattgctttatagagcggttgttgccgctgcggttgggttgtgggccgcgcgccgcgtccgtcgcgtagctcggcgcggtgggatgcttgcggcagtgggttaccaccgggttctactgcggcggcgctcgcggaggagaggggagaaagggccgtcaaaacgggacggggcgggtggaggtgaggccgccgcgccggcaggccgagaaaataac

SEQ ID NO: 69463 - DNA, 849 bp, Zea Mays
gaagagactcgatcttatgtatctacttattgtctttttgcctttgctcggtagttccgtagccggttttttcggacgttttctaggatctgaaggaaccgctataatgaccaccacgtgcgtttcatttgagtttggattaggaagaacaaggcaagtgatgatgaagcatgagcatgtctgcttcttcgtgactgctgccaagactgccccggctttggaacacaggaatttcacaggaattagttcaaaaacataggaaaaacacatgattcaggaaattttgtttattccaaaggagctgtaagccatgcttaggcaggaaactgaccatcatctgcaactttgtcttgcgttcagttaccccccagaatggagtcaatatattactagaaagtgacttaagagttaattgctgccccatgtctgtattgacacacactgaatctgtagtttgatttcaaatttttgatagaacaaggatcaactcaattgtattactcagtagtgtttctgtaatactcaatcattgacagaagagctcaggtaggtgagaattgagaactagctcaatatgacaaaggcaccagtcaacagattgaaagctcaacaaactcctctctttgcaatatttggttgcacctaaatagcttcttctgagctgttacgattcttctagatggattctcgattataacagaagaaaacgatggttgtctatgttattgttttgctcatgctgcaaacgtatattttctgggacggcattggagcattcgacactgtttgatgccctgcactaggtagctggtgagttgttcagctcgaatctcttagacttgaattgct

SEQ ID NO: 69464 - DNA, 2353 bp, Zea Mays
ggaggccgaaagcgaagttatcctcgtacagagagcactgcatatccgtcatcatttgattttcgaggtgcacttgctgcactattaaataatcctctatggtccaatgatgtccggaaattactggatgctggttttgttaagcctcgtcaaggtcatgatgctggggaccatcctccaatcactccaatgaggtcagcaacagaagcatctttgggaactgatgcttggaggctgtaccaatacatatgccagcacttcattggaactgttagtcctgattgtagatatacaaggactgccattgagttcacttcaggtggtgaaacattccactgtgttgggtatcgagtcacttctaaaggatttacatctatcatgccatggctggctgtcagcgagaacagtcttcctgcatttaaaaagggagactctgttagtattcataaggctgacatatatgagggaagcactacaccacctgattacctcactgaaagtgaattgatttccctcatggagaagaatggcataggtacagatgcatcaattcctgtacatataaacaacatttgtgaacgtaattatgttcaggtgaattctggaagaaggttagtaccaacacccctgggaactacgttgataagagggtatcagtgtattgatgctgatctctgcttgccagatatcagaagctttattgagcaacagattactctaattgcaaaaggaaaagctgatcatcttcgagttgttcaacatgtcattcagcaatttatgaaaaagtactcttactttgtgaaaaagattgaaaacatggatgctctgttcgaggcacagttttcacctttggcagactctgggcgcctactaagcaagtgtggaaaatgtggtcggtatatgaagtacatttccactcagccaatgaggttgtactgtataacttgtgaggatgtctattatcttcctcagaacggttcaattaagctttacaaggaaatcgtatgccctcttgatggttttgagttgcttttgttctcgatggtgggacctgatgcaaaatctttcccactgtgccctttttgctataattgtcctccatttgaaggcatcgacaaactctttggtgctctcaagctcgatgacaccggcaaggttgggaaaggggccggcatgccatgcttcctttgtcctcacccgacatgcaagcaatctatgatcactcagggagtttgtgcttgtcctgagtgtagtggtaccctgattcttgatccagttagtgcacccaaatggcggctttactgcaacatgtgtaattgcattgtattgctcccacatgctgctcacaggatcaccactacagataagaagtgcctaacatgtgaatctactatcattgaagttgatttcaacaagaaaaccacccctcttcaagatggagctacattgcatgagggatgtatcttatgtgatgatctgttgcattcactcattgaaatgaagcatggtaagtcattctttattcggagagggagaggaagaggcagagggagaggtcggggcagaggaagcagccggggtagaggaagacgagggaactcaaggtatgatgatcctaaaatgagtttccgggatttttgaagattttggacaaccaacattcggtcactactcactactttgtctgcttcttcgtgactgctgccaagactgccccggctttggaacacaggaatttcacaggaattagttcaaaaacataggaaaaacacatgattcaggaaattttgtttattccaaaggagctgtaagccatgcttaggcaggaaactgaccatcatctgcaactttgtcttgcgttcagttaccccccagaatggagtcaatatattactagaaagtgacttaagagttaattgctgccccatgtctgtattgacacacactgaatctgtagtttgatttcaaatttttgatagaacaaggatcaactcaattgtattactcagtagtgtttctgtaatactcaatcattgacagaagagctcaggtaggtgagaattgagaactagctcaatatgacaaaggcaccagtcaacagattgaaagctcaacaaactcctctctttgcaatatttggttgcacctaaatagcttcttctgagctgttacgattcttctagatggattctcgattataacagaagaaaacgatggttgtctatgttattgttttgctcatgctgcaaacgtatattttctgggacggcattggagcattcgacactgtttgatgccctgcactaggtagctggtgagttgttcagctcgaatctcttagacttgaattgct

SEQ ID NO: 69465 - DNA, 2197 bp, Zea Mays
cttcaacaaaccccatattattttttagagttatcctcgtacagagagcactgcatatccgtcatcatttgattttcgaggtgcacttgctgcactattaaataatcctctatggtccaatgatgtccggaaattactggatgctggttttgttaagcctcgtcaaggtcatgatgctggggaccatcctccaatcactccaatgaggtcagcaacagaagcatctttgggaactgatgcttggaggctgtaccaatacatatgccagcacttcattggaactgttagtcctgattgtagatatacaaggactgccattgagttcacttcaggtggtgaaacattccactgtgttgggtatcgagtcacttctaaaggatttacatctatcatgccatggctggctgtcagcgagaacagtcttcctgcatttaaaaagggagactctgttagtattcataaggctgacatatatgagggaagcactacaccacctgattacctcactgaaagtgaattgatttccctcatggagaagaatggcataggtacagatgcatcaattcctgtacatataaacaacatttgtgaacgtaattatgttcaggtgaattctggaagaagatatcagaagctttattgagcaacagattactctaattgcaaaaggaaaagctgatcatcttcgagttgttcaacatgtcattcagcaatttatgaaaaagtactcttactttgtgaaaaagattgaaaacatggatgctctgttcgaggcacagttttcacctttggcagactctgggcgcctactaagcaagtgtggaaaatgtggtcggtatatgaagtacatttccactcagccaatgaggttgtactgtataacttgtgaggatgtctattatcttcctcagaacggttcaattaagctttacaaggaaatcgtatgccctcttgatggttttgagttgcttttgttctcgatggtgggacctgatgcaaaatctttcccactgtgccctttttgctataattgtcctccatttgaaggcatcgacaaactctttggtgctctcaagctcgatgacaccggcaaggatcaccactacagataagaagtgcctaacatgtgaatctactatcattgaagttgatttcaacaagaaaaccacccctcttcaagatggagctacattgcatgagggatgtatcttatgtgatgatctgttgcattcactcattgaaatgaagcatggtaagtcattctttattcggagagggagaggaagaggcagagggagaggtcggggcagaggaagcagccggggtagaggaagacgagggaactcaaggtatgatgatcctaaaatgagtttccgggatttttgaagattttggacaaccaacattcggtcactactcactactttttccgtagccggttttttcggacgttttctaggatctgaaggaaccgctataatgaccaccacgtgcgtttcatttgagtttggattaggaagaacaaggtctgcttcttcgtgactgctgccaagactgccccggctttggaacacaggaatttcacaggaattagttcaaaaacataggaaaaacacatgattcaggaaattttgtttattccaaaggagctgtaagccatgcttaggcaggaaactgaccatcatctgcaactttgtcttgcgttcagttaccccccagaatggagtcaatatattactagaaagtgacttaagagttaattgctgccccatgtctgtattgacacacactgaatctgtagtttgatttcaaatttttgatagaacaaggatcaactcaattgtattactcagtagtgtttctgtaatactcaatcattgacagaagagctcaggtaggtgagaattgagaactagctcaatatgacaaaggcaccagtcaacagattgaaagctcaacaaactcctctctttgcaatatttggttgcacctaaatagcttcttctgagctgttacgattcttctagatggattctcgattataacagaagaaaacgatggttgtctatgttattgttttgctcatgctgcaaacgtatattttctgggacggcattggagcattcgacactgtttgatgccctgcactaggtagctggtgagttgttcagctcgaatctcttagacttgaattgct

SEQ ID NO: 69466 - DNA, 2794 bp, Zea Mays
attccaagcatatgttgcagttatcgattgcactgggattcctgaaaatgaggctggcagaagaatttttcgtgctagattttcatctgttactgagaaggacatatcgagcgccatggataatcttgttctgccaaacaaagatgaatcactatctgtggatgctcgccaagaaattgacttaaaggttggagtagcatttactcgatttcagacccgatatttccaaggaaaatatggaaaccttgattcaagagtgatttcgtatggtccatgccaaacacctacacttggattctgtgtacaacgccatcagcaaatcaccacatttaaaccagagaaattctggtccttgaaaacgtatattatcaaagatagtgatgaaatacagctagaatgggaccggaagaaactttttgattttgatgttactgtaatgtttcagaagatggtcatcagtgatgggactctaaaagtagcagatatatctgtgaaggaagaatgcaaaacccgtccatctggccttaatacagttaatatgcttaaggttgcatcaagtgcacttggtattgggcctcagacagccatgcacttggctgagcggctttacactcaaggattcatcagttatcctcgtacagagagcactgcatatccgtcatcatttgattttcgaggtgcacttgctgcactattaaataatcctctatggtccaatgatgtccggaaattactggatgctggttttgttaagcctcgtcaaggtcatgatgctggggaccatcctccaatcactccaatgaggtcagcaacagaagcatctttgggaactgatgcttggaggctgtaccaatacatatgccagcacttcattggaactgttagtcctgattgtagatatacaaggactgccattgagttcacttcaggtggtgaaacattccactgtgttgggtatcgagtcacttctaaaggatttacatctatcatgccatggctggctgtcagcgagaacagtcttcctgcatttaaaaagggagactctgttagtattcataaggctgacatatatgagggaagcactacaccacctgattacctcactgaaagtgaattgatttccctcatggagaagaatggcataggtacagatgcatcaattcctgtacatataaacaacatttgtgaacgtaattatgttcaggtgaattctggaagaagatatcagaagctttattgagcaacagattactctaattgcaaaaggaaaagctgatcatcttcgagttgttcaacatgtcattcagcaatttatgaaaaagtactcttactttgtgaaaaagattgaaaacatggatgctctgttcgaggcacagttttcacctttggcagactctgggcgcctactaagcaagtgtggaaaatgtggtcggtatatgaagtacatttccactcagccaatgaggttgtactgtataacttgtgaggatgtctattatcttcctcagaacggttcaattaagctttacaaggaaatcgtatgccctcttgatggttttgagttgcttttgttctcgatggtgggacctgatgcaaaatctttcccactgtgccctttttgctataattgtcctccatttgaaggcatcgacaaactctttggtgctctcaagctcgatgacaccggcaaggatcaccactacagataagaagtgcctaacatgtgaatctactatcattgaagttgatttcaacaagaaaaccacccctcttcaagatggagctacattgcatgagggatgtatcttatgtgatgatctgttgcattcactcattgaaatgaagcatggtaagtcattctttattcggagagggagaggaagaggcagagggagaggtcggggcagaggaagcagccggggtagaggaagacgagggaactcaaggtatgatgatcctaaaatgagtttccgggatttttgaagattttggacaaccaacattcggtcactactcactactttttccgtagccggttttttcggacgttttctaggatctgaaggaaccgctataatgaccaccacgtgcgtttcatttgagtttggattaggaagaacaaggtctgcttcttcgtgactgctgccaagactgccccggctttggaacacaggaatttcacaggaattagttcaaaaacataggaaaaacacatgattcaggaaattttgtttattccaaaggagctgtaagccatgcttaggcaggaaactgaccatcatctgcaactttgtcttgcgttcagttaccccccagaatggagtcaatatattactagaaagtgacttaagagttaattgctgccccatgtctgtattgacacacactgaatctgtagtttgatttcaaatttttgatagaacaaggatcaactcaattgtattactcagtagtgtttctgtaatactcaatcattgacagaagagctcaggtaggtgagaattgagaactagctcaatatgacaaaggcaccagtcaacagattgaaagctcaacaaactcctctctttgcaatatttggttgcacctaaatagcttcttctgagctgttacgattcttctagatggattctcgattataacagaagaaaacgatggttgtctatgttattgttttgctcatgctgcaaacgtatattttctgggacggcattggagcattcgacactgtttgatgccctgcactaggtagctggtgagttgttcagctcgaatctcttagacttgaattgct

SEQ ID NO: 69467 - DNA, 2861 bp, Zea Mays
attccaagcatatgttgcagttatcgattgcactgggattcctgaaaatgaggctggcagaagaatttttcgtgctagattttcatctgttactgagaaggacatatcgagcgccatggataatcttgttctgccaaacaaagatgaatcactatctgtggatgctcgccaagaaattgacttaaaggttggagtagcatttactcgatttcagacccgatatttccaaggaaaatatggaaaccttgattcaagagtgatttcgtatggtccatgccaaacacctacacttggattctgtgtacaacgccatcagcaaatcaccacatttaaaccagagaaattctggtccttgaaaacgtatattatcaaagatagtgatgaaatacagctagaatgggaccggaagaaactttttgattttgatgttactgtaatgtttcagaagatggtcatcagtgatgggactctaaaagtagcagatatatctgtgaaggaagaatgcaaaacccgtccatctggccttaatacagttaatatgcttaaggttgcatcaagtgcacttggtattgggcctcagacagccatgcacttggctgagcggctttacactcaaggattcatcagttatcctcgtacagagagcactgcatatccgtcatcatttgattttcgaggtgcacttgctgcactattaaataatcctctatggtccaatgatgtccggaaattactggatgctggttttgttaagcctcgtcaaggtcatgatgctggggaccatcctccaatcactccaatgaggactgccattgagttcacttcaggtggtgaaacattccactgtgttgggtatcgagtcacttctaaaggatttacatctatcatgccatggctggctgtcagcgagaacagtcttcctgcatttaaaaagggagactctgttagtattcataaggctgacatatatgagggaagcactacaccacctgattacctcactgaaagtgaattgatttccctcatggagaagaatggcataggtacagatgcatcaattcctgtacatataaacaacatttgtgaacgtaattatgttcaggtgaattctggaagaaggttagtaccaacacccctgggaactacgttgataagagggtatcagtgtattgatgctgatctctgcttgccagatatcagaagctttattgagcaacagattactctaattgcaaaaggaaaagctgatcatcttcgagttgttcaacatgtcattcagcaatttatgaaaaagtactcttactttgtgaaaaagattgaaaacatggatgctctgttcgaggcacagttttcacctttggcagactctgggcgcctactaagcaagtgtggaaaatgtggtcggtatatgaagtacatttccactcagccaatgaggttgtactgtataacttgtgaggatgtctattatcttcctcagaacggttcaattaagctttacaaggaaatcgtatgccctcttgatggttttgagttgcttttgttctcgatggtgggacctgatgcaaaatctttcccactgtgccctttttgctataattgtcctccatttgaaggcatcgacaaactctttggtgctctcaagctcgatgacaccggcaaggttgggaaaggggccggcatgccatgcttcctttgtcctcacccgacatgcaagcaatctatgatcactcagggagtttgtgcttgtcctgagtgtagtggtaccctgattcttgatccagttagtgcacccaaatggcggctttactgcaacatgtgtaattgcattgtattgctcccacatgctgctcacaggatcaccactacagataagaagtgcctaacatgtgaatctactatcattgaagttgatttcaacaagaaaaccacccctcttcaagatggagctacattgcatgagggatgtatcttatgtgatgatctgttgcattcactcattgaaatgaagcatggtaagtcattctttattcggagagggagaggaagaggcagagggagaggtcggggcagaggaagcagccggggtagaggaagacgagggaactcaaggtatgatgatcctaaaatgagtttccgggatttttgaagattttggacaaccaacattcggtcactactcactactttgtctgcttcttcgtgactgctgccaagactgccccggctttggaacacaggaatttcacaggaattagttcaaaaacataggaaaaacacatgattcaggaaattttgtttattccaaaggagctgtaagccatgcttaggcaggaaactgaccatcatctgcaactttgtcttgcgttcagttaccccccagaatggagtcaatatattactagaaagtgacttaagagttaattgctgccccatgtctgtattgacacacactgaatctgtagtttgatttcaaatttttgatagaacaaggatcaactcaattgtattactcagtagtgtttctgtaatactcaatcattgacagaagagctcaggtaggtgagaattgagaactagctcaatatgacaaaggcaccagtcaacagattgaaagctcaacaaactcctctctttgcaatatttggttgcacctaaatagcttcttctgagctgttacgattcttctagatggattctcgattataacagaagaaaacgatggttgtctatgttattgttttgctcatgctgcaaacgtatattttctgggacggcattggagcattcgacactgtttgatgccctgcactaggtagctggtgagttgttcagctcgaatctcttagacttgaattgct

SEQ ID NO: 69468 - DNA, 2987 bp, Zea Mays
ccccaatccgccggtctctatggcgcccaaggttctcatggtcgcggagaagcccagcatcgctctttccatcgcctccgccctctccggcggccgcatgtctacaagaaaaggaagcacagatgtccatgagtttgatggaacatttcagggttcttatgcgaacttcaaagtgacatcagtcattggacatgtcttaagatttcccccctgcatatcagaactgggaaggaactgatccaatggacctatttgaggctccagttctgagatctgaatgcaacccaaagttatcgattgcactgggattcctgaaaatgaggctggcagaagaatttttcgtgctagattttcatctgttactgagaaggacatatcgagcgccatggataatcttgttctgccaaacaaagatgaatcactatctgtggatgctcgccaagaaattgacttaaaggtatggtccatgccaaacacctacacttggattctgtgtacaacgccatcagcaaatcaccacatttaaaccagagaaattctggtccttgaaaacgtatattatcaaagatagtgatgaaatacagctagaatgggaccggaagaaactttttgattttgatgttactgtaatgtttcagaagatggtcatcagtgatgggactctaaaagtagcagatatatctgtgaaggaagaatgcaaaacccgtccatctggccttaatacagttaatatgcttaaggttgcatcaagtgcacttggtattgggcctcagacagccatgcacttggctgagcggctttacactcaaggattcatcagttatcctcgtacagagagcactgcatatccgtcatcatttgattttcgaggtgcacttgctgcactattaaataatcctctatggtccaatgatgtccggaaattactggatgctggttttgttaagcctcgtcaaggtcatgatgctggggaccatcctccaatcactccaatgaggtcagcaacagaagcatctttgggaactgatgcttggaggctgtaccaatacatatgccagcacttcattggaactgttagtcctgattgtagatatacaaggactgccattgagttcacttcaggtggtgaaacattccactgtgttgggtatcgagtcacttctaaaggatttacatctatcatgccatggctggctgtcagcgagaacagtcttcctgcatttaaaaagggagactctgttagtattcataaggctgacatatatgagggaagcactacaccacctgattacctcactgaaagtgaattgatttccctcatggagaagaatggcataggtacagatgcatcaattcctgtacatataaacaacatttgtgaacgtaattatgttcaggtgaattctggaagaagatatcagaagctttattgagcaacagattactctaattgcaaaaggaaaagctgatcatcttcgagttgttcaacatgtcattcagcaatttatgaaaaagtactcttactttgtgaaaaagattgaaaacatggatgctctgttcgaggcacagttttcacctttggcagactctgggcgcctactaagcaagtgtggaaaatgtggtcggtatatgaagtacatttccactcagccaatgaggttgtactgtataacttgtgaggatgtctattatcttcctcagaacggttcaattaagctttacaaggaaatcgtatgccctcttgatggttttgagttgcttttgttctcgatggtgggacctgatgcaaaatctttcccactgtgccctttttgctataattgtcctccatttgaaggcatcgacaaactctttggtgctctcaagctcgatgacaccggcaaggatcaccactacagataagaagtgcctaacatgtgaatctactatcattgaagttgatttcaacaagaaaaccacccctcttcaagatggagctacattgcatgagggatgtatcttatgtgatgatctgttgcattcactcattgaaatgaagcatggtaagtcattctttattcggagagggagaggaagaggcagagggagaggtcggggcagaggaagcagccggggtagaggaagacgagggaactcaaggtatgatgatcctaaaatgagtttccgggatttttgaagattttggacaaccaacattcggtcactactcactactttttccgtagccggttttttcggacgttttctaggatctgaaggaaccgctataatgaccaccacgtgcgtttcatttgagtttggattaggaagaacaaggtctgcttcttcgtgactgctgccaagactgccccggctttggaacacaggaatttcacaggaattagttcaaaaacataggaaaaacacatgattcaggaaattttgtttattccaaaggagctgtaagccatgcttaggcaggaaactgaccatcatctgcaactttgtcttgcgttcagttaccccccagaatggagtcaatatattactagaaagtgacttaagagttaattgctgccccatgtctgtattgacacacactgaatctgtagtttgatttcaaatttttgatagaacaaggatcaactcaattgtattactcagtagtgtttctgtaatactcaatcattgacagaagagctcaggtaggtgagaattgagaactagctcaatatgacaaaggcaccagtcaacagattgaaagctcaacaaactcctctctttgcaatatttggttgcacctaaatagcttcttctgagctgttacgattcttctagatggattctcgattataacagaagaaaacgatggttgtctatgttattgttttgctcatgctgcaaacgtatattttctgggacggcattggagcattcgacactgtttgatgccctgcactaggtagctggtgagttgttcagctcgaatctcttagacttgaattgct

SEQ ID NO: 69469 - DNA, 3206 bp, Zea Mays
cactcttctcttgggttccctcccattcccccccccccccccccccaatccgccggtctctatggcgcccaaggttctcatggtcgcggagaagcccagcatcgctctttccatcgcctccgccctctccggcggccgcatgtctacaagaaaaggaagcacagatgtccatgagtttgatggaacatttcagggttcttatgcgaacttcaaagtgacatcagtcattggacatgtcttaagtgtagatttcccccctgcatatcagaactgggaaggaactgatccaatggacctatttgaggctccagttctgagatctgaatgcaacccaaagttatcgattgcactgggattcctgaaaatgaggctggcagaagaatttttcgtgctagattttcatctgttactgagaaggacatatcgagcgccatggataatcttgttctgccaaacaaagatgaatcactatctgtggatgctcgccaagaaattgacttaaaggttggagtagcatttactcgatttcagacccgatatttccaaggaaaatatggaaaccttgattcaagagtgatttcgtatggtccatgccaaacacctacacttggattctgtgtacaacgccatcagcaaatcaccacatttaaaccagagaaattctggtccttgaaaacgtatattatcaaagatagtgatgaaatacagctagaatgggaccggaagaaactttttgattttgatgttactgtaatgtttcagaagatggtcatcagtgatgggactctaaaagtagcagatatatctgtgaaggaagaatgcaaaacccgtccatctggccttaatacagttaatatgcttaaggttgcatcaagtgcacttggtattgggcctcagacagccatgcacttggctgagcggctttacactcaaggattcatcagttatcctcgtacagagagcactgcatatccgtcatcatttgattttcgaggtgcacttgctgcactattaaataatcctctatggtccaatgatgtccggaaattactggatgctggttttgttaagcctcgtcaaggtcatgatgctggggaccatcctccaatcactccaatgaggtcagcaacagaagcatctttgggaactgatgcttggaggctgtaccaatacatatgccagcacttcattggaactgttagtcctgattgtagatatacaaggactgccattgagttcacttcaggtggtgaaacattccactgtgttgggtatcgagtcacttctaaaggatttacatctatcatgccatggctggctgtcagcgagaacagtcttcctgcatttaaaaagggagactctgttagtattcataaggctgacatatatgagggaagcactacaccacctgattacctcactgaaagtgaattgatttccctcatggagaagaatggcataggtacagatgcatcaattcctgtacatataaacaacatttgtgaacgtaattatgttcaggtgaattctggaagaagatatcagaagctttattgagcaacagattactctaattgcaaaaggaaaagctgatcatcttcgagttgttcaacatgtcattcagcaatttatgaaaaagtactcttactttgtgaaaaagattgaaaacatggatgctctgttcgaggcacagttttcacctttggcagactctgggcgcctactaagcaagtgtggaaaatgtggtcggtatatgaagtacatttccactcagccaatgaggttgtactgtataacttgtgaggatgtctattatcttcctcagaacggttcaattaagctttacaaggaaatcgtatgccctcttgatggttttgagttgcttttgttctcgatggtgggacctgatgcaaaatctttcccactgtgccctttttgctataattgtcctccatttgaaggcatcgacaaactctttggtgctctcaagctcgatgacaccggcaaggttgggaaaggggccggcatgccatgcttcctttgtcctcacccgacatgcaagcaatctatgatcactcagggagtttgtgcttgtcctgagtgtagtggtaccctgattcttgatccagttagtgcacccaaatggcggctttactgcaacatgtgtaattgcattgtattgctcccacatgctgctcacaggatcaccactacagataagaagtgcctaacatgtgaatctactatcattgaagttgatttcaacaagaaaaccacccctcttcaagatggagctacattgcatgagggatgtatcttatgtgatgatctgttgcattcactcattgaaatgaagcatggtaagtcattctttattcggagagggagaggaagaggcagagggagaggtcggggcagaggaagcagccggggtagaggaagacgagggaactcaaggtatgatgatcctaaaatgagtttccgggatttttgaagattttggacaaccaacattcggtcactactcactactttgtctgcttcttcgtgactgctgccaagactgccccggctttggaacacaggaatttcacaggaattagttcaaaaacataggaaaaacacatgattcaggaaattttgtttattccaaaggagctgtaagccatgcttaggcaggaaactgaccatcatctgcaactttgtcttgcgttcagttaccccccagaatggagtcaatatattactagaaagtgacttaagagttaattgctgccccatgtctgtattgacacacactgaatctgtagtttgatttcaaatttttgatagaacaaggatcaactcaattgtattactcagtagtgtttctgtaatactcaatcattgacagaagagctcaggtaggtgagaattgagaactagctcaatatgacaaaggcaccagtcaacagattgaaagctcaacaaactcctctctttgcaatatttggttgcacctaaatagcttcttctgagctgttacgattcttctagatggattctcgattataacagaagaaaacgatggttgtctatgttattgttttgctcatgctgcaaacgtatattttctgggacggcattggagcattcgacactgtttgatgccctgcactaggtagctggtgagttgttcagctcgaatctcttagacttgaattgct

SEQ ID NO: 69470 - DNA, 1966 bp, Zea Mays
attgataccagcagaaaaaaacaactcaagcctcgcccggtcgcccctccctccctccctctgccccgggtttccagggaaacccacccccagatccaaatccagcgaagcgacagagatcaaggatggagctggaggtgggtgcgccttcgccggcgaggtacctggtgggggcagcgatcatgatggccggcgtggtgctcccgctggcgtacatgatcttccgcagcaagcgttcgccttcctccgcctccgccgcggggccctcctccttctccaagcagacgaacaaagggctcatctgatctgagcgagtgggtgaatcgatcgccttcccctgatgcttgtcattctgtctgttttggcaccgcgagatcctccaactgcttctcgagactgggcatcatcacgtcaaatactagctgattagtagtcagttccttttgtaccttgtgtagatcagatcgattgcttatttggctgatttgatacaattataaacaatgggtttacttttgagtgcactacttacaagcatcattcatacggatttcagtttacctaaacaaaccacttgccctcttctgctgcttggctggtttattacgataactgtgcagaatttctctctatgctagttctccctcaattccaaaatgtaagttgttttagttttgtctgagttaagcttctctaagactaagtttatagaacatcaaattggtttcgctgagaccaccaggaaatatgtcttgccacttgacagtgcatttatttggtattgtagacgttaatatattttctatagacttcatcagaattagagaattttgacttaggacatgaaaacggcctatgttttggaaacatagggaatactatgtttgtggtttaataaggagcacacttgttgtgccattcatccttttgcatcatcagctgttgatggtctagttgttgcattgtcagatctaacagcattgggattgaattcggcactgatcctgcccttctgtgtagttgtgattcctatgcgatattttcttcagtgcttccctcttcaaagtttggtttgctctcttcagtccccttctttattctattctaacggaggcctttcatgtcattcgcttccaggagctgacacatacattgttgctaagtgcattagtttgttatctgataatccacacctccagatgtgccctgtatgtttgtgttcttataagttggctcctattgaattgtctgtgttcctgcacatgaaggtagtaaacaaatcagtgtgctgccccagaaaagtcagatggatcgattgtttttgtggctacatgaagggcttgcggcttgccttgtggcttgtgatcaagatggtaattctcatggaggctactgggtattcagggcctacccttcctcagtattgaatcaaaccccgatatttaagactgtcccttctgaagttgacgtgacatgctcgagcgctggagcgcgtcgacatcaccggtttctaccctgagtgtgtcctattaaagtgagaagtacctgctggacctagcatgatgtatgtgtccttgagtcttgagaccgcaacatatcaacatcactcgaagaggctgggcacctactgatcagtgatcacataacacagatggagagaaatatatgtgttcctgttttttattttgtattctagtaaaaaaaatactagcttctacagtttccatcatcaaacgcttatcccacttttctgcctcctggatactttgtgtcacgtacgttctctattgccacttggtgatgctgcttgtgtatctcatgcatatctgaatcccaggagatatcgtcccagtctctaccaagaaaatccgtatggagataatgacttttactcgaatagttgatgtgactaaatgaaaggagttacaagtacaatgatagtacaacagtaaggtcttatataact

SEQ ID NO: 69471 - DNA, 1970 bp, Zea Mays
attgataccagcagaaaaaaacaactcaagcctcgcccggtcgcccctccctccctccctctgccccgggtttccagggaaacccacccccagatccaaatccagcgaagcgacagagatcaaggatggagctggaggtgggtgcgccttcgccggcgaggtacctggtgggggcagcgatcatgatggccggcgtggtgctcccgctggcgtacatgatcttccgcagcaagcgttcgccttcctccgcctccgccgcggggccctcctccttctccaagcagacgtaggaacaaagggctcatctgatctgagcgagtgggtgaatcgatcgccttcccctgatgcttgtcattctgtctgttttggcaccgcgagatcctccaactgcttctcgagactgggcatcatcacgtcaaatactagctgattagtagtcagttccttttgtaccttgtgtagatcagatcgattgcttatttggctgatttgatacaattataaacaatgggtttacttttgagtgcactacttacaagcatcattcatacggatttcagtttacctaaacaaaccacttgccctcttctgctgcttggctggtttattacgataactgtgcagaatttctctctatgctagttctccctcaattccaaaatgtaagttgttttagttttgtctgagttaagcttctctaagactaagtttatagaacatcaaattggtttcgctgagaccaccaggaaatatgtcttgccacttgacagtgcatttatttggtattgtagacgttaatatattttctatagacttcatcagaattagagaattttgacttaggacatgaaaacggcctatgttttggaaacatagggaatactatgtttgtggtttaataaggagcacacttgttgtgccattcatccttttgcatcatcagctgttgatggtctagttgttgcattgtcagatctaacagcattgggattgaattcggcactgatcctgcccttctgtgtagttgtgattcctatgcgatattttcttcagtgcttccctcttcaaagtttggtttgctctcttcagtccccttctttattctattctaacggaggcctttcatgtcattcgcttccaggagctgacacatacattgttgctaagtgcattagtttgttatctgataatccacacctccagatgtgccctgtatgtttgtgttcttataagttggctcctattgaattgtctgtgttcctgcacatgaaggtagtaaacaaatcagtgtgctgccccagaaaagtcagatggatcgattgtttttgtggctacatgaagggcttgcggcttgccttgtggcttgtgatcaagatggtaattctcatggaggctactgggtattcagggcctacccttcctcagtattgaatcaaaccccgatatttaagactgtcccttctgaagttgacgtgacatgctcgagcgctggagcgcgtcgacatcaccggtttctaccctgagtgtgtcctattaaagtgagaagtacctgctggacctagcatgatgtatgtgtccttgagtcttgagaccgcaacatatcaacatcactcgaagaggctgggcacctactgatcagtgatcacataacacagatggagagaaatatatgtgttcctgttttttattttgtattctagtaaaaaaaatactagcttctacagtttccatcatcaaacgcttatcccacttttctgcctcctggatactttgtgtcacgtacgttctctattgccacttggtgatgctgcttgtgtatctcatgcatatctgaatcccaggagatatcgtcccagtctctaccaagaaaatccgtatggagataatgacttttactcgaatagttgatgtgactaaatgaaaggagttacaagtacaatgatagtacaacagtaaggtcttatataact

SEQ ID NO: 69472 - DNA, 3185 bp, Zea Mays
attgataccagcagaaaaaaacaactcaagcctcgcccggtcgcccctccctccctccctctgccccgggtttccagggaaacccacccccagatccaaatccagcgaagcgacagagatcaaggatggagctggaggtgggtgcgccttcgccggcgaggtacctggtgggggcagcgatcatgatggccggcgtggtgctcccgctggcgtacatgatcttccgcagcaagcgttcgccttcctccgcctccgccgcggggccctcctccttctccaagcagacgaacaaagggctcatctgatctgagcgagtgggtgaatcgatcgccttcccctgatgcttgtcattctgtctgttttggcaccgcgagatcctccaactgcttctcgagactgggcatcatcacgtcaaatactagctgattagtagtcagttccttttgtaccttgtgtagatcagatcgattgcttatttggctgatttgatacaattataaacaatgggtttacttttgagtgcactacttacaagcatcattcatacggatttcagtttacctaaacaaaccacttgccctcttctgctgcttggctggtttattacgataactgtgcagaatttctctctatgctagttctccctcaattccaaaatgtaagttgttttagttttgtctgagttaagcttctctaagactaagtttatagaacatcaaattggtttcgctgagaccaccaggaaatatgtcttgccacttgacagtgcatttatttggtattgtagacgttaatatattttctatagacttcatcagaattagagaattttgacttaggacatgaaaacggcctatgttttggaaacatagggaatactatgtttgtggtttaataaggagcacacttgttgtgccattcatccttttgcatcatcagctgttgatggtctagttgttgcattgtcagatctaacagcattgggattgaattcggcactgatcctgcccttctgtgtagttgtgattcctatgcgatattttcttcagtgcttccctcttcaaagtttggtttgctctcttcagtccccttctttattctattctaacggaggcctttcatgtcattcgcttccaggagctgacacatacattgttgctaagtgcattagtttgttatctgataatccacacctccagatgtgccctgtatgtttgtgttcttataagttggctcctattgaattgtctgtgttcctgcacatgaaggtagtaaacaaatcagtgtgctgccccagaaaagtcagatggatcgattgtttttgtggctacatgaagggcttgcggcttgccttgtggcttgtgatcaagatggtaattctcatggaggctactgggtattcagggcctacccttcctcaggtaggtataaatccaaaacagtggttgcaagtaatatcatcataacaactagttaattactgtatggcactagtattggctgtgggatacaaatattttggatggcactttatcatatttgtcccttgattgcacaagaatcttctatggccatatgtgtgtcataactcataaacctgtgagaaaagcagcacctttttaagatttttgactacggaatagtgatagctttagttgtctctttacacaatgtgtgaaattaaggtgcctgcatcaaagaaactttcttcatgacaggcaaccttggtgcttcgttcaacttgtggcaccctttgaatcttgttctcatggcgtgtcctgtcatttaaatcctctacgtttgaatgacagaaagcatgaaagttagattcatagtgtgttttcgctgctgtagctatcgctatagttcacgagccgcagcagccgcagcagccacagctgccaagaatagttagggctagtttgggaacccaaatctcctagatatttagttatatatattggggttttcctccctggtttgcctcccctttcttgcaaactagcccaacagggtttcagaaccccagagcctttcagaaatgccagaaggaaagcttcaagacattgtttggcgtggtgaaaaaaaaggattcatgcaatgagaaacaaattaatatcatgcctgctgagatatgcatatatgtgagctttatgtatctgtgtattcttaggctccaccagactgcaaggccaaataatcagccagattcgggtagttgggcatgtttatcagtttagatttgtttgtgtttcactttatatcccgtttggatctagatattcaaaactgaaattgggaattgaaataatgatttctgaattctgctgtttatttgtctaatgaattgagagctggaattaaagctcaatttcttggaattggactttaactaaaaagtgtctcccaattcagagccaagactctaggtattggatggaattgcaattccggatatatccaaacaatatatttttattgaaacttatttctaatactagacagatttggtattggatctaattcaattctaaaatctccaatatctacatcctatccttactaaaattgcatttttacttccgttttacttatgtcatttgctttgagagcaaaccttttcttttctgaaaaatgcagtattgaatcaaaccccgatatttaagactgtcccttctgaagttgacgtgacatgctcgagcgctggagcgcgtcgacatcaccggtttctaccctgagtgtgtcctattaaagtgagaagtacctgctggacctagcatgatgtatgtgtccttgagtcttgagaccgcaacatatcaacatcactcgaagaggctgggcacctactgatcagtgatcacataacacagatggagagaaatatatgtgttcctgttttttattttgtattctagtaaaaaaaatactagcttctacagtttccatcatcaaacgcttatcccacttttctgcctcctggatactttgtgtcacgtacgttctctattgccacttggtgatgctgcttgtgtatctcatgcatatctgaatcccaggagatatcgtcccagtctctaccaagaaaatccgtatggagataatgacttttactcgaatagttgatgtgactaaatgaaaggagttacaagtacaatgatagtacaacagtaaggtcttatataact

SEQ ID NO: 69473 - DNA, 1491 bp, Zea Mays
attgataccagcagaaaaaaacaactcaagcctcgcccggtcgcccctccctccctccctctgccccgggtttccagggaaacccacccccagatccaaatccagcgaagcgacagagatcaaggatggagctggaggtgggtgcgccttcgccggcgaggtacctggtgggggcagcgatcatgatggccggcgtggtgctcccgctggcgtacatgatcttccgcagcaagcgttcgccttcctccgcctccgccgcggggccctcctccttctccaagcagacgtaggaacaaagggctcatctgatctgagcgagtgggtgaatcgatcgccttcccctgatgcttgtcattctgtctgttttggcaccgcgagatcctccaactgcttctcgagactgggcatcatcacgtcaaatactagctgattagtagtcagttccttttgtaccttgtgtagatcagatcgattgcttatttggctgatttgatacaattataaacaatgggtttacttttgagtgcactacttacaagcatcattcatacggatttcagtttacctaaacaaaccacttgccctcttctgctgcttggctggtttattacgataactgtgcagaatttctctctatgctagttctccctcaattccaaaatgagctgacacatacattgttgctaagtgcattagtttgttatctgataatccacacctccagatgtgccctgtatgtttgtgttcttataagttggctcctattgaattgtctgtgttcctgcacatgaaggtagtaaacaaatcagtgtgctgccccagaaaagtcagatggatcgattgtttttgtggctacatgaagggcttgcggcttgccttgtggcttgtgatcaagatggtaattctcatggaggctactgggtattcagggcctacccttcctcagtattgaatcaaaccccgatatttaagactgtcccttctgaagttgacgtgacatgctcgagcgctggagcgcgtcgacatcaccggtttctaccctgagtgtgtcctattaaagtgagaagtacctgctggacctagcatgatgtatgtgtccttgagtcttgagaccgcaacatatcaacatcactcgaagaggctgggcacctactgatcagtgatcacataacacagatggagagaaatatatgtgttcctgttttttattttgtattctagtaaaaaaaatactagcttctacagtttccatcatcaaacgcttatcccacttttctgcctcctggatactttgtgtcacgtacgttctctattgccacttggtgatgctgcttgtgtatctcatgcatatctgaatcccaggagatatcgtcccagtctctaccaagaaaatccgtatggagataatgacttttactcgaatagttgatgtgactaaatgaaaggagttacaagtacaatgatagtacaacagtaaggtcttatataact

SEQ ID NO: 69474 - DNA, 1659 bp, Zea Mays
attgataccagcagaaaaaaacaactcaagcctcgcccggtcgcccctccctccctccctctgccccgggtttccagggaaacccacccccagatccaaatccagcgaagcgacagagatcaaggatggagctggaggtgggtgcgccttcgccggcgaggtacctggtgggggcagcgatcatgatggccggcgtggtgctcccgctggcgtacatgatcttccgcagcaagcgttcgccttcctccgcctccgccgcggggccctcctccttctccaagcagacgtaggaacaaagggctcatctgatctgagcgagtgggtgaatcgatcgccttcccctgatgcttgtcattctgtctgttttggcaccgcgagatcctccaactgcttctcgagactgggcatcatcacgtcaaatactagctgattagtagtcagttccttttgtaccttgtgtagatcagatcgattgcttatttggctgatttgatacaattataaacaatgggtttacttttgagtgcactacttacaagcatcattcatacggatttcagtttacctaaacaaaccacttgccctcttctgctgcttggctggtttattacgataactgtgcagaatttctctctatgctagttctccctcaattccaaaatatctaacagcattgggattgaattcggcactgatcctgcccttctgtgtagttgtgattcctatgcgatattttcttcagtgcttccctcttcaaagtttggtttgctctcttcagtccccttctttattctattctaacggaggcctttcatgtcattcgcttccaggagctgacacatacattgttgctaagtgcattagtttgttatctgataatccacacctccagatgtgccctgtatgtttgtgttcttataagttggctcctattgaattgtctgtgttcctgcacatgaaggtagtaaacaaatcagtgtgctgccccagaaaagtcagatggatcgattgtttttgtggctacatgaagggcttgcggcttgccttgtggcttgtgatcaagatggtaattctcatggaggctactgggtattcagggcctacccttcctcagtattgaatcaaaccccgatatttaagactgtcccttctgaagttgacgtgacatgctcgagcgctggagcgcgtcgacatcaccggtttctaccctgagtgtgtcctattaaagtgagaagtacctgctggacctagcatgatgtatgtgtccttgagtcttgagaccgcaacatatcaacatcactcgaagaggctgggcacctactgatcagtgatcacataacacagatggagagaaatatatgtgttcctgttttttattttgtattctagtaaaaaaaatactagcttctacagtttccatcatcaaacgcttatcccacttttctgcctcctggatactttgtgtcacgtacgttctctattgccacttggtgatgctgcttgtgtatctcatgcatatctgaatcccaggagatatcgtcccagtctctaccaagaaaatccgtatggagataatgacttttactcgaatagttgatgtgactaaatgaaaggagttacaagtacaatgatagtacaacagtaaggtcttatataact

SEQ ID NO: 69475 - DNA, 3189 bp, Zea Mays
attgataccagcagaaaaaaacaactcaagcctcgcccggtcgcccctccctccctccctctgccccgggtttccagggaaacccacccccagatccaaatccagcgaagcgacagagatcaaggatggagctggaggtgggtgcgccttcgccggcgaggtacctggtgggggcagcgatcatgatggccggcgtggtgctcccgctggcgtacatgatcttccgcagcaagcgttcgccttcctccgcctccgccgcggggccctcctccttctccaagcagacgtaggaacaaagggctcatctgatctgagcgagtgggtgaatcgatcgccttcccctgatgcttgtcattctgtctgttttggcaccgcgagatcctccaactgcttctcgagactgggcatcatcacgtcaaatactagctgattagtagtcagttccttttgtaccttgtgtagatcagatcgattgcttatttggctgatttgatacaattataaacaatgggtttacttttgagtgcactacttacaagcatcattcatacggatttcagtttacctaaacaaaccacttgccctcttctgctgcttggctggtttattacgataactgtgcagaatttctctctatgctagttctccctcaattccaaaatgtaagttgttttagttttgtctgagttaagcttctctaagactaagtttatagaacatcaaattggtttcgctgagaccaccaggaaatatgtcttgccacttgacagtgcatttatttggtattgtagacgttaatatattttctatagacttcatcagaattagagaattttgacttaggacatgaaaacggcctatgttttggaaacatagggaatactatgtttgtggtttaataaggagcacacttgttgtgccattcatccttttgcatcatcagctgttgatggtctagttgttgcattgtcagatctaacagcattgggattgaattcggcactgatcctgcccttctgtgtagttgtgattcctatgcgatattttcttcagtgcttccctcttcaaagtttggtttgctctcttcagtccccttctttattctattctaacggaggcctttcatgtcattcgcttccaggagctgacacatacattgttgctaagtgcattagtttgttatctgataatccacacctccagatgtgccctgtatgtttgtgttcttataagttggctcctattgaattgtctgtgttcctgcacatgaaggtagtaaacaaatcagtgtgctgccccagaaaagtcagatggatcgattgtttttgtggctacatgaagggcttgcggcttgccttgtggcttgtgatcaagatggtaattctcatggaggctactgggtattcagggcctacccttcctcaggtaggtataaatccaaaacagtggttgcaagtaatatcatcataacaactagttaattactgtatggcactagtattggctgtgggatacaaatattttggatggcactttatcatatttgtcccttgattgcacaagaatcttctatggccatatgtgtgtcataactcataaacctgtgagaaaagcagcacctttttaagatttttgactacggaatagtgatagctttagttgtctctttacacaatgtgtgaaattaaggtgcctgcatcaaagaaactttcttcatgacaggcaaccttggtgcttcgttcaacttgtggcaccctttgaatcttgttctcatggcgtgtcctgtcatttaaatcctctacgtttgaatgacagaaagcatgaaagttagattcatagtgtgttttcgctgctgtagctatcgctatagttcacgagccgcagcagccgcagcagccacagctgccaagaatagttagggctagtttgggaacccaaatctcctagatatttagttatatatattggggttttcctccctggtttgcctcccctttcttgcaaactagcccaacagggtttcagaaccccagagcctttcagaaatgccagaaggaaagcttcaagacattgtttggcgtggtgaaaaaaaaggattcatgcaatgagaaacaaattaatatcatgcctgctgagatatgcatatatgtgagctttatgtatctgtgtattcttaggctccaccagactgcaaggccaaataatcagccagattcgggtagttgggcatgtttatcagtttagatttgtttgtgtttcactttatatcccgtttggatctagatattcaaaactgaaattgggaattgaaataatgatttctgaattctgctgtttatttgtctaatgaattgagagctggaattaaagctcaatttcttggaattggactttaactaaaaagtgtctcccaattcagagccaagactctaggtattggatggaattgcaattccggatatatccaaacaatatatttttattgaaacttatttctaatactagacagatttggtattggatctaattcaattctaaaatctccaatatctacatcctatccttactaaaattgcatttttacttccgttttacttatgtcatttgctttgagagcaaaccttttcttttctgaaaaatgcagtattgaatcaaaccccgatatttaagactgtcccttctgaagttgacgtgacatgctcgagcgctggagcgcgtcgacatcaccggtttctaccctgagtgtgtcctattaaagtgagaagtacctgctggacctagcatgatgtatgtgtccttgagtcttgagaccgcaacatatcaacatcactcgaagaggctgggcacctactgatcagtgatcacataacacagatggagagaaatatatgtgttcctgttttttattttgtattctagtaaaaaaaatactagcttctacagtttccatcatcaaacgcttatcccacttttctgcctcctggatactttgtgtcacgtacgttctctattgccacttggtgatgctgcttgtgtatctcatgcatatctgaatcccaggagatatcgtcccagtctctaccaagaaaatccgtatggagataatgacttttactcgaatagttgatgtgactaaatgaaaggagttacaagtacaatgatagtacaacagtaaggtcttatataact

SEQ ID NO: 69476 - DNA, 2002 bp, Zea Mays
cgcgttgttacgtgtcgttcgcgcgtgtcgcgcgtgctgcctcgcgtgtcgttcgcgagtgtcgcacgtgctgttcgcacacgttgccgctcgctgttcgcgcgttatctgcgcgtgagattaaaccgttcgcttatagtcactcatgttaatatttattaggctaatactccaattagattaaatatatagtgttcaacttgcgctttgataataaatattagcatgactaatattaacttaactacttttatttatttaataattgtttagtatgaatacgtcacttgtttagttattctcgtctgccacgggtgctattccgcgcgcggtggcgtgctgctccgcgcgtcgtccgtgcgctaagttgcttgtggccgtgcatcgttcgcgcatggttttgcacgtcgcacaccctgtcacgtgtcgccacgcgtcgtttttgtgtgtagtgcgctttgccgcgcgttgttcgcacatgttgtgttgtttcgtgtgtcgtcagcatgctgtgtcgcgcgtgtccgtgtgtcgtttgcacgctgtcgtgttatttcgtgcgtcgtaaattcgcttcgcttagaatccctcgctttaattaaatagtagttataatttatatttgataacatcgaattaaatgtcctagttcataatcgtttagcgtaaacgcgataacttgtcgaccgtatcttcgaccgacgcgtttctttctctcgtgtggccgtagaagcgagctctattttattctgcacattttttttataatgttttaccttgtatggtgtaatgttcttatgcatatatatgtttctttgcttgtactggttcgtcttcgcttcgctttgcgattagatcgcgatttgtttccgcgcttcgaggaatcgacagtcaagcttcggcgaccaagagatcgaactcttcgagttctacagggctgaagaccctgagcatctgattggtgaaggcaagtgtcctctgacccattatgtcccatttactttataattcactgtctcgcatactatgaacaatataaggattgactagctttctatttaccttgtccttgattaccttttgggttactatggttagattcatgctattgctttactctaataaatgaacatgatgtgaacacttatgatacgatgttgttattatgattatgatgtcggactggtgatactttaggggactcgagcgatttctcgagtgcctctcggtaaggacctgttcgttggatgaccgcccgggaaaacagtgcaaccatgagggtggagtgggacgcccttagctgagtaattagaggaactggggtgtagttcgcttcaccgtcgtgccgttaatggggctcggtgtatgcggctcgctctgccaaggttggttcgccccttggggaggagttcggtgcatttaggaaacctaacgggcgactacagccccaatgaatctttgtaaaggctacgtagtgagaccctgcccattcaccttggtagtgtttaagggtttgatcggcccgggctagagagggaatcacggcttgtgggtaaagtgcgcaacctctgcagagtgttatgaaactgatatatcagccgtgctcgcggttatgagcggccaagggagctccattgattagtggtacttgatcagagatgttcggattgcaggtggcaatgagattgatggttcttggtattgactctagtaatggtaagtggtactctttccgtttggaaaggagtacgtttgggttaataacgtgggttaaatctaaaacttggctttctctactagtaataataatctgaccaactaaaagcaactgcttgacttaccccccacataaagctagtccactacagccaaaacaggatacttgctgagtatgttgatgtgtactcacccttgctctacacaccaaacccccccatccccaggttgtcagcattgcaaccactgctcaggagaagatgaagtcgtggaaggagacttccag

SEQ ID NO: 69477 - DNA, 1188 bp, Zea Mays
cccagatccagatcgcaggcgtgaaggacagcgattaccagatcgcgatttgtttccgcgcttcgaggaatcgacagtcaagcttcggcgaccaagagatcgaactcttcgagttctacagggctgaagaccctgagcatctgattggtgaaggcaagtgtcctctgacccattatgtcccatttactttataattcactgtctcgcatactatgaacaatataaggattgactagctttctatttaccttgtccttgattaccttttgggttactatggttagattcatgctattgctttactctaataaatgaacatgatgtgaacacttatgatacgatgttgttattatgattatgatgtcggactggtgatactttaggggactcgagcgatttctcgagtgcctctcggtaaggacctgttcgttggatgaccgcccgggaaaacagtgcaaccatgagggtggagtgggacgcccttagctgagtaattagaggaactggggtgtagttcgcttcaccgtcgtgccgttaatggggctcggtgtatgcggctcgctctgccaaggttggttcgccccttggggaggagttcggtgcatttaggaaacctaacgggcgactacagccccaatgaatctttgtaaaggctacgtagtgagaccctgcccattcaccttggtagtgtttaagggtttgatcggcccgggctagagagggaatcacggcttgtgggtaaagtgcgcaacctctgcagagtgttatgaaactgatatatcagccgtgctcgcggttatgagcggccaagggagctccattgattagtggtacttgatcagagatgttcggattgcaggtggcaatgagattgatggttcttggtattgactctagtaatggtaagtggtactctttccgtttggaaaggagtacgtttgggttaataacgtgggttaaatctaaaacttggctttctctactagtaataataatctgaccaactaaaagcaactgcttgacttaccccccacataaagctagtccactacagccaaaacaggatacttgctgagtatgttgatgtgtactcacccttgctctacacaccaaacccccccatccccaggttgtcagcattgcaaccactgctcaggagaagatgaagtcgtggaaggagacttccag

SEQ ID NO: 69478 - DNA, 1576 bp, Zea Mays
atggcgtcgccaggcgacgacgacggtctcccggggctgccgcccatcaagacaacgcctccgcctccgcctccgccgccccccgctgtctgccaccagtgccacggccgcggcctccccgtcgccgccggcgtcgtcgtcggtggacagcgccaaggccgcggagggcgaggaccacgagccgtcgacgccgacatcggaggcgagcaggctgcggccgcccgccgcgtgcccgccggctccgcgcaagccgccggcgccgcggctgcccgtcaggcggaagccgccgctgccctcgcccgcgcgggtgttcgtcgccgtcccgcgcgacctctccacgtcttccgggcgctgccccccaagaagcgtatacgggtgtcgtgatgccgcgatttacaactgtctttccacaggcttggtcgatttctaggagaattcagaattctgccgggttcttggcttcgtgttcttcccccctcgcgttttttattctcctttgggttactgctacgacccacgggccatggctatggtataaattaaatcatatttttcggtataaataacgtgttttttttgcatgttcattttccttttcctttttgttgttgtgttagtgtgagcaagcttgtagctctagaaatgaattccagccaaacatctggtgtgttatgtgtcaagagtatactatataagctatatggtggtgtagaattcaacagacctgttttaaagaaatatgtatattatgttgaatttggggctacataagaagggtcgaacttaacaaggatagtaaaataaaacttaaaagaatattgttcttactcaatgcaagcagtagaaagaaacaaaaacctgtagcaaaaattcactctgatcctaaattatgatacttgccagaactatttatcataacccgagttttgcttgctgctgaatctgtagattgtttgggaaaattcagccattaactgtggatcatagttcagtggatatatgaaccagcgcacatatgaagccatcaacacggtgacaagctgctaatttgggtagatccaccgtttcttacaagacatccgagaattgttaattgcgagacaacaatcctgtgaccagtttgatttttttttcgaactttactgaacgctctcagcagtggacggattagataccctgcccatcaaatcaattcggcaaaagaaaatggctctgatgggtaaaaacatctctggagatgctctaacatcccaatccgtctctctgctattgtctttaagcgccaaaacttactgttctttgagctcttttcatctgagatatgactggaaactctgagcagaatccaagctcacaagtttcaagaacatgcagccgatggatcatgacaggggaaaaggccaggcaacaaattttcctctcagggccttttgtcttgtgctacattggtcacaggccacatctactactagcccacaagtggtagtacagttcacagttcaggatcatgctgttactacaggaaagttcagttcaccaagcatggctttgtgtctctagaagatgatgagaaaag

SEQ ID NO: 69479 - DNA, 5607 bp, Zea Mays
aaacaattggtgatctggtggaagtcttaacttttataaagttcatttctgtagagtttgtttaaaagaataaactctaatagtctgattacaaagttgtcaaatacaacatataatattatttttcagttggcatgagaactattaacattcttcttgctaaagtttatgcacgtatttttttaaataacacaactaggaatagtagagcacatatttttaaaatattaagtaacaggcgtatgagccactgaagctacaacataacgaaaaatttgtagctctgaatgtgactgaatatatgcagaaagaggttcgccagtacgagaaattatattaacaagcaactcagtgtaatcaacaagagtcattctttccttcggaagcttctggtcattccatttaaacctttcttccatctcaaggcaaatgaaaaactcagtatacgctcattaataatgtcaaacccatatttcttattactgtaatttatcttcgaggaacagcccccacagatctttccctgatcagccagtagtaaaaccgcagattggataagttttccattctcaatgtagttctagagctcttcaagttgattatttattttttcagtaagaagtctaactgtatccataaatattttctgtaaaacaacaagtaacacaaatctaagtgtcatgtagaatttgtatgcaaacaattagtgttgaataactttaaatgtatcacttcattttctcctatcaaagtaattatggcttaggaacattttcaaagccaaggaaaaaacagttactagcaacagtttttgtatattttattgaaaaatccttgtttttgctataacaacatgcactaacacatgaagacagaagattaacagcgccaaactttactttctctaacaagtggagataaatgatgttcagtccttagtatcactaatccattataacgtctgtctcatatctatagcatgactacaattacattttatgtcatgtgacataaaaagatcttcgtacataaaagagaactgaaacaaaccatttcaggtaaacacagcaaatgaataagcttgtagacataataattcaaattacgctcaaagaaagattgtcatccagatacttatgcatgcaagtattttttaactgcaacatagagcggaagtaggttctcaatgacagtattgtcaactgtgtttacatcgactgatgcactatgacgtaaaagcaacttgatcatgtcacaaaaaatttgtcagcagttttatggaattgggaagtactcatacaggtttatgcagttaggattggcgtgcattccacagagctcaggtggcttgcccttcaatacaacttttacacatcgtagagcattattattgaccatgaaggttaagatttctgaggtgatactaaaacttcataccatgtccttgcctgaacagtccttgaataatcggagaagctacctccttccagataataaaaaaaacgaaaggatagaattaaaatttaaggttcctcgttacattatctggaaagaggtagcttcctgcaaagaagataatattaatggtaaagatgaatcaattccgtttatgctagattttgtttctatcgccaagtacagggcaaatgacataatcatcccagaccctgttccacaggtatctgttaccttcgttaatagaatttgattgatgatttgttctattatattaatcatttcatttaatcatataatattctaaggtatcttaagtctactgaatattgtcatatatgaaccttgattagcaacatgttgatcacatgcctcaaccattatcgctttagacccttttatattctgtctcttctcttgttttatgttggattacatgtacttatcattactgctattgttattgtcatatacacacctcaaaaaaatttaccttgatatgttttcttatagttggataactgatgtctttcacctttttcaactgttatgcatctatctagcgggtgaatggtgtatttattgacatatatggaaaattggttcccatccttcaaaatgatagtgtctggtgcttcctccgattattgaaggactgttcaaacaagggaatgacatggacttttagcatcacctcagaaaccttaaccttcatggtcaatagtaattctcttcgatgtgtaaaagttgtattagagggcaagacacctaagctctgtggaatgcacgctaatcccaactgcataaactcatatggatacttcccaatccataaagctgctgacaaattcttttgtgacatgatcaagttgcttttacgtcatggtgcaccattcgatttacacacagttggcaatgatgtcattgagaacctacttccgctccatgttatagttttgaatacttgcatgcataagtatctagaggacaatctttctatcagcgtaatttaaattattatgtctacaagcttatccatctgctgtgtttacctgaaatggttcgtttcgcttctcttctatgtacgaagctcttcttatgtcacatgacataaaatgtaattttagtcatgccatagatataagacaggtgttatattgaattagtgatactaaaggctgagcatcatttatctccacttgttagataaagtaaagtttaccgttgttaatcttctgtattcatgtgttagtgcatgttgttatagcaaaaaactatgattcttcaataaaatatacaaaaattgttattagtaactgttttttcccttgccttggagaatgtttctaagccatcattactttgataggagaagatgaagtaatacatttaaagttattcaacactacttgcttgcatacaaattctacataacacttagatttgtgttacttgttgttttacagaagatcttcatggatacaattagacttcttgctgaaaaaacaaataatctacttgaagagctctggaactacattgagaatgtaaaacttatccagtctgcggttttactactggctgcttaggggaagatctgtgggggttgttcctcgaagataaatggcagtaataagaaagatgagtttgacattatcaatgagcgtatactgaggttttcatttgtcttgagatgggagaaaggttcaaatggaatgaccagaagcttctaaaggaaaggattgttcttgttgattgcactgggttgcttgttaatataatttctcgtactggcgaacctctttctgcatatattcagtcactttcagaggtacggatttttcattatgttgtagcttcagtgcctcatacgcctgttgcttaatattttaaaaatatgttctctactattgttagttgtgttattttaaaaaaatacgtgcacaaactttagcaagaagaatgttaatagttctcatgccaactgaaaaataatagtatatgttgtataattgtatttgacaactttgtaatcagactatcagagtttattcttttaaacaaactctacagaaatgaactttataaaagctaagacttccaccagatcaccaattgttttgcaaccggtcataatctggttccatagattatattctgtttactttagagtttcaacttcacattagaatttttcatatgagtatgcttcaccaaatggcttctcaggaaaactgaagagtcctattgtgttgagaatctggagcccttctcaactagtgcttaggccatcggtttagtccatagcaggagcggtcataccttccttggttttgctccaatatagcatccatccttaagatagctcttgtctggttgatccgggatatgattgcattagttatgtgagtatatttaggggttgttacatattttcatctctgaatctccacaactagcttcgcttggatgctggtgagttgtcactactcctgctttttggtggataagaagaacgattaaatatattagttgcgattattctcgtatttttaacaagagtgatatgtgttgaattaatcgtatcgtttagtatttgtcagttctcagcgtgaaggataggtttagtatttttatcgcctagccaacggtttttcagggttatgacgcttttacttattaaaatagagtcgatgccctgctatgatatccatgatgctttatgatttttgattgatgaaatatcatagatgggtcatttagattaataatcttgaataaatatttattcttgtcctaaatattgggaagcaagtgatgtcattaggtctattctcgtaaaatttgaaaacttctaagcagccctcgttcattaatgttttaagtcattagggcttaaggttatggtcttataaaagtctatagtccttaataatactctacctacgagactatagaatagtgtaatgttcatgtaattggcgtattatgcacattaatccagatatggatttacaaaaataaccacgatgcctccatctttgttctaaatttagatgtaaaaaactaataagtctaagtttattagtcttaaggtgttgagctttagcttagggggtacaacgtgcgtatagtttattgttgctatgatgttgtagctagatttagacaaactggaagaacgcaattgatgtacttaaatgatatcttgacatctagtatttgcttttaagtatattatgtgccttgtcgctaagtgtttaatttgttatcgtgtagcaataattaggcgtgtgttattcttgtttatattcattcatgtgcattatgcatttcatttaggtacgttaattaatcacgatatgcggaggaccagaaccaagtcgaccacaagatgttgtaaagcatgagccactcgcgaggtgatgctgatggacgaacctgaagatggacagacggagcacattttatataaatattgaatttggatatattctagatcttctttcttgactatatatttatttttctttttaaagtttaagaaagtcaaaatcaaaaaacctaactttttctattatatattgatgtgtatctatctataatatttttgaatattatggaattagagaaatgacattccgacgctttctcatttcattaagtatcggaacaaaagatgatcgccaagtggacgtcatctaacaaacactaatgtagtgtttatttcaggcaagcccgatgcatgcaaccccttccttgtatttttaaatgatttttacacactttaagtctagcgaaatgtgcattaagtttataggagttgcttggaaaccctttgatgcattggctaccttaaatatcatgcacccttcgggcgccccacacttattagaatatgatgaacataagtactgcaatttcgagctaagagtaacttcaggagaaatttgcactgcaaacaaaatgagcagggtcagaaacagggtgaagaaacctcatcagggcctcccactgcctccaggcggcagcctgcaactttgtaattacctcgcaagcaactatgctatcacaatcacataaggtgcgcatggtttaaaaggcggctaggcggaactaggcgcccagccaccgcctgaccgcctaggcgac

SEQ ID NO: 69480 - DNA, 4822 bp, Zea Mays
gattctgaccggctgcaaaacaattggtgatctggtggaagtcttaacttttataaagttcatttctgtagagtttgtttaaaagaataaactctaatagtctgattacaaagttgtcaaatacaacatataatattatttttcagttggcatgagaactattaacattcttcttgctaaagtttatgcacgtatttttttaaataacacaactaggaatagtagagcacatatttttaaaatattaagtaacaggcgtatgagccactgaagctacaacataacgaaaaatttgtagctctgaatgtgactgaatatatgcagaaagaggttcgccagtacgagaaattatattaacaagcaactcagtgtaatcaacaagagtcattctttccttcggaagcttctggtcattccatttaaacctttcttccatctcaaggcaaatgaaaaactcagtatacgctcattaataatgtcaaacccatatttcttattactgtaatttatcttcgaggaacagcccccacagatctttccctgatcagccagtagtaaaaccgcagattggataagttttccattctcaatgtagttctagagctcttcaagttgattatttattttttcagtaagaagtctaactgtatccataaatattttctgtaaaacaacaagtaacacaaatctaagtgtcatgtagaatttgtatgcaaacaattagtgttgaataactttaaatgtatcacttcattttctcctatcaaagtaattatggcttaggaacattttcaaagccaaggaaaaaacagttactagcaacagtttttgtatattttattgaaaaatccttgtttttgctataacaacatgcactaacacatgaagacagaagattaacagcgccaaactttactttctctaacaagtggagataaatgatgttcagtccttagtatcactaatccattataacgtctgtctcatatctatagcatgactacaattacattttatgtcatgtgacataaaaagatcttcgtacataaaagagaactgaaacaaaccatttcaggtaaacacagcaaatgaataagcttgtagacataataattcaaattacgctcaaagaaagattgtcatccagatacttatgcatgcaagtattttttaactgcaacatagagcggaagtaggttctcaatgacagtattgtcaactgtgtttacatcgactgatgcactatgacgtaaaagcaacttgatcatgtcacaaaaaatttgtcagcagttttatggaattgggaagtactcatacaggtttatgcagttaggattggcgtgcattccacagagctcaggtggcttgcccttcaatacaacttttacacatcgtagagcattattattgaccatgaaggttaagatttctgaggtgatactaaaacttcataccatgtccttgcctgaacagtccttgaataatcggagaagctacctccttccagataataaaaaaaacgaaaggatagaattaaaatttaaggttcctcgttacattatctggaaagaggtagcttcctgcaaagaagataatattaatggtaaagatgaatcaattccgtttatgctagattttgtttctatcgccaagtacagggcaaatgacataatcatcccagaccctgttccacagcgggtgaatggtgtatttattgacatatatggaaaattggttcccatccttcaaaatgatagtgtctggtgcttcctccgattattgaaggactgttcaaacaagggaatgacatggacttttagcatcacctcagaaaccttaaccttcatggtcaatagtaattctcttcgatgtgtaaaagttgtattagagggcaagacacctaagctctgtggaatgcacgctaatcccaactgcataaactcatatggatacttcccaatccataaagctgctgacaaattcttttgtgacatgatcaagttgcttttacgtcatggtgcaccattcgatttacacacagttggcaatgatgtcattgagaacctacttccgctccatgttatagttttgaatacttgcatgcataagtatctagaggacaatctttctatcagcaagatcttcatggatacaattagacttcttgctgaaaaaacaaataatctacttgaagagctctggaactacattgagaatgtaaaacttatccagtctgcggttttactactggctgcttaggggaagatctgtgggggttgttcctcgaagataaatggcagtaataagaaagatgagtttgacattatcaatgagcgtatactgaggttttcatttgtcttgagatgggagaaaggttcaaatggaatgaccagaagcttctaaaggaaaggattgttcttgttgattgcactgggttgcttgttaatataatttctcgtactggcgaacctctttctgcatatattcagtcactttcagaggtacggatttttcattatgttgtagcttcagtgcctcatacgcctgttgcttaatattttaaaaatatgttctctactattgttagttgtgttattttaaaaaaatacgtgcacaaactttagcaagaagaatgttaatagttctcatgccaactgaaaaataatagtatatgttgtataattgtatttgacaactttgtaatcagactatcagagtttattcttttaaacaaactctacagaaatgaactttataaaagctaagacttccaccagatcaccaattgttttgcaaccggtcataatctggttccatagattatattctgtttactttagagtttcaacttcacattagaatttttcatatgagtatgcttcaccaaatggcttctcaggaaaactgaagagtcctattgtgttgagaatctggagcccttctcaactagtgcttaggccatcggtttagtccatagcaggagcggtcataccttccttggttttgctccaatatagcatccatccttaagatagctcttgtctggttgatccgggatatgattgcattagttatgtgagtatatttaggggttgttacatattttcatctctgaatctccacaactagcttcgcttggatgctggtgagttgtcactactcctgctttttggtggataagaagaacgattaaatatattagttgcgattattctcgtatttttaacaagagtgatatgtgttgaattaatcgtatcgtttagtatttgtcagttctcagcgtgaaggataggtttagtatttttatcgcctagccaacggtttttcagggttatgacgcttttacttattaaaatagagtcgatgccctgctatgatatccatgatgctttatgatttttgattgatgaaatatcatagatgggtcatttagattaataatcttgaataaatatttattcttgtcctaaatattgggaagcaagtgatgtcattaggtctattctcgtaaaatttgaaaacttctaagcagccctcgttcattaatgttttaagtcattagggcttaaggttatggtcttataaaagtctatagtccttaataatactctacctacgagactatagaatagtgtaatgttcatgtaattggcgtattatgcacattaatccagatatggatttacaaaaataaccacgatgcctccatctttgttctaaatttagatgtaaaaaactaataagtctaagtttattagtcttaaggtgttgagctttagcttagggggtacaacgtgcgtatagtttattgttgctatgatgttgtagctagatttagacaaactggaagaacgcaattgatgtacttaaatgatatcttgacatctagtatttgcttttaagtatattatgtgccttgtcgctaagtgtttaatttgttatcgtgtagcaataattaggcgtgtgttattcttgtttatattcattcatgtgcattatgcatttcatttaggtacgttaattaatcacgatatgcggaggaccagaaccaagtcgaccacaagatgttgtaaagcatgagccactcgcgaggtgatgctgatggacgaacctgaagatggacagacggagcacattttatataaatattgaatttggatatattctagatcttctttcttgactatatatttatttttctttttaaagtttaagaaagtcaaaatcaaaaaacctaactttttctattatatattgatgtgtatctatctataatatttttgaatattatggaattagagaaatgacattccgacgctttctcatttcattaagtatcggaacaaaagatgatcgccaagtggacgtcatctaacaaacactaatgtagtgtttatttcaggcaagcccgatgcatgcaaccccttccttgtatttttaaatgatttttacacactttaagtctagcgaaatgtgcattaagtttataggagttgcttggaaaccctttgatgcattggctaccttaaatatcatgcacccttcgggcgccccacacttattagaatatgatgaacataagtactgcaatttcgagctaagagtaacttcaggagaaatttgcactgcaaacaaaatgagcagggtcagaaacagggtgaagaaacctcatcagggcctcccactgcctccaggcggcagcctgcaactttgtaattacctcgcaagcaactatgctatcacaatcacataaggtgcgcatggtttaaaaggcggctaggcggaactaggcgcccagccaccgcctgaccgcctaggcgac

SEQ ID NO: 69481 - DNA, 1544 bp, Zea Mays
cgcaacatgtatttagaaaatgcggttcagaaaagttggggggctgtcgtttctttctgacttgtctgcatatataacctgaatataagatggtcggggagccgtgaatccgaaggggctggagtactacaacaatctcatagatgagctccttagctacggctcttcaggacgagtacagcgggctgatcagtcccagattcatagaggacttcacggcgtacgcagacgtgtgcttcagcaacttcggcgacagggtcaagtactggagcaccgtcaacgagcccaacgtcgagacgatcggcgggtacgaccagggaatcctgccgccgcggcggtgctccttccccttcggcttcggctgcgaggaaggcaactccaccacggagccatacgtagcggcgcaccacctcctgcttgcgcacgcgtctgcggtgtccctgtacagagacaggtaccaggctgcgcaaggaggacggatcggactcaccttgcttggttggtggtacgagcctgggacgcagactcccgacgatgtcgcggcagccgcacggatgaacgacttccacatcggatggttcatgcatcctatggtgttcggggactaccctccggtgatgaggaggaacgtcgggtccaggctgccgaccttcacggacgaggaggcggcgcgagtgagggggtctttcgacttcgtcggattcaaccactacatcgtcgtctacgtcaaggctgaccttggccgcctagacgaccaagtgcgagactacatgggcgatgcagccgtgaagtatgacatgccgtttctcaagtcacgcaaccagttcccgttcggcgccttgacgagcgacttcatgacgtccaccccctgggctctcaagaaaatgctgaggcatctccgggtgacatacaagaaccctgcagtcatgatccatgaaaacggagctgccggacagcctgatccatccggcgtgaacagctacgacgacgagttcaggtcacagttcctgcaggactacatcgaggccacgcttcagtccatcaggaacggatcgaacgtgcaaggctacttcgtgtggtcgttcctggacgtgttcgagtacctgttcggctaccgcctccggttcggcgtctacggcgtcgagttcaactcgacggcaaggacaaggtaccagaggcactcggccaagtggtacgccagcttcctccggggcggcgagctgaggccagtcgctctgcctgacggagcatattcacagtgaccagttacacgtgtacgctccggctccaggggaatatctggcgatcagcgctctcggtgaggtggagagaaaatagagagtttgtaagcaaggatagtcggggtggtatatatagcagtgcttagatacggttttcttgggtaaatgtggtacgagttgaataagttgtggcatgtttggttagaggttagaggattggctctacccgaaaccagctgattcagatggtcgtttctatatatttggttagggggatggagtggatccattttttgtttagga

SEQ ID NO: 69482 - DNA, 2220 bp, Zea Mays
cgatcgagcgaagcagaagcgccaaggcagccgacgcgcatggggaggacggacggcaacgcaacggtgtcgccacgtgcacagccgctagcgaaaccgggcaggaaggaccgcagtagtatatagagacctctccggccggcgcgcgcgacgtcagcgacgacgtccgcgccacgcgggcggaacttcgtagtttgcgacggggcacgcacgcacgacgcaccccacgcattttcaactatataaaaagcaccccccgcgagcgcggccggccggcgaacagaggagaggagaggagagactagacccgctagctgaggccggccggcgcgctggacacgaacatgatggggagaaaggcgccgctcggctgtgctactactcttctcctcctcttggccgccgccgtcgctccggccgagctcagcgtattaggcctaggcggcggggcggcggctgcctcgggcgcggtcacccgggccgacttccccgccgggttcgtcttcggcgtcggctcctcggcgtaccaggtcgaaggtgcagttgcagaggacggaagaaagcctagcatctgggacacattcacacatgaaggctactccctcgacaacgccacaggcgacgtaactgcggatcagtatcataagtacaaggacgacgtaaagcttctgcatgagatgggtgtcgatgcctaccggatgtcgattgcctggcctcgacttatcccagatggtcggggagccgtgaatccgaaggggctggagtactacaacaatctcatagatgagctccttagctacggaatacagcctcacgtgacgatataccatttcgatttcccacaggctcttcaggacgagtacagcgggctgatcagtcccagattcatagaggacttcacggcgtacgcagacgtgtgcttcagcaacttcggcgacagggtcaagtactggagcaccgtcaacgagcccaacgtcgagacgatcggcgggtacgaccagggaatcctgccgccgcggcggtgctccttccccttcggcttcggctgcgaggaaggcaactccaccacggagccatacgtagcggcgcaccacctcctgcttgcgcacgcgtctgcggtgtccctgtacagagacaggtaccaggctgcgcaaggaggacggatcggactcaccttgcttggttggtggtacgagcctgggacgcagactcccgacgatgtcgcggcagccgcacggatgaacgacttccacatcggatggttcatgcatcctatggtgttcggggactaccctccggtgatgaggaggaacgtcgggtccaggctgccgaccttcacggacgaggaggcggcgcgagtgagggggtctttcgacttcgtcggattcaaccactacatcgtcgtctacgtcaaggctgaccttggccgcctagacgaccaagtgcgagactacatgggcgatgcagccgtgaatgccgtttctcaagtcacgcaaccagttcccgttcggcgccttgacgagcgacttcatgacgtccaccccctgggctctcaagaaaatgctgaggcatctccgggtgacatacaagaaccctgcagtcatgatccatgaaaacggagctgccggacagcctgatccatccggcgtgaacagctacgacgacgagttcaggtcacagttcctgcaggactacatcgaggccacgcttcagtccatcaggaacggatcgaacgtgcaaggctacttcgtgtggtcgttcctggacgtgttcgagtacctgttcggctaccgcctccggttcggcgtctacggcgtcgagttcaactcgacggcaaggacaaggtaccagaggcactcggccaagtggtacgccagcttcctccggggcggcgagctgaggccagtcgctctgcctgacggagcatattcacagtgaccagttacacgtgtacgctccggctccaggggaatatctggcgatcagcgctctcggtgaggtggagagaaaatagagagtttgtaagcaaggatagtcggggtggtatatatagcagtgcttagatacggttttcttgggtaaatgtggtacgagttgaataagttgtggcatgtttggttagaggttagaggattggctctacccgaaaccagctgattcagatggtcgtttctatatatttggttagggggatggagtggatccattttttgtttagga

SEQ ID NO: 69483 - DNA, 912 bp, Zea Mays
ttatcttatatgagagtatgttggtcttgctggtgccagattggatggtggggaaatgcttgcatgtggtctggcaactcattttgtccagtcaaattgtgtggtatcatcgatcaatttgctcaacaaccatcactgaaagaaagcagctctttgaataggttggaaatcatcaacaaatgcttttccaaaaggacagtcgaagaaattatatccgctcttgaagtagaggcctcaaattcggcagatgaatgggttgctacaacaatccagtccttgaagaaggcttctcctaccagtctgaaaatctctctgagatcgataagagaagggaggacacaaactgttggggagtgcttgcagcgggaatatagaatggtctgccatgtcatgcgtggtgacttcagcagagacttctttgagggatgcagggctatattgctggataaagaccgaaacccaaagtggatgcctccaaggttggaacaagtgcatgacgaggctgttgaacagtatttctccagaattgatgatccacagtgggaagacttgaacctacctgctagacgctcccacggaagaaatatcgagtccaagctttgatcgaaggtcatgggagaaaggtggaactctggaacggagccttggtagtggtcagaataacacattattgcacatcatctcaagtttgaagagtctgcagactattgataaaataaacatgaatgtgccatataggtcaacttatatcacagaaagaaactctttgctgtttatacgtggagactggagtcatatgcatttttaaataattataagtaataaaatcgaaaaagaaatcgttggaaagacttttcttggagtcagaccctacttgatggtgataatcgatgagctttctacacgaccaat

SEQ ID NO: 69484 - DNA, 1728 bp, Zea Mays
atggtggtgaccgctccctatgatgcccatgacagggtgctcgtcggagtcgtggtggcagtatccatgcctcgaggagaggtcgacatggagggagaagggatagaggaactcgaagtcgtggcgacaatatccagcagctccgggagagaactcggtagggaagggacaaactggcaacgagaggacatggcctcgttggttatcagagatcaaagatgcttccttgtccggcggaagcggatgacctcgatgtctcccccaagcgctgcgggcgacgactctgaccaggtcctttttctatacattttggtagaagtgaatggctttacaaggacactgattttgaataggccaaagcagttaaatgcactctcctcgaccatgattatgggactcttgaggtgtttcactgcttatgagaaagacgatggagttaaattgttgattatgaagggtaaaggaagagcattttgtgctggaggtgatgttgctgcagttgttcgatctatacataaagacagctggaaatatggtgctgatttcttccgaaatgaatttttgttgaattacataattgcaacttataccaaacctcaggtttctcttcttagtggaatcgtcatgggtggaggtgctggcgtttctttacatggaaggtttagagttgccactgataacacggtttttgcaatgccagaaacagctctgggtctctttccagatataggggcctcatattttctgtctcggcttcctggattctatggagagtatgttggtcttgctggtgccagattggatggtggggaaatgcttgcatgtggtctggcaactcattttgtccagtcaaatagtctgctatcgctggaagaatcacttaaaaaggtggatacttccaatgcttttgcagtgtgtggtatcatcgatcaatttgctcaacaaccatcactgaaagaaagcagctctttgaataggttggaaatcatcaacaaatgcttttccaaaaggacagtcgaagaaattatatccgctcttgaagtagaggcctcaaattcggcagatgaatgggttgctacaacaatccagtccttgaagaaggcttctcctaccagtctgaaaatctctctgagatcgataagagaagggaggacacaaactgttggggagtgcttgcagcgggaatatagaatggtctgccatgtcatgcgtggtgacttcagcagagacttctttgagggatgcagggctatattgctggataaagaccgaaacccaaagtggatgcctccaaggttggaacaagtgcatgacgaggctgttgaacagtatttctccagaattgatgatccacagtgggaagacttgaacctacctgctagacgctcccacggaagaaatatcgagtccaagctttgatcgaaggtcatgggagaaaggtggaactctggaacggagccttggtagtggtcagaataacacattattgcacatcatctcaagtttgaagagtctgcagactattgataaaataaacatgaatgtgccatataggtcaacttatatcacagaaagaaactctttgctgtttatacgtggagactggagtcatatgcatttttaaataattataagtaataaaatcgaaaaagaaatcgttggaaagacttttcttggagtcagaccctacttgatggtgataatcgatgagctttctacacgaccaat

SEQ ID NO: 69485 - DNA, 1714 bp, Zea Mays
atggtggtgaccgctccctatgatgcccatgacagggtgctcgtcggagtcgtggtggcagtatccatgcctcgaggagaggtcgacatggagggagaagggatagaggaactcgaagtcgtggcgacaatatccagcagctccgggagagaactcggtagggaagggacaaactggcaacgagaggacatggcctcgttggttatcagagatcaaagatgcttccttgtccggcggaagcggatgacctcgatgtctcccccaagcgctgcgggcgacgactctgaccaggtcctttttctatacattttggtagaagtgaatggctttacaaggacactgattttgaataggccaaagcagttaaatgcactctcctcgaccatgattatgggactcttgaggtgtttcactgcttatgagaaagacgatggagttaaattgttgattatgaagggtaaaggaagagcattttgtgctggaggtgatgttgctgcagttgttcgatctatacataaagacagctggaaatatggtgctgatttcttccgaaatgaatttttgttgaattacataattgcaacttataccaaacctcagtggaatcgtcatgggtggaggtgctggcgtttctttacatggaaggtttagagttgccactgataacacggtttttgcaatgccagaaacagctctgggtctctttccagatataggggcctcatattttctgtctcggcttcctggattctatggagagtatgttggtcttgctggtgccagattggatggtggggaaatgcttgcatgtggtctggcaactcattttgtccagtcaaatagtctgctatcgctggaagaatcacttaaaaaggtggatacttccaatgcttttgcagtgtgtggtatcatcgatcaatttgctcaacaaccatcactgaaagaaagcagctctttgaataggttggaaatcatcaacaaatgcttttccaaaaggacagtcgaagaaattatatccgctcttgaagtagaggcctcaaattcggcagatgaatgggttgctacaacaatccagtccttgaagaaggcttctcctaccagtctgaaaatctctctgagatcgataagagaagggaggacacaaactgttggggagtgcttgcagcgggaatatagaatggtctgccatgtcatgcgtggtgacttcagcagagacttctttgagggatgcagggctatattgctggataaagaccgaaacccaaagtggatgcctccaaggttggaacaagtgcatgacgaggctgttgaacagtatttctccagaattgatgatccacagtgggaagacttgaacctacctgctagacgctcccacggaagaaatatcgagtccaagctttgatcgaaggtcatgggagaaaggtggaactctggaacggagccttggtagtggtcagaataacacattattgcacatcatctcaagtttgaagagtctgcagactattgataaaataaacatgaatgtgccatataggtcaacttatatcacagaaagaaactctttgctgtttatacgtggagactggagtcatatgcatttttaaataattataagtaataaaatcgaaaaagaaatcgttggaaagacttttcttggagtcagaccctacttgatggtgataatcgatgagctttctacacgaccaat

SEQ ID NO: 69486 - DNA, 1625 bp, Zea Mays
atggtggtgaccgctccctatgatgcccatgacagggtgctcgtcggagtcgtggtggcagtatccatgcctcgaggagaggtcgacatggagggagaagggatagaggaactcgaagtcgtggcgacaatatccagcagctccgggagagaactcggtagggaagggacaaactggcaacgagaggacatggcctcgttggttatcagagatcaaagatgcttccttgtccggcggaagcggatgacctcgatgtctcccccaagcgctgcgggcgacgactctgaccaggtcctttttctatacattttggtagaagtgaatggctttacaaggacactgattttgaataggccaaagcagttaaatgcactctcctcgaccatgattatgggactcttgaggtgtttcactgcttatgagaaagacgatggagttaaattgttgattatgaagggtaaaggaagagcattttgtgctggaggtgatgttgctgcagttgttcgatctatacataaagctggaaatatggtgctgatttcttccgaaatgaatttttgttgaattacataattgcaacttataccaaacctcaggtttctcttcttagtggaatcgtcatgggtggaggtgctggcgtttctttacatggaaggtttagagttgccactgataacacggtttttgcaatgccagaaacagctctgggtctctttccagatataggggcctcatattttctgtctcggcttcctggattctatggagagtatgttggtcttgctggtgccagattggatggtggggaaatgcttgcatgtggtctggcaactcattttgtccagtcaaatagtctgctatcgctggaagaatcacttaaaaaggtggatacttccaatgcttttgcagtgtgtggtatcatcgatcaatttgctcaacaaccatcactgaaagaaagcagctctttgaataggttggaaatcatcaacaaatgcttttccaaaaggacagtcgaagaaattatatccgctcttataagagaagggaggacacaaactgttggggagtgcttgcagcgggaatatagaatggtctgccatgtcatgcgtggtgacttcagcagagacttctttgagggatgcagggctatattgctggataaagaccgaaacccaaagtggatgcctccaaggttggaacaagtgcatgacgaggctgttgaacagtatttctccagaattgatgatccacagtgggaagacttgaacctacctgctagacgctcccacggaagaaatatcgagtccaagctttgatcgaaggtcatgggagaaaggtggaactctggaacggagccttggtagtggtcagaataacacattattgcacatcatctcaagtttgaagagtctgcagactattgataaaataaacatgaatgtgccatataggtcaacttatatcacagaaagaaactctttgctgtttatacgtggagactggagtcatatgcatttttaaataattataagtaataaaatcgaaaaagaaatcgttggaaagacttttcttggagtcagaccctacttgatggtgataatcgatgagctttctacacgaccaat

SEQ ID NO: 69487 - DNA, 1593 bp, Zea Mays
cgccgcctgcatttgtctctcggtcaggaacatggaggggagacggctttcacggcggcagttacgctcgctaccggacgccgcgtccttctcgccggaagtcgcggccagcccggggctcgtcggctccggccagttgggtctcggtctctcggcggcgttcgagactctgccgccgattttggtagaagtgaatggctttacaaggacactgattttgaataggccaaagcagttaaatgcactctcctcgaccatgattatgggactcttgaggtgtttcactgcttatgagaaagacgatggagttaaattgttgattatgaagggtaaaggaagagcattttgtgctggaggtgatgttgctgcagttgttcgatctatacataaagacagctggaaatatggtgctgatttcttccgaaatgaatttttgttgaattacataattgcaacttataccaaacctcaggtttctcttcttagtggaatcgtcatgggtggaggtgctggcgtttctttacatggaaggtttagagttgccactgataacacggtttttgcaatgccagaaacagctctgggtctctttccagatataggggcctcatattttctgtctcggcttcctggattctatggagagtatgttggtcttgctggtgccagattggatggtggggaaatgcttgcatgtggtctggcaactcattttgtccagtcaaatagtctgctatcgctggaagaatcacttaaaaaggtggatacttccaatgcttttgcagtgtgtggtatcatcgatcaatttgctcaacaaccatcactgaaagaaagcagctctttgaataggttggaaatcatcaacaaatgcttttccaaaaggacagtcgaagaaattatatccgctcttaggcctcaaattcggcagatgaatgggttgctacaacaatccagtccttgaagaaggcttctcctaccagtctgaaaatctctctgagatcgataagagaagggaggacacaaactgttggggagtgcttgcagcgggaatatagaatggtctgccatgtcatgcgtggtgacttcagcagagacttctttgagggatgcagggctatattgctggataaagaccgaaacccaaagtggatgcctccaaggttggaacaagtgcatgacgaggctgttgaacagtatttctccagaattgatgatccacagtgggaagacttgaacctacctgctagacgctcccacggaagaaatatcgagtccaagctttgatcgaaggtcatgggagaaaggtggaactctggaacggagccttggtagtggtcagaataacacattattgcacatcatctcaagtttgaagagtctgcagactattgataaaataaacatgaatgtgccatataggtcaacttatatcacagaaagaaactctttgctgtttatacgtggagactggagtcatatgcatttttaaataattataagtaataaaatcgaaaaagaaatcgttggaaagacttttcttggagtcagaccctacttgatggtgataatcgatgagctttctacacgaccaat

SEQ ID NO: 69488 - DNA, 1542 bp, Zea Mays
cgccgcctgcatttgtctctcggtcaggaacatggaggggagacggctttcacggcggcagttacgctcgctaccggacgccgcgtccttctcgccggaagtcgcggccagcccggggctcgtcggctccggccagttgggtctcggtctctcggcggcgttcgagactctgccgccgattttggtagaagtgaatggctttacaaggacactgattttgaataggccaaagcagttaaatgcactctcctcgaccatgattatgggactcttgaggtgtttcactgcttatgagaaagacgatggagttaaattgttgattatgaagggtaaaggaagagcattttgtgctggaggtgatgttgctgcagttgttcgatctatacataaagacagctggaaatatggtgctgatttcttccgaaatgaatttttgttgaattacataattgcaacttataccaaacctcaggtttctcttcttagtggaatcgtcatgggtggaggtgctggcgtttctttacatggaaggtttagagttgccactgataacacggtttttgcaatgccagaaacagctctgggtctctttccagatataggggcctcatattttctgtctcggcttcctggattctatggagagtatgttggtcttgctggtgccagattggatggtggggaaatgcttgcatgtggtctggcaactcattttgtccagtcaaattgtgtggtatcatcgatcaatttgctcaacaaccatcactgaaagaaagcagctctttgaataggttggaaatcatcaacaaatgcttttccaaaaggacagtcgaagaaattatatccgctcttgaagtagaggcctcaaattcggcagatgaatgggttgctacaacaatccagtccttgaagaaggcttctcctaccagtctgaaaatctctctgagatcgataagagaagggaggacacaaactgttggggagtgcttgcagcgggaatatagaatggtctgccatgtcatgcgtggtgacttcagcagagacttctttgagggatgcagggctatattgctggataaagaccgaaacccaaagtggatgcctccaaggttggaacaagtgcatgacgaggctgttgaacagtatttctccagaattgatgatccacagtgggaagacttgaacctacctgctagacgctcccacggaagaaatatcgagtccaagctttgatcgaaggtcatgggagaaaggtggaactctggaacggagccttggtagtggtcagaataacacattattgcacatcatctcaagtttgaagagtctgcagactattgataaaataaacatgaatgtgccatataggtcaacttatatcacagaaagaaactctttgctgtttatacgtggagactggagtcatatgcatttttaaataattataagtaataaaatcgaaaaagaaatcgttggaaagacttttcttggagtcagaccctacttgatggtgataatcgatgagctttctacacgaccaat

SEQ ID NO: 69489 - DNA, 1973 bp, Zea Mays
cgccgcctgcatttgtctctcggtcaggaacatggaggggagacggctttcacggcggcagttacgctcgctaccggacgccgcgtccttctcgccggaagtcgcggccagcccggggctcgtcggctccggccagttgggtctcggtctctcggcggcgttcgagactctgccgccgattttggtagaagtgaatggctttacaaggacactgattttgaataggccaaagcagttaaatgcactctcctcgaccatgattatgggactcttgaggtgtttcactgcttatgagaaagacgatggagttaaattgttgattatgaagggtaaaggaagagcattttgtgctggaggtgatgttgctgcagttgttcgatctatacataaagacagctggaaatatggtgctgatttcttccgaaatgaatttttgttgaattacataattgcaacttataccaaacctcaggtttctcttcttagtggaatcgtcatgggtggaggtgctggcgtttctttacatggaaggtttagagttgccactgataacacggtttttgcaatgccagaaacagctctgggtctctttccagatataggggcctcatattttctgtctcggcttcctggattctatggttatcttatatgtctcttctttttctttatattcagtcgaattacatgttgcgatgtcatttccatctatacagtattgttggatattattcagtcctgaaatatcacgcatcttcaaattttcctttgaagttttccaaataccgtctacttgattgaattttagcaatagtgcttcatgcacaatagtgattgtggagataaatcatataggttgtggagatataatcatatatagaaatgagagtgaccaaatgtaggttcacttatgacttatattagttgtaatgcgtgaaggcagcttcttagttgatggcaaaggtatcttaggagatactgttcactaaactgttttcatgttcttttctccaggagagtatgttggtcttgctggtgccagattggatggtggggaaatgcttgcatgtggtctggcaactcattttgtccagtcaaatagtctgctatcgctggaagaatcacttaaaaaggtggatacttccaatgcttttgcagtgtgtggtatcatcgatcaatttgctcaacaaccatcactgaaagaaagcagctctttgaataggttggaaatcatcaacaaatgcttttccaaaaggacagtcgaagaaattatatccgctcttgaagtagaggcctcaaattcggcagatgaatgggttgctacaacaatccagtccttgaagaaggcttctcctaccagtctgaaaatctctctgagatcgataagagaagggaggacacaaactgttggggagtgcttgcagcgggaatatagaatggtctgccatgtcatgcgtggtgacttcagcagagacttctttgagggatgcagggctatattgctggataaagaccgaaacccaaagtggatgcctccaaggttggaacaagtgcatgacgaggctgttgaacagtatttctccagaattgatgatccacagtgggaagacttgaacctacctgctagacgctcccacggaagaaatatcgagtccaagctttgatcgaaggtcatgggagaaaggtggaactctggaacggagccttggtagtggtcagaataacacattattgcacatcatctcaagtttgaagagtctgcagactattgataaaataaacatgaatgtgccatataggtcaacttatatcacagaaagaaactctttgctgtttatacgtggagactggagtcatatgcatttttaaataattataagtaataaaatcgaaaaagaaatcgttggaaagacttttcttggagtcagaccctacttgatggtgataatcgatgagctttctacacgaccaat

SEQ ID NO: 69490 - DNA, 1490 bp, Zea Mays
attttttattcctactcccagtcgccgcctgcatttgtctctcggtcaggaacatggaggggagacggctttcacggcggcagttacgctcgctaccggacgccgcgtccttctcgccggaagtcgcggccagcccggggctcgtcggctccggccagttgggtctcggtctctcggcggcgttcgagactctgccgccgattttggtagaagtgaatggctttacaaggacactgattttgaataggccaaagcagttaaatgcactctcctcgaccatgattatgggactcttgaggtgtttcactgcttatgagaaagacgatggagttaaattgttgattatgaagggtaaaggaagagcattttgtgctggaggtgatgttgctgcagttgttcgatctatacataaagacagctggaaatatggtgctgatttcttccgaaatgaatttttgttgaattacataattgcaacttataccaaacctcaggtttctcttcttagtggaatcgtcatgggtggaggtgctggcgtttctttacatggaaggtttagagttgccactgataacacggtttttgcaatgccagaaacagctctgggtctctttccagatataggggcctcatattttctgtctcggcttcctggattctatggagagtatgttggtcttgctggtgccagattggatggtggggaaatgcttgcatgtggtctggcaactcattttgtccagtcaaatgtggatacttccaatgcttttgcagtgtgtggtatcatcgatcaatttgctcaacaaccatcactgaaagaaagcagctctttgaataggttggaaatcatcaacaaatgcttttccaaaaggacagtcgaagaaattatatccgctcttataagagaagggaggacacaaactgttggggagtgcttgcagcgggaatatagaatggtctgccatgtcatgcgtggtgacttcagcagagacttctttgagggatgcagggctatattgctggataaagaccgaaacccaaagtggatgcctccaaggttggaacaagtgcatgacgaggctgttgaacagtatttctccagaattgatgatccacagtgggaagacttgaacctacctgctagacgctcccacggaagaaatatcgagtccaagctttgatcgaaggtcatgggagaaaggtggaactctggaacggagccttggtagtggtcagaataacacattattgcacatcatctcaagtttgaagagtctgcagactattgataaaataaacatgaatgtgccatataggtcaacttatatcacagaaagaaactctttgctgtttatacgtggagactggagtcatatgcatttttaaataattataagtaataaaatcgaaaaagaaatcgttggaaagacttttcttggagtcagaccctacttgatggtgataatcgatgagctttctacacgaccaat

SEQ ID NO: 69491 - DNA, 1542 bp, Zea Mays
cactagtgtattttttattcctactcccagtcgccgcctgcatttgtctctcggtcaggaacatggaggggagacggctttcacggcggcagttacgctcgctaccggacgccgcgtccttctcgccggaagtcgcggccagcccggggctcgtcggctccggccagttgggtctcggtctctcggcggcgttcgagactctgccgccgattttggtagaagtgaatggctttacaaggacactgattttgaataggccaaagcagttaaatgcactctcctcgaccatgattatgggactcttgaggtgtttcactgcttatgagaaagacgatggagttaaattgttgattatgaagggtaaaggaagagcattttgtgctggaggtgatgttgctgcagttgttcgatctatacataaagacagctggaaatatggtgctgatttcttccgaaatgaatttttgttgaattacataattgcaacttataccaaacctcaggtttctcttcttagtggaatcgtcatgggtggaggtgctggcgtttctttacatggaaggtttagagttgccactgataacacggtttttgcaatgccagaaacagctctgggtctctttccagatataggggcctcatattttctgtctcggcttcctggattctatggagagtatgttggtcttgctggtgccagattggatggtggggaaatgcttgcatgtggtctggcaactcattttgtccagtcaaatagtctgctatcgctggaagaatcacttaaaaaggttggaaatcatcaacaaatgcttttccaaaaggacagtcgaagaaattatatccgctcttgaagtagaggcctcaaattcggcagatgaatgggttgctacaacaatccagtccttgaagaaggcttctcctaccagtctgaaaatctctctgagatcgataagagaagggaggacacaaactgttggggagtgcttgcagcgggaatatagaatggtctgccatgtcatgcgtggtgacttcagcagagacttctttgagggatgcagggctatattgctggataaagaccgaaacccaaagtggatgcctccaaggttggaacaagtgcatgacgaggctgttgaacagtatttctccagaattgatgatccacagtgggaagacttgaacctacctgctagacgctcccacggaagaaatatcgagtccaagctttgatcgaaggtcatgggagaaaggtggaactctggaacggagccttggtagtggtcagaataacacattattgcacatcatctcaagtttgaagagtctgcagactattgataaaataaacatgaatgtgccatataggtcaacttatatcacagaaagaaactctttgctgtttatacgtggagactggagtcatatgcatttttaaataattataagtaataaaatcgaaaaagaaatcgttggaaagacttttcttggagtcagaccctacttgatggtgataatcgatgagctttctacacgaccaat

SEQ ID NO: 69492 - DNA, 1538 bp, Zea Mays
aacgagcactagtgtattttttattcctactcccagtcgccgcctgcatttgtctctcggtcaggaacatggaggggagacggctttcacggcggcagttacgctcgctaccggacgccgcgtccttctcgccggaagtcgcggccagcccggggctcgtcggctccggccagttgggtctcggtctctcggcggcgttcgagactctgccgccgattttggtagaagtgaatggctttacaaggacactgattttgaataggccaaagcagttaaatgcactctcctcgaccatgattatgggactcttgaggtgtttcactgcttatgagaaagacgatggagttaaattgttgattatgaagggtaaaggaagagcattttgtgctggaggtgatgttgctgcagttgttcgatctatacataaagacagctggaaatatggtgctgatttcttccgaaatgaatttttgttgaattacataattgcaacttataccaaacctcaggtttctcttcttagtggaatcgtcatgggtggaggtgctggcgtttctttacatggaaggtttagagttgccactgataacacggtttttgcaatgccagaaacagctctgggtctctttccagatataggggcctcatattttctgtctcggcttcctggattctatggagagtatgttggtcttgctggtgccagattggatggtggggaaatgcttgcatgtggtctggcaactcattttgtccagtcaaatagtctgctatcgctggaagaatcacttaaaaaggtggatacttccaatgcttttgcagtgtgtggtatcatcgatcaatttgctcaacaaccatcactgaaagaaagcagctctttgaataggttggaaatcatcaacaaatgcttttccaaaaggacagtcgaagaaattatatccgctcttataagagaagggaggacacaaactgttggggagtgcttgcagcgggaatatagaatggtctgccatgtcatgcgtggtgacttcagcagagacttctttgagggatgcagggctatattgctggataaagaccgaaacccaaagtggatgcctccaaggttggaacaagtgcatgacgaggctgttgaacagtatttctccagaattgatgatccacagtgggaagacttgaacctacctgctagacgctcccacggaagaaatatcgagtccaagctttgatcgaaggtcatgggagaaaggtggaactctggaacggagccttggtagtggtcagaataacacattattgcacatcatctcaagtttgaagagtctgcagactattgataaaataaacatgaatgtgccatataggtcaacttatatcacagaaagaaactctttgctgtttatacgtggagactggagtcatatgcatttttaaataattataagtaataaaatcgaaaaagaaatcgttggaaagacttttcttggagtcagaccctacttgatggtgataatcgatgagctttctacacgaccaat

SEQ ID NO: 69493 - DNA, 1514 bp, Zea Mays
gcctacgtcgctgaacaaagtgtccaaaacgagcactagtgtattttttattcctactcccagtcgccgcctgcatttgtctctcggtcaggaacatggaggggagacggctttcacggcggcagttacgctcgctaccggacgccgcgtccttctcgccggaagtcgcggccagcccggggctcgtcggctccggccagttgggtctcggtctctcggcggcgttcgagactctgccgccgggtaaaggaagagcattttgtgctggaggtgatgttgctgcagttgttcgatctatacataaagacagctggaaatatggtgctgatttcttccgaaatgaatttttgttgaattacataattgcaacttataccaaacctcaggtttctcttcttagtggaatcgtcatgggtggaggtgctggcgtttctttacatggaaggtttagagttgccactgataacacggtttttgcaatgccagaaacagctctgggtctctttccagatataggggcctcatattttctgtctcggcttcctggattctatggagagtatgttggtcttgctggtgccagattggatggtggggaaatgcttgcatgtggtctggcaactcattttgtccagtcaaatagtctgctatcgctggaagaatcacttaaaaaggtggatacttccaatgcttttgcagtgtgtggtatcatcgatcaatttgctcaacaaccatcactgaaagaaagcagctctttgaataggttggaaatcatcaacaaatgcttttccaaaaggacagtcgaagaaattatatccgctcttgaagtagaggcctcaaattcggcagatgaatgggttgctacaacaatccagtccttgaagaaggcttctcctaccagtctgaaaatctctctgagatcgataagagaagggaggacacaaactgttggggagtgcttgcagcgggaatatagaatggtctgccatgtcatgcgtggtgacttcagcagagacttctttgagggatgcagggctatattgctggataaagaccgaaacccaaagtggatgcctccaaggttggaacaagtgcatgacgaggctgttgaacagtatttctccagaattgatgatccacagtgggaagacttgaacctacctgctagacgctcccacggaagaaatatcgagtccaagctttgatcgaaggtcatgggagaaaggtggaactctggaacggagccttggtagtggtcagaataacacattattgcacatcatctcaagtttgaagagtctgcagactattgataaaataaacatgaatgtgccatataggtcaacttatatcacagaaagaaactctttgctgtttatacgtggagactggagtcatatgcatttttaaataattataagtaataaaatcgaaaaagaaatcgttggaaagacttttcttggagtcagaccctacttgatggtgataatcgatgagctttctacacgaccaat

SEQ ID NO: 69494 - DNA, 1724 bp, Zea Mays
cttgttagccagcgagtcacgtacaggctgtgacgatgagctgggttatgtcagcattatgcctacgtcgctgaacaaagtgtccaaaacgagcactagtgtattttttattcctactcccagtcgccgcctgcatttgtctctcggtcaggaacatggaggggagacggctttcacggcggcagttacgctcgctaccggacgccgcgtccttctcgccggaagtcgcggccagcccggggctcgtcggctccggccagttgggtctcggtctctcggcggcgttcgagactctgccgccgattttggtagaagtgaatggctttacaaggacactgattttgaataggccaaagcagttaaatgcactctcctcgaccatgattatgggactcttgaggtgtttcactgcttatgagaaagacgatggagttaaattgttgattatgaagggtaaaggaagagcattttgtgctggaggtgatgttgctgcagttgttcgatctatacataaagacagctggaaatatggtgctgatttcttccgaaatgaatttttgttgaattacataattgcaacttataccaaacctcaggtttctcttcttagtggaatcgtcatgggtggaggtgctggcgtttctttacatggaaggtttagagttgccactgataacacggtttttgcaatgccagaaacagctctgggtctctttccagatataggggcctcatattttctgtctcggcttcctggattctatggagagtatgttggtcttgctggtgccagattggatggtggggaaatgcttgcatgtggtctggcaactcattttgtccagtcaaatagtctgctatcgctggaagaatcacttaaaaaggtggatacttccaatgcttttgcagtgtgtggtatcatcgatcaatttgctcaacaaccatcactgaaagaaagcagctctttgaataggttggaaatcatcaacaaatgcttttccaaaaggacagtcgaagaaattatatccgctcttgaagtagaggcctcaaattcggcagatgaatgggttgctacaacaatccagtccttgaagaaggcttctcctaccagtctgaaaatctctctgagatcgataagagaagggaggacacaaactgttggggagtgcttgcagcgggaatatagaatggtctgccatgtcatgcgtggtgacttcagcagagacttctttgagggatgcagggctatattgctggataaagaccgaaacccaaagtggatgcctccaaggttggaacaagtgcatgacgaggctgttgaacagtatttctccagaattgatgatccacagtgggaagacttgaacctacctgctagacgctcccacggaagaaatatcgagtccaagctttgatcgaaggtcatgggagaaaggtggaactctggaacggagccttggtagtggtcagaataacacattattgcacatcatctcaagtttgaagagtctgcagactattgataaaataaacatgaatgtgccatataggtcaacttatatcacagaaagaaactctttgctgtttatacgtggagactggagtcatatgcatttttaaataattataagtaataaaatcgaaaaagaaatcgttggaaagacttttcttggagtcagaccctacttgatggtgataatcgatgagctttctacacgaccaat

SEQ ID NO: 69495 - DNA, 1063 bp, Zea Mays
tttcatagcccttccgccacactatagactccacctggttgtggctcaacgaagctctcttctatagccaccaactcaattgtatactgaactatgtcacgaggcagggatcctttggcattgagccaggtaattggtgatgtgttggatcctttcataaagtcagcaacgatgaggattaattatggtgacaaggagataacaaatggcactggactacgagcatctgctgttctcaatgcaccacatgttgagattgaaggccacgaccaaacaaagctctacacacttgttatggtggatcctgatgcaccaagtccaagcaaaccagagtacagggaatatctgcattggattggatgcagccctctcaaaaaggagggggtgtttttttccatccatcaacatctgaagaactcttgttagtatgctaatgggttggtaacagatataccagaggcaagagacatacgttttgttgcaagtggtgccatgtaaaataccagaatccaacatctacaccaaatactatctggccaagtgcatgctaggttaagcagttgcatggttgttatttgttcaacagcacctcaagttgaggatctgacatcatggttcttgggatcaagctgaagaacagatacagagaaacatctacatcaaggcagtaccattcacaattcagtaatcaatccacataaaacagttgaaaagatatgaaacgttagttgacagttaagctctagagtaattgactcatattatatgaaacaaactagcatttggaggtcatcttcctatggtacccaccacaataaagatcacgatgttcatatgagaagaagtgttcatttacagcaactcattggtgtttaagttcaagtatcacaaaaccttaatgaggtatatatctgcttctgtttggtgggttctccgaagtccaaacagaaagggaaccatatcacatggacgtggccatcctgcgtgctcagatagcgcgccatctgacaactagcagattggccggcccatccttccagagttccaggttaccttctaaggg

SEQ ID NO: 69496 - DNA, 1280 bp, Zea Mays
tttcatagcccttccgccacactatagactccacctggttgtggctcaacgaagctctcttctatagccaccaactcaattgtatactgaactatgtcacgaggcagggatcctttggcattgagccaggtaattggtgatgtgttggatcctttcataaagtcagcaacgatgaggattaattatggtgacaaggagataacaaatggcactggactacgagcatctgctgttctcaatgcaccacatgttgagattgaaggccacgaccaaacaaagctctacacacttgttatggtggatcctgatgcaccaagtccaagcaaaccagagtacagggaatatctgcattggattggatgcagccctctcaaaaaggagggggtgtttttttccatccatcaacatctgaagaactcttgttagtatgctaatgggttggtaacagatataccagaggcaagagacatacgttttgttgcaagtggtgccatgtaaaataccagaatccaacatctacaccaaatactatctggccaagtgcatgctaggttaagcagttgcatggttgttatttgttcaacagcacctcaagttgaggatctgacatcatggcaacgaaatagttccctatgaaagcccaaggccaccagctggaattcatcgaactgtttttgtgctattcaaacaacaagctagacaaacagtttatgcaccaggatggcggccaaatttcaacatcagagacttctcagcaatttacaatcttggaccaccagttgctgcattatacttcaactgccaaaaggaaagcggtgttggtggcagaaggttcttgggatcaagctgaagaacagatacagagaaacatctacatcaaggcagtaccattcacaattcagtaatcaatccacataaaacagttgaaaagatatgaaacgttagttgacagttaagctctagagtaattgactcatattatatgaaacaaactagcatttggaggtcatcttcctatggtacccaccacaataaagatcacgatgttcatatgagaagaagtgttcatttacagcaactcattggtgtttaagttcaagtatcacaaaaccttaatgaggtatatatctgcttctgtttggtgggttctccgaagtccaaacagaaagggaaccatatcacatggacgtggccatcctgcgtgctcagatagcgcgccatctgacaactagcagattggccggcccatccttccagagttccaggttaccttctaaggg

SEQ ID NO: 69497 - DNA, 1196 bp, Zea Mays
tttcatagcccttccgccacactatagactccacctggttgtggctcaacgaagctctcttctatagccaccaactcaattgtatactgaactatgtcacgaggcagggatcctttggcattgagccaggtaattggtgatgtgttggatcctttcataaagtcagcaacgatgaggattaattatggtgacaaggagataacaaatggcactggactacgagcatctgctgttctcaatgcaccacatgttgagattgaaggccacgaccaaacaaagctctacacacttgttatggtggatcctgatgcaccaagtccaagcaaaccagagtacagggaatatctgcattggttggtaacagatataccagaggcaagagacatacgttttgttgcaagtggtgccatgtaaaataccagaatccaacatctacaccaaatactatctggccaagtgcatgctaggttaagcagttgcatggttgttatttgttcaacagcacctcaagttgaggatctgacatcatggcaacgaaatagttccctatgaaagcccaaggccaccagctggaattcatcgaactgtttttgtgctattcaaacaacaagctagacaaacagtttatgcaccaggatggcggccaaatttcaacatcagagacttctcagcaatttacaatcttggaccaccagttgctgcattatacttcaactgccaaaaggaaagcggtgttggtggcagaaggttcttgggatcaagctgaagaacagatacagagaaacatctacatcaaggcagtaccattcacaattcagtaatcaatccacataaaacagttgaaaagatatgaaacgttagttgacagttaagctctagagtaattgactcatattatatgaaacaaactagcatttggaggtcatcttcctatggtacccaccacaataaagatcacgatgttcatatgagaagaagtgttcatttacagcaactcattggtgtttaagttcaagtatcacaaaaccttaatgaggtatatatctgcttctgtttggtgggttctccgaagtccaaacagaaagggaaccatatcacatggacgtggccatcctgcgtgctcagatagcgcgccatctgacaactagcagattggccggcccatccttccagagttccaggttaccttctaaggg

SEQ ID NO: 69498 - DNA, 1144 bp, Zea Mays
tttcatagcccttccgccacactatagactccacctggttgtggctcaacgaagctctcttctatagccaccaactcaattgtatactgaactatgtcacgaggcagggatcctttggcattgagccaggtaattggtgatgtgttggatcctttcataaagtcagcaacgatgaggattaattatggtgacaaggagataacaaatggcactggactacgagcatctgctgttctcaatgcaccacatgttgagattgaaggccacgaccaaacaaagctctacacacttgttatggtggatcctgatgcaccaagtccaagcaaaccagagtacagggaatatctgcattggattggatgcagccctctcaaaaaggagggggtgtttttttccatccatcaacatctgaagaactcttgttagtatgctaatgggttggtaacagatataccagaggcaagagacatacgttttggcaacgaaatagttccctatgaaagcccaaggccaccagctggaattcatcgaactgtttttgtgctattcaaacaacaagctagacaaacagtttatgcaccaggatggcggccaaatttcaacatcagagacttctcagcaatttacaatcttggaccaccagttgctgcattatacttcaactgccaaaaggaaagcggtgttggtggcagaaggttcttgggatcaagctgaagaacagatacagagaaacatctacatcaaggcagtaccattcacaattcagtaatcaatccacataaaacagttgaaaagatatgaaacgttagttgacagttaagctctagagtaattgactcatattatatgaaacaaactagcatttggaggtcatcttcctatggtacccaccacaataaagatcacgatgttcatatgagaagaagtgttcatttacagcaactcattggtgtttaagttcaagtatcacaaaaccttaatgaggtatatatctgcttctgtttggtgggttctccgaagtccaaacagaaagggaaccatatcacatggacgtggccatcctgcgtgctcagatagcgcgccatctgacaactagcagattggccggcccatccttccagagttccaggttaccttctaaggg

SEQ ID NO: 69499 - DNA, 3540 bp, Zea Mays
tttcatagcccttccgccacactatagactccacctggttgtggctcaacgaagctctcttctatagccaccaactcaattgtatactgaactatgtcacgaggcagggatcctttggcattgagccaggtaattggtgatgtgttggatcctttcataaagtcagcaacgatgaggattaattatggtgacaaggagataacaaatggcactggactacgagcatctgctgttctcaatgcaccacatgttgagattgaaggccacgaccaaacaaagctctacacacttgttatggtggatcctgatgcaccaagtccaagcaaaccagagtacagggaatatctgcattggattggatgcagccctctcaaaaaggagggggtgtttttttccatccatcaacatctgaagaactcttgttagtatgctaatgggtaagaaagcacagtttctgtgacagtgtagctttttgtttccaatcactgtaattcggttaacctaagtatcgttgttcagattgttattttattgtcaacaagtattagttttcagttgaattgatatcaatagcatggaaataaaatgttgcagatttttttacattataatagtttctaaattcgtcaagaagatattttataaactctgtatggacagggtgctctgctctcagcagggctatatataaaactgtcaattaattacttcatggataaattgaagagaacggtcatgggcccaaattctaacttgactactttaatgttataattctcagctgctataattatcaaacaaaataaggtaaactgctgctatatcatttaatcatataacacattagttacaagattgacatgaaagatattgcatatatgcatgcatacagttacagttttacacttattttgatagtctgaaactatgaagagaaaggcttgcactgcttagagtagagttcaaagaactcatcaaaagaaccaagtggtattgctactgcttacgctatgatattgctagcataatacttaccacactcgtttaggagaatcctggaggtggccaaaattccaccatgccaggggggtatgccagggagaccccctctcgccaatgcttttcatcctagctatggatccgttccaacgcatccttgacctagcaactgaccaaggtactctgtccccattgccccaagggacgaccagatggagaacatccctgtacgctgatgacgcggccattttcgttagcccacacagagaggacatgcgggcaaccgttgaacactgcttcctcgtgtccctgggtgcactgtaatttttaacatgtacttacgctcttttcctatcttaactggaaggcagagctcctgccatttcgtttcaaaaaaaaaaatacttaccacactcaactgacaattataattgtttaatttacaagaagaataatgtaacatgatcgccatttgcaacaacaaagtgtttcatttagttatttgaccaaattctagattgctacttgctactaggaatcaaccaccagagtgtaaataaaaatctatataatacatcatatttattttaaatgtgacctatgaatttgcacagctgttattagtagaaaacagactcttacatgaacatcgattttccaaattcatgtatgttttacatagttgtgtacttattttttccaattaaagttatttagttgattatctacaatacataagtaattttgataccaatcaaagatctaaggaaggcccttgtttcttttcatcttgtttattttctattacaggttggtaacagatataccagaggcaagagacatacgttttggtgggtaacaccttacctgacctctttttaccgaattagcatttaagacatggatctttaaaccatttttaggactacaacttcgaacattattgttgcacacaaagtgcaaacaactccagattcatgttgtatcaaaattaagtatacataatatgtggcatcttccactaaatataaacccaccagcactttgctcttggaattgtgacaatgaaataaacatgtggttagttaaatgtatgtcaaatgacaaaacatatgatgatagtaaaggatttaagtaactacagaagaaccactactgcaaatgtaacatgtagaatttgaagaaaaaaaaaactgctatgaaagatatggctttgacgaagtaactaccttggtgagaaaatggtcatgtgaatttcattttacaaagttgctatgtaacacatcatttacaatgaaacctttaaacatttatcttatgatgtgtgcatgttattatgcctggcatccatgattagtattacagatgatgtcaatatttgaagaaagatgcatgtgtggacttatagcaagtgcaagaattttgtagtggaactaaatctgtctaaattattccctactagttgcaagtggtgccatgtaaaataccagaatccaacatctacaccaaatactatctggccaagtgcatgctaggtaaatttaataagacactatcgtctcatcagactttctggtttggttcaatctccttaattgccacgctcgcttattttgaatgcaatttcataattttcctaccttttggattcagcaccattcagcaattgagaagaatatgatagataattttattgaagactaaacatagagagaatcattttaatattgcatacctaataatcaatgcaaagcactttagagagaggggaacaacccccactctaatgtgactgcacctattttgatgcaggttaagcagttgcatggttgttatttgttcaacagcacctcaagttgaggatctgacatcatggcaacgaaatagttccctatgaaagcccaaggccaccagctggaattcatcgaactgtttttgtgctattcaaacaacaagctagacaaacagtttatgcaccaggatggcggccaaatttcaacatcagagacttctcagcaatttacaatcttggaccaccagttgctgcattatacttcaactgccaaaaggaaagcggtgttggtggcagaaggttcttgggatcaagctgaagaacagatacagagaaacatctacatcaaggcagtaccattcacaattcagtaatcaatccacataaaacagttgaaaagatatgaaacgttagttgacagttaagctctagagtaattgactcatattatatgaaacaaactagcatttggaggtcatcttcctatggtacccaccacaataaagatcacgatgttcatatgagaagaagtgttcatttacagcaactcattggtgtttaagttcaagtatcacaaaaccttaatgaggtatatatctgcttctgtttggtgggttctccgaagtccaaacagaaagggaaccatatcacatggacgtggccatcctgcgtgctcagatagcgcgccatctgacaactagcagattggccggcccatccttccagagttccaggttaccttctaaggg

SEQ ID NO: 69500 - DNA, 2121 bp, Zea Mays
atttcatagcccttccgccacactatagactccacctggttgtggctcaacgaagctctcttctatagccaccaactcaattgtatactgaactatgtcacgaggcagggatcctttggcattgagccaggtaattggtgatgtgttggatcctttcataaagtcagcaacgatgaggattaattatggtgacaaggagataacaaatggcactggactacgagcatctgctgttctcaatgcaccacatgttgagattgaaggccacgaccaaacaaagctctacacacttgttatggtggatcctgatgcaccaagtccaagcaaaccagagtacagggaatatctgcattggttggtaacagatataccagaggcaagagacatacgttttggttaagcagttgcatggttgttatttgttcaacagcacctcaagttgaggatctgacatcatggtattttctgtgggacccacttgatcactttagtcagtgtggcaatacttacttctacaggaaatcaagtagatgggtattattacctgcttcattgcatgacaatatacaatactcaactaatgctatcttctgtatgggcccacagaaataaatgatgcatctataaatgaaacctgtgaagtgtccttcagaatttcaagtattagaacttagtgtttaaattaaatatggagattataaggtgtcaaaatgttccgcgacgtagatgtctccttcaggaagctttcaaccagatctcgaaagcactatatattagcatgatgatactaaacacatcaatggttatcgatcattatatgaaaaaaaaaactggattaacctagaaggaactaggtggcatgttactaagaacaaaataggcatccaaatttgcctccgtgaggacttgaacgggcataatccaaatcctcttatcatgttaggctggcagatagaaaaacttctgactgcaagaaaaaaaatcaagaacattttaaacaaatgaaataaaagtagcacacctcatccttttgtgaattattcatacttgatgaaacctaagcactacaaatggtctctctctctcacccactttgtgtatgcttaataatggggatattccacttgtacacaacatgtggtcaacttggatatttactttagtttagatgctataaggggctgcacttaatatgctataagtataaataaatccatcatcacaacctattgtgtgtgtgtttcttttttcttttggatgggtggggtgtgctgattttgtttttcttttgtgtgtgtgtgtgtgtgggaggggggtatagtgccaactgaatacaatgttgaggtgagcaggtagtgaaaaacagttagagtcattagtacaaaatggttagtgctagccttcaccttaaaaaatacagaaaaacattctaataaggaatgcacattttttcaggcaacgaaatagttccctatgaaagcccaaggccaccagctggaattcatcgaactgtttttgtgctattcaaacaacaagctagacaaacagtttatgcaccaggatggcggccaaatttcaacatcagagacttctcagcaatttacaatcttggaccaccagttgctgcattatacttcaactgccaaaaggaaagcggtgttggtggcagaaggttcttgggatcaagctgaagaacagatacagagaaacatctacatcaaggcagtaccattcacaattcagtaatcaatccacataaaacagttgaaaagatatgaaacgttagttgacagttaagctctagagtaattgactcatattatatgaaacaaactagcatttggaggtcatcttcctatggtacccaccacaataaagatcacgatgttcatatgagaagaagtgttcatttacagcaactcattggtgtttaagttcaagtatcacaaaaccttaatgaggtatatatctgcttctgtttggtgggttctccgaagtccaaacagaaagggaaccatatcacatggacgtggccatcctgcgtgctcagatagcgcgccatctgacaactagcagattggccggcccatccttccagagttccaggttaccttctaaggg

SEQ ID NO: 69501 - DNA, 2889 bp, Zea Mays
atttcatagcccttccgccacactatagactccacctggttgtggctcaacgaagctctcttctatagccaccaactcaattgtatactgaactatgtcacgaggcagggatcctttggcattgagccaggtaattggtgatgtgttggatcctttcataaagtcagcaacgatgaggattaattatggtgacaaggagataacaaatggcactggactacgagcatctgctgttctcaatgcaccacatgttgagattgaaggccacgaccaaacaaagctctacacacttgttatggtggatcctgatgcaccaagtccaagcaaaccagagtacagggaatatctgcattggattggatgcagccctctcaaaaaggagggggtgtttttttccatccatcaacatctgaagaactcttgttagtatgctaatgggttggtaacagatataccagaggcaagagacatacgttttggtgggtaacaccttacctgacctctttttaccgaattagcatttaagacatggatctttaaaccatttttaggactacaacttcgaacattattgttgcacacaaagtgcaaacaactccagattcatgttgtatcaaaattaagtatacataatatgtggcatcttccactaaatataaacccaccagcactttgctcttggaattgtgacaatgaaataaacatgtggttagttaaatgtatgtcaaatgacaaaacatatgatgatagtaaaggatttaagtaactacagaagaaccactactgcaaatgtaacatgtagaatttgaagaaaaaaaaaactgctatgaaagatatggctttgacgaagtaactaccttggtgagaaaatggtcatgtgaatttcattttacaaagttgctatgtaacacatcatttacaatgaaacctttaaacatttatcttatgatgtgtgcatgttattatgcctggcatccatgattagtattacagatgatgtcaatatttgaagaaagatgcatgtgtggacttatagcaagtgcaagaattttgtagtggaactaaatctgtctaaattattccctactagttgcaagtggtgccatgtaaaataccagaatccaacatctacaccaaatactatctggccaagtgcatgctaggttaagcagttgcatggttgttatttgttcaacagcacctcaagttgaggatctgacatcatggtattttctgtgggacccacttgatcactttagtcagtgtggcaatacttacttctacaggaaatcaagtagatgggtattattacctgcttcattgcatgacaatatacaatactcaactaatgctatcttctgtatgggcccacagaaataaatgatgcatctataaatgaaacctgtgaagtgtccttcagaatttcaagtattagaacttagtgtttaaattaaatatggagattataaggtgtcaaaatgttccgcgacgtagatgtctccttcaggaagctttcaaccagatctcgaaagcactatatattagcatgatgatactaaacacatcaatggttatcgatcattatatgaaaaaaaaaactggattaacctagaaggaactaggtggcatgttactaagaacaaaataggcatccaaatttgcctccgtgaggacttgaacgggcataatccaaatcctcttatcatgttaggctggcagatagaaaaacttctgactgcaagaaaaaaaatcaagaacattttaaacaaatgaaataaaagtagcacacctcatccttttgtgaattattcatacttgatgaaacctaagcactacaaatggtctctctctctcacccactttgtgtatgcttaataatggggatattccacttgtacacaacatgtggtcaacttggatatttactttagtttagatgctataaggggctgcacttaatatgctataagtataaataaatccatcatcacaacctattgtgtgtgtgtttcttttttcttttggatgggtggggtgtgctgattttgtttttcttttgtgtgtgtgtgtgtgtgggaggggggtatagtgccaactgaatacaatgttgaggtgagcaggtagtgaaaaacagttagagtcattagtacaaaatggttagtgctagccttcaccttaaaaaatacagaaaaacattctaataaggaatgcacattttttcaggcaacgaaatagttccctatgaaagcccaaggccaccagctggaattcatcgaactgtttttgtgctattcaaacaacaagctagacaaacagtttatgcaccaggatggcggccaaatttcaacatcagagacttctcagcaatttacaatcttggaccaccagttgctgcattatacttcaactgccaaaaggaaagcggtgttggtggcagaaggttcttgggatcaagctgaagaacagatacagagaaacatctacatcaaggcagtaccattcacaattcagtaatcaatccacataaaacagttgaaaagatatgaaacgttagttgacagttaagctctagagtaattgactcatattatatgaaacaaactagcatttggaggtcatcttcctatggtacccaccacaataaagatcacgatgttcatatgagaagaagtgttcatttacagcaactcattggtgtttaagttcaagtatcacaaaaccttaatgaggtatatatctgcttctgtttggtgggttctccgaagtccaaacagaaagggaaccatatcacatggacgtggccatcctgcgtgctcagatagcgcgccatctgacaactagcagattggccggcccatccttccagagttccaggttaccttctaaggg

SEQ ID NO: 69502 - DNA, 2300 bp, Zea Mays
atttcatagcccttccgccacactatagactccacctggttgtggctcaacgaagctctcttctatagccaccaactcaattgtatactgaactatgtcacgaggcagggatcctttggcattgagccaggtaattggtgatgtgttggatcctttcataaagtcagcaacgatgaggattaattatggtgacaaggagataacaaatggcactggactacgagcatctgctgttctcaatgcaccacatgttgagattgaaggccacgaccaaacaaagctctacacacttgttatggtggatcctgatgcaccaagtccaagcaaaccagagtacagggaatatctgcattggattggatgcagccctctcaaaaaggagggggtgtttttttccatccatcaacatctgaagaactcttgttagtatgctaatgggtaagaaagcacagtttctgtgacagtgtagctttttgtttccaatcactgtaattcggttaacctaagtatcgttgttcagattgttattttattgtcaacaagtattagttttcagttgaattgatatcaatagcatggaaataaaatgttgcagatttttttacattataatagtttctaaattcgtcaagaagatattttataaactctgtatggacagggtgctctgctctcagcagggctatatataaaactgtcaattaattacttcatggataaattgaagagaacggtcatgggcccaaattctaacttgactactttaatgttataattctcagctgctataattatcaaacaaaataaggtaaactgctgctatatcatttaatcatataacacattagttacaagattgacatgaaagatattgcatatatgcatgcatacagttacagttttacacttattttgatagtctgaaactatgaagagaaaggcttgcactgcttagagtagagttcaaagaactcatcaaaagaaccaagtggtattgctactgcttacgctatgatattgctagcataatacttaccacactcgtttaggagaatcctggaggtggccaaaattccaccatgccaggggggtatgccagggagaccccctctcgccaatgcttttcatcctagctatggatccgttccaacgcatccttgacctagcaactgaccaaggtactctgtccccattgccccaagggacgaccagatggagaacatccctgtacgctgatgacgcggccattttcgttagcccacacagagaggacatgcgggcaaccgttgaacactgcttcctcgtgtccctgggtgcactgtaatttttaacatgtacttacgctcttttcctatcttaactggaaggcagagctcctgccatttcgtttcaaaaaaaaaaatacttaccacactcaactgacaattataattgtttaatttacaagaagaataatgtaacatgatcgccatttgcaacaacaaagtgtttcatttagttatttgaccaaattctagattgctacttgctactaggaatcaaccaccagagtgtaaataaaaatctatataatacatcatatttattttaaatgtgacctatgaatttgcacagctgttattagtagaaaacagactcttacatgaacatcgattttccaaattcatgtatgttttacatagttgtgtacttattttttccaattaaagttatttagttgattatctacaatacataagtaattttgataccaatcaaagatctaaggaaggcccttgtttcttttcatcttgtttattttctattacaggttggtaacagatataccagaggcaagagacatacgttttggttcttgggatcaagctgaagaacagatacagagaaacatctacatcaaggcagtaccattcacaattcagtaatcaatccacataaaacagttgaaaagatatgaaacgttagttgacagttaagctctagagtaattgactcatattatatgaaacaaactagcatttggaggtcatcttcctatggtacccaccacaataaagatcacgatgttcatatgagaagaagtgttcatttacagcaactcattggtgtttaagttcaagtatcacaaaaccttaatgaggtatatatctgcttctgtttggtgggttctccgaagtccaaacagaaagggaaccatatcacatggacgtggccatcctgcgtgctcagatagcgcgccatctgacaactagcagattggccggcccatccttccagagttccaggttaccttctaaggg

SEQ ID NO: 69503 - DNA, 928 bp, Zea Mays
atttcatagcccttccgccacactatagactccacctggttgtggctcaacgaagctctcttctatagccaccaactcaattgtatactgaactatgtcacgaggcagggatcctttggcattgagccaggtaattggtgatgtgttggatcctttcataaagtcagcaacgatgaggattaattatggtgacaaggagataacaaatggcactggactacgagcatctgctgttctcaatgcaccacatgttgagattgaaggccacgaccaaacaaagctctacacacttgttatggtggatcctgatgcaccaagtccaagcaaaccagagtacagggaatatctgcattggattggatgcagccctctcaaaaaggagggggtgtttttttccatccatcaacatctgaagaactcttgttagtatgctaatgggttggtaacagatataccagaggcaagagacatacgttttggttcttgggatcaagctgaagaacagatacagagaaacatctacatcaaggcagtaccattcacaattcagtaatcaatccacataaaacagttgaaaagatatgaaacgttagttgacagttaagctctagagtaattgactcatattatatgaaacaaactagcatttggaggtcatcttcctatggtacccaccacaataaagatcacgatgttcatatgagaagaagtgttcatttacagcaactcattggtgtttaagttcaagtatcacaaaaccttaatgaggtatatatctgcttctgtttggtgggttctccgaagtccaaacagaaagggaaccatatcacatggacgtggccatcctgcgtgctcagatagcgcgccatctgacaactagcagattggccggcccatccttccagagttccaggttaccttctaaggg

SEQ ID NO: 69504 - DNA, 1212 bp, Zea Mays
aaacatttcatagcccttccgccacactatagactccacctggttgtggctcaacgaagctctcttctatagccaccaactcaattgtatactgaactatgtcacgaggcagggatcctttggcattgagccaggtaattggtgatgtgttggatcctttcataaagtcagcaacgatgaggattaattatggtgacaaggagataacaaatggcactggactacgagcatctgctgttctcaatgcaccacatgttgagattgaaggccacgaccaaacaaagctctacacacttgttatggtggatcctgatgcaccaagtccaagcaaaccagagtacagggaatatctgcattggattggatgcagccctctcaaaaaggagggggtgtttttttccatccatcaacatctgaagaactcttgttagtatgctaatgggttggtaacagatataccagaggcaagagacatacgttttggttaagcagttgcatggttgttatttgttcaacagcacctcaagttgaggatctgacatcatggcaacgaaatagttccctatgaaagcccaaggccaccagctggaattcatcgaactgtttttgtgctattcaaacaacaagctagacaaacagtttatgcaccaggatggcggccaaatttcaacatcagagacttctcagcaatttacaatcttggaccaccagttgctgcattatacttcaactgccaaaaggaaagcggtgttggtggcagaaggttcttgggatcaagctgaagaacagatacagagaaacatctacatcaaggcagtaccattcacaattcagtaatcaatccacataaaacagttgaaaagatatgaaacgttagttgacagttaagctctagagtaattgactcatattatatgaaacaaactagcatttggaggtcatcttcctatggtacccaccacaataaagatcacgatgttcatatgagaagaagtgttcatttacagcaactcattggtgtttaagttcaagtatcacaaaaccttaatgaggtatatatctgcttctgtttggtgggttctccgaagtccaaacagaaagggaaccatatcacatggacgtggccatcctgcgtgctcagatagcgcgccatctgacaactagcagattggccggcccatccttccagagttccaggttaccttctaaggg

SEQ ID NO: 69505 - DNA, 2233 bp, Zea Mays
ctgctctgttcttcccacacaaaaaaacatttcatagcccttccgccacactatagactccacctggttgtggctcaacgaagctctcttctatagccaccaactcaattgtatactgaactatgtcacgaggcagggatcctttggcattgagccaggtaattggtgatgtgttggatcctttcataaagtcagcaacgatgaggattaattatggtgacaaggagataacaaatggcactggactacgagcatctgctgttctcaatgcaccacatgttgagattgaaggccacgaccaaacaaagctctacacacttgttatggtggatcctgatgcaccaagtccaagcaaaccagagtacagggaatatctgcattggattggatgcagccctctcaaaaaggagggggtgtttttttccatccatcaacatctgaagaactcttgttagtatgctaatgggttggtaacagatataccagaggcaagagacatacgttttggttaagcagttgcatggttgttatttgttcaacagcacctcaagttgaggatctgacatcatggtattttctgtgggacccacttgatcactttagtcagtgtggcaatacttacttctacaggaaatcaagtagatgggtattattacctgcttcattgcatgacaatatacaatactcaactaatgctatcttctgtatgggcccacagaaataaatgatgcatctataaatgaaacctgtgaagtgtccttcagaatttcaagtattagaacttagtgtttaaattaaatatggagattataaggtgtcaaaatgttccgcgacgtagatgtctccttcaggaagctttcaaccagatctcgaaagcactatatattagcatgatgatactaaacacatcaatggttatcgatcattatatgaaaaaaaaaactggattaacctagaaggaactaggtggcatgttactaagaacaaaataggcatccaaatttgcctccgtgaggacttgaacgggcataatccaaatcctcttatcatgttaggctggcagatagaaaaacttctgactgcaagaaaaaaaatcaagaacattttaaacaaatgaaataaaagtagcacacctcatccttttgtgaattattcatacttgatgaaacctaagcactacaaatggtctctctctctcacccactttgtgtatgcttaataatggggatattccacttgtacacaacatgtggtcaacttggatatttactttagtttagatgctataaggggctgcacttaatatgctataagtataaataaatccatcatcacaacctattgtgtgtgtgtttcttttttcttttggatgggtggggtgtgctgattttgtttttcttttgtgtgtgtgtgtgtgtgggaggggggtatagtgccaactgaatacaatgttgaggtgagcaggtagtgaaaaacagttagagtcattagtacaaaatggttagtgctagccttcaccttaaaaaatacagaaaaacattctaataaggaatgcacattttttcaggcaacgaaatagttccctatgaaagcccaaggccaccagctggaattcatcgaactgtttttgtgctattcaaacaacaagctagacaaacagtttatgcaccaggatggcggccaaatttcaacatcagagacttctcagcaatttacaatcttggaccaccagttgctgcattatacttcaactgccaaaaggaaagcggtgttggtggcagaaggttcttgggatcaagctgaagaacagatacagagaaacatctacatcaaggcagtaccattcacaattcagtaatcaatccacataaaacagttgaaaagatatgaaacgttagttgacagttaagctctagagtaattgactcatattatatgaaacaaactagcatttggaggtcatcttcctatggtacccaccacaataaagatcacgatgttcatatgagaagaagtgttcatttacagcaactcattggtgtttaagttcaagtatcacaaaaccttaatgaggtatatatctgcttctgtttggtgggttctccgaagtccaaacagaaagggaaccatatcacatggacgtggccatcctgcgtgctcagatagcgcgccatctgacaactagcagattggccggcccatccttccagagttccaggttaccttctaaggg

SEQ ID NO: 69506 - DNA, 1126 bp, Zea Mays
tgttctttttattatatttcagtatttcatttatttttattctctcctgtgtgtcaacaacaaaaccaaacatataaaattcggtacaggaatacattctcatgaaagagactacagggcaacagtaaaccttactagatcaaggagtacgaaaaacaatcaagtttacataatgaaacattgtagtctaggaaactggagagtgtaatctcgaccctcacttctcttggtgtgatgccggtcaccatggcgtcggggatccctgtggtgcgagtgagagttgcctagtccctgtaatctcgactctcgcttctcttggtgcgatgccggtcaccatggcgtcggcgatccctgtggtgagagtgtctgctctcatatgtatcctccctgtgatgccgatggtgatggtaccaatcagggctgcgaccaagttcgtctgaagttctttccctttcatagctactgtcttcctctagtggagatacgcctggctcttggcttcgtctgcgcttgcgatgatccctgtggcgtgagtgtctgctctcatatgtaccatccctttgatgccagtggtgatggtaccgatcagggctgcgaccaggttcgtctgaagttctctccctttcatggctacagtcttcctctggtggagatacttcgcccggttcttggcttcgtctacgcttgcgatgatccctgtggcgcaagtgtctgctctcatatgtatcatccctgtgatgccagtggtgatggtaccgatcagggctgcgatcaggttcttctaaagttctctgcctttcatagctaccgtcttcctctgctggaggagatacttcgcccggatcttggcttcgtctgtgcttgcgatgacctttgtcatgttccttggacttcctctgactgctgtacctgttgtcctccttggtactaaccccggctctgtccttggatcttctcccaggaggtgaatcttcaatgtcaatattgctgctcttccgccttggtggtggtggaacctgtggtggtaggggtaatcaatgttatttcagttatgtcagtaagcagagataaaatagtcaatcccttccgcctaaaacatggtaggagttggaacagcagatcaagc

SEQ ID NO: 69507 - DNA, 2531 bp, Zea Mays
ggaagttattttgccggcactatatcagcttattgtagcagtacatttggaccgaggagaatatttggcggcatttttactggtttccgagcgatcggcacagaacacgccacggcactgacggccagccacagccagccaacaataggaacctgtcgggacgttccccgatcggcgatcgcgcgcgcgcatcgcaagcaccgaaattagaccgaggaagagggtaaggaaaggtcgaggcacgagggggctagcggcggagatagcgagcacccggcgtcgggcgacggtggcgccatgggtggctgccactccgccatcgcggccaccaagctgaagattctgcgccgcggaggccggggtgccgctgccgtcctccccgtcaccaaccacgacggcccgtgctgctcctccgaccacggcagcaaggagaagaagaagaaaaagaagggcgccaggaagggcaggaaacgcgcctccatcctgggcgacgccggcaccttcgacccggacttctcgcggcggtaccggctcggcgcggagctcgggcgcggcgagttcggcgtcacgcggcggtgcgaggacgccgccacgggggaggccctggcgtgcaagacgatccggcggaagcggctgctcctgcgcctcgccgggcccgacgcgaccgacgtgcagcgcgaggtggagatcacgcggcgcatgtcggaggtgagcgggggcagggtcgcgtgcctgcgcgaggcgtgcgaggacgacgacggtgtgcacctcgtcatggagctctgcgagggcggcgagctcttcgaccgcatcttcgagcggaagcactactccgagcgcgccgccgccaagctcgcccgcaccatcgtcgaggtcgtgcagctgtgccacgagaacggagtgatgcacagggacctgaagccggagaacttcctgttcgtgaacaagtcggaggagtcacctctcaaggccatcgacttcggcctctccgtgttcttcaagcctggagatcggttcaccgaagtggttggcagcgggtgttacatggctccagaggttctcaagagaagctatgggccagagatagacgtgtggagcgctggtgtcatcctgcacatccttctctgcgggttccctccgttttggggaggctccgatgagaaaattgcacagtcgatactccgtggggtaattaacttacagaaggatccatggcccaaggtctcccagagcgcaaaggatcttgtcacgaggatgcttgacccagatccttgtacacggttgacggcaaagcaagtccttgagcacccttggctcaagaatgctgataaggcttcaaatgtgtcactcggagaggttgttcggtcgaggctgaagcagttgtcgtctatgaacaagcttaagaagaaggcacttggagtcgtcgccatgaatttaccgatggaagagattggcaaattcaaagagatgttccatacaatggacaaaaacaaggacggtagtttgtcacttgaagagctgaaggagggtttccggataaacgatcatcctgttccagaggaagagataaagatgttgttacaagcggtgagtgcaaggaccaccatttggtattcttatattatacaaatgtagtactaggatgtctagcatactggcaagtgaactacagtgaatagagtcgaagaggtaaattccatctgcaattgcagcagtattcacaaacctaaaagtgtaatttgcattataaaatcaatgctcgcactacaaagttgcacaaaatcaattatcagtttaacactgcaacgacctaatacaactttcttcgttttgcagggcgatatacatggaactgacacattagattgtgaggaatttgtgacagtcttgcttcacattaaaaagatgagtaatgacgagtatctacctaaagctttcgagttcttcgacaaagacgggaatggttttattgaaatgtccgagttaatggagactctaagtgatggtgaactaaagcctgatgagcaattggttaacgacattattcaagaggttgacaaggataaggatggtcgcatcagttacccagagtttgaattgatgatgaaaagtggatcggactggaggaacgcctctagacgttactcaacagagaatttcagcagcctcagtcaaaaactgtgcaaagatactttatgaaacaagaaagtagtttccaagcagcaattactgactgaagtaccacaccctcaactaaacagcatcagaagacaacgcaaaagcaggattactggatctggtggaaataagggttgaaggagatcacatataccagttgcatgcttgacaaacttcgtcaactagcaagccctctggcattgtcctttgctctggaagtaaaatttactattccaatagaatacatgacttagacatagacagatgtaaaggatgccccagcatccatgcaatccactaaccaaaatttggcattttactactgtcaaatatataaagaaaagaagatgtcc

SEQ ID NO: 69508 - DNA, 2314 bp, Zea Mays
aaaaaagtaaaggatcatccttggagtggaaaggaagttattttgccggcactatatcagcttattgtagcagtacatttggaccgaggagaatatttggcggcatttttactggtttccgagcgatcggcacagaacacgccacggcactgacggccagccacagccagccaacaataggaacctgtcgggacgttccccgatcggcgatcgcgcgcgcgcatcgcaagcaccgaaattagaccgaggaagagggtaaggaaaggtcgaggcacgagggggctagcggcggagatagcgagcacccggcgtcgggcgacggtggcgccatgggtggctgccactccgccatcgcggccaccaagctgaagattctgcgccgcggaggccggggtgccgctgccgtcctccccgtcaccaaccacgacggcccgtgctgctcctccgaccacggcagcaaggagaagaagaagaaaaagaagggcgccaggaagggcaggaaacgcgcctccatcctgggcgacgccggcaccttcgacccggacttctcgcggcggtaccggctcggcgcggagctcgggcgcggcgagttcggcgtcacgcggcggtgcgaggacgccgccacgggggaggccctggcgtgcaagacgatccggcggaagcggctgctcctgcgcctcgccgggcccgacgcgaccgacgtgcagcgcgaggtggagatcacgcggcgcatgtcggaggtgagcgggggcagggtcgcgtgcctgcgcgaggcgtgcgaggacgacgacggtgtgcacctcgtcatggagctctgcgagggcggcgagctcttcgaccgcatcttcgagcggaagcactactccgagcgcgccgccgccaagctcgcccgcaccatcgtcgaggtcgtgcagctgtgccacgagaacggagtgatgcacagggacctgaagccggagaacttcctgttcgtgaacaagtcggaggagtcacctctcaaggccatcgacttcggcctctccgtgttcttcaagcctggagatcggttcaccgaagtggttggcagcgggtgttacatggctccagaggttctcaagagaagctatgggccagagatagacgtgtggagcgctggtgtcatcctgcacatccttctctgcgggttccctccgttttggggaggctccgatgagaaaattgcacagtcgatactccgtggggtaattaacttacagaaggatccatggcccaaggtctcccagagcgcaaaggatcttgtcacgaggatgcttgacccagatccttgtacacggttgacggcaaagcaagtccttgagcacccttggctcaagaatgctgataaggcttcaaatgtgtcactcggagaggttgttcggtcgaggctgaagcagttgtcgtctatgaacaagcttaagaagaaggcacttggagtcgtcgccatgaatttaccgatggaagagattggcaaattcaaagagatgttccatacaatggacaaaaacaaggacggtagtttgtcacttgaagagctgaaggagggtttccggataaacgatcatcctgttccagaggaagagataaagatgttgttacaagcgggcgatatacatggaactgacacattagattgtgaggaatttgtgacagtcttgcttcacattaaaaagatgagtaatgacgagtatctacctaaagctttcgagttcttcgacaaagacgggaatggttttattgaaatgtccgagttaatggagactctaagtgatggtgaactaaagcctgatgagcaattggttaacgacattattcaagaggttgacaaggataaggatggtcgcatcagttacccagagtttgaattgatgatgaaaagtggatcggactggaggaacgcctctagacgttactcaacagagaatttcagcagcctcagtcaaaaactgtgcaaagatactttatgaaacaagaaagtagtttccaagcagcaattactgactgaagtaccacaccctcaactaaacagcatcagaagacaacgcaaaagcaggattactggatctggtggaaataagggttgaaggagatcacatataccagttgcatgcttgacaaacttcgtcaactagcaagccctctggcattgtcctttgctctggaagtaaaatttactattccaatagaatacatgacttagacatagacagatgtaaaggatgccccagcatccatgcaatccactaaccaaaatttggcattttactactgtcaaatatataaagaaaagaagatgtcc

SEQ ID NO: 69509 - DNA, 3431 bp, Zea Mays
agggtagctgagactgaggagatgttttttgctctcttcataccccatcggattggctattaaaagtttaaaacaaaaaaatgacattaaaacatgagcccacttcattttcatccatccatagcacagatatttattgcaccaggggaaaaacttgttagcatttgcaagggcactaaaagtcacacaccagccatcaggcaactgctgtgaaatcagaaacaagggctaggatctctgaagcacacaagaacaatcacgcacaaacaaggtcagcactcgacttgatgcaaaagtataaacagagtacaccacatgaaactcgaacatgattcactcatctcagtacccaccatatataggccaactgggtgcggccgcacccagtcccaaataccaaaagccttatagtatatacatttttaccctatttgcactcccctggcctaaacagcagcacccacagcccggcgcggagagcccacagcagccaacaactccctgcaggaatgaaggaaacagccacaatctcatatgggaaagccggcctgtagtcgcttcttagagtcctcgactcgactcttcaactgcacgctttggtggcttcatctcttctgctcccgcgtcctgctcattgatttgtctctccagttcccctccaccgctctacgcacaagcgaaagctatcaggcattcaggcggccctgctggctggctagcaggtgctgctgctgctgctgagcgcactagagcaagtagcatggcagcaggcggtaatggatcacgatccaaatgtttcttcacaattcgtttgagcctagaaatagagctcaatcctaatccaatccttaaattttatagtgtaaaatttagagcccattaccacccctaggtgaagtccgcccgcctcccaggcctgctcctctgtcatccttcaaaaagtaacttgatcattcttttttcaaattccattagcctaatcgtccaatgattttaatttgtgcttcttgtttgtttgtccagattttaggttacgatttttttgttctttctgtgatatctattaaatatttttatgggtgctaggaaatggaaagattttataaaagaaaagcaccagacagtggtagtgcaaggaattcatgtcatccagatgctactaattgggaagaggagatcaaatatgacccaaccttaagaaaggaaattgattcttaatttcttaccatcctaatcctaatttgagggtgagaaggaaatatttggagaatgggccatgccaactgcgcacttgcaattttccctctacacagattgggggaaaaggcaatccaagaaggtttcaacaagaatggttcgatgattttggaagttggcttgaatatagtgaatcaaaagatagagcatatttttttgttatttcttgttcagagaaaagaaggatacatgatataaggatttcgttgttgagtgctggaatggttatcacagaaaagagcggctaaagatacatgttggcaatgttggtggatcacactttattcctataaagaagtctgatgatttgttatagagatatcagcacattgatgttattttacataagaaaagtgaaacatctaaaagggcttattttactagattgaatggatccattaatactgctaggctactattcgagcaaggcttgccttttcatggccatgatgagtcgaaggagtctttgaacaaatggaattttttggaggtttttgattgattagcagagcatgattcaaatttgggaaaggcagtgggtcttgcaggtaacagttgtatggtggctcatgaaactcagaccaacattatagactgttttgcaaatgaaattctacaatttattcttgaagaacttggggacgatgtcttttgcttgcttagttgatgagtcaagggatgtttcttgtaaagatcaaatggccatggtcttgaggtatattgaaaaatgtagaatggcgaaagagagattacataaatacttgcggaatttaagctgggcttaaaacaagttagaggccaaggatatgatggtgctagcaacatgcgaggtgagtttagttctggagatttgagaaatcttagccaaggatatgatggtgctagcaacattgctgatgtgagagaaggcaatcaattctccaacataaatactatcagtgagctttcacaaagaatggtggagacaagtaaccattggtttatcgattttagaaacttgtgctgctattgtaaattgatactgcaacagtggatagaatatttgaggggatgaagatcgtaaaaacaactcttaatgaccgcatgggtgatccacacttgagtaatagacttatttgctatgtggagaaagaagaattttaaaaaataccaatgatgctgtggttcatcgcttcatgaacatggaaagaaaagggcgtagatttgatctgtaagaggtaatgcacctcttttcaatttttcaacgatacattatataaattgtttgctcacaattaatggtttattttttttcagtgaggattttgtggttaaggaatgcattttgccgacaacgacaatcttctgttgttataattgtgggattcttttactgtgatttgataaattgcaagcacaaatatactattaccactacttcattgttgatgtacatcaatattgcttgttttaagctattcatgctaaaattatggctatggtgctattaagttgcattagtgttctgtctttagacagcaagccacacccccaccataattctctagctccactcctaggataaaaaacaagacggcaactggaaaacacctacaaaacacaacaccaacattacaagcaccatcctgatttgctcaccacactacctacggtagggtataattgaggaagggaagtggaataacataggacagtaggacacgaacacatcgcaatcccagcgaatgtaaatcgtcataattgtaagagatcttacatgttgcatggtccaaaccggaaagagctagaccttctccttatgccaacactaacaaatcgcccgaggttttgcaatggaactcgggagagagcgagagagagggcgcggggtaaaaaaaaccagatttaagcaagcagagaagccgccacaggaccaaccaagctcgcataagcaacagcgcgagcgcgggtaccgcggcgccatcctgccctccgccgagaggggtgaagggaagtggacgccgggagtgccgaggcgtcaaatccaaatgggaggacatgcgagaaagcgaatagacgggggttgggcaccgggatactcacggtggaggcggacgtggacgacgtgcggcgagtggcgccgaggtcctaggcagggtttggaattcgtcggtggattgggacttggagaatag

SEQ ID NO: 69510 - DNA, 1247 bp, Zea Mays
tcggtctaaatcgatctggcacattgttagtactcctgctacgtactatgtttctagtagcccacaagatctagcccagtccaaacctttcgatccgtggtgtgttggatctgaacccaagctccgagtcgctttcggggtgggcattctcctcttcgtcttcggttgcaagaaagaaaaaggtcacccctctaacaccacgccgccgccgtttgctgctcggcgcctctcctcacaacccgcgggagccaggcggcggcaggaggaggcgcgacgcagcggacgcagtatccgtatgtgactggtaattcagtcattgccttgaaatacaaggatggtgtgatcatggcatgtgacactggagcctcttatggatcaactttgagatacaagagtgtggaacgcattaaggcagttggcaagcatagcatcattggagcaagcggagagttcagtgacttccaggagattttgcgctatttggatgaactaactctgtctgatcatatgtgggatgatggaaactcgctgggccccaaagagatccacagctatttgacaagagtgatgtacaaccggcgcaacaagtttgatcctctctggaactcacttgtacttggtggggtgaaaaagggtccaaagggtgatgagaagtatcttgggatggttaacatgattggtacccacttcgaggaaaaccatgtcgctactggatttggaaatcatatggcaatcccgatactccgtgctgaatggcgcgatgatatgacttttgaagaagctgttaagctggttgagaagtgcttggtggtcttgctgtaccgagacagatcatctatcaacaaattccagattgccaagatcacaagtgaaggatcaaccatctacccaccatattccttgaagacctactggggcttcactcacttcgaaaacccagcccagggcgctgtgggatcatggtagatttatgctctgcatgccgcgtatcatgccatgaacttaggggagagcaatctgtgctgctgaaatcaaaacccttgtgaacgtttgttctgaacataactggaactctgcatttgcttgtatgacatgcgtatggttcaggaagtttaattccaatatttggtcactaaaaatggattgtgcggttgtgttctcagatgccgtttttgtgttgattgtgctatgtggagaacttggaatgctaactctgttttttttttactgtgtcattcttttgcttt

SEQ ID NO: 69511 - DNA, 1099 bp, Zea Mays
tcggtctaaatcgatctggcacattgttagtactcctgctacgtactatgtttctagtagcccacaagatctagcccagtccaaacctttcgatccgtggtgtgttggatctgaacccaagctccgagtcgctttcggggtatccgtatgtgactggtaattcagtcattgccttgaaatacaaggatggtgtgatcatggcatgtgacactggagcctcttatggatcaactttgagatacaagagtgtggaacgcattaaggcagttggcaagcatagcatcattggagcaagcggagagttcagtgacttccaggagattttgcgctatttggatgaactaactctgtctgatcatatgtgggatgatggaaactcgctgggccccaaagagatccacagctatttgacaagagtgatgtacaaccggcgcaacaagtttgatcctctctggaactcacttgtacttggtggggtgaaaaagggtccaaagggtgatgagaagtatcttgggatggttaacatgattggtacccacttcgaggaaaaccatgtcgctactggatttggaaatcatatggcaatcccgatactccgtgctgaatggcgcgatgatatgacttttgaagaagctgttaagctggttgagaagtgcttggtggtcttgctgtaccgagacagatcatctatcaacaaattccagattgccaagatcacaagtgaaggatcaaccatctacccaccatattccttgaagacctactggggcttcactcacttcgaaaacccagcccagggcgctgtgggatcatggtagatttatgctctgcatgccgcgtatcatgccatgaacttaggggagagcaatctgtgctgctgaaatcaaaacccttgtgaacgtttgttctgaacataactggaactctgcatttgcttgtatgacatgcgtatggttcaggaagtttaattccaatatttggtcactaaaaatggattgtgcggttgtgttctcagatgccgtttttgtgttgattgtgctatgtggagaacttggaatgctaactctgttttttttttactgtgtcattcttttgcttt

SEQ ID NO: 69512 - DNA, 2318 bp, Zea Mays
cgactgagggaatcgctcaccttgaggttggggctgacgagggccatgaccgcagttctagcaagggatggataactccattgcagcattgctccgcctcctcggaggtcgtaggctcgcagcagcagttgaagccgcaattccccgctcccctgtccccattcacagctgaggagatcggacggttagcttgaggttttctcgttctttgatccatctcagccgttgatttccatataggacgggggaaatgcctccgtgatcggtttaagttctttcgctgcggagatggcagcggcggcggggccgtacaaagagatgctggaagtggtgaacgcgtgcgcggcccggatccggtggcgccttcgtccagcttccaagcgccgcctcctcaacgatatcctgtttctctgcactgggttgcggcctgtggtactggtcgactatggtggcacaatgcctcagctacaagaaaatctttgtggcctgctatatcatgcccggcaggaaacaagcatattgaatccactccgcgtgatgattattggagatatgctttacttgatccatgttaaaggacttgcggaacatgcatcaccaaacgcaaggtcgcagcaagggctagctttcgtggacctagagaaaagatgttgcaatctgcttacaaccatagaagagaatgacactgtgctggagcttgtatccatacaagatcaattcacagccaaatttcctctagatctgtctgatgttcgacctggaataacaaagcaaatgtcaggaaatccacagagtactgttgttgcagagtgcactgacaatcacgttgaggacaggaccctattggtcgttgatctgagtagcttcctcgagaacacccagattgccttgccttctctgaatgggtggcttttaggttatccggtaacatatttgttccgcaatgcaagttctgaggcagcgatacagaacctctcaaggcagtctctgcatatctaccgagtatatgtgtgcggaagttatcggtcagctggcgaacgaagagaagaggaactgatgagtttttcagttccatgtggcgcgagcacgaagcgtgatgaagaagtatgggctagatcgttcatagctcgcatgaatgagaagctcaggcgatgcagccaagtctgggcatccataaggctagaagtcgaggttttccagagccagtcgcaggtcattgtgttgtagttgagatcagtatggctgttattacgggctgatggcataaactccttatacaaagcgacgtgtctcagaagtatcactgccctgggccaaataaacgagttggatacaagtcatgcatgcagaggccggaggtatccgtatgtgactggtaattcagtcattgccttgaaatacaaggatggtgtgatcatggcatgtgacactggagcctcttatggatcaactttgagatacaagagtgtggaacgcattaaggcagttggcaagcatagcatcattggagcaagcggagagttcagtgacttccaggagattttgcgctatttggatgaactaactctgtctgatcatatgtgggatgatggaaactcgctgggccccaaagagatccacagctatttgacaagagtgatgtacaaccggcgcaacaagtttgatcctctctggaactcacttgtacttggtggggtgaaaaagggtccaaagggtgatgagaagtatcttgggatggttaacatgattggtacccacttcgaggaaaaccatgtcgctactggatttggaaatcatatggcaatcccgatactccgtgctgaatggcgcgatgatatgacttttgaagaagctgttaagctggttgagaagtgcttggtggtcttgctgtaccgagacagatcatctatcaacaaattccagattgccaagatcacaagtgaaggatcaaccatctacccaccatattccttgaagacctactggggcttcactcacttcgaaaacccagcccagggcgctgtgggatcatggtagatttatgctctgcatgccgcgtatcatgccatgaacttaggggagagcaatctgtgctgctgaaatcaaaacccttgtgaacgtttgttctgaacataactggaactctgcatttgcttgtatgacatgcgtatggttcaggaagtttaattccaatatttggtcactaaaaatggattgtgcggttgtgttctcagatgccgtttttgtgttgattgtgctatgtggagaacttggaatgctaactctgttttttttttactgtgtcattcttttgcttt

SEQ ID NO: 69513 - DNA, 1748 bp, Zea Mays
ctgcttgttcgtagatgtgcatgcttgtccctcttgcactgcttgtctgttacctgcagcaatctttgccaaacggacacagggaacctatgcccccacaggattgcacaacacgtgggataggtaatgcaggtattgcccccgctggctgtggctggccggtgtgcaattcactaggctgccaaatgagccctaaaggccccagcatgggcgaccctctccagagtgattcttatcaatcttgcattggaaaaacacggagcctattattatcagggaagcatttgagccaaagtactatgtacatcaccatgcttttatgtgactatatatataaatataacaaataaagttttattggaccagttctttgaccatgccattggtatcaacgttccaaggtcccgcttcctaccagttaaggcgacatcagatttgaagctagtacagtctgatctatataccttggttgatggcttcgttacacgtaattcagccagaacaaatccatcaaatccctcaattgaacttggtcctgagttcaagaaggttgggagcttccttggtcgcttcaagtccatacctagcattgttgagcttgacatcttgaaggtttccggtgatgtttggttcggttctggaattgtactgaaggggaaagtgaccatcactgcaaaacctggcgtcaagctagaaatcctagacggagcagtgattgggaataaggataattttggaaaaggaaagagaaaacaataccagatgccttacaacctgaattagggatgaaactgctaattgcacatggaagtcaccaagaacttggtaaaggtgattcaatgacaaatctaatgattaacatgttcacatgttaatgcatgcaactgaagtgcattaccaatgtcccaagaggagcaatcacacaaacactcgatttcacacatcgaggagccaaacactaataattcagaaggatccctggctggtgctgctgtctgggatgtatttcgcaggcaggatcttccaaagcttaatgaatatctagctgttcatcgggaagaatgtgcagctagatgtcaagcagtgtcttctgttaaatatcctatttatgatcaaacagtgtaccttaacgattatcataagaagatgttgaaggatcaatatgagggactgaagacaatcgagcagattacaatggactcagcttcggtcgagaccaatatgttcaagctctgcaaggtgaggtttgttcagtttggccaaaaaggcatcccctacctgaacacctacgatggtcgcgccatccgctacctcgacccgctcatcaaggccaacgacaccatcaaaatcgatctggagaccaacaagatcatggacttcatcaagtttgacgtcgacaacatggtcatggtgactggcgggaggaacaccgagcgtgtaggagtcatcaagaacagggagaagcacaagggcagcttttgctgcttggagctttttgctatgtctagttttctcctatttgttgtacaggaaaacttagaatagaattcaaatttggtggtcacaaaagtgtggagactttaattcatatataaagttaggcttaacattagtgcaaacagttgtattttagtttagatttagagtacacttatgtatgcgttgtttgacaatgcttatttatgatatattgaatggtacttatttatattatattaattataatgttgttcaatatatgtgtatat

SEQ ID NO: 69514 - DNA, 1706 bp, Zea Mays
ctgcttgttcgtagatgtgcatgcttgtccctcttgcactgcttgtctgttacctgcagcaatctttgccaaacggacacagggaacctatgcccccacaggattgcacaacacgtgggataggtaatgcaggtattgcccccgctggctgtggctggccggtgtgcaattcactaggctgccaaatgagccctaaaggccccagcatgggcgaccctctccagagtgattcttatcaatcttgcattggaaaaacacggagcctattattatcagggaagcatttgagccaaagtactatgtacatcaccatgcttttatgtgactatatatataaatataacaaataaagttttattggaccagttctttgaccatgccattggtatcaacgttccaaggtcccgcttcctaccagttaaggcgacatcagatttgaagctagtacagtctgatctatataccttggttgatggcttcgttacacgtaattcagccagaacaaatccatcaaatccctcaattgaacttggtcctgagttcaagaaggttgggagcttccttggtcgcttcaagtccatacctagcattgttgagcttgacatcttgaaggtttccggtgatgtttggttcggttctggaattgtactgaaggggaaagtgaccatcactgcaaaacctggcgtcaagctagaaatcctagacggagcagtgattgggaataaggttcacatgttaatgcatgcaactgaagtgcattaccaatgtcccaagagggtaagggtacagtctgatgtatctgaaaggattgctaatggaactagtgttcatgtaaatactcatgttcaaaatttgaatctggatattgaagagcaatcacacaaacactcgatttcacacatcgaggagccaaacactaataattcagaaggatccctggctggtgctgctgtctgggatgtatttcgcaggcaggatcttccaaagcttaatgaatatctagctgttcatcgggaagaatgtgcagctagatgtcaagcagtgtcttctgttaaatatcctatttatgatcaaacagtgtaccttaacgattatcataagaagatgttgaaggatcaatatgagggactgaagacaatcgagcagattacaatggactcagcttcggtcgagaccaatatgttcaagctctgcaaggtgaggtttgttcagtttggccaaaaaggcatcccctacctgaacacctacgatggtcgcgccatccgctacctcgacccgctcatcaaggccaacgacaccatcaaaatcgatctggagaccaacaagatcatggacttcatcaagtttgacgtcgacaacatggtcatggtgactggcgggaggaacaccgagcgtgtaggagtcatcaagaacagggagaagcacaagggcagcttttgctgcttggagctttttgctatgtctagttttctcctatttgttgtacaggaaaacttagaatagaattcaaatttggtggtcacaaaagtgtggagactttaattcatatataaagttaggcttaacattagtgcaaacagttgtattttagtttagatttagagtacacttatgtatgcgttgtttgacaatgcttatttatgatatattgaatggtacttatttatattatattaattataatgttgttcaatatatgtgtatat

SEQ ID NO: 69515 - DNA, 1487 bp, Zea Mays
ctgcttgttcgtagatgtgcatgcttgtccctcttgcactgcttgtctgttacctgcagcaatctttgccaaacggacacagggaacctatgcccccacaggattgcacaacacgtgggataggtaatgcaggtattgcccccgctggctgtggctggccggtgtgcaattcactaggctgccaaatgagccctaaaggccccagcatgggcgaccctctccagagtgattcttatcaatcttgcattggaaaaacacggagcctattattatcagggaagcatttgagccaaagtactatgtacatcaccatgcttttatgtgactatatatataaatataacaaataaagttttattggaccagttctttgaccatgccattggtatcaacgttccaaggtcccgcttcctaccagttaaggcgacatcagatttgaagctagtacagtctgatctatataccttggttgatggcttcgttacacgtaattcagccagaacaaatccatcaaatccctcaattgaacttggtcctgagttcaagaaggttgggagcttccttggtcgcttcaagtccatacctagcattgttgagcttgacatcttgaaggtttccggtgatgtttggttcggttctggaattgtactgaaggggaaagtgaccatcactgcaaaacctggcgtcaagctagaaatcctagacggagcagtgattgggaataaggttcacatgttaatgcatgcaactgaagtgcattaccaatgtcccaagagggtaagggtacagtctgatgtatctgaaaggattgctaatggaactagtgttcatgttaaatatcctatttatgatcaaacagtgtaccttaacgattatcataagaagatgttgaaggatcaatatgagggactgaagacaatcgagcagattacaatggactcagcttcggtcgagaccaatatgttcaagctctgcaaggtgaggtttgttcagtttggccaaaaaggcatcccctacctgaacacctacgatggtcgcgccatccgctacctcgacccgctcatcaaggccaacgacaccatcaaaatcgatctggagaccaacaagatcatggacttcatcaagtttgacgtcgacaacatggtcatggtgactggcgggaggaacaccgagcgtgtaggagtcatcaagaacagggagaagcacaagggcagcttttgctgcttggagctttttgctatgtctagttttctcctatttgttgtacaggaaaacttagaatagaattcaaatttggtggtcacaaaagtgtggagactttaattcatatataaagttaggcttaacattagtgcaaacagttgtattttagtttagatttagagtacacttatgtatgcgttgtttgacaatgcttatttatgatatattgaatggtacttatttatattatattaattataatgttgttcaatatatgtgtatat

SEQ ID NO: 69516 - DNA, 6259 bp, Zea Mays
ctggtgcacagcacttggtccgaaaggatacgaacgattggaaaaatatctcctgttgagcggcgacccatgataaggatgagaggatctttccttctccatttcttttcactaattcacttttaaattcccaaaataaaaagttgaacactttttaatgtccaaattccactacgtgaagaatgaaagatcctcgacgctagtttccccaatacagaaataagttccagttaactgaaactatgttcagcacaccacttacctgacagagcgttttaaaacatgaatttctcccaattctaagcaagcaaatagaaatcatgcttagtaaaagttgttctcctatattaggtcttcacgtttgctataagaatcgtagacccaacctccctagattaagcactagaaagctccaaagttgagcaacactcactaaaaattcagtttcagttaactgcactaagtctgaaatccaaagtttgacagcatgttttagacaccattttctcccagttctagcctagttcagggggatccatcttaatgcaaattactcaccacactaccctctaacacttttctatagagagtgcaggccataacatcatttatcagtcacaacagagctctgtagtttgataaacaatgctgaaactgcactttaacttcctgaacaaatttcagaacaacataatctgacagcaaggttttgagcccccttttctctcaattccatatagttctttggttagatcacttaatagaacttgccctcctatgacagctatacaacttcgtcatggtgatcataatctataactctatggaaaggacaaccgatagctccaaacttggcactttttactgaaattcagatgactgaaccaaattcagaccacaacccacctgacagctgatcttcgaaccatattttatcccaattctgagcaacaacagaccatgctttcttaaggaaacttacttactattacttggtatctaactttgctataaagaatatggctcgcaattctatagatgatgcacaaaagagctcacaagttgtaccaaaacacacaatttcgggttctggtttttttactaagtctgaacgggaaacagattaattacgactactcaatatcggctctaactatctcgatccgatttaattttgcatcaatattgttgtcgtcgagttctaataaatcttgtttcggacaaaaatcatcaaggtgagtcgggcttccgaattcgtattcgcgcgagcgatgaattttaaataatcaccggacgcaccgattttcggaacaacgatgttccgaacatcacgaaaatttcggaagaggccgggcagataaaaataaaaactacgtcgcactcgcgacagacgaaacagatgcgatattaaaatcacgatagacgaagatgtttaaaatttagcatccgttttatccactgatattacatgcttaaattcatactcgttgtcgagcggaatataaacacctggggtgttacagccctccccccttaaaagaatctcgtcccgagattcggagcgaaagacttctaagggtagagaagtatgtaacccttgttcatatcagcgataattataaggcagttccaagcaaggacgagtgtctcagaatgttgtttctctagtggacatatcatgtatcgccttaagccaatttagaaatgtccaccaatagagacgctatctgccagaagaacacataaggttccatgtgtgcagtttgctttttttatgacactgtactatctgagtctgttgagcgagcggcaaatacacgattttacccaaacagaatcagatacaccatcttgggtaaaacacacagaaagaggtttaccaacaagtggttatagtaagctcatagcacacgtgacgggtgtgaatgtcgaataacatcacagttaactcgtgttagccagagaatccaagtccctgaaaggtgatatagattcgagaacatcaccagcaaagggatctgtagatacggactttacaactagtcccttttatcaagcactaggcatgactcgaccaggtcatacatgctagaaaagcacacgtgaggcgatcgagacacgactagagcgatggctaggtggttattggccgccttaatctcgattcttataagtactttcttaagagggtttgaaccaaagtgagttcaggcaaatcgataaaaacgatctctaaactcaaccttcgttcattgagcagttacaagttagtaaaaccaacttgttgaactacttttgacattgggcatgtcctctcagtaccatcggtaagccaacggtcgagagttcactcatactaacagttggtcatgcatttgggtagaaatccatttggtcatgttgttcatccgtttcttcatgcgagacgcattatccacttggttagggaatacatggattaaataagagagcgaatgaacaaactcctgcatctcagtagcaggggaaacagatctccattttgagagctaatcggttgtctctcgacactaaaaagctccaaggcttcacctttacacaaaggatgtaaagggaacttgtatgagtagtcactaccaagatcaaaagaaataagagaccacccgtgaaagtggtatgcccttttgatccaacaaaaatgatagatgttgcttgatcacttgtcaaacaacatagacttgtttcaaggaaaggtccacggaagataacatatcgatatagtctcataatggattatgactactaacggtgataccagcgcgtgccatcggttttagtcataacaccattaccagacgtaaccaataagaaatctcgcgcgacaccaatggattgggcaagggtgacaatatacaagagactctacctgtcaaaacagttacaagcagagagtcaaatagatcatggcccgatgaaatgaacaagacatggccaaaacctaaattggtttatgaagggagtacgatgggagactgttaattcagccccaagcatatttctatgcccatcgcagagatcacaagaccaaggattagtatctgacactactagagatatgcttatttaagacacacattttaagacgaatattagtgtattttataaaagcgtcttttatcatatggtgatgcgtaaagtaagacagtttgttagagatttgtctttaataaagaagtgttttgagacagttacatcgtaaaaaatgtcttatattgatttaagacggattgttattgaaaaccgcctaaaataaatataccttttgagtcattaaaattgcaagaattgtcttagattttggttagtatattagacacgtctatatatgaaaccatctcaaataaagatagtattagagtcatgtagactataaggactgtcttaaatgttagtaagtatactagacacttctaaatatgaaaccttatttgtatgatatttgtaataagacgtattatgaaaaaaaaacgtagtgaatagtgaatttggcttagtttgattatatatgatataaaatgtaaaacttatttctgcaacttgatatagatagtaaaatagacccacatgcgacccgatcattaatgtgtcacacaagagacataagtcatcattttcctttaattcctatcatttacgtaccaaggggtttaggaagatatatccatctatgatgaatatatcaatacttttacatttacattgtcaaactccaaaaacccgaccactttagctttcattgtgtttctgtcgtgccgcgtgctcaagcatgcagatatgtggatgtactctgacttcagacctgaacaaaattatcaaaattatgggcgacttcagactaaaaaaattatcaaactgaggggatgtttggttccacccaaataaaatttagtcactaccatatcaaatatttgaatgataattacgggtattaaatgtagcctaattagaaaactaatttaacaaatcttttatatatcttatactatattaaaacactagttttaacgatcatcttgggtcatcttttttaaactgtcattatactttcttttaatttaatccatcctacctaccctgatgctaaacctaatgagtcgccgacagtagcctaaaattgggttggtttctcctacacttccatgttcgacacgagcggcgagccaacttccctctcattcgtcttccacaaaccctataaccctagcaccgccgccaccatgtcctcgtctccatcttcagtgaaccgccgtcccccgggcccgctagcgttggggctggagtccttggcgaagaagaatacacataggaagaagctcaccgtcaaacctcatccagatccagtcgttgccctccaatggtcggatatggaacgtctcgtctcttcctttggattcagcagccggtgctcctcctctggatctggtggtcaactccatcacccgcagcttctatggcacctcccctagtccccctccatcgtcgccttcacccaccgcttctatatcgccacctctctcattgtagaagaagacactgaggatctgggaacctatgcccccacaggattgcacaacacgtgggataggtaatgcaggtattgcccccgctggctgtggctggccggtgtgcaattcactaggctgccaaatgagccctaaaggccccagcatgggcgaccctctccagagtgattcttatcaatcttgcattggaaaaacacggagcctattattatcagggaagcatttgagccaaagtactatgtacatcaccatgcttttatgtgactatatatataaatataacaaataaagttttattggaccagttctttgaccatgccattggtatcaacgttccaaggtcccgcttcctaccagttaaggcgacatcagatttgaagctagtacagtctgatctatataccttggttgatggcttcgttacacgtaattcagccagaacaaatccatcaaatccctcaattgaacttggtcctgagttcaagaaggttgggagcttccttggtcgcttcaagtccatacctagcattgttgagcttgacatcttgaaggtttccggtgatgtttggttcggttctggaattgtactgaaggggaaagtgaccatcactgcaaaacctggcgtcaagctagaaatcctagacggagcagtgattgggaataaggataattttggaaaaggaaagagaaaacaataccagatgccttacaacctgaattagggatgaaactgctaattgcacatggaagtcaccaagaacttggtaaaggtgattcaatgacaaatctaatgattaacatgtgcgatgtggttcacatgttaatgcatgcaactgaagtgcattaccaatgtcccaagaggagcaatcacacaaacactcgatttcacacatcgaggagccaaacactaataattcagaaggatccctggctggtgctgctgtctgggatgtatttcgcaggcaggatcttccaaagcttaatgaatatctagctgttcatcgggaagaatgtgcagctagatgtcaagcagtgtcttctgttaaatatcctatttatgatcaaacagtgtaccttaacgattatcataagaagatgttgaaggatcaatatgagggactgaagacaatcgagcagattacaatggactcagcttcggtcgagaccaatatgttcaagctctgcaaggtgaggtttgttcagtttggccaaaaaggcatcccctacctgaacacctacgatggtcgcgccatccgctacctcgacccgctcatcaaggccaacgacaccatcaaaatcgatctggagaccaacaagatcatggacttcatcaagtttgacgtcgacaacatggtcatggtgactggcgggaggaacaccgagcgtgtaggagtcatcaagaacagggagaagcacaagggcagcttttgctgcttggagctttttgctatgtctagttttctcctatttgttgtacaggaaaacttagaatagaattcaaatttggtggtcacaaaagtgtggagactttaattcatatataaagttaggcttaacattagtgcaaacagttgtattttagtttagatttagagtacacttatgtatgcgttgtttgacaatgcttatttatgatatattgaatggtacttatttatattatattaattataatgttgttcaatatatgtgtatat

SEQ ID NO: 69517 - DNA, 6327 bp, Zea Mays
ctggtgcacagcacttggtccgaaaggatacgaacgattggaaaaatatctcctgttgagcggcgacccatgataaggatgagaggatctttccttctccatttcttttcactaattcacttttaaattcccaaaataaaaagttgaacactttttaatgtccaaattccactacgtgaagaatgaaagatcctcgacgctagtttccccaatacagaaataagttccagttaactgaaactatgttcagcacaccacttacctgacagagcgttttaaaacatgaatttctcccaattctaagcaagcaaatagaaatcatgcttagtaaaagttgttctcctatattaggtcttcacgtttgctataagaatcgtagacccaacctccctagattaagcactagaaagctccaaagttgagcaacactcactaaaaattcagtttcagttaactgcactaagtctgaaatccaaagtttgacagcatgttttagacaccattttctcccagttctagcctagttcagggggatccatcttaatgcaaattactcaccacactaccctctaacacttttctatagagagtgcaggccataacatcatttatcagtcacaacagagctctgtagtttgataaacaatgctgaaactgcactttaacttcctgaacaaatttcagaacaacataatctgacagcaaggttttgagcccccttttctctcaattccatatagttctttggttagatcacttaatagaacttgccctcctatgacagctatacaacttcgtcatggtgatcataatctataactctatggaaaggacaaccgatagctccaaacttggcactttttactgaaattcagatgactgaaccaaattcagaccacaacccacctgacagctgatcttcgaaccatattttatcccaattctgagcaacaacagaccatgctttcttaaggaaacttacttactattacttggtatctaactttgctataaagaatatggctcgcaattctatagatgatgcacaaaagagctcacaagttgtaccaaaacacacaatttcgggttctggtttttttactaagtctgaacgggaaacagattaattacgactactcaatatcggctctaactatctcgatccgatttaattttgcatcaatattgttgtcgtcgagttctaataaatcttgtttcggacaaaaatcatcaaggtgagtcgggcttccgaattcgtattcgcgcgagcgatgaattttaaataatcaccggacgcaccgattttcggaacaacgatgttccgaacatcacgaaaatttcggaagaggccgggcagataaaaataaaaactacgtcgcactcgcgacagacgaaacagatgcgatattaaaatcacgatagacgaagatgtttaaaatttagcatccgttttatccactgatattacatgcttaaattcatactcgttgtcgagcggaatataaacacctggggtgttacagccctccccccttaaaagaatctcgtcccgagattcggagcgaaagacttctaagggtagagaagtatgtaacccttgttcatatcagcgataattataaggcagttccaagcaaggacgagtgtctcagaatgttgtttctctagtggacatatcatgtatcgccttaagccaatttagaaatgtccaccaatagagacgctatctgccagaagaacacataaggttccatgtgtgcagtttgctttttttatgacactgtactatctgagtctgttgagcgagcggcaaatacacgattttacccaaacagaatcagatacaccatcttgggtaaaacacacagaaagaggtttaccaacaagtggttatagtaagctcatagcacacgtgacgggtgtgaatgtcgaataacatcacagttaactcgtgttagccagagaatccaagtccctgaaaggtgatatagattcgagaacatcaccagcaaagggatctgtagatacggactttacaactagtcccttttatcaagcactaggcatgactcgaccaggtcatacatgctagaaaagcacacgtgaggcgatcgagacacgactagagcgatggctaggtggttattggccgccttaatctcgattcttataagtactttcttaagagggtttgaaccaaagtgagttcaggcaaatcgataaaaacgatctctaaactcaaccttcgttcattgagcagttacaagttagtaaaaccaacttgttgaactacttttgacattgggcatgtcctctcagtaccatcggtaagccaacggtcgagagttcactcatactaacagttggtcatgcatttgggtagaaatccatttggtcatgttgttcatccgtttcttcatgcgagacgcattatccacttggttagggaatacatggattaaataagagagcgaatgaacaaactcctgcatctcagtagcaggggaaacagatctccattttgagagctaatcggttgtctctcgacactaaaaagctccaaggcttcacctttacacaaaggatgtaaagggaacttgtatgagtagtcactaccaagatcaaaagaaataagagaccacccgtgaaagtggtatgcccttttgatccaacaaaaatgatagatgttgcttgatcacttgtcaaacaacatagacttgtttcaaggaaaggtccacggaagataacatatcgatatagtctcataatggattatgactactaacggtgataccagcgcgtgccatcggttttagtcataacaccattaccagacgtaaccaataagaaatctcgcgcgacaccaatggattgggcaagggtgacaatatacaagagactctacctgtcaaaacagttacaagcagagagtcaaatagatcatggcccgatgaaatgaacaagacatggccaaaacctaaattggtttatgaagggagtacgatgggagactgttaattcagccccaagcatatttctatgcccatcgcagagatcacaagaccaaggattagtatctgacactactagagatatgcttatttaagacacacattttaagacgaatattagtgtattttataaaagcgtcttttatcatatggtgatgcgtaaagtaagacagtttgttagagatttgtctttaataaagaagtgttttgagacagttacatcgtaaaaaatgtcttatattgatttaagacggattgttattgaaaaccgcctaaaataaatataccttttgagtcattaaaattgcaagaattgtcttagattttggttagtatattagacacgtctatatatgaaaccatctcaaataaagatagtattagagtcatgtagactataaggactgtcttaaatgttagtaagtatactagacacttctaaatatgaaaccttatttgtatgatatttgtaataagacgtattatgaaaaaaaaacgtagtgaatagtgaatttggcttagtttgattatatatgatataaaatgtaaaacttatttctgcaacttgatatagatagtaaaatagacccacatgcgacccgatcattaatgtgtcacacaagagacataagtcatcattttcctttaattcctatcatttacgtaccaaggggtttaggaagatatatccatctatgatgaatatatcaatacttttacatttacattgtcaaactccaaaaacccgaccactttagctttcattgtgtttctgtcgtgccgcgtgctcaagcatgcagatatgtggatgtactctgacttcagacctgaacaaaattatcaaaattatgggcgacttcagactaaaaaaattatcaaactgaggggatgtttggttccacccaaataaaatttagtcactaccatatcaaatatttgaatgataattacgggtattaaatgtagcctaattagaaaactaatttaacaaatcttttatatatcttatactatattaaaacactagttttaacgatcatcttgggtcatcttttttaaactgtcattatactttcttttaatttaatccatcctacctaccctgatgctaaacctaatgagtcgccgacagtagcctaaaattgggttggtttctcctacacttccatgttcgacacgagcggcgagccaacttccctctcattcgtcttccacaaaccctataaccctagcaccgccgccaccatgtcctcgtctccatcttcagtgaaccgccgtcccccgggcccgctagcgttggggctggagtccttggcgaagaagaatacacataggaagaagctcaccgtcaaacctcatccagatccagtcgttgccctccaatggtcggatatggaacgtctcgtctcttcctttggattcagcagccggtgctcctcctctggatctggtggtcaactccatcacccgcagcttctatggcacctcccctagtccccctccatcgtcgccttcacccaccgcttctatatcgccacctctctcattgtagaagaagacactgaggatctgatgtgcatgcttgtccctcttgcactgcttgtctgttacctgcagcaatctttgccaaacggacacagggaacctatgcccccacaggattgcacaacacgtgggataggtaatgcaggtattgcccccgctggctgtggctggccggtgtgcaattcactaggctgccaaatgagccctaaaggccccagcatgggcgaccctctccagagtgattcttatcaatcttgcattggaaaaacacggagcctattattatcagggaagcatttgagccaaagtactatgtacatcaccatgcttttatgtgactatatatataaatataacaaataaagttttattggaccagttctttgaccatgccattggtatcaacgttccaaggtcccgcttcctaccagttaaggcgacatcagatttgaagctagtacagtctgatctatataccttggttgatggcttcgttacacgtaattcagccagaacaaatccatcaaatccctcaattgaacttggtcctgagttcaagaaggttgggagcttccttggtcgcttcaagtccatacctagcattgttgagcttgacatcttgaaggtttccggtgatgtttggttcggttctggaattgtactgaaggggaaagtgaccatcactgcaaaacctggcgtcaagctagaaatcctagacggagcagtgattgggaataaggataattttggaaaaggaaagagaaaacaataccagatgccttacaacctgaattagggatgaaactgctaattgcacatggaagtcaccaagaacttggtaaaggtgattcaatgacaaatctaatgattaacatgtgcgatgtggttcacatgttaatgcatgcaactgaagtgcattaccaatgtcccaagaggagcaatcacacaaacactcgatttcacacatcgaggagccaaacactaataattcagaaggatccctggctggtgctgctgtctgggatgtatttcgcaggcaggatcttccaaagcttaatgaatatctagctgttcatcgggaagaatgtgcagctagatgtcaagcagtgtcttctgttaaatatcctatttatgatcaaacagtgtaccttaacgattatcataagaagatgttgaaggatcaatatgagggactgaagacaatcgagcagattacaatggactcagcttcggtcgagaccaatatgttcaagctctgcaaggtgaggtttgttcagtttggccaaaaaggcatcccctacctgaacacctacgatggtcgcgccatccgctacctcgacccgctcatcaaggccaacgacaccatcaaaatcgatctggagaccaacaagatcatggacttcatcaagtttgacgtcgacaacatggtcatggtgactggcgggaggaacaccgagcgtgtaggagtcatcaagaacagggagaagcacaagggcagcttttgctgcttggagctttttgctatgtctagttttctcctatttgttgtacaggaaaacttagaatagaattcaaatttggtggtcacaaaagtgtggagactttaattcatatataaagttaggcttaacattagtgcaaacagttgtattttagtttagatttagagtacacttatgtatgcgttgtttgacaatgcttatttatgatatattgaatggtacttatttatattatattaattataatgttgttcaatatatgtgtatat

SEQ ID NO: 69518 - DNA, 585 bp, Zea Mays
ccgggattgcggctcgatccacgtggaacatcccggtctagatagattcccgacccacattggaagagctgttcgattagcccactcgtgattccatcaccggcccattaccggcgaaatccttcaccccggcccgggaaccatcccacgagtctagacgtgtggaaccgatcccctggcgctagcacacggacgaagcaacacacggcggcggtggcgggggacgacgacgtcagcacggcgatcttctcagcgagcgacggctttctctccagtaaccttctggctggctttgcatctgtagatcacttctgctattactatctcaggttttgaacttagaagccctagcaactcggtggcaactggtaacaacagcctagaattgtggttgttggagatgtttgtatttttaattcttgatcacgatgaggacatgtaaaaagttgacaaattagcattgttggtggtaactggtagcagcaactctgttttattttcatgtagtgtatttcctaaaaaagttatttaaatattgtgtaaactacaaattagcataacgcagttgattgtgggaacaagcga

SEQ ID NO: 69519 - DNA, 1919 bp, Zea Mays
caataatgcatgcatggcaatttctgcttttggcgtgtatatttaccctgcagaaaaaaagggagggaaagagagaagttacagagggaggacaattactcagcaaattcgttttcaaatctgctgagagcttcctacagaacccaaacgattccctttatttgtagccttcttctccccaacctactcctgtcacaaagaccatttctttctcgtcgtcgacccatactctctctctctctctctctaccattttctccacgctctcctcccctttttcccgatggaaagaaattatgctgctaaatgattagcgaccggaagatccattggcccatgccgcgccgtagtccatgctccatgatggaggagctaagctagctgcctgctgccctgcctccgtctctctcgggcggctcacatgcgtcatgtcaatgtgtgcatgcaccaccaaacaaaaacctaaagctaccaccaaagccccgagagacgagacgaggcgagatgagatgagatctatcttttatatatagcctttagcgcccttcaaacacttcatcccgaagtcaccgcgctgagctccaaagaatctagcagctaggagcaggccgtgtatacgccatccaccacggcaacatgtgctccggctcctggtcctggagcagcagcaagaagcgcccgtctcttgttgtcgtcaacctcaagcggcagcagctgcagaagacgccgccgccgacgccgcctcgtgcctcagttgctatcaggaggaagaggctgaggctgaggaggttgagagccggagcagaggccatggagatggtgaacctgaagctctacctggagaaccggtgcatcatcgcggagaacgagaggctgcgggagagggccagcgcgctccgccgcgagaacctcgcgctgctccaggacctgtccaagacgccggccgtgccagaggcaggagcgggagctggagctgcgtgagattgcttcctcttgctgcctgctgagcatggagtagctagcttagcttgcgttccctcgctggcgcttgtgctagttgcgtgggcaggacagcggactcctagctgctgttcgagaatctggcggttcatatgatgatgcgaaccgttcggcacatgaagatcactggcctcgccagccatttgtttcaggcgctgcacttcagctgtcagtgcttcattcagagctggatacagaacgatgcaccagtgataaaaatcagtagttgaataggctaaggaaacatgattgcaatgtaaataccatgggaaaaaagaaggtcattgtttgtttttcaaaaacacaagggatctacatatcattgtattaatagaagaggatatggtcctgtggcaaaataaggtccatgaagtctcacaaaaaaaaggaccgtgaagcccaataaaaaacagtgagatcctaacaaggattctgaaaacaggtatagctaaagcttgcagcacaaaacagtaatattgtaattattttgttagaacgtttatactattcattcaataatttaaattaataaggcacatataagtcataggaacttgtaatagataaatggaaattcccttgacatatcagtgaactatacagtcaattagagaacgatgaggtacaggaatagcatggaatgccaggtcttagttgaagacactgggaaatgagggccaccaaataagctgaacatatgccaagttggcaatgctgtatcggcattgaaaaatcaaaagaaatgcattcataattattccaatctgctcagtaacaatctcctttttgtttgcattctctacattcctcttctattatacataatatcacccgcacccccttctctgcacacttcagaatgtagaaattgtcatatatttgaatgaacaagaacagat

SEQ ID NO: 69520 - DNA, 2694 bp, Zea Mays
gaaaaccctaaagcttcatcatgcaatgcaatgcaagcacccggcccaagaaatcaataatgcatgcatggcaatttctgcttttggcgtgtatatttaccctgcagaaaaaaagggagggaaagagagaagttacagagggaggacaattactcagcaaattcgttttcaaatctgctgagagcttcctacagaacccaaacgattccctttatttgtagccttcttctccccaacctactcctgtcacaaagaccatttctttctcgtcgtcgacccatactctctctctctctctctctaccattttctccacgctctcctcccctttttcccgatggaaagaaattatgctgctaaatgattagcgaccggaagatccattggcccatgccgcgccgtagtccatgctccatgatggaggagctaagctagctgcctgctgccctgcctccgtctctctcgggcggctcacatgcgtcatgtcaatgtgtgcatgcaccaccaaacaaaaacctaaagctaccaccaaagccccgagagacgagacgaggcgagatgagatgagatctatcttttatatatagcctttagcgcccttcaaacacttcatcccgaagtcaccgcgctgagctccaaagaatctagcagctaggagcaggccgtgtatacgccatccaccacggcaacatgtgctccggctcctggtcctggagcagcagcaagaagcgcccgtctcttgttgtcgtcaacctcaagcggcagcagctgcagaagacgccgccgccgacgccgcctcgtgcctcagttgctatcaggaggaagaggctgaggctgaggaggttgagagccggagcagaggccatggagatggtgaacctgaagctctacctggagaaccggtgcatcatcgcggagaacgagaggctgcgggagagggccagcgcgctccgccgcgagaacctcgcgctgctccaggacctgtccaagacgccggccgtgccagaggcaggagcgggagctggagctgcgtgagattgcttcctcttgctgcctgctgagcatggagtagctagcttagcttgcgttccctcgctggcgcttgtgctagttgcgtgggcaggacagcggactcctaggtatctatctgcttggctgctccgccatgtctgtgctctgctgtctgctcatacatcaccaggctcctggagctctcttgggtgctctgtgccatggtgtttgtacattatatataagtgcgcggattaactagatttccaaagcctgcaccaaactggacaacaaagatcaacagcaagttatgctaaaacataaacctcgactacgacgaatcgatccatttgaacttctagtacaatgattaatgaataagaatattttgtgcagagtttcaagcatccacatctacagaacatgttgtgctgaatatttcccacaaatttacccctctaattcgcgacacaaatgcacctaaaaatgtttttttaaaaaaaaaatctagcagaaaaattacagagacgggaagtttgtacaacaagaatccacccaggcattactaccaacgtccaaccaaataacttagcaataaaccgcaaaaggcggaatatccaaccgctgttgttctaaaacctaaggaaaaaaacgaatatccgggaacacaaggtatcccttcatgaatctgcagtatgaatttgaccttcaagcatgtgctctgtgaaatcaatcgtcttaatggttccactgcttttgctgagctttgaactgctctggttcctgtggctgctgctgctgctgctgagcctgctgggcctctgatggctgcttctgtacctgctgcagctgctgttcgagaatctggcggttcatatgatgatgcgaaccgttcggcacatgaagatcactggcctcgccagccatttgtttcaggcgctgcacttcagctgtcagtgcttcattcagagctggatacagaacgatgcaccagtgataaaaatcagtagttgaataggctaaggaaacatgattgcaatgtaaataccatgggaaaaaagaaggtcattgtttgtttttcaaaaacacaagggatctacatatcattgtattaatagaagaggatatggtcctgtggcaaaataaggtccatgaagtctcacaaaaaaaaggaccgtgaagcccaataaaaaacagtgagatcctaacaaggattctgaaaacaggtatagctaaagcttgcagcacaaaacagtaatattgtaattattttgttagaacgtttatactattcattcaataatttaaattaataaggcacatataagtcataggaacttgtaatagataaatggaaattcccttgacatatcagtgaactatacagtcaattagagaacgatgaggtacaggaatagcatggaatgccaggtcttagttgaagacactgggaaatgagggccaccaaataagctgaacatatgccaagttggcaatgctgtatcggcattgaaaaatcaaaagaaatgcattcataattattccaatctgctcagtaacaatctcctttttgtttgcattctctacattcctcttctattatacataatatcacccgcacccccttctctgcacacttcagaatgtagaaattgtcatatatttgaatgaacaagaacagat

SEQ ID NO: 69521 - DNA, 1627 bp, Zea Mays
gtaatcatcaacgacttgccgggttcgggttaacgccgacgccgacctcacgcagtcccgccgcgtccgcgtccctccggctcgtggcaacgctagcgccctccggtcctctgtcctcctccgccacctcgacgtgagctgcggagaccgccctccgcagtccgtttgacgtgtggggtgggcctggcggccggtgaccggtgaacgcgctctcgctgctcacctgggctgtccacatctccagcgtcaccaagtggtaccgtttctctctgctactggctagcactgcttccgcgcatggagatgacgggttcagagttgatttagtgaccaagaaaacggaggaaatccacgagggatgaaccattttccaggttccacttcttggtgtagcaatgtgtgcatgcacgtggaatttcttctacaattcatagtccctcgaagtccttgtaagccttcaaggtgctctgacagtgatcggtaacataacaatgtgcatagctgcatgccgcatcttcaaagcatcccaggaaggctcaaaaaacttcataggctgcaagattggatcttacaaccggtctggcaagggatgctacgctacaccccatttgaaagttgacattgctgcgagcctgagacggtggtaggagaaaaaacagttagaaggttgatttgattggctttaccttctgaaacatgatcgtgagtcgtgaccaagctgaagaaatacagatctgcatatgtcgtgtaaacgccggttaaaataaccctgaatccggttacagcctagggcccggtttccttccttccaggattatataatccaacttatagattatatattcactggattatataatctggactgtgggtcatagaatccattcactcgatacagagagatgccactcatgagaacgcaacaacagtttggagcactgaatgttagtacaatgacaccatctctccaccactgcaaaaccctgtccccgcaagttcacccgttcatggccatcaaaccaatcctgccaaaaaaaggcatcaaagtacctgctgctctccatctcgaggtgccactggcatgtggcctcatgatgctgaaccctgaactcaacatggacgtcgctgtttgccggacgaggatcgcacgtgttcgtgcggggggccagtgccaatggcgaaagctgcagcaacgatggatgatggtgcttgtgtgctctgtcaatgtgtgtgtgcagcagggagaggtcaagcgtcggaatgaaacctccactcggcgaagatatggatcaaatgagtggacgcgggacctgggccgggtcagtgtgggggcgacacgcgtcccccatcgggggagcgtctgggggtggcatcggacgctgcagatccagagcacaggtgctgttgatctgatcttgaggtgtcaaacgcaaatcctcttgtgtacctccttggcttgccttgtgtcattgtgtgtgtgtgtaatgagtgcaacttttggccaaagctggggcggagtggcccaaagtgtcttccctgcccccaagttttttcgtcgagagattctcgtttccatgatggtgttgtgacgacgcagtagctaacccggggtgccggggctaatggt

SEQ ID NO: 69522 - DNA, 1658 bp, Zea Mays
gtaatcatcaacgacttgccgggttcgggttaacgccgacgccgacctcacgcagtcccgccgcgtccgcgtccctccggctcgtggcaacgctagcgccctccggtcctctgtcctcctccgccacctcgacgtgagctgcggagaccgccctccgcagtccgtttgacgtgtggggtgggcctggcggccggtgaccggtgaacgcgctctcgctgctcacctgggctgtccacatctccagcgtcaccaagtggtaccgtttctctctgctactggctagcactgcttccgcgcatggagatgacgggttcagagttgatttagtgaccaagaaaacggaggaaatccacgagggatgaaccattttccaggtcaccaaaccagcccctctcgtggagaatggttccacttcttggtgtagcaatgtgtgcatgcacgtggaatttcttctacaattcatagtccctcgaagtccttgtaagccttcaaggtgctctgacagtgatcggtaacataacaatgtgcatagctgcatgccgcatcttcaaagcatcccaggaaggctcaaaaaacttcataggctgcaagattggatcttacaaccggtctggcaagggatgctacgctacaccccatttgaaagttgacattgctgcgagcctgagacggtggtaggagaaaaaacagttagaaggttgatttgattggctttaccttctgaaacatgatcgtgagtcgtgaccaagctgaagaaatacagatctgcatatgtcgtgtaaacgccggttaaaataaccctgaatccggttacagcctagggcccggtttccttccttccaggattatataatccaacttatagattatatattcactggattatataatctggactgtgggtcatagaatccattcactcgatacagagagatgccactcatgagaacgcaacaacagtttggagcactgaatgttagtacaatgacaccatctctccaccactgcaaaaccctgtccccgcaagttcacccgttcatggccatcaaaccaatcctgccaaaaaaaggcatcaaagtacctgctgctctccatctcgaggtgccactggcatgtggcctcatgatgctgaaccctgaactcaacatggacgtcgctgtttgccggacgaggatcgcacgtgttcgtgcggggggccagtgccaatggcgaaagctgcagcaacgatggatgatggtgcttgtgtgctctgtcaatgtgtgtgtgcagcagggagaggtcaagcgtcggaatgaaacctccactcggcgaagatatggatcaaatgagtggacgcgggacctgggccgggtcagtgtgggggcgacacgcgtcccccatcgggggagcgtctgggggtggcatcggacgctgcagatccagagcacaggtgctgttgatctgatcttgaggtgtcaaacgcaaatcctcttgtgtacctccttggcttgccttgtgtcattgtgtgtgtgtgtaatgagtgcaacttttggccaaagctggggcggagtggcccaaagtgtcttccctgcccccaagttttttcgtcgagagattctcgtttccatgatggtgttgtgacgacgcagtagctaacccggggtgccggggctaatggt

SEQ ID NO: 69523 - DNA, 1615 bp, Zea Mays
gtaatcatcaacgacttgccgggttcgggttaacgccgacgccgacctcacgcagtcccgccgcgtccgcgtccctccggctcgtggcaacgctagcgccctccggtcctctgtcctcctccgccacctcgacgtgagctgcggagaccgccctccgcagtccgtttgacgtgtggggtgggcctggcggccggtgaccggtgaacgcgctctcgctgctcacctgggctgtccacatctccagcgtcaccaagtgggagatgacgggttcagagttgatttagtgaccaagaaaacggaggaaatccacgagggatgaaccattttccaggtcaccaaaccagcccctctcgtggagaatggttccacttcttggtgtagcaatgtgtgcatgcacgtggaatttcttctacaattcatagtccctcgaagtccttgtaagccttcaaggtgctctgacagtgatcggtaacataacaatgtgcatagctgcatgccgcatcttcaaagcatcccaggaaggctcaaaaaacttcataggctgcaagattggatcttacaaccggtctggcaagggatgctacgctacaccccatttgaaagttgacattgctgcgagcctgagacggtggtaggagaaaaaacagttagaaggttgatttgattggctttaccttctgaaacatgatcgtgagtcgtgaccaagctgaagaaatacagatctgcatatgtcgtgtaaacgccggttaaaataaccctgaatccggttacagcctagggcccggtttccttccttccaggattatataatccaacttatagattatatattcactggattatataatctggactgtgggtcatagaatccattcactcgatacagagagatgccactcatgagaacgcaacaacagtttggagcactgaatgttagtacaatgacaccatctctccaccactgcaaaaccctgtccccgcaagttcacccgttcatggccatcaaaccaatcctgccaaaaaaaggcatcaaagtacctgctgctctccatctcgaggtgccactggcatgtggcctcatgatgctgaaccctgaactcaacatggacgtcgctgtttgccggacgaggatcgcacgtgttcgtgcggggggccagtgccaatggcgaaagctgcagcaacgatggatgatggtgcttgtgtgctctgtcaatgtgtgtgtgcagcagggagaggtcaagcgtcggaatgaaacctccactcggcgaagatatggatcaaatgagtggacgcgggacctgggccgggtcagtgtgggggcgacacgcgtcccccatcgggggagcgtctgggggtggcatcggacgctgcagatccagagcacaggtgctgttgatctgatcttgaggtgtcaaacgcaaatcctcttgtgtacctccttggcttgccttgtgtcattgtgtgtgtgtgtaatgagtgcaacttttggccaaagctggggcggagtggcccaaagtgtcttccctgcccccaagttttttcgtcgagagattctcgtttccatgatggtgttgtgacgacgcagtagctaacccggggtgccggggctaatggt

SEQ ID NO: 69524 - DNA, 2587 bp, Zea Mays
cgggcacgtgcgcacgcgccgcactagggtttccgcagcatacctacaagtactcgaaaccccgtctctctccccctcttttccggctgcgccttcccctcgcagccgccagccctcaacgttcctaccagctgccaccgcctgttacccgtgatgtctcccgcccttgccgctggcgtggagcccatggccgtcgacgattccgcctccaagaaggccaagcgcaagcagctcaaggccgccgccgccgccgcggaggcagaggcggaggccgcttcggtcaagaagaaagagaagaaagagaagaagcgaaaggtgaaggagccgtcccctccgctcccatcggccgcgtcctctgatgaggaagagaaaagcagcaccagctccgaggagacagcacccgcggcgaaaaaagcgaaggagaagacgaagaagaatgttgatgtctcgtcttcagcctcagatgacgatggcgagatcacagccagcagcgatgaggaccccgcggacccgaacgcgctgacgaacttcaggatatcggagtcgctgaggcagagcctcaggtccaaggggatcaagtcactgttccccattcaggccaccactttcgatctcgtactcgatggcagcgacttggttggccgagcgcgcaccggtcagggaaaaactttggcttttgtcttgcccatattggagtctttggttaatggggcaaacaaggcatctagacggactgaacatggcaggaccccaagtgttctcgttctactaccaacaagagagctggccaatcaggtgcacgctgactttgagttttatggtgcaacatttgggctctctgcatgttgtgtgtatgggggatcaccttatcgtcctcaagaaatggcattgagaagaggtgtggatattgttgttggaactcctggtcgtgtcaaggatttcattgttaaaggaactctcaatttgaaatgcttgaaattccgtgtccttgatgaagctgatgagatgctaaacatgggttttgttgatgatgtcgagctcattcttggcaaggtagaagatgctaccaaagtacagacgcttctgttcagtgccactctgccagagtgggtgaataagctctctatgaggtttctgaaagttgacaggaaaacagttgatcttgtcggtaatgagaaactgaaggccagtgcatctgttaagcaccttgctcttccttgtaacaaggcagcaagggcacaagttattccagacattatccgatgttatagccatggaggtcgaaccatcatcttcactgagacgaaggattctgcatcagagctttctggtttgattcatggatcccgtgccttgcatggagatgtagcgcaagcgcagcgtgaagtaattcttgctggattccgtagcgggaagttccaagttttggttgcgacaaatgtggcggcgcgtggtctggatattaatgatgtgcagcttatcattcagtgtgaacctccccgggatgttgaagcttacatacaccggtcaggtcggacagggagagcaggtaatactggtgttgctgtcatgctttatgagcccagatataagcacagtgtcagcagactagaaagggagtctggggttaaatttgagcatatctctgcgccacaacccactgatgtagcacaatctgctggcagtgaagctgcagatgcaattgcgagtgtgtcagacagtgttattcctatcttcaggcagcaagcagagcagttgctaagctcttccagtctgtctgcagctgacttgcttgccaaagcacttgcaaaggcagttggttacacggacataaagaaaagatcattgttatcttccttggaggattacagtacactacatcttcaaactggcagaccgatgtggtcacctgggtttgcttttactatattgaaaaggttcatgccagaagataaacttgcagatgtaaagggtgccaccctcaccgctgatggaacaggagttgtatttgatgttcctgcagcagatgttgaagattacattcaaggtgacaattgatgaagtcaagcaactgccacccttgcaagagaaggaccagtcgagaggcaactctgggggaggaagatttggccatggaggtggccggagattttctggtggtggtggcggcggcagagggttttctggccggggaggtggcggcagagggttttctggcagaggaggcggcggcagtagatttaacaggaggaattagaagctgcttcaatctttatggacatttcagaattcagagaactatgtttgtgttcgacgtagttttgatgaagagggagggaatcgtctcagttttggctgcaactgtatcgtgcttttgtttatttgttagccttcgtcaacgaaggcttattttgttagtgatataattgaggcatggggaagagggggaggtaacagtctcagttttggctgcaaattgtatcgtgctattgtttatttgttagtgttcgtcaacgaaggcttatttgttagtgcttttattgtggcgtggtgaagagggaggaaatagtctcaattttggctgcaa

SEQ ID NO: 69525 - DNA, 2898 bp, Zea Mays
cgggcacgtgcgcacgcgccgcactagggtttccgcagcatacctacaagtactcgaaaccccgtctctctccccctcttttccggctgcgccttcccctcgcagccgccagccctcaacgttcctaccagctgccaccgcctgttacccgtgatgtctcccgcccttgccgctggcgtggagcccatggccgtcgacgattccgcctccaagaaggccaagcgcaagcagctcaaggccgccgccgccgccgcggaggcagaggcggaggccgcttcggtcaagaagaaagagaagaaagagaagaagcgaaaggtgaaggagccgtcccctccgctcccatcggccgcgtcctctgatgaggaagagaaaagcagcaccagctccgaggagacagcacccgcggcgaaaaaagcgaaggagaagacgaagaagaatgttgatgtctcgtcttcagcctcagatgacgatggcgagatcacagccagcagcgatgaggaccccgcggacccgaacgcgctgacgaacttcaggatatcggagtcgctgaggcagagcctcaggtccaaggggatcaagtcactgttccccattcaggccaccactttcgatctcgtactcgatggcagcgacttggttggccgagcgcgcaccggtcagggaaaaactttggcttttgtcttgcccatattggagtctttggttaatggggcaaacaaggcatctagacggactgaacatggcaggaccccaagtgttctcgttctactaccaacaagagagctggccaatcaggtgcacgctgactttgagttttatggtgcaacatttgggctctctgcatgttgtgtgtatgggggatcaccttatcgtcctcaagaaatggcattgagaagaggtgtggatattgttgttggaactcctggtcgtgtcaaggatttcattgttaaaggaactctcaatttgaaatgcttgaaattccgtgtccttgatgaagctgatgagatgctaaacatgggttttgttgatgatgtcgagctcattcttggcaaggtagaagatgctaccaaagtacagacgcttctgttcagtgccactctgccagagtgggtgaataagctctctatgaggtttctgaaagttgacaggaaaacagttgatcttgtcggtaatgagaaactgaaggccagtgcatctgttaagcaccttgctcttccttgtaacaaggcagcaagggcacaagttattccagacattatccgatgttatagccatggaggtcgaaccatcatcttcactgagacgaaggattctgcatcagagctttctggtttgattcatggatcccgtgccttgcatggagatgtagcgcaagcgcagcgtgaagtaattcttgctggattccgtagcgggaagttccaagttttggttgcgacaaatgtggcggcgcgtggtctggatattaatgatgtgcagcttatcattcagtgtgaacctccccgggatgttgaagcttacatacaccggtcaggtcggacagggagagcaggtaatactggtgttgctgtcatgctttatgagcccagatataagcacagtgtcagcagactagaaagggagtctggggttaaatttgagcatatctctgcgccacaacccactgatgtagcacaatctgctggcagtgaagctgcagatgcaattgcgagtgtgtcagacagtgttattcctatcttcaggcagcaagcagagcagttgctaagctcttccagtctgtctgcagctgacttgcttgccaaagcacttgcaaaggcagttggttacacggacataaagaaaagatcattgttatcttccttggaggattacagtacactacatcttcaaactggcagaccgatgtggtcacctggatgtaaagggtgccaccctcaccgctgatggaacaggagttgtatttgatgttcctgcagcagatgttgaagattacattcaaggtataatggtccttcccttgttcgtgaaatagttatcaactagcataggcatgaaaatattttcctgatgtggcccctgaatccgttttcttgttatgcaattcaaataagcctgttaatgccttgtttggttatttctataccatatggattggatgagattggaaaaaattatgaaagattttgacttgtctgggatttaaacctacccaatctcacccaatccacatggaatgagagcaaaatgaataagccttaaagtgtctattattttctaaatgaaattcgactatgaaaaccttttggatatgtggcaccactcgaatcactacatcctgcagcttcggagagtgccgcacaggtgacaattgatgaagtcaagcaactgccacccttgcaagagaaggaccagtcgagaggcaactctgggggaggaagatttggccatggaggtggccggagattttctggtggtggtggcggcggcagagggttttctggccggggaggtggcggcagagggttttctggcagaggaggcggcggcagtagatttaacaggaggaattagaagctgcttcaatctttatggacatttcagaattcagagaactatgtttgtgttcgacgtagttttgatgaagagggagggaatcgtctcagttttggctgcaactgtatcgtgcttttgtttatttgttagccttcgtcaacgaaggcttattttgttagtgatataattgaggcatggggaagagggggaggtaacagtctcagttttggctgcaaattgtatcgtgctattgtttatttgttagtgttcgtcaacgaaggcttatttgttagtgcttttattgtggcgtggtgaagagggaggaaatagtctcaattttggctgcaa

SEQ ID NO: 69526 - DNA, 2550 bp, Zea Mays
cgggcacgtgcgcacgcgccgcactagggtttccgcagcatacctacaagtactcgaaaccccgtctctctccccctcttttccggctgcgccttcccctcgcagccgccagccctcaacgttcctaccagctgccaccgcctgttacccgtgatgtctcccgcccttgccgctggcgtggagcccatggccgtcgacgattccgcctccaagaaggccaagcgcaagcagctcaaggccgccgccgccgccgcggaggcagaggcggaggccgcttcggtcaagaagaaagagaagaaagagaagaagcgaaaggtgaaggagccgtcccctccgctcccatcggccgcgtcctctgatgaggaagagaaaagcagcaccagctccgaggagacagcacccgcggcgaaaaaagcgaaggagaagacgaagaagaatgttgatgtctcgtcttcagcctcagatgacgatggcgagatcacagccagcagcgatgaggaccccgcggacccgaacgcgctgacgaacttcaggatatcggagtcgctgaggcagagcctcaggtccaaggggatcaagtcactgttccccattcaggccaccactttcgatctcgtactcgatggcagcgacttggttggccgagcgcgcaccggtcagggaaaaactttggcttttgtcttgcccatattggagtctttggttaatggggcaaacaaggcatctagacggactgaacatggcaggaccccaagtgttctcgttctactaccaacaagagagctggccaatcaggtgcacgctgactttgagttttatggtgcaacatttgggctctctgcatgttgtgtgtatgggggatcaccttatcgtcctcaagaaatggcattgagaagaggtgtggatattgttgttggaactcctggtcgtgtcaaggatttcattgttaaaggaactctcaatttgaaatgcttgaaattccgtgtccttgatgaagctgatgagatgctaaacatgggttttgttgatgatgtcgagctcattcttggcaaggtagaagatgctaccaaagtacagacgcttctgttcagtgccactctgccagagtgggtgaataagctctctatgaggtttctgaaagttgacaggaaaacagttgatcttgtcggtaatgagaaactgaaggccagtgcatctgttaagcaccttgctcttccttgtaacaaggcagcaagggcacaagttattccagacattatccgatgttatagccatggaggtcgaaccatcatcttcactgagacgaaggattctgcatcagagctttctggtttgattcatggatcccgtgccttgcatggagatgtagcgcaagcgcagcgtgaagtaattcttgctggattccgtagcgggaagttccaagttttggttgcgacaaatgtggcggcgcgtggtctggatattaatgatgtgcagcttatcattcagtgtgaacctccccgggatgttgaagcttacatacaccggtcaggtcggacagggagagcaggtaatactggtgttgctgtcatgctttatgagcccagatataagcacagtgtcagcagactagaaagggagtctggggttaaatttgagcatatctctgcgccacaacccactgatgtagcacaatctgctggcagtgaagctgcagatgcaattgcgagtgtgtcagacagtgttattcctatcttcaggcagcaagcagagcagttgctaagctcttccagtctgtctgcagctgacttgcttgccaaagcacttgcaaaggcagttggttacacggacataaagaaaagatcattgttatcttccttggaggattacagtacactacatcttcaaactggcagaccgatgtggtcacctgggtttgcttttactatattgaaaaggttcatgccagaagataaacttgcagatgtaaagggtgccaccctcaccgctgatggaacaggagttgtatttgatgttcctgcagcagatgttgaagattacattcaagcttcggagagtgccgcacaggtgacaattgatgaagtcaagcaactgccacccttgcaagagaaggaccagtcgagaggcaactctgggggaggaagatttggccatggaggtggcggcagagggttttctggcagaggaggcggcggcagtagatttaacaggaggaattagaagctgcttcaatctttatggacatttcagaattcagagaactatgtttgtgttcgacgtagttttgatgaagagggagggaatcgtctcagttttggctgcaactgtatcgtgcttttgtttatttgttagccttcgtcaacgaaggcttattttgttagtgatataattgaggcatggggaagagggggaggtaacagtctcagttttggctgcaaattgtatcgtgctattgtttatttgttagtgttcgtcaacgaaggcttatttgttagtgcttttattgtggcgtggtgaagagggaggaaatagtctcaattttggctgcaa

SEQ ID NO: 69527 - DNA, 2487 bp, Zea Mays
cgggcacgtgcgcacgcgccgcactagggtttccgcagcatacctacaagtactcgaaaccccgtctctctccccctcttttccggctgcgccttcccctcgcagccgccagccctcaacgttcctaccagctgccaccgcctgttacccgtgatgtctcccgcccttgccgctggcgtggagcccatggccgtcgacgattccgcctccaagaaggccaagcgcaagcagctcaaggccgccgccgccgccgcggaggcagaggcggaggccgcttcggtcaagaagaaagagaagaaagagaagaagcgaaaggtgaaggagccgtcccctccgctcccatcggccgcgtcctctgatgaggaagagaaaagcagcaccagctccgaggagacagcacccgcggcgaaaaaagcgaaggagaagacgaagaagaatgttgatgtctcgtcttcagcctcagatgacgatggcgagatcacagccagcagcgatgaggaccccgcggacccgaacgcgctgacgaacttcaggatatcggagtcgctgaggcagagcctcaggtccaaggggatcaagtcactgttccccattcaggccaccactttcgatctcgtactcgatggcagcgacttggttggccgagcgcgcaccggtcagggaaaaactttggcttttgtcttgcccatattggagtctttggttaatggggcaaacaaggcatctagacggactgaacatggcaggaccccaagtgttctcgttctactaccaacaagagagctggccaatcaggtgcacgctgactttgagttttatggtgcaacatttgggctctctgcatgttgtgtgtatgggggatcaccttatcgtcctcaagaaatggcattgagaagaggtgtggatattgttgttggaactcctggtcgtgtcaaggatttcattgttaaaggaactctcaatttgaaatgcttgaaattccgtgtccttgatgaagctgatgagatgctaaacatgggttttgttgatgatgtcgagctcattcttggcaaggtagaagatgctaccaaagtacagacgcttctgttcagtgccactctgccagagtgggtgaataagctctctatgaggtttctgaaagttgacaggaaaacagttgatcttgtcggtaatgagaaactgaaggccagtgcatctgttaagcaccttgctcttccttgtaacaaggcagcaagggcacaagttattccagacattatccgatgttatagccatggaggtcgaaccatcatcttcactgagacgaaggattctgcatcagagctttctggtttgattcatggatcccgtgccttgcatggagatgtagcgcaagcgcagcgtgaagtaattcttgctggattccgtagcgggaagttccaagttttggttgcgacaaatgtggcggcgcgtggtctggatattaatgatgtgcagcttatcattcagtgtgaacctccccgggatgttgaagcttacatacaccggtcaggtcggacagggagagcaggtaatactggtgttgctgtcatgctttatgagcccagatataagcacagtgtcagcagactagaaagggagtctggggttaaatttgagcatatctctgcgccacaacccactgatgtagcacaatctgctggcagtgaagctgcagatgcaattgcgagtgtgtcagacagtgttattcctatcttcaggcagcaagcagagcagttgctaagctcttccagtctgtctgcagctgacttgcttgccaaagcacttgcaaaggcagttggttacacggacataaagaaaagatcattgttatcttccttggaggattacagtacactacatcttcaaactggcagaccgatgtggtcacctgggtttgcttttactatattgaaaaggttcatgccagaagataaacttgcagatgtaaagggtgccaccctcaccgctgatggaacaggagttgtatttgatgttcctgcagcagatgttgaagattacattcaagcttcggagagtgccgcacaggtgacaattgatgaagtcaagcaactgccacccttgcaagagaaggaccagtcgagaggcggcggcagtagatttaacaggaggaattagaagctgcttcaatctttatggacatttcagaattcagagaactatgtttgtgttcgacgtagttttgatgaagagggagggaatcgtctcagttttggctgcaactgtatcgtgcttttgtttatttgttagccttcgtcaacgaaggcttattttgttagtgatataattgaggcatggggaagagggggaggtaacagtctcagttttggctgcaaattgtatcgtgctattgtttatttgttagtgttcgtcaacgaaggcttatttgttagtgcttttattgtggcgtggtgaagagggaggaaatagtctcaattttggctgcaa

SEQ ID NO: 69528 - DNA, 2569 bp, Zea Mays
cgggcacgtgcgcacgcgccgcactagggtttccgcagcatacctacaagtactcgaaaccccgtctctctccccctcttttccggctgcgccttcccctcgcagccgccagccctcaacgttcctaccagctgccaccgcctgttacccgtgatgtctcccgcccttgccgctggcgtggagcccatggccgtcgacgattccgcctccaagaaggccaagcgcaagcagctcaaggccgccgccgccgccgcggaggcagaggcggaggccgcttcggtcaagaagaaagagaagaaagagaagaagcgaaaggtgaaggagccgtcccctccgctcccatcggccgcgtcctctgatgaggaagagaaaagcagcaccagctccgaggagacagcacccgcggcgaaaaaagcgaaggagaagacgaagaagaatgttgatgtctcgtcttcagcctcagatgacgatggcgagatcacagccagcagcgatgaggaccccgcggacccgaacgcgctgacgaacttcaggatatcggagtcgctgaggcagagcctcaggtccaaggggatcaagtcactgttccccattcaggccaccactttcgatctcgtactcgatggcagcgacttggttggccgagcgcgcaccggtcagggaaaaactttggcttttgtcttgcccatattggagtctttggttaatggggcaaacaaggcatctagacggactgaacatggcaggaccccaagtgttctcgttctactaccaacaagagagctggccaatcaggtgcacgctgactttgagttttatggtgcaacatttgggctctctgcatgttgtgtgtatgggggatcaccttatcgtcctcaagaaatggcattgagaagaggatttcattgttaaaggaactctcaatttgaaatgcttgaaattccgtgtccttgatgaagctgatgagatgctaaacatgggttttgttgatgatgtcgagctcattcttggcaaggtagaagatgctaccaaagtacagacgcttctgttcagtgccactctgccagagtgggtgaataagctctctatgaggtttctgaaagttgacaggaaaacagttgatcttgtcggtaatgagaaactgaaggccagtgcatctgttaagcaccttgctcttccttgtaacaaggcagcaagggcacaagttattccagacattatccgatgttatagccatggaggtcgaaccatcatcttcactgagacgaaggattctgcatcagagctttctggtttgattcatggatcccgtgccttgcatggagatgtagcgcaagcgcagcgtgaagtaattcttgctggattccgtagcgggaagttccaagttttggttgcgacaaatgtggcggcgcgtggtctggatattaatgatgtgcagcttatcattcagtgtgaacctccccgggatgttgaagcttacatacaccggtcaggtcggacagggagagcaggtaatactggtgttgctgtcatgctttatgagcccagatataagcacagtgtcagcagactagaaagggagtctggggttaaatttgagcatatctctgcgccacaacccactgatgtagcacaatctgctggcagtgaagctgcagatgcaattgcgagtgtgtcagacagtgttattcctatcttcaggcagcaagcagagcagttgctaagctcttccagtctgtctgcagctgacttgcttgccaaagcacttgcaaaggcagttggttacacggacataaagaaaagatcattgttatcttccttggaggattacagtacactacatcttcaaactggcagaccgatgtggtcacctgggtttgcttttactatattgaaaaggttcatgccagaagataaacttgcagatgtaaagggtgccaccctcaccgctgatggaacaggagttgtatttgatgttcctgcagcagatgttgaagattacattcaagcttcggagagtgccgcacaggtgacaattgatgaagtcaagcaactgccacccttgcaagagaaggaccagtcgagaggcaactctgggggaggaagatttggccatggaggtggccggagattttctggtggtggtggcggcggcagagggttttctggccggggaggtggcggcagagggttttctggcagaggaggcggcggcagtagatttaacaggaggaattagaagctgcttcaatctttatggacatttcagaattcagagaactatgtttgtgttcgacgtagttttgatgaagagggagggaatcgtctcagttttggctgcaactgtatcgtgcttttgtttatttgttagccttcgtcaacgaaggcttattttgttagtgatataattgaggcatggggaagagggggaggtaacagtctcagttttggctgcaaattgtatcgtgctattgtttatttgttagtgttcgtcaacgaaggcttatttgttagtgcttttattgtggcgtggtgaagagggaggaaatagtctcaattttggctgcaa

SEQ ID NO: 69529 - DNA, 4240 bp, Zea Mays
acggggcctatgtttttctttcggtaccgagatggcaaggtccatgttttccatgtgtgagtgagtctcctcactcgcagggaaaaagaaagaaaggcagaaaagaaaagacatccatcactcacttcccattcatcagactgtgttcaacggtgtgcccttggctccccctcccctaccactgtaaccgatttaggggctacagtgcgcccctaaatccttcaccggcttcctcctcctcctcctctcccctcccgattccttctctctcccgctaaatggatgggcacgctacgccgggatttctcccccgcagtcggttccttgggccacacaatcgcgcgctcggaaaactctgcggagggcgaaggaggcgaagcaagggcgacgtatccgccgccggagaaggtagccgtcgatccgcttcattcgcgcttcaaggtccacccgtgatgagcaaagcaggcggcggccccgggtcggccccggtcccgacggccgcggccgcggcggccgcggtgcagaagcagaagtcgctgctgcagagcttgctgcaagaatttgggcagtcgatccggcgcggcggccgggtatggcggccacggagcagctgaaggagctgggggagaagctgcaggcggtggcgccggctcctgcggacgaactcgccaagctcctcgagctcattgctgaagcatgggatgcaggaggtctctatcaagttggtcagtttcctcactggaacgtttggtcagagtggaatggtaaggtaagatactttcaaagacttgaaagtctttttgctacttggtactttctaaataacaaatgaagccttgtcaaatactgaatgtaagtttcaacagatatatttaaatagatgagtgcttctatctacctgtgaattgtctatagctgtgtttatacggcggtttaattttggtaatatcgatactatttatcacaggagacaattctattatgtttgacatctgtgcatgtgttgaaagaccaaatgcccatccatatgtgtcaggtaataccgatagcactatggaaccaggatttaactgtggaatgctcacttctaatagagcagtcaccaatgttagtgtagcactatgccaccaggaattaactgcttaccattgacatgatctctgaacacaggcactgtcatgtcttattttagtattaaataggttggtcatacatacctgacatgaggattaattgtgaagttttaatactaatcacgaagtttgctaattaattatggaccaagttacggccgcgtactgtgcataaaataaataaaaataaaactaatattggatggtagttgagttagttgataataaaagtatataatattggtgtagtggggtatagaggtttgatatagggggaaccgctgtagagcgtggagatatagggggagagagaacgctgacgtggcacgtgagtgagatatagggggagaaatttagagggaaccgctgaagtcagtctcaggagcgcttgcggcgagcctccctctccccttatacagtgcatgtatagagtagctcttgaggtgcagcggctgacgctaaaatcatctctacgtgaaacagttttagcgccaaacgcagccgtccgctagatccaggggtggactgtagcaccccttgacttaagtttagtgttggttggtatttaatagttaaagaaaaatggtaatagaaaataaatatggttaaataatgatattttatagttgtagtgtgatataggtggagtatttagagggaaccgctgcggaagatgaaaaaatagagggaaacatatagggaaaaagtgatatagggggaaaaatttagaggtagcgattgcggatagcctcagtgtctgctttgtttcctccagcgtccagagtgcgcctgggagcaggtgggcccatgtcctccactgcagtgcactacaaaaaccactgtcaatgtcaagcagcgagctgcacctgcacctgcatattttgcccagctagcccccacacggccaaaacatattttattagcacccaggcttccctccgaaagaatctactggcaccagctgtttcctttgccgcggccagccgcccaaccgccgttcgtcaccatggcttctccgcgtgtgaacaccaacatcgcagggcatacctataaatactacgcatcaaccacacgcttcacagcagccagcaccagcactcagactcagctcaatcccgagacaaaggaacccacctccactcccaccagcaagctcaagcaagcagccaccaccagcagcgatcagcggcagccatggacatgggccggcaccagctccagctccagcacgcggcctcctcgtcctccacctcggcgtcgtcctcgtccgagcaggacaagccgctctgctgctctggtcccaagaagcgccccgcggggcgcaccaagttccgggagacgcggcacccggtgttccgcggcgtgcggcggcggggcgccgcggggcggtgggtgtgcgaggtgcgcgtccccgggcggcgcggcgcgcggctgtggctcggcacctacctcggcgccgaggcggcggcgcgcgcgcacgacgccgcgatgctcgccctgggccgcggcgcggcctgcctcaacttccccgactccgcgtggctgctcgccgtgccgcccccgcccgcgctctcgggcggcctggacggcgcccgccgggccgcgctcgaggccgtcgcggagttccagagacgccgcttcggggcggcagccgccgacgaagcgacctcgggcacgtctcctccctcctcctcctcctcggcgacgaagccggcgccggcgattgagcgcgtgcctgtggaggccagtgagacggtggcgttggacggcgccgtgttcgagcccgactggttcggggacatggacttggacttgtactatgccagcctcgcggaagggctgctcgtggagccgccgccaccgccaccgcccgccgcctgggatcatggtgactgctgcgactccggagctgacgtcgcgctctggagctactagcaagctatagcagcaataagctccaccaactcatctgtactgtagtgtacttgtaccttgtaccttgtaccaaaatccaaattgatttgtagcgaattaacttaccaatcccccttggcaactcaggtgctacttccacttcatttcattccataaaaaagggaacaagaaagcaacacatgcctcaaaagaaagaccctcacaccctgattcaaacgaatggctctagaatctctggaggtccaagaaacgagcaaccggtagaggtagcttttcacgcagctgtccggtcgtcgcagtgagcgatccagaaggcttgctaaaaaaaggcgagatttgtcctgtttcgccggcctaccgttccgggtcgtggtggtcttgttacccccatcaacaaccgtccgtcatacaggtcgtacggacgcgcacgtgtgaccggaggaaaaaaaaaacaagagaccagtaccactacagctcaaagtcaaagagtaagatcgatctaatcaacttgatgtacagtactaccaaggattagctgacttccagtctccatatatccccaacgcatgcagtgacgtgcagcgaggagacaagctactactactactacttgcgttcaagggtcaagagagactcgcttcgcttcaccggatctatcttatctcacgccgttctagatgcagcccaaaagctagcaggcaacaatgatccttatcttgacttgcccctttgtggtaagtacatgctccagcaatctatgagcctgtttggttcagtttttttctgaccagcttttctgaaaatctggccgtgaggagaatctgagtatcattacgattacgtgtggaggaagataaagttgttcatagggctaaggatctagaaaatgacagatttttactattacaacgactcaaccgattatgtgtttatgttgattttgaatggtttttgcccccaaagaattttatagaagctgactgaaaaactgagcgtttggcagttcacaacaacttttggtggccagaaactgacggaagctgaaacaaacaggccctgtcaatcctagctaggcgcctccacaagagggggtgcgctttgtttctcctcctgcctgcaaggccaagtgcacaagaggatagtgctccacaagtagtagtagtatgtgtgtg

SEQ ID NO: 69530 - DNA, 1606 bp, Zea Mays
cgcgacacactaaagcggggtgcgcagtgcatgtgacgacatgggtcaacgtgtgcgaacggcatgcgcaaagtgcgcgaacggcacgcgacgacgcgcgcgacacacgcgaatgactaactaatgtcgtgtttatactaagcaagaataaattaaaaaacatttgaattggcataatcacattaacatgtatttataaaaggggagcttaaaacgacaagttagttttaactaacagttatttttaataaccaacgaacgaactaacaattaactaaataaataaaacatggatctcgacaaaacaatatttttaatgtgtgcacgacattattacgaagctaacgcaatctgaacaatataaaatggatttataacataaactctaacatgtatttaataaactgcaaatttaaagtgatatggtgcgttgtgattggtccgagccaattcccagggatggtcatggattttgcatccacctcggatccttggaggactgtttctcttgagcgcatgcacgcaggagaggaatacgacatgcaacatggggctcgcgggcgtttctacttgcatgcctttttccttcttgcacccatgcatgacgtgcacggttgatttttctctccctaccaccacgacgaccgcaaggggcattcaagcgagttagttgctggccaggaggtggaccacgtcggtgtcggcggccatggccaggcgacggtgatgcggccagtggagcagggtagcagcgcccgacagttcttccatggacgagcagtaaggggaaggagcccaccggttggggcgggcgtggccgctcgctggccagggcgtgcagtggccatggcgggtcggtggtgctcgtggcacggcagcgtggcatcgcggcaatagagaaggagaggggaaacaacatagcatggccttaccttggcaacgcgggatgtagcgaccacacatgccaacaagatcgccggagcagtgggcgtatggcggaagtgacgtgtgcgcagggcatgacggcggccatggctacgcggctgcggcggcgtccgggcacagcaacacgtaggggatgggcaggggctctaatcgcacgcctccatggggcttttgcggagggtgctgggagctcggccagaggacgtgcacgtggggcttctctgcaggatgacgagcgcagcgagggcgaggcgagcgcgagatgcagcaaggtgaggcgagatgccgcgaggcgaggacgtggtgcggcggctgcgcgcaagacgtgagggagtggcggtttgaggaagatgaacagtgtgcagcggcggctgggcggacggcgcccacgcggctagggttgggcgcgcgcacctgcgggggaaatggggtgggccgcagctgggcctggtcgatgggtaagctgggccttttccatttctttcctattctttcattatcttttgttcttttctattctttccaccatttcaaatcgaattccctattaaatggatgctccacaaaatcacccatccaacaaaataaaagtatgctccggcatgatacaaaattagagcacctcttaaggttttattttactatgcttacacacttacac

SEQ ID NO: 69531 - DNA, 285 bp, Zea Mays
gtgaattataaagtaaataggacataatgggtcagaggacacttgccttcaccaaatagatgctcagggtcttcagcctcgtagaactcgaagagttcgatcacttggtcaccaaggcttgatcgtcgattcctcgaagctcggaaacgaatcgcgatctaatcgcaatgcgaagcgaagacgaacaagcacaggcaaacaaacatatataagtgcataagaacattacaccatacaagataaaatgctataaaaatatgcagcataaaatagagctcgattcta

SEQ ID NO: 69532 - DNA, 819 bp, Zea Mays
gtcagcgccctcacctgacagcctcgctctagccttcagcccacgctcgtcgcgcccccacagccagcgcccttgccccggccatctttgtctagcctccagcccacgcccgccgctcgtcgcctgcgccatggtgccagctagccgctgcctagcccagccctagtaggcaccagtcgcactgccctaggccccacacatctgccctgtgagcgcaggaggtttctgtgcgttttttgggagaggactgaatcaataattggttctttatctcttgtacttcgttgggattctttactcttgtagaatttataattatgtctcatatagattatatatttgctggaatcaaagttaacttgatgttttattgaggcagggccaacatgatccgaagatgatgatacaagttccacactgacagtggaaacatttagcttctaagagctctctgctacaactaataatttcattgggatccactgtgattaggttgaagacaaaggatggtgtcgtcctcgctattgagaaacttgtgacctcaccactactgcatttgtggctgaggctagaatagaagggaagaatctaagacctctattgaagcagattgtatagaagggaagagtcttcaagatattggtcttgtagttgcaacaaagagaagagacaatggtggtgatgctatatctatagaagtagcaacgttggtattgtagctccaagatttggttgttgatgaatgatatatatgataatacattgttaagtatatgtgataatcattgattgttatttaattatattgggttgtgattc

SEQ ID NO: 69533 - DNA, 1969 bp, Zea Mays
gtcagcgccctcacctgacagcctcgctctagccttcagcccacgctcgtcgcgcccccacagccagcgcccttgccccggccatctttgtctagcctccagcccacgcccgccgctcgtcgcctgcgccatggtgccagctagccgctgcctagcccagccctagtaggcaccagtcgcactgccctaggccccacacatctgccctgtgagcgcaggaggtttctggccaacatgatccgaagatgatgatacaagttccacactgacagtggaaacatttagcttctaagagctctctgctacaactaataatttcagtaagactctcaggataggctctcggggccaaggcacagtctatgaaggccacttaccccgcattgtataggtcaatttctgctatgtgtcatagtaatacatacatcttaaaacttgtcgttgtgtcaccattgagctaattgtggatatttgattctgtacttagaatatgctacatgtcttttatggttactattataattttcgtattataatagttcactatttgttcagccaagttgttgtcaagctgttactactataacatcttttattaggaagctccagtcgagtggcctcgtccattgtgtagctttgtttatggaaaacaaatagttcattttttggtctgctatgtttttcaactgaactggagggcaacatatagaggtaattccacaattataaaccacttgaactttcatcgtcggtactgctttatttattattttgtagagtgcacttgtctggccaatttggatcttttagatatcgtggctaaatgtagttcaggctcattaaaattgaactttatttgtttgcttaggaaaaatgcaggtctaggaataaaactgcaactccgttagggttatgtgttagggttatgtttgtttgtgaacatgtgtatgtagtatatccataaaaagaaagtagtttagcatctttggcgtaagagtgtgttgctgattgtgtgtgtgaaagcaatcttttatcattttaatcatggttgcttttgaaagttttgagtatatgccacatgcatatgttctaattttgttatttactattgtttacattccaaattataagttgttttggctattctaggttcatagtttttctatgcacctaaatataaactatgtctagatacgtagcagtcttgaaagtcaaaacaacttataattaggaacagatggagtaagttctaatgctcaagtggttagatatctgcatcactggaaattcaatgaaaatatcctcgtcatgctactaacggtgttatgtgacgatgaagtctggagtatctcactcgttcttactaattgagatttgatattttaaggttttctagttctctgtcttgttagattaaaactatgtcaattttagcttagatctaatgccatgttttttttatttttaccctctgacaggcaggttgttgcatgtcattcacattgattaaagaatagctcaagaaaaaagacctaaactaaaatgccaagatctttagttgttgggtttatatgtttgttgcgatgaaagtgattattatgttgtttcttttgatattacagttgggatccactgtgattaggttgaagacaaaggatggtgtcgtcctcgctattgagaaacttgtgacctcaccactactgcatttgtggctgaggctagaatagaagggaagaatctaagacctctattgaagcagattgtatagaagggaagagtcttcaagatattggtcttgtagttgcaacaaagagaagagacaatggtggtgatgctatatctatagaagtagcaacgttggtattgtagctccaagatttggttgttgatgaatgatatatatgataatacattgttaagtatatgtgataatcattgattgttatttaattatattgggttgtgattc

SEQ ID NO: 69534 - DNA, 1210 bp, Zea Mays
gtcagcgccctcacctgacagcctcgctctagccttcagcccacgctcgtcgcgcccccacagccagcgcccttgccccggccatctttgtctagcctccagcccacgcccgccgctcgtcgcctgcgccatggtgccagctagccgctgcctagcccagccctagtaggcaccagtcgcactgccctaggccccacacatctgccctgtgagcgcaggaggtttctgtgcgttttttgggagaggactgaatcaataattggttctttatctcttgtacttcgttgggattctttactcttgtagaatttataattatgtctcatatagattatatatttgctggaatcaaagttaacttgatgttttattgaggcagggccaacatgatccgaagatgatgatacaagttccacactgacagtggaaacatttagcttctaagagctctctgctacaactaataatttcagtaagactctcaggataggctctcggggccaaggcacagtctatgaaggccacttaccccgcattgtataggtcaatttctgctatgtgtcatagtaatacatacatcttaaaacttgtcgttgtgtcaccattgagctaattgtggatatttgattctgtacttagaatatgctacatgtcttttatggttactattataattttcgtattataatagttcactatttgttcagccaagttgttgtcaagctgttactactataacatcttttattaggaagctccagtcgagtggcctcgtccattgtgtagctttgtttatggaaaacaaatagttcattttttggtctgctatgtttttcaactgaactggagggcaacatatagagttgggatccactgtgattaggttgaagacaaaggatggtgtcgtcctcgctattgagaaacttgtgacctcaccactactgcatttgtggctgaggctagaatagaagggaagaatctaagacctctattgaagcagattgtatagaagggaagagtcttcaagatattggtcttgtagttgcaacaaagagaagagacaatggtggtgatgctatatctatagaagtagcaacgttggtattgtagctccaagatttggttgttgatgaatgatatatatgataatacattgttaagtatatgtgataatcattgattgttatttaattatattgggttgtgattc

SEQ ID NO: 69535 - DNA, 1190 bp, Zea Mays
gtcagcgccctcacctgacagcctcgctctagccttcagcccacgctcgtcgcgcccccacagccagcgcccttgccccggccatctttgtctagcctccagcccacgcccgccgctcgtcgcctgcgccatggtgccagctagccgctgcctagcccagccctagtaggcaccagtcgcactgccctaggccccacacatctgccctgtgagcgcaggaggtttctgtgcgttttttgggagaggactgaatcaataattggttctttatctcttgtacttcgttgggattctttactcttgtagaatttataattatgtctcatatagattatatatttgctggaatcaaagttaacttgatgttttattgaggcagggccaacatgatccgaagatgatgatacaagttccacactgacagtggaaacatttagcttctaagagctctctgctacaactaataatttcagtaagactctcaggataggctctcggggccaaggcacagtctatgaaggccacttaccccgcattgtataggtcaatttctgctatgtgtcatagtaatacatacatcttaaaacttgtcgttgtgtcaccattgagctaattgtggatatttgattctgtacttagaatatgctacatgtcttttatggttactattataattttcgtattataatagttcactatttgttcagccaagttgttgtcaagctgttactactataacatcttttattaggaagctccagtcgagtggcctcgtccattgtgtagctttgtttatggaaaacaaatagttcattttttggtctgctatgtttttcaactgaactggagggcaacatatagaggttgaagacaaaggatggtgtcgtcctcgctattgagaaacttgtgacctcaccactactgcatttgtggctgaggctagaatagaagggaagaatctaagacctctattgaagcagattgtatagaagggaagagtcttcaagatattggtcttgtagttgcaacaaagagaagagacaatggtggtgatgctatatctatagaagtagcaacgttggtattgtagctccaagatttggttgttgatgaatgatatatatgataatacattgttaagtatatgtgataatcattgattgttatttaattatattgggttgtgattc

SEQ ID NO: 69536 - DNA, 2629 bp, Zea Mays
atgggtaatttcctcgcctgcctccgcctgtgcctgcaagtcgtcaactgcctccgcctgcgcgcggcgggcggcatgggagcagagagtatcccaccttcgccaacgtctccggggcccacaccctccttttcctcgctgactccacgcccccgccggccccgccttcgcctcctcccgctcacgggtgctctgctcgccgaggccacaagcgcgttgttccataccaaggcagagaaaagacggaagggcgtgtggatcgagatcaacaacgacggcgacgacaaccagagcgcgaggagcagcaccgtctccaccgccccaccccgcacgccgccattgccagggctcccccaccccacccccgcacgccatgacctccacaaccccacccccgcgcgccatctcgccagggctcccccacccccgcgcgccgtctctcctgcaccagctctccctgcaatccctccagctctccctgtcgtgtcgcctccacagcgcccaccgagaagaggcgcgtttagttttctcagacagtatgacagtggattgggtgtttggcttctctttgcagtagcaattggaggcgaacaggaagacactgtagaggcactctcgcgcgctgttcaacgtagtggcagcagaggtggcatcaaggggcaccgatggcggcaacatgctatcgcagcgtgtggcggagagacagaggtcagacctggcaaacaggacagggaaggggacgtgatctccatgcaagagaacatgtctgccaggacactcacgctctctagctccacgcagcagacaattgtgcggttcgttaagctaccattggttgacaagatcaccgcttggatcttcctggaaaagttattggtattcttgtgttcatatgtcttgcaatcggctgaccatgggcactattttgtgatattcatggccattctaaggagattgaactttatgcatcatgggtcgtgcaagtacacttgagtttatttgcttgatttattcggcgagtactcatatgcaggcaccgttgtagatataacgtcatagaatacctattgcatcctttttatccttttgatattttactatcttttaaataacacaacgtcgaaaccaaagaatggtcgacgattagttggttgttgttagaaggatatactatgatatagttggaaacgaggctctgatagactgatacacagtgatattgatgaagaaattctagatccagaggaatagaaacactttttcacaaagggagaagatcatttgcgctacagtgcgacgacggccagggccaaggtgctgaaggaggtgaggaacatcgcagtaacgatctccatggagaagggtgcgatggccagaggtaaaaaggaaaacttgatgctgccaggatcgtccatcaagaaggtaccatggtggggtggtggaggggatggccaaacgatctcagaagctggcagggaggtgaaagagattgaggagctagaggagaaggcgtcatttttcagaagctggcacgtctcatggaggggaaatagcacctttgcttgtttggcatacatgagctatatgagggtggcgatcagatttgcttatggttgttggcctactaggatggttgtatggccagtcactgactggaaagctgcaacggactcaagcttctcccagagaacttattctgccattaagctcctgttcttacagctaagctccatggctagggacatgtgcacattggtgagaatggaagcattcactgcacttggtaaaattcaacgagtttctgagggtgttctgctacaatcgctagaaaagaaggtgagaagaactgcctgcaaatcattaggagcgctggcaaagttttctactcagtacacagagaaggccttggacttgttgatggacatgatgaatgatgatacagaagcaatatggctgcaggctctagaagcactatttcgtatggcaacatatggatgtttgagtgtgcaggagaagcacatgcatatggtattaactacgaacatactccgttcacaaatgcatgactggtccttccaaatagataactatcatggatctggaatggttccattggctgacctgttcctgatgatgttctattctacagatgtgttagaagacgaccgtatcctgtgtgactggcaagatttaccatttaaaaactatgcccccctggaaaatgatgttaatgtccacccagtaactttttgttttgtttcctgtcatctcaagatcaaagatcctaagaaacagttcctggtttatgggtctagcagagccagaagttgttgtaactatccagtatcgtacaactgacctgttacctagggggaaacactgcatgagtgttgttggtatccttgtctggagaaggagagagtgattctcctggaggtggaggaggatgaagtggtgatcgacttcaagccaactccaagtgccatgtcgacctctgcctccgctccttgcacacatccctcccagtcgtcttcaaggtccagacctcctccccgctcaagttcctcgtcagcacgttgcgcggtgctgtgtcgccgctttcctcggtgtccatacgcgtgtgcgaggc

SEQ ID NO: 69537 - DNA, 1099 bp, Zea Mays
atgggtaatttcctcgcctgcctccgcctgtgcctgcaagtcgtcaactgcctccgcctgcgcgcggcgggcggcatgggagcagagagtatcccaccttcgccaacgtctccggggcccacaccctccttttcctcgctgactccacgcccccgccggccccgccttcgcctcctcccgctcacgggtgctctgctcgccgaggccacaagcgcgttgttccataccaaggcagagaaaagacggaagggcgtgtggatcgagatcaacaacgacggcgacgacaaccagagcgcgaggagcagcaccgtctccaccgccccaccccgcacgccgccattgccagggctcccccaccccacccccgcacgccatgacctccacaaccccacccccgcgcgccatctcgccagggctcccccacccccgcgcgccgtctctcctgcaccagctctccctgcaatccctccagctctccctgtcgtgtcgcctccacagcgcccaccgagaagaggcgcgtttagttttctcagacagtatgacagtggattgggtgtttggcttctctttgcagtagcaattggaggcgaacaggaagacactgtagaggcactctcgcgcgctgttcaacgtagtggcagcagaggtggcatcaaggggcaccgatggcggcaacatgctatcgcagcgtgtggcggagagacagaggtcagacctggcaaacaggacagggaaggggacgtgatctccatgcaagagaacatgtctgccaggacactcacgctctctagctccacgcagcagacaattgtgcggttcgttaagctaccattggttgacaagatcaccgcttggatcttcctggaaaagttattgcgctacagtgcgacgacggccagggccaaggtgctgaaggaggtgaggaacatcgcagtaacgatctccatggagaagggtgcgatggccagaggtaaaaaggaaaacttgatgctgccaggatcgtccatcaagaaggtaccatggtggggtggtggaggtgatatgtcgttggattaaaggagttatctagacttgcagcagtaagtattcaggagcaggg

SEQ ID NO: 69538 - DNA, 4782 bp, Zea Mays
gtgacatgcatgatgcctgcaggctgcagcctgctgctgaggccgctgactcgctgtccaccgcgggccttccaattatcactcccaccgatcggaatggatccggtccgaagccggcacaacggacacttggaggtgaaggcaccggtaccaccagtcagtaccaccaccaccaccaacagctttgtgccgagtgaaagcaaagcaccgccgccgccagcgctgggcacggaagaaagcgaggcggtcgatgccattgcccagtcgcgcgcggctatgtggcagagccaggctcggtttggctggcgcccgcgccaacggttgcttggctgctaaggtcccagcccgcacgcacgccagcacgggcaagaggcccgtcagccgtggccgttctccgaaagcaagcgtgcccccgcaccagcaccagtactacccacgccacccgccttcacctactactcctgccacggtcaaaaccgcacggcaagaaacgaaccggaccggagccgggcaagaaaacgaaaaaggcttttgctccgcctcggcggcggcgtgcctggtttcctgtgccgtgatcgcgtggcgtcgtcacccgctcgcatgccgcgggcgttttttttttatcggtataaatattctgctgccctgtccctgagttgtacgcgctgttatgttcccagttctctctctctcttgcccatcccccacctcggctggctcagctcagctcctaaacccgcacctacctctctgcctgctgccccggcccctgatcctgatttccccaatcgagagtccgagacccgagaggaggcacaggcacctgcgctagctgcagctgcaaatcgtcttccccagatccggcgccgcctagttcgctcctgctcgcgacagcgcccagagccgtccgcgtgcgcccgcagagatcgtttcggggacagccgagcagagcagagcagagcagagctgactctgccgcttgttgcccgttcttggctgctgttgctggcgagagcgcgcaggaggagcggctgatttttgattctctctgtccctccctccctcgcttcgctcgcgcggggtgcgtgcacgtaccatgagaagatgatgcgcgccaggcccaaaggtacattcgccgacgcgatgagggagagctcccctcctcctcctccccctccggctccggcttcggcagcggtgaaagaggacgagtgggaggtgcggcccggcgggatgctggtgcagaagcggagccccgacgccgacgcccccgccggggcgcccgtccccaccatccgcgtcaaggtcaagttcaacggcgtgtaccacgagatctacatcaactcccaggcctccttcggtgagctgaagaagatgctgtcggcgcggaccgggctgcaccccgaggaccagaagctggtgtacaaggacaaggagcgggactccaaggcgttcctggacatggccggcgtcaaggaccgctccaagatggtgctgctcgaggaccccgccgcgcaggccaagcgcctcctcgagcagcgccgcaccgacaaggcggagcgcgccgccaagtccatctcccgcatcggcctcgacgtcgacaagctcgccaccaaggtgtcggcgctggaggccatcgtcagcaagggcggcaaggtggtggacgctgacgtggtcgccctcaccgaggcgctcatgaacgagctggtcaagctggactccatcgccgccgacggcgaagtcaaggtgcagcgacgaatgcaggagaagcgggtgcagaagtacgtggagacgctggacgctatccgcgccaagaacgcggcggcgcccaaggccaaggccaaggccaacggcgacatgaatgggcacgccaaggcccgcgcgccgcaactcccgccgcgcccgccgcccgtgtcgcagaggcggaacttccagcagccctccccggcgccagcgccgcccacgcagggctgggagtcgttcgacctgctgtcgtcggtgccgtccacgtcctcggccaccgtgaccaccaccatggcggccgcgaccaccaccacctcgccggccggcgtctccccgatcccgcggttcgactgggagctcttctgaagccctccctcctcgcggcgcgtcggcgtgccggttggtcgatcagacggtacctacctcccttgtccatggatcttccctgctctcatcagtagtgccattgtttcttctgtggattctttccatttcttttcgcctcattctctcttcttttcttccatttcctttcgaatttgtatatctactatatgtctacaaaaagaacagagagaccgacgcggtgcggtgagtgtgttcactgggtcaaaagtccgtcagttgacaactcctcctcgtgaggatccatccatgcatgttgttcagtcacagcaaataagtggtggtcttattatgatggcgatgaagaagttttcatgacagtacacacacatataaatagcatgtatattttggtaacatttatttatacgcttgtgtatggttacgatgattgcttgatttccattccagtgcaattgtgcaaagcttgtgtgtgtgtgagagagggggcgactgagatttgctgtgcaggcgcatcattgattgggttctgggggcttctgttttgtggccttgtgggagccgggcacaattattggtggccaccccgcgtgggcgtgcctgccagtccaggcgcggcgggaccgacgggcgccggccgaccagtgagggtgctctgctcgactgattcgtgactgggtgcgctgtgttatgtctcgccctcgcgaaaccgtgtgtagtgtgtgcttctctatttcagtcaacgcttcagtacagtttcaatttcattgcttcgaatgctaacatctttttccttctcgatttggaaattggcacatctcacctgactcagcaattattttttttactcttacttatgccaatatttaggcggtggtcagaaacatttgttagttttatatgaattgattttacttaggaatgaagggagtatttagagttggtttgtaaccacgttttttttttttgagttttgagtaaccacgtcttaataaaattcagatgttagtagctttttttttgaaccaggtgttagatacttatcaacatagtttgtattagtgcatagttacgtctaactaaaaaaatacgtacaagccctcatagaaaagcacaagtcttatcccttcgtctaaaataaaaacatgtcactgtaaaatttgtcgaacaaagtgacttgaggtaaaataatcataatggtatatttactagaacaagactaataacgcagttggtttttagtctacttatatagtagttatctcttcgctattactatatatggcctagatgtcactattataaagttttatttggtttttatgtcaaagcgggttgtaaacatatagtccgtttctcacctctctcctccacttcagcatatagttgacttaatttgtttattgcatttgcacttagagatagttcttataaaaagaacatgtcgcttgattaatcatctacatttacgcttagataatggtagcatttagctaaataaggaggctctatgcaacttagttacagacaaataagcaaggccgttatggaggaaataaattggatagtccgaccacttgtcctgatgatacagtcagtttataggtcaaaagtttgaatcataccacctaggagtatcttaaatgtctttcctaggcttgctctctaaattctcatttaaagagtcgttgtttgaataaacattgccgtctctgtattttcatcgcccaacagtttaaagatctaattagtgaagccgttaaagaaaacatgtttttttaccaacatctttatttctgtcgataggggaggaatataaagagactagttgatctaagacgggacattccggacatagtatggaagaaccacgggggaatataacttttttttttaagttgctctaacatgggacatgtctaagtctcaaaaatacatgggacatgccacatgtggaagcaaaaaaaaaaaaacccgcagagaagctggtttaaacctaggagtgaggcataactcacaaaattagatggctaacaaaagcaagggcttaagagccctttaacacactcgagtggcgttttcagcagtgtaccgcgtgtctcggtccaagctgtttgtaaaactctgatcaaataaatggttgatgagcgtttccaggcagcatcatgcatcgaacaagctcgacaatataaaagggtgccagtttgcctcccagctcgcgtttctcaacaagtctgacagtagaagccacctagcagccgtggaccgcctatgtatgatacccctactactagtagatctgtaggtggaagtcacaggctcacagctgagcaaaatcagtttgtttgtagtagccccgagcccccgatggaacaaggaagctctagagtctggactggagaagagacgaccacgtgcacgttgaaggaccacgaccagtcgtgtccagacctaaagcggttcctagagcgcactttccagggcccaatcgagaaatgccaattgctaggagccgttgcgatgcaagcgacacgccaggccagcaaaagaaagcccatcgatcatctgccgttcgctgatcatccttctctgtagactgtagtcctatcctatagatagatggagattactactagagagccattgcccacgacccattgggttgggtttggg

SEQ ID NO: 69539 - DNA, 525 bp, Zea Mays
gagtcgcgtctcgtctgcctgtccagagatggagcaaactgacgcagacacttcacagcattcgggggaagggaagccttgctgaaatggcgggtcagatgatgcaggcttgaagcgtagtcaatggagcagaaactcggttgtctgaaacatccagcggttctttctctcgtgcccccgccccttcaagagctgaaaccgcgtctacgatcctcagcctctcacccctgttggtttctggaatccatcacgtcgctatcggattattacagctccatctgcttggagagcaagagctccatgcatccagcgcatgtgcatgtaccatgaacattttgcagacgcacacgcgatgcctctgacttcagtcggatagcgatgcgtttacatctcgtgttgggatgttcatgtatctacttcaatgattcaatctatgtgtgtgatgaagtggatcagcatgaaatccaacttggactctgtattaatctattccaatgcatagtatgttgcattgcatctgcagtc

SEQ ID NO: 69540 - DNA, 1535 bp, Zea Mays
aaaaaaaagaacaaaaaggaagacagcgaagttgtctacatcacttgacttgcgagcgaccgcggctcacgtcggctgcataaattgcttcgtagactagtaccacacagtttgcgagaaggggagaggtagaggttccgaggtagagagatagagaggaggagagggagggcgaggcggcggatccgtcactccgttcttctccgctgatctggaggaaggaggcgagaagtcccaaattctttcttttgcttggtcaagtgccaattgggaggcagaacggaagacagaacctccatgcgaactttagtcgcgctgatttcgatggaatcggaactgatttaggtgtattttagctctgattgttcttggcaggagtacaattttagtagcaccgtttgatggtacggttcttctgggtggtaaattgcccttcctgcgacgcgatgtcagacttcgatctctgttggaagacgctagacattgcagacataaatatttttactgcaatcatgagctcgaaatccaaatgttaatcagttcacagttcagacaatcgcttgaacatgtttaaaagctggacgaggtttcatctactcgattgaatcctcgtcttcgccgctaaatcgttgcaggggagttgcaaatccatcaatggccactccaaccacctattcagtccgcatatcctcggagacccacaagattgaagcctgggtggtgtctgacgaagctttggccaggcaactgcaggaggaggagaacacgcgtgacgctgctgccgacaccagagaagtcgccggcaatgtacccttggagtcatcgtcaccggctgttgagtacaggcctgcacagaatgcagctcaggttgcaagggaagacaatgtggacccagataatatgtcatatgagcaactacaagcattaggggaagcagtaggaattcagtccagagggttatctgatgagctgatatcttatttggagccatttaggaacaagtgcactttcttctccaggaaaaagaacagtgaggaatgtgtgatctgcaagacaacatatagaagccggcagaaattgataagactaccctgcagccactgttatcacgcagattgcataactcgttggcttaagatcaacaaggcatgcccagtctgcaacgaggaggtgtttggatgaactgcaaggttcctggcagatgctgcggtttcatcgttacttgcttgcggcatgcttttgagaagacgttggacgcataaggtccattgtttgtgattatgttgtgagcctagtttggtgccctttgcttaagaggactggctctgcccatgcatgggtcggtctacacgtgtgctagtaactggaccaggtcgcgttttgtgatgcgtctatccatcttggttttatcacaaattgatagatctgttgtgtgggtagtttggttgccgttttctgaatataatggatggtgtttttgccccctttttgggagaagttcaagcaaagagcagttcaatactgtcggcgtttcg

SEQ ID NO: 69541 - DNA, 1021 bp, Zea Mays
aaaaaaaagaacaaaaaggaagacagcgaagttgtctacatcacttgacttgcgagcgaccgcggctcacgtcggctgcataaattgcttcgtagactagtaccacacagtttgcgagaaggggagaggtagaggttccgaggtagagagatagagaggaggagagggagggcgaggcggcggatccgtcactccgttcttctccgctgatctggaggaaggaggcgaggcaactgcaggaggaggagaacacgcgtgacgctgctgccgacaccagagaagtcgccggcaatgtacccttggagtcatcgtcaccggctgttgagtacaggcctgcacagaatgcagctcaggttgcaagggaagacaatgtggacccagataatatgtcatatgagcaactacaagcattaggggaagcagtaggaattcagtccagagggttatctgatgagctgatatcttatttggagccatttaggaacaagtgcactttcttctccaggaaaaagaacagtgaggaatgtgtgatctgcaagacaacatatagaagccggcagaaattgataagactaccctgcagccactgttatcacgcagattgcataactcgttggcttaagatcaacaaggcatgcccagtctgcaacgaggaggtgtttggatgaactgcaaggttcctggcagatgctgcggtttcatcgttacttgcttgcggcatgcttttgagaagacgttggacgcataaggtccattgtttgtgattatgttgtgagcctagtttggtgccctttgcttaagaggactggctctgcccatgcatgggtcggtctacacgtgtgctagtaactggaccaggtcgcgttttgtgatgcgtctatccatcttggttttatcacaaattgatagatctgttgtgtgggtagtttggttgccgttttctgaatataatggatggtgtttttgccccctttttgggagaagttcaagcaaagagcagttcaatactgtcggcgtttcg

SEQ ID NO: 69542 - DNA, 966 bp, Zea Mays
atttgatgctggacgaggtttcatctactcgattgaatcctcgtcttcgccgctaaatcgttgcaggggagttgcaaatccatcaatggccactccaaccacctattcagtccgcatatcctcggagacccacaagattgaagcctgggtggtgtctgacgaagctttggccaggcaactgcaggaggaggagaacacgcgtgacgctgctgccgacaccagagaagtcgccggcaatgtacccttggagtcatcgtcaccggctgttgagtacaggcctgcacagaatgcagctcaggttgcaagggaagacaatgtggacccagataatatgtcatatgagcaactacaagcattaggggaagcagtaggaattcagtccagagggttatctgatgagctgatatcttatttggagccatttaggaacaagtgcactttcttctccaggaaaaagaacagtgaggaatgtgtgatctgcaagacaacatatagaagccggcagaaattgataagactaccctgcagccactgttatcacgcagattgcataactcgttggcttaagatcaacaaggcatgcccagtctgcaacgaggaggtgtttggatgaactgcaaggttcctggcagatgctgcggtttcatcgttacttgcttgcggcatgcttttgagaagacgttggacgcataaggtccattgtttgtgattatgttgtgagcctagtttggtgccctttgcttaagaggactggctctgcccatgcatgggtcggtctacacgtgtgctagtaactggaccaggtcgcgttttgtgatgcgtctatccatcttggttttatcacaaattgatagatctgttgtgtgggtagtttggttgccgttttctgaatataatggatggtgtttttgccccctttttgggagaagttcaagcaaagagcagttcaatactgtcggcgtttcg

SEQ ID NO: 69543 - DNA, 2826 bp, Zea Mays
gttgtactccaccgacacctgctgatgggcttgctggaacatggtggtgatcttaatcgagcaataaattcacatttcaatgatggagacagcatattgaacggaatcagtcaaaacgccatgcctgctagtcgtgatgatatgatggacctggatggaccacttgataatacatttcaaagatctttgttgccagagagtttccgtgccccttttgctctaatggatccaaatttccaggaccaattttttgacagagttggctccactgatggtgtcattcgtgaaccgctagtttcacatccaagagaggtgagggagatacctatcgaagttaaggatggtgatcctcaaacaggttcatctggccaggatgttactggaaatgagtcttcaaatggccctgaagtccctgaaactatcataattgatgatgtggacggtggattgttatctgcaccatctgttccacatcctattattcctagcaatacatctactgtgccaactgctcctccattggttcatgttaatgactatgatgaggacatagaagaggaaatgattcgggcagcaattgaagcttcaaagaaggattctgaaggactggcaaattcgagcaaggaggccagcatcaagaggaagtgaatttgagggaccattcttctgataaagcaggcatggaaaccgcaaatggaatagttgagaggactagcttcagaaaaggctggaacatctaggcaaccaatagatgacgagagcttccaggaggaggctgaagatgtagaagaacagccgttagttaggcgtcgttctcggcgtgccccttctgaggacaatgaattaccaaaaatagtgcacccaggtgctagccctgttctgaacaatcaccagtataatggagatgatttcccatctgagtggggtggcatttcttctgaggaacatgatgaagctgttatgcttgaggctgcaatgtttggtggagttcctgaaggaccaacatatcctttctctatgccttctcacagaacctctacttattatcccccaatatctcattctccatcaccagcattaactgaacagcggttattacgagagcagcaggacgatgagtaccttgcatcgctacaagctgatcaagaaaaggagttaaaggccctacaggaggctgagctccgtcgccttgaagaaacagctgcgagagaagctgttcttgagaaacagaagcaagaggaggaggaaaggcgtaaaaaacaacttgaggaagaggaactagagtccagtctcacttcgaagcaagcatcattaccaccggaaccgtctccagacgcagagggtgctgtgacagttgtagtccgaatgcctgatggtagtcgacaggggcgccgctttctcaaaactgataaacttcagttcctatttgatttcttagacattgggaggacttgcaagccagggacctacagattggtgaggacatacccaaggcgcacgtttaccaacagcgagggtgacgtatcattcagtgatcttggcctaacaagcaagcaggaagccctgtttctagagcagatcacggggtagaggataatcgttaggcatggttagagataccacagctgggcaggagaattttacacaaaatacttgcaccatatcgccagtgaaaactcggtctgtcaaattggttgggttggtcgaagaaaggttaaaaattcttttgtggcgccatgtgtcgtgacgcattgcgctttgcatgcaaattggttgggttggtcgaagaaaggttaaaaattcttttgtggcgccatgtgtcgtgacgcattgcgctttgcatgctttacgttattatatatatgcgtgatactttatacctacgcatgcatgatgattcgtttcagtgagccctgctgtgcagagtgggttctgtattattgttggttctttgaatcaaagcgatgttgcacattgcacagccacaggccggtcgtgtgcgtacaagatcgcaaaagggcacgcgaccctcaagagtttgctttagcattcactacgaatgacggaatgaggacaccgagtcgactcgacgccggtggccttttattattcagcgtgtttggatcccttgccttttgcccagtgcatcgcactggctatcatcagctcattactctgcacgcatgacagcaaagagcaaatcatcagcacggcatataaaaaacgacaaataaagacacatttttcatgcgtggcggatggcggcatggcgcagtgtgtgtcattcatggcggatcagcacgacaaataactagagatggaggccttacggcagctgactggcgggaggccgcacttggccggcaggctgttgatgatgctgaacgttccgcaggcgcagtccctggacacggcccccagcgcggagcagcactccggcccgggcgccggcggaacctgccccggcaagggtggcacgctgtagcgcaagcagggggccagcccgcgcagctgccccgcgcacgtctgctgcgcctcggcgccaccgcccagccccgctgccaacaccaggagcagcagcagggacagcgccgcgggcaggccgcgcggctgcaccttgccgccgccggcggctgtcgtcgtcgtcgccgtcattattccaaactgaaaagcaccggccgacctgaccgtcgtctcgcgtacgcggaccagcagcgtgcgtgctgcttcgcacgtactggctctggactgggtcgcggtgtgcgtgtgccgtgtgcgcgcgctaacggcgggatttataggcgttcattagtgactgtggcctcg

SEQ ID NO: 69544 - DNA, 2856 bp, Zea Mays
ggctttttgaatcgtggagtcattagcaattgctggaattggtgtgcagttacggaatggattttggaacatggtggtgatcttaatcgagcaataaattcacatttcaatgatggagacagcatattgaacggaatcagtcaaaacgccatgcctgctagtcgtgatgatatgatggacctggatggaccacttgataatacatttcaaagatctttgttgccagagagtttccgtgccccttttgctctaatggatccaaatttccaggaccaattttttgacagagttggctccactgatggtgtcattcgtgaaccgctagtttcacatccaagagaggtgagggagatacctatcgaagttaaggatggtgatcctcaaacaggttcatctggccaggatgttactggaaatgagtcttcaaatggccctgaagtccctgaaactatcataattgatgatgtggacggtggattgttatctgcaccatctgttccacatcctattattcctagcaatacatctactgtgccaactgctcctccattggttcatgttaatgactatgatgaggacatagaagaggaaatgattcgggcagcaattgaagcttcaaagaaggattctgaaggactggcaaattcgagcaaggaggccagcatcaagaggaagtgaatttgagggaccattcttctgataaagcaggcatggaaaccgcaaatggaatagttgagaggactagcttcagaaaaggctggaacatctaggcaaccaatagatgacgagagcttccaggaggaggctgaagatgtagaagaacagccgttagttaggcgtcgttctcggcgtgccccttctgaggacaatgaattaccaaaaatagtgcacccaggtgctagccctgttctgaacaatcaccagtataatggagatgatttcccatctgagtggggtggcatttcttctgaggaacatgatgaagctgttatgcttgaggctgcaatgtttggtggagttcctgaaggaccaacatatcctttctctatgccttctcacagaacctctacttattatcccccaatatctcattctccatcaccagcattaactgaacagcggttattacgagagcagcaggacgatgagtaccttgcatcgctacaagctgatcaagaaaaggagttaaaggccctacaggaggctgagctccgtcgccttgaagaaacagctgcgagagaagctgttcttgagaaacagaagcaagaggaggaggaaaggcgtaaaaaacaacttgaggaagaggaactagagtccagtctcacttcgaagcaagcatcattaccaccggaaccgtctccagacgcagagggtgctgtgacagttgtagtccgaatgcctgatggtagtcgacaggggcgccgctttctcaaaactgataaacttcagttcctatttgatttcttagacattgggaggacttgcaagccagggacctacagattggtgaggacatacccaaggcgcacgtttaccaacagcgagggtgacgtatcattcagtgatcttggcctaacaagcaagcaggaagccctgtttctagagcagatcacggggtagaggataatcgttaggcatggttagagataccacagctgggcaggagaattttacacaaaatacttgcaccatatcgccagtgaaaactcggtctgtcaaattggttgggttggtcgaagaaaggttaaaaattcttttgtggcgccatgtgtcgtgacgcattgcgctttgcatgcaaattggttgggttggtcgaagaaaggttaaaaattcttttgtggcgccatgtgtcgtgacgcattgcgctttgcatgctttacgttattatatatatgcgtgatactttatacctacgcatgcatgatgattcgtttcagtgagccctgctgtgcagagtgggttctgtattattgttggttctttgaatcaaagcgatgttgcacattgcacagccacaggccggtcgtgtgcgtacaagatcgcaaaagggcacgcgaccctcaagagtttgctttagcattcactacgaatgacggaatgaggacaccgagtcgactcgacgccggtggccttttattattcagcgtgtttggatcccttgccttttgcccagtgcatcgcactggctatcatcagctcattactctgcacgcatgacagcaaagagcaaatcatcagcacggcatataaaaaacgacaaataaagacacatttttcatgcgtggcggatggcggcatggcgcagtgtgtgtcattcatggcggatcagcacgacaaataactagagatggaggccttacggcagctgactggcgggaggccgcacttggccggcaggctgttgatgatgctgaacgttccgcaggcgcagtccctggacacggcccccagcgcggagcagcactccggcccgggcgccggcggaacctgccccggcaagggtggcacgctgtagcgcaagcagggggccagcccgcgcagctgccccgcgcacgtctgctgcgcctcggcgccaccgcccagccccgctgccaacaccaggagcagcagcagggacagcgccgcgggcaggccgcgcggctgcaccttgccgccgccggcggctgtcgtcgtcgtcgccgtcattattccaaactgaaaagcaccggccgacctgaccgtcgtctcgcgtacgcggaccagcagcgtgcgtgctgcttcgcacgtactggctctggactgggtcgcggtgtgcgtgtgccgtgtgcgcgcgctaacggcgggatttataggcgttcattagtgactgtggcctcg

SEQ ID NO: 69545 - DNA, 2990 bp, Zea Mays
cgagatgtcatcgggatcaggaacatggtggtgatcttaatcgagcaataaattcacatttcaatgatggagacagcatattgaacggaatcagtcaaaacgccatgcctgctagtcgtgatgatatgatggacctggatggaccacttgataatacatttcaaagatctttgttgccagagagtttccgtgccccttttgctctaatggatccaaatttccaggaccaattttttgacagagttggctccactgatggtgtcattcgtgaaccgctagtttcacatccaagagaggtgagggagatacctatcgaagttaaggatggtgatcctcaaacaggttcatctggccaggatgttactggaaatgagtcttcaaatggccctgaagtccctgaaactatcataattgatgatgtggacggtggattgttatctgcaccatctgttccacatcctattattcctagcaatacatctactgtgccaactgctcctccattggttcatgttaatgactatgatgaggacatagaagaggaaatgattcgggcagcaattgaagcttcaaagaaggattctgaaggactggcaaatatagtcgagcaaggaggccagcatcaagaggaagtgaatttgagggaccattcttctgataaagcaggcatggaaaccgcaaatggaatagttgagaggtgaatgttaactttactacccacctcttcactcaggctaccctactacagtatcatttgattccttatacatgcaatttccttttggaggcaaggactagcttcagaaaaggctggaacatctaggcaaccaatagatgacgagagcttccaggaggaggctgaagatgtagaagaacagccgttagttaggcgtcgttctcggcgtgccccttctgaggacaatgaattaccaaaaatagtgcacccaggtgctagccctgttctgaacaatcaccagtataatggagatgatttcccatctgaggtattatataatctgtggttccaatgtgcgctaagacattagatggatttgtttaatttctgacgtctttttacaataaagtggggtggcatttcttctgaggaacatgatgaagctgttatgcttgaggctgcaatgtttggtggagttcctgaaggaccaacatatcctttctctatgccttctcacagaacctctacttattatcccccaatatctcattctccatcaccagcattaactgaacagcggttattacgagagcagcaggacgatgagtaccttgcatcgctacaagctgatcaagaaaaggagttaaaggccctacaggaggctgagctccgtcgccttgaagaaacagctgcgagagaagctgttcttgagaaacagaagcaagaggaggaggaaaggcgtaaaaaacaacttgaggaagaggaactagagtccagtctcacttcgaagcaagcatcattaccaccggaaccgtctccagacgcagagggtgctgtgacagttgtagtccgaatgcctgatggtagtcgacaggggcgccgctttctcaaaactgataaacttcagttcctatttgatttcttagacattgggaggacttgcaagccagggacctacagattggtgaggacatacccaaggcgcacgtttaccaacagcgagggtgacgtatcattcagtgatcttggcctaacaagcaagcaggaagccctgtttctagagcagatcacggggtagaggataatcgttaggcatggttagagataccacagctgggcaggagaattttacacaaaatacttgcaccatatcgccagtgaaaactcggtctgtcaaattggttgggttggtcgaagaaaggttaaaaattcttttgtggcgccatgtgtcgtgacgcattgcgctttgcatgcaaattggttgggttggtcgaagaaaggttaaaaattcttttgtggcgccatgtgtcgtgacgcattgcgctttgcatgctttacgttattatatatatgcgtgatactttatacctacgcatgcatgatgattcgtttcagtgagccctgctgtgcagagtgggttctgtattattgttggttctttgaatcaaagcgatgttgcacattgcacagccacaggccggtcgtgtgcgtacaagatcgcaaaagggcacgcgaccctcaagagtttgctttagcattcactacgaatgacggaatgaggacaccgagtcgactcgacgccggtggccttttattattcagcgtgtttggatcccttgccttttgcccagtgcatcgcactggctatcatcagctcattactctgcacgcatgacagcaaagagcaaatcatcagcacggcatataaaaaacgacaaataaagacacatttttcatgcgtggcggatggcggcatggcgcagtgtgtgtcattcatggcggatcagcacgacaaataactagagatggaggccttacggcagctgactggcgggaggccgcacttggccggcaggctgttgatgatgctgaacgttccgcaggcgcagtccctggacacggcccccagcgcggagcagcactccggcccgggcgccggcggaacctgccccggcaagggtggcacgctgtagcgcaagcagggggccagcccgcgcagctgccccgcgcacgtctgctgcgcctcggcgccaccgcccagccccgctgccaacaccaggagcagcagcagggacagcgccgcgggcaggccgcgcggctgcaccttgccgccgccggcggctgtcgtcgtcgtcgccgtcattattccaaactgaaaagcaccggccgacctgaccgtcgtctcgcgtacgcggaccagcagcgtgcgtgctgcttcgcacgtactggctctggactgggtcgcggtgtgcgtgtgccgtgtgcgcgcgctaacggcgggatttataggcgttcattagtgactgtggcctcg

SEQ ID NO: 69546 - DNA, 3067 bp, Zea Mays
ctcaaagactagcaaagaggtcaggtgaccggctcaccgctcggagtcgcggcttcagaaatcagaatcagagcacctgcctctcttcagtttgttgccgtctctctctctcctcttgacgcaactcctctcctatcttctctctctccatcgctccctcctccgcgccgcgttggcaccgaaccctcctgtcatggcaaggccgccgaaggaggcgattgataccttcatcagcatcacgggggcggacgaggccgtcgccgtacgcaaactcgaggaacatggtggtgatcttaatcgagcaataaattcacatttcaatgatggagacagcatattgaacggaatcagtcaaaacgccatgcctgctagtcgtgatgatatgatggacctggatggaccacttgataatacatttcaaagatctttgttgccagagagtttccgtgccccttttgctctaatggatccaaatttccaggaccaattttttgacagagttggctccactgatggtgtcattcgtgaaccgctagtttcacatccaagagaggtgagggagatacctatcgaagttaaggatggtgatcctcaaacaggttcatctggccaggatgttactggaaatgagtcttcaaatggccctgaagtccctgaaactatcataattgatgatgtggacggtggattgttatctgcaccatctgttccacatcctattattcctagcaatacatctactgtgccaactgctcctccattggttcatgttaatgactatgatgaggacatagaagaggaaatgattcgggcagcaattgaagcttcaaagaaggattctgaaggactggcaaattcgagcaaggaggccagcatcaagaggaagtgaatttgagggaccattcttctgataaagcaggcatggaaaccgcaaatggaatagttgagaggactagcttcagaaaaggctggaacatctaggcaaccaatagatgacgagagcttccaggaggaggctgaagatgtagaagaacagccgttagttaggcgtcgttctcggcgtgccccttctgaggacaatgaattaccaaaaatagtgcacccaggtgctagccctgttctgaacaatcaccagtataatggagatgatttcccatctgagtggggtggcatttcttctgaggaacatgatgaagctgttatgcttgaggctgcaatgtttggtggagttcctgaaggaccaacatatcctttctctatgccttctcacagaacctctacttattatcccccaatatctcattctccatcaccagcattaactgaacagcggttattacgagagcagcaggacgatgagtaccttgcatcgctacaagctgatcaagaaaaggagttaaaggccctacaggaggctgagctccgtcgccttgaagaaacagctgcgagagaagctgttcttgagaaacagaagcaagaggaggaggaaaggcgtaaaaaacaacttgaggaagaggaactagagtccagtctcacttcgaagcaagcatcattaccaccggaaccgtctccagacgcagagggtgctgtgacagttgtagtccgaatgcctgatggtagtcgacaggggcgccgctttctcaaaactgataaacttcagttcctatttgatttcttagacattgggaggacttgcaagccagggacctacagattggtgaggacatacccaaggcgcacgtttaccaacagcgagggtgacgtatcattcagtgatcttggcctaacaagcaagcaggaagccctgtttctagagcagatcacggggtagaggataatcgttaggcatggttagagataccacagctgggcaggagaattttacacaaaatacttgcaccatatcgccagtgaaaactcggtctgtcaaattggttgggttggtcgaagaaaggttaaaaattcttttgtggcgccatgtgtcgtgacgcattgcgctttgcatgcaaattggttgggttggtcgaagaaaggttaaaaattcttttgtggcgccatgtgtcgtgacgcattgcgctttgcatgctttacgttattatatatatgcgtgatactttatacctacgcatgcatgatgattcgtttcagtgagccctgctgtgcagagtgggttctgtattattgttggttctttgaatcaaagcgatgttgcacattgcacagccacaggccggtcgtgtgcgtacaagatcgcaaaagggcacgcgaccctcaagagtttgctttagcattcactacgaatgacggaatgaggacaccgagtcgactcgacgccggtggccttttattattcagcgtgtttggatcccttgccttttgcccagtgcatcgcactggctatcatcagctcattactctgcacgcatgacagcaaagagcaaatcatcagcacggcatataaaaaacgacaaataaagacacatttttcatgcgtggcggatggcggcatggcgcagtgtgtgtcattcatggcggatcagcacgacaaataactagagatggaggccttacggcagctgactggcgggaggccgcacttggccggcaggctgttgatgatgctgaacgttccgcaggcgcagtccctggacacggcccccagcgcggagcagcactccggcccgggcgccggcggaacctgccccggcaagggtggcacgctgtagcgcaagcagggggccagcccgcgcagctgccccgcgcacgtctgctgcgcctcggcgccaccgcccagccccgctgccaacaccaggagcagcagcagggacagcgccgcgggcaggccgcgcggctgcaccttgccgccgccggcggctgtcgtcgtcgtcgccgtcattattccaaactgaaaagcaccggccgacctgaccgtcgtctcgcgtacgcggaccagcagcgtgcgtgctgcttcgcacgtactggctctggactgggtcgcggtgtgcgtgtgccgtgtgcgcgcgctaacggcgggatttataggcgttcattagtgactgtggcctcg

SEQ ID NO: 69547 - DNA, 2967 bp, Zea Mays
gtacaactcaaagactagcaaagaggtcaggtgaccggctcaccgctcggagtcgcggcttcagaaatcagaatcagagcacctgcctctcttcagtttgttgccgtctctctctctcctcttgacgcaactcctctcctatcttctctctctccatcgctccctcctccgcgccgcgttggcaccgaaccctcctgtcatggcaaggccgccgaaggaggcgattgataccttcatcagcatcacgggggcggacgaggccgtcgccgtacgcaaactcgaggaacatggtggtgatcttaatcgagcaataaattcacatttcaatgatggagacagcatattgaacggaatcagtcaaaacgccatgcctgctagtcgtgatgatatgatggacctggatggaccacttgataatacatttcaaagatctttgttgccagagagtttccgtgccccttttgctctaatggatccaaatttccaggaccaattttttgacagagttggctccactgatggtgtcattcgtgaaccgctagtttcacatccaagagaggtgagggagatacctatcgaagttaaggatggtgatcctcaaacaggttcatctggccaggatgttactggaaatgagtcttcaaatggccctgaagtccctgaaactatcataattgatgatgtggacggtggattgttatctgcaccatctgttccacatcctattattcctagcaatacatctactgtgccaactgctcctccattggttcatgttaatgactatgatgaggacatagaagaggaaatgattcgggcagcaattgaagcttcaaagaaggattctgaaggactggcaaatatagtcgagcaaggaggccagcatcaagaggaagtgaatttgagggaccattcttctgataaagcaggcatggaaaccgcaaatggaatagttgagaggactagcttcagaaaaggctggaacatctaggcaaccaatagatgacgagagcttccaggaggaggctgaagatgtagaagaacagccgttagttaggcgtcgttctcggcgtgccccttctgaggacaatgaattaccaaaaatagtgcacccaggtgctagccctgttctgaacaatcaccagtataatggagatgatttcccatctgagaacctctacttattatcccccaatatctcattctccatcaccagcattaactgaacagcggttattacgagagcagcaggacgatgagtaccttgcatcgctacaagctgatcaagaaaaggagttaaaggccctacaggaggctgagctccgtcgccttgaagaaacagctgcgagagaagctgttcttgagaaacagaagcaagaggaggaggaaaggcgtaaaaaacaacttgaggaagaggaactagagtccagtctcacttcgaagcaagcatcattaccaccggaaccgtctccagacgcagagggtgctgtgacagttgtagtccgaatgcctgatggtagtcgacaggggcgccgctttctcaaaactgataaacttcagttcctatttgatttcttagacattgggaggacttgcaagccagggacctacagattggtgaggacatacccaaggcgcacgtttaccaacagcgagggtgacgtatcattcagtgatcttggcctaacaagcaagcaggaagccctgtttctagagcagatcacggggtagaggataatcgttaggcatggttagagataccacagctgggcaggagaattttacacaaaatacttgcaccatatcgccagtgaaaactcggtctgtcaaattggttgggttggtcgaagaaaggttaaaaattcttttgtggcgccatgtgtcgtgacgcattgcgctttgcatgcaaattggttgggttggtcgaagaaaggttaaaaattcttttgtggcgccatgtgtcgtgacgcattgcgctttgcatgctttacgttattatatatatgcgtgatactttatacctacgcatgcatgatgattcgtttcagtgagccctgctgtgcagagtgggttctgtattattgttggttctttgaatcaaagcgatgttgcacattgcacagccacaggccggtcgtgtgcgtacaagatcgcaaaagggcacgcgaccctcaagagtttgctttagcattcactacgaatgacggaatgaggacaccgagtcgactcgacgccggtggccttttattattcagcgtgtttggatcccttgccttttgcccagtgcatcgcactggctatcatcagctcattactctgcacgcatgacagcaaagagcaaatcatcagcacggcatataaaaaacgacaaataaagacacatttttcatgcgtggcggatggcggcatggcgcagtgtgtgtcattcatggcggatcagcacgacaaataactagagatggaggccttacggcagctgactggcgggaggccgcacttggccggcaggctgttgatgatgctgaacgttccgcaggcgcagtccctggacacggcccccagcgcggagcagcactccggcccgggcgccggcggaacctgccccggcaagggtggcacgctgtagcgcaagcagggggccagcccgcgcagctgccccgcgcacgtctgctgcgcctcggcgccaccgcccagccccgctgccaacaccaggagcagcagcagggacagcgccgcgggcaggccgcgcggctgcaccttgccgccgccggcggctgtcgtcgtcgtcgccgtcattattccaaactgaaaagcaccggccgacctgaccgtcgtctcgcgtacgcggaccagcagcgtgcgtgctgcttcgcacgtactggctctggactgggtcgcggtgtgcgtgtgccgtgtgcgcgcgctaacggcgggatttataggcgttcattagtgactgtggcctcg

SEQ ID NO: 69548 - DNA, 3155 bp, Zea Mays
tggcaacgcaccgttacgaccagtagatatattatttatagagtttagttgaaaatacagcggaggacagagagtgtggaactgtggatcgtacaactcaaagactagcaaagaggtcaggtgaccggctcaccgctcggagtcgcggcttcagaaatcagaatcagagcacctgcctctcttcagtttgttgccgtctctctctctcctcttgacgcaactcctctcctatcttctctctctccatcgctccctcctccgcgccgcgttggcaccgaaccctcctgtcatggcaaggccgccgaaggaggcgattgataccttcatcagcatcacgggggcggacgaggccgtcgccgtacgcaaactcgaggaacatggtggtgatcttaatcgagcaataaattcacatttcaatgatggagacagcatattgaacggaatcagtcaaaacgccatgcctgctagtcgtgatgatatgatggacctggatggaccacttgataatacatttcaaagatctttgttgccagagagtttccgtgccccttttgctctaatggatccaaatttccaggaccaattttttgacagagttggctccactgatggtgtcattcgtgaaccgctagtttcacatccaagagaggtgagggagatacctatcgaagttaaggatggtgatcctcaaacaggttcatctggccaggatgttactggaaatgagtcttcaaatggccctgaagtccctgaaactatcataattgatgatgtggacggtggattgttatctgcaccatctgttccacatcctattattcctagcaatacatctactgtgccaactgctcctccattggttcatgttaatgactatgatgaggacatagaagaggaaatgattcgggcagcaattgaagcttcaaagaaggattctgaaggactggcaaatatagtcgagcaaggaggccagcatcaagaggaagtgaatttgagggaccattcttctgataaagcaggcatggaaaccgcaaatggaatagttgagagaaaaggctggaacatctaggcaaccaatagatgacgagagcttccaggaggaggctgaagatgtagaagaacagccgttagttaggcgtcgttctcggcgtgccccttctgaggacaatgaattaccaaaaatagtgcacccaggtgctagccctgttctgaacaatcaccagtataatggagatgatttcccatctgagtggggtggcatttcttctgaggaacatgatgaagctgttatgcttgaggctgcaatgtttggtggagttcctgaaggaccaacatatcctttctctatgccttctcacagaacctctacttattatcccccaatatctcattctccatcaccagcattaactgaacagcggttattacgagagcagcaggacgatgagtaccttgcatcgctacaagctgatcaagaaaaggagttaaaggccctacaggaggctgagctccgtcgccttgaagaaacagctgcgagagaagctgttcttgagaaacagaagcaagaggaggaggaaaggcgtaaaaaacaacttgaggaagaggaactagagtccagtctcacttcgaagcaagcatcattaccaccggaaccgtctccagacgcagagggtgctgtgacagttgtagtccgaatgcctgatggtagtcgacaggggcgccgctttctcaaaactgataaacttcagttcctatttgatttcttagacattgggaggacttgcaagccagggacctacagattggtgaggacatacccaaggcgcacgtttaccaacagcgagggtgacgtatcattcagtgatcttggcctaacaagcaagcaggaagccctgtttctagagcagatcacggggtagaggataatcgttaggcatggttagagataccacagctgggcaggagaattttacacaaaatacttgcaccatatcgccagtgaaaactcggtctgtcaaattggttgggttggtcgaagaaaggttaaaaattcttttgtggcgccatgtgtcgtgacgcattgcgctttgcatgcaaattggttgggttggtcgaagaaaggttaaaaattcttttgtggcgccatgtgtcgtgacgcattgcgctttgcatgctttacgttattatatatatgcgtgatactttatacctacgcatgcatgatgattcgtttcagtgagccctgctgtgcagagtgggttctgtattattgttggttctttgaatcaaagcgatgttgcacattgcacagccacaggccggtcgtgtgcgtacaagatcgcaaaagggcacgcgaccctcaagagtttgctttagcattcactacgaatgacggaatgaggacaccgagtcgactcgacgccggtggccttttattattcagcgtgtttggatcccttgccttttgcccagtgcatcgcactggctatcatcagctcattactctgcacgcatgacagcaaagagcaaatcatcagcacggcatataaaaaacgacaaataaagacacatttttcatgcgtggcggatggcggcatggcgcagtgtgtgtcattcatggcggatcagcacgacaaataactagagatggaggccttacggcagctgactggcgggaggccgcacttggccggcaggctgttgatgatgctgaacgttccgcaggcgcagtccctggacacggcccccagcgcggagcagcactccggcccgggcgccggcggaacctgccccggcaagggtggcacgctgtagcgcaagcagggggccagcccgcgcagctgccccgcgcacgtctgctgcgcctcggcgccaccgcccagccccgctgccaacaccaggagcagcagcagggacagcgccgcgggcaggccgcgcggctgcaccttgccgccgccggcggctgtcgtcgtcgtcgccgtcattattccaaactgaaaagcaccggccgacctgaccgtcgtctcgcgtacgcggaccagcagcgtgcgtgctgcttcgcacgtactggctctggactgggtcgcggtgtgcgtgtgccgtgtgcgcgcgctaacggcgggatttataggcgttcattagtgactgtggcctcg

SEQ ID NO: 69549 - DNA, 3161 bp, Zea Mays
tggcaacgcaccgttacgaccagtagatatattatttatagagtttagttgaaaatacagcggaggacagagagtgtggaactgtggatcgtacaactcaaagactagcaaagaggtcaggtgaccggctcaccgctcggagtcgcggcttcagaaatcagaatcagagcacctgcctctcttcagtttgttgccgtctctctctctcctcttgacgcaactcctctcctatcttctctctctccatcgctccctcctccgcgccgcgttggcaccgaaccctcctgtcatggcaaggccgccgaaggaggcgattgataccttcatcagcatcacgggggcggacgaggccgtcgccgtacgcaaactcgaggaacatggtggtgatcttaatcgagcaataaattcacatttcaatgatggagacagcatattgaacggaatcagtcaaaacgccatgcctgctagtcgtgatgatatgatggacctggatggaccacttgataatacatttcaaagatctttgttgccagagagtttccgtgccccttttgctctaatggatccaaatttccaggaccaattttttgacagagttggctccactgatggtgtcattcgtgaaccgctagtttcacatccaagagaggtgagggagatacctatcgaagttaaggatggtgatcctcaaacaggttcatctggccaggatgttactggaaatgagtcttcaaatggccctgaagtccctgaaactatcataattgatgatgtggacggtggattgttatctgcaccatctgttccacatcctattattcctagcaatacatctactgtgccaactgctcctccattggttcatgttaatgactatgatgaggacatagaagaggaaatgattcgggcagcaattgaagcttcaaagaaggattctgaaggactggcaaatatagtcgagcaaggaggccagcatcaagaggaagtgaatttgagggaccattcttctgataaagcaggcatggaaaccgcaaatggaatagttgagagcttcagaaaaggctggaacatctaggcaaccaatagatgacgagagcttccaggaggaggctgaagatgtagaagaacagccgttagttaggcgtcgttctcggcgtgccccttctgaggacaatgaattaccaaaaatagtgcacccaggtgctagccctgttctgaacaatcaccagtataatggagatgatttcccatctgagtggggtggcatttcttctgaggaacatgatgaagctgttatgcttgaggctgcaatgtttggtggagttcctgaaggaccaacatatcctttctctatgccttctcacagaacctctacttattatcccccaatatctcattctccatcaccagcattaactgaacagcggttattacgagagcagcaggacgatgagtaccttgcatcgctacaagctgatcaagaaaaggagttaaaggccctacaggaggctgagctccgtcgccttgaagaaacagctgcgagagaagctgttcttgagaaacagaagcaagaggaggaggaaaggcgtaaaaaacaacttgaggaagaggaactagagtccagtctcacttcgaagcaagcatcattaccaccggaaccgtctccagacgcagagggtgctgtgacagttgtagtccgaatgcctgatggtagtcgacaggggcgccgctttctcaaaactgataaacttcagttcctatttgatttcttagacattgggaggacttgcaagccagggacctacagattggtgaggacatacccaaggcgcacgtttaccaacagcgagggtgacgtatcattcagtgatcttggcctaacaagcaagcaggaagccctgtttctagagcagatcacggggtagaggataatcgttaggcatggttagagataccacagctgggcaggagaattttacacaaaatacttgcaccatatcgccagtgaaaactcggtctgtcaaattggttgggttggtcgaagaaaggttaaaaattcttttgtggcgccatgtgtcgtgacgcattgcgctttgcatgcaaattggttgggttggtcgaagaaaggttaaaaattcttttgtggcgccatgtgtcgtgacgcattgcgctttgcatgctttacgttattatatatatgcgtgatactttatacctacgcatgcatgatgattcgtttcagtgagccctgctgtgcagagtgggttctgtattattgttggttctttgaatcaaagcgatgttgcacattgcacagccacaggccggtcgtgtgcgtacaagatcgcaaaagggcacgcgaccctcaagagtttgctttagcattcactacgaatgacggaatgaggacaccgagtcgactcgacgccggtggccttttattattcagcgtgtttggatcccttgccttttgcccagtgcatcgcactggctatcatcagctcattactctgcacgcatgacagcaaagagcaaatcatcagcacggcatataaaaaacgacaaataaagacacatttttcatgcgtggcggatggcggcatggcgcagtgtgtgtcattcatggcggatcagcacgacaaataactagagatggaggccttacggcagctgactggcgggaggccgcacttggccggcaggctgttgatgatgctgaacgttccgcaggcgcagtccctggacacggcccccagcgcggagcagcactccggcccgggcgccggcggaacctgccccggcaagggtggcacgctgtagcgcaagcagggggccagcccgcgcagctgccccgcgcacgtctgctgcgcctcggcgccaccgcccagccccgctgccaacaccaggagcagcagcagggacagcgccgcgggcaggccgcgcggctgcaccttgccgccgccggcggctgtcgtcgtcgtcgccgtcattattccaaactgaaaagcaccggccgacctgaccgtcgtctcgcgtacgcggaccagcagcgtgcgtgctgcttcgcacgtactggctctggactgggtcgcggtgtgcgtgtgccgtgtgcgcgcgctaacggcgggatttataggcgttcattagtgactgtggcctcg

SEQ ID NO: 69550 - DNA, 3167 bp, Zea Mays
tggcaacgcaccgttacgaccagtagatatattatttatagagtttagttgaaaatacagcggaggacagagagtgtggaactgtggatcgtacaactcaaagactagcaaagaggtcaggtgaccggctcaccgctcggagtcgcggcttcagaaatcagaatcagagcacctgcctctcttcagtttgttgccgtctctctctctcctcttgacgcaactcctctcctatcttctctctctccatcgctccctcctccgcgccgcgttggcaccgaaccctcctgtcatggcaaggccgccgaaggaggcgattgataccttcatcagcatcacgggggcggacgaggccgtcgccgtacgcaaactcgaggaacatggtggtgatcttaatcgagcaataaattcacatttcaatgatggagacagcatattgaacggaatcagtcaaaacgccatgcctgctagtcgtgatgatatgatggacctggatggaccacttgataatacatttcaaagatctttgttgccagagagtttccgtgccccttttgctctaatggatccaaatttccaggaccaattttttgacagagttggctccactgatggtgtcattcgtgaaccgctagtttcacatccaagagaggtgagggagatacctatcgaagttaaggatggtgatcctcaaacaggttcatctggccaggatgttactggaaatgagtcttcaaatggccctgaagtccctgaaactatcataattgatgatgtggacggtggattgttatctgcaccatctgttccacatcctattattcctagcaatacatctactgtgccaactgctcctccattggttcatgttaatgactatgatgaggacatagaagaggaaatgattcgggcagcaattgaagcttcaaagaaggattctgaaggactggcaaatatagtcgagcaaggaggccagcatcaagaggaagtgaatttgagggaccattcttctgataaagcaggcatggaaaccgcaaatggaatagttgagaggactagcttcagaaaaggctggaacatctaggcaaccaatagatgacgagagcttccaggaggaggctgaagatgtagaagaacagccgttagttaggcgtcgttctcggcgtgccccttctgaggacaatgaattaccaaaaatagtgcacccaggtgctagccctgttctgaacaatcaccagtataatggagatgatttcccatctgagtggggtggcatttcttctgaggaacatgatgaagctgttatgcttgaggctgcaatgtttggtggagttcctgaaggaccaacatatcctttctctatgccttctcacagaacctctacttattatcccccaatatctcattctccatcaccagcattaactgaacagcggttattacgagagcagcaggacgatgagtaccttgcatcgctacaagctgatcaagaaaaggagttaaaggccctacaggaggctgagctccgtcgccttgaagaaacagctgcgagagaagctgttcttgagaaacagaagcaagaggaggaggaaaggcgtaaaaaacaacttgaggaagaggaactagagtccagtctcacttcgaagcaagcatcattaccaccggaaccgtctccagacgcagagggtgctgtgacagttgtagtccgaatgcctgatggtagtcgacaggggcgccgctttctcaaaactgataaacttcagttcctatttgatttcttagacattgggaggacttgcaagccagggacctacagattggtgaggacatacccaaggcgcacgtttaccaacagcgagggtgacgtatcattcagtgatcttggcctaacaagcaagcaggaagccctgtttctagagcagatcacggggtagaggataatcgttaggcatggttagagataccacagctgggcaggagaattttacacaaaatacttgcaccatatcgccagtgaaaactcggtctgtcaaattggttgggttggtcgaagaaaggttaaaaattcttttgtggcgccatgtgtcgtgacgcattgcgctttgcatgcaaattggttgggttggtcgaagaaaggttaaaaattcttttgtggcgccatgtgtcgtgacgcattgcgctttgcatgctttacgttattatatatatgcgtgatactttatacctacgcatgcatgatgattcgtttcagtgagccctgctgtgcagagtgggttctgtattattgttggttctttgaatcaaagcgatgttgcacattgcacagccacaggccggtcgtgtgcgtacaagatcgcaaaagggcacgcgaccctcaagagtttgctttagcattcactacgaatgacggaatgaggacaccgagtcgactcgacgccggtggccttttattattcagcgtgtttggatcccttgccttttgcccagtgcatcgcactggctatcatcagctcattactctgcacgcatgacagcaaagagcaaatcatcagcacggcatataaaaaacgacaaataaagacacatttttcatgcgtggcggatggcggcatggcgcagtgtgtgtcattcatggcggatcagcacgacaaataactagagatggaggccttacggcagctgactggcgggaggccgcacttggccggcaggctgttgatgatgctgaacgttccgcaggcgcagtccctggacacggcccccagcgcggagcagcactccggcccgggcgccggcggaacctgccccggcaagggtggcacgctgtagcgcaagcagggggccagcccgcgcagctgccccgcgcacgtctgctgcgcctcggcgccaccgcccagccccgctgccaacaccaggagcagcagcagggacagcgccgcgggcaggccgcgcggctgcaccttgccgccgccggcggctgtcgtcgtcgtcgccgtcattattccaaactgaaaagcaccggccgacctgaccgtcgtctcgcgtacgcggaccagcagcgtgcgtgctgcttcgcacgtactggctctggactgggtcgcggtgtgcgtgtgccgtgtgcgcgcgctaacggcgggatttataggcgttcattagtgactgtggcctcg

SEQ ID NO: 69551 - DNA, 1783 bp, Zea Mays
ctcaaagactagcaaagaggtcaggtgaccggctcaccgctcggagtcgcggcttcagaaatcagaatcagagcacctgcctctcttcagtttgttgccgtctctctctctcctcttgacgcaactcctctcctatcttctctctctccatcgctccctcctccgcgccgcgttggcaccgaaccctcctgtcatggcaaggccgccgaaggaggcgattgataccttcatcagcatcacgggggcggacgaggccgtcgccgtacgcaaactcgaggaacatggtggtgatcttaatcgagcaataaattcacatttcaatgatggagacagcatattgaacggaatcagtcaaaacgccatgcctgctagtcgtgatgatatgatggacctggatggaccacttgataatacatttcaaagatctttgttgccagagagtttccgtgccccttttgctctaatggatccaaatttccaggaccaattttttgacagagttggctccactgatggtgtcattcgtgaaccgctagtttcacatccaagagaggtgagggagatacctatcgaagttaaggatggtgatcctcaaacaggttcatctggccaggatgttactggaaatgagtcttcaaatggccctgaagtccctgaaactatcataattgatgatgtggacggtggattgttatctgcaccatctgttccacatcctattattcctagcaatacatctactgtgccaactgctcctccattggttcatgttaatgactatgatgaggacatagaagaggaaatgattcgggcagcaattgaagcttcaaagaaggattctgaaggactggcaaatatagtcgagcaaggaggccagcatcaagaggaagtgaatttgagggaccattcttctgataaagcaggcatggaaaccgcaaatggaatagttgagaggcaaggactagcttcagaaaaggctggaacatctaggcaaccaatagatgacgagagcttccaggaggaggctgaagatgtagaagaacagccgttagttaggcgtcgttctcggcgtgccccttctgaggacaatgaattaccaaaaatagtgcacccaggtgctagccctgttctgaacaatcaccagtataatggagatgatttcccatctgagtggggtggcatttcttctgaggaacatgatgaagctgttatgcttgaggctgcaatgtttggtggagttcctgaaggaccaacatatcctttctctatgccttctcacagaacctctacttattatcccccaatatctcattctccatcaccagcattaactgaacagcggttattacgagagcagcaggacgatgagtaccttgcatcgctacaagctgatcaagaaaaggagttaaaggccctacaggaggctgagctccgtcgccttgaagaaacagctgcgagagaagctgttcttgagaaacagaagcaagaggaggaggaaaggcgtaaaaaacaacttgaggaagaggaactagagtccagtctcacttcgaagcaagcatcattaccaccggaaccgtctccagacgcagagggtgctgtgacagttgtagtccgaatgcctgatggtagtcgacaggggcgccgctttctcaaaactgataaacttcagttcctatttgatttcttagacattgggaggacttgcaagccagggacctacagattgttaatgactggtgaccaggcagctatccttgtttgaaagtccctgatccagagttca

SEQ ID NO: 69552 - DNA, 2671 bp, Zea Mays
gttataagattgtctgcatccaatcacaaagccccacagaaattggcccaagactaaagcaacctgtaccgcctcagcccaactaaaagcctgacccaacccaacacttcatacaccctcaacggcaaggtcagagtcagacacacctcccccttgcagaatcccacacaagtctcgatgctccgccgcatagcggccctccggccgccgtctcgagcggccgcgccattgggggcgattgcggcgccctattcctcgaagtccacatccatccctcagaagcagcagcgcgtccgagaccatgccttcgacggcgtcatggaggtccagaagcgcgtccgccgcttccacgccctccacgctctcatcctctacgccgccgcccccaccgcgccctcccgcgccggcggaagcggcgccgtgtccgtccccttcacccgcctcggcgccctcgcgcgccgccagttacgcctcgcgcccctcgacgctggccgctttctcctgcgccacgcgcacgccttccacctcttcctccaccccgtccaccgcatgctccacatccgcctcaccccacgcgctgcagcggtgctcgacgctgaggccgacgccgtcgccgccgcactccccggcatctccgtcctacgcctccgcaagctcctcctccttgcgcccccgcaccgccgtctccgcctcgagcacatccacctcctccgccgcgaccttggcttcccagacgatttcgcccagtctatcatccagtccaacccctccctcttccgcctcacccctgacggcttcgtcgaattcctgccgtcccccaccgacccgcccgatctcaccgtcgccgccgtagagcgcgcccgggagcgccactaccgcgagcaccgcgcgcccggctccgccgaggaggacgcgcgtttcgcgttccccattcgtttcccgccagggtttaagatcggcaagtacttccggatcgctgtctggaaatggcagcgcctcccctacgcttcaccctatgcagacgtcacgggccatgacctgcgttcgcttgaggcacaacgccgcatggaaaagcgcgcggtcgctgctgtccacgagtttctctcgctcacagttgagaagcgcaccacattggagcgccttgcgctgttccgcgatgcactcggtgtgcccaagaagatcaaagagttcttgctgaagtaccagggtatattctacatatccacgagggggaatcagggtaagctgcatacggtgttcctcagggaggcgtattacaaaggggaacttgttgacccgaatgcaatacatgatgcaagacggaagctggaggagttgctcatgatcaacccacagagggcgaatttggacagaatgttcaccagcatgggccgtgggtgggatgaacttggtggcagccgccgtggtggatctgaactgagggatgagtttcttggcgatggaggtggcaggaaaaggaatgctgatgctgatggggctgagagtggggaggactcgggtgttgaatcactgtacattgattgagaaatagaattatatatgaaggctctggacatcaacttgcaagctggtttgtgagcaggcactcgttccctttggaaaaggtttaacttcttgcattggcatcatcaccactatagcatttctagctaatcggtcagctagaaaggtgatgggctcagaagtcagaactgtcagcaaggatatcacattcatgaacctgcaatgagtcgataagatggagaccaaggaaaagtctaaaggcctccacgtgagggctggttcggtggatagagaaattgaggagatccatgagcagggatcctcttgctatttaggcttgtttggttattccaattccatgtggattgaagtgtattggaatgtattgggtagattttgacttgctatgaatttaaaccgactcaatactattcaatccacatggattaacggtgaaatgaacaagccctagaggatctctctccatggatctcctttattttcctgtttgggatcccttctctatgaacccctccatttctctgtccactaaaccagccctgaatgggagaaatagcttgggaagtttttgcctgaacgtttagtgtccaaggaggctggaaaccacgatatgttctgtaaatgcctagaccagtctcctggcattggtatgtgaggcatcatacctgcaacaacagttagattggtatgtgaggcatcagacctgcaacaacagctatattggtatgtgaggcatcagacctgcaacaacagctagattgttatgtgaggcatcagacctgcaacaacagctagattgttatgtgaggcatcagacctgcaacaacagctagaaagggaaccacattcttcatgatgattattgcttcaagggttctgaaacctgttacctgaaatttgttgttaacaacgcaaacttcatattgagccttgccttttgcacagcctttgcctgaaaaaatcatagagtggatatgccattcttttttcaatgtcatcagaacagctcagtcactgcacatatagtgtaaaatctcatggtaagagccttgcagtagattttgatagctagagaatgaaaccaaactgctgcaaaactacaacggaacaaaatatatcattttcc

SEQ ID NO: 69553 - DNA, 2572 bp, Zea Mays
gttataagattgtctgcatccaatcacaaagccccacagaaattggcccaagactaaagcaacctgtaccgcctcagcccaactaaaagcctgacccaacccaacacttcatacaccctcaacggcaaggtcagagtcagacacacctcccccttgcagaatcccacacaagtctcgatgctccgccgcatagcggccctccggccgccgtctcgagcggccgcgccattgggggcgattgcggcgccctattcctcgaagtccacatccatccctcagaagcagcagcgcgtccgagaccatgccttcgacggcgtcatggaggtccagaagcgcgtccgccgcttccacgccctccacgctctcatcctctacgccgccgcccccaccgcgccctcccgcgccggcggaagcggcgccgtgtccgtccccttcacccgcctcggcgccctcgcgcgccgccagttacgcctcgcgcccctcgacgctggccgctttctcctgcgccacgcgcacgccttccacctcttcctccaccccgtccaccgcatgctccacatccgcctcaccccacgcgctgcagcggtgctcgacgctgaggccgacgccgtcgccgccgcactccccggcatctccgtcctacgcctccgcaagctcctcctccttgcgcccccgcaccgccgtctccgcctcgagcacatccacctcctccgccgcgaccttggcttcccagacgatttcgcccagtctatcatccagtccaacccctccctcttccgcctcacccctgacggcttcgtcgaattcctgccgtcccccaccgacccgcccgatctcaccgtcgccgccgtagagcgcgcccgggagcgccactaccgcgagcaccgcgcgcccggctccgccgaggaggacgcgcgtttcgcgttccccattcgtttcccgccagggtttaagatcggcaagtacttccggatcgctgtctggaaatggcagcgcctcccctacgcttcaccctatgcagacgtcacgggccatgacctgcgttcgcttgaggcacaacgccgcatggaaaagcgcgcggtcgctgctgtccacgagtttctctcgctcacagttgagaagcgcaccacattggagcgccttgcgctgttccgcgatgcactcggtgtgcccaagaagatcaaagagttcttgctgaagtaccagggtatattctacatatccacgagggggaatcagggtaagctgcatacggtgttcctcagggaggcgtattacaaaggggaacttgttgacccgaatgcaatacatgatgcaagacggaagctggaggagttgctcatgatcaacccacagagggcgaatttggacagaatgttcaccagcatgggccgtgggtgggatgaacttggtggcagccgccgtggtggatctgaactgagggatgagtttcttggcgatggaggtggcaggaaaaggaatgctgatgctgatggggctgagagtggggaggactcgggtgttgaatcactgtacattgattgagaaatagaattatatatgaaggctctggacatcaacttgcaagctggtgatgggctcagaagtcagaactgtcagcaaggatatcacattcatgaacctgcaatgagtcgataagatggagaccaaggaaaagtctaaaggcctccacgtgagggctggttcggtggatagagaaattgaggagatccatgagcagggatcctcttgctatttaggcttgtttggttattccaattccatgtggattgaagtgtattggaatgtattgggtagattttgacttgctatgaatttaaaccgactcaatactattcaatccacatggattaacggtgaaatgaacaagccctagaggatctctctccatggatctcctttattttcctgtttgggatcccttctctatgaacccctccatttctctgtccactaaaccagccctgaatgggagaaatagcttgggaagtttttgcctgaacgtttagtgtccaaggaggctggaaaccacgatatgttctgtaaatgcctagaccagtctcctggcattggtatgtgaggcatcatacctgcaacaacagttagattggtatgtgaggcatcagacctgcaacaacagctatattggtatgtgaggcatcagacctgcaacaacagctagattgttatgtgaggcatcagacctgcaacaacagctagattgttatgtgaggcatcagacctgcaacaacagctagaaagggaaccacattcttcatgatgattattgcttcaagggttctgaaacctgttacctgaaatttgttgttaacaacgcaaacttcatattgagccttgccttttgcacagcctttgcctgaaaaaatcatagagtggatatgccattcttttttcaatgtcatcagaacagctcagtcactgcacatatagtgtaaaatctcatggtaagagccttgcagtagattttgatagctagagaatgaaaccaaactgctgcaaaactacaacggaacaaaatatatcattttcc

SEQ ID NO: 69554 - DNA, 2497 bp, Zea Mays
caactctctgactctctctccccccctttattggcgtcatatgactctctccctagtccctacactttctcccccgtgtcccgttgctaaaagcttagagaaaaacctaatcggacagcactgtggccaagcagggcgcgggagatcgtacgccggcggcgaggtcctgcggtggcgggcctcggcagagtggtggtgctagcggagtgcagctgttgggttggtgggtaagagtgagaaggacatgaaggcgctgcggcgatccagcacctcgtcctcgccgacggccgcgtcctcccctccgtcctcatcgtggatccacatccggtcgctcctcgccgccgccgcgtcctcgtcctcgtcctcctccttcgcagcggctgcggctgggagcgcggtggctgtggtgtcggctgcggtggccgcctcgtcttcttcctcgccggcgtcgtcctcgccgcactcggagcggggtggtcttaaatctccatggtcccggaggaaaagaaaacgagcactttctcgtgaacagtgggagagtttgttttcagcaaatgggaagcttcgtgatggtggaaggaagtttctcaagaaagttcgcagtggtggcattgaagcaagcattagggctgaagtttggcccttcctactaggagtctatgatttgaatagctctgaagaggaaaggaactctatcaagatcaagaaaagtatgaaaagctgaggaggcagtgccaacaaattctgaatggctacaagggaaatgggttgaaggcaataactgaacttaatagtgatgagtgttctagtttagatggtattgctgaaggatcagaatcaccttgttttgaagatgccaatgctatacgtgctcctgtttcactcgaggaggtgaagcctgaacagaatgaagctgaccaaccagacaacattctctgtgatgttgttgaatgcatggaagaagatgcagatgagttagcttatgcatatccatgcaaagcagagtcagaatcgtctgattctgaatcatctgatgaggatgaccctggagggatttctgtgtctggcgacgagaactgtgacccagatactaaatttaccatgagcaattcattcaaggcagatttttttaggtctagcagaacatcagaggacttcgccacatggcagcgcatcataaggttggatgctatccggtcaaacagtgaatggattttgttctcccgcaaccagtctgaagttcccaaggagagagcattgcagtctgcagcatctgttgggttgaaagactatgagcacttggagcccagtatgatttatcatgcagctcgattagttgggttgctcgaagcatatgcggtctacgatccagagattggctactgccaaggcatgagcgatctgttgtcacctatcattgcggtgatggaggatgacgatgaagcgttctggtgtttcgtgggtttcatgaggaaagcaaggcacaacttcaggctcgacgaggttggaatacgaaggcaactgaagattgtctctcagattatcaagcgcaaagattcgcacctgtataggcatctgcagaagttgcaggccgaggactgtttcttcgtgtacagaatggtggtggttctgttcaggcgagagctcacctttgagcaaaccgtgtgcctgtgggaggttatgtgggctgaccaggcagccatacgagccgggatcgggaggtccacctggggaaggataaggctgcgtgctcccccaactgacgacctgttgctctacgccatcgccgcctgcgtcctgcagaggaggaagctgataattgagaagtatagcagcatggacgagatactgcgagagtgcaatagcatggccgggcagctagacgtctggaggctgctagatgatgcacatgacctggttgttaaccttcatgataaaatctgatctgatctgttctcggccctcatggtagaacagatgtactaagcctcaacaaaaggaaagaaaaaaaagaaactgaggctccttccacctacggcattgttcgtttattccaattccacatggattggagtgtattggaatggattaggatagatttttatttgctatggatttaaaccgacttaataccacccaatctacatggattaatggtgaaacggccaagccctaaggaggccaaatggtggtattctgttacctgctattcgttcccaccacagaacccaattctagatatagagaatgttgtaacttagagtgccctcgcaataaaaaggctgaaatattgcttgtgttcccgtgtagtgaggggttaacgtgttatagacttataggcaaaaacagagtttcctgggaagtcacttgggagttaattttatatgcatccgcacttgggagttaattagtagaaatagtatggtcaatgttttggtctctttttaatattatatcataagtcagaaggttggttattctctctggccgatttttt

SEQ ID NO: 69555 - DNA, 2425 bp, Zea Mays
caactctctgactctctctccccccctttattggcgtcatatgactctctccctagtccctacactttctcccccgtgtcccgttgctaaaagcttagagaaaaacctaatcggacagcactgtggccaagcagggcgcgggagatcgtacgccggcggcgaggtcctgcggtggcgggcctcggcagagtggtggtgctagcggagtgcagctgttgggttggtgggtaagagtgagaaggacatgaaggcgctgcggcgatccagcacctcgtcctcgccgacggccgcgtcctcccctccgtcctcatcgtggatccacatccggtcgctcctcgccgccgccgcgtcctcgtcctcgtcctcctccttcgcagcggctgcggctgggagcgcggtggctgtggtgtcggctgcggtggccgcctcgtcttcttcctcgccggcgtcgtcctcgccgcactcggagcggggtggtcttaaatctccatggtcccggaggaaaagaaaacgagcactttctcgtgaacagtgggagagtttgttttcagcaaatgggaagcttcgtgatggtggaaggaagtttctcaagaaagttcgcagtggtggcattgaagcaagcattagggctgaagtttggcccttcctactaggagtctatgatttgaatagctctgaagaggaaaggaactctatcaagatcaagaaaaggaaacagtatgaaaagctgaggaggcagtgccaacaaattctgaatggctacaagggaaatgggttgaagatgccaatgctatacgtgctcctgtttcactcgaggaggtgaagcctgaacagaatgaagctgaccaaccagacaacattctctgtgatgttgttgaatgcatggaagaagatgcagatgagttagcttatgcatatccatgcaaagcagagtcagaatcgtctgattctgaatcatctgatgaggatgaccctggagggatttctgtgtctggcgacgagaactgtgacccagatactaaatttaccatgagcaattcattcaaggcagatttttttaggtctagcagaacatcagaggacttcgccacatggcagcgcatcataaggttggatgctatccggtcaaacagtgaatggattttgttctcccgcaaccagtctgaagttcccaaggagagagcattgcagtctgcagcatctgttgggttgaaagactatgagcacttggagcccagtatgatttatcatgcagctcgattagttgggttgctcgaagcatatgcggtctacgatccagagattggctactgccaaggcatgagcgatctgttgtcacctatcattgcggtgatggaggatgacgatgaagcgttctggtgtttcgtgggtttcatgaggaaagcaaggcacaacttcaggctcgacgaggttggaatacgaaggcaactgaagattgtctctcagattatcaagcgcaaagattcgcacctgtataggcatctgcagaagttgcaggccgaggactgtttcttcgtgtacagaatggtggtggttctgttcaggcgagagctcacctttgagcaaaccgtgtgcctgtgggaggttatgtgggctgaccaggcagccatacgagccgggatcgggaggtccacctggggaaggataaggctgcgtgctcccccaactgacgacctgttgctctacgccatcgccgcctgcgtcctgcagaggaggaagctgataattgagaagtatagcagcatggacgagatactgcgagagtgcaatagcatggccgggcagctagacgtctggaggctgctagatgatgcacatgacctggttgttaaccttcatgataaaatctgatctgatctgttctcggccctcatggtagaacagatgtactaagcctcaacaaaaggaaagaaaaaaaagaaactgaggctccttccacctacggcattgttcgtttattccaattccacatggattggagtgtattggaatggattaggatagatttttatttgctatggatttaaaccgacttaataccacccaatctacatggattaatggtgaaacggccaagccctaaggaggccaaatggtggtattctgttacctgctattcgttcccaccacagaacccaattctagatatagagaatgttgtaacttagagtgccctcgcaataaaaaggctgaaatattgcttgtgttcccgtgtagtgaggggttaacgtgttatagacttataggcaaaaacagagtttcctgggaagtcacttgggagttaattttatatgcatccgcacttgggagttaattagtagaaatagtatggtcaatgttttggtctctttttaatattatatcataagtcagaaggttggttattctctctggccgatttttt

SEQ ID NO: 69556 - DNA, 6023 bp, Zea Mays
cagatattatggctgcgctggactatcttcgttttggaaatgctcacagtttggggctgctgaattctgcatatattgtgcttatccccaaaaaaacggaggccttgtcagccagggattttcggcctattagcctaattcacagcttcgctaaattggttaccaagttgcttgctaataggctcggcccccaccttcagaagttagtggctgctaaccaaagtgcttttgtgaaaggaagatcgattcatgataattacatgatggtgcaacacgctattaaatctcttcacaaaaaagagtctcaagtttatttttaaaattggacatctccaaggcttttgactccgtttcttgggcttttctcattgaggtgctttctcaccttggatttggaaatatttggcgaaatttgatttcgaatctgttggcttcatcttccactcaggtgctgctgaatgggtctcctggtattcctattaggcatcggagagggcttcgccaaggtgatcccctttccccaatgctatttgtgctaataatggacgtccttagtagtatgtttcttctagctgaagatagggggctgctccataaccttctggaagggaatgtccgaaacataatttctatttatgctgacgatgtggttctgtttgttaaacctatagtggaagatctgaattgtgttaaggtaatattggactgctttggttcagcgtctggactggtgtgtaatatgaacaagagctgcgccatcccaattaaatgtagcgaccaggctgtgcagcagggttgcaaccttcttctctgcagctcggcgtccttcccctgtaattatttgggtcttccaatatcagatagaaagctcagaaaggcagatcttatggactgggttgagaagatagcagatagactccccaattggaaggctcggctacttaatctcgctggcaggacgacgttggtgcgttttgttctctctgccatccctatttatctcctcattgccatgagtattcccaagtgggtgatcaaatcgattgataagattcgcagagggttcttatggagaggcagaaaggacgtgaatggaggtaattgtttagtctcttgggatgtcgttacaaggccgcttctatttggtgggcttggggtcccaaatttgtattatcagagctgggctctgcaagctaaatggttgtggctggagaaaacagattcaaacaggccctggcatgggcttatgctgcctgtgccgttacaggtcaggaagttctttcatgcttcggttattactgcggtgggcaacggaaacaacactttattttggactgatagatggataaatggcggctgcatcaatgattttgctcctgatgtcgtttccaaggttgataaaattattgtctccactagaacagtggcccaggctcttggaggacagcaatggatcagtgacatcttgacacctctttcctggatggggatccaacaatttttgctgatttgggatgctgttagcactattgtgttaactcaggaggcggatattcacacctggctgcatacttcctctggtcagttttcttctaggtcttgttacagggctttatttatgggagctattacgtttgaaccttggaagaggctttggaaatcttgggctccccctaagtgcaagtttttcttatggctggccattcggaacaaatgttggacttcagatagattggagaagagaggtctggaccacccagtgtcttgcctactctgtgatcaagagcaggaaaccatacaacatattttgtgtacatgtgtctttgcaagacagttctggcattccattctgtttggattgaatgttggtaatctctctccatctggagatgagatctcctttgctgattggtggcgaaaaacaagtaagaagattcataaaagcaagagaaagggcatgaacaacatcattatcttaggggcctggtgtttatggatccaccgcaacaaagctgtctttgatggggagaccccttcgctaagctctatcagatgcgtcttccttgatgagattgggtgttggattacggctggtgccaagcatcttcagagctttggcttagagcttgcgcgtaaccttcacagtgtctagggagtggtgtgtgttttgtgtttttttgtttttggtaagcctgcttagggctttgtaccttggtccattttggaccttttttcttctctaattaaaatgatgcgcagttctcctgcgctttcgaaaaaaaaacaattaccaaaaaaaggtgagtacacgcgagtcgactaatgattagttgcactcaagaatgtccaaaaaacatagcaaaacacacatgaaagcgatacaacagaaaacacaaaggaacacacatagaaaacatgtgtcatcagattgattaccactgtacttctgagtcagaaggatgaataacaaatattttcaatattatgagcttcgacagcatgcaccttgggtgcttattctttgtcctgttagagtggatgcacaatcacttcaacccaaaagcttgctattaggagaaggtaaggtagacaatctacttatacacttcaacgaatccactcacgcgtagctagagaaagacgcaaacatcaaaataaataggtgggggcacaaattaagcctctgccaggattcgaactcgaaacctctggttctgataccatgttacagtggatgtactaaccagttcaacctaaaagtttaagctattaggagaaggtagacagtcaatgcacttggtctacacgatcttgctggcttcaggaagaagacacacgtctcatctccatgcttagttgtcgtaggttgatgctggaaaagcgccttatgaaccattacatggacaaaatttaccttctcatatgcactttttgtttcaatcatttcatgatcaacgtagtactccctccgttcttttttatttgtcgtggtttagttcaaaaacgaactagcgggcgacaaatattcgagaacggaggtagtattatttttctcatcccctttgcttgattttgactattatattcatgaagctattcaaatataagagaatgaatgaaaactattttcacattcatcttgttagttaagatctaaaagtaattttgttgtgaggctgatccctgaagtgaatttttggaagctgctttgctaatggaaactgttgccttcacgagcctacaaattgcataccgatgctgctgccagcctttacttgttcagatgcagctgtagttggcacttgcctgtgccctgtgccctgtgccattggatgccacagtagtatgctgtcaagtgctaacttaacaggctactgccagcaggcagcagctgcttatgtcgttgtcgccatttcaagtggctactgcatcaaatcatatataagaggaggatgatggcatgtgcagtttactgttaaatgatagagttggtgctgcagcatatctatttggaaaactggaatgatgaacatatttgtacatatgtcaagtatttggtgaacggattaaattcaatataattctactgttggcgcttgcttaatctggaatttgtcagttcttgaaaactattctctttctagtcccgataggttgatggacctgctcattccatgtcatgattctgcgattacttctttgtttagtttgttagcaatttgcatggtatctgtcaccaagtaggcttgatccattatgtcaatgggaccacaacatgcacatgcactgtgccacagtatggtggctgactgagttggctggagtctttctaagtcattctcctgctgtgattagtgaatctctggcctctgctcactttgaatagaatgtaactgggaatctcacatccgcatatcaacctcagtgaaagaatttacttgacttgagtcaggccaagccagttgcaaccaaaactccatcttttgtctcctggaccattcaattatggggctattcttcgtataaaaccatgccatgcctttgaggctcgtcaatgctactgtctaccactttcctgtgatttcagattagttctggcgatatgggcctaaaggtgtttcattggctgaatcggaggatgcatcctaatactgagtaccgcaccatccatggtaacaaggccatggaggataaggaggactctgcctcatagtgtggttgagaaagacactgaagcacttctgctccgtgatgtgcttcttaatggtatacttgcaattggcacacttggacatcacgtagactctgactcactttctcctgacctttgcattgaagaagatgatctcctcagtcctcatcatgggtgatgaaaaagtaattgaggaagagaaaaatgataaggaacccaggaaactttgcattggaaacagaaccgtttgaaccagtattacctattgttgagcctgctaagatgcattcattgtcgatgaaagaagacaactttacatgctttgtaacagaggaaatcctgatacgtgagttggaagatgggggagctgctaatatccaggaacgaccacttctgatggtagagaaggtggagaaagtaagaactacacttgctgatttgcttgcagcagaagtattctcatcaattgccccaggggagaatagttgccataatatcattgatgttggagcatccacttcaaagcatacatcgtggatggaaaaggtgcatcaaaagaaaccaaggaagccaacaccaaaaccactgaaaggcacaagaaaattaagtcaggtcatgaggaagatgttggggaagaagatccacccagagcagctcaatggacgtagcaatgcagagggccctcttacagtcttacttcatgatgtttattcttgccgacaattttgcttctctatttggttgtttttttggcatacgccgccaaatctggattcttaatagattgtacagatagccttgtaaccctgctgttggtggccctgcaaagtctcaacttgtccatgaggtagatgcccttggtggtgaaattggaaaaattactgataggtgctacttgcaaaagcgtgtactgaacagctcaaaaggccctgctgtacgtgcactgcgtgctcagcctgataagagagagtatgcaatagagatgaagaacagtgtggaaagcacagaaaatcttttcattagagaagcaatggctacagaggttttaattggaaaaaatgacaccattgagggtgtttgcactttcttcagcatggactttatgcaccatctgttgtacttagcaccagaacattcatgagtgtttctggggccaagctgctcggctcctggggcgtggacctccccatcaggccgctgcacacgctccacctctactggcgcgtgaagcccggccaggagcagactgtctcgacgagcgccgggttcccgaccttctccagctacggcgacctgcccgtgtacggcgcgccgtcgctggagctcccggggctcatcaagatcagctgcattagatcttagagtacactgttttacacaatttggagttgttactactatcaagctttagactttagactttggagtacactgtttttacactgtattaagctttagccttttatgctacagtgtgtaaaaaagcaagctttagacagttaggctaatctatagacagtgtaaagcttgattttttgacaatacagttcaaattcttagaacaatgcggtctgaaagtttaatacagttctgacaatagagttgagtacactgttttgaggctaatatgtcaagcttagataccagtttgtcaagcttgtttaagtccaaatttgtatttacttagttgtgtaaattgggtacaatttgaagactgttttagttggtgtagaaattgtgtagaatttctagatagttttatgttgctcggtgtgagacgtgtaaattgtggcttctgtattttttatgcccagtaaatactatcagtaat

SEQ ID NO: 69557 - DNA, 4348 bp, Zea Mays
aactcctcgctatcctcttccaatccgaaccacccggactcccggagcaagcggccgccggctaagcagacacgaacgcaggtccggcggcaatgcaacgcgccgcgctcgtcgggtcccctctcgtacctgtgggtccccttgctcagcttgccgtgcggcgccgctgccgcttccatggtggtgttcgcgtgaggtcctcaaccgggaaggacgggaccgggactgggaccgggggcggaagcgagggcggcgacggcgccggtgccgcagcgtcttggctgagctcggcggtcggggagaaagtggacgagcttctgcgccgcgaagagaaccgggccctgctcgagggcgtcgaggacgccgagcgccgcgttgagcgcgcgcgcgccgcgctcgccgacatcgagcgccaggaggccgccgcacgcctcgcccgcgaggaggtccgccgcctcgagaagcggcgcgatgagattgcagagtcccagcgggaattgcttcaagcaagagaaatgattgatgaagctcagcgatccttgtcttctagtcttgacgaaggaagctttggagatatgtcaagtggtgatgttgatgaagataacgagagaatagaatccgtaaaagctgctgcagtttcctctgtcgtcggtgttctggctagtttgcccatatctttctatgaagttgaagatcttccacaactattccttcggtcatcaattgttttcataagttgtgctttgtttggagtcacattccggtacgctgttagaagagatctggataatatccaactaaaaactggggctcctgcagcatttgcttttgttagaggccttgctctgctggaatctggtagaaccttcgagctgagtactgataccttaatatcagttactcttgatgctgcagtcagtgtggttgagaacattttcatatttctgcctgctgctgttgcactggactactgttttaagatgagatttttgagtccctttcctagaagaaaacaatagcttctgtgaagaatatgtatgatcaataacaatcttgatagctcaaatggtcatatgtaacacaaatgatatcttagattcattaaaaaaaacatttcccctcattcactcaaagttccatcaagtcaaccaaatagtattttttacttaatcttcttcctaagttcttattcaacaaagattactcataacttttctgtgaatatgaatttcacattcttcttgattgccgtgctctttatgaggactagcatagatggacgtatactggaatatgcctctttacaatacctgcacatggggtttgatagattttagatggaattaagtatatcctggtttgtcgttcattcgatcctcaccctggtgtaaacagaattcgctgcaccctgtgatcatctactgtctcagtgagtcagcgttctgatatggtcacgtagaagcattgcatgatatctataaatatgttctgtctgttatctacattaattaatgcttgcctgttagtgcttttccagtatactgtattaaaaaaactcgactggggagggaatgaccgtcctcccggtataatactaagaagagatcgaaacattggtcccggtcgagaaaatcctcgaaccctagctccccatcactaacgggtcggcttcagtgaaagggcctctagctgagttggttaggtggtccgattagcactccttaggtcctgagtttgaatctcagtgggagtgaatttcaggctgagattaaaaaagatcactcactcgttcccctggttgtgtgcacacgagatggactgagctatgggagagggatctttgtaggaaataggaggctcaaacacgagtaaagatttaggaaatagggggcggaccctcatgttgcacggggtaagctttcgtgacctttctcggtcggggcttcgatcgaagttcttcttaatataataccgtgggggcggtttttcccctaccgccgagtttttttacgggccggtgtcaactgtccactctgcaacggcccaaccgaagggtggcgcacatgacatcgtaaccagatgatgcatagtgaggggatttttttaaccaagccgaaaaattcgccccaaagggaatcgaaactgagacttggagatgctactcggaagccttaaccactagtagtgaatctctggcctctgctcactttgaatagaatgtaactgggaatctcacatccgcatatcaacctcagtgaaagaatttacttgacttgagtcaggccaagccagttgcaaccaaaactccatcttttgtctcctggaccattcaattatggggctattcttcgtataaaaccatgccatgcctttgaggctcgtcaatgctactgtctaccactttcctgtgatttcagattagttctggcgatatgggcctaaaggtgtttcattggctgaatcggaggatgcatcctaatactgagtaccgcaccatccatggtaacaaggccatggaggataaggaggactctgcctcatagtgtggttgagaaagacactgaagcacttctgctccgtgatgtgcttcttaatggtatacttgcaattggcacacttggacatcacgtagactctgactcactttctcctgacctttgcattgaagaagatgatctcctcagtcctcatcatgggtgatgaaaaagtaattgaggaagagaaaaatgataaggaacccaggaaactttgcattggaaacagaaccgtttgaaccagtattacctattgttgagcctgctaagatgcattcattgtcgatgaaagaagacaactttacatgctttgtaacagaggaaatcctgatacgtgagttggaagatgggggagctgctaatatccaggaacgaccacttctgatggtagagaaggtggagaaagtaagaactacacttgctgatttgcttgcagcagaagtattctcatcaattgccccaggggagaatagttgccataatatcattgatgttggagcatccacttcaaagcatacatcgtggatggaaaaggtgcatcaaaagaaaccaaggaagccaacaccaaaaccactgaaaggcacaagaaaattaagtcaggtcatgaggaagatgttggggaagaagatccacccagagcagctcaatggacgtagcaatgcagagggccctcttacagtcttacttcatgatgtttattcttgccgacaattttgcttctctatttggttgtttttttggcatacgccgccaaatctggattcttaatagattgtacagatagccttgtaaccctgctgttggtggccctgcaaagtctcaacttgtccatgaggtagatgcccttggtggtgaaattggaaaaattactgataggtgctacttgcaaaagcgtgtactgaacagctcaaaaggccctgctgtacgtgcactgcgtgctcagcctgataagagagagtatgcaatagagatgaagaacagtgtggaaagaaaatcttttcattagagaagcaatggctacagaggttttaattggaaaaaatgacaccattgagggtgtttgcactttcttcagcatggactttatgcaccatctgttgtacttagcaccagaacattcatgagtgtttctggggccaagctgctcggctcctggggcgtggacctccccatcaggccgctgcacacgctccacctctactggcgcgtgaagcccggccaggagcagactgtctcgacgagcgccgggttcccgaccttctccagctacggcgacctgcccgtgtacggcgcgccgtcgctggagctcccggggctcatcaagatcagctgcattagatcttagagtacactgttttacacaatttggagttgttactactatcaagctttagactttagactttggagtacactgtttttacactgtattaagctttagccttttatgctacagtgtgtaaaaaagcaagctttagacagttaggctaatctatagacagtgtaaagcttgattttttgacaatacagttcaaattcttagaacaatgcggtctgaaagtttaatacagttctgacaatagagttgagtacactgttttgaggctaatatgtcaagcttagataccagtttgtcaagcttgtttaagtccaaatttgtatttacttagttgtgtaaattgggtacaatttgaagactgttttagttggtgtagaaattgtgtagaatttctagatagttttatgttgctcggtgtgagacgtgtaaattgtggcttctgtattttttatgcccagtaaatactatcagtaat

SEQ ID NO: 69558 - DNA, 3081 bp, Zea Mays
agactgtcgagcacttctgttttgcttgctgcctcccgggcgcatcccatcccgtcaccccgtggatcggtggatgggcagatcgaggtggggtcaccctgcagggagtcagattccactagccgccgcaagtcgcgaactcctcgctatcctcttccaatccgaaccacccggactcccggagcaagcggccgccggctaagcagacacgaacgcaggtccggcggcaatgcaacgcgccgcgctcgtcgggtcccctctcgtacctgtgggtccccttgctcagcttgccgtgcggcgccgctgccgcttccatggtggtgttcgcgtgaggtcctcaaccgggaaggacgggaccgggactgggaccgggggcggaagcgagggcggcgacggcgccggtgccgcagcgtcttggctgagctcggcggtcggggagaaagtggacgagcttctgcgccgcgaagagaaccgggccctgctcgagggcgtcgaggacgccgagcgccgcgttgagcgcgcgcgcgccgcgctcgccgacatcgagcgccaggaggccgccgcacgcctcgcccgcgaggaggtccgccgcctcgagaagcggcgcgatgagattgcagagtcccagcgggaattgcttcaagcaagagaaatgattgatgaagctcagcgatccttgtcttctagtcttgacgaaggaagctttggagatatgtcaagtggtgatgttgatgaagataacgagagaatagaatccgtaaaagctgctgcagtttcctctgtcgtcggtgttctggctagtttgcccatatctttctatgaagttgaagatcttccacaactattccttcggtcatcaattgttttcataagttgtgctttgtttggagtcacattccggtacgctgttagaagagatctggataatatccaactaaaaactggggctcctgcagcatttgcttttgttagaggccttgctctgctggaatctggtagaaccttcgagctgagtactgataccttaatatcagttactcttgatgctgcagtcagtgtggttgagaacattttcatatttctgcctgctgctgttgcactggactactgttttaagatgagatttttgagtccctttcctagaagaaaacaatagcttctgtgaagaatatgtgtttcattggctgaatcggaggatgcatcctaatactgagtaccgcaccatccatggtaacaaggccatggaggataaggaggactctgcctcatagtgtggttgagaaagacactgaagcacttctgctccgtgatgtgcttcttaatggtatacttgcaattggcacacttggacatcacgtagactctgactcactttctcctgacctttgcattgaagaagatgatctcctcagtcctcatcatgggtgatgaaaaagtaattgaggaagagaaaaatgataaggaacccaggaaactttgcattggaaacagaaccgtttgaaccagtattacctattgttgagcctgctaagatgcattcattgtcgatgaaagaagacaactttacatgctttgtaacagaggaaatcctgatacgtgagttggaagatgggggagctgctaatatccaggaacgaccacttctgatggtagagaaggtggagaaagtaagaactacacttgctgatttgcttgcagcagaagtattctcatcaattgccccaggggagaatagttgccataatatcattgatgttggagcatccacttcaaagcatacatcgtggatggaaaaggtgcatcaaaagaaaccaaggaagccaacaccaaaaccactgaaaggcacaagaaaattaagtcaggtcatgaggaagatgttggggaagaagatccacccagagcagctcaatggacgtagcaatgcagagggccctcttacagtcttacttcatgatgtttattcttgccgacaattttgcttctctatttggttgtttttttggcatacgccgccaaatctggattcttaatagattgtacagatagccttgtaaccctgctgttggtggccctgcaaagtctcaacttgtccatgaggtagatgcccttggtggtgaaattggaaaaattactgataggtgctacttgcaaaagcgtgtactgaacagctcaaaaggccctgctgtacgtgcactgcgtgctcagcctgataagagagagtatgcaatagagatgaagaacagtgtggaaagcacagaaaatcttttcattagagaagcaatggctacagaggttttaattggaaaaaatgacaccattgagggtgtttgcactttcttcagcatggactttatgcaccatctgttgtacttagcaccagaacattcatgagtgtttctggggccaagctgctcggctcctggggcgtggacctccccatcaggccgctgcacacgctccacctctactggcgcgtgaagcccggccaggagcagactgtctcgacgagcgccgggttcccgaccttctccagctacggcgacctgcccgtgtacggcgcgccgtcgctggagctcccggggctcatcaagatcagctgcattagatcttagagtacactgttttacacaatttggagttgttactactatcaagctttagactttagactttggagtacactgtttttacactgtattaagctttagccttttatgctacagtgtgtaaaaaagcaagctttagacagttaggctaatctatagacagtgtaaagcttgattttttgacaatacagttcaaattcttagaacaatgcggtctgaaagtttaatacagttctgacaatagagttgagtacactgttttgaggctaatatgtcaagcttagataccagtttgtcaagcttgtttaagtccaaatttgtatttacttagttgtgtaaattgggtacaatttgaagactgttttagttggtgtagaaattgtgtagaatttctagatagttttatgttgctcggtgtgagacgtgtaaattgtggcttctgtattttttatgcccagtaaatactatcagtaat

SEQ ID NO: 69559 - DNA, 5050 bp, Zea Mays
cagatattatggctgcgctggactatcttcgttttggaaatgctcacagtttggggctgctgaattctgcatatattgtgcttatccccaaaaaaacggaggccttgtcagccagggattttcggcctattagcctaattcacagcttcgctaaattggttaccaagttgcttgctaataggctcggcccccaccttcagaagttagtggctgctaaccaaagtgcttttgtgaaaggaagatcgattcatgataattacatgatggtgcaacacgctattaaatctcttcacaaaaaagagtctcaagtttatttttaaaattggacatctccaaggcttttgactccgtttcttgggcttttctcattgaggtgctttctcaccttggatttggaaatatttggcgaaatttgatttcgaatctgttggcttcatcttccactcaggtgctgctgaatgggtctcctggtattcctattaggcatcggagagggcttcgccaaggtgatcccctttccccaatgctatttgtgctaataatggacgtccttagtagtatgtttcttctagctgaagatagggggctgctccataaccttctggaagggaatgtccgaaacataatttctatttatgctgacgatgtggttctgtttgttaaacctatagtggaagatctgaattgtgttaaggtaatattggactgctttggttcagcgtctggactggtgtgtaatatgaacaagagctgcgccatcccaattaaatgtagcgaccaggctgtgcagcagggttgcaaccttcttctctgcagctcggcgtccttcccctgtaattatttgggtcttccaatatcagatagaaagctcagaaaggcagatcttatggactgggttgagaagatagcagatagactccccaattggaaggctcggctacttaatctcgctggcaggacgacgttggtgcgttttgttctctctgccatccctatttatctcctcattgccatgagtattcccaagtgggtgatcaaatcgattgataagattcgcagagggttcttatggagaggcagaaaggacgtgaatggaggtaattgtttagtctcttgggatgtcgttacaaggccgcttctatttggtgggcttggggtcccaaatttgtattatcagagctgggctctgcaagctaaatggttgtggctggagaaaacagattcaaacaggccctggcatgggcttatgctgcctgtgccgttacaggtcaggaagttctttcatgcttcggttattactgcggtgggcaacggaaacaacactttattttggactgatagatggataaatggcggctgcatcaatgattttgctcctgatgtcgtttccaaggttgataaaattattgtctccactagaacagtggcccaggctcttggaggacagcaatggatcagtgacatcttgacacctctttcctggatggggatccaacaatttttgctgatttgggatgctgttagcactattgtgttaactcaggaggcggatattcacacctggctgcatacttcctctggtcagttttcttctaggtcttgttacagggctttatttatgggagctattacgtttgaaccttggaagaggctttggaaatcttgggctccccctaagtgcaagtttttcttatggctggccattcggaacaaatgttggacttcagatagattggagaagagaggtctggaccacccagtgtcttgcctactctgtgatcaagagcaggaaaccatacaacatattttgtgtacatgtgtctttgcaagacagttctggcattccattctgtttggattgaatgttggtaatctctctccatctggagatgagatctcctttgctgattggtggcgaaaaacaagtaagaagattcataaaagcaagagaaagggcatgaacaacatcattatcttaggggcctggtgtttatggatccaccgcaacaaagctgtctttgatggggagaccccttcgctaagctctatcagatgcgtcttccttgatgagattgggtgttggattacggctggtgccaagcatcttcagagctttggcttagagcttgcgcgtaaccttcacagtgtctagggagtggtgtgtgttttgtgtttttttgtttttggtaagcctgcttagggctttgtaccttggtccattttggaccttttttcttctctaattaaaatgatgcgcagttctcctgcgctttcgaaaaaaaaacaattaccaaaaaaaggtgagtacacgcgagtcgactaatgattagttgcactcaagaatgtccaaaaaacatagcaaaacacacatgaaagcgatacaacagaaaacacaaaggaacacacatagaaaacatgtgtcatcagattgattaccactgtacttctgagtcagaaggatgaataacaaatattttcaatattatgagcttcgacagcatgcaccttgggtgcttattctttgtcctgttagagtggatgcacaatcacttcaacccaaaagcttgctattaggagaaggtaaggtagacaatctacttatacacttcaacgaatccactcacgcgtagctagagaaagacgcaaacatcaaaataaataggtgggggcacaaattaagcctctgccaggattcgaactcgaaacctctggttctgataccatgttacagtggatgtactaaccagttcaacctaaaagtttaagctattaggagaaggtagacagtcaatgcacttggtctacacgatcttgctggcttcaggaagaagacacacgtctcatctccatgcttagttgtcgtaggttgatgctggaaaagcgccttatgaaccattacatggacaaaatttaccttctcatatgcactttttgtttcaatcatttcatgatcaacgtagtactccctccgttcttttttatttgtcgtggtttagttcaaaaacgaactagcgggcgacaaatattcgagaacggaggtagtattatttttctcatcccctttgcttgattttgactattatattcatgaagctattcaaatataagagaatgaatgaaaactattttcacattcatcttgttagttaagatctaaaagtaattttgttgtgaggctgatccctgaagtgaatttttggaagctgctttgctaatggaaactgttgccttcacgagcctacaaattgcataccgatgctgctgccagcctttacttgttcagatgcagctgtagttggcacttgcctgtgccctgtgccctgtgccattggatgccacagtagtatgctgtcaagtgctaacttaacaggctactgccagcaggcagcagctgcttatgtcgttgtcgccatttcaagtggctactgcatcaaatcatatataagaggaggatgatggcatgtgcagtttactgttaaatgatagagttggtgctgcagcatatctatttggaaaactggaatgatgaacatatttgtacatatgtcaagtatttggtgaacggattaaattcaatataattctactgttggcgcttgcttaatctggaatttgtcagttcttgaaaactattctctttctagtcccgataggttgatggacctgctcattccatgtcatgattctgcgattacttctttgtttagtttgttagcaatttgcatggtatctgtcaccaagtaggcttgatccattatgtcaatgggaccacaacatgcacatgcactgtgccacagtatggtggctgactgagttggctggagtctttctaagtcattctcctgctgtgattagtgaatctctggcctctgctcactttgaatagaatgtaactgggaatctcacatccgcatatcaacctcagtgaaagaatttacttgacttgagtcaggccaagccagttgcaaccaaaactccatcttttgtctcctggaccattcaattatggggctattcttcgtataaaaccatgccatgcctttgaggctcgtcaatgctactgtctaccactttcctgtgatttcagattagttctggcgatatgggcctaaaggtgtttcattggctgaatcggaggatgcatcctaatactgagtaccgcaccatccatggtaacaaggccatggaggataaggaggactctgcctcatagtgtggttgagaaagacactgaagcacttctgctccgtgatgtgcttcttaatggtatacttgcaattggcacacttggacatcacgtagactctgactcactttctcctgacctttgcattgaagaagatgatctcctcagtcctcatcatgggtgatgaaaaagtaattgaggaagagaaaaatgataaggaacccaggaaactttgcattggaaacagaaccgtttgaaccagtattacctattgttgagcctgctaagatgcattcattgtcgatgaaagaagacaactttacatgctttgtaacagaggaaatcctgatacgtgagttggaagatgggggagctgctaatatccaggaacgaccacttctgatggtagagaaggtggagaaagtaagaactacacttgctgatttgcttgcagcagaagtattctcatcaattgccccaggggagaatagttgccataatatcattgatgttggagcatccacttcaaagcatacatcgtggatggaaaaggtgcatcaaaagaaaccaaggaagccaacaccaaaaccactgaaaggcacaagaaaattaagtcaggtcatgaggaagatgttggggaagaagatccacccagagcagctcaatggacgtagcaatgcagagggccctcttacagtcttacttcatgatgtttattcttgccgacaattttgcttctctatttggttgtttttttggcatacgccgccaaatctggattcttaatagattgtacagatagggcccattagatacaagtttttgacagtgcggtgtgtttggttgcttgaacaaatatctggg

SEQ ID NO: 69560 - DNA, 6000 bp, Zea Mays
gtaacttcagaggagtaactgattctttgctaaacgaagttgcccctttggccttttgtttactgtaacggttcttgcatgtcactgaattctgaaggtatatatgtgatctctgatcagttcgtccttacagtagcagaggctgagactgtcgagcacttctgttttgcttgctgcctcccgggcgcatcccatcccgtcaccccgtggatcggtggatgggcagatcgaggtggggtcaccctgcagggagtcagattccactagccgccgcaagtcgcgaactcctcgctatcctcttccaatccgaaccacccggactcccggagcaagcggccgccggctaagcagacacgaacgcaggtccggcggcaatgcaacgcgccgcgctcgtcgggtcccctctcgtacctgtgggtccccttgctcagcttgccgtgcggcgccgctgccgcttccatggtggtgttcgcgtgaggtcctcaaccgggaaggacgggaccgggactgggaccgggggcggaagcgagggcggcgacggcgccggtgccgcagcgtcttggctgagctcggcggtcggggagaaagtggacgagcttctgcgccgcgaagagaaccgggccctgctcgagggcgtcgaggacgccgagcgccgcgttgagcgcgcgcgcgccgcgctcgccgacatcgagcgccaggaggccgccgcacgcctcgcccgcgaggaggtccgccgcctcgagaagcggcgcgatgagattgcagagtcccagcgggaattgcttcaagcaagagaaatgattgatgaagctcagcgatccttgtcttctagtcttgacgaaggaagctttggagatatgtcaagtggtgatgttgatgaagataacgagagaatagaatccgtaaaagctgctgcagtttcctctgtcgtcggtgttctggctagtttgcccatatctttctatgaagttgaagatcttccacaactattccttcggtcatcaattgttttcataagttgtgctttgtttggagtcacattccggtacgctgttagaagagatctggataatatccaactaaaaactggggctcctgcagcatttgcttttgttagaggccttgctctgctggaatctggtagaaccttcgagctgagtactgataccttaatatcagttactcttgatgctgcagtcagtgtggttgagaacattttcatatttctgcctgctgctgttgcactggactactgttttaagatgagatttttgagtccctttcctagaagaaaacaatagcttctgtgaagaatatgtatgatcaataacaatcttgatagctcaaatggtcatatgtaacacaaatgatatcttagattcattaaaaaaaacatttcccctcattcactcaaagttccatcaagtcaaccaaatagtattttttacttaatcttcttcctaagttcttattcaacaaagattactcataacttttctgtgaatatgaatttcacattcttcttgattgccgtgctctttatgaggactagcatagatggacgtatactggaatatgcctctttacaatacctgcacatggggtttgatagattttagatggaattaagtatatcctggtttgtcgttcattcgatcctcaccctggtgtaaacagaattcgctgcaccctgtgatcatctactgtctcagtgagtcagcgttctgatatggtcacgtagaagcattgcatgatatctataaatatgttctgtctgttatctacattaattaatgcttgcctgttagtgcttttccagtatactgtattaaaaaaactcgactggggagggaatgaccgtcctcccggtataatactaagaagagatcgaaacattggtcccggtcgagaaaatcctcgaaccctagctccccatcactaacgggtcggcttcagtgaaagggcctctagctgagttggttaggtggtccgattagcactccttaggtcctgagtttgaatctcagtgggagtgaatttcaggctgagattaaaaaagatcactcactcgttcccctggttgtgtgcacacgagatggactgagctatgggagagggatctttgtaggaaataggaggctcaaacacgagtaaagatttaggaaatagggggcggaccctcatgttgcacggggtaagctttcgtgacctttctcggtcggggcttcgatcgaagttcttcttaatataataccgtgggggcggtttttcccctaccgccgagtttttttacgggccggtgtcaactgtccactctgcaacggcccaaccgaagggtggcgcacatgacatcgtaaccagatgatgcatagtgaggggatttttttaaccaagccgaaaaattcgccccaaagggaatcgaaactgagacttggagatgctactcggaagccttaaccactaggttagatgccttttcgagctccgtggcttgcttatttatttcttcactttcttgtattgcaagttgtcttattatggaggcatggtaactttgtgtttggaatgatctttctattcataggcttgcattccatgagctcaaccattgctttcatcattgacttctgaaggactggcctctgtctcgtttcagcccaaagtactcacaattaccaaaaattctgctgttacgcgatgtcctttccgctctcgccccttcctctcccgtcccttccgctcccgtcccctgccctcccacctccggccgacgccccagcccctccaacccacagcctcacgccggtcatcctcccaaggtcggcggccacccaacctgctaccccggcgtcggcttcctctcctctctccgcccagtctgtggccgatattcctggtggccgttcaaaggcgcagcgatggtgtgaacaggagcttccttcggctgcttcccggagtgatttacgtcgctcgtataaggaggcgctagtggatggaaggttcactgccagcggcgctgatgatggtgacggtggatgggtgaaggttgtgggacgtcgccgtcgaagtccctgctcccctcttcccctgcgcccccccagacccgttcctgctgatttacgtgggagatgcttcaactgtttctcgccgtcccaccgtgcggttgagtgtggcagtttggtgcggtgttttcattgccgcctgcctgggcatcgggtgcgcgcgtgcccacgccggaagaggactctacatcacccaacgaaggtgttggtgtggcgtccaattcccaggaaggtcgtcccggaggaagtttctctctgcgatatggaaggtgtttcgcgggtcggcgatgatggtgatgaggcgccgaagaatggaccgggaggatttaggcgcacctggtcggggctcatcgttggcttcctccttgccttcggtggtgccccccctcgttcgtatattcttaagcgttcaaggttgatcgaccaggcggaggaggattttcatcgtgctctgttcgtcaatgttcttggccaggagggttctgactgcgccgttgtgattttggaggcgctcgcctcgaagtatggccttgaggctgatgcgctccaaatccgacgtgctgcgtccaactcgtacctggttttcttcccctccgtggatcacgctgttcgtgccttggctggtggaaattccatttccatacccccctccggctgcatcttaggaggtggtcacgtcaggcgtcgacctctggtggagggattacatccggatgctgttgatgggacggatttgtcagttctgaaactgaaggcttggggtttctctatggattgcttgccttctcgctgcgatctccacgttgaagagccgacgtctattggagaagatggatcctgcttccctcgcacattgatttactccatttcggtgaaagtgactactccggttgttttgccggttgaggagcagcctctgttctcctccccagatgatgatgatgatcgggataacaagcatcagcggcaaaggcagcatgttacggatcatcagttctcttcggtccggacctctgttcatgcacggttgggaccacgtattactcctggtgggggaggtggaacagttgatgccgctcctctcccgaattcctcggttgatgagttgcaggcgcctgttccctccttccctggctgtcccccgtctcctgtgttaggggcgccatttattgataataccggaccccttcctgcttcagttggggtttctgatgtttccaccggtggaaagactgctgacataacattggagcctttttctgggaatgcccttgttcctttggtttcatcgtttaatttggaggagcaatctgcgtcaagaattctggtttcttcttgggactataagatcagggccaaacctccctgcttcaaggtttatgtccgtaaaaaaatcccggttcagatagcacagtctgaggagattggaaattctactcctttgcaaaaatttaaagatggaattacaaaacagatcaatggaatcctaccggcacctattcaacaagtcaaacggaagagaaagctgattcctagcaatttcaacctaaggcgtagcaggagggtggccaagataccacctgagttaggctctccctctgctgctaaggtgtgcaagcttctgggtttctgtgatgatagagagaatatttccttcacggatgcaagaagatatgctaaattgtttgattcacctctttctagagagcatattaccgcgctggtagccctgttcggctgggaggtgcccccacctgggcagtcctgagctgtgcagtttggtggggctggctgttttttgtattttttcatggattcaaatggtattttaatatggaatgtgaggggtctcaatgatcgtgctaagagagattctattaaatctttggttcttgacactatgccttctattgtgtgcctgcaagagaccaagctgtcatccatctccgattttgatattattacaattcttgggtcggcatatagtaattttatttttagcccagccattggaaccagagggggtattcttgtagcgtggcgggacagaaacctttccactggagtttctgtcatcaaggagttttcggtgtcagttcagtttcagttgctgtcaggtcaactctggtggttcacaggtgtttatgggcctcatcaagataacctcaaacttgcctttcttcaggagctcggtgtggtcaggaatgaatgtgaagggccatggatcattgctggggattttaacatgatttatagagcagaagataagaataattccaatatcaatcgagctttgatgggagatttcagaagctggatcaattctctggagttaaaggaattaccgctttgtgggaggagattcacctggtcaaatcagagagaagatcctacccttgtcaagctggatcatgtcttctgcactaacagctgggaagaattttttccggattgtatgctctttagtaatgccactgtggcctctgatcactgtcccttgactctcaaactcaagatggatattagggggaagcgcagatttcattttgaaagtttttggcttaagctccctgggttccttgaggaggttgctgcctcctggaatcagccagctcactgtttctgtcctcttgagaaagtgtccttgaagctgaggagattgtccaagagactgcagtcttgggggcacaaaacggtgggtaatgttgggactcaattgggtttggctcgcgaggtgttgcacagactggagattgcccaggatgttaggaccctggctgtggaagaggtttggttgctgcgaaaactgaaacaacattgtctcgtcctaacctctttacagaggacaattgcccgattaaggtctcggatacaatatttgaaggaaggggatgcaaatacaagttttttccatatgcaggcttgctttagaaaaaag

SEQ ID NO: 69561 - DNA, 1626 bp, Zea Mays
ctgaaacgaaccgcggaaaggggaaaggtggggaaagaccgaaataggcgacagaaatggcgacggagaagcgcagccgccggcgctcaccgtcggccgccacgccgagcgcctcgctgacgtcctcctcaaatccagaagccgctatattgcactcaccttccccatcgctggacctcatccccgacatcacctcccgcctgatctccctcgaggacttcttcgctctgcgcgcctcctgccgcgcttaccgcgccatccttccgccgtccagcgaggccctcgcctgccagtccccgctcctcctcgtctcccttttcccctccttctccgaggcgttattccacctctcgctccgccgcctccaccgcttccgcctcccctggggccatcacctgcccccctcccgccgcaccctccactacgcgcacggctacctcgtcaccgccaccaccgcgtcctcccactaccccccgaggctcatgctcctccacctcttctccggcgagcagctccgcctccccaaggtccccgcgccgttcacccgcgtcgtcatctccgacgacctggccgccgtcctcttcctgcccggcaggtccaatgtccagcactgccaccctggggacgctctctggcgcgtggccaccgcggatgcgccccacgttgttgaagatatgctcttcgtcgatggcaccctctacgccctggtaaatggcctccgtcttgccacagtcgaactgtctgatggtttgctggaactatcgtttctaggagaggaggtggatgacgacagcaagccagcaggagggcagttcaagctcggagagtgcggcggtgacgtgttgctcatcagtgaggatcacacgggggtgatgctgtaccgtgtttatcggtgggtttttgaggcggggaagtgggtttcaatcacgagcttgggcaggcggacactgtttcttggtttcttcggatttgcagcctgtatcggtccagattacccaggaatccgaacggattgcttatatgcagctgggccacgcttgggtgaatggcacgagtactccttggctgatggaacttgcgatgttcgctatgctgattatccaggtgcaccaccgctgaacaacaattcacctaccagacctccagtctgggtcttccccagtctgtgttgatactggctgtgaattcttccacatcatgtagaacatctgacgctgacttgaaataagtcatggtttactggagtcggcaattgggagtaatgtttcagaccagaacctgaaagtctcacagtttatctgtagatcaaagagcattcgcccttgaagaacctagaagaccagaccgctagattaaatggttacgcctattgtcttatggtttgtggttaaaaatttgtgccgtgttttccacacgagttctgtaccctccatttctgaggattttgagttgataatgaaagaaaccagtatcatcttacatgagattggttaggactacttgctcattctcatattagatgccccctgattgatttcttgtcatgaacattgaacactactttcagtaggagatcctgcagtttcccctggttattcagacgtaagaactttgtgcttattacaa

SEQ ID NO: 69562 - DNA, 3191 bp, Zea Mays
tttttttgttttctgaaacgaaccgcggaaaggggaaaggtggggaaagaccgaaataggcgacagaaatggcgacggagaagcgcagccgccggcgctcaccgtcggccgccacgccgagcgcctcgctgacgtcctcctcaaatccagaagccgctatattgcactcaccttccccatcgctggacctcatccccgacatcacctcccgcctgatctccctcgaggacttcttcgctctgcgcgcctcctgccgcgcttaccgcgccatccttccgccgtccagcgaggccctcgcctgccagtccccgctcctcctcgtctcccttttcccctccttctccgaggcgttattccacctctcgctccgccgcctccaccgcttccgcctcccctggggccatcacctgcccccctcccgccgcaccctccactacgcgcacggctacctcgtcaccgccaccaccgcgtcctcccactaccccccgaggctcatgctcctccacctcttctccggcgagcagctccgcctccccaaggtccccgcgccgttcacccgcgtcgtcatctccgacgacctggccgccgtcctcttcctgcccggcaggtccaatgtccagcactgccaccctggggacgctctctggcgcgtggccaccgcggatgcgccccacgttgttgaagatatgctcttcgtcgatggcaccctctacgccctggtaaatggcctccgtcttgccacagtcgaactgtctgatggtttgctggaactatcgtttctaggagaggaggtggatgacgacagcaagccagcaggagggcagttcaagctcggagagtgcggcggtgacgtgttgctcatcagtgaggatcacacgggggtgatgctgtaccgtgtttatcggtgggtttttgaggcggggaagtgggtttcaatcacgagcttgggcaggcggacactgtttcttggtttcttcggatttgcagcctgtatcggtccagattacccaggaatccgaacggattgcttatatgcagctgggccacgcttgggtgaatggcacgagtactccttggctgatggaacttgcgatgttcgctatgctgattatccaggtgcaccaccgctgaacaacaattcacctaccagacctccagtctgggtcttccccagtctgtgttgatactggctgtgaattcttccacatcatgtagaacatctgacgctgacttgaaataagtcatgggccttgcatcactataatggctagcaagatgctgcttgaaccatttaattcctgtaggcactagcttcttacagaatatgcattgcagagtctccttctgaggatcaggccagaacccaaatgtctatcctggatcataagacctagccttccctttaggatctttaaccatctcttcaggatatggtgttaaggcagctatgaccttttctgctaagtgctaaggatttagatgtgaaatctggagcagcagaggaagcagtggcagtagctgatgaacttgtgacatctgcttcgatcacaggaggcattatcacttctaccatagctgcacgccgttgatcttgatccacatctataggatacaggcttatgtaagcaccagcagcatataggacttgaggtaaaggcctagagcagcaagaacaaaaggcagcagcaaccagcaagagtagaaggaaacaaaaaatagagcagcaatagcaggccataaagattctagtaatgaactagaaacacagcaataagatggaggattgaaagacaagatagtaagaggatgcggcaaaacactaaccttcagaggaggagctcatcttcggacggcggcagcacacaacagagtagcagacgggcacaacctccaggcggatgtgcttgaggcctcatgggaatgcctggtggaatgcagtgtgattagttgatgtcggacaactatacaactaatcgctgacctatttgatggacctgattattgctagaggattgataacttaataacatgcttggttgatctaattttgcttctttcttggtatatgaatattaccatgacatcgcaacaatgaggacgtctctgtgtatgaaattacaaatttagtttattgtggcttgaagtcttgaacttatattactggtgagtttgtcttcaaccaacaagctattcacaaaattgctcattggtattgaatattgatgtatcatggtatgtgaaaccaactttaaagtactaaggtcttattgtctcaacatgctggatctcttttcataagttcagtacttaagtcatatgattaattcatcttactatagcacctggttttgttagactagatagttcaggaggtgttgagagaaatgatgaatagttacttcaggaggttactttgaatagttagttcaggttttcctcgaacaaaattagttcagggtaagttgtcaggatatccatataaccaaaaaacaaagccttgcaggttaccaccattcttccactgtaacaatttacttacaacgaggcatgtttgaggaaaaaaaaacttacaatgacacggttagtagaaccaaaatctgaggaatagcagaagatttaactcagcacctgatattcttgaggatgtttacattacgtaagcttatttgctcaatgatctatgcggatacacttcttttttttttcatttaggctttacacccatgattgttatgtagtccttagtcctgactaaacaatgtgactggctgactgctatgttcaatgatttctgcgaggacttactggagtcggcaattgggagtaatgtttcagaccagaacctgaaagtctcacagtttatctgtagatcaaagagcattcgcccttgaagaacctagaagaccagaccgctagattaaatggttacgcctattgtcttatggtttgtggttaaaaatttgtgccgtgttttccacacgagttctgtaccctccatttctgaggattttgagttgataatgaaagaaaccagtatcatcttacatgagattggttaggactacttgctcattctcatattagatgccccctgattgatttcttgtcatgaacattgaacactactttcagtaggagatcctgcagtttcccctggttattcagacgtaagaactttgtgcttattacaa

SEQ ID NO: 69563 - DNA, 3783 bp, Zea Mays
ggcgtttttttctcatcaaataaccatggaaaaggggaaaagttgaccatggcatttttttgttttctgaaacgaaccgcggaaaggggaaaggtggggaaagaccgaaataggcgacagaaatggcgacggagaagcgcagccgccggcgctcaccgtcggccgccacgccgagcgcctcgctgacgtcctcctcaaatccagaagccgctatattgcactcaccttccccatcgctggacctcatccccgacatcacctcccgcctgatctccctcgaggacttcttcgctctgcgcgcctcctgccgcgcttaccgcgccatccttccgccgtccagcgaggccctcgcctgccagtccccgctcctcctcgtctcccttttcccctccttctccgaggcgttattccacctctcgctccgccgcctccaccgcttccgcctcccctggggccatcacctgcccccctcccgccgcaccctccactacgcgcacggctacctcgtcaccgccaccaccgcgtcctcccactaccccccgaggctcatgctcctccacctcttctccggcgagcagctccgcctccccaaggtccccgcgccgttcacccgcgtcgtcatctccgacgacctggccgccgtcctcttcctgcccggcaggtccaatgtccagcactgccaccctggggacgctctctggcgcgtggccaccgcggatgcgccccacgttgttgaagatatgctcttcgtcgatggcaccctctacgccctggtaaatggcctccgtcttgccacagtcgaactgtctgatggtttgctggaactatcgtttctaggagaggaggtggatgacgacagcaagccagcaggagggcagttcaagctcggagagtgcggcggtgacgtgttgctcatcagtgaggatcacacgggggtgatgctgtaccgtgtttatcggtgggtttttgaggcggggaagtgggtttcaatcacgagcttgggcaggcggacactgtttcttggtttcttcggatttgcagcctgtatcggtccagattacccaggaatccgaacggattgcttatatgcagctgggccacgcttgggtgaatggcacgagtactccttggctgatggaacttgcgatgttcgctatgctgattatccaggtgcaccaccgctgaacaacaattcacctaccagacctccagtctgggtcttccccagtctgtgttgatactggctgtgaattcttccacatcatgtagaacatctgacgctgacttgaaataagtcatggtatgctgatttctgaggttgctatttcttaatcttaattttatttctgtaaacagtatgttgttcagcaatgagtattgaaacacaatatattactagttatttgttatactgattgggtatagactacacttgttgagtgttactataagaatatataatgctcatcctgcccaaagggaatggatggtttgtctatgcattatgctcgttttctagaccttggtaatgttattaaatcatataatcaaacctagtcgacaaggtgtcaatcagcgattagttgtcatcaggctcaattagtcgagcctagtggttggtatacttgtcctgaatatatataccagtattgacatgctatttgtacatttgtactccgttttttaatttgtcgtgttttagttaaaaaatgaactagcgggcaacaaatattggagaacggaggtagtactatccaatataattcaatagtcacttgtgaaatttgatctgtgaactgtccatgtctttgctaactattggaggaacttttgctcagggccttgcatcactataatggctagcaagatgctgcttgaaccatttaattcctgtaggcactagcttcttacagaatatgcattgcagagtctccttctgaggatcaggccagaacccaaatgtctatcctggatcataagacctagccttccctttaggatctttaaccatctcttcaggatatggtgttaaggcagctatgaccttttctgctaagtgctaaggatttagatgtgaaatctggagcagcagaggaagcagtggcagtagctgatgaacttgtgacatctgcttcgatcacaggaggcattatcacttctaccatagctgcacgccgttgatcttgatccacatctataggatacaggcttatgtaagcaccagcagcatataggacttgaggtaaaggcctagagcagcaagaacaaaaggcagcagcaaccagcaagagtagaaggaaacaaaaaatagagcagcaatagcaggccataaagattctagtaatgaactagaaacacagcaataagatggaggattgaaagacaagatagtaagaggatgcggcaaaacactaaccttcagaggaggagctcatcttcggacggcggcagcacacaacagagtagcagacgggcacaacctccaggcggatgtgcttgaggcctcatgggaatgcctggtggaatgcagtgtgattagttgatgtcggacaactatacaactaatcgctgacctatttgatggacctgattattgctagaggattgataacttaataacatgcttggttgatctaattttgcttctttcttggtatatgaatattaccatgacatcgcaacaatgaggacgtctctgtgtatgaaattacaaatttagtttattgtggcttgaagtcttgaacttatattactggtgagtttgtcttcaaccaacaagctattcacaaaattgctcattggtattgaatattgatgtatcatggtatgtgaaaccaactttaaagtactaaggtcttattgtctcaacatgctggatctcttttcataagttcagtacttaagtcatatgattaattcatcttactatagcacctggttttgttagactagatagttcaggaggtgttgagagaaatgatgaatagttacttcaggaggttactttgaatagttagttcaggttttcctcgaacaaaattagttcagggtaagttgtcaggatatccatataaccaaaaaacaaagccttgcaggttaccaccattcttccactgtaacaatttacttacaacgaggcatgtttgaggaaaaaaaaacttacaatgacacggttagtagaaccaaaatctgaggaatagcagaagatttaactcagcacctgatattcttgaggatgtttacattacgtaagcttatttgctcaatgatctatgcggatacacttcttttttttttcatttaggctttacacccatgattgttatgtagtccttagtcctgactaaacaatgtgactggctgactgctatgttcaatgatttctgcgaggacttactggagtcggcaattgggagtaatgtttcagaccagaacctgaaagtctcacagtttatctgtagatcaaagagcattcgcccttgaagaacctagaagaccagaccgctagattaaatggttacgcctattgtcttatggtttgtggttaaaaatttgtgccgtgttttccacacgagttctgtaccctccatttctgaggattttgagttgataatgaaagaaaccagtatcatcttacatgagattggttaggactacttgctcattctcatattagatgccccctgattgatttcttgtcatgaacattgaacactactttcagtaggagatcctgcagtttcccctggttattcagacgtaagaactttgtgcttattacaa

SEQ ID NO: 69564 - DNA, 2079 bp, Zea Mays
atggcggcatccatcggccgaaataacgatgttcgtcctccattaagagaactatctaacaatacccttgaagatgaatgtccagatatgtctataagcgacggaagcatcattgattgtactataccgtgtgataccactccaggaggacgtgatgatgcaagacaacgtaagagagaaagagaaagagtacgatatgctacgatgagtgctgaaaagaaaaatgaattgaagaagcgtcgtgagtcacgaaaaaagggaaatgttatgcaccatgagtattcagaagtttgcaacatccctgcaaacaaggacaacaataatcatcaaaacaatgaaattgaggatgttgatgatgattcttatcagttgcataagaataactcatttgaggtgcatagaagacttggcagtgaaaaactttccacacatttgtcagatgaatgtccacaggtgtttgtaagcgacagaagcatcaaaaatctgactatacattgtgataacactttagtcgcattgggtcagacgagtcatcaacatgattccaatcaaagttcagaagttttagatccaagggaacgtaagagaatacgagaaagaactcgatttgcaactcaaacaaaagaacaaagggcattgcgtaatagggaatcatgtaataagatggcaaggaaaaactataaaagaagacaacgagaaattaaactccaggacttaatcggcattgaggacccgaagtttaccccggagcttgtgtggagttcaacagatgctgaagcgcctcatgggtctctatgtagctccgagggcatggctatccctgagttaagtccaacacctttcgttcctaatccatcacagactgaggatgtcgagaaagacagtatgacagagtctcctagacgacaaagacataaacgtcatgtgtcgtctggccaaagacagaccctggtgtctcgtcaaaatcagaaatttcatttagccattggaacaaacttcgctactgcaactagggatcgtgtaatggagaatgatgtggataatgaaattgatcatcagactgtttcagagatcgacaacaatgaaagtaccggtctatgtccattccctcacacggagagtaacaatatgactgaaggagcagacattgggatgcaacaccgggcagccccgactgtcactaccaatgatgatgttgaagatgtgctctttacagaggatgatgatgaagttgtactttttgaagatgacgaagacgaaggatacctattcgctgggcaagttcaaggagagctcccacaaccaccaaatgcatttggtgggcaagcaattgtcttggatgtgctgctgggtctgatcttcggaagtgggctgctgccgagaaacattcgatttgatggtcttcagattacaaaggatatgaagcagccgatttttgtgtattatcagcgggatgacttttaccagaattataggaggtatgtcaagagccgaaatgatgcacagctaggagataaaattgagaagaaggacatctcttgtaagagtgacagagaccacaaattcgggagtgatgtcttcccaacgaactttcagataggacctcttaaaggtggaaaaacacttgatccaagtatcccgttgagtaagaaagaggacctcattgtttggatgcggactacagcacttccgacattcagaaagctgtatggaaggatatatgttgatctcaaggaaaacgatacaatcacagtctagttggacaacaactacaacacctatagctttggtggcaagaagaagctggtgctttctaccgcaacctggctcgggggaaagaacgattttctgggccttgcgtacctcatcgtcggtggactctgcttcttcctggcattcgcgttcaccttgctatacttgataaagccaaggaaaatgggagataaccgctacctgttatggaacagacccccttcaggtcgctgatgatgtgctttggaattaaacgcgatgcacaggcagcaacaaacatattcagattatggtcggaatgtatcttgtaccacagagaaattttat

SEQ ID NO: 69565 - DNA, 1345 bp, Zea Mays
atggcggcatccatcggccgaaataacgatgttcgtcctccattaagagaactatctaacaatacccttgaagatgaatgtccagatatgtctataagcgacggaagcatcattgattgtactataccgtgtgataccactccaggaggacgtgatgatgcaagacaacgtaagagagaaagagaaagagtacgatatgctacgatgagtgctgaaaagaaaaatgaattgaagaagcgtcgtgagtcacgaaaaaagggaaatgttatgcaccatgagtattcagaagtttgcaacatccctgcaaacaaggacaacaataatcatcaaaacaatgaaattgaggatgttgatgatgattcttatcagttgcataagaataactcatttgaggtgcatagaagacttggcagtgaaaaactttccacacatttgtcagatgaatgtccacaggtgtttgtaagcgacagaagcatcaaaaatctgactatacattgtgataacactttagtcgcattgggtcagacgagtcatcaacatgattccaatcaaagttcagaagttttagatccaagggaacgtaagagaatacgagaaagaactcgatttgcaactcaaacaaaagaacaaagggcattgcgtaatagggaatcatgtaataagatggcaaggaaaaactataaaagaagacaacgagaaattaaactccaggacttaatcggcattgaggacccgaagtttaccccggagcttgtgtggagttcaacagatgctgaagcgcctcatgggtctctatgtagctccgagggcatggctatccctgagttaagtccaacacctttcgttcctaatccatcacagactgaggatgtcgagaaagacagtatgacagagtctcctagacgacaaagacataaacgtcatgtgtcgtctggccaaagacagaccctggtgtctcgtcaaaatcagaaatttcatttagccattggaacaaacttcgctactgcaactagggatcgtgtaatggagaatgatgtggataatgaaattgatcatcagactgtttcagagatcgacaacaatgaaagtaccggtctatgtccattccctcacacggagagtaacaatatgactgaaggagcagacattgggatgcaacaccgggcagccccgactgtcactaccaatgatgatgttgaagatgtgctctttacagaggatgatgatgaagttgtactttttgaagatgacgaagacgaaggatacctattcgctgggcaaggttcacccttcaaccaatgctcctggaaatggtctaaacttccattttggacatttgtagcgg

SEQ ID NO: 69566 - DNA, 1069 bp, Zea Mays
ccttaatcggatgtgattaaatcatttttattctattttaaatagcaagagatacaatccctttagttcgtttcaattcacctctaaccgttggtcaatgaaacgagttcctcgaccaatttgtaaagaccataagcagcgcacgatgcaggattgccggcattttgtcacgcctaatgcagttccgacctctaatttaattcatccgaccagttttgacgagtgtgagtactttttctcgagcagaaagccgcgtcccccatccactgcgtcgactcaaacgcctttcaagccctgcagcggctgcaagaaaggctaaagggaaggagaaaaaaaaaagacaacacataggcatctaaacaaaggctgaagccaaaggaaaaggatgagcgatcgagacaaggcgaggcgcgtataacacggagcaggatgatggctgccgcctgccggccagtcatttgcgcggcaatccttctcgccaaaagcagggcacgcagaccaccaccacagctgagctgaccagcagcagaacagaagcaaacatcaaaagaattgaccaccagctcctgcagagttcttcctctcgccttgttgttgctcgcgggcatagaccgcagcgcagctcgcacagaccgggtaccacttgtttgtcgagttgtgggggaagggggcgagcaaggaagcaaagctagtggtaggccggcaaggcggcctggtggagacctcgagtcgagtcgaccatggtggcgcgcgggcagggcggagacagggcggaggaggaggccgcggcgcggtgggagagcgagaaggaggcggagatcgactacgtgttcaaggtggtggtggtgggcgacgcggcggtgggcaagacgcagctgctggcgcgcttcgcgcgggacgagttcgcgctcgactccaagcccaccatcggcgtcgagttccagacgcgcacgctcacgctccaccgcaagcgcgtcaagacgcagatctgggacaccgccggccaggagaggatatccctaccacgactccaaggaagacgaggactacgcgcgtgacggagagcgag

SEQ ID NO: 69567 - DNA, 1084 bp, Zea Mays
gtgcgttgcgtgcgctgtcgactgctcgttcgtgcgccgccattgttgcgttgtagagccgtgcgtcgtttggattcttctactcgaagggatttctggcttcgttacactgcgtggtgcctggtacagggcggtgacgagcgcgtactaccgcggcgcgctgggcgccatggtggtgtacgacgtgacgcggcgcgccacgttcgagcacgtggcgcggtgggtggaggagctccgcgcacacgccgacgggtccaccgtcgtggcgctcatcgggaacaaggccgacatgcccgcggcgcggcgcgaggtgcccgccgacgaggccgcgcgtctggccgaggaccagggcctcttcttctcggaggcgtccgcgctcacgggcgacaacgtggagcgcgccttcctcacgctcctcgaggaggtcttcgccgccgtgtcgcgcagggcgctggagctcgacgaggcccgccggatgcgcggcgaccagggcgacggcggcggcgaggtgctgtcgctcaaggggaccgcggtggacgtgggctccatcatggagaccagcgccatgaagaggagctcgcagtgcgcttgctcatgacgatgcatggctcaagcactgacaagttcgagcaacaaaggcgccgcgagaaaatctaggacagcatcacattggcaggagaaatcttcgacatctcaatccgtacacaacaatcgacaaccctgtgactgtgaagcaagcacatcactacaagtcctcgcaactctagtctccactctccactctctccagcatgcgaacactatgttcgtaatgtctctcttactcttctcctgcaacagctggtagtccttctttgaaccatgtgtaaagtcctccttccagatggtacacgttgctgtagccattcaggaccaacaagtacgcagctatcagggacctgccaaaattcaaccggaacagagcataagctccaacgctgatattatttgctctcgagaaaatagcacgatatttcgaacaagtcactttctgaaaagaagaaaaatattggtggtacaataactgtgtgaaagtgaattcaac

SEQ ID NO: 69568 - DNA, 2156 bp, Zea Mays
cccgacgacgccattcacctccccccgtcccccgtatcgccttcgtcaagtacgcccctcccccttccaccccatgacggagtgctcgattccttcatctgatggcgccacccacctccccccgctctcctccgccgccgcggctgtcgaggctcacttccaggcgcactggtccgcgctcgacgctgccgcacgccaggacccggcgcgggtcatcgccgtgggggactggcggtccccgctcgagctccccttcctgtggcttggggatgtcccctggtgtcgtctccgtcaggctgcaagtccaccaattcggcctcatctgcgacaacctcgacgcagtcaacaagttcgagcccaattacaggcttatcagaagatatatatcttcttcaacgatgttattcactacgggtccacttctagaagaaagccgcgtcccccatccactgcgtcgactcaaacgcctttcaagccctgcagcggctgcaagaaaggctaaagggaaggagaaaaaaaaaagacaacacataggcatctaaacaaaggctgaagccaaaggaaaaggatgagcgatcgagacaaggcgaggcgcgtataacacggagcaggatgatggctgccgcctgccggccagtcatttgcgcggcaatccttctcgccaaaagcagggcacgcagaccaccaccacagctgagctgaccagcagcagaacagaagcaaacatcaaaagaattgaccaccagctcctgcagagttcttcctctcgccttgttgttgctcgcgggcatagaccgcagcgcagctcgcacagaccgggtaccacttgtttgtcgagttgtgggggaagggggcgagcaaggaagcaaagctagtggtaggccggcaaggcggcctggtggagacctcgagtcgagtcgaccatggtggcgcgcgggcagggcggagacagggcggaggaggaggccgcggcgcggtgggagagcgagaaggaggcggagatcgactacgtgttcaaggtggtggtggtgggcgacgcggcggtgggcaagacgcagctgctggcgcgcttcgcgcgggacgagttcgcgctcgactccaagcccaccatcggcgtcgagttccagacgcgcacgctcacgctccaccgcaagcgcgtcaagacgcagatctgggacaccgccggccaggagaggtacagggcggtgacgagcgcgtactaccgcggcgcgctgggcgccatggtggtgtacgacgtgacgcggcgcgccacgttcgagcacgtggcgcggtgggtggaggagctccgcgcacacgccgacgggtccaccgtcgtggcgctcatcgggaacaaggccgacatgcccgcggcgcggcgcgaggtgcccgccgacgaggccgcgcgtctggccgaggaccagggcctcttcttctcggaggcgtccgcgctcacgggcgacaacgtggagcgcgccttcctcacgctcctcgaggaggtcttcgccgccgtgtcgcgcagggcgctggagctcgacgaggcccgccggatgcgcggcgaccagggcgacggcggcggcgaggtgctgtcgctcaaggggaccgcggtggacgtgggctccatcatggagaccagcgccatgaagaggagctcgcagtgcgcttgctcatgacgatgcatggctcaagcactgacaagttcgagcaacaaaggcgccgcgagaaaatctaggacagcatcacattggcaggagaaatcttcgacatctcaatccgtacacaacaatcgacaaccctgtgactgtgaagcaagcacatcactacaagtcctcgcaactctagtctccactctccactctctccagcatgcgaacactatgttcgtaatgtctctcttactcttctcctgcaacagctggtagtccttctttgaaccatgtgtaaagtcctccttccagatggtacacgttgctgtagccattcaggaccaacaagtacgcagctatcagggacctgccaaaattcaaccggaacagagcataagctccaacgctgatattatttgctctcgagaaaatagcacgatatttcgaacaagtcactttctgaaaagaagaaaaatattggtggtacaataactgtgtgaaagtgaattcaac

SEQ ID NO: 69569 - DNA, 1390 bp, Zea Mays
cccgacgacgccattcacctccccccgtcccccgtatcgccttcgtcaagtacgcccctcccccttccaccccatgacggagtgctcgattccttcatctgatggcgccacccacctccccccgctctcctccgccgccgcggctgtcgaggctcacttccaggcgcactggtccgcgctcgacgctgccgcacgccaggacccggcgcgggtcatcgccgtgggggactggcggtccccgctcgagctccccttcctgtggcttggggatgtcccctggtgtcgtctccgtcaggctgcaagtccaccaattcggcctcatctgcgacaacctcgacgcagtcaacaagttcgagcccaattacaggcttatcagaagatatatatcttcttcaacgatgttattcactacgggtccacttctagaaggtacagggcggtgacgagcgcgtactaccgcggcgcgctgggcgccatggtggtgtacgacgtgacgcggcgcgccacgttcgagcacgtggcgcggtgggtggaggagctccgcgcacacgccgacgggtccaccgtcgtggcgctcatcgggaacaaggccgacatgcccgcggcgcggcgcgaggtgcccgccgacgaggccgcgcgtctggccgaggaccagggcctcttcttctcggaggcgtccgcgctcacgggcgacaacgtggagcgcgccttcctcacgctcctcgaggaggtcttcgccgccgtgtcgcgcagggcgctggagctcgacgaggcccgccggatgcgcggcgaccagggcgacggcggcggcgaggtgctgtcgctcaaggggaccgcggtggacgtgggctccatcatggagaccagcgccatgaagaggagctcgcagtgcgcttgctcatgacgatgcatggctcaagcactgacaagttcgagcaacaaaggcgccgcgagaaaatctaggacagcatcacattggcaggagaaatcttcgacatctcaatccgtacacaacaatcgacaaccctgtgactgtgaagcaagcacatcactacaagtcctcgcaactctagtctccactctccactctctccagcatgcgaacactatgttcgtaatgtctctcttactcttctcctgcaacagctggtagtccttctttgaaccatgtgtaaagtcctccttccagatggtacacgttgctgtagccattcaggaccaacaagtacgcagctatcagggacctgccaaaattcaaccggaacagagcataagctccaacgctgatattatttgctctcgagaaaatagcacgatatttcgaacaagtcactttctgaaaagaagaaaaatattggtggtacaataactgtgtgaaagtgaattcaac

SEQ ID NO: 69570 - DNA, 4264 bp, Zea Mays
cccgacgacgccattcacctccccccgtcccccgtatcgccttcgtcaagtacgcccctcccccttccaccccatgacggagtgctcgattccttcatctgatggcgccacccacctccccccgctctcctccgccgccgcggctgtcgaggctcacttccaggcgcactggtccgcgctcgacgctgccgcacgccaggacccggcgcgggtcatcgccgtgggggactggcggtccccgctcgagctccccttcctgtggcttggggatgtcccctggtgtcgtctccgtcaggctgcaagtccaccaattcggcctcatctgcgacaacctcgacgcagtcaacaagttcgagcccaattacaggcttatcagaagatatatatcttcttcaacgatgttattcactacgggtccacttctagaaggtatgtatctgagaaatattttccccatcgcaaggtaaataatagttatacatctaccaagtttcagatgtagtcttattccttttttagtttttatcgttaatttttattgcactaatgatgtgttacctcttaagatatttgtcaaaccaataattttgaatgacatttatcttggtactttgtcaaatctataaacttgggagttaggatcacatctgttcctataaaccaagttcaaagattgttattttattttgaagatcacaactcactgtaattgttcatgataattatttgtaaactgaaaatccaattatctcgctatcaaacaccttcaaagaaataaattattctcgcgcgcagggcgcgcgttacctactagttctgataaaaaagaatgtgcccctgcgctgcgctgcccaatgtcctccacccgcattccccgttcagctaaaccctacccgtctccggcgccgcttagatccatcacagacgacgctcgccggtcctgaggagagatggccgacccgaactcgcagcccctcgccgccgctacggcggatgtttctgcaacctaacatcaagctgcgatgaccgcgccgcaatcgcaccgaggcgctgcggtggcggcggcgaagcagggagcatgcgcaagcgcaaccatggttgtgccgtcgtccccgcaaggcgctcccgggttcgcggtggtgtctcaagaggccgaggacgtggcggctttatcgtcccctctaggtcctcccgggttttgggtggtgcctcagcaggtagcggtcgcgccacagcaaggtgctccggtaatggcgccgccacagggtgcaaccatggtgcctccgcaacagcagcatttcgcgcctgagatggtgcctggctcctaggaagtcatgcacatgctcgttcaagctacgcccatgggcatgatgatggcctcgatgcccctgcaagcccaggctatggttgatcaccaacctgctcaaggtatggcgccatccgtccatgatggaggcgcagcaagctcaacctggacacacgacgcatgacgacaccacaacctctgccactcggcccttcgttgacgcagcagcagccttcacaagctgatacgattataatggcacaaccgcctctgcctttcggccctccacctgcaatgcttcagcaacagcctccacatgggagtatgggaccgcgatgatggtggcacaatcacttctcactaccggaatcgtgttctttgccgagtgtctaagaaactcggtaaaagctattttacactcggcaaagtgtttttttgctgaatacttttttcggtttgccgagtgtcaaaaaacactcggcaaattaagaatcgaaaaaataaaaaaaaacagcaaaacattttttaaaattctaggaacaactctccaacactgtctattatcaattgctctatcatttttcactattattttgaatcaaaatttatatgttttataaatgatgagattcgaactttcaacctctctctctcgcgcatacactcctataccactacactactacacaaattatgtctatattacgatttcatttcccatgtactataacaaatcgagagtaatttgactatttaaggcactaaatgagttcatttaaaaatgtgaccaactataaagttgcataactttttgagatctacaagttttattttaatagtttctacatccgagaccgtttacaaaatttgaattttaaatttgaaaacttcacacgaatttttcaaagataagatgatttcaaatcaaaaaaaattgtcaactacagagtttcattatatttcaagacctacaacttttattttggtggttttttcatccgagatggtttgaaaaattcaaatttcaaaattcaaacatagttttgtataacaagatgatttcaaaacaaaacattgtcaactacaaagtttcataacacttcaatgcctacaactttcatgttggtggttgtttctttcgaagtcgttttcaaaattcaaattttatttttttaaattcagacgtagttttcgttgacaatatgacttcaaatataaaagttgtcaactataaacttctataacttcttaagatctacaaagtttattttggttgtttggtcatttgtttatctcacatgatggttctaacaatatgcacaaattctatacgcctctctcgtagtttcataaactacgagagagatacgttttatgaacaaatttatttttattttgtcatatgaagaaatgttcaatatataaattgtacatcatgatgagttatacaaatttatagttgaaaaccttttcatttgaattaatttactatttaaaaatgtgatttttaaattgtttttgcctagtgttggagaaaaaacactcggcaaagagctctttgccgagtgttgtatttgtgacactcgccaaagagcctgccaagtgtcaaaaaaagacactcggcaaagaaattctttgctgagtgtcaaaaataaaacactcggcaaaaagtttctttgtcgagtgttttcttttaccgagggttttttgcgtggcactcggcaaataacttctttgccgagtgcccgaaaaaagcactcggcaaagaatatgacaatcggcaaagagccaaattatgccctccattagtgatgctgcaacacaatccacagggcaaccaggtgatggtggcacagccgcaattcgttgcgtcttgaccaatatggtttgtgatcaacttctagttatgcctgattactattttatttacgtgatatcagtcccatatgtatgattaacaaaagttctaccatatatagatgtattcaagctggtgtagactaggactagatttttacatttatttgttgtataaatctagaagaatagaagataagccatatcaaaaccataggcagtgtctgactggcttgtgtcatttgtgcaagacgacaggagcttttacgattgaggttcttatatgggctgattggaccagctgcccagaaaacaaaagctcatctcatattttgtctgttctgtattttctttccttttcccccttccatcttaggacagatatgcactcagcataagcatttcattaattttgaacctgcagttctctcactctcctcgtatgtgttcacatagtgggtcctaggcactgttttctgcggatctagttttcttctacagcatctcttgaattcctgatatcttgacgtggcaaccttgttcttgcttttcatcagcaacttgactttgtctattgctcaattgttgcaactggcatcagtacttaactactggaggttgccttgctgtatgatatgcttttgttataatggtgcaatgtgacaagtatgttctagtggatttcactctcaactggtgctgacattcttgggtcatccacttcactgattagtattgtcagctggagggctcagattatctgttgagggacgtgagctacaatttacaggtgtctcagtggttccagtctgtttgtgatcacattggttcgcatggttgccagggtcattttgatgtaaatggaatcatgagatttgcctgcagccgcaactgctgcagctgtagtctatagagataaaataacgtataagccgcccgcagtcggattaaagccgcaacgagaataaataggagaagcttacagtcgtcttagacacaataaacaagtaaatttgtaagagagataggtgggccaaatattagtagcgaagagctaactactggtctactggatgttattagtcttgctttaagtgcaac

SEQ ID NO: 69571 - DNA, 1317 bp, Zea Mays
ctccttcctgccaacacagcagcgccaccccctctcatggccctccccgacgacgccattcacctccccccgtcccccgtatcgccttcgtcaagtacgcccctcccccttccaccccatgacggagtgctcgattccttcatctgatggcgccacccacctccccccgctctcctccgccgccgcggctgtcgaggctcacttccaggcgcactggtccgcgctcgacgctgccgcacgccaggacccggcgcgggtcatcgccgtgggggactggcggtccccgctcgagctccccttcctgtggcttggggatgtcccctggtgtcgtctccgtcaggctgcaagtccaccaattcggcctcatctgcgacaacctcgacgcagtcaacaagttcgagcccaattacaggcttatcagaagatatatatcttcttcaacgatgttattcactacgggtccacttctagaaggagcttttacgattgaggttcttatatgggctgattggaccagctgcccagaaaacaaaagctcatctcatattttgtctgttctgtattttctttccttttcccccttccatcttaggacagatatgcactcagcataagcatttcattaattttgaacctgcagttctctcactctcctcgtatgtgttcacatagtgggtcctaggcactgttttctgcggatctagttttcttctacagcatctcttgaattcctgatatcttgacgtggcaaccttgttcttgcttttcatcagcaacttgactttgtctattgctcaattgttgcaactggcatcagtacttaactactggaggttgccttgctgtatgatatgcttttgttataatggtgcaatgtgacaagtatgttctagtggatttcactctcaactggtgctgacattcttgggtcatccacttcactgattagtattgtcagctggagggctcagattatctgttgagggacgtgagctacaatttacaggtgtctcagtggttccagtctgtttgtgatcacattggttcgcatggttgccagggtcattttgatgtaaatggaatcatgagatttgcctgcagccgcaactgctgcagctgtagtctatagagataaaataacgtataagccgcccgcagtcggattaaagccgcaacgagaataaataggagaagcttacagtcgtcttagacacaataaacaagtaaatttgtaagagagataggtgggccaaatattagtagcgaagagctaactactggtctactggatgttattagtcttgctttaagtgcaac

SEQ ID NO: 69572 - DNA, 2013 bp, Zea Mays
ctctcatggccctccccgacgacgccattcacctccccccgtcccccgtatcgccttcgtcaagtacgcccctcccccttccaccccatgacggagtgctcgattccttcatctgatggcgccacccacctccccccgctctcctccgccgccgcggctgtcgaggctcacttccaggcgcactggtccgcgctcgacgctgccgcacgccaggacccggcgcgggtcatcgccgtgggggactggcggtccccgctcgagctccccttcctgtggcttggggatgtcccctggtgtcgtctccgtcaggctgcaagtccaccaattcggcctcatctgcgacaacctcgacgcagtcaacaagttcgagcccaattacaggcttatcagaaggtacactactattgctcctaccctttttttccaccctttggccaacaacggaatgttatgtcttcaatgtttaatccatactacccaagtctttgtaattgacaaactaaacagtgcactaattgagtagactacgatacaagagtaaccacatgcttctattcaacctgtcttcaattacatttgatgttagttactaaagaccaagtagactgagtcttttagattgcacattttttaactttcatggaaacgtttttaggaaaacaaattaggtgtgattctttttaaaattctataacatcaaataaaaaggaaaatagattgtaaataaatgctatagtcaagaactgaacgtgtctaataggttgatttcagtgtttcaagctttatcttatgtttattgattatatgagaccttgcaattggaatattcctgcagattggtatattatatgctcgagtggtgaaaacaaataataccatgaatcccgatgtctcatgcagattggtatattaatgcatgctttaaagaataggaatatataagagataagacttcttcggtttccactactatcatcacctgacatttaatcagaaggcgtagacaatttctaacttattcatgtacatatttactgttctgtaacaattactgtccataaggtatacttactacatcgataagctttgttgcaggtaattcccattcattgttcttattgattaacatgctgacacttaagctaatgtgttcagtgttacgaggaacatactccaatagaaatcttcaagtttgaaacagagatttactacaatttgtttaacctgaagatctaacaactctatcaaaacctttgtttcttacatgcctacctgctttacattgtagcctccccatccacccacccacccaccaagagtgaaaaaatctaattccgtcatttttataaaaaatgttatacttttagtgcttcctttgttaagcacctgaagtgacatctttatttcttccaaaaaaattgttgtgttatactcgcaggcccctgttcctctatccatgttttgaacatacttcatttcccggttatacaaaaaaatctttcaatgcattttttggtgaacacgaacatatttacagaaatttgttttaatgagtgttgtcttatgttatttccatgtggcaatacttcagtttttctctttgtcaccaccttaacgtgtactactacagtgtttacaactatagattcgtcaagtattgccctaattaagttacattttaagatattataatcccattaaactgtctaggtttctcttaccaatttaatagttaaagaaattttatgatgcattgtatttgtagaagtaaatgttcgtatgctattcttttaatagccgataaaatttatgcaattaactttaatagtcaagaaaaatgttatgttccattctatcaatagaattaactgtatactgattgtttaaaatcaacaaaatctatctagcatatattcaaatgttttttccatcaaaatctgaaatgtcagtgttacctagatttagcttagcaattggtttagcactctaattatatacctttttctgtcgtag

SEQ ID NO: 69573 - DNA, 4490 bp, Zea Mays
gtacgttgatgtgtactcacccttgctttcacaaaacaccaggttgcctttggggcaatctatgctcaggtaaagaagaaggcgtcgaggcggatccccaggaattccaggacttcgacgagttcgaggattaggctagcgacctcccccagtcagctgcctgtggtgggttaatttacgttggctacgtttctattctgtgtactttgattatattatgtaaatgactctagtctttaatactatgacttaccctttattgttactcgaggcattgtgctatgatgagtcatttatgtaatcgctatgtacgtgagttctgatcctggcacgtacacggtttgcattcggtttaccttacaaaaccgggtgtgacataagtggtatcaaagccgtgctgactgtaggaccgctgacctagagtagcattggccgttttaaggacttattgattattacttcatctcatccttgattatgcttcaaaatattagtcacctcgactaattctatgttgtgctcctatatgccccttgccaaaaagtgttttattctagtatgatctatacttctctcaatctattagatctgatctcactcttgtgcttgcgacatctttatagatgccccctgaccacaacctttttgtctgttggggttctttcttcttccgtcattaatttgctaccccttgactatctttattcccttgatattgacatgctcgtacccctagattctttaatactcttgctttaaatacttgcctaaaaaactctgttatctatttaaacattccagtttatatgtccatgaacttctggtcttctgagatcccttactattctaatgttaagtctttatcctttgccttattccattcccttgtcttggtatgctcgtatccttggaatcttgcatgctcttatattcttatgtacacttattttcataccccaatgtctgttcaagacattttagttaacatatccatgaccacccttgtttcctaatgatccatgagcggtcatcttattttgcacatacttggtgatcttgctaattccttgtaacttctttcggttatgaatatctatttcaactcttctgttggaaccttacttatcttatccttgattgttttctccactccacttcgtgactttgtaagtcttgccttaactctgtccatggactatgcttttcatcatcatcacctttacccttatcatctctatatcttactttgatgtttatcttatacccgccctttaaaacctcttcttttccatcttgatctgagcgttgtactttgcctacttttcccttggtcgtgtcctcttctttgtcacctgcgagtttttaactctatcatttgttgtgtttttgtttgttatttcctttacccttctcagcactctatcctaccttgtgattatgttatgtctgttatttaaaatctccaatctcccatcccaatttgggagcggtgttttacttacctcacccttggcaacatcctcttctttaccgcgtgtaagccttgatgtaactccattctttgttgtacttataccactggctcttctgtgccttcatcttttcccttatgcccttgtttattatcgcatttgacccttgcgatatttatgtcttctacctaaatgctcaccttgaacttatcctttaaaagcctcccctttctttcaacccagtttgagggttgcgagttacctatctctcccttgatttcctttccctccatgtcgccttacaagtcttgtctaattccatcctctgttgtgtttttatttgctatcaccatttcctcgccatccatcgatcttaccttcatacttatctttatgcttgctccttaaaaatctcctctcttccacctcaatttgagagtggcagtttacctatctggcccttggacacaccttctcctttttcatttacaggttctgtcttaactccatccttatggtacttatatccgttgttcttatgctgatttaccttctttcctatatccttgtccgttatcacctttaaaacccttgtgatacttatgcccttgtcttcctgcctaccttgaacctaccttttgaagcctcctcttttccatccatgttcggggataatgcctcatctatctcatcattaactgctcccccttctctaacaccttgcaagattttcctcaaatacatcctttgttgtgtgattgcccgttatcaccttaacccttgtcatccctcgatctttaccatgatgcttatcttgcacctgcattttaaagcctcctctcccatttcatttcaatagtgatgccttacctatcccactcttgttcgtttccttttcctctgtcgcgttgcaagtcttgtcctaactctatcttttggtgtgcttttgcctttcatctcccttacctttgtaatctctatatcattccatgatacttatcttatgcctaccttttgaaatatcatccttcccatctcgatttgagaatggtgttttacctatcctgaccttggatgcattctctcccttgccggttacaatccttacttcagcttcatcctttattatgctcatgcccgtaccctacatgtcttatcttgccccttgtctttcgatggccttagagcagtttccccttggtaaggaaagaccaccatctagttaacattaacgtatagcaacgagatgtttgttgttgtatgcttgtgttgtttgtctttgtgttatgactgatttgcctctttgtgatgggtgttgatgtattgtggtcgttggtccgcattgacatcagtttactagcggagtgccgtggattaagtagctaggtgctctcccttctctccctttaagccatctatgcttaccttttctatcttaccttttctatctatactcttcccttttgcacctgtccggttggcatcctccaacctctcccaatcagtcaagataagagtcggcggcatctgcaccaagtgcgtatcaacgctcctgttaagggggttagtcgctaaccccaatgaagacaatgtgatcaacgtcaaccgacaagatcaaagtggtgcggcgaaagcgtgtgtgggtcctaacccataggtccaagagatcctcaagtattgcatcaatcggcctcaagcatctcaaggttaaagcaaccagtccacaagttaaagttgccagagtcaaagtcaactcaagaaagccgtgaacaaccaataaaccaatctcatttttgtgctagcctcttcttgaatctcgagggcgagattcctgttaagggggttagatttgtaacaccctgaatttgggggtataaaatttcttttttaatatccaccaaattcaggtgtcaccgtctcagttcctcgctttccttccctttttcctaaaaaaatggagaattattttgttatatatacgttttaatcttagtaaaataatgccctaaagaagctttgactgttgcattcatgccgaagcacaatttttgtttgctaaaaaaataatcttggcattgtgtttatgttttgaagaaggaaaaactatagaatttaaactatttgagcatggtctaaaataaccaaacatatttatatataaataaagagaaaataaaactcctctcttcaccttttcccaagcacgacccactctactgtacgtgcgcgccgaggcgctcgccctggtcctctgcgcatcagctgcacaagaaaccccccccagcagcccgcctgtcattggcatcttcccccaaccgcctcctgcttcactcggtcatctgggctcttggctcatacccacaacgtgggcgtgaccagaacgaaattgtcgctcaactcgcgtgtcgctcgcataattctattctccataccgctctcttctccctcgtctcgttcagcaaccactcccgtggacacggcaaggcagggccgggcctctgcgcacggcgtccggccggctacaacccctagccgtggccatggcggcggccagccccgccccccagtcgacctcggctctccggtgagctgccctccatgtcctggccgctcagtcgttcgccgcgccgaatcgcccaggaagatctgcgatgctctcgtcgttgccgaggttgcctttggggcaatctatgctcaggtaaagaagaaggcgtcgaggcggatccccaggaattccaggacttcgacgagttcgaggattaggctagcgacctcccccagtcagctgcctgtggtgggttaatttacgttggctacgtttctattctgtgtactttgattatattatgtaaatgactctagtctttaatactatgacttaccctttattgttactcgaggcattgtgctatgatgagtcatttatgtaatcgctatgtacgtgagttctgatcctggcacgtacacggtttgcattcggtttaccttacaaaaccgggtgtgacagacgcgccccaa

SEQ ID NO: 69574 - DNA, 732 bp, Zea Mays
aaccgcctcctgcttcactcggtcatctgggctcttggctcatacccacaacgtgggcgtgaccagaacgaaattgtcgctcaactcgcgtgtcgctcgcataattctattctccataccgctctcttctccctcgtctcgttcagcaaccactcccgtggacacggcaaggcagggccgggcctctgcgcacggcgtccggccggctacaacccctagccgtggccatggcggcggccagccccgccccccagtcgacctcggctctccggtgagctgccctccatgtcctggccgctcagtcgttcgccgcgccgaatcgcccaggaagatctgcgatgctctcgtcgttgccgagactgtgatccatttccgagcttcgaggaatcgacgatcaagcttcgacgatcaaatgacccagctctttgagttctacaaggctgaagattctgagcatctgtttggtgaaggcaagtgtcctctgacccattatgtcctatctacttataattcactgtcccgcatacaatgatcaacctaaggattgactagctttctatttacttatccttgtttacccttttgggttatcatggttagctttatgctattgctttactttaatcaatgaacatgatgtgaatattatgatacgatgatgttatcccaaggatgatattgtgatactctagggggctcgggccttttccctgagtacctctccgtaaggac

SEQ ID NO: 69575 - DNA, 927 bp, Zea Mays
aaccgcctcctgcttcactcggtcatctgggctcttggctcatacccacaacgtgggcgtgaccagaacgaaattgtcgctcaactcgcgtgtcgctcgcataattctattctccataccgctctcttctccctcgtctcgttcagcaaccactcccgtggacacggcaaggcagggccgggcctctgcgcacggcgtccggccggctacaacccctagccgtggccatggcggcggccagccccgccccccagtcgacctcggctctccggtgagctgccctccatgtcctggccgctcagtcgttcgccgcgccgaatcgcccaggaagatctgcgatgctctcgtcgttgccgagctgcccaggtcgtccgagctttccccagcgtccttgtagttgaagaatggaagattggagaagaagctgcccacttcgtgcgtgcacaggaaaaagaatcgcatgtgctcgcatgtgcggttacagcagagaggaataagtccatgtagccacatttgatcccattcactttgaccggttgtggatgagatcatgtgacccttggtgtggcacgattctgaccgataggatcgtgccacatcgttgttagtgcgctatttattaaaatatgtattaactttggtgttagatattcgattaatccattccagttatattaaccgtgtaatgatctcgtgcacatgttataaatttgtttcgactcgttctagttgcgttagtttgataataacgttgtctacatgttagaaacattgtttggtcgtgacaaatgttttatttaattaataaagtaattgtttatctcttggtcattaaaataactaattcatagttttagttacgatttataaacacatgttagtgtgattaatgactacacaaatgttttaatttaatacttgtttagt

SEQ ID NO: 69576 - DNA, 1200 bp, Zea Mays
cccgaaacccccattcgcgcctcatcccgctgcacactccccaccctccccgctagggttttgccaccatagtcgctgccgttgtatagaggctcctctcccgtcgcgcctcctcgttatccctcttcgtgatcctccgccgcagtgctgcccaggagcagtcgctgctggtgcacctagccatcctcgtgacggtctcctgccttggcttctagcacgatggcatggtggggacggctacgtctcgacgtgccccggcttcccctccgctcctcgtgcctcgtagtagcgatggagtccctaggcgtgcggtggcggtggtcaccaactggtcatcttctctaaaggtcacccatttctcctattcctcaatcggacgacgctgtaccaaatctccacacgttgcttgggttgcttggtatgctagaaccgattcggttgatcgactggttggtacatgtgtcgtttgattgactggttggaatgggtacttttcatgggaatcagaggtaaatttaggtttcatatttttttatttatttgccacttttgtttatttatttttcactcttgtaattgttgctcttaggaccgtggttgttgatttgttgtcctctaattctctagtcattagatatttggtagacctccgctttattttcatggaaccttagcttgttgccctattaacccataactgacataaagatgtccttcacaatcacatatttgtgcaaagtgagttgctgtaaggctccatccgaagaatttagaggatttagctcatggtgctgacattggtagttgtgttgagttgcaaccagtgtattaaatcgcgggctaagaggtttagcggctgggttccagaacagctaagtccagctataaccggctatagcggaagctaaacattttagcggatttgcaaaaaaatagagtataaatttaacacagatgaatagacgacaactttgatagtcatacatattgccatacatataggagttcagctctatacatgactgctgtaaaatgtctgagcagcttaacttaaaacaaaatgtctaagctccaagacattgagatcattagtttagttcacagttcacccaaaatgactgtccacaaggtcaaatataacattgtaatctagcatcaatcagaatcaaaggcatgtggagacttatcagattcagagga

SEQ ID NO: 69577 - DNA, 1093 bp, Zea Mays
aagaaattaatctcagtcattggctaggtttttttttctagaagttattggttaagttgaattaaaattgccacacatgttatgataatatattaatatgtacagattcacggatcaatcacatgaagggaaagtgcgctagaaagatatgcacgtttcacgttaacaaagccatccccaaactaaacagagatagtaaacttgccctctgtagtcgtacccttcagtcaatgctcagctttcactttgacatctccattaagcaaattgccatgggactgagccaaccgctttgcctcctgcacaaaaatggggaattatgatgttatgcaacaagaacaatagaggatttattctaaccaccgaagcaacagctgaggcacatctggacatgttacaatcaccagcgtttgacaaaacttgatttccagaaaccctaacaagcagcaggatttaatgaagcctagatgtttctcacagaatccaatcgattttcacctttcttacactaccaattgctaattgcttcaaaacaaatacgagtaaatggtaactatcagctcctgcagtatcataagaacaactcagataccaattgctccggtcgagttagttgagtttgtggacatttcagagtaaagaaaaagctctacctgcacaggaactgcgcaacactagccaggaccgggcacaggcaactccttagtccttacagatataaggtgtagagaaaatcaaccggtagtttttttttcttgaatacgcaggagatctgcgtatttttgtattaagaagagaaaaggggtgaaaccccaaaacacgaacagcagacttacagacacacaccaccaaatacaccactcttaaaacaactcctctagatggaaagaagagagagctttagcgccagccaaacgccagcacaacatctcttccctcgcagccgagagggcgatcacaacactcgggctacatccatcaaacacacacctatttctatgcttccaaatggaccacgcacccaaaatgaccagcgagttgaaacccttcgacaaaggcttgcccaccatctcagcactcttctgccaccaag

SEQ ID NO: 69578 - DNA, 2231 bp, Zea Mays
gggcacttcaatcttgtggacccatggcttgtgcaagagtacataagctagcacaatcaattttggcatgctccataatgctggtttggagcctgcttctgcaccctctaagcctgcttaaggcccaatttgagtaaccaaacgttacgagcttgcactgtacaagtctggataggccctaatgaaagcaacgaagcacaaccttagggttcctctctcccgcaaccactcattgtccagcagccggtttgttctccattgcatgtcaactcagctgctcatgtgtgacctaggtcctcactccttagtgagctgtgcagtctagctgtcctccgtcacttctcttcggctcttcaccatccgtccagctctcatctgcaaccttcccaaatctgagactcaagctccaggaaacatgaggcaatcaagctgccttagaacttcttatgaagcttgtaagaaggtaagcgcaggttcttccatgtatcaatcaagaactcttccacaggacttgataaatgagctgccagaagcttgcatagctgaaatattcaggcatgtgggaaacccagaagatcgccagtcatgtgcctgtgtctgttggagacgggccaacatattggtccctcagcggccagatttttggggccccttcagtgttcatcaaggtgttcacccttgcctgcatatgtctgatgttgatgatgtcaagcttgcagccgctgttgtcaacatatgtgcaaggggtgtgataactgatcttggtctttgttgtgcaccatgtgggactgttgttgctggtgttccacggctcactgatagtgctatccattttgtaagcagtgcatgcggcaatctgaagtcagtttgtctcgttgactgcctctctctcacggataaagctgccaggatcattgcttcaaactgccctgcactagaaaatttcgttatgttacagtcttcaatcagcgacgatggtcttcctcaggttgctaagcaatgcagaaacctgaagttcctccatatcgaagggtgcttgtccatcactgaggcgtctctaagagcccttatgcagtatgccaagagactcgagtcccttactctgggaagctgccctcaaattgggcaagatgccatcttgtccttactgatgaaccaaccttatctggataaacttgagctcaagggcatgatggctggagaatcacatatgaatgttgcaagacaatcatcagtcctccatcatttatgcttatttcgccagctctctactctcatcctggtgaaatgctcaggtttatgggacctgggcaatgcttaaccttgctagaattcactttcgattgctaaggcatttggtaattaatgactgcagaggagtgacagaacttggcttgaagtgtctattgggtgatgccatgaatcccagtaagcttaggaccattgaacttgtcaggttccattttttttacatataaagctgtaatagaagtcatgtccttgatcagcagaactattgaatcaatgattatggattcatgtgattttggcataatgacgccacgtgatcttcatgaagctgtagctgtggcctgtgagtgtcccaagctgaaggtgatcagaacggagcactgtgagagaactatcttgtaatgggtcaacatagtgtgtcgagggcttaaggagcttaggcttgttggctttccagcatctgttcaggcttatcacatggaacacattttatgtgacatcctgcactacaatgggatcagaaaggttgaactgcaatcctaccattttccagacacgcatgtttgcactgtagctcgttcatgccagggagctctgcaggaacttatattggacgagtgcccgaacgttctgggcaactttgtggtgtgcctcagagagtcttgccccaacctaaccaagttgaccttgaatcgtattggaatcagtgatgtccaaatcaggatccttatgcttgtaggatttcaccaacttgaggagtttaatttaacgtggtgctggtgccccttgatcactgacaggttactggctatcttacatgcatcaacattgcctaagctgaagagagtcaatttgtcagactgccctaatgtcacccaggagtctgttgactaccaccagcatcgctgggaagtcgagtactaagcgagagctgaacctcaagaaggaaaataaacttggctgcgtgcttctgtttgctt

SEQ ID NO: 69579 - DNA, 2851 bp, Zea Mays
gcatgaacatgacgctggttcggtcgtgccaatgtgcgtgacgcatgtgggtgactgagcatccattgatgggtcagtcgctttgtttgtgttcctttaaggttggatccatagcaagaaaagcagacgtggagtacagcaatggctagcgaggagcggatcctagtatcggtgcggctacggccggtgaatgcgcgagaggcggagcgcggcgacggctccgactgggagtgcgccggtccgaccacgctcatgttccacggcaacatcccagagcgtgcaatgttccccgcctcatacacctacgacagggtgttcaaccctgagtgtagcacacgccaggtgtacgaggaaggggccaagcaggtggccctatcggtgctcagcggcatcaactcaagcatatttgcgtacggccagacgagcagcgggaagacgtacacgatggtcggcatcacggagcgtagcatggcagacatctacgactacattgacaagcatcctgagagggagttcgtgctaaaattttcggcgatggagatatacaatgaagccgtgagggatctcttgagacctgacgcaacacaactaaggcttcttgatgatccagagaaaggaactgtagtagagaaactcaccgaggaaacccttagggacaaaggccatctcttggagctccttgcagtgtgtgaagctcaaagacagattggggaaactgccatgaacgaaacaagctccagatcgcatcagatactccgactgacgatcgagagttcagcaaagcaattcatgggacgaggcaaatcgagcacccttctagcttgtgtgaatttcgttgatttagcaggaagtgagcgcgcctctcaaacacaatcagctggtgtgaggctgaaggaaggtagccacattaacagaagccttcttacattgggaaaagtcattcgccaactcagctagaaggacagttgaaggaattaatggagcagaaagacaccgttcagtctcaacttgacaattttcgtagagttacaagtgatggaaatttcaatgatcatgcaacaaggcaatgggatcaatcgaacaggtcttcagagtcccttccatgtagtgcgtctgaagacacactttcttttgatacttacagtgatgtttatgaagaacaagatgatctaggctccaaaggatttgatgtgtcacatgtctataatgattatcatcatgatgtgtatcaccaaaaagtagacgaacacccaatgtctagtttgcatcaaccaagaaaccatatttctaatagaacacagatgtaccaaccaaatagggagacttcaccagaggtccctaaggagcattgcaaggaagtccagtgcatcaaaataaatgagtttaggaggagtcggtctgacgaagaaaaacatggtgaaaacataacatacacatcagagggtgccatcaaactgtacacatgtgattctgagccatcttctgatactgaaaaaacaaataatgacgaatctttagtcctgaagaggtgtgtgataagctccagagacagtgtactaactagaagcagaagttgcagagctagcttcatggtcattccgaatagttggtttgatgattcagcggatatgagaatgacaccaccaggtgacattttaaaatatcctcacagaaggctagagaaggttaggaggagcatgtactctgaaaatggtcattgtcaaaatgatcttacattagactgccctgtggtctctggaaaagttgcatctgacatggttatagacaaaaacacttgcaatgaagaagatggatatgccaacaataaattcagctgcatcacaaaggttaaagagaagcaagaagactattgtacatcccaactagagggcaatcaggacaacgttactgcagaaatcttggacatgaaacatgcaaaaaatattgacaaagatatatttgtggccaatattgactccccttcacggtggcctattaattttgagaaaaaacagaaagaaatcattgagttatggcatgaatgcaatgtctctatagtacacagaacatatttcttcctcctcttcaaaggagtcaaagcagacaatatttatttggaagtggagcacagaagattgtccttcattcacagttctttcattgccggatgtgagcctaatgttactgttacatcaagcttgagaaatcttcggcatgaaagagacatgctctacaagcaaatgctgaggagactccatcttctagaaagagagagcctttatagcaaatggggaattgatctgaattctaaacaacgaaggctgcaactatctcgccgcatctggacacagactgacatggaacatgtgagggaaagtgccgctcttgtcataaaattggtagaacatctggagaaggggcaagccatcaaggaaatgtttgggttaagcttcacattgaaccaacgagctatccaaagacctttcagctgggttagtgctaactcctaaagcaagcatcgagacaaattatgattatgatggttgatagttgcatgggacaacaaacaatgccatgatgaaatacatagtagaggagacctcttgtcagtcacccatacgagcattgattttcactgatgcccctgtatatttcgtatcacttattatgtagatgtacatgtgatggattttgcattgtggaactgttaaaatgaaccgacatgagatgccaaatctttgcaccaaacagtatgatgtattgctgatctgatttttttgcatcaaatgtatatctaatataccatattttttgcttaagtaaatcagatgctatgaatgccaactaattg

SEQ ID NO: 69580 - DNA, 3271 bp, Zea Mays
gttttccatccaattcaagggaggcaggaaccaccaaccaccttctcctgtcccgctccgtccggttccattcctctcctcctcctctcttctcttccctcgaacgaaggggaggaggaggaagcgcctcgccggcattgccctctagctcctgtcataccacaaacctcgattgtcatcttgtcaaaccacgaaccaccaccgtcttcttgccggaggttggatccatagcaagaaaagcagacgtggagtacagcaatggctagcgaggagcggatcctagtatcggtgcggctacggccggtgaatgcgcgagaggcggagcgcggcgacggctccgactgggagtgcgccggtccgaccacgctcatgttccacggcaacatcccagagcgtgcaatgttccccgcctcatacacctacgacagggtgttcaaccctgagtgtagcacacgccaggtgtacgaggaaggggccaagcagcaagcatatttgcgtacggccagacgagcagcgggaagacgtacacgatggtcggcatcacggagcgtagcatggcagacatctacgactacattgacaagcatcctgagagggagttcgtgctaaaattttcggcgatggagatatacaatgaagccgtgagggatctcttgagacctgacgcaacacaactaaggcttcttgatgatccagagaaaggaactgtagtagagaaactcaccgaggaaacccttagggacaaaggccatctcttggagctccttgcagtgtgtgaagctcaaagacagattggggaaactgccatgaacgaaacaagctccagatcgcatcagatactccgactgacgatcgagagttcagcaaagcaattcatgggacgaggcaaatcgagcacccttctagcttgtgtgaatttcgttgatttagcaggaagtgagcgcgcctctcaaacacaatcagctggtgtgaggctgaaggaaggtagccacattaacagaagccttcttacattgggaaaagtcattcgccaactcagcaagggaagaaatgggcatatcccttacagagattcaaagctcactcgcatattgcagtcatctttgggcggcaatgcgagaactgctattatctgcacgatgagcccagcacatagtcatatcgagcaatccaggaacacacttttgtttgcaaactgtgctaaaaatgtagttactgatgcaaaggtcaatgtagtgatgtcagacaaggtgttattgaaacatcttcaaagagaaattgcaaggctagagaatgagctaaagtttcctagaccaacctcttgcagcaactatgctgaggctttaagagaaaaagatgagctgatcaaacagctagaaggacagttgaaggaattaatggagcagaaagacaccgttcagtctcaacttgacaattttcgtagagttacaagtgatggaaatttcaatgatcatgcaacaaggcaatgggatcaatcgaacaggtcttcagagtcccttccatgtagtgcgtctgaagacacactttcttttgatacttacagtgatgtttatgaagaacaagatgatctaggctccaaaggatttgatgtgtcacatgtctataatgattatcatcatgatgtgtatcaccaaaaagtagacgaacacccaatgtctagtttgcatcaaccaagaaaccatatttctaatagaacacagatgtaccaaccaaatagggagacttcaccagaggtccctaaggagcattgcaaggaagtccagtgcatcaaaataaatgagtttaggaggagtcggtctgacgaagaaaaacatggtgaaaacataacatacacatcagagggtgccatcaaactgtacacatgtgattctgagccatcttctgatactgaaaaaacaaataatgacgaatctttagtcctgaagaggtgtgtgataagctccagagacagtgtactaactagaagcagaagttgcagagctagcttcatggtcattccgaatagttggtttgatgattcagcggatatgagaatgacaccaccaggtgacattttaaaatatcctcacagaaggctagagaaggttaggaggagcatgtactctgaaaatggtcattgtcaaaatgatcttacattagactgccctgtggtctctggaaaagttgcatctgacatggttatagacaaaaacacttgcaatgaagaagatggatatgccaacaataaattcagctgcatcacaaaggttaaagagaagcaagaagactattgtacatcccaactagagggcaatcaggacaacgttactgcagaaatcttggacatgaaacatgcaaaaaatattgacaaagatatatttgtggccaatattgactccccttcacggtggcctattaattttgagaaaaaacagaaagaaatcattgagttatggcatgaatgcaatgtctctatagtacacagaacatatttcttcctcctcttcaaaggagtcaaagcagacaatatttatttggaagtggagcacagaagattgtccttcattcacagttctttcattgccggatgtgagcctaatgttactgttacatcaagcttgagaaatcttcggcatgaaagagacatgctctacaagcaaatgctgaggagactccatcttctagaaagagagagcctttatagcaaatggggaattgatctgaattctaaacaacgaaggctgcaactatctcgccgcatctggacacagactgacatggaacatgtgagggaaagtgccgctcttgtcataaaattggtagaacatctggagaaggggcaagccatcaaggaaatgtttgggttaagcttcacattgaaccaacgagctatccaaagacctttcagctgggttagtgctaactcctaaagcaagcatcgagacaaattatgattatgatggttgatagttgcatgggacaacaaacaatgccatgatgaaatacatagtagaggagacctcttgtcagtcacccatacgagcattgattttcactgatgcccctgtatatttcgtatcacttattatgtagatgtacatgtgatggattttgcattgtggaactgttaaaatgaaccgacatgagatgccaaatctttgcaccaaacagtatgatgtattgctgatctgatttttttgcatcaaatgtatatctaatataccatattttttgcttaagtaaatcagatgctatgaatgccaactaattg

SEQ ID NO: 69581 - DNA, 2267 bp, Zea Mays
aacaagttcagtgcaaacccaacaacaaaaggccaaaaaaaaaaaatcatgcaagacaaactctctttgtctctctcacctacaagtatcttatctatagctccatccactcgatctcatatataaaaatatatacacacacaccaagaaagattcagaggctgcgatgctcaatgtctggtgttatgaccaggattcgggttgccaacgaagtacgcaaggacccctaccaagggagcgttgatgtaggtggtgggctcagattttctgaaatccgcacggtcatcctcgtaagcgtcgtcctcccccggcccgccgaccaccgcgccgaccagcgggttaggattcgcaccggatgagttgaagtacggcgtgccttccttgcacgccatcggctgaggatggtccctgatcgagggcaacgacgaggcccggtggtggatccgctgcgggtaccggtcgccgtacccgatcatgtacgacatcttcatcgggttgtctcctagcagctgaagagtttcagggccaactgaaacgtctccgcagtcgacggtatgagaggacttggagaggtacttggcgtaggtcaggagcaggaaagagatggaggtgacgtgctgcatgttgctgcctccaggcttgtagatcatgcccccgggggtgtacgtgatgtgcggggaagaagacgactccgggatgagcgtgcatacgaagctgtccgcgaactccttgtacgactgcaaaggcagcgcggcgccttctatgaactcctgcaatgcagtcaaattcccccatacaagtcagttctgctctgttgatttgccagcgtaatttgcattcgtggattgaaggggggggggtgcgatggaagcagccccgtaaaataaccttggagacgaggacgttgaggccggcatgcttgttgtcccacccgaactcgttgctgctgtcctctgcacccagggtcttgccgttgttctgaatgtactggaggaacgtgtcatccttggaggctctcctcagccatgctgccccccacagcagctcgtcctgcgaaggatttcagtgcgcgttaggctctcctcagccatgctgccatctatggaagtgttgttcctcagaccgaacactctatttcgacacttttgtttgggccgttggggtgcaacacataatacatgagcaatgatatgtagtgcatgtagacggggaaacagccaaaattgctagaggttggtcaggaaaagaaacttcaaagtttgttgttccattgaaaacgacagtcactatccattttctgcatttccgaagaaaaaaaatcagttggtaaactaacgagttctctaaataacataagattgagagcatatttgttgtcttcgaacagctttcaaaatctccatcctaaaataatctttacgtcaggaaactaaaaatatttttaaatcattccaacattttcataccttttttctctcttctatatttgtgttatgaatttgacctacttattttttccaccatcagattggcgctgcggaaagatcaggagatcggatagtgagctgttagaaagcaattcttttaatctgtccagaaaatcaaaattagaagtgggttttaataaaaactctttaagataaacatgtgaataccaatagcagggcatatatatttttgtccatatacattttagccagtagtccattaataagtaatcagccgtggcccatgggtctagaactatgcaaggtacactgacagagtacaaattacacgtaataagggggtgtttggttgctccggctaaagtttagcccgggtcacatcaagcgtttaacttttaaataggagtatgaaatatagacccaaccaactggactagattcgtctcgtcttttaatcttcggctgacaaattagttttataatccgactacatttaatacccggaacggaggtttaaacattcgatgagacaggagctaaattttagcggggtgtaaccaaacaccccctaagtaacagaccagacctcgtcagttgtcaccggtttatgtagctccattctctatgtttttttgcttttcgtttttttaatcaaatatgcatggttagagagtagagactatccatttccaaccaaacgctattgcaactgcagcacagcgtaagcttcttctttttaggtgttctttgtgtcttgtggtgtcaaagcagaggtgcagaggtcatgtcgccatcttctcacacaggcaaggacacgag

SEQ ID NO: 69582 - DNA, 480 bp, Zea Mays
cgaccgtcccctcccctcccctttcgacgagcgaggggctgtatgctgggcgccgtcgtccgtgtcccgggcccgatcctacctttcctgcccgggccgacgcgcccctctcctccgccgccgccactacctcccgcccgaaacgcccatggcctcggccaccccttgcgatggcggcaccgggaagcccgacgccgcgccggctcccacgcccgcgccaacgccgctgccgcccgagaagcctctcccgggcgactgctgcggcagcggctgcgttcgctgcgtctgggacatatatttcgacgagctcgacgcgtacgacaaggccctcgccgcgcgcgcggcctcctcaggctccggcggcaaggacgactctgctgataccaagcccaaagaagtacagactggcagatcagatttcgatggatacggtcggtaccggtgcatggcctgcttaaggtcaatgctcagagtaatgcc

SEQ ID NO: 69583 - DNA, 1461 bp, Zea Mays
gttgccttgtggcagttggattctcctgcgtcccaatcacgcagcctcttggcctccgcgaccgtcccctcccctcccctttcgacgagcgaggggctgtatgctgggcgccgtcgtccgtgtcccgggcccgatcctacctttcctgcccgggccgacgcgcccctctcctccgccgccgccactacctcccgcccgaaacgcccatggcctcggccaccccttgcgatggcggcaccgggaagcccgacgccgcgccggctcccacgcccgcgccaacgccgctgccgcccgagaagcctctcccgggcgactgctgcggcagcggctgcgttcgctgcgtctgggacatatatttcgacgagctcgacgcgtacgacaaggccctcgccgcgcgcgcggcctcctcaggctccggcggcaaggacgactctgctgataccaagcccaaagaaggcaagacaacaaggtgaaagaaaccaaagcgtgaggccaacctgttgcagttggaaacattgaacctgtccccggcgacgcattgccctttccaccgccgcggagcctcgctcatgccgtcgtctctaaaactggccgactctggccagattcctgcaaagcgcggaccaccaggacacctcagtcttcgaactgaaatgtcagtcctaatcccagttgctactgaaagaaaagaaagtgaagggaaatctcctcaccagtgtctagcacaccgataatggaatcctcaccgaacctactctctgggaggattccagccgaatgcgatggatccactcgcatgaagtcccagctcctggtggtgtgcaggtcaagaacacggttccgcaccactcgcacaaccccaggcgaaccttttgatgccacagttcagattgagccagaacgcacaggagagcggcaggggtttcgtcagcatcacacacacatggaagcggaaggtctgagcatgcagaaaaggagaagagtgaagcgtgagctcaccggcgagccgcgccgcctggctgtccgtcagcacggcggcgaacccggagaagccgtgcctgtagctgtaaaggatggcgtccttggccgcctgctcgctgcagagttcgacaccgcgactcgttaggggcacggcacgggcatcgtagatactatactagtcaacaggcaggctctgaaagaagccgacgagtggtggcctcacctgccgagaaggccggcgagcatgccgtggtgcgcgtcccggaccagcgccgggtgcagctcgggattcctcgcccccatgtacacaatgtacacctgcaggaaacggaaccgcgtcattcaagggtcgaggcaagaaccactcgtggtggatcgggaagctgaaccaccaggactccgttcaggctcactcacattgttacaagaagagtggcccagctgaagaagaagaagcagcagcatgcagaaaaagcccag

SEQ ID NO: 69584 - DNA, 782 bp, Zea Mays
gtccgagttgccttgtggcagttggattctcctgcgtcccaatcacgcagcctcttggcctccgcgaccgtcccctcccctcccctttcgacgagcgaggggctgtatgctgggcgccgtcgtccgtgtcccgggcccgatcctacctttcctgcccgggccgacgcgcccctctcctccgccgccgccactacctcccgcccgaaacgcccatggcctcggccaccccttgcgatggcggcaccgggaagcccgacgccgcgccggctcccacgcccgcgccaacgccgctgccgcccgagaagcctctcccgggcgactgctgcggcagcggctgcgttcgctgcgtctgggacatatatttcgacgagctcgacgcgtacgacaaggccctcgccgcgcgcgcggcctcctcaggctccggcggcaaggacgactctgctgataccaagcccaaagaaggactccaattgggatgcattgatttgaggagagcaacaactcctgagatgtggggacaggacatcgaggttcccgaatcgatcttgaacttcacagatccaatggctgatgatatggcagcagcaggagtccatgctgccaaaatgttgacacctggagcagcaatgtctggctgcagaagaaggtgcagggttttttcagcctcccaactagaactggaggtttgatcaacactgtagaggtttgatcaactgtcgaactggaggtttttttttaccttcagaacagcgggggacagagaacttggaccccgagatgag

SEQ ID NO: 69585 - DNA, 2465 bp, Zea Mays
ccacagcccaccgcggccgcgctgccgtgttggtgtggtgcctgtctcgcgctgtgcggaaaggagatagagagagagggagtgagaagaaggagacgcgaggagagagagagagcggcaggcaggcaggcaggcaataaatggcagttttggtgcgcgcaggctgatggcggcgtggcaggtcctctctgtcgcctcaccgtcttaactccggccgcgcgccggcaccacaaaccacaccgctcggctgcgagcacgcgggttttaatccgtcgcagagcgcatgagcacgccgcccagagcgcagactacgacgagcagccgtctgtagagggggagggaccgagggagagatcagggcgtcaggccgttgtctctcagcttcaccttcaccttgccgggcacggcgaacggcacggcggcctatggatttggccacatggcggggttccctctaggtggaggaggccacagccgcgacgcccccgcgtcgtccgtcccgccggtgcacccctccgacgcagcgtccttcctctacgccgcgcgcgcgggagcgggcctgcagctatggcagcagcacgagcagcaacagcagcacccgttctacacctccaacatcatccgcttctccgatgacccgaccggcgccccgccctcgctcacgggcgccgcgtcgtcgtcgtcttcgcgcggcacgaggggcggcgcgggaagcggcggcggaggcggcggcggggtcagctgccaggactgcggcaaccaggccaagaaggactgcgtgcaccagcgctgccgcacctgctgcaagagccgcggcttcacctgcagcacccacgtcaagtccacctgggtccctgccgccaagagacgcgagcgccagcagcagctcgccgtgctagcggcctccgccgccgccacaaccgccggcgccggcccatcccgcgacccgaccaagcgccctcgcgcgcgcctctccgtcgccacccccgccacgtcctcggatggtcacggtcgcggagaggttcccacgggaggtgagctcggaggcggtgttccggtgcgtgcgcctggggccggtcgaccaggccgaggcggaggtcgcgtaccagaccaccgtcagcatcggcggccacgtgttcaagggcatccttcacgacgttggccctcacagcttgcctgccgctggagtcggaggcggcgccatcgagtaccacttccgccacgccggggacggattgccgccgagcacggcagccactggcgaagcaggcggcggtggcgtggggagtgtcgtcgtgtcatcggctgtggtgatggacccgtacccgacgcccggaccctacgccgccttccccgccggcgcgccgttcttccacggccacccgagacagtgaccgccggctcgctcgctcgccagcagccgtcccgctgtgtaacgacatcacgactcccatctctggctcgctcgatctgtcaatttcgttagcttcctaatttcttagcctcttgttgagatgcataaattcatgttccttctagagcctagctagctagcttaggcgcgggttagacttgtttgcttcttgagatcaattcatgaggtgagtagcaatatactcagtggctgcaagtggctaaaaatctgacatttaggaaccttgatgagacatttgagatggtttcttgcactgttctctctctgatggtttttggtaattcttgttggtgtggttttgctcagtgttaagatgctaatgcttctttgatcttttgttatgtatcttctatgcatgtgtcttccataaggagagatccctttgctttactacttgcacctttgctctccaaaagctgagccctagaaacctagttgcctttaattggtagctcgtgaatccttgatatcgtctcgtgttaagcattgcctctggttagacgcgtgagtgagagagagagaggagagagagagagagcgaggagagagagagagttgagtcatcatatgctcatgggagagacaaaatgatccgatgattggaagctgtaaccaatgagccatgcgccgatcccttgttcgattcagggagttcttttatgtttccgagtgtagcaaccctgaggaggtctggagattagggctcgcacattctcgtgttcttcgcctctgacatgatcttgtttcctcgttgatcccatcacgtcaggtccggaatatttgttttttatggcttttccacagcatcctcgattccaactattgctccacaggggattagcctgtttggcatagcttttctaacttctgcaatgcattggtcttctcataaagaaactatattagttttcgtctaccaaaagaaaaaaatggttgctagagcatttttctaactaaggtttcgatttcatgtgaaagaaaatagtgtcaagataaagatgtttcagtaaagtccatgccaatctcattt

SEQ ID NO: 69586 - DNA, 2419 bp, Zea Mays
ttcagacttcacacatcgatccccactcccccacggaagcgaagcgtacgctacgcgcactgccctccggcgaccgccccgccgctggcgggtcggattgggtccgatccggatctggatcagcaccggcatcgccgcgacggagatgccgaccccgaggcagcggcatacctccacctccggcgggggcggaggagggaggcgcgccgcctccgggtcggccatgctgccccccgtggtggtcctcgtgttcctcttcgtggtcgcgccttcgctcttcttcgtcgtgcgcaatgacggtcgcgcccacgcccacgtccacgtagcctccgatcgcaagggtaagaatggcaatcaggaagcagcagcaatgaagaacctcaaatctattttgcctaaggaggtgtttgatgctataactgctagtcaacaagaatcaggcacattgagtgttgatttttttaggaatcatgcatctccctcttggaaaactgatgatctagtcaccgagaagagcatggatgtcaatgacaatgctaaagctgaaaatagtttgctagaacattctgtgccaacaaatagatcacccaaagatccagatgaacatcaagttgacaaagcagcaaaagtagctcgaaggaaacttagggagaaaaggcgtgagaagagagcaatggatttggttcataaagatgatgaagcacgtattaagctggaaaatgctgccattgagcgatcaaaagctgtcgattctgctgtgcttggaaaatacagcatatggcgaaaagagaatgagaatgagaattcagactctacagttaggctgatgagggaccaaattattatggctcgtgtctattctacgcttgctaaatcaaagaacaagaacgatctatatcaaaaactgcagactcgaatcagagaaagccagcgggctgttggagaggctaatgctgatgctgacctgcatcacagcgcaccagaaaaaatcagagcaatgggtcaagttttatcaaaggctagagaagaactttatgattgtacggcaatcactcagagaataagggctatgcttcagtcagctgatgaacaggtcaggagcttgaagaagcagagtacatttcttagccagttggctgcaaagacaattccaaacagcattcactgcttgtctatgcgtttaacaattgattactatatcctgccccttgaggaacggaaattcccaaggagtgaaaatttagaaaacccaaatctctatcactatgcacttttctctgataatgttttggcagcctctgttgttgtgaactcaaccataatgaatgctaaggaaccagagaaacatgttttccatcttgtgactgacaagttaaactttggagccatgaacatgtggtttctgctgaacccacctggcaaggccaccatccatgttgagaatgtggacgaatttaagtggttgaactcatcatactgtcctgtgttgcggcaacttgagtctgctgccatgaaagagtactatttcaaagctgatcgtcccaccactctctcagcaggttcttcgaacctaaagtatcggaaccccaagtacctctctatgctgaaccacttgaggttctatctcccagaggtctatccaaagttggataagatactcttcctcgacgatgacatagttgtgcagaaagatttaacagggctgtgggatgttgatcttaatggaaaggtcaatggtgctgtggaaacctgtggggagagttttcaccgttttgacaaatatcttaatttttcaaatccacacattgctcggaactttgatccaaatgcatgtggctgggcttatgggatgaacatctttgatctgagggagtggaagaagaaagatattactgggatctaccacaaatggcaaaatatgaatgaagacagggtcctttggaagcttgggacacttccgcctggcctcttgaccttctataagttgacgcacccactggacaagtcatggcatgttcttggattaggatacaacccaagcattgaccgttcagagatagacaatgctgctgtggttcattacaatgggaacatgaagccatggctggagctagcaatgaccaagtaccgaccatattggaccaagtatatcaagtatgatcacccttacatccgtggatgcaacttgagtgagtagatagtcgtgctgaaaaactgacagatgaggaagagcttattggacagaagtgttccactaccatgtccttgcggtgcgttattcgactcagcaaagtggtgtggagcacgaggacagtggtcgacgactaatgtgaaggtcatgcgggcttgtgctgatggattgggagcggtgaagagcgaatgctgggtcttgactgatggaccggggcagctttgtgac

SEQ ID NO: 69587 - DNA, 2329 bp, Zea Mays
gttgcttgattttttcgtttggatggaaactgtgtcggtggaacattggtgctctaaggaaacgaacctagtcactctcgggattgcaggaattattatcccctggcgctcagatcgcaagggtaagaatggcaatcaggaagcagcagcaatgaagaacctcaaatctattttgcctaaggaggtgtttgatgctataactgctagtcaacaagaatcaggcacattgagtgttgatttttttaggaatcatgcatctccctcttggaaaactgatgatctagtcaccgagaagagcatggatgtcaatgacaatgctaaagctgaaaatagtttgctagaacattctgtgccaacaaatagatcacccaaagatccagatgaacatcaagttgacaaagcagcaaaagtagctcgaaggaaacttagggagaaaaggcgtgagaagagagcaatggatttggttcataaagatgatgaagcacgtattaagctggaaaatgctgccattgagcgatcaaaagctgtcgattctgctgtgcttggaaaatacagcatatggcgaaaagagaatgagaatgagaattcagactctacagttaggctgatgagggaccaaattattatggctcgtgtctattctacgcttgctaaatcaaagaacaagaacgatctatatcaaaaactgcagactcgaatcagagaaagccagcgggctgttggagaggctaatgctgatgctgacctgcatcacagcgcaccagaaaaaatcagagcaatgggtcaagttttatcaaaggctagagaagaactttatgattgtacggcaatcactcagagaataagggctatgcttcagtcagctgatgaacaggtcaggagcttgaagaagcagagtacatttcttagccagttggctgcaaagacaattccaaacagcattcactgcttgtctatgcgtttaacaattgattactatatcctgccccttgaggaacggaaattcccaaggagtgaaaatttagaaaacccaaatctctatcactatgcacttttctctgataatgttttggcagcctctgttgttgtgaactcaaccataatgaatgctaaggaaccagagaaacatgttttccatcttgtgactgacaagttaaactttggagccatgaacatgtggtttctgctgaacccacctggcaaggccaccatccatgttgagaatgtggacgaatttaagtggttgaactcatcatactgtcctgtgttgcggcaacttgagtctgctgccatgaaagagtactatttcaaagctgatcgtcccaccactctctcagcaggttcttcgaacctaaagtatcggaaccccaagtacctctctatgctgaaccacttgaggttctatctcccagaggtctatccaaagttggataagatactcttcctcgacgatgacatagttgtgcagaaagatttaacagggctgtgggatgttgatcttaatggaaaggtcaatggtgctgtggaaacctgtggggagagttttcaccgttttgacaaatatcttaatttttcaaatccacacattgctcggaactttgatccaaatgcatgtggctgggcttatgggatgaacatctttgatctgagggagtggaagaagaaagatattactgggatctaccacaaatggcaaaatatgaatgaagacagggtcctttggaagcttgggacacttccgcctggcctcttgaccttctataagttgacgcacccactggacaagtcatggcatgttcttggattaggatacaacccaagcattgaccgttcagagatagacaatgctgctgtggttcattacaatgggaacatgaagccatggctggagctagcaatgaccaagtaccgaccatattggaccaagtatatcaagtatgatcacccttacatccgtggatgcaacttgagtgagtagatagtcgtgctgaaaaactgacagatgaggaagagcttattggacagaagtgttccactaccatgtccttgcggagaaaaacttataaaatggatttgtggggctggtgtcgcgtgctgcttagaggtatgcctagagaatcgagtgttgccggaattggatcctttttttgtatcagacgataaagtgggagtacaagccaaagcggaaggcatgaatcgaatggattacaggtttaaccctgagtcctgaccaatgtgaaactattttacctacagtatcaagaaatgctggtgtccgttttatgataactgatctcgtagctaatcttgtgtttctcggtcacgtgtt

SEQ ID NO: 69588 - DNA, 2619 bp, Zea Mays
ctcgtctcatcatacttcagacttcacacatcgatccccactcccccacggaagcgaagcgtacgctacgcgcactgccctccggcgaccgccccgccgctggcgggtcggattgggtccgatccggatctggatcagcaccggcatcgccgcgacggagatgccgaccccgaggcagcggcatacctccacctccggcgggggcggaggagggaggcgcgccgcctccgggtcggccatgctgccccccgtggtggtcctcgtgttcctcttcgtggtcgcgccttcgctcttcttcgtcgtgcgcaatgacggtcgcgcccacgcccacgtccacgtagcctccggtaagcattgacatattctgtttgcctgcagatcgcaagggtaagaatggcaatcaggaagcagcagcaatgaagaacctcaaatctattttgcctaaggaggtgtttgatgctataactgctagtcaacaagaatcaggcacattgagtgttgatttttttaggaatcatgcatctccctcttggaaaactgatgatctagtcaccgagaagagcatggatgtcaatgacaatgctaaagctgaaaatagtttgctagaacattctgtgccaacaaatagatcacccaaagatccagatgaacatcaagttgacaaagcagcaaaagtagctcgaaggaaacttagggagaaaaggcgtgagaagagagcaatggatttggttcataaagatgatgaagcacgtattaagctggaaaatgctgccattgagcgatcaaaagctgtcgattctgctgtgcttggaaaatacagcatatggcgaaaagagaatgagaatgagaattcagactctacagttaggctgatgagggaccaaattattatggctcgtgtctattctacgcttgctaaatcaaagaacaagaacgatctatatcaaaaactgcagactcgaatcagagaaagccagcgggctgttggagaggctaatgctgatgctgacctgcatcacagcgcaccagaaaaaatcagagcaatgggtcaagttttatcaaaggctagagaagaactttatgattgtacggcaatcactcagagaataagggctatgcttcagtcagctgatgaacaggtcaggagcttgaagaagcagagtacatttcttagccagttggctgcaaagacaattccaaacagcattcactgcttgtctatgcgtttaacaattgattactatatcctgccccttgaggaacggaaattcccaaggagtgaaaatttagaaaacccaaatctctatcactatgcacttttctctgataatgttttggcagcctctgttgttgtgaactcaaccataatgaatgctaaggaaccagagaaacatgttttccatcttgtgactgacaagttaaactttggagccatgaacatgtggtttctgctgaacccacctggcaaggccaccatccatgttgagaatgtggacgaatttaagtggttgaactcatcatactgtcctgtgttgcggcaacttgagtctgctgccatgaaagagtactatttcaaagctgatcgtcccaccactctctcagcaggttcttcgaacctaaagtatcggaaccccaagtacctctctatgctgaaccacttgaggttctatctcccagaggtctatccaaagttggataagatactcttcctcgacgatgacatagttgtgcagaaagatttaacagggctgtgggatgttgatcttaatggaaaggtcaatggtgctgtggaaacctgtggggagagttttcaccgttttgacaaatatcttaatttttcaaatccacacattgctcggaactttgatccaaatgcatgtggctgggcttatgggatgaacatctttgatctgagggagtggaagaagaaagatattactgggatctaccacaaatggcaaaatatgaatgaagacagggtcctttggaagcttgggacacttccgcctggcctcttgaccttctataagttgacgcacccactggacaagtcatggcatgttcttggattaggatacaacccaagcattgaccgttcagagatagacaatgctgctgtggttcattacaatgggaacatgaagccatggctggagctagcaatgaccaagtaccgaccatattggaccaagtatatcaagtatgatcacccttacatccgtggatgcaacttgagtgagtagatagtcgtgctgaaaaactgacagatgaggaagagcttattggacagaagtgttccactaccatgtccttgcggtgcgttattcgactcagcaaagtggagaaaaacttataaaatggatttgtggggctggtgtcgcgtgctgcttagaggtatgcctagagaatcgagtgttgccggaattggatcctttttttgtatcagacgataaagtgggagtacaagccaaagcggaaggcatgaatcgaatggattacaggtttaaccctgagtcctgaccaatgtgaaactattttacctacagtatcaagaaatgctggtgtccgttttatgataactgatctcgtagctaatcttgtgtttctcggtcacgtgtt

SEQ ID NO: 69589 - DNA, 2648 bp, Zea Mays
gccgcacctacgcccggcccccggggattgagcaagcatcgggtgctttccgttacgttcctccctcccgtcctgtcctgacctcctcgtctcatcatacttcagacttcacacatcgatccccactcccccacggaagcgaagcgtacgctacgcgcactgccctccggcgaccgccccgccgctggcgggtcggattgggtccgatccggatctggatcagcaccggcatcgccgcgacggagatgccgaccccgaggcagcggcatacctccacctccggcgggggcggaggagggaggcgcgccgcctccgggtcggccatgctgccccccgtggtggtcctcgtgttcctcttcgtggtcgcgccttcgctcttcttcgtcgtgcgcaatgacggtcgcgcccacgcccacgtccacgtagcctccgatcgcaagggtaagaatggcaatcaggaagcagcagcaatgaagaacctcaaatctattttgcctaaggaggtgtttgatgctataactgctagtcaacaagaatcaggcacattgagtgttgatttttttaggaatcatgcatctccctcttggaaaactgatgatctagtcaccgagaagagcatggatgtcaatgacaatgctaaagctgaaaatagtttgctagaacattctgtgccaacaaatagatcacccaaagatccagatgaacatcaagttgacaaagcagcaaaagtagctcgaaggaaacttagggagaaaaggcgtgagaagagagcaatggatttggttcataaagatgatgaagcacgtattaagctggaaaatgctgccattgagcgatcaaaagctgtcgattctgctgtgcttggaaaatacagcatatggcgaaaagagaatgagaatgagaattcagactctacagttaggctgatgagggaccaaattattatggctcgtgtctattctacgcttgctaaatcaaagaacaagaacgatctatatcaaaaactgcagactcgaatcagagaaagccagcgggctgttggagaggctaatgctgatgctgacctgcatcacagcgcaccagaaaaaatcagagcaatgggtcaagttttatcaaaggctagagaagaactttatgattgtacggcaatcactcagagaataagggctatgcttcagtcagctgatgaacaggtcaggagcttgaagaagcagagtacatttcttagccagttggctgcaaagacaattccaaacagcattcactgcttgtctatgcgtttaacaattgattactatatcctgccccttgaggaacggaaattcccaaggagtgaaaatttagaaaacccaaatctctatcactatgcacttttctctgataatgttttggcagcctctgttgttgtgaactcaaccataatgaatgctaaggaaccagagaaacatgttttccatcttgtgactgacaagttaaactttggagccatgaacatgtggtttctgctgaacccacctggcaaggccaccatccatgttgagaatgtggacgaatttaagtggttgaactcatcatactgtcctgtgttgcggcaacttgagtctgctgccatgaaagagtactatttcaaagctgatcgtcccaccactctctcagcaggttcttcgaacctaaagtatcggaaccccaagtacctctctatgctgaaccacttgaggttctatctcccagaggtctatccaaagttggataagatactcttcctcgacgatgacatagttgtgcagaaagatttaacagggctgtgggatgttgatcttaatggaaaggtcaatggtgctgtggaaacctgtggggagagttttcaccgttttgacaaatatcttaatttttcaaatccacacattgctcggaactttgatccaaatgcatgtggctgggcttatgggatgaacatctttgatctgagggagtggaagaagaaagatattactgggatctaccacaaatggcaaaatatgaatgaagacagggtcctttggaagcttgggacacttccgcctggcctcttgaccttctataagttgacgcacccactggacaagtcatggcatgttcttggattaggatacaacccaagcattgaccgttcagagatagacaatgctgctgtggttcattacaatgggaacatgaagccatggctggagctagcaatgaccaagtaccgaccatattggaccaagtatatcaagtatgatcacccttacatccgtggatgcaacttgagtgagtagatagtcgtgctgaaaaactgacagatgaggaagagcttattggacagaagtgttccactaccatgtccttgcggagaaaaacttataaaatggatttgtggggctggtgtcgcgtgctgcttagaggtatgcctagagaatcgagtgttgccggaattggatcctttttttgtatcagacgataaagtgggagtacaagccaaagcggaaggcatgaatcgaatggattacaggtttaaccctgagtcctgaccaatgtgaaactattttacctacagtatcaagaaatgctggtgtccgttttatgataactgatctcgtagctaatcttgtgtttctcggtcacgtgtt

SEQ ID NO: 69590 - DNA, 2114 bp, Zea Mays
caccgcgccgcgccgcccggctacacgtcactcgctcatataacactccatacggtccaggaagccaatcgccagccagtcagagtcaggaagcgcggccgcaccaaccaggccctgtacatagcatcggccataacacaggttataggattctcagtccggccgtgccggccatccatccggatcctgagaagccgtgcaagtttcctgcttcgcggaggatttcagtcatccgcctgccgagggccgagtttctgcggagagtggccagtgggcagattttctcggccctgaatcgatttgcctgctactcgcggtaggcgaagggaaggattcaaatcaacataacatggccgcagccaccgccgccgcttccaccatgtcgctgctcccgatctcccagctcaggcagcagcacggcgcgggcgccatgaggcggcggccctgggtcgcgcggcggaggcgatacgtcgttccgacggcgaggctgttcgggccggcgatcttcgaggcgtcgaagctgaaggtgctgttcctgggcgtggacgacgaggccggcagcaagcagcacgggccgctgccgcggacgtacacgctgacgcacagcgacgtgacggccaggctgacgctcgccgtctcgcacaccatcaaccgcgcgcagctgcagggctggtacaaccgcctgcagcgcgacgaggtggtggccgagtggaagaaggtgcgcggccggatgtcgctgcacgtgcactgccacatctccggcggccacttcctgctcgacctcatcgcgggcctccgctacgtcatcttccgcaaggagctccccgtggcgttcgtgcacggcgacggcgacctgttcagccggcacccggagctggaggaggccacggtgtgggtctacttccactccaacctggcccgcttcaaccgcgtggagtgctggggtccgctccgcgacgccgccgcgcccgccgaggacgactccgccgcgccggccgactcctccaactccaaggatggccagatgatggccatgtgcgagtggccgcaccggtgtccccagcagtgcgactgctgcttcccgccgcacagcctcatcccctggccgaacgagcacgacatggccaccgccgccgccgccgatgcctccggctccgcccaacagcagtagcgaaactgcacttgtgctgctacgcaatgtaagccgtcgtagctagactactagaactagcgtgttgtttggttgggtacgtagctgcaaccgcgcgcgtgcagtagtgtggcgccaacaccacaacacctgcatctgcatgcccggcccgcgctgcctattctttaattggtagcttagcttagctcgttcagctccacttctacaagctcttcgtctttggatcggaagtactccctccgtttcttcgtttctttttagttgttgctggatagttcaattttgcactatccagcgacaactaaaacaaaacgaaagaagtagtagcttggtcgaggtcggagatgaacatggtcttgtacatatagctagaacacttgatctctagatggaaaacctgcacgtacacacatatgttgcaggcaaagtatcatccgaagtattcttgaactggaagtcctagatttgtgtagtggtgtacaaaattggatatggttaattgtttgttcgaccgtaccatctttggtcacgcgtgtctctgtcaggaggtgtgaagatgcgtctcaaagtctggggccgatagccgacgtcgttgcgagtggtttgtgtgtactggaagaagatgtgcagtgtggtaggagtctggagttaccggtagttttcacgcttgcgtgccatttgacaagactggctccggagagatcgtctttttttttctttctctttgccttctcgtgattgctggactcggcaattttgtcagcatatgccgccgtttttttgtgatgggtttggtgctcttgcttggcgtgcttgttcggtacagtaggacgacttacatgcatgcatctgtctgcggaagaaattaccagaactcctggagtgcccaaggaacaggaaggatcatagaaacgacgggatcactctggatgtctttgttaat

SEQ ID NO: 69591 - DNA, 2016 bp, Zea Mays
caccgcgccgcgccgcccggctacacgtcactcgctcatataacactccatacggtccaggaagccaatcgccagccagtcagagtcaggaagcgcggccgcaccaaccaggccctgtacatagcatcggccataacacaggttataggattctcagtccggccgtgccggccatccatccggatcctgagaagccgtgcaagtttcctgcttcgcggaggatttcagtcatccgcctgccgagggccgagtttctgcggagagtggccagtgggcagattttctcggccctgaatcgatttgcctgctactcgcggtaggcgaagggaaggattcaaatcaacataacatggccgcagccaccgccgccgcttccaccatgtcgctgctcccgatctcccagctcaggcagcagcacggcgcgggcgccatgaggcggcggccctgggtcgcgcggcggaggcgatacgtcgttccgacggcgaggctgttcgggccggcgatcttcgaggcgtcgaagctgaaggtgctgttcctgggcgtggacgacgaggccggcagcaagcagcacgggccgctgccgcggacgtacacgctgacgcacagcgacgtgacggccaggctgacgctcgccgtctcgcacaccatcaaccgcgcgcagctgcagggctggtacaaccgcctgcagcgcgacgaggtggtggccgagtggaagaaggtgcgcggccggatgtcgctgcacgtgcactgccacatctccggcggccacttcctgctcgacctcatcgcgggcctccgctacgtcatcttccgcaaggagctccccgtggtgctcaaggcgttcgtgcacggcgacggcgacctgttcagccggcacccggagctggaggaggccacggtgtgggtctacttccactccaacctggcccgcttcaaccgcgtggagtgctggggtccgctccgcgacgccgccgcgcccgccgaggacgactccgccgcgccggccgactcctccaactccaaggatggccagatgatggccatgtgcgagtggccgcaccggtgtccccagcagtgcgactgctgcttcccgccgcacagcctcatcccctggccgaacgagcacgacatggccaccgccgccgccgccgatgcctccggctccgcccaacagcagtagcgaaactgcacttgtgctgctacgcaatgtaagccgtcgtagctagactactagaactagcgtgttgtttggttgggtacgtagctgcaaccgcgcgcgtgcagtagtgtggcgccaacaccacaacacctgcatctgcatgcccggcccgcgctgcctattctttaattggtagcttagcttagctcgttcagctccacttctacaagctcttcgtctttggatcggaagtcggagatgaacatggtcttgtacatatagctagaacacttgatctctagatggaaaacctgcacgtacacacatatgttgcaggcaaagtatcatccgaagtattcttgaactggaagtcctagatttgtgtagtggtgtacaaaattggatatggttaattgtttgttcgaccgtaccatctttggtcacgcgtgtctctgtcaggaggtgtgaagatgcgtctcaaagtctggggccgatagccgacgtcgttgcgagtggtttgtgtgtactggaagaagatgtgcagtgtggtaggagtctggagttaccggtagttttcacgcttgcgtgccatttgacaagactggctccggagagatcgtctttttttttctttctctttgccttctcgtgattgctggactcggcaattttgtcagcatatgccgccgtttttttgtgatgggtttggtgctcttgcttggcgtgcttgttcggtacagtaggacgacttacatgcatgcatctgtctgcggaagaaattaccagaactcctggagtgcccaaggaacaggaaggatcatagaaacgacgggatcactctggatgtctttgttaat

SEQ ID NO: 69592 - DNA, 2200 bp, Zea Mays
ctcacttctgttatattgcggtgccttgtgtgttgctgcagcctctgatggtgtgaaggcgtgggacctattaaaggaaaaatctttcaacgtagaccttgttttaactgaagttgaactgcctttgatgtctgggttcctcttgttatccacaatcatggagcatgatgcgtccaagaacatccctgttataatgatgtcttcgcatgactcagtaagcatggttttcaaatgcatgctaaagggtgcagcagatttccttgttaaaccgataagaaagaatgaattaaggaacttgtggcagcacgtttggagaaaacaactggcaaacggtgggcctaatgttcagcacatacaacgagaagagaatcttgcagaaagaatccaacagaagactggcgtgacaaaatctgataatttggacagagatgtgccctgtaaaaatagagaatgcagtgaacaagaaagtgatgctcaaagttcttgcacaaggtcagagctggaggctgaaagtaagcaaacagacaacattttggagtataagcaatcaactcaaaggcacttgtctattcctagccacaagaatgttgagctaaatggacagaccaaaatacaaagagctgagggtaataacttgattccagcaagagaagacgatttatcgccaaagaaaagaacgtgtttgaatgagaataattctgagagagcttcaagagatatggagctagtccacattatggaaaatcagcagaagtataacacacagtgggaggtggatactatgagaacaacatctaggggaaatgatgagaagggctccatcccagcacatcagttggagctttctcttagaagaactgactacggaaaattagagaaccacgagaaaaatgatagaagaacactgaaccattcaacttcctctgcgttttccttgtataattgcagggctgtgccaaccttaggaaatgctggtgatggtcaattatgcagcacctcagaaacactagtggatgttgaaaataaaaatggagattcagcagatccctctcaagacatgactgaaacaaatcgtcctcctattagagttgttcctgtccctgtccaaggtctcacatttgatgggcagccattctggaatggtacaccagtggcatccctattctactcacagtcaactcctcccatttggaatagcaaaacatcaatgtggcaagaatcaaccccacaagcaacttcactgccacaaaaatctccacagaatgaaccaaatgaaatgggggctaaaccagttataaatgcaggggaacaatttgccatgggtcctcccagtgccagtgggaagcagctgcatgttgaaattcttaatgatgatccacggcatatttctcctatgactggtgaaagtggaatcagtaccgtgctagacagcaccagaaatactctgagcagtagtggctgtgatagcatttccaaccagatcactgcccctactgaatcatccaatgtatataaggatgttcctgaaaccccaagcgccgaagggtcacggcatctgagccagcgtgaggctgcactgaacaagttccggctaaagaggaaggataggtgctttgagaagaaggttcgataccagagccggaaattactcgcagagcagcgtccacgggtcaagggccagtttgttcgtcaagatcatagcatccaaggaagctagggtccagttactgagctggaactctattctattatctaaaaaaagtcactgcaagtgactccactgcggtctgcgggtatcctgatgtcagattttgccgaagagttggaagcagtcacactgagttacagtttgctctgtatatttgctgaagtttgtaatatatgtatgtataggctaacgctgttctttcctaggttaggcacaggacctggcacgtttgaaggtttgtcagtaggcgttagaaaatacaggcatactttgtttcaggtcaagatgagatgtgaccttcagtagcgcatgtgtgctttaagtcttgtattacgtaattaagttgtttgatgtttcgggttagatgtacgctccgtggatgaaatgtaaaggatgtccaccaaaacatgcttgtttccgtgcagcttgttgcaatgaacatcgttggcctggtttctgtcaatgctctcatgccgtgtgtactactgtgaa

SEQ ID NO: 69593 - DNA, 2281 bp, Zea Mays
gtactttttattctcttccacatccttccaccttcgatttatgcgatggatgcgattcgcgcgcgtgtacatccacacaattcgatccgcacaaggagggcgattttttctaattgctgcagcctctgatggtgtgaaggcgtgggacctattaaaggaaaaatctttcaacgtagaccttgttttaactgaagttgaactgcctttgatgtctgggttcctcttgttatccacaatcatggagcatgatgcgtccaagaacatccctgttataatgatgtcttcgcatgactcagtaagcatggttttcaaatgcatgctaaagggtgcagcagatttccttgttaaaccgataagaaagaatgaattaaggaacttgtggcagcacgtttggagaaaacaactggcaaacggtgggcctaatgttcagcacatacaacgagaagagaatcttgcagaaagaatccaacagaagactggcgtgacaaaatctgataatttggacagagatgtgccctgtaaaaatagagaatgcagtgaacaagaaagtgatgctcaaagttcttgcacaaggtcagagctggaggctgaaagtaagcaaacagacaacattttggagtataagcaatcaactcaaaggcacttgtctattcctagccacaagaatgttgagctaaatggacagaccaaaatacaaagagctgagggtaataacttgattccagcaagagaagacgatttatcgccaaagaaaagaacgtgtttgaatgagaataattctgagagagcttcaagagatatggagctagtccacattatggaaaatcagcagaagtataacacacagtgggaggtggatactatgagaacaacatctaggggaaatgatgagaagggctccatcccagcacatcagttggagctttctcttagaagaactgactacggaaaattagagaaccacgagaaaaatgatagaagaacactgaaccattcaacttcctctgcgttttccttgtataattgcagggctgtgccaaccttaggaaatgctggtgatggtcaattatgcagcacctcagaaacactagtggatgttgaaaataaaaatggagattcagcagatccctctcaagacatgactgaaacaaatcgtcctcctattagagttgttcctgtccctgtccaaggtctcacatttgatgggcagccattctggaatggtacaccagtggcatccctattctactcacagtcaactcctcccatttggaatagcaaaacatcaatgtggcaagaatcaaccccacaagcaacttcactgccacaaaaatctccacagaatgaaccaaatgaaatgggggctaaaccagttataaatgcaggggaacaatttgccatgggtcctcccagtgccagtgggaagcagctgcatgttgaaattcttaatgatgatccacggcatatttctcctatgactggtgaaagtggaatcagtaccgtgctagacagcaccagaaatactctgagcagtagtggctgtgatagcatttccaaccagatcactgcccctactgaatcatccaatgtatataaggatgttcctgaaaccccaagcgccgaagggtcacggcatctgagccagcgtgaggctgcactgaacaagttccggctaaagaggaaggataggtgctttgagaagaaggttcgataccagagccggaaattactcgcagagcagcgtccacgggtcaagggccagtttgttcgtcaagatcatagcatccaaggaagctagggtccagttactgagctggaactctattctattatctaaaaaaagtcactgcaagtgactccactgcggtctgcgggtatcctgatgtcagattttgccgaagagttggaagcagtcacactgagttacagtttgctctgtatatttgctgaagtttgtaatatatgtatgtataggctaacgctgttctttcctaggttaggcacaggacctggcacgtttgaaggtttgtcagtaggcgttagaaaatacaggcatactttgtttcaggtcaagatgagatgtgaccttcagtagcgcatgtgtgctttaagtcttgtattacgtaattaagttgtttgatgtttcgggttagatgtacgctccgtggatgaaatgtaaaggatgtccaccaaaacatgcttgtttccgtgcagcttgttgcaatgaacatcgttggcctggtttctgtcaatgctctcatgccgtgtgtactactgtgaa

SEQ ID NO: 69594 - DNA, 2604 bp, Zea Mays
gtcgttctctcacaaactggcattcgatttcgcagcccaccagctccggtttcttccgactgcgagcttccaagtggcgactgcccgagtgcgagaagagggagagaagcggttgtcggaatccactccggccaggggtgcggaggtcggaatggggggaggattggatgaggcggtgaaggtggtggatttggaggacggtgaaggggaggaggaggcagaggccgccgcggcggagggatcgagcatggagatggggatgctgccaaggatgccggtgcgtgtgctgctcgccgaaggcgacgactccacgcgccacgtcatctccgcgctgctccgcaagtgcggctaccgagcctctgatggtgtgaaggcgtgggacctattaaaggaaaaatctttcaacgtagaccttgttttaactgaagttgaactgcctttgatgtctgggttcctcttgttatccacaatcatggagcatgatgcgtccaagaacatccctgttataatgatgtcttcgcatgactcagtaagcatggttttcaaatgcatgctaaagggtgcagcagatttccttgttaaaccgataagaaagaatgaattaaggaacttgtggcagcacgtttggagaaaacaactggcaaacggtgggcctaatgttcagcacatacaacgagaagagaatcttgcagaaagaatccaacagaagactggcgtgacaaaatctgataatttggacagagatgtgccctgtaaaaatagagaatgcagtgaacaagaaagtgatgctcaaagttcttgcacaaggtcagagctggaggctgaaagtaagcaaacagacaacattttggagtataagcaatcaactcaaaggcacttgtctattcctagccacaagaatgttgagctaaatggacagaccaaaatacaaagagctgagggtaataacttgattccagcaagagaagacgatttatcgccaaagaaaagaacgtgtttgaatgagaataattctgagagagcttcaagagatatggagctagtccacattatggaaaatcagcagaagtataacacacagtgggaggtggatactatgagaacaacatctaggggaaatgatgagaagggctccatcccagcacatcagttggagctttctcttagaagaactgactacggaaaattagagaaccacgagaaaaatgatagaagaacactgaaccattcaacttcctctgcgttttccttgtataattgcagggctgtgccaaccttaggaaatgctggtgatggtcaattatgcagcacctcagaaacactagtggatgttgaaaataaaaatggagattcagcagatccctctcaagacatgactgaaacaaatcgtcctcctattagagttgttcctgtccctgtccaaggtctcacatttgatgggcagccattctggaatggtacaccagtggcatccctattctactcacagtcaactcctcccatttggaatagcaaaacatcaatgtggcaagaatcaaccccacaagcaacttcactgccacaaaaatctccacagaatgaaccaaatgaaatgggggctaaaccagttataaatgcaggggaacaatttgccatgggtcctcccagtgccagtgggaagcagctgcatgttgaaattcttaatgatgatccacggcatatttctcctatgactggtgaaagtggaatcagtaccgtgctagacagcaccagaaatactctgagcagtagtggctgtgatagcatttccaaccagatcactgcccctactgaatcatccaatgtatataaggatgttcctgaaaccccaagcgccgaagggtcacggcatctgagccagcgtgaggctgcactgaacaagttccggctaaagaggaaggataggtgctttgagaagaaggtaagcaactaagtgcgcatttttatttcgatccgatttttatgccacctactaggacctgtgattcacgcttttacaatcatttgcaggttcgataccagagccggaaattactcgcagagcagcgtccacgggtcaagggccagtttgttcgtcaagatcatagcatccaaggaagctagggtccagttactgagctggaactctattctattatctaaaaaaagtcactgcaagtgactccactgcggtctgcgggtatcctgatgtcagattttgccgaagagttggaagcagtcacactgagttacagtttgctctgtatatttgctgaagtttgtaatatatgtatgtataggctaacgctgttctttcctaggttaggcacaggacctggcacgtttgaaggtttgtcagtaggcgttagaaaatacaggcatactttgtttcaggtcaagatgagatgtgaccttcagtagcgcatgtgtgctttaagtcttgtattacgtaattaagttgtttgatgtttcgggttagatgtacgctccgtggatgaaatgtaaaggatgtccaccaaaacatgcttgtttccgtgcagcttgttgcaatgaacatcgttggcctggtttctgtcaatgctctcatgccgtgtgtactactgtgaa

SEQ ID NO: 69595 - DNA, 3949 bp, Zea Mays
ctggtgtttatgttcgcgcccgggttttggacccccgaaatccgggtgtgacagttatggattaatcaaagttgcagcaggttgcacaatacgtactaatgaaggtatttgcagtggcagactccaagtgaccaaaccccagaacattgctgatgtgatctcatgagcatgccagtacacgttagcagcatttgtcaatgagtggctagatactcattcgtagtagtatttcagttgacggaaacagtgatgaccagatacacatcaactgacgcaggttttattgttagcttgctccactgtttcacctgtcagccatgatgctaagcagccaccaaatgaatctcgctcgagttaaacacgcaccccatcggattgatgccttttcaaggaacagatgaatggaacaaaaatatatttatatagcttatacctcaaattaatgccatccacgcgtgtggcgccaatacgtgtatatgcagcaaatcgacgtgttggccgaaactgatcgagtgagtgatgacctactgacctgtctaacagaagttttgtgggaagcctttgcatggaagaaaaatgcgtgcatgcatgcatgctgcgtcacaacagtaaacccaaaaaaaatcttgtacatggccacgctatgatcaattttaaaaaaattactctacactgcaatagtactaacaactaactctaactactagagtaaaaagcttccgcgtgtacgtctcttttttccctctgaattaaaaaatcacctgctaataatcagtggaatatatagataaaattaaacctcacgaacatatatatattttgacgtcgacgcgctagtggtaaaattgcattttccttacatactgtccttagatacaagaggaatatagcaagcatcttgacctatatgcacccaataattgtacacctctagtcaattttctaaccaaacgccactttcatctgctgaacattcagcgggcgtatgctaggctttggggcattaacaatttggcttccgtgacagagataacaaagctaggctgcatcattcttcgaccccatcatcaaaggacaaacaatgaaacaacatcagtctctagtgtaccaacttcgcaagcgacactccttttgacctctcttagaataagttgccgtaatcagacacgacatgacaatgtgtaacagtactaatatattcgacctgcatacttgcctgtgtttctttttgcaaagccaacatagccataggtatgcgtactcaaacaaagcgtgtagcgactatttggaatttaagagtttcacatagaaatggtttaatatattaacagttccaatgtcaaaatcatagcaattttacagtcttgtactatctccaaccatatcatctatattcctcatctatatatctcatttacagtctcctctaaaaacattccctcatgtcttatttctccccagcgtccttcatattccgtcctctttacgttaaataatattaaaaacatattttgttctagatttatgtatgtatgtatttatcatgcactcaaatatcttataaatagtttagttttgctataaaataagtagatagaagagagaatctatatagagagaggatagagaaacatcatctatatctagaagacactgctagagcgtatagaggagaagaattttctccagatataggacaaggggccctttagagaaaccgctagagacaatcttagtgtatacttttccgtcctaaaaatggtatacttctcactccgatgataggtcaaacaatcttcattttgaccattttctattaaaaatgtataaatattaatgatattaaataagagttattgaattcctcaaaataacctttcacatattcctatatataaccatacctgttgatagtatttttgttataaactacagaccagttttttaggacggatggaacatatattttgtgtttaaattctaaaacgtagcttgttcgaaagaggtcctacactcctgtcctaccggaaaagctccagaagtttcacagcccggccccgattctgtcgcccgacctgcgcaacgcacgtcgctacgcctaggcactagcgtaagaactcgccaagaaatccagcacaagggaggagactggagagagcacttggcttgaaagcagacagcaagagtgcagcaactggtggcccatgagcagcagcttgtaacatccacgagtgaccggaccgactggacacgagcgaaagcagctggatcacaaacaattccgtggaggcttgtagctagggcgagcaattcaagcagtggccgtggacgaagtgcaagtgacctcagggcagggcccagcctagcctatctatcgatatcattagagggaagagggggaggaggtcagtagcttgtgagggatggaacggtcacctgcaacttgacatcttccggaggccatgcaccgggcgcgtcaccgtcagatttggtgaaaccaagagagagggggaaagctgataaggtgcgttggttgggcgatcccaatcagcgcttttgttttatggcctcactgatgcgcgcccaaagatttctcggatggtcaccagggctcatgactggtggaagcactgctgatttgtttctgggacagaaaaaagaaagaattaaggcactgaatatttggtcagcaaagcgaaaaaaacaatgacagcatgcgtgatgcgtggcggtcatgctcatgaggggattgatattcactctgagtggtcgctgtccgcctggccctagaggtaatgctcgcgttctttttgctgggggaaggtggccaaagtgacagctgcagtttcatgacagtatggcaccgcgaaaggatggaagcaccagcgattagtagattggcgtggaaatggaactggaactgcacaactgatgtaatgcaaacgcaggatgatgaaacgaaaccctgctccagtgtcgacaagtgtgttccatactgaacaaccgagcacgaattgttcagtacggaaaagaaggggtacaatacgcaagcagaaaggggagcatttgacaaactacgacaccgaacttggtctctctattatataatctatacgtatataatccagtgtcttctgattaacacagccgcactagggactgtgatgactgacagctcaaaaaatatcggcgtaaataaccgccttacctcttcgtcgtcgtgagcctatgatggcatgtgctgatattgaaaccaggcgtccgggtctgctctgatcctacgtttaaacttagaacccagatcaagctctagagggtcacggctgcactataacaaaagaatactaacacatccagttcaaatccttcactaaaagttccagcagctcaccttgctggagaatagttcaacaaggtgattacaattggcttctctcatgaaattgctgattgcacataattacataaatgacatgataaagcaccagttggcgtgagataaaaaataattgtgtgacgctgctgtctcaataaaacaagcaggagtggagtacagtggatgcaagtatagaagtagcatgattaaacattacttgcacaatgggatcacaagcgcaactattgtgattttagattatatgtcgttgagggtccaaggtttatttccggtcagattcagcctttaatcaaaagcaacatttagggcttgtctgaattggcagggatctgacccaatcttttcatcccataaaacagggatcagctctagtccctctatctaaacaagccctaagaagcagaaccaggcatgttatgtgcaacttagaatgcatctcggctctgcaaacttactcagaaacatgctcaaatgctagcccaccccccacccccaaaaaaaagtccttttggtttcatgtatgttcatctcaacatcagctgaaagaaaatg

SEQ ID NO: 69596 - DNA, 3171 bp, Zea Mays
agcaagccttttcatagatgggaatgcaggtaagcagaagcctggctagctggcctctggtatgtggttggctcaaggattacaggatttcaatcagtaacaatcaagtatgaggaaggaacaacaacgggtgtccaagcttgggtggttggcttgccggttacagcaagtcaattagtaactacagatgggaggaaggcgaccgacggtatggctgacatgagaccctgtctaactcatgtttcttccttccttccctcatcagccgtcccgtcgatcgggcaaataaagttgcgcctagggaggaaggaaccaggcggcaggctgcccgtgccgacgtggatcgggccagagctaggtaagtgcacctgtgggctgtggtcggcaggcgatcgaaggtgagtgagccggtgagccccgccatgcactgacggagtcactgccgactctcgtcgtccgatctctttttactgtggacgaatgggtgcgtgcagcctatctgcctatgggaagcgagagggggcccgggactgggttgagcaccttgtgcgcaaaggcatggtggcgtctggggccggctgcaggcgtgtgcgcacctgcacgagcgtgcagtcgcggcgcgtggctgcagtttggtgtgcctgggacggggactcgtgccgtgtgtcctgcgcgaggtggttttgcggctggctgacggaatggttgatggaatccttgcgtaaggacgcaactgagaggtaagcccccctcgtccccgtcccccgtgggaaacgggagtgccaaagccttgtggcacaccaaactgtagcttttgatcgtgcatggtggggcgcctacctgatgctacgcaaacttttgtgtcgcagcttcagttaccctgaagagcagggcaagctagcaaaaggtgaaagcgtttggtcacgtagaatccatacaggtcatacatatatagcagtcgcaactcgcaactcgcacgtagagcgtagaggttcaaatctgagccttagttcagaatgcagcttcagtttgggagttcgttcgtgcatagcaggccctatagctggggttagtcgtgtgcaaggattctccatgtggacaacacaacacaagcaagcaagctaatataaggttggatttaaaagtcgcagaacaattcatgacgtgcttggaaaacgttggtagcgtcttttaatgcttgatctaaaggctaagttatcatccatgggctaggtttgtttgttagtattaccctgtccagtgcaagggcaggtaggaggtagagagagaccgagcaagtactaacctttcatggccccggtctgccccccagctccctctttcccttgggggccgctgtgtgctccgtcgccatcgcgggggataaaaggaaaaggctccgaggaaacagtataaaagcgcccccggcacgcacgcacgcacgcaggctcactccacgcagcagttgccaggcgcttgtcactccagccagcggcagcccttttccttggcgaggcttggtttagtttagcccgcctgcggtctgccgcctgccaagtgccacctgagacctgatagccgcaaccgtgagaggctggtagcccgtagccggcatccctcgccctcgacccatttgaacagggcctcgagctttgcctctgctgctgctcgcttgatccgtctcttgccgtagtatactacgcgtgctcgatcggcggcggcggctctacgacccgcggccgggatgggtcggcagccgtgctgcgacaagctgggggtgaagcgggggccgtggacggcggaggaggaccgcaagctcatcaacttcatcctcaccaacggccattgctgctggcgcgcggtgcccaagctcgccggcctgctgcgctgcggcaagagctgccgcctgcgctggaccaactacctccgcccggacctcaagcgcgggctcctcacggacgccgaggagcaggtcgtcatcgacctccacgccaagctcggcaacagatggtcgaagattgctgccaagctaccgggcaggactgacaacgagatcaagaaccactggaacacgcacattaagaagaagctgatcaagatgggcatcgatccagtcacgcacgaacccctcgaccggaagacaaccagcagcggcccggctacaacctctcagtcaaccaagtctgacgaggcgaccaaggagcagagcccgcagaacgacgacgccgtgataagggacgtgccggccgatggttgcagcccgacggaatcgagcacgaacaccgtgagcaccggcggaagcagcagcagtggtggcggcggccatgaccaagacccgctggtgaagtggcttttggaagaggagcctgccaccggcgacgaggcgtggctgaacttcactggcagtgtcgacgtggacgagttcagcagcattgccgccggtccggagttgttgccgtgggatggcgcgaccgactggctgctcgactaccaagattttggattgggggactcgagcttggtcgatggctacatggtcaacaacaacagctcaaacggagcaaagttctagctagctagccgaagatgtcatctcatctgcttgtgttgctttgctgccagtgaacgtagatacgtaagtaataaaagcattggtatcgaggttgtcaaaggtggatgaccacatcgcaggaagatcatgaagagtccttgcacgcactcctgtatctcgaaccaactaacggctgggatgcaattgagaaggggaggagcacaggccaatcaatctcaaagagataaaactggttcttgaagatctcgaagaaagatgtgtttcttcacaatcacaaagagaggttgtagaagttcttgctgttgtatacatggttgcgtatatattgctaaattgtaccttgttaggccattttgttcgcaaattgcacgagtcactaattagtcagcaaaaatgtgtgcataaagaagagcagttgaaatcgcctctttgtacgttgtgggtgacgttcttttagttacgttgtggatgacgttgatgcatttatagggtatttggtttgaggaataagttatctggtttgtagaatggaataagttatccatcatcacctcattaatcatggttagtactaacatgagtaattgagtcattccacc

SEQ ID NO: 69597 - DNA, 1684 bp, Zea Mays
gatttccagaataaagccaatgaaaatgtaagcagaagcctggctagctggcctctggtatgtggttggctcaaggattacaggatttcaatcagtaacaatcaagtatgaggaaggaacaacaacgggtgtccaagcttgggtggttggcttgccggttacagcaagtcaattagtaactacagatgggaggaaggcgaccgacgtatactacgcgtgctcgatcggcggcggcggctctacgacccgcggccgggatgggtcggcagccgtgctgcgacaagctgggggtgaagcgggggccgtggacggcggaggaggaccgcaagctcatcaacttcatcctcaccaacggccattgctgctggcgcgcggtgcccaagctcgccggcctgctgcgctgcggcaagagctgccgcctgcgctggaccaactacctccgcccggacctcaagcgcgggctcctcacggacgccgaggagcaggtcgtcatcgacctccacgccaagctcggcaacagatggtcgaagattgctgccaagctaccgggcaggactgacaacgagatcaagaaccactggaacacgcacattaagaagaagctgatcaagatgggcatcgatccagtcacgcacgaacccctcgaccggaagacaaccagcagcggcccggctacaacctctcagtcaaccaagtctgacgaggcgaccaaggagcagagcccgcagaacgacgacgccgtgataagggacgtgccggccgatggttgcagcccgacggaatcgagcacgaacaccgtgagcaccggcggaagcagcagcagtggtggcggcggccatgaccaagacccgctggtgaagtggcttttggaagaggagcctgccaccggcgacgaggcgtggctgaacttcactggcagtgtcgacgtggacgagttcagcagcattgccgccggtccggagttgttgccgtgggatggcgcgaccgactggctgctcgactaccaagattttggattgggggactcgagcttggtcgatggctacatggtcaacaacaacagctcaaacggagcaaagttctagctagctagccgaagatgtcatctcatctgcttgtgttgctttgctgccagtgaacgtagatacgtaagtaataaaagcattggtatcgaggttgtcaaaggtggatgaccacatcgcaggaagatcatgaagagtccttgcacgcactcctgtatctcgaaccaactaacggctgggatgcaattgagaaggggaggagcacaggccaatcaatctcaaagagataaaactggttcttgaagatctcgaagaaagatgtgtttcttcacaatcacaaagagaggttgtagaagttcttgctgttgtatacatggttgcgtatatattgctaaattgtaccttgttaggccattttgttcgcaaattgcacgagtcactaattagtcagcaaaaatgtgtgcataaagaagagcagttgaaatcgcctctttgtacgttgtgggtgacgttcttttagttacgttgtggatgacgttgatgcatttatagggtatttggtttgaggaataagttatctggtttgtagaatggaataagttatccatcatcacctcattaatcatggttagtactaacatgagtaattgagtcattccacc

SEQ ID NO: 69598 - DNA, 3330 bp, Zea Mays
aacacatcgagcgactctgtttatatcagaatcgcgccaacgcgtcgccggcagcgtcgtctcgtgtgggtcgcggtcgcgaccaagcgacgacggcgagggagggaatgtacgccgctgtcccccactctcctccccactcccaccgcagtccatcgacagtggagggttcccggaagcaaagcgccagcggcagaagcctggctagctggcctctggtatgtggttggctcaaggattacaggatttcaatcagtaacaatcaagtatgaggaaggaacaacaacgggtgtccaagcttgggtggttggcttgccggttacagcaagtcaattagtaactacagatgggaggaaggcgaccgacggtatggctgacatgagaccctgtctaactcatgtttcttccttccttccctcatcagccgtcccgtcgatcgggcaaataaagttgcgcctagggaggaaggaaccaggcggcaggctgcccgtgccgacgtggatcgggccagagctaggtaagtgcacctgtgggctgtggtcggcaggcgatcgaaggtgagtgagccggtgagccccgccatgcactgacggagtcactgccgactctcgtcgtccgatctctttttactgtggacgaatgggtgcgtgcagcctatctgcctatgggaagcgagagggggcccgggactgggttgagcaccttgtgcgcaaaggcatggtggcgtctggggccggctgcaggcgtgtgcgcacctgcacgagcgtgcagtcgcggcgcgtggctgcagtttggtgtgcctgggacggggactcgtgccgtgtgtcctgcgcgaggtggttttgcggctggctgacggaatggttgatggaatccttgcgtaaggacgcaactgagaggtaagcccccctcgtccccgtcccccgtgggaaacgggagtgccaaagccttgtggcacaccaaactgtagcttttgatcgtgcatggtggggcgcctacctgatgctacgcaaacttttgtgtcgcagcttcagttaccctgaagagcagggcaagctagcaaaaggtgaaagcgtttggtcacgtagaatccatacaggtcatacatatatagcagtcgcaactcgcaactcgcacgtagagcgtagaggttcaaatctgagccttagttcagaatgcagcttcagtttgggagttcgttcgtgcatagcaggccctatagctggggttagtcgtgtgcaaggattctccatgtggacaacacaacacaagcaagcaagctaatataaggttggatttaaaagtcgcagaacaattcatgacgtgcttggaaaacgttggtagcgtcttttaatgcttgatctaaaggctaagttatcatccatgggctaggtttgtttgttagtattaccctgtccagtgcaagggcaggtaggaggtagagagagaccgagcaagtactaacctttcatggccccggtctgccccccagctccctctttcccttgggggccgctgtgtgctccgtcgccatcgcgggggataaaaggaaaaggctccgaggaaacagtataaaagcgcccccggcacgcacgcacgcacgcaggctcactccacgcagcagttgccaggcgcttgtcactccagccagcggcagcccttttccttggcgaggcttggtttagtttagcccgcctgcggtctgccgcctgccaagtgccacctgagacctgatagccgcaaccgtgagaggctggtagcccgtagccggcatccctcgccctcgacccatttgaacagggcctcgagctttgcctctgctgctgctcgcttgatccgtctcttgccgtagtatactacgcgtgctcgatcggcggcggcggctctacgacccgcggccgggatgggtcggcagccgtgctgcgacaagctgggggtgaagcgggggccgtggacggcggaggaggaccgcaagctcatcaacttcatcctcaccaacggccattgctgctggcgcgcggtgcccaagctcgccggcctgctgcgctgcggcaagagctgccgcctgcgctggaccaactacctccgcccggacctcaagcgcgggctcctcacggacgccgaggagcaggtcgtcatcgacctccacgccaagctcggcaacagatggtcgaagattgctgccaagctaccgggcaggactgacaacgagatcaagaaccactggaacacgcacattaagaagaagctgatcaagatgggcatcgatccagtcacgcacgaacccctcgaccggaagacaaccagcagcggcccggctacaacctctcagtcaaccaagtctgacgaggcgaccaaggagcagagcccgcagaacgacgacgccgtgataagggacgtgccggccgatggttgcagcccgacggaatcgagcacgaacaccgtgagcaccggcggaagcagcagcagtggtggcggcggccatgaccaagacccgctggtgaagtggcttttggaagaggagcctgccaccggcgacgaggcgtggctgaacttcactggcagtgtcgacgtggacgagttcagcagcattgccgccggtccggagttgttgccgtgggatggcgcgaccgactggctgctcgactaccaagattttggattgggggactcgagcttggtcgatggctacatggtcaacaacaacagctcaaacggagcaaagttctagctagctagccgaagatgtcatctcatctgcttgtgttgctttgctgccagtgaacgtagatacgtaagtaataaaagcattggtatcgaggttgtcaaaggtggatgaccacatcgcaggaagatcatgaagagtccttgcacgcactcctgtatctcgaaccaactaacggctgggatgcaattgagaaggggaggagcacaggccaatcaatctcaaagagataaaactggttcttgaagatctcgaagaaagatgtgtttcttcacaatcacaaagagaggttgtagaagttcttgctgttgtatacatggttgcgtatatattgctaaattgtaccttgttaggccattttgttcgcaaattgcacgagtcactaattagtcagcaaaaatgtgtgcataaagaagagcagttgaaatcgcctctttgtacgttgtgggtgacgttcttttagttacgttgtggatgacgttgatgcatttatagggtatttggtttgaggaataagttatctggtttgtagaatggaataagttatccatcatcacctcattaatcatggttagtactaacatgagtaattgagtcattccacc

SEQ ID NO: 69599 - DNA, 2266 bp, Zea Mays
atcaccttccggagctgatgtagcaagacggagaaagtagcactcgatacgagaacacatcgagcgactctgtttatatcagaatcgcgccaacgcgtcgccggcagcgtcgtctcgtgtgggtcgcggtcgcgaccaagcgacgacggcgagggagggaatgtacgccgctgtcccccactctcctccccactcccaccgcagtccatcgacagtggagggttcccggaagcaaagcgccagcggcaggtaagcagaagcctggctagctggcctctggtatgtggttggctcaaggattacaggatttcaatcagtaacaatcaagtatgaggaaggaacaacaacgggtgtccaagcttgggtggttggcttgccggttacagcaagtcaattagtaactacagatgggaggaaggcgaccgacgctccctctttcccttgggggccgctgtgtgctccgtcgccatcgcgggggataaaaggaaaaggctccgaggaaacagtataaaagcgcccccggcacgcacgcacgcacgcaggctcactccacgcagcagttgccaggcgcttgtcactccagccagcggcagcccttttccttggcgaggcttggtttagtttagcccgcctgcggtctgccgcctgccaagtgccacctgagacctgatagccgcaaccgtgagaggctggtagcccgtagccggcatccctcgccctcgacccatttgaacagggcctcgagctttgcctctgctgctgctcgcttgatccgtctcttgccgtagtatactacgcgtgctcgatcggcggcggcggctctacgacccgcggccgggatgggtcggcagccgtgctgcgacaagctgggggtgaagcgggggccgtggacggcggaggaggaccgcaagctcatcaacttcatcctcaccaacggccattgctgctggcgcgcggtgcccaagctcgccggcctgctgcgctgcggcaagagctgccgcctgcgctggaccaactacctccgcccggacctcaagcgcgggctcctcacggacgccgaggagcaggtcgtcatcgacctccacgccaagctcggcaacagatggtcgaagattgctgccaagctaccgggcaggactgacaacgagatcaagaaccactggaacacgcacattaagaagaagctgatcaagatgggcatcgatccagtcacgcacgaacccctcgaccggaagacaaccagcagcggcccggctacaacctctcagtcaaccaagtctgacgaggcgaccaaggagcagagcccgcagaacgacgacgccgtgataagggacgtgccggccgatggttgcagcccgacggaatcgagcacgaacaccgtgagcaccggcggaagcagcagcagtggtggcggcggccatgaccaagacccgctggtgaagtggcttttggaagaggagcctgccaccggcgacgaggcgtggctgaacttcactggcagtgtcgacgtggacgagttcagcagcattgccgccggtccggagttgttgccgtgggatggcgcgaccgactggctgctcgactaccaagattttggattgggggactcgagcttggtcgatggctacatggtcaacaacaacagctcaaacggagcaaagttctagctagctagccgaagatgtcatctcatctgcttgtgttgctttgctgccagtgaacgtagatacgtaagtaataaaagcattggtatcgaggttgtcaaaggtggatgaccacatcgcaggaagatcatgaagagtccttgcacgcactcctgtatctcgaaccaactaacggctgggatgcaattgagaaggggaggagcacaggccaatcaatctcaaagagataaaactggttcttgaagatctcgaagaaagatgtgtttcttcacaatcacaaagagaggttgtagaagttcttgctgttgtatacatggttgcgtatatattgctaaattgtaccttgttaggccattttgttcgcaaattgcacgagtcactaattagtcagcaaaaatgtgtgcataaagaagagcagttgaaatcgcctctttgtacgttgtgggtgacgttcttttagttacgttgtggatgacgttgatgcatttatagggtatttggtttgaggaataagttatctggtttgtagaatggaataagttatccatcatcacctcattaatcatggttagtactaacatgagtaattgagtcattccacc

SEQ ID NO: 69600 - DNA, 3418 bp, Zea Mays
ggtaattctgttcattctttcatcggtatcaccttccggagctgatgtagcaagacggagaaagtagcactcgatacgagaacacatcgagcgactctgtttatatcagaatcgcgccaacgcgtcgccggcagcgtcgtctcgtgtgggtcgcggtcgcgaccaagcgacgacggcgagggagggaatgtacgccgctgtcccccactctcctccccactcccaccgcagtccatcgacagtggagggttcccggaagcaaagcgccagcggcaggtaagcagaagcctggctagctggcctctggtatgtggttggctcaaggattacaggatttcaatcagtaacaatcaagtatgaggaaggaacaacaacgggtgtccaagcttgggtggttggcttgccggttacagcaagtcaattagtaactacagatgggaggaaggcgaccgacggtatggctgacatgagaccctgtctaactcatgtttcttccttccttccctcatcagccgtcccgtcgatcgggcaaataaagttgcgcctagggaggaaggaaccaggcggcaggctgcccgtgccgacgtggatcgggccagagctaggtaagtgcacctgtgggctgtggtcggcaggcgatcgaaggtgagtgagccggtgagccccgccatgcactgacggagtcactgccgactctcgtcgtccgatctctttttactgtggacgaatgggtgcgtgcagcctatctgcctatgggaagcgagagggggcccgggactgggttgagcaccttgtgcgcaaaggcatggtggcgtctggggccggctgcaggcgtgtgcgcacctgcacgagcgtgcagtcgcggcgcgtggctgcagtttggtgtgcctgggacggggactcgtgccgtgtgtcctgcgcgaggtggttttgcggctggctgacggaatggttgatggaatccttgcgtaaggacgcaactgagaggtaagcccccctcgtccccgtcccccgtgggaaacgggagtgccaaagccttgtggcacaccaaactgtagcttttgatcgtgcatggtggggcgcctacctgatgctacgcaaacttttgtgtcgcagcttcagttaccctgaagagcagggcaagctagcaaaaggtgaaagcgtttggtcacgtagaatccatacaggtcatacatatatagcagtcgcaactcgcaactcgcacgtagagcgtagaggttcaaatctgagccttagttcagaatgcagcttcagtttgggagttcgttcgtgcatagcaggccctatagctggggttagtcgtgtgcaaggattctccatgtggacaacacaacacaagcaagcaagctaatataaggttggatttaaaagtcgcagaacaattcatgacgtgcttggaaaacgttggtagcgtcttttaatgcttgatctaaaggctaagttatcatccatgggctaggtttgtttgttagtattaccctgtccagtgcaagggcaggtaggaggtagagagagaccgagcaagtactaacctttcatggccccggtctgccccccagctccctctttcccttgggggccgctgtgtgctccgtcgccatcgcgggggataaaaggaaaaggctccgaggaaacagtataaaagcgcccccggcacgcacgcacgcacgcaggctcactccacgcagcagttgccaggcgcttgtcactccagccagcggcagcccttttccttggcgaggcttggtttagtttagcccgcctgcggtctgccgcctgccaagtgccacctgagacctgatagccgcaaccgtgagaggctggtagcccgtagccggcatccctcgccctcgacccatttgaacagggcctcgagctttgcctctgctgctgctcgcttgatccgtctcttgccgtagtatactacgcgtgctcgatcggcggcggcggctctacgacccgcggccgggatgggtcggcagccgtgctgcgacaagctgggggtgaagcgggggccgtggacggcggaggaggaccgcaagctcatcaacttcatcctcaccaacggccattgctgctggcgcgcggtgcccaagctcgccggcctgctgcgctgcggcaagagctgccgcctgcgctggaccaactacctccgcccggacctcaagcgcgggctcctcacggacgccgaggagcaggtcgtcatcgacctccacgccaagctcggcaacagatggtcgaagattgctgccaagctaccgggcaggactgacaacgagatcaagaaccactggaacacgcacattaagaagaagctgatcaagatgggcatcgatccagtcacgcacgaacccctcgaccggaagacaaccagcagcggcccggctacaacctctcagtcaaccaagtctgacgaggcgaccaaggagcagagcccgcagaacgacgacgccgtgataagggacgtgccggccgatggttgcagcccgacggaatcgagcacgaacaccgtgagcaccggcggaagcagcagcagtggtggcggcggccatgaccaagacccgctggtgaagtggcttttggaagaggagcctgccaccggcgacgaggcgtggctgaacttcactggcagtgtcgacgtggacgagttcagcagcattgccgccggtccggagttgttgccgtgggatggcgcgaccgactggctgctcgactaccaagattttggattgggggactcgagcttggtcgatggctacatggtcaacaacaacagctcaaacggagcaaagttctagctagctagccgaagatgtcatctcatctgcttgtgttgctttgctgccagtgaacgtagatacgtaagtaataaaagcattggtatcgaggttgtcaaaggtggatgaccacatcgcaggaagatcatgaagagtccttgcacgcactcctgtatctcgaaccaactaacggctgggatgcaattgagaaggggaggagcacaggccaatcaatctcaaagagataaaactggttcttgaagatctcgaagaaagatgtgtttcttcacaatcacaaagagaggttgtagaagttcttgctgttgtatacatggttgcgtatatattgctaaattgtaccttgttaggccattttgttcgcaaattgcacgagtcactaattagtcagcaaaaatgtgtgcataaagaagagcagttgaaatcgcctctttgtacgttgtgggtgacgttcttttagttacgttgtggatgacgttgatgcatttatagggtatttggtttgaggaataagttatctggtttgtagaatggaataagttatccatcatcacctcattaatcatggttagtactaacatgagtaattgagtcattccacc

SEQ ID NO: 69601 - DNA, 3200 bp, Zea Mays
ctacatctaattaacaccacttgctacgaaattacgactccttggtccttgcgcttcaatttggttatctcgcttcagacgggaaaaattgaaattgcttgcctcaatttgatgcgttcgttgaatttggggttttcagtgggctgtttgcttttgagtgtgaagctggtggagcaagaactctggcagaaggaagagaaaggcctgatcggggtacttcctgtgcgggactcggaggcaacagctgttggctctttgctgtctcctggtgtgggcagtgattcaggtgaaggaggcagtaaggttggcggttctgcagtagagtcatcaaagcaggacacaaaaaatgggaaggagcccattcactggcacagcaagggagttgctgccagagctttacacctttccagaggggtggagaagccaagtggaagggttacatacattgttgttcttgaaggtctttgtaggttcagcgttcaggaactaagtgcaagaggaccataccatgtcgcccgtgtttcacgccttgacatgacaaagactgaattggagcaggcagagcaagacccagatcttatcgctctttctaggcagtttaaagctactgccatggaactaatttctgttctagaacagaagcagaagacggttggtagaacaaaggtgcttcttgatacagttcctgtttacaggctagctgatatttttgttgctagctttgagataagttttgaggagcagctttcgatgctggattcagttcacttgaaagttagactctcaaaggcaactgaacttgtagacagacacctgcagtccattcttgtagctgagaaaataacacaaaaggttgaggggcagctatcaaagtcgcaaaaagaatttctactgcgccagcagatgagggccataaaagaagaacttggtgataacgatgatgacgaagatgatgttgctgctctggaaagaaagatgcagaatgcaggaatgcctgctaatatttggaagcatgctcaaagggaaatgaggcgcctacgaaagatgcaacctcagcaacctggttatagtagctctcgagcctacttggaacttcttgctgaccttccttggcaaaaggtcagtgaagaaagggagcttgaccttagagttgcgaaagagagccttgaccaggatcattatggactaacaaaagttaagcaaaggattattgagtatttggctgttcgtaagcttaaacctgatgccaggggtccagtgctgtgttttgttggaccacctggtgttgggaagacatctttggcctcctccatagcaaaggccctgaacagaaaattcataagaatctctcttggtggtgtaaaggatgaagctgatattaggggccaccgaaggacatacattggaagcatgccagggagacttattgatggactaaagagggtatctgtgagcaatccagtgatgcttctagatgaaattgacaagactggttctgatgtacgtggtgatcctgcatcagcactactagaagttcttgaccctgagcagaacaaagcattcaacgatcactatttgaatgtgccgttcgacctgtcaaaagtcatatttgttgcaactgccaataggatgcaacctataccccctcctctgttagacaggatggaaatcattgagctgccaggctacacacccgaagagaagttaaaaatagccatgaaacatctcataccaagggtattggagcagcatggcttgagtacgacaaatcttcagattcctgaggctatggtcaaactggtcatcgagaggtacacgagagaagctggtgtgcgcaatcttgagcggaacctagctgcattggctcgtgcagctgctgttaaggtcgcagagcaagttaaaactcttagacttggcaaggaaatacaaccaattactacaacccttcttgattcaaggcttgctgatggcggtgaagttgaaatggaagttattcctatggagcatgatatatcaaacacttatgaaaatccatctcctatgattgttgatgaggctatgctagaaaaagtacttgggcctcctagatttgatgacagagaagctgcagatcgtgtagcaagcccaggagtctcagttggccttgtctggacttcggttggtggggaagttcagtttgtggaggctacagccatggtgggtaagggtgacttgcatttgactgggcagcttggtgatgttattaaggagtcagcgcagctagctttgacatgggtgagagcaagagctgctgacctcaatttgtcacctacttctgatatcaacttattggagagccgtgatatccacatacattttcctgctggtgctgtgccaaaggatggcccttctgcaggtgtgacattggtaacggcactggtgtcgctttttagtaacagaaaagtcagagcagatactgctatgactggcgagatgactctaaggggccttgtattgccagttggtggtgttaaggacaaggtacttgcggcacatcgttatggaatcaagagagtaattttacctgaaaggaacttgaaggacttatcagaggttccattaccaattctctccgacatggagattctgcttgtgaagcgcatcgaggaagtactcgaccatgctttcgaaggccgatgcccacttagatcacgctccaagttgtagcacccaagtcgcgtttggtatggatgtttgcttgagaggatcatcgtcacagtaccacgaatggtcaacagtgtgagagtaagagcctagctctcttgccagcacaggtcttggcacgcccttttcggtttggcttcgcgtctggaatgtgtatacaggattactggtcagaattctgagaataacgagaagattctctgctgggatagtgggattccctgcatatttatgtgaaaccagctgtcggtatttatgcacagatgcaacagcaacacaaatctggtaggaacactggtgggtttctgtcgataatttgagtgtatatgtaatattatgtaatctattccagggaaacatagttaaaccgaggttgtgaaagccaaagagattgagaaatatcatacgtactttagggttgggtgacttgttacaaaatgtgcatattcacatttcttcaataaacaaccgaaaatgcaaacatttgctcgttaatt

SEQ ID NO: 69602 - DNA, 3574 bp, Zea Mays
ggcttctttactctctaaattttcttttttttaaaaaaaaatattgttctttggcgtacgctggtgcgcctctcctccccgcctcggcatcgacgcgatttgcgtgcccgacatgtcggactcgccggtggagctgccgagccggctcgccgtactgcccttccgcaacaaggtgctgctccccggtgccatcgtgcggattcgctgcaccaaccccatgtgaagctggtggagcaagaactctggcagaaggaagagaaaggcctgatcggggtacttcctgtgcgggactcggaggcaacagctgttggctctttgctgtctcctggtgtgggcagtgattcaggtgaaggaggcagtaaggttggcggttctgcagtagagtcatcaaagcaggacacaaaaaatgggaaggagcccattcactggcacagcaagggagttgctgccagagctttacacctttccagaggggtggagaagccaagtggaagggttacatacattgttgttcttgaaggtctttgtaggttcagcgttcaggaactaagtgcaagaggaccataccatgtcgcccgtgtttcacgccttgacatgacaaagactgaattggagcaggcagagcaagacccagatcttatcgctctttctaggcagtttaaagctactgccatggaactaatttctgttctagaacagaagcagaagacggttggtagaacaaaggtgcttcttgatacagttcctgtttacaggctagctgatatttttgttgctagctttgagataagttttgaggagcagctttcgatgctggattcagttcacttgaaagttagactctcaaaggcaactgaacttgtagacagacacctgcagtccattcttgtagctgagaaaataacacaaaaggttgaggggcagctatcaaagtcgcaaaaagaatttctactgcgccagcagatgagggccataaaagaagaacttggtgataacgatgatgacgaagatgatgttgctgctctggaaagaaagatgcagaatgcaggaatgcctgctaatatttggaagcatgctcaaagggaaatgaggcgcctacgaaagatgcaacctcagcaacctggttatagtagctctcgagcctacttggaacttcttgctgaccttccttggcaaaaggtcagtgaagaaagggagcttgaccttagagttgcgaaagagagccttgaccaggatcattatggactaacaaaagttaagcaaaggattattgagtatttggctgttcgtaagcttaaacctgatgccaggggtccagtgctgtgttttgttggaccacctggtgttgggaagacatctttggcctcctccatagcaaaggccctgaacagaaaattcataagaatctctcttggtggtgtaaaggatgaagctgatattaggggccaccgaaggacatacattggaagcatgccagggagacttattgatggactaaagagggtatctgtgagcaatccagtgatgcttctagatgaaattgacaagactggttctgatgtacgtggtgatcctgcatcagcactactagaagttcttgaccctgagcagaacaaagcattcaacgatcagtatcctttcatttatcattaaagggagctatgatttatttgttgttttttaaatgaacaagggacagttttacctcattggcaatgcttcttacaattaggcatgtgtgagttgtatgaggtcatcattactttgtcacgtagtgtgtgggttgctgatttagttgaataattgcagttggcagagactaaaaggctaagctcttagtttgtttatgaatttgatactcaccatcaaattccttggtcttttactgcttgatctgtgggttatatatgtatatatattaagaattccttaatatgatcaccagctatttgaatgtgccgttcgacctgtcaaaagtcatatttgttgcaactgccaataggatgcaacctataccccctcctctgttagacaggatggaaatcattgagctgccaggctacacacccgaagagaagttaaaaatagccatgaaacatctcataccaagggtattggagcagcatggcttgagtacgacaaatcttcagattcctgaggctatggtcaaactggtcatcgagaggtacacgagagaagctggtgtgcgcaatcttgagcggaacctagctgcattggctcgtgcagctgctgttaaggtcgcagagcaagttaaaactcttagacttggcaaggaaatacaaccaattactacaacccttcttgattcaaggcttgctgatggcggtgaagttgaaatggaagttattcctatggagcatgatatatcaaacacttatgaaaatccatctcctatgattgttgatgaggctatgctagaaaaagtacttgggcctcctagatttgatgacagagaagctgcagatcgtgtagcaagcccaggagtctcagttggccttgtctggacttcggttggtggggaagttcagtttgtggaggctacagccatggtgggtaagggtgacttgcatttgactgggcagcttggtgatgttattaaggagtcagcgcagctagctttgacatgggtgagagcaagagctgctgacctcaatttgtcacctacttctgatatcaacttattggagagccgtgatatccacatacattttcctgctggtgctgtgccaaaggatggcccttctgcaggtgtgacattggtaacggcactggtgtcgctttttagtaacagaaaagtcagagcagatactgctatgactggcgagatgactctaaggggccttgtattgccagttggtggtgttaaggacaaggtacttgcggcacatcgttatggaatcaagagagtaattttacctgaaaggaacttgaaggacttatcagaggttccattaccaattctctccgacatggagattctgcttgtgaagcgcatcgaggaagtactcgaccatgctttcgaaggccgatgcccacttagatcacgctccaagttgtagcacccaagtcgcgtttggtatggatgtttgcttgagaggatcatcgtcacagtaccacgaatggtcaacagtgtgagagtaagagcctagctctcttgccagcacaggtcttggcacgcccttttcggtttggcttcgcgtctggaatgtgtatacaggattactggtcagaattctgagaataacgagaagattctctgctgggatagtgggattccctgcatatttatgtgaaaccagctgtcggtatttatgcacagatgcaacagcaacacaaatctggtaggaacactggtgggtttctgtcgataatttgagtgtatatgtaatattatgtaatctattccagggaaacatagttaaaccgaggttgtgaaagccaaagagattgagaaatatcatacgtactttagggttgggtgacttgttacaaaatgtgcatattcacatttcttcaataaacaaccgaaaatgcaaacatttgctcgttaatt

SEQ ID NO: 69603 - DNA, 4026 bp, Zea Mays
ggcttctttactctctaaattttcttttttttaaaaaaaaatattgttctttggcgtacgctggtgcgcctctcctccccgcctcggcatcgacgcgatttgcgtgcccgacatgtcggactcgccggtggagctgccgagccggctcgccgtactgcccttccgcaacaaggtgctgctccccggtgccatcgtgcggattcgctgcaccaaccccagtagtgtgaagctggtggagcaagaactctggcagaaggaagagaaaggcctgatcggggtacttcctgtgcgggactcggaggcaacagctgttggctctttgctgtctcctggtgtgggcagtgattcaggtgaaggaggcagtaaggttggcggttctgcagtagagtcatcaaagcaggacacaaaaaatgggaaggagcccattcactggcacagcaagggagttgctgccagagctttacacctttccagaggggtggagaagccaagtggaagggttacatacattgttgttcttgaaggtctttgtaggttcagcgttcaggaactaagtgcaagaggaccataccatgtcgcccgtgtttcacgccttgacatgacaaagactgaattggagcaggcagagcaagacccagatcttatcgctctttctaggcagtttaaagctactgccatggaactaatttctgttctagaacagaagcagaagacggttggtagaacaaaggtgcttcttgatacagttcctgtttacaggctagctgatatttttgttgctagctttgagataagttttgaggagcagctttcgatgctggattcagttcacttgaaagttagactctcaaaggcaactgaacttgtagacagacacctgcagtccattcttgtagctgagaaaataacacaaaaggttgaggggcagctatcaaagtcgcaaaaagaatttctactgcgccagcagatgagggccataaaagaagaacttggtgataacgatgatgacgaagatgatgttgctgctctggaaagaaagatgcagaatgcaggaatgcctgctaatatttggaagcatgctcaaagggaaatgaggcgcctacgaaagatgcaacctcagcaacctggttatagtagctctcgagcctacttggaacttcttgctgaccttccttggcaaaaggtcagtgaagaaagggagcttgaccttagagttgcgaaagagagccttgaccaggatcattatggactaacaaaagttaagcaaaggattattgagtatttggctgttcgtaagcttaaacctgatgccaggggtccagtgctgtgttttgttggaccacctggtgttgggaagacatctttggcctcctccatagcaaaggccctgaacagaaaattcataagaatctctcttggtggtgtaaaggatgaagctgatattaggggccaccgaaggacatacattggaagcatgccagggagacttattgatggactaaagagggtatctgtgagcaatccagtgatgcttctagatgaaattgacaagactggttctgatgtacgtggtgatcctgcatcagcactactagaagttcttgaccctgagcagaacaaagcattcaacgatcactatttgaatgtgccgttcgacctgtcaaaagtcatatttgttgcaactgccaataggatgcaacctataccccctcctctgttagacaggatggaaatcattgagctgccaggctacacacccgaagagaagttaaaaatagccatgaaacatctcataccaagggtattggagcagcatggcttgagtacgacaaatcttcagattcctgaggttttacacagctggagtttctgctgttacctttcgtagtcttgactttctacactatactgatttcattaatgcatgtccacaaaaatgatgaatgccaaaatgcttttgttgccaacatactttatcaattttgcccctttttaactacaagttataccacgttgatggcaaaagatatttatgatcactttaaaatggcaaatgctatacatcttactatgtaggaaatgtgctattctatttgttattcagctgatgttggaaattttgtgtcttgacccttgagatgccattttcactaatttagcaagtaacaaaaattagctcatttgttcacaagttggaaaattttcttttggtatattatgcattttcaccatacttggaacaaatgagttttctgctagacaatagaactttttttctcgaacacctagacaatagaactgagtccatggtacaaatgagttttctgctagacaatagaactttttttctcgaacacctagacaatagaactgagtccatggtaattcttggggcatgctggttatgggaatatcacacctactcgtccagctgtttgttaatggcgagccttttatcgttttttcctgcctattttccttttattttctgttggtgttttgtgtctatcttagtctagctagttcctattcttcgtcgagttgtcttacagctttgttctattttctttcttgtgttcaaatgatgcatacttgctggtcatttgtgcaggctatggtcaaactggtcatcgagaggtacacgagagaagctggtgtgcgcaatcttgagcggaacctagctgcattggctcgtgcagctgctgttaaggtcgcagagcaagttaaaactcttagacttggcaaggaaatacaaccaattactacaacccttcttgattcaaggcttgctgatggcggtgaagttgaaatggaagttattcctatggagcatgatatatcaaacacttatgaaaatccatctcctatgattgttgatgaggctatgctagaaaaagtacttgggcctcctagatttgatgacagagaagctgcagatcgtgtagcaagcccaggagtctcagttggccttgtctggacttcggttggtggggaagttcagtttgtggaggctacagccatggtgggtaagggtgacttgcatttgactgggcagcttggtgatgttattaaggagtcagcgcagctagctttgacatgggtgagagcaagagctgctgacctcaatttgtcacctacttctgatatcaacttattggagagccgtgatatccacatacattttcctgctggtgctgtgccaaaggatggcccttctgcaggtgtgacattggtaacggcactggtgtcgctttttagtaacagaaaagtcagagcagatactgctatgactggcgagatgactctaaggggccttgtattgccagttggtggtgttaaggacaaggtacttgcggcacatcgttatggaatcaagagagtaattttacctgaaaggaacttgaaggacttatcagaggttccattaccaattctctccgacatggagattctgcttgtgaagcgcatcgaggaagtactcgaccatgctttcgaaggccgatgcccacttagatcacgctccaagttgtagcacccaagtcgcgtttggtatggatgtttgcttgagaggatcatcgtcacagtaccacgaatggtcaacagtgtgagagtaagagcctagctctcttgccagcacaggtcttggcacgcccttttcggtttggcttcgcgtctggaatgtgtatacaggattactggtcagaattctgagaataacgagaagattctctgctgggatagtgggattccctgcatatttatgtgaaaccagctgtcggtatttatgcacagatgcaacagcaacacaaatctggtaggaacactggtgggtttctgtcgataatttgagtgtatatgtaatattatgtaatctattccagggaaacatagttaaaccgaggttgtgaaagccaaagagattgagaaatatcatacgtactttagggttgggtgacttgttacaaaatgtgcatattcacatttcttcaataaacaaccgaaaatgcaaacatttgctcgttaatt

SEQ ID NO: 69604 - DNA, 3190 bp, Zea Mays
ggcttctttactctctaaattttcttttttttaaaaaaaaatattgttctttggcgtacgctggtgcgcctctcctccccgcctcggcatcgacgcgatttgcgtgcccgacatgtcggactcgccggtggagctgccgagccggctcgccgtactgcccttccgcaacaaggtgctgctccccggtgccatcgtgcggattcgctgcaccaaccccagtagtgtgaagctggtggagcaagaactctggcagaaggaagagaaaggcctgatcggggtacttcctgtgcgggactcggaggcaacagctgttggctctttgctgtctcctggtgtgggcagtgattcaggtgaaggaggcagtaaggttggcggttctgcagtagagtcatcaaagcaggacacaaaaaatgggaaggagcccattcactggcacagcaagggagttgctgccagagctttacacctttccagaggggtggagaagccaagtggaagggttacatacattgttgttcttgaaggtctttgtaggttcagcgttcaggaactaagtgcaagaggaccataccatgtcgcccgtgtttcacgccttgacatgacaaagactgaattggagcaggcagagcaagacccagatcttatcgctctttctaggcagtttaaagctactgccatggaactaatttctgttctagaacagaagcagaagacggttggtagaacaaaggtgcttcttgatacagttcctgtttacaggctagctgatatttttgttgctagctttgagataagttttgaggagcagctttcgatgctggattcagttcacttgaaagttagactctcaaaggcaactgaacttgtagacagacacctgcagtccattcttgtagctgagaaaataacacaaaaggttgaggggcagctatcaaagtcgcaaaaagaatttctactgcgccagcagatgagggccataaaagaagaacttggtgataacgatgatgacgaagatgatgttgctgctctggaaagaaagatgcagaatgcaggaatgcctgctaatatttggaagcatgctcaaagggaaatgaggcgcctacgaaagatgcaacctcagcaacctggttatagtagctctcgagcctacttggaacttcttgctgaccttccttggcaaaaggtcagtgaagaaagggagcttgaccttagagttgcgaaagagagccttgaccaggatcattatggactaacaaaagttaagcaaaggattattgagtatttggctgttcgtaagcttaaacctgatgccaggggtccagtgctgtgttttgttggaccacctggtgttgggaagacatctttggcctcctccatagcaaaggccctgaacagaaaattcataagaatctctcttggtggtgtaaaggatgaagctgatattaggggccaccgaaggacatacattggaagcatgccagggagacttattgatggactaaagagggtatctgtgagcaatccagtgatgcttctagatgaaattgacaagactggttctgatgtacgtggtgatcctgcatcagcactactagaagttcttgaccctgagcagaacaaagcattcaacgatcactatttgaatgtgccgttcgacctgtcaaaagtcatatttgttgcaactgccaataggatgcaacctataccccctcctctgttagacaggatggaaatcattgagctgccaggctacacacccgaagagaagttaaaaatagccatgaaacatctcataccaagggtattggagcagcatggcttgagtacgacaaatcttcagattcctgaggctatggtcaaactggtcatcgagaggtacacgagagaagctggtgtgcgcaatcttgagcggaacctagctgcattggctcgtgcagctgctgttaaggcttgctgatggcggtgaagttgaaatggaagttattcctatggagcatgatatatcaaacacttatgaaaatccatctcctatgattgttgatgaggctatgctagaaaaagtacttgggcctcctagatttgatgacagagaagctgcagatcgtgtagcaagcccaggagtctcagttggccttgtctggacttcggttggtggggaagttcagtttgtggaggctacagccatggtgggtaagggtgacttgcatttgactgggcagcttggtgatgttattaaggagtcagcgcagctagctttgacatgggtgagagcaagagctgctgacctcaatttgtcacctacttctgatatcaacttattggagagccgtgatatccacatacattttcctgctggtgctgtgccaaaggatggcccttctgcaggtgtgacattggtaacggcactggtgtcgctttttagtaacagaaaagtcagagcagatactgctatgactggcgagatgactctaaggggccttgtattgccagttggtggtgttaaggacaaggtacttgcggcacatcgttatggaatcaagagagtaattttacctgaaaggaacttgaaggacttatcagaggttccattaccaattctctccgacatggagattctgcttgtgaagcgcatcgaggaagtactcgaccatgctttcgaaggccgatgcccacttagatcacgctccaagttgtagcacccaagtcgcgtttggtatggatgtttgcttgagaggatcatcgtcacagtaccacgaatggtcaacagtgtgagagtaagagcctagctctcttgccagcacaggtcttggcacgcccttttcggtttggcttcgcgtctggaatgtgtatacaggattactggtcagaattctgagaataacgagaagattctctgctgggatagtgggattccctgcatatttatgtgaaaccagctgtcggtatttatgcacagatgcaacagcaacacaaatctggtaggaacactggtgggtttctgtcgataatttgagtgtatatgtaatattatgtaatctattccagggaaacatagttaaaccgaggttgtgaaagccaaagagattgagaaatatcatacgtactttagggttgggtgacttgttacaaaatgtgcatattcacatttcttcaataaacaaccgaaaatgcaaacatttgctcgttaatt

SEQ ID NO: 69605 - DNA, 2723 bp, Zea Mays
gtacgagccgcgggccgtgtccacctttctgttcagccttgctgtcttgtcgcgcgctctcttcctctcccgcggccccgccccacagctctgctcccccgtccttccgacgttcacactgccttctcttctcagcccccacgtcgcgtcttacaagaggcatcgcagcctccgattccccgagaggcggcacgtcggcacggcacgctcttctcctagcgcgggtggtgtgggtaaccgcggcgcgagaagctgctcgatcttgcagctcgtgccgggcgccgggggtgtgcggtgcgggtgctgcggacatgagctgcctgtgctggttcaagcggaggtccaggaaagggcgatcgtcgtcgtcggggaagcgaggggcgtcgtcgacggcgacggtgtcggtgtcgggccccgcgaccgcgaccgcgaccacgaccacgacggcgtcggcggagagcacgagccggtcggacgactcgggcgcggtgcggccggtgagcaagtcggcgggctcgtcgcagtcgcagcggagcatctcgtcgctctacgaggagcggggccacggccagctgcgcgtgttcgactacgacgagctccagggcgccacggccgagttcggccgcgcgcagaagctcggcgagggcggcttcggcagcgtctacaagggcttcatccgcgccgccgacggcaagggggaccgcgtccccgtcgccgtcaagaagctcaaccagcgtggcatgcagggacataagcaatggctggcagaagtacagttccttggtgttctggagcacccaaatcttgtaaagctacttggatattgtgctgttgatagcgaaagaggggcacagagattgttggtctacgagtttatgcccaataagagcttggaagaccacttgttcaggcgagctaatcctcctctaccgtggaacagaaggcttcaggttatcttgggagctgcagaaggattggcgtacctgcatgaaggggaagttcaggtaatcaggtgttcttcaagcctgcactattggtcctgtgctttcaatttaccgccaaaggatagcctatcttccatggttttttttaaatgggaaagcatcctagctagcaaaagtcatcctgactactcgccgcaaagattccaggaagctaacttctttgacgtttccggaaagcacagctcaatgttcaaggctaggacatgcaggcgccgtagccaatttcaattgtagctgtgctgtctgtgccaaacatttcagcctgcctagcaccggttctccagctgactattgtgcgcagcatatgagagccgtcaagcaagatcaaaatatcacatattacttgtgttaagactacgccatgccattgtttcagaacgtgtgctacagcgctgttcttgtttgttttcaagtttttcgttcagaaaagctagaccttaattttctgcattttggttaggtgatctaccgggacttcaaaacgtccaacattttactggacaaggacttcagagcaaagctatcagacttcggcctagccagggaggggccaactggagcaaacactcacgtctcgactgcggtacgtacgttacatccatcaatacgtaggcaatgcagtgtacctgctcgatctacgcgtagctgacgaacgacgagcctgggcttccattgtcaatggtgcattcactttctttctatgcgagcatgcacggcactgtcatgtgactgaactgaactattgcactacgtgccatgctaacgcagggcttgaagatagcatcaagcagtcaatgtgacgcagggtcgcgctacggttttgacagctctgtggcatgatgtattttcaggtcgtcgggacgcaagggtacgccgcaccggagtacatggacacggggcacctgacgacgaagagcgacgtgtggagcttcggtgtggtgctttacgagatcctgacggggcggcggtcgctggaccggaacaggccggcggcggagcagaagctgctggagtgggtggcccagttcccgccggacagccgcaactttcggatgatcatggaccccaggctccgcggcgagtactcggtgaaggccgcccgggagatcgccaagctggccgacagctgcctgctcaagaacgccaaggagcgccccaccatgagcgaggtggtcgaggtcctcggccgggccgtgcaggcgcacgccgagcctgacagcggggctcccggccccggcgccaaggggaagaagaccgacgctgccacaccgtcccggcggcggcgtgactgactgctacatgtcgtcatcggtaaaggcgcttaccgagtccattggttagtctagtcgtgagctgtgacagcacaaaaggagtgagtgttgtgcttggggccctacatataattttttttggacatacagcattacttagacgtacgtagagacgagctggcggattgaactttgtgtagctttcgaaagtgagcattttgaaaagaaaaaaaagagtagaggtctcaagggtttcgaaagggggcatttcaaaagattttgcgctggctctacaaaaggatctgttttagcatagccgagtgaaatcagagtgtcagacgcgagcgcacagatttttcaggaagcagctggcaagagcttcgtcaagcatgtattaacagaaaacataatttataaaaaaaaaatagcgcacaaatttgattgtatt

SEQ ID NO: 69606 - DNA, 834 bp, Zea Mays
ctttttcctttttttttttttttgcatgagtagatgtggcttcaccgtagttggagctacccaaagcaagtacaccacagaggggcgtcgatccccgcggatgcgaaaacaggctgcaaagggttcgagtatctccactcacccagcccgaacccaaacgtggctacgggcgccctggtgggtgggccgttccagaacgacaccttcgtggactcccgtgacaacgccgtgcagacggagtccagcacctacaacagtggcaccctggtcggtctcctctccggcctcgtcaccacttcctccgtggtacagtcgttcacctagagggctcctcctatgttctggcctggagcgatgcgtgtacgagtacgattgcagtttttttgcttggcgtggctgatggtgatgcgcgatctgtgactgtgagagagaaagcttggttgccaaccgttcagttcagacggatggcatatgcaggatgcagcagtagtttagtagtgcccacgcgtttcttctgttgtgtgtgtacaatgacggtgctgctcctgcagtgcagctatagtttttcaccgcgtgctcctatctggtttgctggtgtgcctgtaaggctgtagctacgagtaatgtattagactatttgtaggtcgtatttcatttgttcattctgtggtgaggtagttcagcagagctttgtactgtaccgatgaattgcaccgtctcccaactgaaatgtgccttgtggattcacagctggaggtgaatggcacgcattcgtgcggctcttcgctccatgtttttttttaaaaaaaactgggataaaatagggaagagaaa

SEQ ID NO: 69607 - DNA, 2092 bp, Zea Mays
ctcactcctccggtgaccgtgcacccaacaattccttattactacggagctgtgcgcacccaccccgactgcgccacacccacacccacaccgcaccaaccaaccccggccggccagccagcccacgagccccatcccgccatccgcccgcgcggcgagcgcagagccgagccgagctgccggaacgcaggcagcggccaccgggaggcctccgaaacgcagcggaacacctgaggaggcggcttcccggcgaatgctctaggaggaggcgcggcgccggcggagatggggtccaagtacacgcgcgggtgctgcggctggctgatcgtggcgctgattgcggcgctggtggccacggccgcgatgttcgccatcatgaagcgcaagcccgggggccgccacatcaagccgctgccggtgccggggccgccgggggccatcgactccaagtacggcgacgcgctcggggtcgcgctccagttcttccaggtccagaagggtcggtgatcctgatctggaccacaattgttgggaaaggccagaaacaatgaccgagaaaagacctctcacacagatcaacaagaagactcccggatcagatgttgctgctgaggcagcagcagccatggcagctgcttcaatggtcttcaaatccagagataccacgtattctgatgtgcttcttcagcatgctcagaaactattcacttttgctgacacttatagaggcctctcaagcgagagctatcccaagctccaggatttctataactccaccagttacgttgatgagcttctatgggcagcgagttggctctaccacgccacaggcgaccagacgtatctcagctatgtaactgtacagaacgggaaaagttatgctgattggggaaggccaacatggttcagttgggatgacaaaaatccaggcacacaggtgcttttgtccagactaaatttcttcgggtccaaacagatatctaatgccgaaaatgaggggttgaaaatgtatagagatactgcagaagctgtcatttgtggtctgattccagattcgcctcaagccactgccagcagaactggaggaggcttggtgtggataagcgggtggaattctctccagcatgccaccaacgctgcgttcctatctgttgtgtacagcgactacatgctctcgacgcggacagcggcagtgcagtgcagcgggaagtactacagccctaccgatatacgcaactttgctgcatcacaggctaactatatcctgggagacaacccgatgaagcttagctaccttgtgggatatgggagcagctacccaaagcaagtacaccacagaggggcgtcgatccccgcggatgcgaaaacaggctgcaaagggttcgagtatctccactcacccagcccgaacccaaacgtggctacgggcgccctggtgggtgggccgttccagaacgacaccttcgtggactcccgtgacaacgccgtgcagacggagtccagcacctacaacagtggcaccctggtcggtctcctctccggcctcgtcaccacttcctccgtggtacagtcgttcacctagagggctcctcctatgttctggcctggagcgatgcgtgtacgagtacgattgcagtttttttgcttggcgtggctgatggtgatgcgcgatctgtgactgtgagagagaaagcttggttgccaaccgttcagttcagacggatggcatatgcaggatgcagcagtagtttagtagtgcccacgcgtttcttctgttgtgtgtgtacaatgacggtgctgctcctgcagtgcagctatagtttttcaccgcgtgctcctatctggtttgctggtgtgcctgtaaggctgtagctacgagtaatgtattagactatttgtaggtcgtatttcatttgttcattctgtggtgaggtagttcagcagagctttgtactgtaccgatgaattgcaccgtctcccaactgaaatgtgccttgtggattcacagctggaggtgaatggcacgcattcgtgcggctcttcgctccatgtttttttttaaaaaaaactgggataaaatagggaagagaaa

SEQ ID NO: 69608 - DNA, 1325 bp, Zea Mays
tattattaacttcatcgctcgctgttccatagttagctaatcatttttaccaatttagaaaaccagatatctgaatttttggaaaactagatatctgaggacaaaaagtgaaaaaaacaaataactaaaaccacgaggtggtaactgaaaacaccgcccgtcttcttctcccaccgggccaccgcccccgccccccagcaggccagcacccctattctattcctcgagactgccccctcccctccacgaattctccttccaaatgcatatacaccgccacgatttcgtaccaccacgaccacccatctcaccgatctcctgctcatggacgccgacgatccctccgccgccaccgcttcctcctccgacgaaaccttcttcgatgcccttgactcgctcccctccccgtcgccttcgccttccccttccccttcgccttccccttccccttcccatatctcctcctctacgctccatcgccgcccgcgccgcgcaaaaagtgtaaagcagcccgactctattctctcatcacccccctcggcctccgcggccacctccaccgtcaccgccgtcgaggacgagcatctcaagcccgattcctccgaggccaccagcgccacttcccgtactgaccccgcacccaaggaggaggaggagcaggaggaggaggaggaggaggacattaaggctacggacgtggatgcggttgttgaggtggaggcgcctgctcctacggcgacgccgtcgccggccccgagcatactcgagtacctcgccgtgctcgtcgttaaggcagtggtcttccagagtttctctccgccgatggcaaagtgatctcaacttcaagtcaaccatgcatgctcaagttcaaaagcgtacacatgcacttcatcgagacttttctccagagcgtctctcttctgtccggctactcatcggaatctcaggttattagactgaagatgaggggtatcacccaaggtctggaaccaacaactgcggtgaggataatcctggagcaaagagcagagtttggtcgcggtgcaggcattccagagatatatgttgcatcactaaagctcgagggcgaacttcctctcgtcagaagattgctctggaactggaggtggaccttttttgtctggagcagcacggggttgtttgctattgaattgctgtttgggcttgtgtgctgtagatcctgtatatttcccaggagtggacacaatgttgctgctccttaagaccttgggctaacctcatgtaacgtattgtacaatttccgaaataaatgaaaaggcggcatttgatgtggtacaatacaa

SEQ ID NO: 69609 - DNA, 1384 bp, Zea Mays
gtccctcgcctgccccgccgcccctagccctttccccccgtgtccggtggttgcggctgcccgcatcatattcccaccttgcgaacgaggacgaactgctaccccctcgcctcgccctcgccgcctgctcctctccagttctcccccaccaaccgcagcagcgagagcgagactgagaatggccgcggcgccgtcgtccctcgtgtcctcccatctctcccgcctcgccgacctccgccgcgcggcggcgccggccactcccaccgtcccacagcagcttcgcgtcggcttctcgcgccgccgcgcccagcgcgtcgtcgccatggctggatccggcaagttcttcgtcggaggcaactggaagtgcaacggaacaaaggactccgttagcaagcttgtctctgaactgaatgctgctaccctcgaaactgatgtagatgttgtggtggctcctccattcatctatatcgatcaggtcaagaattcactaacgggtcgcattgaggtttctgctcagaatgtgtggattggaaaaggaggagcctacaccggagagatcagtgcagaacaactggtggacatcggttgtcaatgggttattcttggacactcagagcgtagacatattattggtgaaaatgacgagtttattgggaagaaggctgcatatgcattgagccaaaatgttaaggttattgcctgcataggagagcttctggaagagagggaagcagggaaaacttttgaagtatgttttgagcagatgaaggcttttgcagatagtatttcaaactgggccgatgttgtgattgcatatgagcctgtttgggctattggaaccggaaaagttgctactcctgagcaagcccaggaagttcatgctgctgtacgcgattggttgacgaccaacatatcacctgatgttgcctctagcacccgaataatctatggaggttctgtgaatgcagccaactgtgcagagctagcaaagaaagaggatatcgatggttttcttgttggtggtgcctccttgaaggccccggacttcgccaccattatcaactcagtgaccgccaagaaagttgcagcctgatggaccaccctgtgaagaaataagaggccatcaccgtgtcgcctcatctgccacgccttaaagcctgtaggaggcgtcacctcctgtttttgctgatttgcagcacggggacagaaaataatgttttgctctcgtggatctgcacgtgacgaggagagttcagttgtcgtgagcgatgtacgttgggaatattgttatgtggtccttttctaaagaaaaaaaaatgttgacagtcaaggagaaatgtaagcgtgtttttttttaacagagaagctacatcttactgtgaaa

SEQ ID NO: 69610 - DNA, 1142 bp, Zea Mays
cctgcctcctgagtatagagaggccttgttgctttcttgactctctttgctaagctttgagagacctggccggaggagagaagatgtaaagtgaacggaacaaaggactccgttagcaagcttgtctctgaactgaatgctgctaccctcgaaactgatgtagatgttgtggtggctcctccattcatctatatcgatcaggtcaagaattcactaacgggtcgcattgaggtttctgctcagaatgtgtggattggaaaaggaggagcctacaccggagagatcagtgcagaacaactggtggacatcggttgtcaatgggttattcttggacactcagagcgtagacatattattggtgaaaatgacgagtttattgggaagaaggctgcatatgcattgagccaaaatgttaaggttattgcctgcataggagagcttctggaagagagggaagcagggaaaacttttgaagtatgttttgagcagatgaaggcttttgcagatagtatttcaaactgggccgatgttgtgattgcatatgagcctgtttgggctattggaaccggaaaagttgctactcctgagcaagcccaggaagttcatgctgctgtacgcgattggttgacgaccaacatatcacctgatgttgcctctagcacccgaataatctatggaggttctgtgaatgcagccaactgtgcagagctagcaaagaaagaggatatcgatggttttcttgttggtggtgcctccttgaaggccccggacttcgccaccattatcaactcagtgaccgccaagaaagttgcagcctgatggaccaccctgtgaagaaataagaggccatcaccgtgtcgcctcatctgccacgccttaaagcctgtaggaggcgtcacctcctgtttttgctgatttgcagcacggggacagaaaataatgttttgctctcgtggatctgcacgtgacgaggagagttcagttgtcgtgagcgatgtacgttgggaatattgttatgtggtccttttctaaagaaaaaaaaatgttgacagtcaaggagaaatgtaagcgtgtttttttttaacagagaagctacatcttactgtgactgtgagtgttccatcactcgattctttcctttt

SEQ ID NO: 69611 - DNA, 1231 bp, Zea Mays
ccccgtgtccggtggttgcggctgcccgcatcatattcccaccttgcgaacgaggacgaactgctaccccctcgcctcgccctcgccgcctgctcctctccagttctcccccaccaaccgcagcagcgagagcgagactgagaatggccgcggcgccgtcgtccctcgtgtcctcccatctctcccgcctcgccgacctccgccgcgcggcggcgccggccactcccaccgtcccacagcagcttcgcgtcggcttctcgcgccgccgcgcccagcgcgtcgtcgccatggctggatccggcaagttcttcgtcggaggcaactggaagtgcaatgtgtggattggaaaaggaggagcctacaccggagagatcagtgcagaacaactggtggacatcggttgtcaatgggttattcttggacactcagagcgtagacatattattggtgaaaatgacgagtttattgggaagaaggctgcatatgcattgagccaaaatgttaaggttattgcctgcataggagagcttctggaagagagggaagcagggaaaacttttgaagtatgttttgagcagatgaaggcttttgcagatagtatttcaaactgggccgatgttgtgattgcatatgagcctgtttgggctattggaaccggaaaagttgctactcctgagcaagcccaggaagttcatgctgctgtacgcgattggttgacgaccaacatatcacctgatgttgcctctagcacccgaataatctatggaggttctgtgaatgcagccaactgtgcagagctagcaaagaaagaggatatcgatggttttcttgttggtggtgcctccttgaaggccccggacttcgccaccattatcaactcagtgaccgccaagaaagttgcagcctgatggaccaccctgtgaagaaataagaggccatcaccgtgtcgcctcatctgccacgccttaaagcctgtaggaggcgtcacctcctgtttttgctgatttgcagcacggggacagaaaataatgttttgctctcgtggatctgcacgtgacgaggagagttcagttgtcgtgagcgatgtacgttgggaatattgttatgtggtccttttctaaagaaaaaaaaatgttgacagtcaaggagaaatgtaagcgtgtttttttttaacagagaagctacatcttactgtgactgtgagtgttccatcactcgattctttcctttt

SEQ ID NO: 69612 - DNA, 2211 bp, Zea Mays
ccccgtgtccggtggttgcggctgcccgcatcatattcccaccttgcgaacgaggacgaactgctaccccctcgcctcgccctcgccgcctgctcctctccagttctcccccaccaaccgcagcagcgagagcgagactgagaatggccgcggcgccgtcgtccctcgtgtcctcccatctctcccgcctcgccgacctccgccgcgcggcggcgccggccactcccaccgtcccacagcagcttcgcgtcggcttctcgcgccgccgcgcccagcgcgtcgtcgccatggctggatccggcaagttcttcgtcggaggcaactggaagtgcgtaagtgcatgttctgcttcttcagctttacgcggcttggagatgctgtgtaccgatgatcctggagatgctgtgtaactgtatcattttttggctgttgccgcattgggcattccaacgggacagggacgagatttttttgtcgtcatgcataccacggctccatcgaccatcgccacagtgttgcgccggcctcccctccttggttcctgccgtagtgcagcgctggccgccggcaccatacatatatcgtgatttactccgtacatggccacttctagaaatacaatcgcttctctgctgcccagcccagcttggtctgccagccagagccgttttgttcggtatataaaaagtgtgtctgtgtgtttttttggaaaggcaggtgtataaaagttgatattgcatctttcgccttttagaaaccttttagctgagagaaaccagggaatgccactagttcctgcctcctgagtatagagaggccttgttgctttcttgactctctttgctaagctttgagagacctggccggaggagagaagatgtaaagtggtgcgtgttgtgaacttttgagttgtggttgtttattagtaatgggtctgcgagtttcatcaatccaaaatcaagctttaaatttgcaaattcattttttgggctccatcttggattagcgaacatggcctatttgttttgaagaaaaatcttatacgaagcttcttcacttcaggagctcttgctagcaacattaagctatatcccttggggtatttagttactcgtcttagaatttgtggtcttgatgtcagtttctttaccctcttattcagaacggaacaaaggactccgttagcaagcttgtctctgaactgaatgctgctaccctcgaaactgatgtagatgttgtggtggctcctccattcatctatatcgatcaggtcaagaattcactaacgggtcgcattgaggtttctgctcagaatgtgtggattggaaaaggaggagcctacaccggagagatcagtgcagaacaactggtggacatcggttgtcaatgggttattcttggacactcagagcgtagacatattattggtgaaaatgacgagtttattgggaagaaggctgcatatgcattgagccaaaatgttaaggttattgcctgcataggagagcttctggaagagagggaagcagggaaaacttttgaagtatgttttgagcagatgaaggcttttgcagatagtatttcaaactgggccgatgttgtgattgcatatgagcctgtttgggctattggaaccggaaaagttgctactcctgagcaagcccaggaagttcatgctgctgtacgcgattggttgacgaccaacatatcacctgatgttgcctctagcacccgaataatctatggaggttctgtgaatgcagccaactgtgcagagctagcaaagaaagaggatatcgatggttttcttgttggtggtgcctccttgaaggccccggacttcgccaccattatcaactcagtgaccgccaagaaagttgcagcctgatggaccaccctgtgaagaaataagaggccatcaccgtgtcgcctcatctgccacgccttaaagcctgtaggaggcgtcacctcctgtttttgctgatttgcagcacggggacagaaaataatgttttgctctcgtggatctgcacgtgacgaggagagttcagttgtcgtgagcgatgtacgttgggaatattgttatgtggtccttttctaaagaaaaaaaaatgttgacagtcaaggagaaatgtaagcgtgtttttttttaacagagaagctacatcttactgtgactgtgagtgttccatcactcgattctttcctttt

SEQ ID NO: 69613 - DNA, 1381 bp, Zea Mays
ttccccccgtgtccggtggttgcggctgcccgcatcatattcccaccttgcgaacgaggacgaactgctaccccctcgcctcgccctcgccgcctgctcctctccagttctcccccaccaaccgcagcagcgagagcgagactgagaatggccgcggcgccgtcgtccctcgtgtcctcccatctctcccgcctcgccgacctccgccgcgcggcggcgccggccactcccaccgtcccacagcagcttcgcgtcggcttctcgcgccgccgcgcccagcgcgtcgtcgccatggctggatccggcaagttcttcgtcggaggcaactggaagtgcaacggaacaaaggactccgttagcaagcttgtctctgaactgaatgctgctaccctcgaaactgatatgttgtggtggctcctccattcatctatatcgatcaggtcaagaattcactaacgggtcgcattgaggtttctgctcagaatgtgtggattggaaaaggaggagcctacaccggagagatcagtgcagaacaactggtggacatcggttgtcaatgggttattcttggacactcagagcgtagacatattattggtgaaaatgacgagtttattgggaagaaggctgcatatgcattgagccaaaatgttaaggttattgcctgcataggagagcttctggaagagagggaagcagggaaaacttttgaagtatgttttgagcagatgaaggcttttgcagatagtatttcaaactgggccgatgttgtgattgcatatgagcctgtttgggctattggaaccggaaaagttgctactcctgagcaagcccaggaagttcatgctgctgtacgcgattggttgacgaccaacatatcacctgatgttgcctctagcacccgaataatctatggaggttctgtgaatgcagccaactgtgcagagctagcaaagaaagaggatatcgatggttttcttgttggtggtgcctccttgaaggccccggacttcgccaccattatcaactcagtgaccgccaagaaagttgcagcctgatggaccaccctgtgaagaaataagaggccatcaccgtgtcgcctcatctgccacgccttaaagcctgtaggaggcgtcacctcctgtttttgctgatttgcagcacggggacagaaaataatgttttgctctcgtggatctgcacgtgacgaggagagttcagttgtcgtgagcgatgtacgttgggaatattgttatgtggtccttttctaaagaaaaaaaaatgttgacagtcaaggagaaatgtaagcgtgtttttttttaacagagaagctacatcttactgtgactgtgagtgttccatcactcgattctttcctttt

SEQ ID NO: 69614 - DNA, 2459 bp, Zea Mays
gtttggttcgggagccaccaccggttcgtgtcgggaccggaaaccacgatcagccttgcacagttcccggcttccagccgccgccgccgcggggagcaccggccgttggttcttcgtctccgccccgcttgcgagaagagcgacgcgtttccccttcgaaccctcgtgtatcgtgggtcatggtgacgcctcgtggtagcggcgggagatggtgaagatagtgacgtacaacgtgaatgggctgcggccgcgggtggcgcagcacggctcgctccgctgcctcctcgacgccctcgatgccgacatcatctgcttccaggagaccaaattgtcaaggcaggacctatctgcggatgtaattatggctgatggatatgaggcttttgtttcatgcaaccgctcttcaaaaggccgtggagcatactctggtgttgcaacattttgccgagtaacatcatcattttccagccaggaggttgctttgccagtagcagctgaagaaggctttactggacttcaggactatgcaaaaaatagtcaaactgttggggatttcagtattgcaatgcctgttgaggaggagggtcttggtgaactcacaagagaggacctcttaagggtggacaatgaggggcggtgcatcatcactgatcatggacattttgttcttttcaacatatacggcccagctgttgacggagatgataaagagcgtgttcgttttaagctactattttacaagatactgcagaaaagatgggaacgtctattggctcttggaaagagagtttttgttgttggtgatttgaatattgctcctgcttctatagacaggtgtgacgcggcacctggcttcgagaagcaaatgttccgggaatggctgagatccatgctgagagaacatggaggtcccttttttgatgcttttagatcaaaacaccctgaaaggacaggagcatatacttgttttaatcaaaaaattggtgcagaagagtataattatggttctagaatagaccacattctcatttccggttcctgtctccatcgctgtgattctgtggaggaccatagcattttttgttgccatgtagaagaatgtgagataatgaatcatttcaaaagagggaattctgaaaatttatcaaagtggaaagggggaagaagcagtaagctagaaggatctgatcatattccagtttatattttactgaaagaaatacctgaacttccggtccataatatcccaccatcagctgcaagatatcttccagagatccgtggaaggcaacaaagtatagtatcgttccttgataaagggaaaatttatgagctgcaaaatgctgcaaatttgattcaatctgaagatacagtacttgatagttactgtagtgatggcttggaaaatacaattctagctaagaaaggactggcaactggtataactgagtttgcaaaaggtggtaaccttcctagtttgatgtgcaaggggacagatctgaatcaatggataaatgaaggtttaatgggcatctctcatgtcagccagaaaaaatcactgtctagtaccaagtttgtgccacaaaagaaaattaaacgcaacttatcatcccaaccaacaatcaagtcattttttcaaagaccagggtcaaagacagtaaatgctagtaccagtaccttagttactccagcagaaacattagaccttacaaatcaagcatgtgtttcaaatggtgatacactgcctgaaaacatgcagtgcacaacttcagctgcaaaagttcaggataacacagatgcatcgtcatgttcactttcaacagacaagtctaatgctgcagcattggagtggcagaggatacagaaaaagatgaagatgacactaccacgttgcaaagggcatagtgaaccatgcattccgaggtctgtgaagaagggccctaatataggccgtttgttctatgtctgtgctcgtgctcagggacctgcatcaaatccagaagccaattgtggccactttcagtgggcacctggaaagtctaaagagaagagctctaaagagaaacgtctgtgacttcatttttctcccaggaatccaggacattttgcttccaatgagtctggtacatcaccttgtcccagcatactgatgacgtggcgatgtatttgtggagaggtaagctgatcaagggcctgtttgggaggtctggctctgactggctccttgctctagtaaccggaggggccacaaaacgtgtcttcaccagctccccattgttttgaaaaggacagaaaacaacttcatgaacattgcagccacagtgccatggataagctacagtagcgcatcagctggaacagccaagagctgtcccaaacgtggcctgaacaagcacttctctcaggcagacaaaatttatgatcaaagcaaacgaatagtgacgactgttggggcgaag

SEQ ID NO: 69615 - DNA, 1532 bp, Zea Mays
gtcaaatagaaccctctttgacaggagcatatacttgttttaatcaaaaaattggtgcagaagagtataattatggttctagaatagaccacattctcatttccggttcctgtctccatcgctgtgattctgtggaggaccatagcattttttgttgccatgtagaagaatgtgagataatgaatcatttcaaaagagggaattctgaaaatttatcaaagtggaaagggggaagaagcagtaagctagaaggatctgatcatattccagtttatattttactgaaagaaatacctgaacttccggtccataatatcccaccatcagctgcaagatatcttccagagatccgtggaaggcaacaaagtatagtatcgttccttgataaagggaaaatttatgagctgcaaaatgctgcaaatttgattcaatctgaagatacagtacttgatagttactgtagtgatggcttggaaaatacaattctagctaagaaaggactggcaactggtataactgagtttgcaaaaggtggtaaccttcctagtttgatgtgcaaggggacagatctgaatcaatggataaatgaaggtttaatgggcatctctcatgtcagccagaaaaaatcactgtctagtaccaagtttgtgccacaaaagaaaattaaacgcaacttatcatcccaaccaacaatcaagtcattttttcaaagaccagggtcaaagacagtaaatgctagtaccagtaccttagttactccagcagaaacattagaccttacaaatcaagcatgtgtttcaaatggtgatacactgcctgaaaacatgcagtgcacaacttcagctgcaaaagttcaggataacacagatgcatcgtcatgttcactttcaacagacaagtctaatgctgcagcattggagtggcagaggatacagaaaaagatgaagatgacactaccacgttgcaaagggcatagtgaaccatgcattccgaggtctgtgaagaagggccctaatataggccgtttgttctatgtctgtgctcgtgctcagggacctgcatcaaatccagaagccaattgtggccactttcagtgggcacctggaaagtctaaagagaagagctctaaagagaaacgtctgtgacttcatttttctcccaggacattttgcttccaatgagtctggtacatcaccttgtcccagcatactgatgacgtggcgatgtatttgtggagaggtaagctgatcaagggcctgtttgggaggtctggctctgactggctccttgctctagtaaccggaggggccacaaaacgtgtcttcaccagctccccattgttttgaaaaggacagaaaacaacttcatgaacattgcagccacagtgccatggataagctacagtagcgcatcagctggaacagccaagagctgtcccaaacgtggcctgaacaagcacttctctcaggcagttgaacgcggagcacatctgcacaggttgtgttttgaacacgtggaagtcaaatgattgg

SEQ ID NO: 69616 - DNA, 2374 bp, Zea Mays
cgggagccaccaccggttcgtgtcgggaccggaaaccacgatcagccttgcacagttcccggcttccagccgccgccgccgcggggagcaccggccgttggttcttcgtctccgccccgcttgcgagaagagcgacgcgtttccccttcgaaccctcgtgtatcgtgggtcatggtgacgcctcgtggtagcggcgggagatggtgaagatagtgacgtacaacgtgaatgggctgcggccgcgggtggcgcagcacggctcgctccgctgcctcctcgacgccctcgatgccgacatcatctgcttccaggagaccaaattgtcaaggcaggacctatctgcggatgtaattatggctgatggatatgaggcttttgtttcatgcaaccgctcttcaaaaggccgtggagcatactctggtgttgcaacattttgccgagtaacatcatcattttccagccaggaggttgctttgccagtagcagctgaagaaggctttactggacttcaggactatgcaaaaaatagtcaaactgttggggatttcagtattgcaatgcctgttgaggaggagggtcttggtgaactcacaagagaggacctcttaagggtggacaatgaggggcggtgcatcatcactgatcatggacattttgttcttttcaacatatacggcccagctgttgacggagatgataaagagcgtgttcgttttaagctactattttacaagatactgcagacaggtgtgacgcggcacctggcttcgagaagcaaatgttccgggaatggctgagatccatgctgagagaacatggaggtcccttttttgatgcttttagatcaaaacaccctgaaaggacaggagcatatacttgttttaatcaaaaaattggtgcagaagagtataattatggttctagaatagaccacattctcatttccggttcctgtctccatcgctgtgattctgtggaggaccatagcattttttgttgccatgtagaagaatgtgagataatgaatcatttcaaaagagggaattctgaaaatttatcaaagtggaaagggggaagaagcagtaagctagaaggatctgatcatattccagtttatattttactgaaagaaatacctgaacttccggtccataatatcccaccatcagctgcaagatatcttccagagatccgtggaaggcaacaaagtatagtatcgttccttgataaagggaaaatttatgagctgcaaaatgctgcaaatttgattcaatctgaagatacagtacttgatagttactgtagtgatggcttggaaaatacaattctagctaagaaaggactggcaactggtataactgagtttgcaaaaggtggtaaccttcctagtttgatgtgcaaggggacagatctgaatcaatggataaatgaaggtttaatgggcatctctcatgtcagccagaaaaaatcactgtctagtaccaagtttgtgccacaaaagaaaattaaacgcaacttatcatcccaaccaacaatcaagtcattttttcaaagaccagggtcaaagacagtaaatgctagtaccagtaccttagttactccagcagaaacattagaccttacaaatcaagcatgtgtttcaaatggtgatacactgcctgaaaacatgcagtgcacaacttcagctgcaaaagttcaggataacacagatgcatcgtcatgttcactttcaacagacaagtctaatgctgcagcattggagtggcagaggatacagaaaaagatgaagatgacactaccacgttgcaaagggcatagtgaaccatgcattccgaggtctgtgaagaagggccctaatataggccgtttgttctatgtctgtgctcgtgctcagggacctgcatcaaatccagaagccaattgtggccactttcagtgggcacctggaaagtctaaagagaagagctctaaagagaaacgtctgtgacttcatttttctcccaggacattttgcttccaatgagtctggtacatcaccttgtcccagcatactgatgacgtggcgatgtatttgtggagaggtaagctgatcaagggcctgtttgggaggtctggctctgactggctccttgctctagtaaccggaggggccacaaaacgtgtcttcaccagctccccattgttttgaaaaggacagaaaacaacttcatgaacattgcagccacagtgccatggataagctacagtagcgcatcagctggaacagccaagagctgtcccaaacgtggcctgaacaagcacttctctcaggcagttgaacgcggagcacatctgcacaggttgtgttttgaacacgtggaagtcaaatgattgg

SEQ ID NO: 69617 - DNA, 2539 bp, Zea Mays
tttgggggtgtttggttcgggagccaccaccggttcgtgtcgggaccggaaaccacgatcagccttgcacagttcccggcttccagccgccgccgccgcggggagcaccggccgttggttcttcgtctccgccccgcttgcgagaagagcgacgcgtttccccttcgaaccctcgtgtatcgtgggtcatggtgacgcctcgtggtagcggcgggagatggtgaagatagtgacgtacaacgtgaatgggctgcggccgcgggtggcgcagcacggctcgctccgctgcctcctcgacgccctcgatgccgacatcatctgcttccaggagaccaaattgtcaaggcaggacctatctgcggatgtaattatggctgatggatatgaggcttttgtttcatgcaaccgctcttcaaaaggccgtggagcatactctggtgttgcaacattttgccgagtaacatcatcattttccagccaggaggttgctttgccagtagcagctgaagaaggctttactggacttcaggactatgcaaaaaatagtcaaactgttggggatttcagtattgcaatgcctgttgaggaggagggtcttggtgaactcacaagagaggacctcttaagggtggacaatgaggggcggtgcatcatcactgatcatggacattttgttcttttcaacatatacggcccagctgttgacggagatgataaagagcgtgttcgttttaagctactattttacaagatactgcagaaaagatgggaacgtctattggctcttggaaagagagtttttgttgttggtgatttgaatattgctcctgcttctatagacaggtgtgacgcggcacctggcttcgagaagcaaatgttccgggaatggctgagatccatgctgagagaacatggaggtcccttttttgatgcttttagatcaaaacaccctgaaaggacaggagcatatacttgttttaatcaaaaaattggtgcagaagagtataattatggttctagaatagaccacattctcatttccggttcctgtctccatcgctgtgattctgtggaggaccatagcattttttgttgccatgtagaagaatgtgagataatgaatcatttcaaaagagggaattctgaaaatttatcaaagtggaaagggggaagaagcagtaagctagaaggatctgatcatattccagtttatattttactgaaagaaatacctgaacttccggtccataatatcccaccatcagctgcaagatatcttccagagatccgtggaaggcaacaaagtatagtatcgttccttgataaagggaaaatttatgagctgcaaaatgctgcaaatttgattcaatctgaagatacagtacttgatagttactgtagtgatggcttggaaaatacaattctagctaagaaaggactggcaactggtataactgagtttgcaaaaggtggtaaccttcctagtttgatgtgcaaggggacagatctgaatcaatggataaatgaaggtttaatgggcatctctcatgtcagccagaaaaaatcactgtctagtaccaagtttgtgccacaaaagaaaattaaacgcaacttatcatcccaaccaacaatcaagtcattttttcaaagaccagggtcaaagacagtaaatgctagtaccagtaccttagttactccagcagaaacattagaccttacaaatcaagcatgtgtttcaaatggtgatacactgcctgaaaacatgcagtgcacaacttcagctgcaaaagttcaggataacacagatgcatcgtcatgttcactttcaacagacaagtctaatgctgcagcattggagtggcagaggatacagaaaaagatgaagatgacactaccacgttgcaaagggcatagtgaaccatgcattccgaggtctgtgaagaagggccctaatataggccgtttgttctatgtctgtgctcgtgctcagggacctgcatcaaatccagaagccaattgtggccactttcagtgggcacctggaaagtctaaagagaagagctctaaagagaaacgtctgtgacttcatttttctcccaggtgaaaggattccttcagcactcagtgtattcctttgtgttgtgctaactgccaattttaactaggaatccaggacattttgcttccaatgagtctggtacatcaccttgtcccagcatactgatgacgtggcgatgtatttgtggagaggtaagctgatcaagggcctgtttgggaggtctggctctgactggctccttgctctagtaaccggaggggccacaaaacgtgtcttcaccagctccccattgttttgaaaaggacagaaaacaacttcatgaacattgcagccacagtgccatggataagctacagtagcgcatcagctggaacagccaagagctgtcccaaacgtggcctgaacaagcacttctctcagttgaacgcggagcacatctgcacaggttgtgttttgaacacgtggaagtcaaatgattgg

SEQ ID NO: 69618 - DNA, 2523 bp, Zea Mays
atatgggtaagctgaagtctgtacttttgaaacatgcaaagcaaatttctagttttgggggtgtttggttcgggagccaccaccggttcgtgtcgggaccggaaaccacgatcagccttgcacagttcccggcttccagccgccgccgccgcggggagcaccggccgttggttcttcgtctccgccccgcttgcgagaagagcgacgcgtttccccttcgaaccctcgtgtatcgtgggtcatggtgacgcctcgtggtagcggcgggagatggtgaagatagtgacgtacaacgtgaatgggctgcggccgcgggtggcgcagcacggctcgctccgctgcctcctcgacgccctcgatgccgacatcatctgcttccaggagaccaaattgtcaaggcaggacctatctgcggatgtaattatggctgatggatatgaggcttttgtttcatgcaaccgctcttcaaaaggccgtggagcatactctggtgttgcaacattttgccgagtaacatcatcattttccagccaggaggttgctttgccagtagcagctgaagaaggctttactggacttcaggactatgcaaaaaatagtcaaactgttggggatttcagtattgcaatgcctgttgaggaggagggtcttggtgaactcacaagagaggacctcttaagggtggacaatgaggggcggtgcatcatcactgatcatggacattttgttcttttcaacatatacggcccagctgttgacggagatgataaagagcgtgttcgttttaagctactattttacaagatactgcagaaaagatgggaacgtctattggctcttggaaagagagtttttgttgttggtgatttgaatattgctcctgcttctatagacaggtgtgacgcggcacctggcttcgagaagcaaatgttccgggaatggctgagatccatgctgagagaacatggaggtcccttttttgatgcttttagatcaaaacaccctgaaaggacaggagcatatacttgttttaatcaaaaaattggtgcagaagagtataattatggttctagaatagaccacattctcatttccggttcctgtctccatcgctgtgattctgtggaggaccatagcattttttgttgccatgtagaagaatgtgagataatgaatcatttcaaaagagggaattctgaaaatttatcaaagtggaaagggggaagaagcagtaagctagaaggatctgatcatattccagtttatattttactgaaagaaatacctgaacttccggtccataatatcccaccatcagctgcaagatatcttccagagatccgtggaaggcaacaaagtatagtatcgttccttgataaagggaaaatttatgagctgcaaaatgctgcaaatttgattcaatctgaagatacagtacttgatagttactgtagtgatggcttggaaaatacaattctagctaagaaaggactggcaactggtataactgagtttgcaaaaggtggtaaccttcctagtttgatgtgcaaggggacagatctgaatcaatggataaatgaaggtttaatgggcatctctcatgtcagccagaaaaaatcactgtctagtaccaagtttgtgccacaaaagaaaattaaacgcaacttatcatcccaaccaacaatcaagtcattttttcaaagaccagggtcaaagacagtaaatgctagtaccagtaccttagttactccagcagaaacattagaccttacaaatcaagcatgtgtttcaaatggtgatacactgcctgaaaacatgcagtgcacaacttcagctgcaaaagttcaggataacacagatgcatcgtcatgttcactttcaacagacaagtctaatgctgcagcattggagtggcagaggatacagaaaaagatgaagatgacactaccacgttgcaaagggcatagtgaaccatgcattccgaggtctgtgaagaagggccctaatataggccgtttgttctatgtctgtgctcgtgctcagggacctgcatcaaatccagaagccaattgtggccactttcagtgggcacctggaaagtctaaagagaagagctctaaagagaaacgtctgtgacttcatttttctcccaggacattttgcttccaatgagtctggtacatcaccttgtcccagcatactgatgacgtggcgatgtatttgtggagaggtaagctgatcaagggcctgtttgggaggtctggctctgactggctccttgctctagtaaccggaggggccacaaaacgtgtcttcaccagctccccattgttttgaaaaggacagaaaacaacttcatgaacattgcagccacagtgccatggataagctacagtagcgcatcagctggaacagccaagagctgtcccaaacgtggcctgaacaagcacttctctcaggcagttgaacgcggagcacatctgcacaggttgtgttttgaacacgtggaagtcaaatgattgg

SEQ ID NO: 69619 - DNA, 2874 bp, Zea Mays
cgggagccaccaccggttcgtgtcgggaccggaaaccacgatcagccttgcacagttcccggcttccagccgccgccgccgcggggagcaccggccgttggttcttcgtctccgccccgcttgcgagaagagcgacgcgtttccccttcgaaccctcgtgtatcgtgggtcatggtgacgcctcgtggtagcggcgggagatggtgaagatagtgacgtacaacgtgaatgggctgcggccgcgggtggcgcagcacggctcgctccgctgcctcctcgacgccctcgatgccgacatcatctgcttccaggagaccaaattgtcaaggcaggacctatctgcggatgtaattatggctgatggatatgaggcttttgtttcatgcaaccgctcttcaaaaggccgtggagcatactctggtgttgcaacattttgccgagtaacatcatcattttccagccaggaggttgctttgccagtagcagctgaagaaggctttactggacttcaggactatgcaaaaaatagtcaaactgttggggatttcagtattgcaatgcctgttgaggaggagggtcttggtgaactcacaagagaggacctcttaagggtggacaatgaggggcggtgcatcatcactgatcatggacattttgctgttgacggagatgataaagagcgtgttcgttttaagctactattttacaagatactgcagaaaagatgggaacgtctattggctcttggaaagagagtttttgttgttggtgatttgaatattgctcctgcttctatagacaggtgtgacgcggcacctggcttcgagaagcaaatgttccgggaatggctgagatccatgctgagagaacatggaggtcccttttttgatgcttttagatcaaaacaccctgaaaggacaggagcatatacttgttttaatcaaaaaattggtgcagaagagtataattatggttctagaatagaccacattctcatttccggttcctgtctccatcgctgtgattctgtggaggaccatagcattttttgttgccatgtagaagaatgtgagataatgaatcatttcaaaagagggaattctgaaaatttatcaaagtggaaagggggaagaagcagtaagctagaaggatctgatcatattccagtttatattttactgaaagaaatacctgaacttccggtccataatatcccaccatcagctgcaagatatcttccagagatccgtggaaggcaacaaagtatagtatcgttccttgataaagggaaaatttatgagctgcaaaatgctgcaaatttgattcaatctgaagatacagtacttgatagttactgtagtgatggcttggaaaatacaattctagctaagaaaggactggcaactggtataactgagtttgcaaaaggtggtaaccttcctagtttgatgtgcaaggggacagatctgaatcaatggataaatgaaggtttaatgggcatctctcatgtcagccagaaaaaatcactgtctagtaccaagtttgtgccacaaaagaaaattaaacgcaacttatcatcccaaccaacaatcaagtcattttttcaaagaccagggtcaaagacagtaaatgctagtaccagtaccttagttactccagcagaaacattagaccttacaaatcaagcatgtgtttcaaatggtgatacactgcctgaaaacatgcagtgcacaacttcagctgcaaaagttcaggataacacagatgcatcgtcatgttcactttcaacagacaagtctaatgctgcagcattggagtggcagaggatacagaaaaagatgaagatgacactaccacgttgcaaagggcatagtgaaccatgcattccgaggtctgtgaagaagggccctaatataggccgtttgttctatgtctgtgctcgtgctcagggacctgcatcaaatccagaagccaattgtggccactttcagtgggcacctggaaagtctaaagagaagagctctaaagagaaacgtctgtgacttcatttttctcccaggaatccaggacattttgcttccaatgagtctggtacatcaccttgtcccagcatactgatgacgtggcgatgtatttgtggagaggtaagctgatcaagggcctgtttgggaggtctggctctgactggctccttgctctagtaaccggaggggccacaaaacgtgtcttcaccagctccccattgttttgaaaaggacagaaaacaacttcatgaacattgcagccacagtgccatggataagctacagtagcgcatcagctggaacagccaagagctgtcccaaacgtggcctgaacaagcacttctctcaggcaggtacatattctaatcctgtaattagttggttgacactaacatgcagccttccgttggttggctaacaactaagggcttgttcggttagctctcaatccatacgtacggattgagtaggattgggtgcgtttaaattccaagcaagtcaaacttctttttaattttttctaatctctcagggatcttctcagaagttatttatttttccgcctggtttagcgtattcaaattcttaatagacaagtcacaagtggccatcagtggagaaatcttacagtcctgtagtaatgttttatatgaaaactaatatggacattatagtattattgcccatatctccccagaaataaagtgccagtcgtgtaagtttttgtttctttcctttttcaaaacaacgagaaagagcatatattaggcaagaattaacatcgtctgcccgtagcttatgtcaaccactgttttgagtgaatttgtatggttgatgaagctatgtgtgc

SEQ ID NO: 69620 - DNA, 2697 bp, Zea Mays
cgggagccaccaccggttcgtgtcgggaccggaaaccacgatcagccttgcacagttcccggcttccagccgccgccgccgcggggagcaccggccgttggttcttcgtctccgccccgcttgcgagaagagcgacgcgtttccccttcgaaccctcgtgtatcgtgggtcatggtgacgcctcgtggtagcggcgggagatggtgaagatagtgacgtacaacgtgaatgggctgcggccgcgggtggcgcagcacggctcgctccgctgcctcctcgacgccctcgatgccgacatcatctgcttccaggagaccaaattgtcaaggcaggacctatctgcggatgtaattatggctgatggatatgaggcttttgtttcatgcaaccgctcttcaaaaggccgtggagcatactctggtgttgcaacattttgccgagtaacatcatcattttccagccaggaggttgctttgccagtagcagctgaagaaggctttactggacttcaggactatgcaaaaaatagtcaaactgttggggatttcagtattgcaatgcctgttgaggaggagggtcttggtgaactcacaagagaggacctcttaagggtggacaatgaggggcggtgcatcatcactgatcatggacattttgttcttttcaacatatacggcccagctgttgacggagatgataaagagcgtgttcgttttaagctactattttacaagatactgcagaaaagatgggaacgtctattggctcttggaaagagagtttttgttgttggtgatttgaatattgctcctgcttctatagacaggtgtgacgcggcacctggcttcgagaagcaaatgttccgggaatggctgagatccatgctgagagaacatggaggtcccttttttgatgcttttagatcaaaacaccctgaaaggtggaaagggggaagaagcagtaagctagaaggatctgatcatattccagtttatattttactgaaagaaatacctgaacttccggtccataatatcccaccatcagctgcaagatatcttccagagatccgtggaaggcaacaaagtatagtatcgttccttgataaagggaaaatttatgagctgcaaaatgctgcaaatttgattcaatctgaagatacagtacttgatagttactgtagtgatggcttggaaaatacaattctagctaagaaaggactggcaactggtataactgagtttgcaaaaggtggtaaccttcctagtttgatgtgcaaggggacagatctgaatcaatggataaatgaaggtttaatgggcatctctcatgtcagccagaaaaaatcactgtctagtaccaagtttgtgccacaaaagaaaattaaacgcaacttatcatcccaaccaacaatcaagtcattttttcaaagaccagggtcaaagacagtaaatgctagtaccagtaccttagttactccagcagaaacattagaccttacaaatcaagcatgtgtttcaaatggtgatacactgcctgaaaacatgcagtgcacaacttcagctgcaaaagttcaggataacacagatgcatcgtcatgttcactttcaacagacaagtctaatgctgcagcattggagtggcagaggatacagaaaaagatgaagatgacactaccacgttgcaaagggcatagtgaaccatgcattccgaggtctgtgaagaagggccctaatataggccgtttgttctatgtctgtgctcgtgctcagggacctgcatcaaatccagaagccaattgtggccactttcagtgggcacctggaaagtctaaagagaagagctctaaagagaaacgtctgtgacttcatttttctcccaggaatccaggacattttgcttccaatgagtctggtacatcaccttgtcccagcatactgatgacgtggcgatgtatttgtggagaggtaagctgatcaagggcctgtttgggaggtctggctctgactggctccttgctctagtaaccggaggggccacaaaacgtgtcttcaccagctccccattgttttgaaaaggacagaaaacaacttcatgaacattgcagccacagtgccatggataagctacagtagcgcatcagctggaacagccaagagctgtcccaaacgtggcctgaacaagcacttctctcaggcaggtacatattctaatcctgtaattagttggttgacactaacatgcagccttccgttggttggctaacaactaagggcttgttcggttagctctcaatccatacgtacggattgagtaggattgggtgcgtttaaattccaagcaagtcaaacttctttttaattttttctaatctctcagggatcttctcagaagttatttatttttccgcctggtttagcgtattcaaattcttaatagacaagtcacaagtggccatcagtggagaaatcttacagtcctgtagtaatgttttatatgaaaactaatatggacattatagtattattgcccatatctccccagaaataaagtgccagtcgtgtaagtttttgtttctttcctttttcaaaacaacgagaaagagcatatattaggcaagaattaacatcgtctgcccgtagcttatgtcaaccactgttttgagtgaatttgtatggttgatgaagctatgtgtgc

SEQ ID NO: 69621 - DNA, 2814 bp, Zea Mays
cgggagccaccaccggttcgtgtcgggaccggaaaccacgatcagccttgcacagttcccggcttccagccgccgccgccgcggggagcaccggccgttggttcttcgtctccgccccgcttgcgagaagagcgacgcgtttccccttcgaaccctcgtgtatcgtgggtcatggtgacgcctcgtggtagcggcgggagatggtgaagatagtgacgtacaacgtgaatgggctgcggccgcgggtggcgcagcacggctcgctccgctgcctcctcgacgccctcgatgccgacatcatctgcttccaggagaccaaattgtcaaggcaggacctatctgcggatgtaattatggctgatggatatgaggcttttgtttcatgcaaccgctcttcaaaaggccgtggagcatactctggtgttgcaacattttgccgagtaacatcatcattttccagccaggaggttgctttgccagtagcagctgaagaaggctttactggacttcaggactatgcaaaaaatagtcaaactgttggggatttcagtattgcaatgcctgttgaggaggagggtcttggtgaactcacaagagaggacctcttaagggtggacaatgaggggcggtgcatcatcactgatcatggacattttgttcttttcaacatatacggcccagctgttgacggagatgataaagagcgtgttcgttttaagctactattttacaagatactgcagacaggtgtgacgcggcacctggcttcgagaagcaaatgttccgggaatggctgagatccatgctgagagaacatggaggtcccttttttgatgcttttagatcaaaacaccctgaaaggagcatatacttgttttaatcaaaaaattggtgcagaagagtataattatggttctagaatagaccacattctcatttccggttcctgtctccatcgctgtgattctgtggaggaccatagcattttttgttgccatgtagaagaatgtgagataatgaatcatttcaaaagagggaattctgaaaatttatcaaagtggaaagggggaagaagcagtaagctagaaggatctgatcatattccagtttatattttactgaaagaaatacctgaacttccggtccataatatcccaccatcagctgcaagatatcttccagagatccgtggaaggcaacaaagtatagtatcgttccttgataaagggaaaatttatgagctgcaaaatgctgcaaatttgattcaatctgaagatacagtacttgatagttactgtagtgatggcttggaaaatacaattctagctaagaaaggactggcaactggtataactgagtttgcaaaaggtggtaaccttcctagtttgatgtgcaaggggacagatctgaatcaatggataaatgaaggtttaatgggcatctctcatgtcagccagaaaaaatcactgtctagtaccaagtttgtgccacaaaagaaaattaaacgcaacttatcatcccaaccaacaatcaagtcattttttcaaagaccagggtcaaagacagtaaatgctagtaccagtaccttagttactccagcagaaacattagaccttacaaatcaagcatgtgtttcaaatggtgatacactgcctgaaaacatgcagtgcacaacttcagctgcaaaagttcaggataacacagatgcatcgtcatgttcactttcaacagacaagtctaatgctgcagcattggagtggcagaggatacagaaaaagatgaagatgacactaccacgttgcaaagggcatagtgaaccatgcattccgaggtctgtgaagaagggccctaatataggccgtttgttctatgtctgtgctcgtgctcagggacctgcatcaaatccagaagccaattgtggccactttcagtgggcacctggaaagtctaaagagaagagctctaaagagaaacgtctgtgacttcatttttctcccaggaatccaggacattttgcttccaatgagtctggtacatcaccttgtcccagcatactgatgacgtggcgatgtatttgtggagaggtaagctgatcaagggcctgtttgggaggtctggctctgactggctccttgctctagtaaccggaggggccacaaaacgtgtcttcaccagctccccattgttttgaaaaggacagaaaacaacttcatgaacattgcagccacagtgccatggataagctacagtagcgcatcagctggaacagccaagagctgtcccaaacgtggcctgaacaagcacttctctcaggcaggtacatattctaatcctgtaattagttggttgacactaacatgcagccttccgttggttggctaacaactaagggcttgttcggttagctctcaatccatacgtacggattgagtaggattgggtgcgtttaaattccaagcaagtcaaacttctttttaattttttctaatctctcagggatcttctcagaagttatttatttttccgcctggtttagcgtattcaaattcttaatagacaagtcacaagtggccatcagtggagaaatcttacagtcctgtagtaatgttttatatgaaaactaatatggacattatagtattattgcccatatctccccagaaataaagtgccagtcgtgtaagtttttgtttctttcctttttcaaaacaacgagaaagagcatatattaggcaagaattaacatcgtctgcccgtagcttatgtcaaccactgttttgagtgaatttgtatggttgatgaagctatgtgtgc

SEQ ID NO: 69622 - DNA, 2819 bp, Zea Mays
cgggagccaccaccggttcgtgtcgggaccggaaaccacgatcagccttgcacagttcccggcttccagccgccgccgccgcggggagcaccggccgttggttcttcgtctccgccccgcttgcgagaagagcgacgcgtttccccttcgaaccctcgtgtatcgtgggtcatggtgacgcctcgtggtagcggcgggagatggtgaagatagtgacgtacaacgtgaatgggctgcggccgcgggtggcgcagcacggctcgctccgctgcctcctcgacgccctcgatgccgacatcatctgcttccaggagaccaaattgtcaaggcaggacctatctgcggatgtaattatggctgatggatatgaggcttttgtttcatgcaaccgctcttcaaaaggccgtggagcatactctggtgttgcaacattttgccgagtaacatcatcattttccagccaggaggttgctttgccagtagcagctgaagaaggctttactggacttcaggactatgcaaaaaatagtcaaactgttggggatttcagtattgcaatgcctgttgaggaggagggtcttggtgaactcacaagagaggacctcttaagggtggacaatgaggggcggtgcatcatcactgatcatggacattttgttcttttcaacatatacggcccagctgttgacggagatgataaagagcgtgttcgttttaagctactattttacaagatactgcagacaggtgtgacgcggcacctggcttcgagaagcaaatgttccgggaatggctgagatccatgctgagagaacatggaggtcccttttttgatgcttttagatcaaaacaccctgaaaggacaggagcatatacttgttttaatcaaaaaattggtgcagaagagtataattatggttctagaatagaccacattctcatttccggttcctgtctccatcgctgtgattctgtggaggaccatagcattttttgttgccatgtagaagaatgtgagataatgaatcatttcaaaagagggaattctgaaaatttatcaaagtggaaagggggaagaagcagtaagctagaaggatctgatcatattccagtttatattttactgaaagaaatacctgaacttccggtccataatatcccaccatcagctgcaagatatcttccagagatccgtggaaggcaacaaagtatagtatcgttccttgataaagggaaaatttatgagctgcaaaatgctgcaaatttgattcaatctgaagatacagtacttgatagttactgtagtgatggcttggaaaatacaattctagctaagaaaggactggcaactggtataactgagtttgcaaaaggtggtaaccttcctagtttgatgtgcaaggggacagatctgaatcaatggataaatgaaggtttaatgggcatctctcatgtcagccagaaaaaatcactgtctagtaccaagtttgtgccacaaaagaaaattaaacgcaacttatcatcccaaccaacaatcaagtcattttttcaaagaccagggtcaaagacagtaaatgctagtaccagtaccttagttactccagcagaaacattagaccttacaaatcaagcatgtgtttcaaatggtgatacactgcctgaaaacatgcagtgcacaacttcagctgcaaaagttcaggataacacagatgcatcgtcatgttcactttcaacagacaagtctaatgctgcagcattggagtggcagaggatacagaaaaagatgaagatgacactaccacgttgcaaagggcatagtgaaccatgcattccgaggtctgtgaagaagggccctaatataggccgtttgttctatgtctgtgctcgtgctcagggacctgcatcaaatccagaagccaattgtggccactttcagtgggcacctggaaagtctaaagagaagagctctaaagagaaacgtctgtgacttcatttttctcccaggaatccaggacattttgcttccaatgagtctggtacatcaccttgtcccagcatactgatgacgtggcgatgtatttgtggagaggtaagctgatcaagggcctgtttgggaggtctggctctgactggctccttgctctagtaaccggaggggccacaaaacgtgtcttcaccagctccccattgttttgaaaaggacagaaaacaacttcatgaacattgcagccacagtgccatggataagctacagtagcgcatcagctggaacagccaagagctgtcccaaacgtggcctgaacaagcacttctctcaggcaggtacatattctaatcctgtaattagttggttgacactaacatgcagccttccgttggttggctaacaactaagggcttgttcggttagctctcaatccatacgtacggattgagtaggattgggtgcgtttaaattccaagcaagtcaaacttctttttaattttttctaatctctcagggatcttctcagaagttatttatttttccgcctggtttagcgtattcaaattcttaatagacaagtcacaagtggccatcagtggagaaatcttacagtcctgtagtaatgttttatatgaaaactaatatggacattatagtattattgcccatatctccccagaaataaagtgccagtcgtgtaagtttttgtttctttcctttttcaaaacaacgagaaagagcatatattaggcaagaattaacatcgtctgcccgtagcttatgtcaaccactgttttgagtgaatttgtatggttgatgaagctatgtgtgc

SEQ ID NO: 69623 - DNA, 2866 bp, Zea Mays
cgggagccaccaccggttcgtgtcgggaccggaaaccacgatcagccttgcacagttcccggcttccagccgccgccgccgcggggagcaccggccgttggttcttcgtctccgccccgcttgcgagaagagcgacgcgtttccccttcgaaccctcgtgtatcgtgggtcatggtgacgcctcgtggtagcggcgggagatggtgaagatagtgacgtacaacgtgaatgggctgcggccgcgggtggcgcagcacggctcgctccgctgcctcctcgacgccctcgatgccgacatcatctgcttccaggagaccaaattgtcaaggcaggacctatctgcggatgtaattatggctgatggatatgaggcttttgtttcatgcaaccgctcttcaaaaggccgtggagcatactctggtgttgcaacattttgccgagtaacatcatcattttccagccaggaggttgctttgccagtagcagctgaagaaggctttactggacttcaggactatgcaaaaaatagtcaaactgttggggatttcagtattgcaatgcctgttgaggaggagggtcttggtgaactcacaagagaggacctcttaagggtggacaatgaggggcggtgcatcatcactgatcatggacattttgctgttgacggagatgataaagagcgtgttcgttttaagctactattttacaagatactgcagaaaagatgggaacgtctattggctcttggaaagagagtttttgttgttggtgatttgaatattgctcctgcttctatagacaggtgtgacgcggcacctggcttcgagaagcaaatgttccgggaatggctgagatccatgctgagagaacatggaggtcccttttttgatgcttttagatcaaaacaccctgaaaggacaggagcatatacttgttttaatcaaaaaattggtgcagaagagtataattatggttctagaatagaccacattctcatttccggttcctgtctccatcgctgtgattctgtggaggaccatagcattttttgttgccatgtagaagaatgtgagataatgaatcatttcaaaagagggaattctgaaaatttatcaaagtggaaagggggaagaagcagtaagctagaaggatctgatcatattccagtttatattttactgaaagaaatacctgaacttccggtccataatatcccaccatcagctgcaagatatcttccagagatccgtggaaggcaacaaagtatagtatcgttccttgataaagggaaaatttatgagctgcaaaatgctgcaaatttgattcaatctgaagatacagtacttgatagttactgtagtgatggcttggaaaatacaattctagctaagaaaggactggcaactggtataactgagtttgcaaaaggtggtaaccttcctagtttgatgtgcaaggggacagatctgaatcaatggataaatgaaggtttaatgggcatctctcatgtcagccagaaaaaatcactgtctagtaccaagtttgtgccacaaaagaaaattaaacgcaacttatcatcccaaccaacaatcaagtcattttttcaaagaccagggtcaaagacagtaaatgctagtaccagtaccttagttactccagcagaaacattagaccttacaaatcaagcatgtgtttcaaatggtgatacactgcctgaaaacatgcagtgcacaacttcagctgcaaaagttcaggataacacagatgcatcgtcatgttcactttcaacagacaagtctaatgctgcagcattggagtggcagaggatacagaaaaagatgaagatgacactaccacgttgcaaagggcatagtgaaccatgcattccgaggtctgtgaagaagggccctaatataggccgtttgttctatgtctgtgctcgtgctcagggacctgcatcaaatccagaagccaattgtggccactttcagtgggcacctggaaagtctaaagagaagagctctaaagagaaacgtctgtgacttcatttttctcccaggacattttgcttccaatgagtctggtacatcaccttgtcccagcatactgatgacgtggcgatgtatttgtggagaggtaagctgatcaagggcctgtttgggaggtctggctctgactggctccttgctctagtaaccggaggggccacaaaacgtgtcttcaccagctccccattgttttgaaaaggacagaaaacaacttcatgaacattgcagccacagtgccatggataagctacagtagcgcatcagctggaacagccaagagctgtcccaaacgtggcctgaacaagcacttctctcaggcaggtacatattctaatcctgtaattagttggttgacactaacatgcagccttccgttggttggctaacaactaagggcttgttcggttagctctcaatccatacgtacggattgagtaggattgggtgcgtttaaattccaagcaagtcaaacttctttttaattttttctaatctctcagggatcttctcagaagttatttatttttccgcctggtttagcgtattcaaattcttaatagacaagtcacaagtggccatcagtggagaaatcttacagtcctgtagtaatgttttatatgaaaactaatatggacattatagtattattgcccatatctccccagaaataaagtgccagtcgtgtaagtttttgtttctttcctttttcaaaacaacgagaaagagcatatattaggcaagaattaacatcgtctgcccgtagcttatgtcaaccactgttttgagtgaatttgtatggttgatgaagctatgtgtgc

SEQ ID NO: 69624 - DNA, 2700 bp, Zea Mays
gtttggttcgggagccaccaccggttcgtgtcgggaccggaaaccacgatcagccttgcacagttcccggcttccagccgccgccgccgcggggagcaccggccgttggttcttcgtctccgccccgcttgcgagaagagcgacgcgtttccccttcgaaccctcgtgtatcgtgggtcatggtgacgcctcgtggtagcggcgggagatggtgaagatagtgacgtacaacgtgaatgggctgcggccgcgggtggcgcagcacggctcgctccgctgcctcctcgacgccctcgatgccgacatcatctgcttccaggagaccaaattgtcaaggcaggacctatctgcggatgtaattatggctgatggatatgaggcttttgtttcatgcaaccgctcttcaaaaggccgtggagcatactctggtgttgcaacattttgccgagtaacatcatcattttccagccaggaggttgctttgccagtagcagctgaagaaggctttactggacttcaggactatgcaaaaaatagtcaaactgttggggatttcagtattgcaatgcctgttgaggaggagggtcttggtgaactcacaagagaggacctcttaagggtggacaatgaggggcggtgcatcatcactgatcatggacattttgttcttttcaacatatacggcccagctgttgacggagatgataaagagcgtgttcgttttaagctactattttacaagatactgcagatgggaacgtctattggctcttggaaagagagtttttgttgttggtgatttgaatattgctcctgcttctatagacaggtgtgacgcggcacctggcttcgagaagcaaatgttccgggaatggctgagatccatgctgagagaacatggaggtcccttttttgatgcttttagatcaaaacaccctgaaaggtggaaagggggaagaagcagtaagctagaaggatctgatcatattccagtttatattttactgaaagaaatacctgaacttccggtccataatatcccaccatcagctgcaagatatcttccagagatccgtggaaggcaacaaagtatagtatcgttccttgataaagggaaaatttatgagctgcaaaatgctgcaaatttgattcaatctgaagatacagtacttgatagttactgtagtgatggcttggaaaatacaattctagctaagaaaggactggcaactggtataactgagtttgcaaaaggtggtaaccttcctagtttgatgtgcaaggggacagatctgaatcaatggataaatgaaggtttaatgggcatctctcatgtcagccagaaaaaatcactgtctagtaccaagtttgtgccacaaaagaaaattaaacgcaacttatcatcccaaccaacaatcaagtcattttttcaaagaccagggtcaaagacagtaaatgctagtaccagtaccttagttactccagcagaaacattagaccttacaaatcaagcatgtgtttcaaatggtgatacactgcctgaaaacatgcagtgcacaacttcagctgcaaaagttcaggataacacagatgcatcgtcatgttcactttcaacagacaagtctaatgctgcagcattggagtggcagaggatacagaaaaagatgaagatgacactaccacgttgcaaagggcatagtgaaccatgcattccgaggtctgtgaagaagggccctaatataggccgtttgttctatgtctgtgctcgtgctcagggacctgcatcaaatccagaagccaattgtggccactttcagtgggcacctggaaagtctaaagagaagagctctaaagagaaacgtctgtgacttcatttttctcccaggaatccaggacattttgcttccaatgagtctggtacatcaccttgtcccagcatactgatgacgtggcgatgtatttgtggagaggtaagctgatcaagggcctgtttgggaggtctggctctgactggctccttgctctagtaaccggaggggccacaaaacgtgtcttcaccagctccccattgttttgaaaaggacagaaaacaacttcatgaacattgcagccacagtgccatggataagctacagtagcgcatcagctggaacagccaagagctgtcccaaacgtggcctgaacaagcacttctctcaggcaggtacatattctaatcctgtaattagttggttgacactaacatgcagccttccgttggttggctaacaactaagggcttgttcggttagctctcaatccatacgtacggattgagtaggattgggtgcgtttaaattccaagcaagtcaaacttctttttaattttttctaatctctcagggatcttctcagaagttatttatttttccgcctggtttagcgtattcaaattcttaatagacaagtcacaagtggccatcagtggagaaatcttacagtcctgtagtaatgttttatatgaaaactaatatggacattatagtattattgcccatatctccccagaaataaagtgccagtcgtgtaagtttttgtttctttcctttttcaaaacaacgagaaagagcatatattaggcaagaattaacatcgtctgcccgtagcttatgtcaaccactgttttgagtgaatttgtatggttgatgaagctatgtgtgc

SEQ ID NO: 69625 - DNA, 2907 bp, Zea Mays
gtttggttcgggagccaccaccggttcgtgtcgggaccggaaaccacgatcagccttgcacagttcccggcttccagccgccgccgccgcggggagcaccggccgttggttcttcgtctccgccccgcttgcgagaagagcgacgcgtttccccttcgaaccctcgtgtatcgtgggtcatggtgacgcctcgtggtagcggcgggagatggtgaagatagtgacgtacaacgtgaatgggctgcggccgcgggtggcgcagcacggctcgctccgctgcctcctcgacgccctcgatgccgacatcatctgcttccaggagaccaaattgtcaaggcaggacctatctgcggatgtaattatggctgatggatatgaggcttttgtttcatgcaaccgctcttcaaaaggccgtggagcatactctggtgttgcaacattttgccgagtaacatcatcattttccagccaggaggttgctttgccagtagcagctgaagaaggctttactggacttcaggactatgcaaaaaatagtcaaactgttggggatttcagtattgcaatgcctgttgaggaggagggtcttggtgaactcacaagagaggacctcttaagggtggacaatgaggggcggtgcatcatcactgatcatggacattttgttcttttcaacatatacggcccagctgttgacggagatgataaagagcgtgttcgttttaagctactattttacaagatactgcagaaaagatgggaacgtctattggctcttggaaagagagtttttgttgttggtgatttgaatattgctcctgcttctatagacaggtgtgacgcggcacctggcttcgagaagcaaatgttccgggaatggctgagatccatgctgagagaacatggaggtcccttttttgatgcttttagatcaaaacaccctgaaaggacaggagcatatacttgttttaatcaaaaaattggtgcagaagagtataattatggttctagaatagaccacattctcatttccggttcctgtctccatcgctgtgattctgtggaggaccatagcattttttgttgccatgtagaagaatgtgagataatgaatcatttcaaaagagggaattctgaaaatttatcaaagtggaaagggggaagaagcagtaagctagaaggatctgatcatattccagtttatattttactgaaagaaatacctgaacttccggtccataatatcccaccatcagctgcaagatatcttccagagatccgtggaaggcaacaaagtatagtatcgttccttgataaagggaaaatttatgagctgcaaaatgctgcaaatttgattcaatctgaagatacagtacttgatagttactgtagtgatggcttggaaaatacaattctagctaagaaaggactggcaactggtataactgagtttgcaaaaggtggtaaccttcctagtttgatgtgcaaggggacagatctgaatcaatggataaatgaaggtttaatgggcatctctcatgtcagccagaaaaaatcactgtctagtaccaagtttgtgccacaaaagaaaattaaacgcaacttatcatcccaaccaacaatcaagtcattttttcaaagaccagggtcaaagacagtaaatgctagtaccagtaccttagttactccagcagaaacattagaccttacaaatcaagcatgtgtttcaaatggtgatacactgcctgaaaacatgcagtgcacaacttcagctgcaaaagttcaggataacacagatgcatcgtcatgttcactttcaacagacaagtctaatgctgcagcattggagtggcagaggatacagaaaaagatgaagatgacactaccacgttgcaaagggcatagtgaaccatgcattccgaggtctgtgaagaagggccctaatataggccgtttgttctatgtctgtgctcgtgctcagggacctgcatcaaatccagaagccaattgtggccactttcagtgggcacctggaaagtctaaagagaagagctctaaagagaaacgtctgtgacttcatttttctcccagggaatccaggacattttgcttccaatgagtctggtacatcaccttgtcccagcatactgatgacgtggcgatgtatttgtggagaggtaagctgatcaagggcctgtttgggaggtctggctctgactggctccttgctctagtaaccggaggggccacaaaacgtgtcttcaccagctccccattgttttgaaaaggacagaaaacaacttcatgaacattgcagccacagtgccatggataagctacagtagcgcatcagctggaacagccaagagctgtcccaaacgtggcctgaacaagcacttctctcaggcaggtacatattctaatcctgtaattagttggttgacactaacatgcagccttccgttggttggctaacaactaagggcttgttcggttagctctcaatccatacgtacggattgagtaggattgggtgcgtttaaattccaagcaagtcaaacttctttttaattttttctaatctctcagggatcttctcagaagttatttatttttccgcctggtttagcgtattcaaattcttaatagacaagtcacaagtggccatcagtggagaaatcttacagtcctgtagtaatgttttatatgaaaactaatatggacattatagtattattgcccatatctccccagaaataaagtgccagtcgtgtaagtttttgtttctttcctttttcaaaacaacgagaaagagcatatattaggcaagaattaacatcgtctgcccgtagcttatgtcaaccactgttttgagtgaatttgtatggttgatgaagctatgtgtgc

SEQ ID NO: 69626 - DNA, 2609 bp, Zea Mays
gggggtgtttggttcgggagccaccaccggttcgtgtcgggaccggaaaccacgatcagccttgcacagttcccggcttccagccgccgccgccgcggggagcaccggccgttggttcttcgtctccgccccgcttgcgagaagagcgacgcgtttccccttcgaaccctcgtgtatcgtgggtcatggtgacgcctcgtggtagcggcgggagatggtgaagatagtgacgtacaacgtgaatgggctgcggccgcgggtggcgcagcacggctcgctccgctgcctcctcgacgccctcgatgccgacatcatctgcttccaggagaccaaattgtcaaggcaggacctatctgcggatgtaattatggctgatggatatgaggcttttgtttcatgcaaccgctcttcaaaaggccgtggagcatactctggtgttgcaacattttgccgagtaacatcatcattttccagccaggaggttgctttgccagtagcagctgaagaaggctttactggacttcaggactatgcaaaaaatagtcaaactgttggggatttcagtattgcaatgcctgttgaggaggagggtcttggtgaactcacaagagaggacctcttaagggtggacaatgaggggcggtgcatcatcactgatcatggacattttgttcttttcaacatatacggcccagctgttgacggagatgataaagagcgtgttcgttttaagctactattttacaagatactgcagaaaagatgggaacgtctattggctcttggaaagagagtttttgttgttggtgatttgaatattgctcctgcttctatagacaggtgtgacgcggcacctggcttcgagaagcaaatgttccgggaatggctgagatccatgctgagagaacatggaggtcccttttttgatgcttttagatcaaaacaccctgaaaggacaggagcatatacttgttttaatcaaaaaattggtgcagaagagtataattatggttctagaatagaccacattctcatttccggttcctgtctccatcgctgtgattctgtggaggaccatagcattttttgttgccatgtagaagaatgtgagataatgaatcatttcaaaagagggaattctgaaaatttatcaaagtggaaagggggaagaagcagtaagctagaaggatctgatcatattccagtttatattttactgaaagaaatacctgaacttccggtccataatatcccaccatcagctgcaagatatcttccagagatccgtggaaggcaacaaagtatagtatcgttccttgataaagggaaaatttatgagctgcaaaatgctgcaaatttgattcaatctgaagatacagtacttgatagttactgtagtgatggcttggaaaatacaattctagctaagaaaggactggcaactggtataactgagtttgcaaaaggtggtaaccttcctagtttgatgtgcaaggggacagatctgaatcaatggataaatgaaggtttaatgggcatctctcatgtcagccagaaaaaatcactgtctagtaccaagtttgtgccacaaaagaaaattaaacgcaacttatcatcccaaccaacaatcaagtcattttttcaaagaccagggtcaaagacagtaaatgctagtaccagtaccttagttactccagcagaaacattagaccttacaaatcaagcatgtgtttcaaatggtgatacactgcctgaaaacatgcagtgcacaacttcagctgcaaaagttcaggataacacagatgcatcgtcatgttcactttcaacagacaagtctaatgctgcagcattggagtggcagaggatacagaaaaagatgaagatgacactaccacgttgcaaagggcatagtgaaccatgcattccgaggtctgtgaagaagggccctaatataggccgtttgttctatgtctgtgctcgtgctcagggacctgcatcaaatccagaagccaattgtggccactttcagtgggcacctggaaagtctaaagagaagagctctaaagagaaacgtctgtgacttcatttttctcccaggacattttgcttccaatgagtctggtacatcaccttgtcccagcatactgatgacgtggcgatgtatttgtggagagaaaacaacttcatgaacattgcagccacagtgccatggataagctacagtagcgcatcagctggaacagccaagagctgtcccaaacgtggcctgaacaagcacttctctcaggcagggatcttctcagaagttatttatttttccgcctggtttagcgtattcaaattcttaatagacaagtcacaagtggccatcagtggagaaatcttacagtcctgtagtaatgttttatatgaaaactaatatggacattatagtattattgcccatatctccccagaaataaagtgccagtcgtgtaagtttttgtttctttcctttttcaaaacaacgagaaagagcatatattaggcaagaattaacatcgtctgcccgtagcttatgtcaaccactgttttgagtgaatttgtatggttgatgaagctatgtgtgc

SEQ ID NO: 69627 - DNA, 2742 bp, Zea Mays
aaatttctagttttgggggtgtttggttcgggagccaccaccggttcgtgtcgggaccggaaaccacgatcagccttgcacagttcccggcttccagccgccgccgccgcggggagcaccggccgttggttcttcgtctccgccccgcttgcgagaagagcgacgcgtttccccttcgaaccctcgtgtatcgtgggtcatggtgacgcctcgtggtagcggcgggagatggtgaagatagtgacgtacaacgtgaatgggctgcggccgcgggtggcgcagcacggctcgctccgctgcctcctcgacgccctcgatgccgacatcatctgcttccaggagaccaaattgtcaaggcaggacctatctgcggatgtaattatggctgatggatatgaggcttttgtttcatgcaaccgctcttcaaaaggccgtggagcatactctggtgttgcaacattttgccgagtaacatcatcattttccagccaggaggttgctttgccagtagcagctgaagaaggctttactggacttcaggactatgcaaaaaatagtcaaactgttggggatttcagtattgcaatgcctgttgaggaggagggtcttggtgaactcacaagagaggacctcttaagggtggacaatgaggggcggtgcatcatcactgatcatggacattttgttcttttcaacatatacggcccagctgttgacggagatgataaagagcgtgttcgttttaagctactattttacaagatactgcagatgggaacgtctattggctcttggaaagagagtttttgttgttggtgatttgaatattgctcctgcttctatagacaggtgtgacgcggcacctggcttcgagaagcaaatgttccgggaatggctgagatccatgctgagagaacatggaggtcccttttttgatgcttttagatcaaaacaccctgaaaggacaggagcatatacttgttttaatcaaaaaattggtgcagaagagtataattatggttctagaatagaccacattctcatttccggttcctgtctccatcgctgtgattctgtggaggaccatagcattttttgttgccatgtagaagaatgtgagataatgaatcatttcaaaagagggaattctgaaaatttatcaaagtggaaagggggaagaagcagtaagctagaaggatctgatcatattccagtttatattttactgaaagaaatacctgaacttccggtccataatatcccaccatcagctgcaagatatcttccagagatccgtggaaggcaacaaagtatagtatcgttccttgataaagggaaaatttatgagctgcaaaatgctgcaaatttgattcaatctgaagatacagtacttgatagttactgtagtgatggcttggaaaatacaattctagctaagaaaggactggcaactggtataactgagtttgcaaaaggtggtaaccttcctagtttgatgtgcaaggggacagatctgaatcaatggataaatgaaggtttaatgggcatctctcatgtcagccagaaaaaatcactgtctagtaccaagtttgtgccacaaaagaaaattaaacgcaacttatcatcccaaccaacaatcaagtcattttttcaaagaccagggtcaaagacagtaaatgctagtaccagtaccttagttactccagcagaaacattagaccttacaaatcaagcatgtgtttcaaatggtgatacactgcctgaaaacatgcagtgcacaacttcagctgcaaaagttcaggataacacagatgcatcgtcatgttcactttcaacagacaagtctaatgctgcagcattggagtggcagaggatacagaaaaagatgaagatgacactaccacgttgcaaagggcatagtgaaccatgcattccgaggtctgtgaagaagggccctaatataggccgtttgttctatgtctgtgctcgtgctcagggacctgcatcaaatccagaagccaattgtggccactttcagtgggcacctggaaagtctaaagagaagagctctaaagagaaacgtctgtgacttcatttttctcccaggaatccaggacattttgcttccaatgagtctggtacatcaccttgtcccagcatactgatgacgtggcgatgtatttgtggagaggtaagctgatcaagggcctgtttgggaggtctggctctgactggctccttgctctagtaaccggaggggccacaaaacgtgtcttcaccagctccccattgttttgaaaaggacagaaaacaacttcatgaacattgcagccacagtgccatggataagctacagtagcgcatcagctggaacagccaagagctgtcccaaacgtggcctgaacaagcacttctctcaggcagggatcttctcagaagttatttatttttccgcctggtttagcgtattcaaattcttaatagacaagtcacaagtggccatcagtggagaaatcttacagtcctgtagtaatgttttatatgaaaactaatatggacattatagtattattgcccatatctccccagaaataaagtgccagtcgtgtaagtttttgtttctttcctttttcaaaacaacgagaaagagcatatattaggcaagaattaacatcgtctgcccgtagcttatgtcaaccactgttttgagtgaatttgtatggttgatgaagctatgtgtgc

SEQ ID NO: 69628 - DNA, 2748 bp, Zea Mays
caaatttctagttttgggggtgtttggttcgggagccaccaccggttcgtgtcgggaccggaaaccacgatcagccttgcacagttcccggcttccagccgccgccgccgcggggagcaccggccgttggttcttcgtctccgccccgcttgcgagaagagcgacgcgtttccccttcgaaccctcgtgtatcgtgggtcatggtgacgcctcgtggtagcggcgggagatggtgaagatagtgacgtacaacgtgaatgggctgcggccgcgggtggcgcagcacggctcgctccgctgcctcctcgacgccctcgatgccgacatcatctgcttccaggagaccaaattgtcaaggcaggacctatctgcggatgtaattatggctgatggatatgaggcttttgtttcatgcaaccgctcttcaaaaggccgtggagcatactctggtgttgcaacattttgccgagtaacatcatcattttccagccaggaggttgctttgccagtagcagctgaagaaggctttactggacttcaggactatgcaaaaaatagtcaaactgttggggatttcagtattgcaatgcctgttgaggaggagggtcttggtgaactcacaagagaggacctcttaagggtggacaatgaggggcggtgcatcatcactgatcatggacattttgttcttttcaacatatacggcccagctgttgacggagatgataaagagcgtgttcgttttaagctactattttacaagatactgcagaaaagatgggaacgtctattggctcttggaaagagagtttttgttgttggtgatttgaatattgctcctgcttctatagacaggtgtgacgcggcacctggcttcgagaagcaaatgttccgggaatggctgagatccatgctgagagaacatggaggtcccttttttgatgcttttagatcaaaacaccctgaaaggacaggagcatatacttgttttaatcaaaaaattggtgcagaagagtataattatggttctagaatagaccacattctcatttccggttcctgtctccatcgctgtgattctgtggaggaccatagcattttttgttgccatgtagaagaatgtgagataatgaatcatttcaaaagagggaattctgaaaatttatcaaagtggaaagggggaagaagcagtaagctagaaggatctgatcatattccagtttatattttactgaaagaaatacctgaacttccggtccataatatcccaccatcagctgcaagatatcttccagagatccgtggaaggcaacaaagtatagtatcgttccttgataaagggaaaatttatgagctgcaaaatgctgcaaatttgattcaatctgaagatacagtacttgatagttactgtagtgatggcttggaaaatacaattctagctaagaaaggactggcaactggtataactgagtttgcaaaaggtggtaaccttcctagtttgatgtgcaaggggacagatctgaatcaatggataaatgaaggtttaatgggcatctctcatgtcagccagaaaaaatcactgtctagtaccaagtttgtgccacaaaagaaaattaaacgcaacttatcatcccaaccaacaatcaagtcattttttcaaagaccagggtcaaagacagtaaatgctagtaccagtaccttagttactccagcagaaacattagaccttacaaatcaagcatgtgtttcaaatggtgatacactgcctgaaaacatgcagtgcacaacttcagctgcaaaagttcaggataacacagatgcatcgtcatgttcactttcaacagacaagtctaatgctgcagcattggagtggcagaggatacagaaaaagatgaagatgacactaccacgttgcaaagggcatagtgaaccatgcattccgaggtctgtgaagaagggccctaatataggccgtttgttctatgtctgtgctcgtgctcagggacctgcatcaaatccagaagccaattgtggccactttcagtgggcacctggaaagtctaaagagaagagctctaaagagaaacgtctgtgacttcatttttctcccaggaatccaggacattttgcttccaatgagtctggtacatcaccttgtcccagcatactgatgacgtggcgatgtatttgtggagaggtaagctgatcaagggcctgtttgggaggtctggctctgactggctccttgctctagtaaccggaggggccacaaaacgtgtcttcaccagctccccattgttttgaaaaggacagaaaacaacttcatgaacattgcagccacagtgccatggataagctacagtagcgcatcagctggaacagccaagagctgtcccaaacgtggcctgaacaagcacttctctcaggcagggatcttctcagaagttatttatttttccgcctggtttagcgtattcaaattcttaatagacaagtcacaagtggccatcagtggagaaatcttacagtcctgtagtaatgttttatatgaaaactaatatggacattatagtattattgcccatatctccccagaaataaagtgccagtcgtgtaagtttttgtttctttcctttttcaaaacaacgagaaagagcatatattaggcaagaattaacatcgtctgcccgtagcttatgtcaaccactgttttgagtgaatttgtatggttgatgaagctatgtgtgc

SEQ ID NO: 69629 - DNA, 1674 bp, Zea Mays
atctccacctatcaccttcgattcctcctaacctcgccggtccacctgcaaccgtgacggttcttgttcttcttcccacccagcgtgcgctccctcttcctcttccccttctctctcggcgacgactgggtggccgtagctgcctccatacgcctggtgccctggtcttcttcgggccattcgccggccgcgagcaccaccaaggagagcttcccaggtagagctgtttctccgtactctagcagatggcaaggataaagcctaagcaattgctaatccaaagcaaaacaaagaaggctccatctcgaatcagctactctactatcatcacatggaacttgattgtcatattggttgtgctatctctctatgctacctacagccattggcatcaaaggtctgcccaagacttcgaaatggagcttcatgaagctgagcttgctgtgagaccggaggatccaaaaatgataagtagaccaagatatgcggtaatgaacaccgcaaaaggcccaattactatagaaatatacaaagatgcttctgctgacgttgtggatagatttatcaacttgtgcaagagtaatcatttcaaaggaatgccatttcggcatatcataaaaaattttgtaattcaaggaggtgattttgattttgatggagcttcccaagaatggataacgaaagctaaagctagtggaaaaaatgatctcagtccaaaacatgaggcatttatgattgggactgcaaagaatcctaataccaaaggatttgatttgtttatcacgacggctccaattcctgacttgaatgacaagcttgttgtatttgggcgagttatcaagggagaggacatcgttcaggtgctttctgaatttctctttctgggatctttccaatctaaaaattcagccccacctcgcttggaaagatgttcgactttgtgtgccagaactgtgaggagcctttttgtctggtgataaagaaagaaccctgtttcatatacttatccttcagcatttgagcccaaatagatgtttcgaatcttgatttatagactagcaggtgttcaaaatgccaagttatagatatgaaaaagcccgaccaaattgaattcgtcatttacgccaggactgttggcatatgcacatggcccaggctgttgatgcattttgatttgggtgatatcactataatagttgcttattagattttgtttttgtctgcttgcttatgtgaacaggagattgaagaagtcgacactgatgagcattaccagccaaaggccgccataggcatcatcgatatcgtgctaaaacaggagccttgagcctggatgcacatgatgacgttaaccacatgccgacggacttttctgtagttggaaaatctatctcatcgagttggtttttgttttggtgccttattatgtgttgttgcgtggaaagcagttgtgacgcttgttccaggagtcgttgcagcagcgtttgtgtataaaatatattcacagggtttttggctgtcagcatgcgcgagcatatgctgctacaccttgtatcgtggttgtggtaacagtaagcaggctattctctgctattgctaccagtaatcggtttgggccttacgatttgcgaatgaatccaataaaatcagcgcacgtgcttctggtcgttgttt

SEQ ID NO: 69630 - DNA, 733 bp, Zea Mays
cacacttcaatctgtgatcttgcaggcaatatgtttcatttcgtttgctgatgttcaagccttttaatggggagattcttgttgggaggattactggatatgacgataagggattgcaggtttcacttgaattcttcagtgacatttgcatacctggacacttgatgcagtttggcacagtaaggggaccagatggtaggtggatgctgaagactgaattaggcgatgagctttatctagatctagatgacgagataaggttcttggtttctagcacaaaatacccgcctataccaattgatcaaaatgaggatgacccaccatttgctccaatgcagattgttggaagtattaaaggggatggccttggtcttcttgtttggtgggcagctgatgaagaggagggggaggaggcggcagaggaagagcaatagcatcgtgttgcttgagggctcacttcgtgtaatttacagaatcagcctggtagcatgtgtagtgtaggggtcaggttcctaggagaattatgtatgtatgcaatcccctgaaattttctaaatatctgtgagctatatataattttatagcgcagagatctctccctgtaagagcatctccaaaagctccccagaagtctcctctaaatctattttttggggaaaaacacaaaaacatgtctccaacagttcccctaaagcgccccaactttttcatagcccttaaaactccctcgttt

SEQ ID NO: 69631 - DNA, 979 bp, Zea Mays
ataagtttcatttcgtttgctgatgttcaagccttttaatggggagattcttgttgggaggattactggatatgacgataagggattgcaggtttcacttgaattcttcagtgacatttgcatacctggacacttgatgcagtttggcacagtaaggttgtgtaccacctgttttgctaatttattgtcgcagcttataaactaccactattgttcaaagtgatacatgcttctggatatatattgtacaatttagttctggtttctcttggagtagcatttcgaccagacctccttttacatctgaagtatgacctaaattatgttagctatcttatcagtgtacagtgcagtgtttcaaaggcatccaggtgaacctagcttgccttgggaaacagtggcgccatgtcgcctaggcgctgcctaggtgtccaggcatacccagcactggggaccagatggtaggtggatgctgaagactgaattaggcgatgagctttatctagatctagatgacgagcacaaaatacccgcctataccaattgatcaaaatgaggatgacccaccatttgctccaatgcagattgttggaagtattaaaggggatggccttggtcttcttgtttggtgggcagctgatgaagaggagggggaggaggcggcagaggaagagcaatagcatcgtgttgcttgagggctcacttcgtgtaatttacagaatcagcctggtagcatgtgtagtgtaggggtcaggttcctaggagaattatgtatgtatgcaatcccctgaaattttctaaatatctgtgagctatatataattttatagcgcagagatctctccctgtaagagcatctccaaaagctccccagaagtctcctctaaatctattttttggggaaaaacacaaaaacatgtctccaacagttcccctaaagcgccccaactttttcatagcccttaaaactccctcgttt

SEQ ID NO: 69632 - DNA, 1398 bp, Zea Mays
ccttgatgcttggtggcctcgaacaaagtacaggtccatttctagcctatcgagctcctcaggtagtaaaaccctacctacacctcgtgccgcctccgtcgccggctcgcctccccatcgacgcgcaggcagccctgcgtttgctccccgtcggtcgggaaaggggcgcgccggcgctgcctccagcaatcaactcgccgcatccaatcacggcgcctccctcctcgattggctcctcggtggttggttgttataggcaggcgggaaggatgttctcgctgagccagatcgagcacgacctcccgatgccgccgcacctgctgagccgcccccttcccgacgccatcaaggccgagctcgagaggctcttcttggacaaggtaatcacaaaacttgggctgtgcgtgtctgtctatgatatccgatccattgaaggcggttccatccatccaggggagggctgctcgacttataaagtaacgcgtgccttttcattctcttatgttatgttcttggtacagtgatatgatcgcattaaatgttttattgaggtacatttgtggaagtatcgtaattcctataaaacacgaccttccaaatcatgcggcacggccgcacgggtgctgctattgtgtctcttgtcacacacttcaatctgtgatcttgcaggcaatatgtgaggtctaacctctaataagtttcatttcgtttgctgatgttcaagccttttaatggggagattcttgttgggaggattactggatatgacgataagggattgcaggtttcacttgaattcttcagtgacatttgcatacctggacacttgatgcagtttggcacagtaaggggaccagatggtaggtggatgctgaagactgaattaggcgatgagctttatctagatctagatgacgagataaggttcttggtttctagcacaaaatacccgcctataccaattgatcaaaatgaggatgacccaccatttgctccaatgcagattgttggaagtattaaaggggatggccttggtcttcttgtttggtgggcagctgatgaagaggagggggaggaggcggcagaggaagagcaatagcatcgtgttgcttgagggctcacttcgtgtaatttacagaatcagcctggtagcatgtgtagtgtaggggtcaggttcctaggagaattatgtatgtatgcaatcccctgaaattttctaaatatctgtgagctatatataattttatagcgcagagatctctccctgtaagagcatctccaaaagctccccagaagtctcctctaaatctattttttggggaaaaacacaaaaacatgtctccaacagttcccctaaagcgccccaactttttcatagcccttaaaactccctcgttt

SEQ ID NO: 69633 - DNA, 1286 bp, Zea Mays
ccttgatgcttggtggcctcgaacaaagtacaggtccatttctagcctatcgagctcctcaggtagtaaaaccctacctacacctcgtgccgcctccgtcgccggctcgcctccccatcgacgcgcaggcagccctgcgtttgctccccgtcggtcgggaaaggggcgcgccggcgctgcctccagcaatcaactcgccgcatccaatcacggcgcctccctcctcgattggctcctcggtggttggttgttataggcaggcgggaaggatgttctcgctgagccagatcgagcacgacctcccgatgccgccgcacctgctgagccgcccccttcccgacgccatcaaggccgagctcgagaggctcttcttggacaaggtaatcacaaaacttgggctgtgcgtgtctgtctatgatatccgatccattgaaggcggttccatccatccaggggagggctgctcgacttataaagtttcatttcgtttgctgatgttcaagccttttaatggggagattcttgttgggaggattactggatatgacgataagggattgcaggtttcacttgaattcttcagtgacatttgcatacctggacacttgatgcagtttggcacagtaagtgtacagtgcagtgtttcaaaggcatccaggtgaacctagcttgccttgggaaacagtggcgccatgtcgcctaggcgctgcctaggtgtccaggcatacccagcactggggaccagatggtaggtggatgctgaagactgaattaggcgatgagctttatctagatctagatgacgagataaggttcttggtttctagcacaaaatacccgcctataccaattgatcaaaatgaggatgacccaccatttgctccaatgcagattgttggaagtattaaaggggatggccttggtcttcttgtttggtgggcagctgatgaagaggagggggaggaggcggcagaggaagagcaatagcatcgtgttgcttgagggctcacttcgtgtaatttacagaatcagcctggtagcatgtgtagtgtaggggtcaggttcctaggagaattatgtatgtatgcaatcccctgaaattttctaaatatctgtgagctatatataattttatagcgcagagatctctccctgtaagagcatctccaaaagctccccagaagtctcctctaaatctattttttggggaaaaacacaaaaacatgtctccaacagttcccctaaagcgccccaactttttcatagcccttaaaactccctcgttt

SEQ ID NO: 69634 - DNA, 1333 bp, Zea Mays
gttgccatatataataaatcttactataaaaaacaaagatgccactactgaatgatgtgttgggctcgaggtaacgagctacaacgcaggcacgacccagatcgttcgcgggccatttgggccacccacattatacacagaaatagtacctcctcttggatccttgatgcttggtggcctcgaacaaagtacaggtccatttctagcctatcgagctcctcaggtagtaaaaccctacctacacctcgtgccgcctccgtcgccggctcgcctccccatcgacgcgcaggcagccctgcgtttgctccccgtcggtcgggaaaggggcgcgccggcgctgcctccagcaatcaactcgccgcatccaatcacggcgcctccctcctcgattggctcctcggtggttggttgttataggcaggcgggaaggatgttctcgctgagccagatcgagcacgacctcccgatgccgccgcacctgctgagccgcccccttcccgacgccatcaaggccgagctcgagaggctcttcttggacaaggtaatcacaaaacttgggctgtgcgtgtctgtctatgatatccgatccattgaaggcggttccatccatccaggggagggctgctcgacttataaagtttcatttcgtttgctgatgttcaagccttttaatggggagattcttgttgggaggattactggatatgacgataagggattgcaggtttcacttgaattcttcagtgacatttgcatacctggacacttgatgcagtttggcacagggaccagatggtaggtggatgctgaagactgaattaggcgatgagctttatctagatctagatgacgagataaggttcttggtttctagcacaaaatacccgcctataccaattgatcaaaatgaggatgacccaccatttgctccaatgcagattgttggaagtattaaaggggatggccttggtcttcttgtttggtgggcagctgatgaagaggagggggaggaggcggcagaggaagagcaatagcatcgtgttgcttgagggctcacttcgtgtaatttacagaatcagcctggtagcatgtgtagtgtaggggtcaggttcctaggagaattatgtatgtatgcaatcccctgaaattttctaaatatctgtgagctatatataattttatagcgcagagatctctccctgtaagagcatctccaaaagctccccagaagtctcctctaaatctattttttggggaaaaacacaaaaacatgtctccaacagttcccctaaagcgccccaactttttcatagcccttaaaactccctcgttt

SEQ ID NO: 69635 - DNA, 895 bp, Zea Mays
gggcagctccctagctcaactcacaccacatccacaccagccagcaggcaggcagccacagcccacagagcacaaattaataaacctgctggtagtagccaatcctcgataaagtgtacgtgcaggcagctctgcatgtgccgcacacgctagcttagctaaccagcagcagcgcatcggtcgtgtcgtctcgtcttcgtgtttcttccaccatgatgagctcgctgaagctgacggaggtcgtctccaagaggtggggcggcggcggcagcagcagcaaggtgacctccccgagcgcggcggcgtgcccgcgaggccacttcgcggcctacacgcgggagggccgccgcttctttgtccccatcgcctacctcgccagcgacaccttccgggagctgctcagcatggccgaggaggagttcggcgagcccggcgcccgccccatcgtgctgccctgctccgccagccatctggagcagatcctcgacgccttccgcagcggcggcggcgccaagaagaagaaggagagcgccggcaggatcagcaagatctggtagcaggagaccagctgtggcgtggcagtcagtactcagtactatggccgacctgccatgacgtaacatctctctgtacaatgtaccttttcgtttgttggattttctcctgctggttcagttgtgcaacgagtcatgccatgcatgagttaattgttcgatggtcgtgcattgtaacatcaatgtgtagtagttcaggtgcagagatgtatctagaattctaggtgaattcatattctgcttaaagagtgttgataattcttttgtcataggatgttttcaagggcctgtttggcagcactctgatttctctaaaaataacttcagctttggctcctccg

SEQ ID NO: 69636 - DNA, 363 bp, Zea Mays
atggcgcaggagggctctgaggcctccgtcgccagctccccgccgccccagacgccgccgtcggcctcctcctggtggcgcgacatgcagcacccggctgcctacggcgcgtggccgccgtcccccgcggcgaggtggccgcccccggtatcgatggcgccggcagcgacgacgcagcagcagcagcagcatggcggacgggcgacgacgtcctccgacggtctctcggcctccaacgccaccgtggcgtccttcaccaaccactccgggctcagcctggactccgcgggtggagctgaggccgccgccgctgccgccgccgccgccgagagccacctctggaaccaagtcctcatcatgtga

SEQ ID NO: 69637 - DNA, 2232 bp, Zea Mays
gaagctaccctaaaccccactaggaacacttctggatggctattccctttgtttcccatatttttggtcactggttatctgttgagcttgatatctgcaagcaagtcatgcaggcagtttatgattcaacttattgagccattcacgcacaacaagaaaacggtggacattagaggcaggtcggagggaactcccaaaaaaagaaaaacacggaagaaggatggacttgtcaatagctctgagaccttgacagcatctgacaaggagtgcagtgatactggtgggtcaactgaggcaccaatgaaaaattctgcgctaacagatgcccttggtggtcgtcagattggtaaggtatatgtctccaataaagaaattggcagagggagcaatggcacaattgtttttgaaggatcttatgatggtcgtcaagttgccgtgaaacgtctgctgcgttcccacaatgacatagccgaaaaggagactcgaaatcttattatatcggatcatgatcctaatattgttagactctacggttgtgaccatgacagtgattttgtttatatctcccttgagaggtgccactgcagcttggctgacctaatccaaaaacagtcatatttgtcttctggagagtctatttctaacaatgaggtcagtatgagcatcaactcaaagatttcaaatgttaagggaatagacgtggagttgtggacgcaggatgggcttccttcagcacaactcctgaagctgatgagagatgtggttgctggccttgtgcatttgcataacttgggaattattcatcgtgatttgaagcctcagaatgtcttaataagcgcagaaggacctattagagcaaagctttctgatatgggtatcagtaagcacctgcaagatgacatgacttctgttagccatcatggaattggaagctctggctggcaagcacccgaacagcttcgtcatggtcgtcaaactcgtgcaatggatctttttagtttgggctgccttattttctattgtatcactaaaggcaagcatccgtttggtgaatactatgaacgggatacaaacattgtaaacaatcgctttgatctctttgtggtggactacataccagaagcagtacatcttatatctcaactgttacaaccaaacccagagacaaggtaagaactaaaaactaagaccaacggcagtatacgtcatgcatcatcctctcttctggagccctgaattgcgcctttcgtttctaagggataccagtgacagaattgagaaaaccagtgaaacggacctcataaacgcactggaaagcataggaccagtggcgtttggtgggaaatggggagagaaactggatgctgctttagttacagacatgggtcgttatagaaaatataactttgagtctactcgtgatcttctgaggtatatcagaaataaatcgggtcattacagagaactttcaaatgatctcaaggtttgttggtgctgcactttactgtgttcgattttgtcatgctgtatgaatggagttaaattgttgattagttgctgatctaattagggtaggctgtgtgcgttacctgatagttttgactagacattaggtatggacggcatgcgaacgaacatgcatgttgtgaattagcagagaatttcctagggcaatttaaatacagcttatgttttatattgcaaatttgctctgctcatcagtcaagtcaacctttgttttgtctcataagctcacaattgatggatgcaaattccagggcatacttgggtcattgccagagggatttgatcactattttgctagccgatttccaaagttgctaattgaggtgtacaaggtcttgtgggtgcactgcaaggacgaagaagctttcagtaaacatttcaatggaagctccttatagctggagaggattgccttttcctactgtaaatactaaccctgatgtagaagttgtatgtacatttgatatgtataccatattacccgttttatagaataaagagagctcagtctgtacattatgtagcatattactgtgttgcctataaatccaagctttactgttgaatggtgaacaatggtaacacaatctgctggatggaaaccagtggtatgtataatacccactttgtaagaaaagtctaaaaagaaaaattatattactttgtatctgtatgtgttatttatgtttatcatttcatgtgaac

SEQ ID NO: 69638 - DNA, 3454 bp, Zea Mays
ggaaatcctcctcccatgtcccgtttcctatccccttcttcgccaagcaatcctctccccctttcagaaaaaaaagtaatcctctccggagtccaagctccgaccagatccggacccccccccccccctccgaacaagctcgggcatgcccagcagctgatgaggtcgctccgcggggtcctcatcccgctcgtcctcctcgcggggctcgccttccgcgtggacgacggcggcgccgcgctcctcccgctcccgccacccgcgcttcccgcttccccgtcccgcctcgcgctccccggaggcactccgaaggatgatggggcggcggcttcgcgctccacggaggtcgtcacggcgggggtgcgctccaccgagatcgtcgccccagtggggcccaagaagcagagcctccgggagctccttgtccggccgcagcctgcacgtcacgagccgtctagcttggttagcggcgaggcgaaagccgaaaccagatctgtgctccagttttacgacaatggcacgattcagcttgtggacaagctgtctcaatctcctctgtgggagattgccacagggcctccactctcagaccatattactaccactgagtctggtccgaattacctcatttatcctttcaatgggaacgagaacatgaatgggaatagtactgaactttgggaggtttataatgggaacagcgtgaggctcccatggaaattggaggaattcgttgccaggagcccatatattcgggattctgttgttactatcggatcaaaagtttcaactgtttttgtagttgatgctgatagtggtgagattatttacaggcatagtatcccatctgcgttaaaggaattggaaggaccaggggttgaaggagcaccatccaagctaaatgtccgtactagtgatgacagtgataatatcatagtgcttgtgagaactgactattctctcagtgcatcagaccttggcaatcatttatttaactggacaagaacttctttcactgcaaactactatgtgaaatacaagcaccctgacatgcttgatcagtcatcttgcctgcaaggagacattccatgcattagaactgagggtttgccacttgctttacctgatttaaattcagctaatgtaattgtcttgaaagatggtaccccttttgtttctatgcatggttctgatgctttggaaccagttcaaaccccaaggaagctaccaaacactgctgggaagtcaaatatcctattggatgattctcaaaatcaaactcatgatgttgctcgatctcatgccatctctgccgatcctgaagctaccctaaaccccactaggaacacttctggatggctattccctttgtttcccatatttttggtcactggttatctgttgagcttgatatctgcaagcaagtcatgcaggcagtttatgattcaacttattgagccattcacgcacaacaagaaaacggtggacattagaggcaggtcggagggaactcccaaaaaaagaaaaacacggaagaaggatggacttgtcaatagctctgagaccttgacagcatctgacaaggagtgcagtgatactggtgggtcaactgaggcaccaatgaaaaattctgcgctaacagatgcccttggtggtcgtcagattggtaaggtatatgtctccaataaagaaattggcagagggagcaatggcacaattgtttttgaaggatcttatgatggtcgtcaagttgccgtgaaacgtctgctgcgttcccacaatgacatagccgaaaaggagactcgaaatcttattatatcggatcatgatcctaatattgttagactctacggttgtgaccatgacagtgattttgtttatatctcccttgagaggtgccactgcagcttggctgacctaatccaaaaacagtcatatttgtcttctggagagtctatttctaacaatgagagatgtggttgctggccttgtgcatttgcataacttgggaattattcatcgtgatttgaagcctcagaatgtcttaataagcgcagaaggacctattagagcaaagctttctgatatgggtatcagtaagcacctgcaagatgacatgacttctgttagccatcatggtacaggaattggaagctctggctggcaagcacccgaacagcttcgtcatggtcgtcaaactcgtgcaatggatctttttagtttgggctgccttattttctattgtatcactaaaggcaagcatccgtttggtgaatactatgaacgggatacaaacattgtaaacaatcgctttgatctctttgtggtggactacataccagaagcagtacatcttatatctcaactgttacaaccaaacccagagacaaggtaagaactaaaaactaagaccaacggcagtatacgtcatgcatcatcctctcttctggagccctgaattgcgcctttcgtttctaagggataccagtgacagaattgagaaaaccagtgaaacggacctcataaacgcactggaaagcataggaccagtggcgtttggtgggaaatggggagagaaactggatgctgctttagttacagacatgggtcgttatagaaaatataactttgagtctactcgtgatcttctgaggtatatcagaaataaatcgggtcattacagagaactttcaaatgatctcaaggtttgttggtgctgcactttactgtgttcgattttgtcatgctgtatgaatggagttaaattgttgattagttgctgatctaattagggtaggctgtgtgcgttacctgatagttttgactagacattaggtatggacggcatgcgaacgaacatgcatgttgtgaattagcagagaatttcctagggcaatttaaatacagcttatgttttatattgcaaatttgctctgctcatcagtcaagtcaacctttgttttgtctcataagctcacaattgatggatgcaaattccagggcatacttgggtcattgccagagggatttgatcactattttgctagccgatttccaaagttgctaattgaggtgtacaaggtcttgtgggtgcactgcaaggacgaagaagctttcagtaaacatttcaatggaagctccttatagctggagaggattgccttttcctactgtaaatactaaccctgatgtagaagttgtatgtacatttgatatgtataccatattacccgttttatagaataaagagagctcagtctgtacattatgtagcatattactgtgttgcctataaatccaagctttactgttgaatggtgaacaatggtaacacaatctgctggatggaaaccagtggtatgtataatacccactttgtaagaaaagtctaaaaagaaaaattatattactttgtatctgtatgtgttatttatgtttatcatttcatgtgaac

SEQ ID NO: 69639 - DNA, 3556 bp, Zea Mays
agacgatttccgcttcgggaaatcctcctcccatgtcccgtttcctatccccttcttcgccaagcaatcctctccccctttcagaaaaaaaagtaatcctctccggagtccaagctccgaccagatccggacccccccccccccctccgaacaagctcgggcatgcccagcagctgatgaggtcgctccgcggggtcctcatcccgctcgtcctcctcgcggggctcgccttccgcgtggacgacggcggcgccgcgctcctcccgctcccgccacccgcgcttcccgcttccccgtcccgcctcgcgctccccggaggcactccgaaggatgatggggcggcggcttcgcgctccacggaggtcgtcacggcgggggtgcgctccaccgagatcgtcgccccagtggggcccaagaagcagagcctccgggagctccttgtccggccgcagcctgcacgtcacgagccgtctagcttggttagcggcgaggcgaaagccgaaaccagatctgtgctccagttttacgacaatggcacgattcagcttgtggacaagctgtctcaatctcctctgtgggagattgccacagggcctccactctcagaccatattactaccactgagtctggtccgaattacctcatttatcctttcaatgggaacgagaacatgaatgggaatagtactgaactttgggaggtttataatgggaacagcgtgaggctcccatggaaattggaggaattcgttgccaggagcccatatattcgggattctgttgttactatcggatcaaaagtttcaactgtttttgtagttgatgctgatagtggtgagattatttacaggcatagtatcccatctgcgttaaaggaattggaaggaccaggggttgaaggagcaccatccaagctaaatgtccgtactagtgatgacagtgataatatcatagtgcttgtgagaactgactattctctcagtgcatcagaccttggcaatcatttatttaactggacaagaacttctttcactgcaaactactatgtgaaatacaagcaccctgacatgcttgatcagtcatcttgcctgcaaggagacattccatgcattagaactgagggtttgccacttgctttacctgatttaaattcagctaatgtaattgtcttgaaagatggtaccccttttgtttctatgcatggttctgatgctttggaaccagttcaaaccccaaggaagctaccaaacactgctgggaagtcaaatatcctattggatgattctcaaaatcaaactcatgatgttgctcgatctcatgccatctctgccgatcctgaagctaccctaaaccccactaggaacacttctggatggctattccctttgtttcccatatttttggtcactggttatctgttgagcttgatatctgcaagcaagtcatgcaggcagtttatgattcaacttattgagccattcacgcacaacaagaaaacggtggacattagaggcaggtcggagggaactcccaaaaaaagaaaaacacggaagaaggatggacttgtcaatagctctgagaccttgacagcatctgacaaggagtgcagtgatactggtgggtcaactgaggcaccaatgaaaaattctgcgctaacagatgcccttggtggtcgtcagattggtaaggtatatgtctccaataaagaaattggcagagggagcaatggcacaattgtttttgaaggatcttatgatggtcgtcaagttgccgtgaaacgtctgctgcgttcccacaatgacatagccgaaaaggagactcgaaatcttattatatcggatcatgatcctaatattgttagactctacggttgtgaccatgacagtgattttgtttatatctcccttgagaggtgccactgcagcttggctgacctaatccaaaaacagtcatatttgtcttctggagagtctatttctaacaatgaggtcagtatgagcatcaactcaaagatttcaaatgttaagggaatagacgtggagttgtggacgcaggatgggcttccttcagcacaactcctgaagctgatgagagatgtggttgctggccttgtgcatttgcataacttgggaattattcatcgtgatttgaagcctcagaatgtcttaataagcgcagaaggacctattagagcaaagctttctgatatgggtatcagtaagcacctgcaagatgacatgacttctgttagccatcatggtacaggaattggaagctctggctggcaagcacccgaacagcttcgtcatggtcgtcaaactcgtgcaatggatctttttagtttgggctgccttattttctattgtatcactaaaggcaagcatccgtttggtgaatactatgaacgggatacaaacattgtaaacaatcgctttgatctctttgtggtggactacataccagaagcagtacatcttatatctcaactgttacaaccaaacccagagacaagaccaacggcagtatacgtcatgcatcatcctctcttctggagccctgaattgcgcctttcgtttctaagggataccagtgacagaattgagaaaaccagtgaaacggacctcataaacgcactggaaagcataggaccagtggcgtttggtgggaaatggggagagaaactggatgctgctttagttacagacatgggtcgttatagaaaatataactttgagtctactcgtgatcttctgaggtatatcagaaataaatcgggtcattacagagaactttcaaatgatctcaaggtttgttggtgctgcactttactgtgttcgattttgtcatgctgtatgaatggagttaaattgttgattagttgctgatctaattagggtaggctgtgtgcgttacctgatagttttgactagacattaggtatggacggcatgcgaacgaacatgcatgttgtgaattagcagagaatttcctagggcaatttaaatacagcttatgttttatattgcaaatttgctctgctcatcagtcaagtcaacctttgttttgtctcataagctcacaattgatggatgcaaattccagggcatacttgggtcattgccagagggatttgatcactattttgctagccgatttccaaagttgctaattgaggtgtacaaggtcttgtgggtgcactgcaaggacgaagaagctttcagtaaacatttcaatggaagctccttatagctggagaggattgccttttcctactgtaaatactaaccctgatgtagaagttgtatgtacatttgatatgtataccatattacccgttttatagaataaagagagctcagtctgtacattatgtagcatattactgtgttgcctataaatccaagctttactgttgaatggtgaacaatggtaacacaatctgctggatggaaaccagtggtatgtataatacccactttgtaagaaaagtctaaaaagaaaaattatattactttgtatctgtatgtgttatttatgtttatcatttcatgtgaac

SEQ ID NO: 69640 - DNA, 3165 bp, Zea Mays
gttgaatccgaaacagacgagacggatgaagtgactgcaggggcaaatggggctgactgcagacgatttccgcttcgggaaatcctcctcccatgtcccgtttcctatccccttcttcgccaagcaatcctctccccctttcagaaaaaaaagtaatcctctccggagtccaagctccgaccagatccggacccccccccccccctccgaacaagctcgggcatgcccagcagctgatgaggtcgctccgcggggtcctcatcccgctcgtcctcctcgcggggctcgccttccgcgtggacgacggcggcgccgcgctcctcccgctcccgccacccgcgcttcccgcttccccgtcccgcctcgcgctccccggaggcactccgaaggatgatggggcggcggcttcgcgctccacggaggtcgtcacggcgggggtgcgctccaccgagatcgtcgccccagtggggcccaagaagcagagcctccgggagctccttgtccggccgcagcctgcacgtcacgagccgtctagcttggttagcggcgaggcgaaagccgaaaccagatctgtgctccagttttacgacaatggcacgattcagcttgtggacaagctgtctcaatctcctctgtgggagattgccacagggcctccactctcagaccatattactaccactgagtctggtccgaattacctcatttatcctttcaatgggaacgagaacatgaatgggaatagtactgaactttgggaggtttataatgggaacagcgtgaggctcccatggaaattggaggaattcgttgccaggagcccatatattcgggattctgttgttactatcggatcaaaagtttcaactgtttttgtagttgatgctgatagtggtgagattatttacaggcatagtatcccatctgcgttaaaggaattggaaggaccaggggttgaaggagcaccatccaagctaaatgtccgtactagtgatgacagtgataatatcatagtgcttgtgagaactgactattctctcagtgcatcagaccttggcaatcatttatttaactggacaagaacttctttcactgcaaactactatgtgaaatacaagcaccctgacatgcttgatcagtcatcttgcctgcaaggagacattccatgcattagaactgagggtttgccacttgctttacctgatttaaattcagctaatgtaattgtcttgaaagatggtaccccttttgtttctatgcatggttctgatgctttggaaccagttcaaaccccaaggaagctaccaaacactgctgggaagtcaaatatcctattggatgattctcaaaatcaaactcatgatgttgctcgatctcatgccatctctgccgatcctgaagctaccctaaaccccactaggaacacttctggatggctattccctttgtttcccatatttttggtcactggttatctgttgagcttgatatctgcaagcaagtcatgcaggcagtttatgattcaacttattgagccattcacgcacaacaagaaaacggtggacattagaggcaggtcggagggaactcccaaaaaaagaaaaacacggaagaaggatggacttgtcaatagctctgagaccttgacagcatctgacaaggagtgcagtgatactggtgggtcaactgaggcaccaatgaaaaattctgcgctaacagatgcccttggtggtcgtcagattggtaaggtatatgtctccaataaagaaattggcagagggagcaatggcacaattgtttttgaaggatcttatgatggtcgtcaagttgccgtgaaacgtctgctgcgttcccacaatgacatagccgaaaaggagactcgaaatcttattatatcggatcatgatcctaatattgttagactctacggttgtgaccatgacagtgattttgtttatatctcccttgagaggtgccactgcagcttggctgacctaatccaaaaacagtcatatttgtcttctggagagtctatttctaacaatgaggtcagtatgagcatcaactcaaagatttcaaatgttaagggaatagacgtggagttgtggacgcaggatgggcttccttcagcacaactcctgaagctgatgagagatgtggttgctggccttgtgcatttgcataacttgggaattattcatcgtgatttgaagcctcagaatgtcttaataagcgcagaaggacctattagagcaaagctttctgatatgggtatcagtaagcacctgcaagatgacatgacttctgttagccatcatggtacaggaattggaagctctggctggcaagcacccgaacagcttcgtcatggtcgtcaaactcgtgcaatggatctttttagtttgggctgccttattttctattgtatcactaaagaagcagtacatcttatatctcaactgttacaaccaaacccagagacaagggataccagtgacagaattgagaaaaccagtgaaacggacctcataaacgcactggaaagcataggaccagtggcgtttggtgggaaatggggagagaaactggatgctgctttagttacagacatgggtcgttatagaaaatataactttgagtctactcgtgatcttctgaggtatatcagaaataaatcgggtcattacagagaactttcaaatgatctcaagggcatacttgggtcattgccagagggatttgatcactattttgctagccgatttccaaagttgctaattgaggtgtacaaggtcttgtgggtgcactgcaaggacgaagaagctttcagtaaacatttcaatggaagctccttatagctggagaggattgccttttcctactgtaaatactaaccctgatgtagaagttgtatgtacatttgatatgtataccatattacccgttttatagaataaagagagctcagtctgtacattatgtagcatattactgtgttgcctataaatccaagctttactgttgaatggtgaacaatggtaacacaatctgctggatggaaaccagtggtatgtataatacccactttgtaagaaaagtctaaaaagaaaaattatattactttgtatctgtatgtgttatttatgtttatcatttcatgtgaac

SEQ ID NO: 69641 - DNA, 3371 bp, Zea Mays
gaacagtgttctaaagaaaaatttcagagttacaaaatttcgacagcgacgactttctccaaccgcctccggtcgtctccttgccagcgattgagccgacgtccagctcagggaggaacggagaggcgcgggagctattggccgttgaatccgaaacagacgagacggatgaagtgactgcaggggcaaatggggctgactgcagacgatttccgcttcgggaaatcctcctcccatgtcccgtttcctatccccttcttcgccaagcaatcctctccccctttcagaaaaaaaagtaatcctctccggagtccaagctccgaccagatccggacccccccccccccctccgaacaagctcgggcatgcccagcagctgatgaggtcgctccgcggggtcctcatcccgctcgtcctcctcgcggggctcgccttccgcgtggacgacggcggcgccgcgctcctcccgctcccgccacccgcgcttcccgcttccccgtcccgcctcgcgctccccggaggcactccgaaggatgatggggcggcggcttcgcgctccacggaggtcgtcacggcgggggtgcgctccaccgagatcgtcgccccagtggggcccaagaagcagagcctccgggagctccttgtccggccgcagcctgcacgtcacgagccgtctagcttggttagcggcgaggcgaaagccgaaaccagatctgtgctccagttttacgacaatggcacgattcagcttgtggacaagctgtctcaatctcctctgtgggagattgccacagggcctccactctcagaccatattactaccactgagtctggtccgaattacctcatttatcctttcaatgggaacgagaacatgaatgggaatagtactgaactttgggaggtttataatgggaacagcgtgaggctcccatggaaattggaggaattcgttgccaggagcccatatattcgggattctgttgttactatcggatcaaaagtttcaactgtttttgtagttgatgctgatagtggtgagattatttacaggcatagtatcccatctgcgttaaaggaattggaaggaccaggggttgaaggagcaccatccaagctaaatgtccgtactagtgatgacagtgataatatcatagtgcttgtgagaactgactattctctcagtgcatcagaccttggcaatcatttatttaactggacaagaacttctttcactgcaaactactatgtgaaatacaagcaccctgacatgcttgatcagtcatcttgcctgcaaggagacattccatgcattagaactgagggtttgccacttgctttacctgatttaaattcagctaatgtaattgtcttgaaagatggtaccccttttgtttctatgcatggttctgatgctttggaaccagttcaaaccccaaggaagctaccaaacactgctgggaagtcaaatatcctattggatgattctcaaaatcaaactcatgatgttgctcgatctcatgccatctctgccgatcctgaagctaccctaaaccccactaggaacacttctggatggctattccctttgtttcccatatttttggtcactggttatctgttgagcttgatatctgcaagcaagtcatgcaggcagtttatgattcaacttattgagccattcacgcacaacaagaaaacggtggacattagaggcaggtcggagggaactcccaaaaaaagaaaaacacggaagaaggatggacttgtcaatagctctgagaccttgacagcatctgacaaggagtgcagtgatactggtgggtcaactgaggcaccaatgaaaaattctgcgctaacagatgcccttggtggtcgtcagattggtaaggtatatgtctccaataaagaaattggcagagggagcaatggcacaattgtttttgaaggatcttatgatggtcgtcaagttgccgtgaaacgtctgctgcgttcccacaatgacatagccgaaaaggagactcgaaatcttattatatcggatcatgatcctaatattgttagactctacggttgtgaccatgacagtgattttgtttatatctcccttgagaggtgccactgcagcttggctgacctaatccaaaaacagtcatatttgtcttctggagagtctatttctaacaatgaggtcagtatgagcatcaactcaaagatttcaaatgttaagggaatagacgtggagttgtggacgcaggatgggcttccttcagcacaactcctgaagctgatgagagatgtggttgctggccttgtgcatttgcataacttgggaattattcatcgtgatttgaagcctcagaatgtcttaataagcgcagaaggacctattagagcaaagctttctgatatgggtatcagtaagcacctgcaagatgacatgacttctgttagccatcatggtacaggaattggaagctctggctggcaagcacccgaacagcttcgtcatggtcgtcaaactcgtgcaatggatctttttagtttgggctgccttattttctattgtatcactaaagtacatcttatatctcaactgttacaaccaaacccagagacaagaccaacggcagtatacgtcatgcatcatcctctcttctggagccctgaattgcgcctttcgtttctaagggataccagtgacagaattgagaaaaccagtgaaacggacctcataaacgcactggaaagcataggaccagtggcgtttggtgggaaatggggagagaaactggatgctgctttagttacagacatgggtcgttatagaaaatataactttgagtctactcgtgatcttctgaggtatatcagaaataaatcgggtcattacagagaactttcaaatgatctcaagggcatacttgggtcattgccagagggatttgatcactattttgctagccgatttccaaagttgctaattgaggtgtacaaggtcttgtgggtgcactgcaaggacgaagaagctttcagtaaacatttcaatggaagctccttatagctggagaggattgccttttcctactgtaaatactaaccctgatgtagaagttgtatgtacatttgatatgtataccatattacccgttttatagaataaagagagctcagtctgtacattatgtagcatattactgtgttgcctataaatccaagctttactgttgaatggtgaacaatggtaacacaatctgctggatggaaaccagtggtatgtataatacccactttgtaagaaaagtctaaaaagaaaaattatattactttgtatctgtatgtgttatttatgtttatcatttcatgtgaac

SEQ ID NO: 69642 - DNA, 1451 bp, Zea Mays
taaatcaaaataggacatttgttggagttgactctttccgtatcttccaggaagtttatcttcgaacagatgatccaagggtggtcaatgttgtcaagttttcagaatcagttggtgatctgaaagtagaggcagaagcaactattaaggatggaaagcgcatacttttccgttttgaccgagcagcatttgccttcaagtttctgccatttaaagttccatacccagtgccatttagacttcttggagatgaagctaatggttggcttgacacaacgtacttgtcccacactgggaacatacgaatttcaaggggaaacaagggaaccacttttgtcctacagaagagtgcagacccaagacaaatcttattgtcagctatatctgcaagaacaggagtagaagaggtcatcaatgattttatttcaagccaaaatggaacaaaggctgatctaagcattctggtgggtgaatggcaactattgtggtgctcacagactgaaggtgaaagttggtcatctgttgcatctgccggtctcaaggacttccagattataagagaagatgggaaattaaagaattcagctagccccttcccaggtctcactcttaatgcaacaggcaacatatgcaaaaatgggagtggaaacacctttaccatgtccatgaaagaaggagctgttaaagttggtggtttacagtttcccttggatgctcaaggagaatttgtgatggaaatcttgtatggcattcacgtcttcctgaaattgaaatatgaagcttatacttaggaaaatgttggttgctggtatatcgacaacaagataaggatatccaggattaaccagcacatgcttgtccatttacgcattgcgaatacaacatgacaccttaatgaagactatgtgaacatatatcctaatttcattgctgagcacacctcatcagatgtgactaggtcatgcgacataattttaaatttactggtgtatagctaacattttagcacaaaattttctacatagttttcttgtactcaaaccgttttctcacaaacatatggaaccacagttgagcagtttgtatggcaacattctgtaaatgcctgtttgaaaccagatccgatttctcaggggatttcttatgtaacttcagagttcctagaagacatgggcagaaagtagatctcaaaatgcccttgtgcaattaacttttattttctttatgggcccggacggactcaggctcgtgttcgtgctacccgatttatgtttcaggactgaatgactactctctcgtcattccaatggtacaaaatggtgtccgaattaagtagctaaggctcaccgctctttcaattttcatttttcattttaaattttattcttcaaacaaacactacagtatatagtgtaatttaggcattctttggaatgcaggattggtaaaac

SEQ ID NO: 69643 - DNA, 2274 bp, Zea Mays
gcgcttcccaccgggcactcctccaccaggcgtgagaggcgctaacgagagccacaaactctgctccgcgtgcacgccgcgctccatggccgccgccccagcagcagccggaggccttatgcagctccagcctccgctatgcgtgtcgcctcgcgccagcgcttcttgcgcaccaagcatctggggggccctgccccagcttcgccgccgccgggccctggcgcgcgcggcgtcgtcggtagcggccggggaggctgaggcgtacacggaacccgagctggtgttgctggaggccctcctcggcatccagggccgcggccgcgccgtcgctccgcgccagctccaggaagtggagagcgctgtgcaggctctcgagacccagggaggcattcctgatccgacaagttcaagtttaatcgaaggtagctggcggctcatcttcactacgagaccagggacagcatcgcccattcagaggacatttgttggagttgactctttccgtatcttccaggaagtttatcttcgaacagatgatccaagggtggtcaatgttgtcaagttttcagaatcagttggtgatctgaaagtagaggcagaagcaactattaaggatggaaagcgcatacttttccgttttgaccgagcagcatttgccttcaagtttctgccatttaaagttccatacccagtgccatttagacttcttggagatgaagctaatggttggcttgacacaacgtacttgtcccacactgggaacatacgaatttcaaggggaaacaagggaaccacttttgtcctacagaagagtgcagacccaagacaaatcttattgtcagctatatctgcaagaacaggagtagaagaggtgtgtgattacagctcgcatcatacatcgtcgcactaaatggagataaattatgtgcacaaactttctttttggctaagcaggtcatcaatgattttatttcaagccaaaatggaacaaaggctgatctaagcattctggtgggtgaatggcaactattgtggtgctcacagactgaaggtgaaagttggtcatctgttgcatctgccggtctcaaggacttccagattataagagaagatgggaaattaaagaattcagctagccccttcccaggtctcactcttaatgcaacaggcaacatatggtaagtctgtagcgcctccaagaatcaatgtttatttgtgtgtcctgtcaaggatactttgcatttatgcatgaccatcttaatgaagaagaaacagaagtccttactccatccctccaacatgcgtgattctataattgttgaagcagtttgtcttctacctgaaggaaacactatgatatacttacttttgtaagggcaaacatatacaataagttgtgcacatacagggagggaaatgaacgttttgcagtaagacagggtgtacaagaatgctgaaattattgcaggaaagtgcattttggtttccagttctgactcagctttgcactgcacttgcagcaaaaatgggagtggaaacacctttaccatgtccatgaaagaaggagctgttaaagttggtggtttacagtttcccttggatgctcaaggagaatttgtgatggaaatcttgtatatcgacaacaagataaggatatccaggattaaccagcacatgcttgtccatttacgcattgcgaatacaacatgacaccttaatgaagactatgtgaacatatatcctaatttcattgctgagcacacctcatcagatgtgactaggtcatgcgacataattttaaatttactggtgtatagctaacattttagcacaaaattttctacatagttttcttgtactcaaaccgttttctcacaaacatatggaaccacagttgagcagtttgtatggcaacattctgtaaatgcctgtttgaaaccagatccgatttctcaggggatttcttatgtaacttcagagttcctagaagacatgggcagaaagtagatctcaaaatgcccttgtgcaattaacttttattttctttatgggcccggacggactcaggctcgtgttcgtgctacccgatttatgtttcaggactgaatgactactctctcgtcattccaatggtacaaaatggtgtccgaattaagtagctaaggctcaccgctctttcaattttcatttttcattttaaattttattcttcaaacaaacactacagtatatagtgtaatttaggcattctttggaatgcaggattggtaaaac

SEQ ID NO: 69644 - DNA, 1824 bp, Zea Mays
gcgcgaacgagaggcgcttcccaccgggcactcctccaccaggcgtgagaggcgctaacgagagccacaaactctgctccgcgtgcacgccgcgctccatggccgccgccccagcagcagccggaggccttatgcagctccagcctccgctatgcgtgtcgcctcgcgccagcgcttcttgcgcaccaagcatctggggggccctgccccagcttcgccgccgccgggccctggcgcgcgcggcgtcgtcggtagcggccggggaggctgaggcgtacacggaacccgagctggtgttgctggaggccctcctcggcatccagggccgcggccgcgccgtcgctccgcgccagctccaggaagtggagagcgctgtgcaggctctcgagacccagggaggcattcctgatccgacaagttcaagtttaatcgaaggtagctggcggctcatcttcactacgagaccagggacagcatcgcccattcaggaagtttatcttcgaacagatgatccaagggtggtcaatgttgtcaagttttcagaatcagttggtgatctgaaagtagagaagcaactattaaggatggaaagcgcatacttttccgttttgaccgagcagcatttgccttcaagtttctgccatttaaagttccatacccagtgccatttagacttcttggagatgaagctaatggttggcttgacacaacgtacttgtcccacactgggaacatacgaatttcaaggggaaacaagtgcagggaaccacttttgtcctacagaagagtgcagacccaagacaaatcttattgtcagctatatctgcaagaacaggagtagaagaggtcatcaatgattttatttcaagccaaaatggaacaaaggctgatctaagcattctggtgggtgaatggcaactattgtggtgctcacagactgaaggtgaaagttggtcatctgttgcatctgccggtctcaaggacttccagattataagagaagatgggaaattaaagaattcagctagccccttcccaggtctcactcttaatgcaacaggcaacatatgcaaaaatgggagtggaaacacctttaccatgtccatgaaagaaggagctgttaaagttggtggtttacagtttcccttggatgctcaaggagaatttgtgatggaaatcttgtatatcgacaacaagataaggatatccaggattaaccagcacatgcttgtccatttacgcattgcgaatacaacatgacaccttaatgaagactatgtgaacatatatcctaatttcattgctgagcacacctcatcagatgtgactaggtcatgcgacataattttaaatttactggtgtatagctaacattttagcacaaaattttctacatagttttcttgtactcaaaccgttttctcacaaacatatggaaccacagttgagcagtttgtatggcaacattctgtaaatgcctgtttgaaaccagatccgatttctcaggggatttcttatgtaacttcagagttcctagaagacatgggcagaaagtagatctcaaaatgcccttgtgcaattaacttttattttctttatgggcccggacggactcaggctcgtgttcgtgctacccgatttatgtttcaggactgaatgactactctctcgtcattccaatggtacaaaatggtgtccgaattaagtagctaaggctcaccgctctttcaattttcatttttcattttaaattttattcttcaaacaaacactacagtatatagtgtaatttaggcattctttggaatgcaggattggtaaaac

SEQ ID NO: 69645 - DNA, 1969 bp, Zea Mays
gcgagaggcgcgaacgagaggcgcttcccaccgggcactcctccaccaggcgtgagaggcgctaacgagagccacaaactctgctccgcgtgcacgccgcgctccatggccgccgccccagcagcagccggaggccttatgcagctccagcctccgctatgcgtgtcgcctcgcgccagcgcttcttgcgcaccaagcatctggggggccctgccccagcttcgccgccgccgggccctggcgcgcgcggcgtcgtcggtagcggccggggaggctgaggcgtacacggaacccgagctggtgttgctggaggccctcctcggcatccagggccgcggccgcgccgtcgctccgcgccagctccaggaagtggagagcgctgtgcaggctctcgagacccagggaggcattcctgatccgacaagttcaagtttaatcgaaggtagctggcggctcatcttcactacgagaccagggacagcatcgcccattcaggaagtttatcttcgaacagatgatccaagggtggtcaatgttgtcaagttttcagaatcagttggtgatctgaaagtagaggcagaagcaactattaaggatggaaagcgcatacttttccgttttgaccgagcagcatttgccttcaagtttctgccatttaaagttccatacccagtgccatttagacttcttggagatgaagctaatggttggcttgacacaacgtacttgtcccacactgggaacatacgaatttcaaggggaaacaagtgcagggaaccacttttgtcctacagaagagtgcagacccaagacaaatcttattgtcagctatatctgcaagaacaggagtagaagaggtcatcaatgattttatttcaagccaaaatggaacaaaggctgatctaagcattctggtgggtgaatggcaactattgtggtgctcacagactgaaggtgaaagttggtcatctgttgcatctgccggtctcaaggacttccagattataagagaagatgggaaattaaagaattcagctagccccttcccaggtctcactcttaatgcaacaggcaacatatgcaaaaatgggagtggaaacacctttaccatgtccatgaaagaaggagctgttaaagttggtggtttacagtttcccttggatgctcaaggagaatttgtgatggaaatcttgtatggcattcacgtcttcctgaaattgaaatatgaagcttatacttaggaaaatgttggttgctggtgagtggtagctcaagatagcagaaataatgcttattctgaatgagttttttttccccacattacaggtatatcgacaacaagataaggatatccaggattaaccagcacatgcttgtccatttacgcattgcgaatacaacatgacaccttaatgaagactatgtgaacatatatcctaatttcattgctgagcacacctcatcagatgtgactaggtcatgcgacataattttaaatttactggtgtatagctaacattttagcacaaaattttctacatagttttcttgtactcaaaccgttttctcacaaacatatggaaccacagttgagcagtttgtatggcaacattctgtaaatgcctgtttgaaaccagatccgatttctcaggggatttcttatgtaacttcagagttcctagaagacatgggcagaaagtagatctcaaaatgcccttgtgcaattaacttttattttctttatgggcccggacggactcaggctcgtgttcgtgctacccgatttatgtttcaggactgaatgactactctctcgtcattccaatggtacaaaatggtgtccgaattaagtagctaaggctcaccgctctttcaattttcatttttcattttaaattttattcttcaaacaaacactacagtatatagtgtaatttaggcattctttggaatgcaggattggtaaaac

SEQ ID NO: 69646 - DNA, 1930 bp, Zea Mays
gcgcgagaggcgcgaacgagaggcgcttcccaccgggcactcctccaccaggcgtgagaggcgctaacgagagccacaaactctgctccgcgtgcacgccgcgctccatggccgccgccccagcagcagccggaggccttatgcagctccagcctccgctatgcgtgtcgcctcgcgccagcgcttcttgcgcaccaagcatctggggggccctgccccagcttcgccgccgccgggccctggcgcgcgcggcgtcgtcggtagcggccggggaggctgaggcgtacacggaacccgagctggtgttgctggaggccctcctcggcatccagggccgcggccgcgccgtcgctccgcgccagctccaggaagtggagagcgctgtgcaggctctcgagacccagggaggcattcctgatccgacaagttcaagtttaatcgaaggtagctggcggctcatcttcactacgagaccagggacagcatcgcccattcagaggacatttgttggagttgactctttccgtatcttccaggaagtttatcttcgaacagatgatccaagggtggtcaatgttgtcaagttttcagaatcagttggtgatctgaaagtagaggcagaagcaactattaaggatggaaagcgcatacttttccgttttgaccgagcagcatttgccttcaagtttctgccatttaaagttccatacccagtgccatttagacttcttggagatgaagctaatggttggcttgacacaacgtacttgtcccacactgggaacatacgaatttcaaggggaaacaagtgcagggaaccacttttgtcctacagaagagtgcagacccaagacaaatcttattgtcagctatatctgcaagaacaggagtagaagaggtcatcaatgattttatttcaagccaaaatggaacaaaggctgatctaagcattctggtgggtgaatggcaactattgtggtgctcacagactgaaggtgaaagttggtcatctgttgcatctgccggtctcaaggacttccagcaaaaatgggagtggaaacacctttaccatgtccatgaaagaaggagctgttaaagttggtggtttacagtttcccttggatgctcaaggagaatttgtgatggaaatcttgtatggcattcacgtcttcctgaaattgaaatatgaagcttatacttaggaaaatgttggttgctggtgagtggtagctcaagatagcagaaataatgcttattctgaatgagttttttttccccacattacaggtatatcgacaacaagataaggatatccaggattaaccagcacatgcttgtccatttacgcattgcgaatacaacatgacaccttaatgaagactatgtgaacatatatcctaatttcattgctgagcacacctcatcagatgtgactaggtcatgcgacataattttaaatttactggtgtatagctaacattttagcacaaaattttctacatagttttcttgtactcaaaccgttttctcacaaacatatggaaccacagttgagcagtttgtatggcaacattctgtaaatgcctgtttgaaaccagatccgatttctcaggggatttcttatgtaacttcagagttcctagaagacatgggcagaaagtagatctcaaaatgcccttgtgcaattaacttttattttctttatgggcccggacggactcaggctcgtgttcgtgctacccgatttatgtttcaggactgaatgactactctctcgtcattccaatggtacaaaatggtgtccgaattaagtagctaaggctcaccgctctttcaattttcatttttcattttaaattttattcttcaaacaaacactacagtatatagtgtaatttaggcattctttggaatgcaggattggtaaaac

SEQ ID NO: 69647 - DNA, 1877 bp, Zea Mays
aacacgcgcgagaggcgcgaacgagaggcgcttcccaccgggcactcctccaccaggcgtgagaggcgctaacgagagccacaaactctgctccgcgtgcacgccgcgctccatggccgccgccccagcagcagccggaggccttatgcagctccagcctccgctatgcgtgtcgcctcgcgccagcgcttcttgcgcaccaagcatctggggggccctgccccagcttcgccgccgccgggccctggcgcgcgcggcgtcgtcggtagcggccggggaggctgaggcgtacacggaacccgagctggtgttgctggaggccctcctcggcatccagggccgcggccgcgccgtcgctccgcgccagctccaggaagtggagagcgctgtgcaggctctcgagacccagggaggcattcctgatccgacaagttcaagtttaatcgaaggtagctggcggctcatcttcactacgagaccagggacagcatcgcccattcagaggacatttgttggagttgactctttccgtatcttccaggaagtttatcttcgaacagatgatccaagggtggtcaatgttgtcaagttttcagaatcagttggtgatctgaaagtagagaagcaactattaaggatggaaagcgcatacttttccgttttgaccgagcagcatttgccttcaagtttctgccatttaaagttccatacccagtgccatttagacttcttggagatgaagctaatggttggcttgacacaacgtacttgtcccacactgggaacatacgaatttcaaggggaaacaagtgcagggaaccacttttgtcctacagaagagtgcagacccaagacaaatcttattgtcagctatatctgcaagaacaggagtagaagaggtcatcaatgattttatttcaagccaaaatggaacaaaggctgatctaagcattctggtgggtgaatggcaactattgtggtgctcacagactgaaggtgaaagttggtcatctgttgcatctgccggtctcaaggacttccagattataagagaagatgggaaattaaagaattcagctagccccttcccaggtctcactcttaatgcaacaggcaacatatgcaaaaatgggagtggaaacacctttaccatgtccatgaaagaaggagctgttaaagttggtggtttacagtttcccttggatgctcaaggagaatttgtgatggaaatcttgtatatcgacaacaagataaggatatccaggattaaccagcacatgcttgtccatttacgcattgcgaatacaacatgacaccttaatgaagactatgtgaacatatatcctaatttcattgctgagcacacctcatcagatgtgactaggtcatgcgacataattttaaatttactggtgtatagctaacattttagcacaaaattttctacatagttttcttgtactcaaaccgttttctcacaaacatatggaaccacagttgagcagtttgtatggcaacattctgtaaatgcctgtttgaaaccagatccgatttctcaggggatttcttatgtaacttcagagttcctagaagacatgggcagaaagtagatctcaaaatgcccttgtgcaattaacttttattttctttatgggcccggacggactcaggctcgtgttcgtgctacccgatttatgtttcaggactgaatgactactctctcgtcattccaatggtacaaaatggtgtccgaattaagtagctaaggctcaccgctctttcaattttcatttttcattttaaattttattcttcaaacaaacactacagtatatagtgtaatttaggcattctttggaatgcaggattggtaaaac

SEQ ID NO: 69648 - DNA, 2327 bp, Zea Mays
agaagatatagaggataaaatcttttagagaagactgtaaaggacggatatagagaatacatatagaggacgttgctggagacagcctaacaattcaatagatcaacacgcgcgagaggcgcgaacgagaggcgcttcccaccgggcactcctccaccaggcgtgagaggcgctaacgagagccacaaactctgctccgcgtgcacgccgcgctccatggccgccgccccagcagcagccggaggccttatgcagctccagcctccgctatgcgtgtcgcctcgcgccagcgcttcttgcgcaccaagcatctggggggccctgccccagcttcgccgccgccgggccctggcgcgcgcggcgtcgtcggtagcggccggggaggctgaggcgtacacggaacccgagctggtgttgctggaggccctcctcggcatccagggccgcggccgcgccgtcgctccgcgccagctccaggaagtggagagcgctgtgcaggctctcgagacccagggaggcattcctgatccgacaagttcaagtttaatcgaaggtagctggcggctcatcttcactacgagaccagggacagcatcgcccattcagaggacatttgttggagttgactctttccgtatcttccaggaagtttatcttcgaacagatgatccaagggtggtcaatgttgtcaagttttcagaatcagttggtgatctgaaagtagaggcagaagcaactattaaggatggaaagcgcatacttttccgttttgaccgagcagcatttgccttcaagtttctgccatttaaagttccatacccagtgccatttagacttcttggagatgaagctaatggttggcttgacacaacgtacttgtcccacactgggaacatacgaatttcaaggggaaacaagtgcagggaaccacttttgtcctacagaagagtgcagacccaagacaaatcttattgtcagctatatctgcaagaacaggagtagaagaggtcatcaatgattttatttcaagccaaaatggaacaaaggctgatctaagcattctggtgggtgaatggcaactattgtggtgctcacagactgaaggtgaaagttggtcatctgttgcatctgccggtctcaaggacttccagattataagagaagatgggaaattaaagaattcagctagccccttcccaggtctcactcttaatgcaacaggcaacatatggtaagtctgtagcgcctccaagaatcaatgtttatttgtgtgtcctgtcaaggatactttgcatttatgcatgaccatcttaatgaagaagaaacagaagtccttactccatccctccaacatgcgtgattctataattgttgaagcagtttgtcttctacctgaaggaaacactatgatatacttacttttgtaagggcaaacatatacaataagttgtgcacatacagggagggaaatgaacgttttgcagtaagacagggtgtacaagaatgctgaaattattgcaggaaagtgcattttggtttccagttctgactcagctttgcactgcacttgcagcaaaaatgggagtggaaacacctttaccatgtccatgaaagaaggagctgttaaagttggtggtttacagtttcccttggatgctcaaggagaatttgtgatggaaatcttgtatatcgacaacaagataaggatatccaggattaaccagcacatgcttgtccatttacgcattgcgaatacaacatgacaccttaatgaagactatgtgaacatatatcctaatttcattgctgagcacacctcatcagatgtgactaggtcatgcgacataattttaaatttactggtgtatagctaacattttagcacaaaattttctacatagttttcttgtactcaaaccgttttctcacaaacatatggaaccacagttgagcagtttgtatggcaacattctgtaaatgcctgtttgaaaccagatccgatttctcaggggatttcttatgtaacttcagagttcctagaagacatgggcagaaagtagatctcaaaatgcccttgtgcaattaacttttattttctttatgggcccggacggactcaggctcgtgttcgtgctacccgatttatgtttcaggactgaatgactactctctcgtcattccaatggtacaaaatggtgtccgaattaagtagctaaggctcaccgctctttcaattttcatttttcattttaaattttattcttcaaacaaacactacagtatatagtgtaatttaggcattctttggaatgcaggattggtaaaac

SEQ ID NO: 69649 - DNA, 887 bp, Zea Mays
gctaagacagatcacagcccaaaccagatcacatgaagcggcccaaattcgaggaagcaaacaggtgggctgggcacctgtactgcgagcagccggtcacagcgcgcagcgccgtctcctgcgattcccggctgcctccacctcttctcccacagcgccggcgtgctcctctcctttcacgctacgttccctccggccccggcgtcgacggctaagaaacccttaacctaggaacgagttcgcaccctcgggacctgtggcgatgcatctcactctcgaattcgggggcgggctggagctgctcctggagaactccaccaaggtgcacaaggtggaggtcaccacgcccaaggacggccaaggcaaggtgacgatgaagttcttgctctcttgggtcaaggagaatctgatcaaggagcgaccggagatgttcctcaaggctgattccggaggcctggggttcttgtccttataaatgactgtgactgggagctgtgtggtggtcttgatgcagagttggaagagaaggatgttgtggttttcatctccactttgcatggtggttagtttgattacatcaggatgatagcatcctatgattttcctgaaaatcgcaccttgtatcaagtctttggaagggatggattggtctgagttgtgtggctttctggagatactaattgcaaactgtggaactgcacttgttggtgccaatatcatcaaactatagttccattttcttactgggacgcaggcacataatattgtgcacaaccgatcctgtatttttccagtactgctgtggctctcccccgtttgctgtatatacataaatgaaaggtcaagtgaagtacgtatttctaaacactgttcatgcttgtcaattg

SEQ ID NO: 69650 - DNA, 1015 bp, Zea Mays
caatatttgagatttacttgtcagtaaccttttttgctaaattatctttcggttacacccagctaagacagatcacagcccaaaccagatcacatgaagcggcccaaattcgaggaagcaaacaggtgggctgggcacctgtactgcgagcagccggtcacagcgcgcagcgccgtctcctgcgattcccggctgcctccacctcttctcccacagcgccggcgtgctcctctcctttcacgctacgttccctccggccccggcgtcgacggctaagaaacccttaacctaggaacgagttcgcaccctcgggacctgtggcgatgcatctcactctcgaattcgggggcgggctggagctgctcctggagaactccaccaaggtgcacaaggtggaggtcaccacgcccaaggacggccaaggcaaggtgacgatgaagttcttgctctcttgggtcaaggagaatctgatcaaggagcgaccggagatgttcctcaaggctgattccgtgcagaggactaggagctgcggcacttggggtaggcatttacagaagggcagccctaagcacgtccagaggcctggggttcttgtccttataaatgactgtgactgggagctgtgtggtggtcttgatgcagagttggaagagaaggatgttgtggttttcatctccactttgcatggtggttagtttgattacatcaggatgatagcatcctatgattttcctgaaaatcgcaccttgtatcaagtctttggaagggatggattggtctgagttgtgtggctttctggagatactaattgcaaactgtggaactgcacttgttggtgccaatatcatcaaactatagttccattttcttactgggacgcaggcacataatattgtgcacaaccgatcctgtatttttccagtactgctgtggctctcccccgtttgctgtatatacataaatgaaaggtcaagtgaagtacgtatttctaaacactgttcatgcttgtcaattg

SEQ ID NO: 69651 - DNA, 589 bp, Zea Mays
gctaagacagatcacagcccaaaccagatcacatgaagcggcccaaattcgaggaagcaaacaggtgggctgggcacctgtactgcgagcagccggtcacagcgcgcagcgccgtctcctgcgattcccggctgcctccacctcttctcccacagcgccggcgtgctcctctcctttcacgctacgttccctccggccccggcgtcgacggctaagaaacccttaacctaggaacgagttcgcaccctcgggacctgtggcgatgcatctcactctcgaattcgggggcgggctggagctgctcctggagaactccaccaaggtgcacaaggtggaggtcaccacgcccaaggacggccaaggcaaggtgacgatgaagttcttgctctcttgggtcaaggagaatctgatcaaggagcgaccggagatgttcctcaaggctgattccgtccagttattcaattgggagcccaggctcaatcccaagcaaagcaagcaatatgcatgtgttcattcagacttctggccattaacatagtagaaggcaacagattggtacaaaggaacaagccagcacaaaggaattttg

SEQ ID NO: 69652 - DNA, 1104 bp, Zea Mays
tgtgctttcaccaaaaggtggattgggttgttgcacctattctttactgggaatcaataactttcagcagaccagctattgctctaatatgttttggcacaatcgccttattcccaagtgttttgttaccttcttcgcccttcatgtggcttgctgggatgacttttggatatctttatggctttttgataatcacagtggggatgagcataggcatgtcgttgccgtattttataggttctgcattccactgcaggatacatagatggctggagaagtggccaaagaaagcagcttttgtaaggcttgctggcgagggagattggcatcatcaatttaaggctgttgctttactcaggatttctccatttccatatttagtttttaactacgcttctgtggctacgaacgtcaaatattacccatacatagctggttccatggctggaaccatacatgaaactttccttgcaatatacagtgggaaacttctacagagcttggctgtagcaactagccaagggtcattcttgtcggtggatcagattatctacaatggaatcggctttacaattgctgcaacttccactgctgctatcactatttatgcaaagaaagcgcttcaaaagctccaagcggaggacgagatattttgagaggtccaaggccaggatcaaacccgtaacgctagttttctttcaggtgtactatatatgaacagctggtactaatctggtttcctgtgtcgactaccggactgctactaccatccatctgaggaagaggagggggggaggtgcttcagcaattgtaaagaaaatagaggcccagagtttttcgttcttgttttgttttctgtagagagaattaccaacctcatctgtgtattgcaattgcgctatgtaaatccccaagttgaaagttgtttccttatcttgagaagtataacaaggtatgctggctgcgtcgaaatatattacatacactgcagccatgatttgcgtgttgtatagtaatgcatcttaagctaatatatatacgacgaaaaactttggggctattaggaaacatcatcggtgatgctgatatatgacaacccctctg

SEQ ID NO: 69653 - DNA, 1336 bp, Zea Mays
atggagttgaggaatcgactcactgaattgaagagaaaaactgccgtagacaagacagaggtcgagcaggcatcgagtgatcttaaggcaaaaactgtgccattgaatttggctcttgtcacgctaaaaaagagacgagctgatgcagtggccatgcacaccaatgccatgaaagttgctcagatgaatctcatggcaaccacctcagattgtatgaaaatgcaatcaaaatctgtaaagcaactttgcagattgttcccaatgcgacgaaacgatcagaatgtttttatggggtcaagtaaagataactttcatggaatgtcaaaaactggagaacagttccttgctggagtgtatcatcaccttccgtcaatattggcatttaccgctcctcacccaaacagctacgaccggattcagccagatacttggagtggagcttatctatgctgggggaaagagaacaaggaggctccattaagaaccgcatgcccacctggtgtgcctcttgatttagtcagcaacttcgagatcaaatccttcgatggttgcgcaaatccgcacttgggtcttgctgctatcgtagctgctggcatcgatgggctaagaagacaccttacctgagccaattgaatcaaacccttctgatcactcttcaaaactgaaaaggctaccgcagaacctgcaggaatctgtagaatcactttctgcagataaggttttgcatgagttaattggtgataaacttgtcacaactgctatagttatacggaaggtggctgagggacccaggagttgtggggcgtcaaagataatcggcatggaatttagtagtttataacagtgcctgaaggagctaggatttatgaatcattctccaccaccttgaggtttggttgacatgaacaaacctcctgaaatgatatctggcaatatgaaggtagggtcagcaaactcgtttgaaagaaaaagacctagaaagggaactcttggccaagcttttggtgtacttgtgcacagctcaagagcacttgctgagccagaggcagctactccaggggacataattatattggatctgagcacctgctccttggactgcttcgtgagggtgaaggttattcgaatgattggtgagaccaccgaagctgttggtgctagagttggcggcggcagcagtggtaataagatgccaactcttgaggagtatggaactaatttaacaaaattagcagaggagggaaaattagatcctgttgttggaaggcagccacaaattgagcatgtcataccgcacattcacaagtctctaatcaacaagtcatccaaagagtga

SEQ ID NO: 69654 - DNA, 1816 bp, Zea Mays
gtctctactcccaaacccaaacctgattaatgcctcgcctccattccgtactctcctgctgaagcttttttctctgaaactagtatatcccccatctgtttggtcccgacgattttccgctttgggagcaccaccaagctcttccagcttgcagggctggagtctttgccagggacagcaatggtgccgacgcatggcgatacagccggaccgagctccagccaggatgacccggcagccagcgtgaagaagcgcaacagcaacaggcctcagtcaacagcttccagcttgcaagcctatacttgcgcctcagacggtcatccctgtactcctgtttgtgggcgtagtttttatcgtgattggccttggctgcattgcagcctcaaacagggtggttgaagtggtctatgagtatgagacttcatgcataccaagacacatgcttggcaacaaagtcgcctatatccaaaacccatctatagataagacatgcacatggattctcaaggttcctagggatatgaagcacccaatctacgtatattaccagcttgacaagttctaccagaaccacaggaggtacgtgaagagccgcagcgacaagcagctgagagatcccaaggaggccaacagcacgcagcagtactgcaagcccgaagctaccaccgagcacgggagcgccgtcgtcccctgcgggctcgtggcctggagcctgttcaacgacacctacagcttcgcccggggcaacaacagggcgctgagggtccacaagcgaggcatctcgtggaggagcgagagggaacacatcttcgggaagcaggtgttcccgaggaatttccagaaaggagctctgatcggaggaggcacgcttgatccaagaatacctgtgagtgtactacagtacctctggaactttattactggggaaaaaaaacagggctgtgatgaagtcgaaattccacagctgagtgagcaagaagacctgatcgtgtggatgcggaccgcggctctgccgacgttccggaagctgtacggcaggatcgaggcggacctccgcgccggcgagctggtcacggtgacgacgcagaataactacaacacctacagcttcggcgggaagaaggcgctggtgctgtccacggccggcgtgctgggaggcaggaacggcttcctcggccgcgggtacgccgtcgtcggcctggcctgcctgctgctggcgctgctcctcaccatgctctgcctcgtcttcccactgaaagaggaacaccttgcgctgcagtaccctttgctccggcctgccacggtgaccatgcatgcctagctagatcagtagacggtgtacagattgaaacagtttcttctttttcatttttgatgtatactcagattgaaacagtttgttctttttcttcttggatgtatacttggggtctgatcggtgatttcttgcgcacaggaacagctataggtcgagctgcgacatgtaaatagacactcaaagatttgagttgtacttgtacatttctactagggtctaggggttacagagtttaaaattggaatatgacagtggatacgagggtaacccccaatgtaatcgccaagtgatttggtagtagagcaccgcagtgtgtctaaaaatgaggattgaagtttctctgtcgatactgagcaccgttaccagccagccactacgcagctctgtttggatatcagttatattatttaggtgtcactgaattgtagtttagaattgtacggtctattttcacataatacagaggagtgagctctctattgagagagagagtttcta

SEQ ID NO: 69655 - DNA, 1947 bp, Zea Mays
cttacctttctggtttcctagaggctctcaaggacaggttgtgatgtctctccatccttttagttccttgcttcgtctctactcccaaacccaaacctgattaatgcctcgcctccattccgtactctcctgctgaagcttttttctctgaaactagtatatcccccatctgtttggtcccgacgattttccgctttgggagcaccaccaagctcttccagcttgcagggctggagtctttgccagggacagcaatggtgccgacgcatggcgatacagccggaccgagctccagccaggatgacccggcagccagcgtgaagaagcgcaacagcaacaggcctcagtatcatccgtttactcagcaacagcttccagcttgcaagcctatacttgcgcctcagacggatggtgactattgcaactaaccctgggcgacgcaatcaggtcatccctgtactcctgtttgtgggcgtagtttttatcgtgattggccttggctgcattgcagcctcaaacagggtggttgaagtggtctatgagtatgagacttcatgcataccaagacacatgcttggcaacaaagtcgcctatatccaaaacccatctatagataagacatgcacatggattctcaaggttcctagggatatgaagcacccaatctacgtatattaccagcttgacaagttctaccagaaccacaggaggtacgtgaagagccgcagcgacaagcagctgagagatcccaaggaggccaacagcacgcagcagtactgcaagcccgaagctaccaccgagcacgggagcgccgtcgtcccctgcgggctcgtggcctggagcctgttcaacgacacctacagcttcgcccggggcaacaacagggcgctgagggtccacaagcgaggcatctcgtggaggagcgagagggaacacatcttcgggaagcaggtgttcccgaggaatttccagaaaggagctctgatcggaggaggcacgcttgatccaagaatacctgtgagtgtactacagtacctctggaactttattactggggaaaaaaaacagggctgtgatgaagtcgaaattccacagctgagtgagcaagaagacctgatcgtgtggatgcggaccgcggctctgccgacgttccggaagctgtacggcaggatcgaggcggacctccgcgccggcgagctggtcacggtgacgacgcagaataactacaacacctacagcttcggcgggaagaaggcgctggtgctgtccacggccggcgtgctgggaggcaggaacggcttcctcggccgcgggtacgccgtcgtcggcctggcctgcctgctgctggcgctgctcctcaccatgctctgcctcgtcttcccactgaaagaggaacaccttgcgctgcagtaccctttgctccggcctgccacggtgaccatgcatgcctagctagatcagtagacggtgtacagattgaaacagtttcttctttttcatttttgatgtatactcagattgaaacagtttgttctttttcttcttggatgtatacttggggtctgatcggtgatttcttgcgcacaggaacagctataggtcgagctgcgacatgtaaatagacactcaaagatttgagttgtacttgtacatttctactagggtctaggggttacagagtttaaaattggaatatgacagtggatacgagggtaacccccaatgtaatcgccaagtgatttggtagtagagcaccgcagtgtgtctaaaaatgaggattgaagtttctctgtcgatactgagcaccgttaccagccagccactacgcagctctgtttggatatcagttatattatttaggtgtcactgaattgtagtttagaattgtacggtctattttcacataatacagaggagtgagctctctattgagagagagagtttcta

SEQ ID NO: 69656 - DNA, 2030 bp, Zea Mays
gttaggtgatgcttacctttctggtttcctagaggctctcaaggacagtatatcccccatctgtttggtcccgacgattttccgctttgggagcaccaccaagctcttccagcttgcagggctggagtctttgccagggacagcaatggtgccgacgcatggcgatacagccggaccgagctccagccaggatgacccggcagccagcgtgaagaagcgcaacagcaacaggcctcagtgtaatcgaatctctcctctgataaagaagcagaattctgttaattatttctttatttctccagcctggtttttagtgaatttgagggctggggcttttgcaccataatcagaattcgatgtgcttcgaaccagaacaaaaagaaaaaaaaaactctctctttccaagattaggcgatggtgaattcatgaagttttttttttaaaaaatgaggcgattcataaagccgaagtaacctaaactaatttatacgatgctgttatctttgtggtttaaatttgaaacaaggagtggttgttatgtatatgatgactgtattgtgttgactttgaagatcatccgtttactcagcaacagcttccagcttgcaagcctatacttgcgcctcagacggatggtgactattgcaactaaccctgggcgacgcaatcaggtcatccctgtactcctgtttgtgggcgtagtttttatcgtgattggccttggctgcattgcagcctcaaacagggtggttgaagtggtctatgagtatgagacttcatgcataccaagacacatgcttggcaacaaagtcgcctatatccaaaacccatctatagataagacatgcacatggattctcaaggttcctagggatatgaagcacccaatctacgtatattaccagcttgacaagttctaccagaaccacaggaggtacgtgaagagccgcagcgacaagcagctgagagatcccaaggaggccaacagcacgcagcagtactgcaagcccgaagctaccaccgagcacgggagcgccgtcgtcccctgcgggctcgtggcctggagcctgttcaacgacacctacagcttcgcccggggcaacaacagggcgctgagggtccacaagcgaggcatctcgtggaggagcgagagggaacacatcttcgggaagcaggtgttcccgaggaatttccagaaaggagctctgatcggaggaggcacgcttgatccaagaatacctctgtacggcaggatcgaggcggacctccgcgccggcgagctggtcacggtgacgacgcagaataactacaacacctacagcttcggcgggaagaaggcgctggtgctgtccacggccggcgtgctgggaggcaggaacggcttcctcggccgcgggtacgccgtcgtcggcctggcctgcctgctgctggcgctgctcctcaccatgctctgcctcgtcttcccactgaaagaggaacaccttgcgctgcagtaccctttgctccggcctgccacggtgaccatgcatgcctagctagatcagtagacggtgtacagattgaaacagtttcttctttttcatttttgatgtatactcagattgaaacagtttgttctttttcttcttggatgtatacttggggtctgatcggtgatttcttgcgcacaggaacagctataggtcgagctgcgacatgtaaatagacactcaaagatttgagttgtacttgtacatttctactagggtctaggggttacagagtttaaaattggaatatgacagtggatacgagggtaacccccaatgtaatcgccaagtgatttggtagtagagcaccgcagtgtgtctaaaaatgaggattgaagtttctctgtcgatactgagcaccgttaccagccagccactacgcagctctgtttggatatcagttatattatttaggtgtcactgaattgtagtttagaattgtacggtctattttcacataatacagaggagtgagctctctattgagagagagagtttcta

SEQ ID NO: 69657 - DNA, 2325 bp, Zea Mays
cttggctgttgcgttggttgtaatacactaatacctgtgtaggaagtgcctcaagcgatgatacagacacaggttgagccaataataatatcatgaacaaaacaccaaagtcttcttgagcagaggaggatgaaagtgacgtggacggttgggttaggtgatgcttacctttctggtttcctagaggctctcaaggacaggttgtgatgtctctccatccttttagttccttgcttcgtctctactcccaaacccaaacctgattaatgcctcgcctccattccgtactctcctgctgaagcttttttctctgaaactagtatatcccccatctgtttggtcccgacgattttccgctttgggagcaccaccaagctcttccagcttgcagggctggagtctttgccagggacagcaatggtgccgacgcatggcgatacagccggaccgagctccagccaggatgacccggcagccagcgtgaagaagcgcaacagcaacaggcctcagtgtaatcgaatctctcctctgataaagaagcagaattctgttaattatttctttatttctccagcctggtttttagtgaatttgagggctggggcttttgcaccataatcagaattcgatgtgcttcgaaccagaacaaaaagaaaaaaaaaactctctctttccaagattaggcgatggtgaattcatgaagttttttttttaaaaaatgaggcgattcataaagccgaagtaacctaaactaatttatacgatgctgttatctttgtggtttaaatttgaaacaaggagtggttgttatgtatatgatgactgtattgtgttgactttgaagatcatccgtttactcagcaacagcttccagcttgcaagcctatacttgcgcctcagacggtcatccctgtactcctgtttgtgggcgtagtttttatcgtgattggccttggctgcattgcagcctcaaacagggtggttgaagtggtctatgagtatgagacttcatgcataccaagacacatgcttggcaacaaagtcgcctatatccaaaacccatctatagataagacatgcacatggattctcaaggttcctagggatatgaagcacccaatctacgtatattaccagcttgacaagttctaccagaaccacaggaggtacgtgaagagccgcagcgacaagcagctgagagatcccaaggaggccaacagcacgcagcagtactgcaagcccgaagctaccaccgagcacgggagcgccgtcgtcccctgcgggctcgtggcctggagcctgttcaacgacacctacagcttcgcccggggcaacaacagggcgctgagggtccacaagcgaggcatctcgtggaggagcgagagggaacacatcttcgggaagcaggtgttcccgaggaatttccagaaaggagctctgatcggaggaggcacgcttgatccaagaatacctctgagtgagcaagaagacctgatcgtgtggatgcggaccgcggctctgccgacgttccggaagctgtacggcaggatcgaggcggacctccgcgccggcgagctggtcacggtgacgacgcagaataactacaacacctacagcttcggcgggaagaaggcgctggtgctgtccacggccggcgtgctgggaggcaggaacggcttcctcggccgcgggtacgccgtcgtcggcctggcctgcctgctgctggcgctgctcctcaccatgctctgcctcgtcttcccactgaaagaggaacaccttgcgctgcagtaccctttgctccggcctgccacggtgaccatgcatgcctagctagatcagtagacggtgtacagattgaaacagtttcttctttttcatttttgatgtatactcagattgaaacagtttgttctttttcttcttggatgtatacttggggtctgatcggtgatttcttgcgcacaggaacagctataggtcgagctgcgacatgtaaatagacactcaaagatttgagttgtacttgtacatttctactagggtctaggggttacagagtttaaaattggaatatgacagtggatacgagggtaacccccaatgtaatcgccaagtgatttggtagtagagcaccgcagtgtgtctaaaaatgaggattgaagtttctctgtcgatactgagcaccgttaccagccagccactacgcagctctgtttggatatcagttatattatttaggtgtcactgaattgtagtttagaattgtacggtctattttcacataatacagaggagtgagctctctattgagagagagagtttcta

SEQ ID NO: 69658 - DNA, 1158 bp, Zea Mays
tataaaggacacttttacctggcatgagagaaaggtgacttgtacatgtggggaaatgcaagagactgccagctaggcatccctggtctgccagaagttcagccactcccagtcaaggtgattttcctcagagacgatgatgaagggttgggcccttctcgtgtcatctccgttgcaataggagcctcccatgccatgtgcttggtctccacgcaacaaaccgagaagtagggcagtctgggtttctgctttgtgaaggcacttatgtttcggtattcatacgtctgagtcagttcgaagcggaccctgttctcttttgatttgatccagctgttcctgttggtggaaactggaatccctgctcggttaagctgaacacatctggaagaaagaataaaaaaactgccacacgctgatagaaagcaggaaaggccccctgtggctggctccgggtaggcatagctgtagtagattcgaatccttgaatttcatctgtggaagttcttatgagtgtagacattgttcttgctttttctgtagcactgtaatacgagggacgaaactgcgagaagcgcggatgtaagacatgcgcccttgtgcgttctcaccaaagatttgtagattctgtctgtagttgagatggctagaattttgtagcgctaattttattgtgactctgtcaggaggcctggcctgattttagttgctgttcaataaaggcaaccgttggtgttttattccttatcattcgtttgtagaatctcggaggcaaatatcttgagtagttgagccgcgatgtaaactcggcctgggggaaaaaagaagaagagaaaaccatagctgcaagtctgcaagcgtgcagccctgtcccagccaaccaatcgcagattcgatgcttgaatctcactgtacagcgtacactgtgcgtgtgaaaattcaccttcctcaggcagggtgctctcagctctgcccaggctgatttgggtcctcttcgtgcgaatcagatcgccactatgtgggctcgtcagatcgcacgcctgccctgcccaagtgggcaaattcaggggtcaagccttgcgtgcgcaccgccgccatcctccttccaccttcgctgtcagtcaagcgacctccccgagcccgattggatttagcgtcgtc

SEQ ID NO: 69659 - DNA, 1559 bp, Zea Mays
ctggtagatagttgttttctccagatggcatagcagtcaatagccagtgtttgttagcatgtccagaccttcatttcattatcagacatagattagatgactttggaattgtccttgaagtgccattatgctgcttcaatccagcaaattcaaacttcgaactgggtagaggaagcaatttcagtgattggaggccacagcttgtccctagtctgaaaagcacccgtgtaatccaagtagcatgtggtggatatcattctttagctttgactgatgaaggcaaagttctctcttgggggcatggtgggcatggtcaacttgggcatcccacccttcaaaatcatagagtcccacttgccatcaaagctttatcagatgagcgaattgtccatatagcctgtggaggatcaacctctgctgctatatcagagaaaggtgacttgtacatgtggggaaatgcaagagactgccagctaggcatccctggtctgccagaagttcagccactcccagtcaaggtgattttcctcagagacgatgatgaagggttgggcccttctcgtgtcatctccgttgcaataggagcctcccatgccatgtgcttggtctccacgcaacaaaccgagaagtagggcagtctgggtttctgctttgtgaaggcacttatgtttcggtattcatacgtctgagtcagttcgaagcggaccctgttctcttttgatttgatccagctgttcctgttggtggaaactggaatccctgctcggttaagctgaacacatctggaagaaagaataaaaaaactgccacacgctgatagaaagcaggaaaggccccctgtggctggctccgggtaggcatagctgtagtagattcgaatccttgaatttcatctgtggaagttcttatgagtgtagacattgttcttgctttttctgtagcactgtaatacgagggacgaaactgcgagaagcgcggatgtaagacatgcgcccttgtgcgttctcaccaaagatttgtagattctgtctgtagttgagatggctagaattttgtagcgctaattttattgtgactctgtcaggaggcctggcctgattttagttgctgttcaataaaggcaaccgttggtgttttattccttatcattcgtttgtagaatctcggaggcaaatatcttgagtagttgagccgcgatgtaaactcggcctgggggaaaaaagaagaagagaaaaccatagctgcaagtctgcaagcgtgcagccctgtcccagccaaccaatcgcagattcgatgcttgaatctcactgtacagcgtacactgtgcgtgtgaaaattcaccttcctcaggcagggtgctctcagctctgcccaggctgatttgggtcctcttcgtgcgaatcagatcgccactatgtgggctcgtcagatcgcacgcctgccctgcccaagtgggcaaattcaggggtcaagccttgcgtgcgcaccgccgccatcctccttccaccttcgctgtcagtcaagcgacctccccgagcccgattggatttagcgtcgtc

SEQ ID NO: 69660 - DNA, 2314 bp, Zea Mays
gcaaacccggtttcacactagttctgtattcgtgtcctctggtctctcgcaggccaaacaaaagcgctgccgccgccggcaatgttccgccgcctcctcccccaccgtcgctacatctccacctcgcccgcctccaactccaccccgaccctctactctgacggaaccatcccattctctatcctctcgtggggccgtggcgcttccggacagctcggcggtggcaaggaggagcgccgcctctacccatcccccgtcgcccacctacttctccccgaatcagacccacgccttgctcccacccccggacgccttccctctgcagaggatacgtctggagtggaggttgggatctcttgtgggctcttccactcctcgctcctcgtcgaaggaggcgcctgggtgtggggcaagggcgacggaggccgcctcggcctcggtgacgagtcttccgccttcgtgccccactctaaccccaatctccgcgatctccgcctccttgcgcttggcggcatccactccgccgcgctgaccacttccggtgacgtcttcacctgtctgcaggggttatggtggatttggagctctgggtcaccatgtataccatagggagcttttgccaaggcaagtgaatggcccttgggaagggaagataacacacatttctactagtggagcgcatactgcagcaatcactgactcaggtgaactttacacttggggtcgtgatgaaggtgatggtaggctggggcttgggagtggaggtggtccaggtgaagctggctccctcagcgttccttccaaggtgaatgcactgcctgttccagttgctgctgtagcttgtggtggcttcttcacaatggctcttacttcagatggacagttatggagttggggagcaaattcaaacttcgaactgggtagaggaagcaatttcagtgattggaggccacagcttgtccctagtctgaaaagcacccgtgtaatccaagtagcatgtggtggatatcattctttagctttgactgatgaaggcaaagttctctcttgggggcatggtgggcatggtcaacttgggcatcccacccttcaaaatcatagagtcccacttgccatcaaagctttatcagatgagcgaattgtccatatagcctgtggaggatcaacctctgctgctatatcagagaaaggtgacttgtacatgtggggaaatgcaagagactgccagctaggcatccctggtctgccagaagttcagccactcccagtcaaggtgattttcctcagagacgatgatgaagggttgggcccttctcgtgtcatctccgttgcaataggagcctcccatgccatgtgcttggtctccacgcaacaaaccgagaagtagggcagtctgggtttctgctttgtgaaggcacttatgtttcggtattcatacgtctgagtcagttcgaagcggaccctgttctcttttgatttgatccagctgttcctgttggtggaaactggaatccctgctcggttaagctgaacacatctggaagaaagaataaaaaaactgccacacgctgatagaaagcaggaaaggccccctgtggctggctccgggtaggcatagctgtagtagattcgaatccttgaatttcatctgtggaagttcttatgagtgtagacattgttcttgctttttctgtagcactgtaatacgagggacgaaactgcgagaagcgcggatgtaagacatgcgcccttgtgcgttctcaccaaagatttgtagattctgtctgtagttgagatggctagaattttgtagcgctaattttattgtgactctgtcaggaggcctggcctgattttagttgctgttcaataaaggcaaccgttggtgttttattccttatcattcgtttgtagaatctcggaggcaaatatcttgagtagttgagccgcgatgtaaactcggcctgggggaaaaaagaagaagagaaaaccatagctgcaagtctgcaagcgtgcagccctgtcccagccaaccaatcgcagattcgatgcttgaatctcactgtacagcgtacactgtgcgtgtgaaaattcaccttcctcaggcagggtgctctcagctctgcccaggctgatttgggtcctcttcgtgcgaatcagatcgccactatgtgggctcgtcagatcgcacgcctgccctgcccaagtgggcaaattcaggggtcaagccttgcgtgcgcaccgccgccatcctccttccaccttcgctgtcagtcaagcgacctccccgagcccgattggatttagcgtcgtc

SEQ ID NO: 69661 - DNA, 465 bp, Zea Mays
gaatcaagcttcaacattaagtgtgcagacgacatgccatgtttacaattacatgatcaaaaccctcgagtaaattcatcacaggcttttgtatcaccggtcattatttgagttcatcaggcatttcacatgtaacacgaaggaaagaagaatcaaaagatactacgcgaagcattccagagatgctcctaacacttaacccagcattatggctaggcacaggtttccacaaaaagaaggcaaaagcaaggtgcccgcacttcatgctagttggagggtccttcagtattccttcttaccaaagtttttgcaccacagttgagatgggattggccggactgggtgatgcgggcgttgcttctggcggaagtcgccgccggcgtgcccaccgccatggtcaccgcccatcgccgccgcagccttcgattcgatcagatcgggggtgaggttcgatgcggggggtga

SEQ ID NO: 69662 - DNA, 732 bp, Zea Mays
gaatcaagcttcaacattaagtgtgcagacgacatgccatgtttacaattacatgatcaaaaccctcgagtaaattcatcacaggcttttgtatcaccggtcattatttgagttcatcaggcatttcacatgtaacacgaaggaaagaagaatcaaaagatactacgcgaagcattccagagatgctcctaacacttaacccagcattatggctaggcacaggtttccacaaaaagaaggcaaaagcaaggtgcccgcacttcatgctagttggagggtccttcagtattccttcttaccaaagtttttgcaccacagttgagatgggattggccggactgggtgatgcgggcgttgctgcataaaagtatcatattacattcgttagcactgtgatttccccagtctattttacaaacaaaacgatgaacacattgagtcagtatgcctgtcttttagcaacatggctccagcctgaaaaaaagggccaagctctggtacctcgagctctgcggacttcatagcgatggggatgcagatgaggaagacgccgaacatggcgatggcggtgttacggcgccagtggacggggcggcagtacgggccgcccgtcatgctccataccttctggcggaagtcgccgccggcgtgcccaccgccatggtcaccgcccatcgccgccgcagccttcgattcgatcagatcgggggtgaggttcgatgcggggggtga

SEQ ID NO: 69663 - DNA, 3494 bp, Zea Mays
ctcgctcctctggccttccctccagctcgttccgacgttcccctccgccttcggccgtggccatggccgccgccgccactttcggcttcctccaccctctaatccggaaacctttagttccaccactgtacatcctcccgcttcccacccaaccccacgccaaaacgcaccctcgctctctccccctcctcttcctcctcccgcgccgccgccggggaggccccatcgctgccttacccaacaccacatcttcgtccacgaatgcctctgcctcgcccacctacgacgtccgggaggcagaggccgccgtcgcggatctcctccgcgagggcggcgcctccgcggacgacgccgccgccatcgccgcgcgcgcgccggcctacgccgctatgctcgccgatggcgtccgcgagctggacgagcttggcctctgggcgtcgtggagctccggtgccagtgctcggctgggcctcagcggtgtcgtcgagatggagatggggaggctcggttttaggaggaaggtgtatctcatgggacggagcaggcctgaccacgacgtggtgccgctcctcgagagcttgggagtgcgtctctcctcggccaagctcatcgcgccttacgtcgcttctgcgggccttactgtgctgattgataggtgattatgcaatactaattggaaggaatgctaagcgcatgatgacatacttatcaatacctgcagatgatgcactccaaagtactttatctttttttgaaaaaatggaggctagatatggcggtgttagcatgttgggacatggagacatgtcatttccttacctcattgaatcatttccaatgcttcttctctgctcagaagataatcatctcgagccgttagttgattttctcgagcacattggaattccaaagccaaagattgcatcagttttgctgctatttcctcctatcattctttctgatgttgaaaatgatattaagcctagaattcgtgaatgggagaaggtatttttgttcatggtatctattggaacctgctagattgtacacttgacaataacacattaatactagtgatcccatttttaaatttcctaggctggcattgaacacgactatattactaggatgttgttgaagtatccatggattctttcaacgagtgtgatagagaactacagtaaaatgttgttgtttttcaaccaaaaaggggtaagtaaaaaagaataattttcctactatgttgtgcctcaagttcatgttaaattgttttgcctgtcttgccttctttttgttgttgggagtattcaacttttccctttcagatttccagtacagtcctcgctattgctgtgaaaagttggccacatattcttggctcctcttcaaaaagaatgaattcagttttggagctgtttcgtgttctgggcatcagtaaaaaaatggtggttccagtcattacatcaagtccacagttattactgagaaaacctgatcagtttatgcagaatgttttgttttttagagaaatgggtgttgataagaaaacaacaggaaaaattttgtgtcgttcgcctgaaatatttgcttcaaatgtggataacactctcaagaagaaaattgactttcttatcaactttggtgtttctaaacaccatcttcctcgcatcattaggaagtatccagaacttctattgttggacctaaattgtacattgctccctaggattaactacttattggagatgggtttgtctaagaaagatctgtgctcaatgatctctaggttttccccacttctaggttacagtatagaacttgttatgaaaccaaagcttgagtttctgctaagaaccatgaagaaaccacttaaagcagttgtagaatacccaaggtacttcagttattcacttgaggggaagatcaaaccgcgtttttggctattgcagagtagaaacatagactgcactctgacagagatgttagcaaagaacgatgaactctttgctgaagagtacttggaacttggaggattgctcgagaaacctgtacaatcaagcataggtggttaatttctggacttatttgaaccatgcagtgcactatgctgaagctgttcagctttatgcttggattggtgaggctgtttttcagatgggaggccacttttttttcctgaaaacgaaggagagctgtgtttctttgtattcaaatgtcgtggctctgataaccactcttttctggaccgataaatggctgcttggttcctgtatcggagatgtggcgccagctgttcttgctatggtaccagcaaaaataattaaaacaagggctgtggctgacgcactctcaaacaacagttaggtatcaaatattaatggaggactgtccatgattggtctgttcaattttttcagctatgggatgccacacatgaagtttctttaaccattgatgatggtcgccatatctggagattctctggttcggttgaattctcggcgatatcggcctatagagtttcttccatggtttggtctcctttgatccttggaagcgtatttcaaaaacttgggctccacctaagtgcaagattttcatttggctagctgtccgaaatcgctgttggactgcagaccgattgccttggagaggactggcacacctagttcattacgttctttgcgacctggaagaggagaatattaatcacattttgttttcctgtgttttctcgagggttctggtttagagttttctcccggctggggtatatttattgaccatgtgttggggtcccaggagcaatcgtttgcagattggtggtgaaaggcttgcaaatatctcccaaaagaaagaaaaaaggaagggcatggattcaatgattatgttgcgaatatgtggagtgttctgcatgctctcgaagatgaacaacatctctggtgtcttgctgtaagagttttgttcttgtccggagtgcaagcacagcccctcacggctctgtccggagcgagggtaaagtttgtacgggaggccacttttccggtgcttagtatcaaaaaggtaatacttgttctcatgaaagtcacctaacggaagttacaggtgcaaatttagattgatgagtgatgttgttaactcaatacagcaatgcattgggtattgggaaggtgatgaagaaattagttttcgccatacgcctcagttttactaatgcttcgtttagatgtcgatattggaggtcatgtaattgaatttgtttgaataccaaattaatcatagtatagtattgaaatgagatgtaattccaattctattgtttggatgtcatcgaattatagtttagaattatgcggtctaattccacgtaataccgagcgatgaggctttgcattgagagagagtttctagttatagtccaatccagggaattaggcatatgattctaaatctcaattttatatgtaacaaaacaacagaatttaagaaagctg

SEQ ID NO: 69664 - DNA, 3939 bp, Zea Mays
actcgctcctctggccttccctccagctcgttccgacgttcccctccgccttcggccgtggccatggccgccgccgccactttcggcttcctccaccctctaatccggaaacctttagttccaccactgtacatcctcccgcttcccacccaaccccacgccaaaacgcaccctcgctctctccccctcctcttcctcctcccgcgccgccgccggggaggccccatcgctgccttacccaacaccacatcttcgtccacgaatgcctctgcctcgcccacctacgacgtccgggaggcagaggccgccgtcgcggatctcctccgcgagggcggcgcctccgcggacgacgccgccgccatcgccgcgcgcgcgccggcctacgccgctatgctcgccgatggcgtccgcgagctggacgagcttggcctctgggcgtcgtggagctccggtgccagtgctcggctgggcctcagcggtgtcgtcgagatggagatggggaggctcggttttaggaggaaggtgtatctcatgggacggagcaggcctgaccacgacgtggtgccgctcctcgagagcttgggagtgcgtctctcctcggccaagctcatcgcgccttacgtcgcttctgcgggccttactgtgctgattgatagggtcagagatgctcaacttgcttacataacatgcgtagatcgaaaatacactatacgtttacgtgccgtacaagggagtttcagtatttatttatttttaattgatgcattggttcctctgttgaaattcaaacttctattgcaatcgtttgcaaaattgttaaccaagatcaagtggtttcttaagaaatttcaaggttgacaaaagtttatgttcttaaaaaaaacaaagtgctcaagcatctgtcacgagtcgcctctattctcaatagtactttggtttcgataccatggaacaaaactaactaaaggaatcattctgatagataacactataaatttagaatacactcagtttttaacactagtctatgcctctatggagacatcatgatagtggtcaatatgtttcttcaacagttgcagctgtgcttggcactataatatgtttactatatcacaacacactatttcttatggagtcgtggtttattcacatataggttaagtttttgaaggaaatgttattttcaagcagtgattatgcaatactaattggaaggaatgctaagcgcatgatgacatacttatcaatacctgcagatgatgcactccaaagtactttatctttttttgaaaaaatggaggctagatatggcggtgttagcatgttgggacatggagacatgtcatttccttacctcattgaatcatttccaatgcttcttctctgctcagaagataatcatctcgagccgttagttgattttctcgagcacattggaattccaaagccaaagattgcatcagttttgctgctatttcctcctatcattctttctgatgttgaaaatgatattaagcctagaattcgtgaatgggagaaggctggcattgaacacgactatattactaggatgttgttgaagtatccatggattctttcaacgagtgtgatagagaactacagtaaaatgttgttgtttttcaaccaaaaaggggtaagtaaaaaagaataattttcctactatgttgtgcctcaagttcatgttaaattgttttgcctgtcttgccttctttttgttgttgggagtattcaacttttccctttcagatttccagtacagtcctcgctattgctgtgaaaagttggccacatattcttggctcctcttcaaaaagaatgaattcagttttggagctgtttcgtgttctgggcatcagtaaaaaaatggtggttccagtcattacatcaagtccacagttattactgagaaaacctgatcagtttatgcagaatgttttgttttttagagaaatgggtgttgataagaaaacaacaggaaaaattttgtgtcgttcgcctgaaatatttgcttcaaatgtggataacactctcaagaagaaaattgactttcttatcaactttggtgtttctaaacaccatcttcctcgcatcattaggaagtatccagaacttctattgttggacctaaattgtacattgctccctaggattaactacttattggagatgggtttgtctaagaaagatctgtgctcaatgatctctaggttttccccacttctaggttacagtatagaacttgttatgaaaccaaagcttgagtttctgctaagaaccatgaagaaaccacttaaagcagttgtagaatacccaaggtacttcagttattcacttgaggggaagatcaaaccgcgtttttggctattgcagagtagaaacatagactgcactctgacagagatgttagcaaagaacgatgaactctttgctgaagagtacttggaacttggaggattgctcgagaaacctgtacaatcaagcataggtggttaatttctggacttatttgaaccatgcagtgcactatgctgaagctgttcagctttatgcttggattggtgaggctgtttttcagatgggaggccacttttttttcctgaaaacgaaggagagctgtgtttctttgtattcaaatgtcgtggctctgataaccactcttttctggaccgataaatggctgcttggttcctgtatcggagatgtggcgccagctgttcttgctatggtaccagcaaaaataattaaaacaagggctgtggctgacgcactctcaaacaacagttaggtatcaaatattaatggaggactgtccatgattggtctgttcaattttttcagctatgggatgccacacatgaagtttctttaaccattgatgatggtcgccatatctggagattctctggttcggttgaattctcggcgatatcggcctatagagtttcttccatggtttggtctcctttgatccttggaagcgtatttcaaaaacttgggctccacctaagtgcaagattttcatttggctagctgtccgaaatcgctgttggactgcagaccgattgccttggagaggactggcacacctagttcattacgttctttgcgacctggaagaggagaatattaatcacattttgttttcctgtgttttctcgagggttctggtttagagttttctcccggctggggtatatttattgaccatgtgttggggtcccaggagcaatcgtttgcagattggtggtgaaaggcttgcaaatatctcccaaaagaaagaaaaaaggaagggcatggattcaatgattatgttgcgaatatgtggagtgttctgcatgctctcgaagatgaacaacatctctggtgtcttgctgtaagagttttgttcttgtccggagtgcaagcacagcccctcacggctctgtccggagcgagggtaaagtttgtacgggaggccacttttccggtgcttagtatcaaaaaggtaatacttgttctcatgaaagtcacctaacggaagttacaggtgcaaatttagattgatgagtgatgttgttaactcaatacagcaatgcattgggtattgggaaggtgatgaagaaattagttttcgccatacgcctcagttttactaatgcttcgtttagatgtcgatattggaggtcatgtaattgaatttgtttgaataccaaattaatcatagtatagtattgaaatgagatgtaattccaattctattgtttggatgtcatcgaattatagtttagaattatgcggtctaattccacgtaataccgagcgatgaggctttgcattgagagagagtttctagttatagtccaatccagggaattaggcatatgattctaaatctcaattttatatgtaacaaaacaacagaatttaagaaagctg

SEQ ID NO: 69665 - DNA, 3082 bp, Zea Mays
cgaggactcgctcctctggccttccctccagctcgttccgacgttcccctccgccttcggccgtggccatggccgccgccgccactttcggcttcctccaccctctaatccggaaacctttagttccaccactgtacatcctcccgcttcccacccaaccccacgccaaaacgcaccctcgctctctccccctcctcttcctcctcccgcgccgccgccggggaggccccatcgctgccttacccaacaccacatcttcgtccacgaatgcctctgcctcgcccacctacgacgtccgggaggcagaggccgccgtcgcggatctcctccgcgagggcggcgcctccgcggacgacgccgccgccatcgccgcgcgcgcgccggcctacgccgctatgctcgccgatggcgtccgcgagctggacgagcttggcctctgggcgtcgtggagctccggtgccagtgctcggctgggcctcagcggtgtcgtcgagatggagatggggaggctcggttttaggaggaaggtgtatctcatgggacggagcaggcctgaccacgacgtggtgccgctcctcgagagcttgggagtgcgtctctcctcggccaagctcatcgcgccttacgtcgcttctgcgggccttactgtgctgattgatagggttaagtttttgaaggaaatgttattttcaagcagtgattatgcaatactaattggaaggaatgctaagcgcatgatgacatacttatcaatacctgcagatgatgcactccaaagtactttatctttttttgaaaaaatggaggctagatatggcggtgttagcatgttgggacatggagacatgtcatttccttacctcattgaatcatttccaatgcttcttctctgctcagaagataatcatctcgagccgttagttgattttctcgagcacattggaattccaaagccaaagattgcatcagttttgctgctatttcctcctatcattctttctgatgttgaaaatgatattaagcctagaattcgtgaatgggagaaggatgttgttgaagtatccatggattctttcaacgagtgtgatagagaactacagtaaaatgttgttgtttttcaaccaaaaagggatttccagtacagtcctcgctattgctgtgaaaagttggccacatattcttggctcctcttcaaaaagaatgaattcagttttggagctgtttcgtgttctgggcatcagtaaaaaaatggtggttccagtcattacatcaagtccacagttattactgagaaaacctgatcagtttatgcaggattaactacttattggagatgggtttgtctaagaaagatctgtgctcaatgatctctaggttttccccacttctaggttacagtatagaacttgttatgaaaccaaagcttgagtttctgctaagaaccatgaagaaaccacttaaagcagttgtagaatacccaaggtacttcagttattcacttgaggggaagatcaaaccgcgtttttggctattgcagagtagaaacatagactgcactctgacagagatgttagcaaagaacgatgaactctttgctgaagagtacttggaacttggaggattgctcgagaaacctgtacaatcaagcataggtggttaatttctggacttatttgaaccatgcagtgcactatgctgaagctgttcagctttatgcttggattggtgaggctgtttttcagatgggaggccacttttttttcctgaaaacgaaggagagctgtgtttctttgtattcaaatgtcgtggctctgataaccactcttttctggaccgataaatggctgcttggttcctgtatcggagatgtggcgccagctgttcttgctatggtaccagcaaaaataattaaaacaagggctgtggctgacgcactctcaaacaacagttaggtatcaaatattaatggaggactgtccatgattggtctgttcaattttttcagctatgggatgccacacatgaagtttctttaaccattgatgatggtcgccatatctggagattctctggttcggttgaattctcggcgatatcggcctatagagtttcttccatggtttggtctcctttgatccttggaagcgtatttcaaaaacttgggctccacctaagtgcaagattttcatttggctagctgtccgaaatcgctgttggactgcagaccgattgccttggagaggactggcacacctagttcattacgttctttgcgacctggaagaggagaatattaatcacattttgttttcctgtgttttctcgagggttctggtttagagttttctcccggctggggtatatttattgaccatgtgttggggtcccaggagcaatcgtttgcagattggtggtgaaaggcttgcaaatatctcccaaaagaaagaaaaaaggaagggcatggattcaatgattatgttgcgaatatgtggagtgttctgcatgctctcgaagatgaacaacatctctggtgtcttgctgtaagagttttgttcttgtccggagtgcaagcacagcccctcacggctctgtccggagcgagggtaaagtttgtacgggaggccacttttccggtgcttagtatcaaaaaggtaatacttgttctcatgaaagtcacctaacggaagttacaggtgcaaatttagattgatgagtgatgttgttaactcaatacagcaatgcattgggtattgggaaggtgatgaagaaattagttttcgccatacgcctcagttttactaatgcttcgtttagatgtcgatattggaggtcatgtaattgaatttgtttgaataccaaattaatcatagtatagtattgaaatgagatgtaattccaattctattgtttggatgtcatcgaattatagtttagaattatgcggtctaattccacgtaataccgagcgatgaggctttgcattgagagagagtttctagttatagtccaatccagggaattaggcatatgattctaaatctcaattttatatgtaacaaaacaacagaatttaagaaagctg

SEQ ID NO: 69666 - DNA, 3359 bp, Zea Mays
aaaggacacagcgtgcgaggactcgctcctctggccttccctccagctcgttccgacgttcccctccgccttcggccgtggccatggccgccgccgccactttcggcttcctccaccctctaatccggaaacctttagttccaccactgtacatcctcccgcttcccacccaaccccacgccaaaacgcaccctcgctctctccccctcctcttcctcctcccgcgccgccgccggggaggccccatcgctgccttacccaacaccacatcttcgtccacgaatgcctctgcctcgcccacctacgacgtccgggaggcagaggccgccgtcgcggatctcctccgcgagggcggcgcctccgcggacgacgccgccgccatcgccgcgcgcgcgccggcctacgccgctatgctcgccgatggcgtccgcgagctggacgagcttggcctctgggcgtcgtggagctccggtgccagtgctcggctgggcctcagcggtgtcgtcgagatggagatggggaggctcggttttaggaggaaggtgtatctcatgggacggagcaggcctgaccacgacgtggtgccgctcctcgagagcttgggagtgcgtctctcctcggccaagctcatcgcgccttacgtcgcttctgcgggccttactgtgctgattgatagggttaagtttttgaaggaaatgttattttcaagcagtgattatgcaatactaattggaaggaatgctaagcgcatgatgacatacttatcaatacctgcagatgatgcactccaaagtactttatctttttttgaaaaaatggaggctagatatggcggtgttagcatgttgggacatggagacatgtcatttccttacctcattgaatcatttccaatgcttcttctctgctcagaagataatcatctcgagccgttagttgattttctcgagcacattggaattccaaagccaaagattgcatcagttttgctgctatttcctcctatcattctttctgatgttgaaaatgatattaagcctagaattcgtgaatgggagaaggtatttttgttcatggctggcattgaacacgactatattactaggatgttgttgaagtatccatggattctttcaacgagtgtgatagagaactacagtaaaatgttgttgtttttcaaccaaaaagggatttccagtacagtcctcgctattgctgtgaaaagttggccacatattcttggctcctcttcaaaaagaatgaattcagttttggagctgtttcgtgttctgggcatcagtaaaaaaatggtggttccagtcattacatcaagtccacagttattactgagaaaacctgatcagtttatgcagaatgttttgttttttagagaaatgggtgttgataagaaaacaacaggaaaaattttgtgtcgttcgcctgaaatatttgcttcaaatgtggataacactctcaagaagaaaattgactttcttatcaactttggtgtttctaaacaccatcttcctcgcatcattaggaagtatccagaacttctattgttggacctaaattgtacattgctccctaggattaactacttattggagatgggtttgtctaagaaagatctgtgctcaatgatctctaggttttccccacttctaggttacagtatagaacttgttatgaaaccaaagcttgagtttctgctaagaaccatgaagaaaccacttaaagcagttgtagaatacccaaggtacttcagttattcacttgaggggaagatcaaaccgcgtttttggctattgcagagtagaaacatagactgcactctgacagagatgttagcaaagaacgatgaactctttgctgaagagtacttggaacttggaggattgctcgagaaacctgtacaatcaagcataggtggttaatttctggacttatttgaaccatgcagtgcactatgctgaagctgttcagctttatgcttggattggtgaggctgtttttcagatgggaggccacttttttttcctgaaaacgaaggagagctgtgtttctttgtattcaaatgtcgtggctctgataaccactcttttctggaccgataaatggctgcttggttcctgtatcggagatgtggcgccagctgttcttgctatggtaccagcaaaaataattaaaacaagggctgtggctgacgcactctcaaacaacagttaggtatcaaatattaatggaggactgtccatgattggtctgttcaattttttcagctatgggatgccacacatgaagtttctttaaccattgatgatggtcgccatatctggagattctctggttcggttgaattctcggcgatatcggcctatagagtttcttccatggtttggtctcctttgatccttggaagcgtatttcaaaaacttgggctccacctaagtgcaagattttcatttggctagctgtccgaaatcgctgttggactgcagaccgattgccttggagaggactggcacacctagttcattacgttctttgcgacctggaagaggagaatattaatcacattttgttttcctgtgttttctcgagggttctggtttagagttttctcccggctggggtatatttattgaccatgtgttggggtcccaggagcaatcgtttgcagattggtggtgaaaggcttgcaaatatctcccaaaagaaagaaaaaaggaagggcatggattcaatgattatgttgcgaatatgtggagtgttctgcatgctctcgaagatgaacaacatctctggtgtcttgctgtaagagttttgttcttgtccggagtgcaagcacagcccctcacggctctgtccggagcgagggtaaagtttgtacgggaggccacttttccggtgcttagtatcaaaaaggtaatacttgttctcatgaaagtcacctaacggaagttacaggtgcaaatttagattgatgagtgatgttgttaactcaatacagcaatgcattgggtattgggaaggtgatgaagaaattagttttcgccatacgcctcagttttactaatgcttcgtttagatgtcgatattggaggtcatgtaattgaatttgtttgaataccaaattaatcatagtatagtattgaaatgagatgtaattccaattctattgtttggatgtcatcgaattatagtttagaattatgcggtctaattccacgtaataccgagcgatgaggctttgcattgagagagagtttctagttatagtccaatccagggaattaggcatatgattctaaatctcaattttatatgtaacaaaacaacagaatttaagaaagctg

SEQ ID NO: 69667 - DNA, 3776 bp, Zea Mays
ggataatgcacgcggtaacggaaaaggacacagcgtgcgaggactcgctcctctggccttccctccagctcgttccgacgttcccctccgccttcggccgtggccatggccgccgccgccactttcggcttcctccaccctctaatccggaaacctttagttccaccactgtacatcctcccgcttcccacccaaccccacgccaaaacgcaccctcgctctctccccctcctcttcctcctcccgcgccgccgccggggaggccccatcgctgccttacccaacaccacatcttcgtccacgaatgcctctgcctcgcccacctacgacgtccgggaggcagaggccgccgtcgcggatctcctccgcgagggcggcgcctccgcggacgacgccgccgccatcgccgcgcgcgcgccggcctacgccgctatgctcgccgatggcgtccgcgagctggacgagcttggcctctgggcgtcgtggagctccggtgccagtgctcggctgggcctcagcggtgtcgtcgagatggagatggggaggctcggttttaggaggaaggtgtatctcatgggacggagcaggcctgaccacgacgtggtgccgctcctcgagagcttgggagtgcgtctctcctcggccaagctcatcgcgccttacgtcgcttctgcgggccttactgtgctgattgatagggttaagtttttgaaggaaatgttattttcaagcagtgattatgcaatactaattggaaggaatgctaagcgcatgatgacatacttatcaatacctgcagatgatgcactccaaagtactttatctttttttgaaaaaatggaggctagatatggcggtgttagcatgttgggacatggagacatgtcatttccttacctcattgaatcatttccaatgcttcttctctgctcagaagataatcatctcgagccgttagttgattttctcgagcacattggaattccaaagccaaagattgcatcagttttgctgctatttcctcctatcattctttctgatgttgaaaatgatattaagcctagaattcgtgaatgggagaaggctggcattgaacacgactatattactaggatgttgttgaagtatccatggattctttcaacgagtgtgatagagaactacagtaaaatgttgttgtttttcaaccaaaaagggatttccagtacagtcctcgctattgctgtgaaaagttggccacatattcttggctcctcttcaaaaagaatgaattcagttttggagctgtttcgtgttctgggcatcagtaaaaaaatggtggttccagtcattacatcaagtccacagttattactgagaaaacctgatcagtttatgcaggtgtgtaacgattattgaggttgcatttatatatttaaacttcattggcaatggatataaactacttttggttgcatataagtttcaaagcaaattggaaccaaagttcagcaaaaggattgttttgtgtacccaatatcacgtcttccattaaattgacatggattatggctcttataaatgtacatttgttgccggattcacatattttcccaatcagaatgtggtgcttaatatcaatgtttttatctttctgtctgtcgtaactgcatccacagtaggcatatttatatagttatatcctgagttggggatgtcttgtgccttgacccttgagttgcatctcttttacatctttaaccctccaattactgatatcttgatactaacttttgtgcctcatgtttcagaatgttttgttttttagagaaatgggtgttgataagaaaacaacaggaaaaattttgtgtcgttcgcctgaaatatttgcttcaaatgtggataacactctcaagaagaaaattgactttcttatcaactttggtgtttctaaacaccatcttcctcgcatcattaggaagtatccagaacttctattgttggacctaaattgtacattgctccctaggattaactacttattggagatgggtttgtctaagaaagatctgtgctcaatgatctctaggttttccccacttctaggttacagtatagaacttgttatgaaaccaaagcttgagtttctgctaagaaccatgaagaaaccacttaaagcagttgtagaatacccaaggtacttcagttattcacttgaggggaagatcaaaccgcgtttttggctattgcagagtagaaacatagactgcactctgacagagatgttagcaaagaacgatgaactctttgctgaagagtacttggaacttggaggattgctcgagaaacctgtacaatcaagcataggtggttaatttctggacttatttgaaccatgcagtgcactatgctgaagctgttcagctttatgcttggattggtgaggctgtttttcagatgggaggccacttttttttcctgaaaacgaaggagagctgtgtttctttgtattcaaatgtcgtggctctgataaccactcttttctggaccgataaatggctgcttggttcctgtatcggagatgtggcgccagctgttcttgctatggtaccagcaaaaataattaaaacaagggctgtggctgacgcactctcaaacaacagttaggtatcaaatattaatggaggactgtccatgattggtctgttcaattttttcagctatgggatgccacacatgaagtttctttaaccattgatgatggtcgccatatctggagattctctggttcggttgaattctcggcgatatcggcctatagagtttcttccatggtttggtctcctttgatccttggaagcgtatttcaaaaacttgggctccacctaagtgcaagattttcatttggctagctgtccgaaatcgctgttggactgcagaccgattgccttggagaggactggcacacctagttcattacgttctttgcgacctggaagaggagaatattaatcacattttgttttcctgtgttttctcgagggttctggtttagagttttctcccggctggggtatatttattgaccatgtgttggggtcccaggagcaatcgtttgcagattggtggtgaaaggcttgcaaatatctcccaaaagaaagaaaaaaggaagggcatggattcaatgattatgttgcgaatatgtggagtgttctgcatgctctcgaagatgaacaacatctctggtgtcttgctgtaagagttttgttcttgtccggagtgcaagcacagcccctcacggctctgtccggagcgagggtaaagtttgtacgggaggccacttttccggtgcttagtatcaaaaaggtaatacttgttctcatgaaagtcacctaacggaagttacaggtgcaaatttagattgatgagtgatgttgttaactcaatacagcaatgcattgggtattgggaaggtgatgaagaaattagttttcgccatacgcctcagttttactaatgcttcgtttagatgtcgatattggaggtcatgtaattgaatttgtttgaataccaaattaatcatagtatagtattgaaatgagatgtaattccaattctattgtttggatgtcatcgaattatagtttagaattatgcggtctaattccacgtaataccgagcgatgaggctttgcattgagagagagtttctagttatagtccaatccagggaattaggcatatgattctaaatctcaattttatatgtaacaaaacaacagaatttaagaaagctg

SEQ ID NO: 69668 - DNA, 3248 bp, Zea Mays
ataaaagttcggtttaattttcctaatttgttgagataaacttcagtaataaaaaacaatcccttcattttttgggagttttctcacgccaatatgcgatggataatgcacgcggtaacggaaaaggacacagcgtgcgaggactcgctcctctggccttccctccagctcgttccgacgttcccctccgccttcggccgtggccatggccgccgccgccactttcggcttcctccaccctctaatccggaaacctttagttccaccactgtacatcctcccgcttcccacccaaccccacgccaaaacgcaccctcgctctctccccctcctcttcctcctcccgcgccgccgccggggaggccccatcgctgccttacccaacaccacatcttcgtccacgaatgcctctgcctcgcccacctacgacgtccgggaggcagaggccgccgtcgcggatctcctccgcgagggcggcgcctccgcggacgacgccgccgccatcgccgcgcgcgcgccggcctacgccgctatgctcgccgatggcgtccgcgagctggacgagcttggcctctgggcgtcgtggagctccggtgccagtgctcggctgggcctcagcggtgtcgtcgagatggagatggggaggctcggttttaggaggaaggtgtatctcatgggacggagcaggcctgaccacgacgtggtgccgctcctcgagagcttgggagtgcgtctctcctcggccaagctcatcgcgccttacgtcgcttctgcgggccttactgtgctgattgatagggttaagtttttgaaggaaatgttattttcaagcagtgattatgcaatactaattggaaggaatgctaagcgcatgatgacatacttatcaatacctgcagatgatgcactccaaagtactttatctttttttgaaaaaatggaggctagatatggcggtgttagcatgttgggacatggagacatgtcatttccttacctcattgaatcatttccaatgcttcttctctgctcagaagataatcatctcgagccgttagttgattttctcgagcacattggaattccaaagccaaagattgcatcagttttgctgctatttcctcctatcattctttctgatgttgaaaatgatattaagcctagaattcgtgaatgggagaaggctggcattgaacacgactatattactaggatgttgttgaagtatccatggattctttcaacgagtgtgatagagaactacagtaaaatgttgttgtttttcaaccaaaaagggatttccagtacagtcctcgctattgctgtgaaaagttggccacatattcttggctcctcttcaaaaagaatgaattcagttttggagctgtttcgtgttctgggcatcagtaaaaaaatggtggttccagtcattacatcaagtccacagttattactgagaaaacctgatcagtttatgcaggattaactacttattggagatgggtttgtctaagaaagatctgtgctcaatgatctctaggttttccccacttctaggttacagtatagaacttgttatgaaaccaaagcttgagtttctgctaagaaccatgaagaaaccacttaaagcagttgtagaatacccaaggtacttcagttattcacttgaggggaagatcaaaccgcgtttttggctattgcagagtagaaacatagactgcactctgacagagatgttagcaaagaacgatgaactctttgctgaagagtacttggaacttggaggattgctcgagaaacctgtacaatcaagcataggtggttaatttctggacttatttgaaccatgcagtgcactatgctgaagctgttcagctttatgcttggattggtgaggctgtttttcagatgggaggccacttttttttcctgaaaacgaaggagagctgtgtttctttgtattcaaatgtcgtggctctgataaccactcttttctggaccgataaatggctgcttggttcctgtatcggagatgtggcgccagctgttcttgctatggtaccagcaaaaataattaaaacaagggctgtggctgacgcactctcaaacaacagttaggtatcaaatattaatggaggactgtccatgattggtctgttcaattttttcagctatgggatgccacacatgaagtttctttaaccattgatgatggtcgccatatctggagattctctggttcggttgaattctcggcgatatcggcctatagagtttcttccatggtttggtctcctttgatccttggaagcgtatttcaaaaacttgggctccacctaagtgcaagattttcatttggctagctgtccgaaatcgctgttggactgcagaccgattgccttggagaggactggcacacctagttcattacgttctttgcgacctggaagaggagaatattaatcacattttgttttcctgtgttttctcgagggttctggtttagagttttctcccggctggggtatatttattgaccatgtgttggggtcccaggagcaatcgtttgcagattggtggtgaaaggcttgcaaatatctcccaaaagaaagaaaaaaggaagggcatggattcaatgattatgttgcgaatatgtggagtgttctgcatgctctcgaagatgaacaacatctctggtgtcttgctgtaagagttttgttcttgtccggagtgcaagcacagcccctcacggctctgtccggagcgagggtaaagtttgtacgggaggccacttttccggtgcttagtatcaaaaaggtaatacttgttctcatgaaagtcacctaacggaagttacaggtgcaaatttagattgatgagtgatgttgttaactcaatacagcaatgcattgggtattgggaaggtgatgaagaaattagttttcgccatacgcctcagttttactaatgcttcgtttagatgtcgatattggaggtcatgtaattgaatttgtttgaataccaaattaatcatagtatagtattgaaatgagatgtaattccaattctattgtttggatgtcatcgaattatagtttagaattatgcggtctaattccacgtaataccgagcgatgaggctttgcattgagagagagtttctagttatagtccaatccagggaattaggcatatgattctaaatctcaattttatatgtaacaaaacaacagaatttaagaaagctg

SEQ ID NO: 69669 - DNA, 803 bp, Zea Mays
gtcaatcccttgctctcagaccttgttcactggggaaaaagcttcacctaagcatgaaaagttatctctcttattgatctagacgaggactcatagcagttctgaagtatcaattgcacaactgactctgaaaatcaagcatctgtcagctgttctacacaagaaggataaacattctagaaaggggcttcaggagatggtccaaaagagaaagaaatacatgaaatacttgcgaagaaccgactgggactcgtactgttttgttctatcaaagctggggctacgcgatgtgcccgagtacaaagctcctgattacaagagcaaagcaaccactaaggccaaatctaagaagagcaagagcaagaggagaaagatgaaggcataggagcggtgaacaaacacaccctttttggtcttgaattgcatggctaggaaatgattcgagaagatggatccatccaatcttacagttttttttttgactcgaagctgtttgtaataaccatctctttggaggccacggtttttccttgttctgcttggagcggcaaccttcctgtaagttttgtaacaactgatttattatattatttgcttttgagttctcccgctcgatatgccttattatgagggaagggaggaacagatacgacgatatgataccattacgtcatcatcagtttgtagctttgccagttttttttgtttgacgtaattttccagaattcttgtataagaatgcttgaacaatcttgctagctagcctagcgaaacaatcaagtagaaattcttctattttctat

SEQ ID NO: 69670 - DNA, 714 bp, Zea Mays
cccgaagggaggcaggacagagaattgcacaactgactctgaaaatcaagcatctgtcagctgttctacacaagaaggataaacattctagaaaggggcttcaggagatggtccaaaagagaaagaaatacatgaaatacttgcgaagaaccgactgggactcgtactgttttgttctatcaaagctggggctacgcgatgtgcccgagtacaaagctcctgattacaagagcaaagcaaccactaaggccaaatctaagaagagcaagagcaagaggagaaagatgaaggcataggagcggtgaacaaacacaccctttttggtcttgaattgcatggctaggaaatgattcgagaagatggatccatccaatcttacagttttttttttgactcgaagctgtttgtaataaccatctctttggaggccacggtttttccttgttctgcttggagcggcaaccttcctgtaagttttgtaacaactgatttattatattatttgcttttgagttctcccgctcgatatgccttattatgagggaagggaggaacagatacgacgatatgataccattacgtcatcatcagtttgtagctttgccagttttttttgtttgacgtaattttccagaattcttgtataagaatgcttgaacaatcttgctagctagcctagcgaaacaatcaagtagaaattcttctattttctat

SEQ ID NO: 69671 - DNA, 751 bp, Zea Mays
gttggagtacgcttttcacaatggacttagagccaacgttgatttcgggagtcccaacaagttgcacaactgactctgaaaatcaagcatctgtcagctgttctacacaagaaggataaacattctagaaaggggcttcaggagatggtccaaaagagaaagaaatacatgaaatacttgcgaagaaccgactgggactcgtactgttttgttctatcaaagctggggctacgcgatgtgcccgagtacaaagctcctgattacaagagcaaagcaaccactaaggccaaatctaagaagagcaagagcaagaggagaaagatgaaggcataggagcggtgaacaaacacaccctttttggtcttgaattgcatggctaggaaatgattcgagaagatggatccatccaatcttacagttttttttttgactcgaagctgtttgtaataaccatctctttggaggccacggtttttccttgttctgcttggagcggcaaccttcctgtaagttttgtaacaactgatttattatattatttgcttttgagttctcccgctcgatatgccttattatgagggaagggaggaacagatacgacgatatgataccattacgtcatcatcagtttgtagctttgccagttttttttgtttgacgtaattttccagaattcttgtataagaatgcttgaacaatcttgctagctagcctagcgaaacaatcaagtagaaattcttctattttctat

SEQ ID NO: 69672 - DNA, 825 bp, Zea Mays
gtcacatttatgcagaaattaggatagcgatcaagcaggtgttctgattgtcgaagtcacaaatgacagttgctggtccaataggaacctgaggctgtagcggtcagtgcagatgaggaagcagggaacctaaagttgcacaactgactctgaaaatcaagcatctgtcagctgttctacacaagaaggataaacattctagaaaggggcttcaggagatggtccaaaagagaaagaaatacatgaaatacttgcgaagaaccgactgggactcgtactgttttgttctatcaaagctggggctacgcgatgtgcccgagtacaaagctcctgattacaagagcaaagcaaccactaaggccaaatctaagaagagcaagagcaagaggagaaagatgaaggcataggagcggtgaacaaacacaccctttttggtcttgaattgcatggctaggaaatgattcgagaagatggatccatccaatcttacagttttttttttgactcgaagctgtttgtaataaccatctctttggaggccacggtttttccttgttctgcttggagcggcaaccttcctgtaagttttgtaacaactgatttattatattatttgcttttgagttctcccgctcgatatgccttattatgagggaagggaggaacagatacgacgatatgataccattacgtcatcatcagtttgtagctttgccagttttttttgtttgacgtaattttccagaattcttgtataagaatgcttgaacaatcttgctagctagcctagcgaaacaatcaagtagaaattcttctattttctat

SEQ ID NO: 69673 - DNA, 714 bp, Zea Mays
ctttattctgttcttgagttcgaattgcacaactgactctgaaaatcaagcatctgtcagctgttctacacaagaaggataaacattctagaaaggggcttcaggagatggtccaaaagagaaagaaatacatgaaatacttgcgaagaaccgactgggactcgtactgttttgttctatcaaagctggggctacgcgatgtgcccgagtacaaagctcctgattacaagagcaaagcaaccactaaggccaaatctaagaagagcaagagcaagaggagaaagatgaaggcataggagcggtgaacaaacacaccctttttggtcttgaattgcatggctaggaaatgattcgagaagatggatccatccaatcttacagttttttttttgactcgaagctgtttgtaataaccatctctttggaggccacggtttttccttgttctgcttggagcggcaaccttcctgtaagttttgtaacaactgatttattatattatttgcttttgagttctcccgctcgatatgccttattatgagggaagggaggaacagatacgacgatatgataccattacgtcatcatcagtttgtagctttgccagttttttttgtttgacgtaattttccagaattcttgtataagaatgcttgaacaatcttgctagctagcctagcgaaacaatcaagtagaaattcttctattttctat

SEQ ID NO: 69674 - DNA, 1726 bp, Zea Mays
ggaaccctataggcggagcagaagtgagcctccacctccacccgccgccgccatggctctccgtcgtgtcaccccgcagaggagacccgttctccccctcccccgtgccttcttctcctcgtgccccccgttcactccgcccccgtccccggcgaacgaccccgacgacgaccattccccgtcctcctctccgccccccaaccccggcgcgccgcggaatccgtcatcctcgcttttccaggacatcaaggatcgcctccgcttgtctcccacgtcgtcccctccgcgccggaatccatcgaacttgctccgtcccaaccccgcgcgtggtcctccttcgaaaccgtcccttgaagaggttcgccggatgctcgatgacttccgcccaaccgtcggcgcgccctccccctccgcacccggagtcgccccctcctttttggacataatcaagaggagcagcgtcgcccagggtgccaacgctgggcagggggtgaccggcttcgattccgtccgagagagtctcaagcgctccccgctgcggacaccgcatcctccgtcgacgccgtttctgactctttcgcagagcaacatcttcagcccggagttacagaggaagtttaaggctgtagatgcgcggaaggatgggaaggaatctaacgtggcgctttcgaggctctacagctacgaagagcttgggaagaagctaggcgagctccggccagcggttggggccaaagacggtaaggagtggttctctcttaaggagctgcaggggcggatcgccaagctggcggagttggagaagcaggaaaaccagttgtcagggtctctctgggaaatcaagaattgcattgggaacctgaatcataaaccagaaaacgccactcagcgggtaaacattcatgcactgctgaaccttcgcggtcagccgacgccagactacatgagtcagcctccgcaggaggagttgttagagaagtacttccatccagatcatatgtcatccgaagagacgatgaaattggagctccaaaggttgcacaactgactctgaaaatcaagcatctgtcagctgttctacacaagaaggataaacattctagaaaggggcttcaggagatggtccaaaagagaaagaaatacatgaaatacttgcgaagaaccgactgggactcgtactgttttgttctatcaaagctggggctacgcgatgtgcccgagtacaaagctcctgattacaagagcaaagcaaccactaaggccaaatctaagaagagcaagagcaagaggagaaagatgaaggcataggagcggtgaacaaacacaccctttttggtcttgaattgcatggctaggaaatgattcgagaagatggatccatccaatcttacagttttttttttgactcgaagctgtttgtaataaccatctctttggaggccacggtttttccttgttctgcttggagcggcaaccttcctgtaagttttgtaacaactgatttattatattatttgcttttgagttctcccgctcgatatgccttattatgagggaagggaggaacagatacgacgatatgataccattacgtcatcatcagtttgtagctttgccagttttttttgtttgacgtaattttccagaattcttgtataagaatgcttgaacaatcttgctagctagcctagcgaaacaatcaagtagaaattcttctattttctat

SEQ ID NO: 69675 - DNA, 2218 bp, Zea Mays
acatcctccattagtccgcctccggccaccccctttcattccgccgcaacgccaccgcccccaacgcaagtttccggcgatggaccccgcggcggccgcgctaggtgcagtacccgccgctggcgcgccacctccgggcgcagccgcaggggaccagcaggcagctccccgggttgagcggctcagcgcgggggtgcagcagcagttgaacctggaggggatgcgcgcgcgcgcggtggggctgtacaaggccatctcccgcatcctcgaggactttgacgtcatcatacgcaccaatcccagcgcctcccccaagtggcaggacgtgctcgggcagttctcgatggtgagcatggagctcttcaacattgtggaggacattaagaatgtgtccaaggtgtttgtcgtgtacccccggaatgtcaatgccgagaatgcaacaatactacctgtaatgctgtcgtcaaaactgctgcctgagatggaagttgaggaaactactaagagagagcaactattgtctggaataactaatctacctgtgcctacacagattgaaaaattaaaggttagaatagacatgattgggagtgcatgcgaaactgctgagaaagtaattgcagaatgccgtaagagctatgggctgggaagccgtcaggggacaaatcttggtcctacattggacaaagcacaagctgcaaagatacaggagcaggaaggcctacttagagcagcagtaaattatggtgaaggattacgggtacctggagatcagaggcatccacaatctcttcctatccatctgatagaagtgcttcctttaggagacggtgcacaaaattttggtgatagttctggtagttatcccaaaaatatgtcaacatttgcacctaatagtgtcaacagccagggaaatcagattcaggcatccggaggacagttacttggaaggcctgcgccatcacctggaaccacaggaacccctaatttcgagaatgtgtccactcctccaatgccatatgctaactctcctaggtcaggcaccaatatgatgaataccccttccccccagcaacatctaacaccacaacaacagaggcaaaaactgatgcaacattctcaaccgcttcaccagccggtgaggccatcagctgctgggatgctagcacagagcgcacttcctcaactacaagatttacaggggcaggctcaacaaaaactacaggtccctggtcaacagcaaatgcaatacaaccaagcattgtcacaacagtttcataacagacagatgcaacctggacgtatgcaaccaggcatggctcagagtcaattgaatcaaggaactcagctacgaagtcatttaggccagtttactggagctgcaaataatgcgatgttcaatgctgcacaggcatcatcaaactcacaaatggttctgccagaaataattctctgcgtgcatatggtataattgatcacaactactgggcaatgacagtctgtattcccttttgcccttgtagatcgtcaagaaagtatggtatggctggtgggcatccacataggagccatccccaaatgctgactgaccaaatgttcggtatgggagccacaaatagcagcatgatgggaatgcagcagcagcagcaagggctatacgggaacatgcaggcaggtgcacagaacgtgccacagggtatggcgggccttcagaaccagacccagaatcccaacttcactcagcagaggcaacaaaaccaacaatgatttaacactaacgttcacggaggttgaaagatgagcaatatatccgtcgttttgctgcttgtctgttggtctttactcagcttatctgtgagactgatagtagccccaggttagccttcgttttgctgtaaatcattagcgagatgcaggtcaattataattatatacgttgtaactgtgtttcggatatgtctaatatgttttgttggaatcgtgttacgcgcgttccttttatttataattaagcctcgcagcaaggccggcaatcgaattgcatacggctagacgggtgggtagttcaccaggatgaaaatcggtcatcaggtggaccctagaattatttgaggaactcacagatgtactgtaatatgtattccctgttgtctttctggataaatatcccaagatgttattacgtctttcatgcttgcaatcatgaggccccattgct

SEQ ID NO: 69676 - DNA, 2153 bp, Zea Mays
acatcctccattagtccgcctccggccaccccctttcattccgccgcaacgccaccgcccccaacgcaagtttccggcgatggaccccgcggcggccgcgctaggtgcagtacccgccgctggcgcgccacctccgggcgcagccgcaggggaccagcaggcagctccccgggttgagcggctcagcgcgggggtgcagcagcagttgaacctggaggggatgcgcgcgcgcgcggtggggctgtacaaggccatctcccgcatcctcgaggactttgacgtcatcatacgcaccaatcccagcgcctcccccaagtggcaggacgtgctcgggcagttctcgatggtgagcatggagctcttcaacattgtggaggacattaagaatgtgtccaaggtgtttgtcgtgtacccccggaatgtcaatgccgagaatgcaacaatactacctgtaatgctgtcgtcaaaactgctgcctgagatggaagttgaggaaactactaagagagagcaactattgtctggaataactaatctacctgtgcctacacagattgaaaaattaaaggttagaatagacatgattgggagtgcatgcgaaactgctgagaaagtaattgcagaatgccgtaagagctatgggctgggaagccgtcaggggacaaatcttggtcctacattggacaaagcacaagctgcaaagatacaggagcaggaaggcctacttagagcagcagtaaattatggattacgggtacctggagatcagaggcatccacaatctcttcctatccatctgatagaagtgcttcctttaggagacggtgcacaaaattttggtgatagttctggtagttatcccaaaaatatgtcaacatttgcacctaatagtgtcaacagccagggaaatcagattcaggcatccggaggacagttacttggaaggcctgcgccatcacctggaaccacaggaacccctaatttcgagaatgtgtccactcctccaatgccatatgctaactctcctaggtcaggcaccaatatgatgaataccccttccccccagcaacatctaacaccacaacaacagaggcaaaaactgatgcaacattctcaaccgcttcaccagccggtgaggccatcagctgctgggatgctagcacagagcgcacttcctcaactacaagatttacaggggcaggctcaacaaaaactacaggtccctggtcaacagcaaatgcaatacaaccaagcattgtcacaacagtttcataacagacagatgcaacctggacgtatgcaaccaggcatggctcagagtcaattgaatcaaggaactcagctacgaagtcatttaggccagtttactggagctgcaaataatgcgatgttcaatgctgcacaggcatcatcaaactcacaaatgatggcaaatatgcatggatcacagtcgcttatgccacaaatgcagtatggtatggctggtgggcatccacataggagccatccccaaatgctgactgaccaaatgttcggtatgggagccacaaatagcagcatgatgggaatgcagcagcagcagcaagggctatacgggaacatgcaggcaggtgcacagaacgtgccacagggtatggcgggccttcagaaccagacccagaatcccaacttcactcagcagaggcaacaaaaccaacaatgatttaacactaacgttcacggaggttgaaagatgagcaatatatccgtcgttttgctgcttgtctgttggtctttactcagcttatctgtgagactgatagtagccccaggttagccttcgttttgctgtaaatcattagcgagatgcaggtcaattataattatatacgttgtaactgtgtttcggatatgtctaatatgttttgttggaatcgtgttacgcgcgttccttttatttataattaagcctcgcagcaaggccggcaatcgaattgcatacggctagacgggtgggtagttcaccaggatgaaaatcggtcatcaggtggaccctagaattatttgaggaactcacagatgtactgtaatatgtattccctgttgtctttctggataaatatcccaagatgttattacgtctttcatgcttgcaatcatgaggccccattgct

SEQ ID NO: 69677 - DNA, 2134 bp, Zea Mays
acatcctccattagtccgcctccggccaccccctttcattccgccgcaacgccaccgcccccaacgcaagtttccggcgatggaccccgcggcggccgcgctaggtgcagtacccgccgctggcgcgccacctccgggcgcagccgcaggggaccagcaggcagctccccgggttgagcggctcagcgcgggggtgcagcagcagttgaacctggaggggatgcgcgcgcgcgcggtggggctgtacaaggccatctcccgcatcctcgaggactttgacgtcatcatacgcaccaatcccagcgcctcccccaagtggcaggacgtgctcgggcagttctcgatggtgagcatggagctcttcaacattgtggaggacattaagaatgtgtccaaggtgtttgtcgtgtacccccggaatgtcaatgccgagaatgcaacaatactacctgtaatgctgtcgtcaaaactgctgcctgagatggaagttgaggaaactactaagagagagcaactattgtctggaataactaatctacctgtgcctacacagattgaaaaattaaagacatgattgggagtgcatgcgaaactgctgagaaagtaattgcagaatgccgtaagagctatgggctgggaagccgtcaggggacaaatcttggtcctacattggacaaagcacaagctgcaaagatacaggagcaggaaggcctacttagagcagcagtaaattatggtgaaggattacgggtacctggagatcagaggcatccacaatctcttcctatccatctgatagaagtgcttcctttaggagacggtgcacaaaattttggtgatagttctggtagttatcccaaaaatatgtcaacatttgcacctaatagtgtcaacagccagggaaatcagattcaggcatccggaggacagttacttggaaggcctgcgccatcacctggaaccacaggaacccctaatttcgagaatgtgtccactcctccaatgccatatgctaactctcctaggtcaggcaccaatatgatgaataccccttccccccagcaacatctaacaccacaacaacagaggcaaaaactgatgcaacattctcaaccgcttcaccagccggtgaggccatcagctgctgggatgctagcacagagcgcacttcctcaactacaagatttacaggggcaggctcaacaaaaactacagcaaatgcaatacaaccaagcattgtcacaacagtttcataacagacagatgcaacctggacgtatgcaaccaggcatggctcagagtcaattgaatcaaggaactcagctacgaagtcatttaggccagtttactggagctgcaaataatgcgatgttcaatgctgcacaggcatcatcaaactcacaaatgatggcaaatatgcatggatcacagtcgcttatgccacaaatgcagtatggtatggctggtgggcatccacataggagccatccccaaatgctgactgaccaaatgttcggtatgggagccacaaatagcagcatgatgggaatgcagcagcagcagcaagggctatacgggaacatgcaggcaggtgcacagaacgtgccacagggtatggcgggccttcagaaccagacccagaatcccaacttcactcagcagaggcaacaaaaccaacaatgatttaacactaacgttcacggaggttgaaagatgagcaatatatccgtcgttttgctgcttgtctgttggtctttactcagcttatctgtgagactgatagtagccccaggttagccttcgttttgctgtaaatcattagcgagatgcaggtcaattataattatatacgttgtaactgtgtttcggatatgtctaatatgttttgttggaatcgtgttacgcgcgttccttttatttataattaagcctcgcagcaaggccggcaatcgaattgcatacggctagacgggtgggtagttcaccaggatgaaaatcggtcatcaggtggaccctagaattatttgaggaactcacagatgtactgtaatatgtattccctgttgtctttctggataaatatcccaagatgttattacgtctttcatgcttgcaatcatgaggccccattgct

SEQ ID NO: 69678 - DNA, 2030 bp, Zea Mays
acatcctccattagtccgcctccggccaccccctttcattccgccgcaacgccaccgcccccaacgcaagtttccggcgatggaccccgcggcggccgcgctaggtgcagtacccgccgctggcgcgccacctccgggcgcagccgcaggggaccagcaggcagctccccgggttgagcggctcagcgcgggggtgcagcagcagttgaacctggaggggatgcgcgcgcgcgcggtggggctgtacaaggccatctcccgcatcctcgaggactttgacgtcatcatacgcaccaatcccagcgcctcccccaagtggcaggacgtgctcgggcagttctcgatggtgagcatggagctcttcaacattgtggaggacattaagaatgtgtccaaggtgtttgtcgtgtacccccggaatgtcaatgccgagaatgcaacaatactacctgtaatgctgtcgtcaaaactgctgcctgagatggaagttgaggaaactactaagagagagcaactattgtctggaataactaatctacctgtgcctacacagattgaaaaattaaaggttagaatagacatgattgggagtgcatgcgaaactgctgagaaagtaattgcagaatgccgtaagagctatgggctgggaagccgtcaggggacaaatcttggtcctacattggacaaagcacaagctgcaaagatacaggagcaggaaggcctacttagagcagcagtaaattatggtgaaggattacgggtacctggagatcagaggcatccacaatctcttcctatccatctgatagaagtgcttcctttaggagacggtgcacaaaattttggtgatagttctggcatccggaggacagttacttggaaggcctgcgccatcacctggaaccacaggaacccctaatttcgagaatgtgtccactcctccaatgccatatgctaactctcctagaggcaaaaactgatgcaacattctcaaccgcttcaccagccggtgaggccatcagctgctgggatgctagcacagagcgcacttcctcaactacaagatttacaggggcaggctcaacaaaaactacaggtccctggtcaacagcaaatgcaatacaaccaagcattgtcacaacagtttcataacagacagatgcaacctggacgtatgcaaccaggcatggctcagagtcaattgaatcaaggaactcagctacgaagtcatttaggccagtttactggagctgcaaataatgcgatgttcaatgctgcacaggcatcatcaaactcacaaatgatggcaaatatgcatggatcacagtcgcttatgccacaaatgcagtatggtatggctggtgggcatccacataggagccatccccaaatgctgactgaccaaatgttcggtatgggagccacaaatagcagcatgatgggaatgcagcagcagcagcaagggctatacgggaacatgcaggcaggtgcacagaacgtgccacagggtatggcgggccttcagaaccagacccagaatcccaacttcactcagcagaggcaacaaaaccaacaatgatttaacactaacgttcacggaggttgaaagatgagcaatatatccgtcgttttgctgcttgtctgttggtctttactcagcttatctgtgagactgatagtagccccaggttagccttcgttttgctgtaaatcattagcgagatgcaggtcaattataattatatacgttgtaactgtgtttcggatatgtctaatatgttttgttggaatcgtgttacgcgcgttccttttatttataattaagcctcgcagcaaggccggcaatcgaattgcatacggctagacgggtgggtagttcaccaggatgaaaatcggtcatcaggtggaccctagaattatttgaggaactcacagatgtactgtaatatgtattccctgttgtctttctggataaatatcccaagatgttattacgtctttcatgcttgcaatcatgaggccccattgct

SEQ ID NO: 69679 - DNA, 2023 bp, Zea Mays
acatcctccattagtccgcctccggccaccccctttcattccgccgcaacgccaccgcccccaacgcaagtttccggcgatggaccccgcggcggccgcgctaggtgcagtacccgccgctggcgcgccacctccgggcgcagccgcaggggaccagcaggcagctccccgggttgagcggctcagcgcgggggtgcagcagcagttgaacctggaggggatgcgcgcgcgcgcggtggggctgtacaaggccatctcccgcatcctcgaggactttgacgtcatcatacgcaccaatcccagcgcctcccccaagtggcaggacgtgctcgggcagttctcgatggtgagcatggagctcttcaacattgtggaggacattaagaatgtgtccaaggtgtttgtcgtgtacccccggaatgtcaatgccgagaatgcaacaatactacctgtaatgctgtcgtcaaaactgctgcctgagatggaagttgaggaaactactaagagagagcaactattgtctggaataactaatctacctgtgcctacacagattgaaaaattaaaggttagaatagacatgattgggagtgcatgcgaaactgctgagaaagtaattgcagaatgccgtaagagctatgggctgggaagccgtcaggggacaaatcttggtcctacattggacaaagcacaagctgcaaagatacaggagcaggaaggcctacttagagcagcagtaaattatggtgaaggattacgggtacctggagatcagaggcatccacaatctcttcctatccatctgatagaagtgcttcctttaggagacggtgcacaaaattttggtgatagttctggtagttatcccaaaaatatgtcaacatttgcacctaatagtgtcaacagccagggaaatcagattcaggcatccggaggacagttacttggaaggcctgcgccatcacctggaaccacaggaacccctaatttcgagaatgtgtccactcctccaatgccatatgctaactctcctagagcgcacttcctcaactacaagatttacaggggcaggctcaacaaaaactacaggtccctggtcaacagcaaatgcaatacaaccaagcattgtcacaacagtttcataacagacagatgcaacctggacgtatgcaaccaggcatggctcagagtcaattgaatcaaggaactcagctacgaagtcatttaggccagtttactggagctgcaaataatgcgatgttcaatgctgcacaggcatcatcaaactcacaaatgatggcaaatatgcatggatcacagtcgcttatgccacaaatgcagtatggtatggctggtgggcatccacataggagccatccccaaatgctgactgaccaaatgttcggtatgggagccacaaatagcagcatgatgggaatgcagcagcagcagcaagggctatacgggaacatgcaggcaggtgcacagaacgtgccacagggtatggcgggccttcagaaccagacccagaatcccaacttcactcagcagaggcaacaaaaccaacaatgatttaacactaacgttcacggaggttgaaagatgagcaatatatccgtcgttttgctgcttgtctgttggtctttactcagcttatctgtgagactgatagtagccccaggttagccttcgttttgctgtaaatcattagcgagatgcaggtcaattataattatatacgttgtaactgtgtttcggatatgtctaatatgttttgttggaatcgtgttacgcgcgttccttttatttataattaagcctcgcagcaaggccggcaatcgaattgcatacggctagacgggtgggtagttcaccaggatgaaaatcggtcatcaggtggaccctagaattatttgaggaactcacagatgtactgtaatatgtattccctgttgtctttctggataaatatcccaagatgttattacgtctttcatgcttgcaatcatgaggccccattgct

SEQ ID NO: 69680 - DNA, 2114 bp, Zea Mays
acatcctccattagtccgcctccggccaccccctttcattccgccgcaacgccaccgcccccaacgcaagtttccggcgatggaccccgcggcggccgcgctaggtgcagtacccgccgctggcgcgccacctccgggcgcagccgcaggggaccagcaggcagctccccgggttgagcggctcagcgcgggggtgcagcagcagttgaacctggaggggatgcgcgcgcgcgcggtggggctgtacaaggccatctcccgcatcctcgaggactttgacgtcatcatacgcaccaatcccagcgcctcccccaagtggcaggacgtgctcgggcagttctcgatggtgagcatggagctcttcaacattgtggaggacattaagaatgtgtccaaggtgtttgtcgtgtacccccggaatgtcaatgccgagaatgcaacaatactacctgtaatgctgtcgtcaaaactgctgcctgagatggaagttgaggaaactactaagagagagcaactattgtctggaataactaatctacctgtgcctacacagattgaaaaattaaaggttagaatagacatgattgggagtgcatgcgaaactgctgagaaagtaattgcagaatgccgtaagagctatgggctgggaagccgtcaggggacaaatcttggtcctacattggacaaagcacaagctgcaaagatacaggagcaggaaggcctacttagagcagcagtaaattatggtgaaggattacgggtacctggagatcagaggcatccacaatctcttcctatccatctgatagaagtgcttcctttaggagacggtgcacaaaattttggtgatagttctggtagttatcccaaaaatatgtcaacatttgcacctaatagtgtcaacagccagggaaatcagattcaggcatccggaggacagttacttggaaggcctgcgccatcacctggaaccacaggaacccctaatttcgagaatgtgtccactcctccaatgccatatgctaactctcctaggtcaggcaccaatatgatgaataccccttccccccagcaacatctaacaccacaacaacagaggcaaaaactgatgcaacattctcaaccgcttcaccagccggtgaggccatcagctgctgggatgctagcacagagcgcacttcctcaactacaagatttacaggggcaggctcaacaaaaactacaggtccctggtcaacagcaaatgcaatacaaccaagcattgtcacaacagtttcataacagacagatgcaacctggacgtatgcaaccaggcatggctcagagtcaattgaatcaaggaactcagctacgaagtcatttaggccagtttactggagctgcaaataatgcgatgttcaatgctgcacaggcatcatcaaactcacaaatgtatggtatggctggtgggcatccacataggagccatccccaaatgctgactgaccaaatgttcggtatgggagccacaaatagcagcatgatgggaatgcagcagcagcagcaagggctatacgggaacatgcaggcaggtgcacagaacgtgccacagggtatggcgggccttcagaaccagacccagaatcccaacttcactcagcagaggcaacaaaaccaacaatgatttaacactaacgttcacggaggttgaaagatgagcaatatatccgtcgttttgctgcttgtctgttggtctttactcagcttatctgtgagactgatagtagccccaggttagccttcgttttgctgtaaatcattagcgagatgcaggtcaattataattatatacgttgtaactgtgtttcggatatgtctaatatgttttgttggaatcgtgttacgcgcgttccttttatttataattaagcctcgcagcaaggccggcaatcgaattgcatacggctagacgggtgggtagttcaccaggatgaaaatcggtcatcaggtggaccctagaattatttgaggaactcacagatgtactgtaatatgtattccctgttgtctttctggataaatatcccaagatgttattacgtctttcatgcttgcaatcatgaggccccattgct

SEQ ID NO: 69681 - DNA, 2372 bp, Zea Mays
acatcctccattagtccgcctccggccaccccctttcattccgccgcaacgccaccgcccccaacgcaagtttccggcgatggaccccgcggcggccgcgctaggtgcagtacccgccgctggcgcgccacctccgggcgcagccgcaggggaccagcaggcagctccccgggttgagcggctcagcgcgggggtgcagcagcagttgaacctggaggggatgcgcgcgcgcgcggtggggctgtacaaggccatctcccgcatcctcgaggactttgacgtcatcatacgcaccaatcccagcgcctcccccaagtggcaggacgtgctcgggcagttctcgatggtgagcatggagctcttcaacattgtggaggacattaagaatgtgtccaaggtgtttgtcgtgtacccccggaatgtcaatgccgagaatgcaacaatactacctgtaatgctgtcgtcaaaactgctgcctgagatggaagttgaggaaactactaagagagagcaactattgtctggaataactaatctacctgtgcctacacagattgaaaaattaaaggttagaatagacatgattgggagtgcatgcgaaactgctgagaaagtaattgcagaatgccgtaagagctatgggctgggaagccgtcaggggacaaatcttggtcctacattggacaaagcacaagctgcaaagatacaggagcaggaaggcctacttagagcagcagtaaattatggtgaaggattacgggtacctggagatcagaggcatccacaatctcttcctatccatctgatagaagtgcttcctttaggagacggtgcacaaaattttggtgatagttctggtagttatcccaaaaatatgtcaacatttgcacctaatagtgtcaacagccagggaaatcagattcaggcatccggaggacagttacttggaaggcctgcgccatcacctggaaccacaggaacccctaatttcgagaatgtgtccactcctccaatgccatatgctaactctcctaggtcaggcaccaatatgatgaataccccttccccccagcaacatctaacaccacaacaacagaggcaaaaactgatgcaacattctcaaccgcttcaccagccggtgaggccatcagctgctgggatgctagcacagagcgcacttcctcaactacaagatttacaggggcaggctcaacaaaaactacaggtccctggtcaacagcaaatgcaatacaaccaagcattgtcacaacagtttcataacagacagatgcaacctggacgtatgcaaccaggcatggctcagagtcaattgaatcaaggaactcagctacgaagtcatttaggccagtttactggagctgcaaataatgcgatgttcaatgctgcacaggcatcatcaaactcacaaatggttagatatacttattcttaacaatttagtgaggaaaataagttgtttcattttcttaaattggtagttggagtttaagatatgcatttatgagctgatgagatggactggtgaaaaaaaatctttgttttttcaatcattagcctctagagattgtttttgtacttgttcccacgattggctaatcttgcctggttcgattttgcattttagatggcaaatatgcatggatcacagtcgcttatgccacaaatgcagtatggtatggctggtgggcatccacataggagccatccccaaatgctgactgaccaaatgttcggtatgggagccacaaatagcagcatgatgggaatgcagcagcagcagcaagggctatacgggaacatgcaggcaggtgcacagaacgtgccacagggtatggcgggccttcagaaccagacccagaatcccaacttcactcagcagaggcaacaaaaccaacaatgatttaacactaacgttcacggaggttgaaagatgagcaatatatccgtcgttttgctgcttgtctgttggtctttactcagcttatctgtgagactgatagtagccccaggttagccttcgttttgctgtaaatcattagcgagatgcaggtcaattataattatatacgttgtaactgtgtttcggatatgtctaatatgttttgttggaatcgtgttacgcgcgttccttttatttataattaagcctcgcagcaaggccggcaatcgaattgcatacggctagacgggtgggtagttcaccaggatgaaaatcggtcatcaggtggaccctagaattatttgaggaactcacagatgtactgtaatatgtattccctgttgtctttctggataaatatcccaagatgttattacgtctttcatgcttgcaatcatgaggccccattgct

SEQ ID NO: 69682 - DNA, 2132 bp, Zea Mays
cgcaaactggtggtaccgccataacgatctgaaaacatcctccattagtccgcctccggccaccccctttcattccgccgcaacgccaccgcccccaacgcaagtttccggcgatggaccccgcggcggccgcgctaggtgcagtacccgccgctggcgcgccacctccgggcgcagccgcaggggaccagcaggcagctccccgggttgagcggctcagcgcgggggtgcagcagcagttgaacctggaggggatgcgcgcgcgcgcggtggggctgtacaaggccatctcccgcatcctcgaggactttgacgtcatcatacgcaccaatcccagcgcctcccccaagtggcaggacgtgctcgggcagttctcgatggtgagcatggagctcttcaacattgtggaggacattaagaatgtgtccaaggtgtttgtcgtgtacccccggaatgtcaatgccgagaatgcaacaatactacctgtaatgctgtcgtcaaaactgctgcctgagatggaagttgaggaaactactaagagagagcaactattgtctggaataactaatctacctgtgcctacacagattgaaaaattaaaggttagaatagacatgattgggagtgcatgcgaaactgctgagaaagtaattgcagaatgccgtaagagctatgggctgggaagccgtcaggggacaaatcttggtcctacattggacaaagcacaagctgcaaagatacaggagcaggaaggcctacttagagcagcagtaaattatggtgaaggattacgggtacctggagatcagaggcatccacaatctcttcctatccatctgatagaagtgcttcctttaggagacggtgcacaaaattttggtgatagttctggtagttatcccaaaaatatgtcaacatttgcacctaatagtgtcaacagccagggaaatcagattcaggcatccggaggacagttacttggaaggcctgcgccatcacctggaaccacaggaacccctaatttcgagaatgtgtccactcctccaatgccatatgctaactctcctagaggcaaaaactgatgcaacattctcaaccgcttcaccagccggtgaggccatcagctgctgggatgctagcacagagcgcacttcctcaactacaagatttacaggggcaggctcaacaaaaactacaggtccctggtcaacagcaaatgcaatacaaccaagcattgtcacaacagtttcataacagacagatgcaacctggacgtatgcaaccaggcatggctcagagtcaattgaatcaaggaactcagctacgaagtcatttaggccagtttactggagctgcaaataatgcgatgttcaatgctgcacaggcatcatcaaactcacaaatgatggcaaatatgcatggatcacagtcgcttatgccacaaatgcagtatggtatggctggtgggcatccacataggagccatccccaaatgctgactgaccaaatgttcggtatgggagccacaaatagcagcatgatgggaatgcagcagcagcagcaagggctatacgggaacatgcaggcaggtgcacagaacgtgccacagggtatggcgggccttcagaaccagacccagaatcccaacttcactcagcagaggcaacaaaaccaacaatgatttaacactaacgttcacggaggttgaaagatgagcaatatatccgtcgttttgctgcttgtctgttggtctttactcagcttatctgtgagactgatagtagccccaggttagccttcgttttgctgtaaatcattagcgagatgcaggtcaattataattatatacgttgtaactgtgtttcggatatgtctaatatgttttgttggaatcgtgttacgcgcgttccttttatttataattaagcctcgcagcaaggccggcaatcgaattgcatacggctagacgggtgggtagttcaccaggatgaaaatcggtcatcaggtggaccctagaattatttgaggaactcacagatgtactgtaatatgtattccctgttgtctttctggataaatatcccaagatgttattacgtctttcatgcttgcaatcatgaggccccattgct

SEQ ID NO: 69683 - DNA, 2178 bp, Zea Mays
cgcaaactggtggtaccgccataacgatctgaaaacatcctccattagtccgcctccggccaccccctttcattccgccgcaacgccaccgcccccaacgcaagtttccggcgatggaccccgcggcggccgcgctaggtgcagtacccgccgctggcgcgccacctccgggcgcagccgcaggggaccagcaggcagctccccgggttgagcggctcagcgcgggggtgcagcagcagttgaacctggaggggatgcgcgcgcgcgcggtggggctgtacaaggccatctcccgcatcctcgaggactttgacgtcatcatacgcaccaatcccagcgcctcccccaagtggcaggacgtgctcgggcagttctcgatggtgagcatggagctcttcaacattgtggaggacattaagaatgtgtccaaggtgtttgtcgtgtacccccggaatgtcaatgccgagaatgcaacaatactacctgtaatgctgtcgtcaaaactgctgcctgagatggaagttgaggaaactactaagagagagcaactattgtctggaataactaatctacctgtgcctacacagattgaaaaattaaaggttagaatagacatgattgggagtgcatgcgaaactgctgagaaagtaattgcagaatgccgtaagagctatgggctgggaagccgtcaggggacaaatcttggtcctacattggacaaagcacaagctgcaaagatacaggagcaggaaggcctacttagagcagcagtaaattatggtgaaggattacgggtacctggagatcagaggcatccacaatctcttcctatccatctgatagaagtgcttcctttaggagacggtgcacaaaattttggtgatagttctggtagttatcccaaaaatatgtcaacatttgcacctaatagtgtcaacagccagggaaatcagattcaggcatccggaggacagttacttggaaggcctgcgccatcacctggaaccacaggaacccctaatttcgagaatgtgtccactcctccaatgccatatgctaactctcctaggtcaggcaccaatatgatgaataccccttccccccagcaacatctaacaccacaacaacagaggcaaaaactgatgcaacattctcaaccgcttcaccagccggtgaggccatcagctgctgggatgctagcacagagcgcacttcctcaactacaagatttacaggggcaggctcaacaaaaactacagcaaatgcaatacaaccaagcattgtcacaacagtttcataacagacagatgcaacctggacgtatgcaaccaggcatggctcagagtcaattgaatcaaggaactcagctacgaagtcatttaggccagtttactggagctgcaaataatgcgatgttcaatgctgcacaggcatcatcaaactcacaaatgatggcaaatatgcatggatcacagtcgcttatgccacaaatgcagtatggtatggctggtgggcatccacataggagccatccccaaatgctgactgaccaaatgttcggtatgggagccacaaatagcagcatgatgggaatgcagcagcagcagcaagggctatacgggaacatgcaggcaggtgcacagaacgtgccacagggtatggcgggccttcagaaccagacccagaatcccaacttcactcagcagaggcaacaaaaccaacaatgatttaacactaacgttcacggaggttgaaagatgagcaatatatccgtcgttttgctgcttgtctgttggtctttactcagcttatctgtgagactgatagtagccccaggttagccttcgttttgctgtaaatcattagcgagatgcaggtcaattataattatatacgttgtaactgtgtttcggatatgtctaatatgttttgttggaatcgtgttacgcgcgttccttttatttataattaagcctcgcagcaaggccggcaatcgaattgcatacggctagacgggtgggtagttcaccaggatgaaaatcggtcatcaggtggaccctagaattatttgaggaactcacagatgtactgtaatatgtattccctgttgtctttctggataaatatcccaagatgttattacgtctttcatgcttgcaatcatgaggccccattgct

SEQ ID NO: 69684 - DNA, 2770 bp, Zea Mays
gtctttttgtgagaggctgcaaacagtatgatttgcagcagggctgcaccaaatttttttcatgagaacaggccgtcaccacttggtccaccccttcgctgtcctctctggctaaaaagaaccgcagaaagatcgttttttttccctgtccccgttcttgcactcgagttcttcagttcttaggaatagtcagacggaacaactcgagtttgccatggtggtgatctggaaccggggtgtgctgccccctctttgattccctgattggtctcgctccagttcgacgcgggatttggacgggacgggcggaagttgggagagcagagcggccggcatgtttgggtccagggtccaggatgaggtggagatgcagaggaggcctaacaacaggatctttcccgacgagagacaaaatcaatctaagtcattgtatcaaactacacgggctgacagatttggcgcaaatagaatagatctgaagaatcctgagaagcttaaggtgttaaatgaaagcaacaaaccctggcaccagcgtattctagaccctggaagtaatattgtactgagatggaacagggtgtaccttgtggcatgtttgtttgctctttttatagatccttttttctattaccttccattgattagacaaaatggcaatggatcttcatgtgttgccaaggaccagggactgagcataagaatcactgtcctacgatcacttgctgacttattttacatgttgaacatagcaatcaagtttcatactgcatatgtggatccaaagtccagagtccttggaaagggagagcttgttgtggatattaagaagattcaacgaagatatataagaactgatttctttgtagacatacttgcagctgtgccacttccacaggttactgtgtggttaattatgcctgcgataaaaagctcagattataacatccggaacactacatttgctctcgtaattgtaattcagtatgtcataagaatgtatctcatcatccctttaagcaatcagattatcaaagctgttggagtagttgcaaagtcagcttgggggggagcagcatacaatcttcttctctacatgcttgcaagccatattactggtgcaatatattaccttctctccatcgaacggcagattacatgctgggatcagcagtgcgttgctgagtacaatgatacacattgcaactttagttttataagctgtgagaataatggttctaatgattattctgtgtgggcaaataagacaaaagtatttgccaactgtgatgccacgaatagtagtatatcatttaactacgggatgttttctagtgcactgagtaaaggtgctgtatcatctccattccttgagaagtatttcttttgcctatggtggggcttgctgcagcttagttcaagcggaaatcctctcgtgacaagtgcatttatcacagagaatgcatttgcgatagcaattggtgctatcagtctcatactctttgctcagttgattggcaaaatgcagacatacctgcagtctatcagtaaaaggcttgaagagtggaggctgaggcaaagggacatggatgagtggatgagacaccatcaactcccatctcatcttcaagaacgtgtgcggcggttcgttcaagtcaaatggcttgctacaagaggagtagaagaagaatccatcttgcaagctttgcctgctgatattcgtcgggatgtgcagcgtcatctttgtttggacctcgttagacgtgtaccttttttctctgagatggataaccaacttctcgatgccatctgtgagcggctggtgtctttcctgtgccctgagaacacgtacatctctcgcgagggtgatcctgtgaacgagatgctcttcattatacgcgggaaactagagagctcaacgacaaatggtggccgcagcaacttcttcaactccatcatcctgcgccccggcgatttcgcaggcgaggagctgctcacgtgggccctgctccccaagaccaacgtccacttcccgctctcgacaaggaccgtacggagccacacagaggtggaggccttcgctctgcgggctgaggacctgaagttcgtcgcgaaccagttccgtaggctccacagcaagaagctccagcacacgttccggttctactcccaccactggaggacctgggccgcctgcttcatccaggccgcttggcggcagcaccagaggaggaagctggccgagagcctcagccgctgggagtcgtactcgtggtggtcggcggaggaccacccaaccggcgataagccgaggcaggagggcacctcgagcggcggcggcggcacgaggacgatcgctgaaggtgccatcgcccatatgcacaagctcgcctctgcttccagaaggttccgcaccgaggacgtcgctatccgcaggctgcagaagcctgacgagcccgatttctccgcggaccattttgattgaaccttcttaatattgtgcttcgcagctgggagttgcatgttgtacgaacgatcgcagccgtagcatatatactctactgtaattttactgcacagccatcttaggtgtcgtgaattgtaatagaaaaagaagatgtatcgtgtaattctaaatccagaatctaccctgtataggcttaaccttttgtgcagtgcataaacttgagtatttcgaagcgtcatatgtgacttgttagagaccagagcagtgacagcactacagatgagtgataacattggtatagctcga

SEQ ID NO: 69685 - DNA, 1540 bp, Zea Mays
gtctgtccttccaacttgctgagccggagacgtacatgccatgttcccttccgtctccacaccagggccctgtctcgttcgtcagccgccagcgaacaagccttgttctctcctgtcgacgcacatgatttcaacttcttcactcgctaggattggcatctcgtcggcgtgccctgctgcaacctgtcggcgtgtcctgctccagcgacctcgaactccaacccatggatcaaaggaaggtgcaacagccacaaaggagtcgtcgaaggtcgtcgctaaacactgccatagatgcaattcggcaagaatcaacaggtccccttgcagttggagttgctgaccgccctcaacttgcatctcggtcacagttcagcagtgacaattcatcttggaccgcgctcaatgttcggcaacattgatccctcttggatggcatctgattctagagtggttactacacgtcactactaagccaggatgttgcagatgattttgtctcagttgattatgtgcaagttgatattgaagttgtacaatcaccggggctgaatgaaatgagctcacattcaactaaaaggtgccgatccaaaaaattcagtgaagaggacacactattagtttcaggctatcttaatatgagtaaagaccctattattgaagagataaaaaagatggcacattttgggaaagagtatggaaatactttcacaagaataggacattcgagtgtgatagtaattggtcgtctttgaagcgttgttggggtataattcaaaaggaagtgaagatttttcaacattactatgacaccacagaaagaaaaaaaatgaaagtggaaaaactagtgatgacaagcttgctaaagcgaaagcgaaatttcgtgaagaccatcaaggaaagacattttttgtctttcacgtttggattattcttaggcatgagccaaagtggactttcaaagattcaaagctgaaagaccttcatgaggctaatagtaatggtcctgtcaatgttgacaaaccactagggaggaaagatgatgagcgagaaaacatgatggctgcgatatggtgatattctctttggagaagttaacaagatgagagaagaaaggcaagaaacaaataaataccggaaggttcgtgatgacaagttttatgagcttgagatgaccaaggttcaattggagcgagacccgcaggacaaggacattaagcaaacagacacaagcacaatggacgatgactccaaactatacttcaagatgatgaaacaaaatattttggctcagtgttttgggagtagttaggcaatagtacctgacttgggtttcaggaccagtattgtcaaataaaaacctttagtttgcagtctcgtgttctgggaataaaaacgtaagctaccttccctgggttgataggtggcttattttgctcaattgtaataggtcgaatcttgtttaatactttacactggtagtatccacagttcttgcttcatattgtaatagttctataatcaaaacctttcaaagattcca

SEQ ID NO: 69686 - DNA, 720 bp, Zea Mays
ccctaggcaggagcaaggaggatgagagagatctccagagttccacgcctccaccagaccaccacccatttgtccccgaccccgaccgctgctgcacatcatcctcccgccgctcggcgtcttcctccgattcggctgctgcagagagcagactattcaatccgtaacagtggtgctacaagagaatgggatgtacctgtattcctgaaccctgagagcaattaatcctgagagcaattaaccggtctccgttcgcagccccctccacttcctctgcagctccggtgatatgggcagtggattcgggtgccgccagatcttgcgcctcatcccgtgatctggaggcggcacgtcttcatgtcgatgatgatagcccagcgtgcagccagccaaatatgttatcagaatgattctgtttcccggtgctgattgctcgtgcacatgtgcatgcagcccagcgattcggatagatcgcgagcacctgtgtagactgtttgcagcggatgctgctctggaactggaagctttgtttaatgacaccttcggattgcaaggacctgcacccttacctgcccacttgagcgtatccgcgtatatgctttgctcacttgtccggataatctggtacactgatgatatatgctggttgattcagccgtagtgtatttattctgaaaaaaaatatcacatctgattctcttcttgattcttaatatcgct

SEQ ID NO: 69687 - DNA, 3050 bp, Zea Mays
gctcaattcccgccaaatctgctgaaatccgtggtgccccaacaaaaaaagcgggccacacccacactccgcagcaaaaccatactcgagtcgggctcggggctgacactagcgatataattggtgctgctgccgggctcctgtgtcctgtctcctttcctacgcggctacgccggtccgcccactgactgtacgacagcacttccgccgcagttcacttgctctctgcctcctcttcgctcttctgctcacataaccacggccgtctccccaacgtggtgctcgcaccgcagccgcaatgtcgtggctccttgtcgccgcggtgcttgccggcttcgcgcttggtccctccgccggcacggaccacatcgttggggccaaccatgggtggaaccccaacatcaactactccctctggtccggcaaccagaccttctacgtcggcgacctcatctcgttccggtatcagaaggggacgcataacgtgttcgaggtgaacgagacggggtacgacaattgcaccatggctggggtcgccggcaactggacctccggcaaggacttcatcccactccccgccgcccgccgctactactttgtctgcggcaacggcttctgcctgcaaggcatgaaggtcgccatcactgtccacccgctcccgcacaacgctacctccaagggctccagcagccatgcggacaccggcgcacaggaagaggccgccgcggcggcgctcgggaccaggagcgccgcgtggctggcgacgctcgcagtcgccgcagctgcagtggctgctttctgctaggagccttattccatgcattcactgaacattgttctagtatttttgtttttgctcccatctcattcggatctttcacttttctgcaagcaaatctgcttgagaagctaaactacccttccgacaactcatcaatgcatttcacaaaaaaaccaatttaagcaccaacatgccatgtattacaggttgcgacgactctgaacactagaaagaaggaagcaacaaaccctataagagattgtcgaatagaatcccttttcttatatacaccacctcactatccttttttgtctattatccaccggttagagctccacagcacggtgtgccactcaacgcctacttcggggggtaatctgggccatcgacctcgctgttcacaaaggcaactcaaattctgaaagaataacttgggattttacaacgctgagatttcaaacgctgctagtgtagtagcttcagtcaaaggaaagcttacttgggccgcatcccttctgcagtggtagcagactgctcagcgctagaagtagcaacagctaaagctggtttcttgaattgaaccacaataaccgtcatgttatcacatccttcgccaccagatgtaggtgccacacagcggttgagcaacttctcacacacactagatatcttatcctcctgttaagttattaggcgcatgagggaacaatttaaagtgtaaaggtatcaaacacaacagtgtgctccacttacggtctttagctgtttatgtacaaaatcaactacttcttgacttgacatgcaatccctgtatgaagaaaaaaatgttcagcaacgacaatacaataagcagagtaacagcactagtggggttcaccaattgaatctaaaatcaaagcatggattccaaaattatccatggcaacatggatacttgtaaccaaagtatcagtttccaacctaaagaccagggatctgcttgtctatcatggattaattctatttgtgtggaaccatcgatgccttatgcactcaaactgcaatggagctcaagagtgtccatcagtctccttttttcggtgggggtccaatatcgcgcggctcaatgcacaatatttcgaactcgaaaagaactatagattgcaactttatttgacatgcccaccgtgtcaatctaactatctagctaatgtatgcaaaacaaataaacatttcccaattataattttaataggaagggtgggcctggtgtagtggtgagagctatctcactaagtcactaggtcacggctcacgggttcgaagcagtctctatgcatttgaggggaaagacttgcctcagtttatccctgcaccaaactcgactcatgtgggagcctctggtactaggtttgtcaattagaaattcattaattgtatacaacatggatacaacatacatatatctataaacagtttagatatcaacaactgcaaaccctagtgtgctacttctaaggaattagctcaaatccaaaatatgtgtggcatcacaaatacagattagatacgcaagctgattactcatttgatacagtatttgtatgacaatttgcaggtgttctgctttacttagttacatatcagaaactgcaaagcctggtttgtgagttactccctctgccctgaaatagggatttttaagctaataagtccatggtcaataagatgcttttgcccgaagaacattaagcacccttggccagttcataattgtgtattcaggattttctatgattgattgaatgataaacatcatcgaaattgttcatgtagtattccacacacagccatgacaaaagagtgatttcattatctcttacccagagtaattataatacatgaaaactaaggaagccaattatggcatcctctcttcaaggatgatgtacctcatgtagatagtttgtttattttggtaacacaacaaaaatgaatgcaaacaaatactagtagaagaaaacaattgagttatattaaatttacattcagtagagaaatataaagcataccaaattccatcacaagctaaaacaatgaattcatcatcctccgagagctggacctgatcagaagccaaagcaacccttagtaaattgtgtatttgtgttcaaggtttcaagaaaaaatactgatagaaagggtcaccaaaacccactgttttcaattcaggttcagctgtcacgatctgcctctccactggcaggaggtcattttgcttcagttccat

SEQ ID NO: 69688 - DNA, 2400 bp, Zea Mays
atcaataaaaaccctagcagatccacccgtcacccgaagcttcctcctcgcagcgcgccgcgcgtcgtcgcctctacccacctgacttcgcgcgccacgccgagcctgcgagccatcagcccatcacccacccaacccctcgccacgcagatctagggagcttgccctcccaccgggcggtgattcttccgtcccatcaccgatgcggacgccggcgatgctccggtgggccgcggcgctcgcggtcctgctcgccgtcgccgcgccggccgccgggttctacctccccggcgttgccccgagcgatttcgcgaagggtgatccgcttccagtgaaggtgaataagttgacatctatcaagactcaactcccgtatacatattattcccttccgttctgcaagccagataccatagtcgacagtgccgaaaatcttggggaggtacttcgtggcgatcgcattgagaactctccttatgtgttcaaaatgggagagcccaagatgtgtcagattgtctgcagagcaccgatcactgagaaagaagccaaggagctcaaggaaaagatagaggacgaataccgagtgaacatgatccttgacaacctcccgctagttgttcctgttacaaggcaagataagaacagtattgcttatcaaggtggatatcatgttggtgccaaaggcctgtattctggaacaaaggatgagaaatacttcatacacaaccatttgtcatttacggtgaagtatcacaaggacgataatttggaacattctagaatagtgggatttgaggtcaacccacacaggaagttgaagttggcaaggaaatcatattcacatatgatgttcgctttgaggagagtgagatcaagtgggcgtcacgctgggacacctacctgttgatgaccgatgatcagattcactggttttctattgtgaactctctcatgatcgtgcttttcctatcaggcatggttgccatgataatgcttcgcactctctacagagacatttctagatacaatcagcttgaaactcaagaagaagcacaagaggaaacaggctggaagcttgttcatggggatgtgttccgtcctccaacctactctgacttgctctgtgtttatgttggcactggcgtccaattctttggcatgctcgtagttacaatgatctttgctgtgttgggtttcctttctccatcaaaccggggaggactcatgactgcaatgcttctagtctgggttttgatgggtctgcttgctggctactcttcttcccgcctttacaagatgttcaaaggttcagagtggaagaagataaccctgcaaacggctttcctatttccaggggttgcatttgttattttcttcatcttgaatgctcttatatggggggagaagtcatctggtgctgttcctttcaccacaatgtttgccttggtcctcctttggtttggcatctcagtaccccttgtcttcgttgggagttatcttgggttcaagaaacctgccatggaacctccagtcaagacaaacaagattccacgtcagatccctgagcaggcttggtacatgaatccgcttttcaccattctgattggcggtgtccttccatttggagcagttttcattgaactcttcttcatcctcacctccatctggctgcaccagttctactacatatttggcttcctcttccttgtgtttgtgatcctgatcatcacctgcgccgagatcacaatcgtgctctgctatttccagctctgcagtgaggactacatgtggtggtggaggtcttaccttacctcaggatcctccgccctgtatctcttcctgtacgctggtttctacttcttcacgaaactgcagatcactaagctggtgtctggcatcttgtacttcggctacatgcttctcgcctcatatgccttcttcgtgctgactggcacaattggtttctgcgcctgcttctggttcactaggttgatttactcttcagtgaagatcgattaggtgccaagatgacagaacagcacatgtttcaatggagtcaagataattgtatgattaatgtggattggggaattaccccccctcctttttttgaaggttttcaggaaaattttactgtttaggatttagtttacagatggtttatgttttgttattgtcaggttatacactttagtgatttggaactgaaaaatataagggtaaacacattatgatgaggctgtaccttgtgacaaatttttttgtggggctctatataaattaaattcattgtgacaggtatatgcttgtaccggtgaattactgtagggctccaagaccagtatgaaatccaccgtttggatcctggaattgaatagtaaatttagatatagattaatt

SEQ ID NO: 69689 - DNA, 820 bp, Zea Mays
acccgaccccacccctcctgagggccgacggccgagcgcaaaaccctaaccttgtcttgtgcgcagctccgctattaaagtctgcgtacagtccgccgcggctaggcgaccgcatccgcatctccccaacgtcttctcgccggtcgcgcacgggcaaagcagcgatggctacagcgacggcagttggcggacccgacagggtggagactgcggcgtcgtccgcggcggcagtgctggccgtcgccgttgcctcgcagaggttgctaggtctgctcgctcttgcggatgggtcagatgacgacgatgatgatgacgacgatgaagacaatgacgatgagggtggtgacgacgatgatgatgctgaggaggaattctctggagaagaagatgggggtgatgacgatgatgaagatgatgatcctgaagctaatggtgaagaaggaagtgacaacgacaatgatgacgacgaagatggtgatgatgatgacgatgaggacgacgaaggtgatgaggacgacaaagacgaggacgatgatgaagatgacgaagaccagccaccttccaagaagaagaaatgatttgctcatccatggatttacctcagcttctccatgctgttagttgtgttgtttagatcatggacagctttgggatcaatgtagcttgttgcttgtcatggtatcgtagtgtaggaaaatttgacatctgatgttaaatcactatcctgctttcccctctgtgcatgtagtcttaaatcttgatttttactctattggagctgcgattgtgtcatgccattcaattttgttctgccgaggcc

SEQ ID NO: 69690 - DNA, 2802 bp, Zea Mays
catacccgcagctgcgtagccattcccacaaaccaaccatacacgctaatcaaaaagattagtggagcactgcctgagccttgatttctcgttctttagtactacctgctccacgagaccagaccacgccagcggaaagataaaggattagtagaccagaagcttaagcttgctgccttgctgttcatttcccttgcctgagccgttaagcgtactgtactggcagtttgttcgtttactccgttccacgcatcccaacaattcgtcaatccccagccgcacgcacgagaaagaggctttggggatttggttgcttcctgtcggggtttgagaggagcggcgctcttgaattgttgctttcaattggtccgtttggcagggtttggcaatagaaagatttgttgccggagatgggcaagccgtcgctgaagaagaagagggcctccggcggcggcaagtccggcgaccacgggggcaagccggcgtcactggagcggtctggttccaaggtcctcgacggcgatgagaccctcttcacggacatggcgcaggagcacaaggaagagggcaataagctcttccagcgccgggactacgaccgcgcgctgctcaactacgacaaggccataaagcttctgccccgggcgcaccccgacgtcgcctacctccacagcaacatcgccgcctgctacatgcagatgagcccgcccgactactaccgagccatcaacgagtgcaacatcgcgctcgaagcgtcgcccaagtacaccaaggcgctgctcaagcgggcgcgctgcttcgaggctctgggcaggctcgacctcgcgtgcagggacgtcaacaaggtgctcgctctggagcccaacaaccttactgcgctggatgtatccgacaggatcaagaagactatggaggagaagggaatcgttctggacgacaaggagatcatgcccacgccggaggaggtggtggccgctgcacccaagcagaaaccgcgcaagaagaggggaggacggaagttcgctgccaaggctgcggctgctgctgtggaggaggtcgatgaacagaagattgcggaagctatcaaggaggaggtggaggagcagccaaggcaggtgaaactcgtgtttggggaggacataaggtgggctcaggtgccggcgagctgcagcatggcacagctgcgcgaggccgtccggagcaagtttcctggactgaaggctgttcttgtcaagtacaaggacaaggagggtgatcttgtgacaatcaccaaccaggatgagctgaaatgggctgaggagttggctgaggctgggagctcacttcggctgtatgttaccgaggctgatccggaacatgaaccttatgttgacgacaccaatatggagagaaatgtaaacagcaattcggataatggaagtattagaagcaataggcaggatgaggacaggagcactgtgacctgtattgatgattggattgtgcaattcgcccggcttttcaagaaccatgttgggattagctctgatgagtacctggacctccatgaggtcagtatgaagctctacactgaggcaatcgaggacactattactactgaggaagcccaggaggtgtttcatcttgctgagggaaactttcaggagatggcagcacttgcatttttccactggggtaatgttcacatgtcccgggccaggaagagattgttgctatcaggagattccccaagtgaattggtgcttgagcaggtgaaggaagcatatgaatgggcaagggacgaatacaataaggctggaacaagatatgaagatgccgtgaaggccaagccggacttttttgaaggtttccttgcactggcgcaccagcagtttgaacaagcaaaactgtcatggtactatgcaattggtagtaatgcagatttggacagctgttcttctgaaattctggagctcttcaataaagctgaggataatattgagaaaggtatagagatgtgggaggaaatggaagaacagcgtctgaagaatcgatctaaacctagccaggagaatattgtgctagagaagatgggcttggaggagtatatcaaggatgtatccactgatgatgcggctgaacaggcttccaatttaaggtctcagataaacattttatggggtatgctcctttatgaacgttcagttgtggaatttaaattaggtctcccaatgtgggaggattgtttgatggctgctattgaaaagttcaaacttgggggagcttctgccacagatattgctgtgctggtgaaaaaccactgtgccaatgaaactgctcaagatggtttgggcttcaagattgatgaaattgttcaagcctggaatgaaatgtatgacattaaacggtggctgcgtggtgttccatcatttcgccttgagccattatttaggcgaagagttccacaattgcatactgcacttgaacatatatagtactcatgaagttgttctacatcatattggatttcaatgcttttttatcagtgacacttttctctttttttggtgagtacaataactgtatttttatcttgtaatagattagttttattcatacgacaagcactatgcactgtgatatttgttgatttttcctttacctgcccccttgcactttctaattaaatgtttgtgactatggaatggatcttttccattccatgtggtttgggggacaattgatgtgctttgctttgaagacagttgtagtggtcatctgattgtgaatttgtggtgcacaagttggctgtgtgttttttcc

SEQ ID NO: 69691 - DNA, 2542 bp, Zea Mays
ggctgtcaccacacgcgcccgccgacgccgaccaggctttggggatttggttgcttcctgtcggggtttgagaggagcggcgctcttgaattgttgctttcaattggtccgtttggcagggtttggcaatagaaagatttgttgccggagatgggcaagccgtcgctgaagaagaagagggcctccggcggcggcaagtccggcgaccacgggggcaagccggcgtcactggagcggtctggttccaaggtcctcgacggcgatgagaccctcttcacggacatggcgcaggagcacaaggaagagggcaataagctcttccagcgccgggactacgaccgcgcgctgctcaactacgacaaggccataaagcttctgccccgggcgcaccccgacgtcgcctacctccacagcaacatcgccgcctgctacatgcagatgagcccgcccgactactaccgagccatcaacgagtgcaacatcgcgctcgaagcgtcgcccaagtacaccaaggcgctgctcaagcgggcgcgctgcttcgaggctctgggcaggctcgacctcgcgtgcagggacgtcaacaaggtgctcgctctggagcccaacaaccttactgcgctggatgtatccgacaggatcaagaagactatggaggagaagggaatcgttctggacgacaaggagatcatgcccacgccggaggaggtggtggccgctgcacccaagcagaaaccgcgcaagaagaggggaggacggaagttcgctgccaaggctgcggctgctgctgtggaggaggtcgatgaacagaagattgcggaagctatcaaggaggaggtggaggagcagccaaggcaggtgaaactcgtgtttggggaggacataaggtgggctcaggtgccggcgagctgcagcatggcacagctgcgcgaggccgtccggagcaagtttcctggactgaaggctgttcttgtcaagtacaaggacaaggagggtgatcttgtgacaatcaccaaccaggatgagctgaaatgggctgaggagttggctgaggctgggagctcacttcggctgtatgttaccgaggctgatccggaacatgaaccttatgttgacgacaccaatatggagagaaatgtaaacagcaattcggataatggaagtattagaagcaataggcaggatgaggacaggagcactgtgacctgtattgatgattggattgtgcaattcgcccggcttttcaagaaccatgttgggattagctctgatgagtacctggacctccatgaggtcagtatgaagctctacactgaggcaatcgaggacactattactactgaggaagcccaggaggtgtttcatcttgctgagggaaactttcaggagatggcagcacttgcatttttccactggggtaatgttcacatgtcccgggccaggaagagattgttgctatcaggagattccccaagtgaattggtgcttgagcaggtgaaggaagcatatgaatgggcaagggacgaatacaataaggctggaacaagatatgaagatgccgtgaaggccaagccggacttttttgaaggtttccttgcactggcgcaccagcagtttgaacaagcaaaactgtcatggtactatgcaattggtagtaatgcagatttggacagctgttcttctgaaattctggagctcttcaataaagctgaggataatattgagaaaggtatagagatgtgggaggaaatggaagaacagcgtctgaagaatcgatctaaacctagccaggagaatattgtgctagagaagatgggcttggaggagtatatcaaggatgtatccactgatgatgcggctgaacaggcttccaatttaaggtctcagataaacattttatggggtatgctcctttatgaacgttcagttgtggaatttaaattaggtctcccaatgtgggaggattgtttgatggctgctattgaaaagttcaaacttgggggagcttctgccacagatattgctgtgctggtgaaaaaccactgtgccaatgaaactgctcaagatggtttgggcttcaagattgatgaaattgttcaagcctggaatgaaatgtatgacattaaacggtggctgcgtggtgttccatcatttcgccttgagccattatttaggcgaagagttccacaattgcatactgcacttgaacatatatagtactcatgaagttgttctacatcatattggatttcaatgcttttttatcagtgacacttttctctttttttggtgagtacaataactgtatttttatcttgtaatagattagttttattcatacgacaagcactatgcactgtgatatttgttgatttttcctttacctgcccccttgcactttctaattaaatgtttgtgactatggaatggatcttttccattccatgtggtttgggggacaattgatgtgctttgctttgaagacagttgtagtggtcatctgattgtgaatttgtggtgcacaagttggctgtgtgttttttcc

SEQ ID NO: 69692 - DNA, 1157 bp, Zea Mays
tcacgaagacatgtcgtgttggttcataatggtcctctatttcttcagactctaagcctggtactttgtcgagattcgactcaacatcctcgtctaaatctgaacttggctctaagcctggtacctcagtgagattcaactcaacatcctcatccaaactcgaactcgactctaagcctcgtacctcattgagattccattcatcaccctctaaatctgaactcgactctacgcctagtacctcatcgagattccactctgcatcatcgtccaaatccgaacttgtctctaagcctggtacctcatcgagatcccactcaacatcctcatctaaatctgaacaatgctctaagcccggtacctcatcgagattccattcaacgtcctcctccaaacccaaaatcgactctaagcctgatacctcgttgagattccccttgtcatccttgtccaaatcccaactcatcctcgatgttttaagagctcgacatgtcgcctcaccaagaccctgaattgttgctgcctcttttggcactagacatgttgctcctttgttatcccacctcaacaccattgctttgagctctaatcttggaaggtcccatcctactgccttatcgagatccgagctcatcgtcgttgcttcgatctctaggcttgttgcctctttcaaccccccctgatgccccattgagatccaaaatcgtcgctatcactctagaatgccaacttgttgcctctttgagattccatagtggtgtcttgtccagatccaagctcgtcgccactgccaccgctttaggatcttcgcttggttcctctctatggtcccaccgaactgcttaggtgagatccaaggatcttgctaccacttcaagctcttagctcgctacctcatcaagatctcatcctgctacctcgttgagatcccaactcatcgcctccaaatcatagatgccatatccgctctcgccctttggcatcaacacaggattcatagactcatcccatcttaaggtctcactgtgtctgattgccacaatctctaaatctttgctcacccatagtaaatttgaatgttgtagagattcgctgggtgagaaagcttataagaaggataaatgaaggggatagagaataaaagtaaggacataaac

SEQ ID NO: 69693 - DNA, 150 bp, Zea Mays
atgaatgcaacaggacataacaacatcgatcaacagatttcctaccgagcattacagtcacagatcgacatttttacaaaacagtacgggacttggaaccagagtgcagcaaaaccaaagcattcagaagcggccggtatagccatataa

SEQ ID NO: 69694 - DNA, 1553 bp, Zea Mays
ttccatttttttccttatattcttgctctaatgtttttgttacctttaactagttcttcgacaaagcgattggaattaatgttccccgctcaaggtttctcccagtgaaggctacatctgatctgttgcttgtgcagtctgatctttacaccttggttgatggctttgtcatccgcaacccatccagagcgaatccagctaacccttcaattgagcttggacctgagttcaagaaggtaaaacagtttgtctccaagatattgaagatacctttcataatagagttccatcagtagcattgagaatgctccttcacaaaataaagatcagactgttttatctttcataatagagttccatcagtagcattgagaatgctccttcacaaaataatgtgttgatgaaaccatttttttaacgtaaactggcaggatctgccgtttttttattaattaatataggggaaacactgatgaaaccattgatcagtaaaaattgtcactccttaactggtgtcagatcacagcaagcactgatgaaatatctccttcctaatacaggttgccaatttccttgctcggttcaagtccatccccagcatagttgagcttgacagcttgaaggtgtctggtgatgtctggtttggctctggaattacactcaagggcaaggtgacaattatcgccaagcctggagtgaagttggagattccagatggagacgtacttgagaacaaggatgtcaatggccctgaggatctttaagcaatgtttgtcatcaccagtttttcccaaggacatgtcacaggaactgccgagcctaatcactcctactgagctctatatttttgtaattttcatgtgcattccgattccgctgcgagggtcatgtgagcccgctagagaataattgtaatcttctttgctgcgtctgtacttgtgtttttgtgcgccaggacgtatatttttactgaaatgatactccgaagagcacgtatggtgtcttaccgggaggactcattgccgccattctgccacatgcccccggtgctcgagaatattgttatggaaagggcacaaagtggccatattcccaaggtgataaacgccgtcatgcgggacacttttcgagcgaatggcgtttgtggtccgggagaccgggaccttgcggataagttcctcgcctgcttgttcgaatccaaggtgctagatccatcccgaataccagccggcaatcctgttagcactttagctccattctgcgggttgttagactagctctaacaagaaactctaaagagttctgtaccctaaatttagaggatcagatcgttctctatttactccagcagcgtcgtctaaacgatcctctaaatttagaaaacgttgttggattttctatatatagagtttctttaaacgttattctatttatttgaatactttaaacaatcgatttagcaaaactaaaatatgtacaatatatttaagagtatggtaaatatatatatatatatatatatatatatatatacaaaaaataaaaattaaaaa

SEQ ID NO: 69695 - DNA, 2747 bp, Zea Mays
cacaaatttaaacagaagttctgccaaacagctagcttctgcagcagcttatcagttcagctgcttctcagaatacactaaaagcagccaacaagcagaaactgcttttcaccagcttatcagataagctgctttttcaacaagcagcagctgtgccaaacagggccttcgttttggattttatttcgcctggcaaaactctggcgtgagtcaatgcaagaaccgagcgcaatctctgcatggtcctttggatacgaacaggacgtcccgtgttcgatcgcctggcagcagcgtgagatgattatgatgatttgttcggcagcttgtttgggcgtccgtgtccctgcccgcagaagcaccgaaaggtgtcacctctgctcgccttcgccttcaccttcaccttcaccttcaaatgtgactcggcttggcgcaaggggaatgaactccaggagacaggagcagcaggctcggcggaccatcagagcgctgctggccaagaacggagcgctgtgcacaggtgtttggagatgcaggagcggaggcgcagatatagcctcgcgagccccgacgatggccaccaccgcggtgtcggtcgacgagaagctcgataagcttcgcgccgaggtcgccaagctcgaccagatcagcgagaacgagaagtccgggttcatcagcctcgtgtcacggtacctcagtggggaggcggagcagatcgagtggagcaagatccagacccctacggatgaggtggtggtgccctacgataccgtcgcgtcgcctcccgaagatctcgaggagacgaagaagctgctggataagctcgttgtgctcaagcttaacggagggctcgggacgaccatgggctgcactgggcccaagtctgtcattgaagtccgcaatgggttcacattccttgaccttattgtgattcaaattgagtccctgaacaagaagtatggatgcaatgtccctttacttctgatgaactctttcaacacccatgatgacacacagaagattgttgagaagtattccaactccaacatcgaaattcatactttcaatcagagccagtatcctcgcattgttaccgaggacttcttgccacttcccagcaaagggaaatctgggaaggatggctggtatcctcctggtcatggtgatgtgtttccttctttgaataacagcggaaaacttgacatcttattggctcagggcaaggagtatgtctttgttgcaaactcagacaacttgggtgctatagtcgacatcaagatcctaaaccatctgatcaataaccagaacgagtactgcatggaggttactccaaagacgctggctgacgttaagggtggcactctcatctcttacgaaggaagagttcagcttttggagattgcccaagtacccgatgagcatgtgaatgaatttaaatcaatcgagaagtttaagatattcaacactaacaacttgtgggtgaaccttaaagctatcaagagactcgtagaggctgaggcacttaagatggaaattattccaaaccccaaggaagttgatggtgtgaaagtccttcaactcgaaaccgcagctggtgcagctattcggttcttcgacaaagcgattggaattaatgttccccgctcaaggtttctcccagtgaaggctacatctgatctgttgcttgtgcagtctgatctttacaccttggttgatggctttgtcatccgcaacccatccagagcgaatccagctaacccttcaattgagcttggacctgagttcaagaaggttgccaatttccttgctcggttcaagtccatccccagcatagttgagcttgacagcttgaaggtgtctggtgatgtctggtttggctctggaattacactcaagggcaaggtgacaattatcgccaagcctggagtgaagttggagattccagatggagacgtacttgagaacaaggatgtcaatggccctgaggatctttaagcaatgtttgaactgccgagcctaatcactcctactgagctctatatttttgtaattttcatgtgcattccgattccgctgcgagggtcatgtgagcccgctagagaataattgtaatcttctttgctgcgtctgtacttgtgtttttgtgcgccaggacgtatatttttactgaaatgatactccgaagagcacgtatggtgtcttaccgggaggactcattgccgccattctgccacatgcccccggtgctcgagaatattgttatggaaagggcacaaagtggccatattcccaaggtgataaacgccgtcatgcgggacacttttcgagcgaatggcgtttgtggtccgggagaccgggaccttgcggataagttcctcgcctgcttgttcgaatccaaggtgctagatccatcccgaataccagccggcaatcctgttagcactttagctccattctgcgggttgttagactagctctaacaagaaactctaaagagttctgtaccctaaatttagaggatcagatcgttctctatttactccagcagcgtcgtctaaacgatcctctaaatttagaaaacgttgttggattttctatatatagagtttctttaaacgttattctatttatttgaatactttaaacaatcgatttagcaaaactaaaatatgtacaatatatttaagagtatggtaaatatatatatatatatatatatatatatatatacaaaaaataaaaattaaaaa

SEQ ID NO: 69696 - DNA, 2665 bp, Zea Mays
cagctcagcgttcaccgcgccatccccgatcccggtcgcggcgccgacggatcagacgggacaggcgggctagcctcgacacgacgagaaccccgaggtccgcacggccgggctcttcccgtcgtgccagatgtcagacgccgtcacgacgcgcggagcatccggcacccccgccgcacattccgtcacggcgcctgacggagaccgcggccgctataaatgaaacccgcgctgtcctgctcgctcgcgcacacggcacacacaccacaccacacctcctcgcttgcactccgctcgtctgacatctcgtcccgtcctttcgtttcgaagcctcgcgagccccgacgatggccaccaccgcggtgtcggtcgacgagaagctcgataagcttcgcgccgaggtcgccaagctcgaccagatcagcgagaacgagaagtccgggttcatcagcctcgtgtcacggtacctcagtggggaggcggagcagatcgagtggagcaagatccagacccctacggatgaggtggtggtgccctacgataccgtcgcgtcgcctcccgaagatctcgaggagacgaagaagctgctggataagctcgttgtgctcaagcttaacggagggctcgggacgaccatgggctgcactgggcccaagtctgtcattgaagtccgcaatgggttcacattccttgaccttattgtgattcaaattgagtccctgaacaagaagtatggatgcaatgtccctttacttctgatgaactctttcaacacccatgatgacacacagaagattgttgagaagtattccaactccaacatcgaaattcatactttcaatcagagccagtatcctcgcattgttaccgaggacttcttgccacttcccagcaaagggaaatctgggaaggatggctggtatcctcctggtcatggtgatgtgtttccttctttgaataacagcggaaaacttgacatcttattggctcagggcaaggagtatgtctttgttgcaaactcagacaacttgggtgctatagtcgacatcaagatcctaaaccatctgatcaataaccagaacgagtactgcatggaggttactccaaagacgctggctgacgttaagggtggcactctcatctcttacgaaggaagagttcagcttttggagattgcccaagtacccgatgagcatgtgaatgaatttaaatcaatcgagaagtttaagatattcaacactaacaacttgtgggtgaaccttaaagctatcaagagactcgtagaggctgaggcacttaagatggaaattattccaaaccccaaggaagttgatggtgtgaaagtccttcaactcgaaaccgcagctggtgcagctattcggttcttcgacaaagcgattggaattaatgttccccgctcaaggtttctcccagtgaaggctacatctgatctgttgcttgtgcagtctgatctttacaccttggttgatggctttgtcatccgcaacccatccagagcgaatccagctaacccttcaattgagcttggacctgagttcaagaaggtaaaacagtttgtctccaagatattgaagatacctttcataatagagttccatcagtagcattgagaatgctccttcacaaaataaagatcagactgttttatctttcataatagagttccatcagtagcattgagaatgctccttcacaaaataatgtgttgatgaaaccatttttttaacgtaaactggcaggatctgccgtttttttattaattaatataggggaaacactgatgaaaccattgatcagtaaaaattgtcactccttaactggtgtcagatcacagcaagcactgatgaaatatctccttcctaatacaggttgccaatttccttgctcggttcaagtccatccccagcatagttgagcttgacagcttgaaggtgtctggtgatgtctggtttggctctggaattacactcaaggtaaactttaatttgatgttcttctttctcctttgttgccgtatgtgctgcttaggtactctttgtatttggattttctcctttgttgccatatgtgctggtgctgcttaaatactgtttgtatttggacatgaatacctggtgcaaatttcgttggctgtttctgtctgatctgatcttgtatacctggtgcaaattttgtcagttgtttctgtctgatctgatcttgtatctgctcattccactccataccgcctcctagttcagctgtggcatatgtgttactgagtagtgcctgattcatattgttggtgctatttctagggcaaggtgacaattatcgccaagcctggagtgaagttggagattccagatggagacgtacttgagaacaaggtgcacgtagttcttcgctatgcataaatccttcatgctccatagggaatttgagtgcttcttctttattaagaattaaggtggtagtgctttcagggttaataccaaacctgccgtagagactattcatagtggtcttgttaataaaatctaaagctttcttccctctagcctttgcttcaagccttcttcggtagatatcattcacaaaatccttgaatggtgattccattatgtcaaacagatagccgcagattgggtagaccttgtaaccg

SEQ ID NO: 69697 - DNA, 1489 bp, Zea Mays
aaaattccaaatttgttgttgtacacacggcacaccctaaccaaaacatcctgccgtttcccgttcacccagcgtgcgctccatcttggcgaggccgcgagggcgaccgctacagcagcagccgccgccgccgccagatccccaggccttcgttgaacccttcgccgtaacgagatcagatggctgggtatatgtcaagagggccccaaaatggttctgtgtatgtctgcaatctacctcctggaactgatgaaaatatgttggctgaatattttggcaccataggcttgctaaagaaggacaaaaggactgggcgtccaaaaatttggatatacagggacaaagttactaatgaaccaaagggtgatgcaacagtcacctatgaggatccacatgctgcttcagctgctgtggaatggttcgataacaaggatttccatgggagcactattcaggttcacatagctgagtcaaaaagcaaagatgcattcgataaccccacaagtttgaacatcattggtggtgttggtgaacaagatgaactggataatggagcaggcagaggcagagggcgtggtgatggtccaggcaaggcttggcagcaagatggggattggatgtgtccaaatacaagttgtggcaatgtaaattttgccttccgtggtgtttgtaatcgctgtggagctgcacgccctgctggtgctggtggaactgctgctggtggtggcggtaggggtagaggccgtggtagctctgatgcaagaggaagcagccatgctggtgctgctgttggtggtccacctggattgtttggcccgaatgattggccatgtccaatgtgtggcaacatcaactgggctaagcggaccaaatgtaatatatgtaacacctccaagcctggtaccaatgaaggtggtgtgaggggtggccgtggtggtgggtacaaagagcttgatgaagaagaactagaggaagttaaaaaacgtcggaaagaggctgaggaggatgatggagagatctatgacgaatttggcaacctgaaaaagaaatttcgctctaaagctctgcatactgaaggtgcacaggcacttcctgggtctggacgtgctggatgggaagttgagcatcgtggtcctagtgaaagggaaggcagggagaggagcagggatcgtgttagggatgactactatgaaaaggaaaccaggggcagagatagaggtgatcttggaagggaccagcgccggagcaggagtcgaagcagagaccgtgaaagggaaaggagggagaggagaagagaacatgattatgagagaagggagcgtgaccgggatcgggaccgccgccatagctttgagctggtggacgtcatggagctaaccctgagccactacatggcttcgggaggaaggtcgagcagttcgagtaattcaagggccagttgtgggctcgcttggagttagaggggcatgtggtggcccaagcgacgaca

SEQ ID NO: 69698 - DNA, 1530 bp, Zea Mays
aaaattccaaatttgttgttgtacacacggcacaccctaaccaaaacatcctgccgtttcccgttcacccagcgtgcgctccatcttggcgaggccgcgagggcgaccgctacagcagcagccgccgccgccgccagatccccaggccttcgttgaacccttcgccgtaacgagatcagatggctgggtatatgtcaagagggccccaaaatggttctgtgtatgtctgcaatctacctcctggaactgatgaaaatatgttggctgaatattttggcaccataggcttgctaaagaaggacaaaaggactgggcgtccaaaaatttggatatacagggacaaagttactaatgaaccaaagggtgatgcaacagtcacctatgaggatccacatgctgcttcagctgctgtggaatggttcgataacaaggatttccatgggagcactattcaggttcacatagctgagtcaaaaagcaaagatgcattcgataaccccacaagtttgaacatcattggtggtgttggtgaacaagatgaactggataatggagcaggcagaggcagagggcgtggtgatggtccaggcaaggcttggcagcaagatggggattggatgtgtccaaatacaaggttgtggcaatgtaaattttgccttccgtggtgtttgtaatcgctgtggagctgcacgccctgctggtgctggtggaactgctgctggtggtggcggtaggggtagaggccgtggtagctctgatgcaagaggaagcagccatgctggtgctgctgttggtggtccacctggattgtttggcccgaatgattggccatgtccaatgtgtggcaacatcaactgggctaagcggaccaaatgtaatatatgtaacacctccaagcctggtaccaatgaaggtggtgtgaggggtggccgtggtggtgggtacaaagagcttgatgaagaagaactagaggaagttaaaaaacgtcggaaagaggctgaggaggatgatggagagatctatgacgaatttggcaacctgaaaaagaaatttcgctctaaagctctgcatactgaaggtgcacaggcacttcctgggtctggacgtgctggatgggaagttgagcatcgtggtcctagtgaaagggaaggcagggagaggagcagggatcgtgttagggatgactactatgaaaaggaaaccaggggcagagatagaggtgatcttggaagggaccagcgccggagcaggagtcgaagcagagaccgtgaaagggaaaggagggagaggagaagagaacatgattatgagagaagggagcgtgaccgggatcgggaccgccgccataggtgaagatagaaataacaaggctttctgttcgtacactgcatttgccaatttttgtagccatgcgacccgtggtcttgtgttagtaactgggggcgtgcgttgttgctctgaatctgatttttgctttgaatgattcgctgcactggcattttattcagatattctgtttcttctgtgatt

SEQ ID NO: 69699 - DNA, 1545 bp, Zea Mays
aaaattccaaatttgttgttgtacacacggcacaccctaaccaaaacatcctgccgtttcccgttcacccagcgtgcgctccatcttggcgaggccgcgagggcgaccgctacagcagcagccgccgccgccgccagatccccaggccttcgttgaacccttcgccgtaacgagatcagatggctgggtatatgtcaagagggccccaaaatggttctgtgtatgtctgcaatctacctcctggaactgatgaaaatatgttggctgaatattttggcaccataggcttgctaaaggtatgggtcttaccagaaggacaaaaggactgggcgtccaaaaatttggatatacagggacaaagttactaatgaaccaaagggtgatgcaacagtcacctatgaggatccacatgctgcttcagctgctgtggaatggttcgataacaaggatttccatgggagcactattcaggttcacatagctgagtcaaaaagcaaagatgcattcgataaccccacaagtttgaacatcattggtggtgttggtgaacaagatgaactggataatggagcaggcagaggcagagggcgtggtgatggtccaggcaaggcttggcagcaagatggggattggatgtgtccaaatacaagttgtggcaatgtaaattttgccttccgtggtgtttgtaatcgctgtggagctgcacgccctgctggtgctggtggaactgctgctggtggtggcggtaggggtagaggccgtggtagctctgatgcaagaggaagcagccatgctggtgctgctgttggtggtccacctggattgtttggcccgaatgattggccatgtccaatgtgtggcaacatcaactgggctaagcggaccaaatgtaatatatgtaacacctccaagcctggtaccaatgaaggtggtgtgaggggtggccgtggtggtgggtacaaagagcttgatgaagaagaactagaggaagttaaaaaacgtcggaaagaggctgaggaggatgatggagagatctatgacgaatttggcaacctgaaaaagaaatttcgctctaaagctctgcatactgaaggtgcacaggcacttcctgggtctggacgtgctggatgggaagttgagcatcgtggtcctagtgaaagggaaggcagggagaggagcagggatcgtgttagggatgactactatgaaaaggaaaccaggggcagagatagaggtgatcttggaagggaccagcgccggagcaggagtcgaagcagagaccgtgaaagggaaaggagggagaggagaagagaacatgattatgagagaagggagcgtgaccgggatcgggaccgccgccataggtgaagatagaaataacaaggctttctgttcgtacactgcatttgccaatttttgtagccatgcgacccgtggtcttgtgttagtaactgggggcgtgcgttgttgctctgaatctgatttttgctttgaatgattcgctgcactggcattttattcagatattctgtttcttctgtgatt

SEQ ID NO: 69700 - DNA, 1543 bp, Zea Mays
aaaattccaaatttgttgttgtacacacggcacaccctaaccaaaacatcctgccgtttcccgttcacccagcgtgcgctccatcttggcgaggccgcgagggcgaccgctacagcagcagccgccgccgccgccagatccccaggccttcgttgaacccttcgccgtaacgagatcagatggctgggtatatgtcaagagggccccaaaatggttctgtgtatgtctgcaatctacctcctggaactgatgaaaatatgttggctgaatattttggcaccataggcttgctaaagaaggacaaaaggactgggcgtccaaaaatttggatatacagggacaaagttactaatgaaccaaagggtgatgcaacagtcacctatgaggatccacatgctgcttcagctgctgtggaatggttcgataacaaggatttccatgggagcactattcaggttcacatagctgagtcaaaaagcaaagatgcattcgataaccccacaagtttgaacatcattggtggtgttggtgaacaagatgaactggataatggagcaggcagaggcagagggcgtggtgatggtccaggcaaggcttggcagcaagatggggattggatgtgtccaaatacaaggtctgttatgattgttgtggcaatgtaaattttgccttccgtggtgtttgtaatcgctgtggagctgcacgccctgctggtgctggtggaactgctgctggtggtggcggtaggggtagaggccgtggtagctctgatgcaagaggaagcagccatgctggtgctgctgttggtggtccacctggattgtttggcccgaatgattggccatgtccaatgtgtggcaacatcaactgggctaagcggaccaaatgtaatatatgtaacacctccaagcctggtaccaatgaaggtggtgtgaggggtggccgtggtggtgggtacaaagagcttgatgaagaagaactagaggaagttaaaaaacgtcggaaagaggctgaggaggatgatggagagatctatgacgaatttggcaacctgaaaaagaaatttcgctctaaagctctgcatactgaaggtgcacaggcacttcctgggtctggacgtgctggatgggaagttgagcatcgtggtcctagtgaaagggaaggcagggagaggagcagggatcgtgttagggatgactactatgaaaaggaaaccaggggcagagatagaggtgatcttggaagggaccagcgccggagcaggagtcgaagcagagaccgtgaaagggaaaggagggagaggagaagagaacatgattatgagagaagggagcgtgaccgggatcgggaccgccgccataggtgaagatagaaataacaaggctttctgttcgtacactgcatttgccaatttttgtagccatgcgacccgtggtcttgtgttagtaactgggggcgtgcgttgttgctctgaatctgatttttgctttgaatgattcgctgcactggcattttattcagatattctgtttcttctgtgatt

SEQ ID NO: 69701 - DNA, 665 bp, Zea Mays
ttcttcttgaagacccggcataatgcataggtgtcctgagtatgagaatgccagcacagagcaagggaaaagtcattaataaccagtaatatctagaaagagaggacgtagatttgcgcaagagaaagggacggcgagggaagagaagggtgtgcgaggctgatgatggattcaacatggaataaagcagaaagcgcgggacaccgactcgctccgcgccatgagagcgggaagagggagaaacggtttgctttgccctttaatacgtcatggacgacatgatcaatggacagcccaatggtgatcatgtctgctgatcgacggtgcttgaaaaaagagcagattagagaggattcacggccaatctactagactactgtatatagagacacgagaaaggagggctagctagcatccgaaaaatttatgtgtcgataagaggacagaaagaattaaaggggcccaacgtcatgatgtatcaacatgcactacgtacacagcacgtggtatatcacgatcatcatgatgaaatcacgatctagctagctagctacgtacttcagtagtatagctagctgctggtaatcagttgagcatgcataccggccagttcattgtaattgtaagctactaccggcagcaggtaatcacaaagccaatgcaag

SEQ ID NO: 69702 - DNA, 597 bp, Zea Mays
ggagatcgatacaagttaagaggacaggaaagagaggacgtagatttgcgcaagagaaagggacggcgagggaagagaagggtgtgcgaggctgatgatggattcaacatggaataaagcagaaagcgcgggacaccgactcgctccgcgccatgagagcgggaagagggagaaacggtttgctttgccctttaatacgtcatggacgacatgatcaatggacagcccaatggtgatcatgtctgctgatcgacggtgcttgaaaaaagagcagattagagaggattcacggccaatctactagactactgtatatagagacacgagaaaggagggctagctagcatccgaaaaatttatgtgtcgataagaggacagaaagaattaaaggggcccaacgtcatgatgtatcaacatgcactacgtacacagcacgtggtatatcacgatcatcatgatgaaatcacgatctagctagctagctacgtacttcagtagtatagctagctgctggtaatcagttgagcatgcataccggccagttcattgtaattgtaagctactaccggcagcaggtaatcacaaagccaatgcaag

SEQ ID NO: 69703 - DNA, 1387 bp, Zea Mays
cactagtctcctcttcgcacgagcgcaacaccatccacccaccagttcgaagcggaggcgaccggcaacctgcggcggagatgtcaggcaggggcaagggcggcaaggggctcgggaagggcggcgcgaagcgtcaccggaaggtgctgcgcgacaacatccaggggatcacgaagccggcgatccggaggctggcgaggaggggtggcgtgaagcgcatctccgggctgatctacgaggagacccgcggcgtgctcaagatctttctcgagaatgtcatccgcgacgctgtgacctacacggagcacgcccgtcgcaaaaccgtcaccgctatggacgtcgtggtgatggacagatggtgtactaaggtaaagcgaatgcatccagaagcaagttttgcagagatggatgatgggatttcagaagcattcctgcatcgagcaacggaacaagagatctagaatcaccaagatggaacccgtttggtgtgactatagctctagaaagaggtaaaaatatgagagggaacccgcaaagatgttacagacagtacatggacttcctcgacgtcttgacagaacaatagttgatatgccggttgaaatggcggaacagttcaaaggtggtgacgtggtgtgttgacatcaaggaggcgctctgaacattacagaggctacattcttgtgacgaagtgtcaccatgaagatgcttaactcggatgcaattagtaagatgagcagaatagttagattttggagatcgatacaagttaagaggacaggtataatattcataataattgtcttcaatttccattcataatgcgcattatatttcatctgacatataggcacaagacaaaaactatgcaattgcatagctacaaccagtatgcttcacataagagaaaaaaagacaccactcaaaaagtacaatacatgcgatggaaaacccaaagaagaagaaaataagggggagctggttgttttatatactatatatatataatataggagtatatataaccctccttatgaactcaactcaaggaaggattctgagaacaatcttgaggcggcaacgatccttcaacccccagcaataggatggaagctgaaaaccccaaagatgcatgcttattgtgctatgatcttacactttgtagacatgatcacggtggttattgatggctagccggcatcatcatcaccatctcgatcagagaaaaaggaggaaaaatagttattaggaggatttctcagtcgcatcatttttgaacaacagataaaagggtttcagctggccagggccacacgggaggtgctctcctcggcgccgtccgccgtgctggagcaccacgcgtcgtcggatatgaactgcatccagg

SEQ ID NO: 69704 - DNA, 2596 bp, Zea Mays
gtcaacgccgccacatcctcacaaaagaaacacaccccaggtcccctccccgccatgtcactgatccgcacatccggaccttctccattttctgccacccatcccacatccaacggcacaaagctctcatcacgcggatcgtgccacaatctgcacccaaagaccccgcctatatagcccagccgcacatgcctgcaatacccacctcagcactagtctcctcttcgcacgagcgcaacaccatccacccaccagttcgaagcggaggctggcgaggaggggtggcgtgaagcgcatctccgggctgatctacgaggagacccgcggcgtgctcaagatctttctcgagaatgtcatccgcgacgctgtgacctacacggagcacgcccgtcgcaaaaccgtcaccgctatggacgtcgtgtacgccctcaaacgccagggccgcactctctatggcttcggcggctaggttaggtgtgggtaattgcctgtccaggtgtctcggatctgtggtactagtttggctgccttcctgtgttcgtattgtagtagttgtggtagctggttgctttgtcgtcctgtagtcgtgcttctttgggtctgtaagaaccgctggttcgatgggattggattggacggtgaagtaggaatgttggcatgttagacttttctccaacgtagcgttgcctctaatttgatctctcgatttattttcaattggggtgcactgtaattcttcctgtctaattcaaatcccctttctgaaattttgtgacctcccaagttttggacccctcgattgttcgaacgagtttttgaatttgtgtttcgagtcgaagtttcgattcacttcaggcgaaacaattcgttaatgcatttcgtgttgtcgctgaatctatgaaaccgtgtctgggatttatagggctcagaagttggggtttagtgacttaaacatgtacgtgtccaaaacgccatccgatgatcgatttcgtcgagcacctaagacacattctctggtgtcatccatcccatttatcctgttgtctgactacagttaatgctcgcgccccggcgtcgacgagtagcaactgcagccttgcctgggaattgagattgttgcgtcttccgagtcaggggatcggattttacttgcccggtccattggtaatgatttctctatcttttacacgtccttatcccggatttcgtttcagtgatttatcgatgatgaaaaagttactggattagtcttgctgtgtatgattgttcactgtaggtgggtttcttcaagctcagtgcacaggttgtacgcatggaacttctaatgttatttgtttatcacgcattctctggtttgtcagttgttcagaagttcgtttttgctggtttgaatgcaacgtggcgtggttactggtgacattgtgttcggcttaaacctagatcattgagagctcgacagtcgacaccattgtggaactgaattcagtctgatgtaatgtcttcttagcccgggtacctaaacagacttcttttaactatgccaacagggtgatggacagatggtgtactaaggtaaagcgaatgcatccagaagcaagttttgcagagatggatgatgggatttcagaagcattcctgcatcgagcaacggaacaagagatctagaatcaccaagatggaacccgtttggtgtgactatagctctagaaagaggtaaaaatatgagagggaacccgcaaagatgttacagacagtacatggacttcctcgacgtcttgacagaacaatagttgatatgccggttgaaatggcggaacagttcaaaggtggtgacgtggtgtgttgacatcaaggaggcgctctgaacattacagaggctacattcttgtgacgaagtgtcaccatgaagatgcttgtaataactcggatgcaattagtaagatgagcagaatagttagattttggagatcgatacaagttaagaggacaggtataatattcataataattgtcttcaatttccattcataatgcgcattatatttcatctgacatataggcacaagacaaaaactatgcaattgcatagctacaaccagtatgcttcacataagagaaaaaaagacaccactcaaaaagtacaatacatgcgatggaaaacccaaagaagaagaaaataagggggagctggttgttttatatactatatatatataatataggagtatatataaccctccttatgaactcaactcaaggaaggattctgagaacaatcttgaggcggcaacgatccttcaacccccagcaataggatggaagctgaaaaccccaaagatgcatgcttattgtgctatgatcttacactttgtagacatgatcacggtggttattgatggctagccggcatcatcatcaccatctcgatcagagaaaaaggaggaaaaatagttattaggaggatttctcagtcgcatcatttttgaacaacagataaaagggtttcagctggccagggccacacgggaggtgctctcctcggcgccgtccgccgtgctggagcaccacgcgtcgtcggatatgaactgcatccagg

SEQ ID NO: 69705 - DNA, 2512 bp, Zea Mays
gtcaacgccgccacatcctcacaaaagaaacacaccccaggtcccctccccgccatgtcactgatccgcacatccggaccttctccattttctgccacccatcccacatccaacggcacaaagctctcatcacgcggatcgtgccacaatctgcacccaaagaccccgcctatatagcccagccgcacatgcctgcaatacccacctcagcactagtctcctcttcgcacgagcgcaacaccatccacccaccagttcgaagcggaggctggcgaggaggggtggcgtgaagcgcatctccgggctgatctacgaggagacccgcggcgtgctcaagatctttctcgagaatgtcatccgcgacgctgtgacctacacggagcacgcccgtcgcaaaaccgtcaccgctatggacgtcgtgtacgccctcaaacgccagggccgcactctctatggcttcggcggctaggttaggtgtgggtaattgcctgtccaggtgtctcggatctgtggtactagtttggctgccttcctgtgttcgtattgtagtagttgtggtagctggttgctttgtcgtcctgtagtcgtgcttctttgggtctgtaagaaccgctggttcgatgggattggattggacggtgaagtaggaatgttggcatgttagacttttctccaacgtagcgttgcctctaatttgatctctcgatttattttcaattggggtgcactgtaattcttcctgtctaattcaaatcccctttctgaaattttgtgacctcccaagttttggacccctcgattgttcgaacgagtttttgaatttgtgtttcgagtcgaagtttcgattcacttcaggcgaaacaattcgttaatgcatttcgtgttgtcgctgaatctatgaaaccgtgtctgggatttatagggctcagaagttggggtttagtgacttaaacatgtacgtgtccaaaacgccatccgatgatcgatttcgtcgagcacctaagacacattctctggtgtcatccatcccatttatcctgttgtctgactacagttaatgctcgcgccccggcgtcgacgagtagcaactgcagccttgcctgggaattgagattgttgcgtcttccgagtcaggggatcggattttacttgcccggtccattggtaatgatttctctatcttttacacgtccttatcccggatttcgtttcagtgatttatcgatgatgaaaaagttactggattagtcttgctgtgtatgattgttcactgtaggtgggtttcttcaagctcagtgcacaggttgtacgcatggaacttctaatgttatttgtttatcacgcattctctggtttgtcagttgttcagaagttcgtttttgctggtttgaatgcaacgtggcgtggttactggtgacattgtgttcggcttaaacctagatcattgagagctcgacagtcgacaccattgtggaactgaattcagtctgatgtaatgtcttcttagcccgggtacctaaacagacttcttttaactatgccaacagggtgatggacagatggtgtactaaggtaaagcgaatgcatccagaagcaagttttgcagagatggatgatgggatttcagaagcattcctgcatcgagcaacggaacaagagatctagaatcaccaagatggaacccgtttggtgtgactatagctctagaaagaggtaaaaatatgagagggaacccgcaaagatgttacagacagtacatggacttcctcgacgtcttgacagaacaatagttgatatgccggttgaaatggcggaacagttcaaaggtggtgacgtggtgtgttgacatcaaggaggcgctctgaacattacagaggctacattcttgtgacgaagtgtcaccatgaagatgcttgtaatgtagacttctgaactttagttttgcttgatacctagaaacatgatagaatacaacagtactactttgctaaaatctacagaattcttcagcatattgattatcttaagtctgctatcatgtcacttctcggaggtaatttgctgtgacatgttgaaaaatgaatcccaagaatgtcaaggtaggaggtgcaaagcatttctatatagccaaactggtcatagttattgacctggaaggggttctgattgacattccagaaagggctgctgcaacatcatgtgtttaaccactgacattacttatggaatagtatttcttcaatcctttcatcctttgtgaacccaagtgtttttagctcagcgtagcatcgatactgacagcatgtgatctaacgcctgctgttaggcttttccatattagcggatctatagagacctttatatatgttctccagacttcactcatgttctgtatatatgatacttactccgttcttttttatttatcgtcgtatagtttaaaaatgaactagcgggcgacaaatattcgagaatggaggtagtataattttaagaaaaaaaaacactgatg

SEQ ID NO: 69706 - DNA, 722 bp, Zea Mays
cccagccgcacatgcctgcaatacccacctcagcactagtctcctcttcgcacgagcgcaacaccatccacccaccagttcgaagcggaggcgaccggcaacctgcggcggagatgtcaggcaggggcaagggcggcaaggggctcgggaagggcggcgcgaagcgtcaccggaaggtgctgcgcgacaacatccaggggatcacgaagccggcgatccggaggctggcgaggaggggtggcgtgaagcgcatctccgggctgatctacgaggagacccgcggcgtgctcaagatctttctcgagaatgtcatccgcgacgctgtgacctacacggagcacgcccgtcgcaaaaccgtcaccgctatggacgtcgtgtacgccctcaaacgccagggccgcactctctatggcttcggcggctaggttaggtgtggggtgatggacagatggtgtactaaggtaaagcgaatgcatccagaagcaagttttgcagagatggatgatgggatttcagaagcattcctgcatcgagcaacggaacaagagatctagaatcaccaagatggaacccgtttggtgtgactatagctctagaaagaggtaaaaatatgagagggaacccgcaaagatgttacagacagtacatggacttcctcgacgtcttgacagaacaatagtatcctgcctgggttgcgcggtttgtgcggcatccatttggat

SEQ ID NO: 69707 - DNA, 490 bp, Zea Mays
ccccgcctatatagcccagccgcacatgcctgcaatacccacctcagcactagtctcctcttcgcacgagcgcaacaccatccacccaccagttcgaagcggaggcgaccggcaacctgcggcggagatgtcaggcaggggcaagggcggcaaggggctcgggaagggcggcgcgaagcgtcaccggaaggtgctgcgcgacaacatccaggggatcacgaagccggcgatccggaggctggcgaggaggggtggcgtgaagcgcatctccgggctgatctacgaggagacccgcggcgtgctcaagatctttctcgagaatgtcatccgcgacgctgtgacctacacggagcacgcccgtcgcaaaaccgtcaccgctatggacgtcgtgtacgccctcaaacgccagggccgcactctctatggcttcggcggctagggtgatggacagatggtgtactaaggtaaagcgaatgcatccagaagcaag

SEQ ID NO: 69708 - DNA, 688 bp, Zea Mays
ctagtctcctcttcgcacgagcgcaacaccatccacccaccagttcgaagcggagatgtcaggcaggggcaagggcggcaaggggctcgggaagggcggcgcgaagcgtcaccggaaggtgctgcgcgacaacatccaggggatcacgaagccggcgatccggaggctggcgaggaggggtggcgtgaagcgcatctccgggctgatctacgaggagacccgcggcgtgctcaagatctttctcgagaatgtcatccgcgacgctgtgacctacacggagcacgcccgtcgcaaaaccgtcaccgctatggacgtcgtgtacgccctcaaacgccagggccgcactctctatggcttcggcggctaggttaggtgtgggtaattgcctgtccaggtgtctcggatctgtggtactagtttggctgccttcctgtgttcgtattgtagtagttgtggtagctggttgctttgtcgtcctgtagtcgtgcttctttgggtctgtaagaaccgctggttcgatgggattggattggacggtgaagtaggaatgttggcatgttagacttttctccaacgtagcgttgcctctaatttgatctctcgatttattttcaattggggtgcactgtaattcttcctgtctaattcaaatcccctttctgaaattttgtgacctcccaagttttgg

SEQ ID NO: 69709 - DNA, 259 bp, Zea Mays
accgccccttactttaaaagccgcccccttgtggcctcctttcccctccactcgcatcagagcggcgccggcctacaaccgttttcgtgctcacacacccaaaccttagtcgcgatcaggccccaaggactcgagatgaagtcgagggcacggtccaccgccggcgactccaggctctcggtgaggaagaccaaggcagagaaggacccaaacaagcccaagaggcctccgagcgcgttcttcgtcttcatggaggtga

SEQ ID NO: 69710 - DNA, 2555 bp, Zea Mays
agcactgcttcctacaaagatgctttaccagagatactggaggtcctgagagcagcttgcttgacccacaagctgccattagctcagacatgggtcacatgtgctcaacaagggaaacgaggcagccgacattccgacgagaactaccggtactgcatctccaccattgatgaagcatgctttgtgaatgaagccgagatgcggggcttccatgaggcctgctccgagcaccaccttctgcgcggggagggggttgcagggaaggcctttacaacaaaccagccatgcttcttgccagacattggatcctcaactaaattggaatactccttgtctcaccatgctaagatcttcaagttaaaaggtgcagtggcgatccgcctgcggtgcacacgcactgggacagcagactttgtgctggaattctttctgccaacagattgcgaagcactggaggagcagaagtcagtgctggactccttgtcaggcaccatgcgaagtgtttgccagaccctacgtgtggtcacagatagagagatggaagacgaaacggtgctggaaatgaacgagctgaactcttttactcctcatgggaaggacaaagttgagttgtcctttggatgcaattcagcagatcgtagaggagaggcctcttggacaagtctggcaggaacatcacagcaagaatccgagttagctgcattgcggatgcatggaatgttctcacctggggggcagggtccatctctatctggtgttcaggcaactgctgaaggtagcaaggcaaaaaggcgtacaaaggccgagaagaccgttagtttgcagattcttcggcagtacttcgctggtagcctgaaagatgcagcaaggagccttggagtgtgccctacgaccctcaaaagaatttgcaggcagcatggtataacccgctggccatcgcgaaagatcaagaaggtagaccactctctaagaaagcttcaacagatcattgattcggttcatggagcagagacagctttccagctaaacaccctgtacaaggatatcacgaacacctcaatatcatctgacaacaatttgtcaggaagtgtcacggttcctccaaccaaccagagcaatctcaccgacgtcaacaagcaccaaccccacaagtcaagcagtaatgtgccatcaacttcacactcacactcttcgtgcagccacagttctgagtcaagtccctcatgtagcggtggtgcaacaaaacatgcacaacagggtataattgatcagatgaagtcagaaaatcctgtgaaagacagctctattcagactctgcaaacagaaaacacttcattatttgagcatttctcagttaatgagactccaattgatcttctacaggatgttactgaaaaggctaatggtggacatcattcttctcgaagcccgtcgtcccccaatcccaagcagaacacagatgcaaatatgagagtaaaggcaacatttggctcagaaaaagtgagattcagactgaacccagagtgcaattttcaagaactgaagcatgagatagcaaaacgtttgagtatagtagacacaaaccccttggttttgaagtacttggatgatgattcagaatgggtcttgatgacatgcgatgcagatctacaggagtgccttcatgtatacaaactagcaggaatccaaacaatcaaaatttcagttcatttagctgttagtccagctacaagggtgacaactggtcacactggtttgtcatgacaacagtatgaacctcaccactttgtgaggtttaatcagaattcaacctggatcacttggttttatggttttatacaggggaaaccaattccaggagtcccgagttggtagcctatgcaatgtactatgtgccaccaagtcccagttctgctgttagatcgattagtcttcgatctgttgctcaggttaggaactgatgatcaaacaaaagtacttgacaatgggaaagtcaattctaggaattaggataaaccgaagtaagcatgcattgcttgtaaacactcactgatgaacctaaatctctgaaaggcaatgcaattgattgaattaatagggtgatagggtgaagtatacctacaaatcagatttgctccaactccaagtatgttttggttcttggaatactgatgtgcaacaatccttgatgacttctttctgataattgatcagctacaatgtcccttaagatcccagcattccttcatcgcccgagtgaccaacatgctctgtctgttcaatggacattaaattctgcttctgaaattgcaactttctgcagcaagggttagatctaaaaaataggatgataggatatttagtttgttcaatttgtttgtcctttgccaaaaaaacattgtatgctatactacagtgtggtcctctttgaaagaacgcctgctactgtagacgttatggattgctttccttttaagaagcttccgtttataaaccgtttggtatgtcaattgtcaagtatcaatatagagattagattatgtcaatactctaat

SEQ ID NO: 69711 - DNA, 3449 bp, Zea Mays
caaaaatctcgcaaggattcccatgtccccatggtttcctagcacaagatgtgcatggaccagcagaacagaagttctgaagggagagttacctgcatctgcatggaagagggaggagacccgcagcttccgagcatctccgcaccacgcaccacgtccgaaggcgcggggggcgtcgacttggatctccttgagcagctactgtccggcgacaacggctggctcgaggtggtctcacgctcgcccaactcggtagcgtttcctccactctcagccttcttctcggctgacgcgacagccaccacagtgacgacggcggcgccggccgcgaacgccagctggtggattcagacgggtggcgcgagcccctcctccgtggaggagcggttcagccaggccctgtcctacatccgggatacgcagagcgacggcgacgtcctcgtgcagctctgggtgccggtcaaccgcgatgacgggaaactggtgctgaccaccagcgagcaaccgttcacgctcgaccaccgctccgacagcctcctccggttcagggaggtgtccaccaagtaccagttctcggccgatgttaagtcgggggattcgccggggctgccagggagggtctttatcggcaggctccccgagtggtcgccggacatcaggtacttcaccagctacgagtatcccagggtaagggatgcacaatacctcgatgtccacggcaccatgggtctgccagtgttcgagaagggaagctacaactgcctgggcgtcatcgagctgatcatgacaaggcagaagataaacttcacctctgagctcaacaccatttgcagtgctctccaggcagttaatctcagaagtacagaagtttcaagcattccacgcataaagttcagcactgcttcctacaaagatgctttaccagagatactggaggtcctgagagcagcttgcttgacccacaagctgccattagctcagacatgggtcacatgtgctcaacaagggaaacgaggcagccgacattccgacgagaactaccggtactgcatctccaccattgatgaagcatgctttgtgaatgaagccgagatgcggggcttccatgaggcctgctccgagcaccaccttctgcgcggggagggggttgcagggaaggcctttacaacaaaccagccatgcttcttgccagacattggatcctcaactaaattggaatactccttgtctcaccatgctaagatcttcaagttaaaaggtgcagtggcgatccgcctgcggtgcacacgcactgggacagcagactttgtgctggaattctttctgccaacagattgcgaagcactggaggagcagaagtcagtgctggactccttgtcaggcaccatgcgaagtgtttgccagaccctacgtgtggtcacagatagagagatggaagacgaaacggtgctggaaatgaacgagctgaactcttttactcctcatgggaaggacaaagttgagttgtcctttggatgcaattcagcagatcgtagaggagaggcctcttggacaagtctggcaggaacatcacagcaagaatccgagttagctgcattgcggatgcatggaatgttctcacctggggggcagggtccatctctatctggtgttcaggcaactgctgaaggtagcaaggcaaaaaggcgtacaaaggccgagaagaccgttagtttgcagattcttcggcagtacttcgctggtagcctgaaagatgcagcaaggagccttggagtgtgccctacgaccctcaaaagaatttgcaggcagcatggtataacccgctggccatcgcgaaagatcaagaaggtagaccactctctaagaaagcttcaacagatcattgattcggttcatggagcagagacagctttccagctaaacaccctgtacaaggatatcacgaacacctcaatatcatctgacaacaatttgtcaggaagtgtcacggttcctccaaccaaccagagcaatctcaccgacgtcaacaagcaccaaccccacaagtcaagcagtaatgtgccatcaacttcacactcacactcttcgtgcagccacagttctgagtcaagtccctcatgtagcggtggtgcaacaaaacatgcacaacagggtataattgatcagatgaagtcagaaaatcctgtgaaagacagctctattcagactctgcaaacagaaaacacttcattatttgagcatttctcagttaatgagactccaattgatcttctacaggatgttactgaaaaggctaatggtggacatcattcttctcgaagcccgtcgtcccccaatcccaagcagaacacagatgcaaatatgagagtaaaggcaacatttggctcagaaaaagtgagattcagactgaacccagagtgcaattttcaagaactgaagcatgagatagcaaaacgtttgagtatagtagacacaaaccccttggttttgaagtacttggatgatgattcagaatgggtcttgatgacatgcgatgcagatctacaggagtgccttcatgtatacaaactagcaggaatccaaacaatcaaaatttcagttcatttagctgttagtccagctacaagggtgacaactggtcacactggtttgtcatgacaacagtatgaacctcaccactttgtgaggtttaatcagaattcaacctggatcacttggttttatggttttatacaggggaaaccaattccaggagtcccgagttggtagcctatgcaatgtactatgtgccaccaagtcccagttctgctgttagatcgattagtcttcgatctgttgctcaggttaggaactgatgatcaaacaaaagtacttgacaatgggaaagtcaattctaggaattaggataaaccgaagtaagcatgcattgcttgtaaacactcactgatgaacctaaatctctgaaaggcaatgcaattgattgaattaatagggtgatagggtgaagtatacctacaaatcagatttgctccaactccaagtatgttttggttcttggaatactgatgtgcaacaatccttgatgacttctttctgataattgatcagctacaatgtcccttaagatcccagcattccttcatcgcccgagtgaccaacatgctctgtctgttcaatggacattaaattctgcttctgaaattgcaactttctgcagcaagggttagatctaaaaaataggatgataggatatttagtttgttcaatttgtttgtcctttgccaaaaaaacattgtatgctatactacagtgtggtcctctttgaaagaacgcctgctactgtagacgttatggattgctttccttttaagaagcttccgtttataaaccgtttggtatgtcaattgtcaagtatcaatatagagattagattatgtcaatactctaat

SEQ ID NO: 69712 - DNA, 2510 bp, Zea Mays
gacatcgtagcgtaggagcaaaaaaaaaaaaaaaaaaaaaaaaaaaacggcaaacgacgcgcgcgccgcctcttcgtaacaccactctgccgccccctcgctcgttcgatcgccctgtgagcttatccgacgccgtggtcacttgagccccgatggagtttgccgccggcgctgcggtggccccgcgcccgatgcccgccgggcccggccgaaaccgccgggtgggcggtggagcgatcggcatcggttgggcccgccgcgcgaccgcgccggggctctcgctggctcccgccgtcgcgagacgggcggcctccgcgtcgggaggaggccacgggcgcgtcgtcgttcgctcaaccggcggcggctgtctgtggttccgcggcgagggcgccgacggtgatcgatcatccctggcgcgcgcgtctccgtcggatggcgcggctcctgcgcgcagttcagttcgggaacagactataggaattaagaaggagctcttcaatctggccgttccagccatagttgggcaagcgatcgaccccgtggcgcagttactggaaaccgcatatgttggccgcttaggtcctgtggagctggcttcagcagccgtcggtatgtcagtattcaacattatatcaaagctcttcaaacatacccctcctaagtatcacaacatcatttgtggctgaagatgtgtcaaaacatgactcttcacagtatgcttcggctgcaattggtgtcattgaagccttggctttgattttggggtctggaatactcctcaacattatgggtgtctcacatgcatcagctatgcacaatccagcaaggctatttctttctgtaagagcacttggtgctcctgctgttgttgtttcattggctatccaaggtgtgtttcgtggactcaaagatacaaaaacacctctactttatagtggtttgggtaacatctcagctgtggttctgcttccttttttcgtgtattccttgaaccttggattgactggagctgcacttgcaactattgcttcacagtatgtctgatatattggtatgtttctgcttctttggtctttaagcaagagagcagttctattaccaccaaaaatgaaagacctagagtttgttgggtacataaaatccggtggcatgctgttagggagaaccctttcagttctgataacaatgactctcgggactgcaatggctgctcggcaaggcacagtagcgatggccgctcatcaaatatgtctgcaagtttggctggctgtatcattactttcggatgcattggctgtttctgcccaggcactgattgcaagttcatttgccaaacttgactacgaaaaagtggaggaggtcacattctatgtattaaaggcaggagtgttcgttggtatcgctttagcacttcttctgtttgtctcttttggtagacttgcagaaatattctccaaagaccccatggttatacaaattgtgaggagtggtgttttgttcgttagtgctagccagcctatcaatgccctcgcttttatctttgacggactccattttggtgtctcagacttctcgtactcagcttcctccatgattgggatggagagcagggccttggtggtttttgcacagaaaagaacccaaatacaggctgcaatgaacaaaatgtggatctatggagccgaataaccaaatggcgagattaggatggaggatacaagttatgaaggcacactacaatggcgaaacatactttcatgttgactcccgtgtatgttttaaccagttcggttattctaattccatgtgtggtttggaatgtattttgacttgttatggatttcaaccaacttaggttttgttcggttaatcccgttacctatggattggatgagattggaaaaaaataagaagtttgacttacttgggatttaaactcatccaatcccacttaatccacatggattgagagctaaccgaacaaactctcaatatcagtcaatccacatagattaacggtgaaacgaacaagcccttaaggcttgttcggttagctctcaatccatgtggattgagtgggattagatgagtttgaatcccaaacaagtcaaacttcttaattttctccaatcccatccaatccaaatgtattgagaataaccgaacaagcccttagcccttaggtggttttagaacttggaatttgagagtaaagctacattggacaaattttcgcttgtatgtgtcacataggcgatgattgttcagtatctctatcctctctgtcaaactctagattgaatattgcagatttatttagacatatctgatgggttcaaactttacggttcaaacactcatacaccagattgattttagttgcagtttttacataacgaatgatagttcattatctctcctgcctcaagttattactgtttgcggaacatcatatgtgtcgtttggtttacgaaatgtaacgtaaaatgataataataataataatttac

SEQ ID NO: 69713 - DNA, 2567 bp, Zea Mays
gacatcgtagcgtaggagcaaaaaaaaaaaaaaaaaaaaaaaaaaaacggcaaacgacgcgcgcgccgcctcttcgtaacaccactctgccgccccctcgctcgttcgatcgccctgtgagcttatccgacgccgtggtcacttgagccccgatggagtttgccgccggcgctgcggtggccccgcgcccgatgcccgccgggcccggccgaaaccgccgggtgggcggtggagcgatcggcatcggttgggcccgccgcgcgaccgcgccggggctctcgctggctcccgccgtcgcgagacgggcggcctccgcgtcgggaggaggccacgggcgcgtcgtcgttcgctcaaccggcggcggctgtctgtggttccgcggcgagggcgccgacggtgatcgatcatccctggcgcgcgcgtctccgtcggatggcgcggctcctgcgcgttcagttcgggaacagactataggaattaagaaggagctcttcaatctggccgttccagccatagttgggcaagcgatcgaccccgtggcgcagttactggaaaccgcatatgttggccgcttaggtcctgtggagctggcttcagcagccgtcggtatgtcagtattcaacattatatcaaagctcttcaaacatacccctcctaagtatcacaacatcatttgtggctgaagatgtgtcaaaacatgactcttcacagtatgcttcgggaaatatatctggcaaggttggagaaaggaagaggcttccttcaatttcttctgctttactcttggcagctgcaattggtgtcattgaagccttggctttgattttggggtctggaatactcctcaacattatgggtgtctcacatgcatcagctatgcacaatccagcaaggctatttctttctgtaagagcacttggtgctcctgctgttgttgtttcattggctatccaaggtgtgtttcgtggactcaaagatacaaaaacacctctactttatagtggtttgggtaacatctcagctgtggttctgcttccttttttcgtgtattccttgaaccttggattgactggagctgcacttgcaactattgcttcacaatatattggtatgtttctgcttctttggtctttaagcaagagagcagttctattaccaccaaaaatgaaagacctagagtttgttgggtacataaaatccggtggcatgctgttagggagaaccctttcagttctgataacaatgactctcgggactgcaatggctgctcggcaaggcacagtagcgatggccgctcatcaaatatgtctgcaagtttggctggctgtatcattactttcggatgcattggctgtttctgcccaggcactgattgcaagttcatttgccaaacttgactacgaaaaagtggaggaggtcacattctatgtattaaaggcaggagtgttcgttggtatcgctttagcacttcttctgtttgtctcttttggtagacttgcagaaatattctccaaagaccccatggttatacaaattgtgaggagtggtgttttgttcgttagtgctagccagcctatcaatgccctcgcttttatctttgacggactccattttggtgtctcagacttctcgtactcagcttcctccatgattgggatggagagcagggccttggtggtttttgcacagaaaagaacccaaatacaggctgcaatgaacaaaatgtggatctatggagccgaataaccaaatggcgagattaggatggaggatacaagttatgaaggcacactacaatggcgaaacatactttcatgttgactcccgtgtatgttttaaccagttcggttattctaattccatgtgtggtttggaatgtattttgacttgttatggatttcaaccaacttaggttttgttcggttaatcccgttacctatggattggatgagattggaaaaaaataagaagtttgacttacttgggatttaaactcatccaatcccacttaatccacatggattgagagctaaccgaacaaactctcaatatcagtcaatccacatagattaacggtgaaacgaacaagcccttaaggcttgttcggttagctctcaatccatgtggattgagtgggattagatgagtttgaatcccaaacaagtcaaacttcttaattttctccaatcccatccaatccaaatgtattgagaataaccgaacaagcccttagcccttaggtggttttagaacttggaatttgagagtaaagctacattggacaaattttcgcttgtatgtgtcacataggcgatgattgttcagtatctctatcctctctgtcaaactctagattgaatattgcagatttatttagacatatctgatgggttcaaactttacggttcaaacactcatacaccagattgattttagttgcagtttttacataacgaatgatagttcattatctctcctgcctcaagttattactgtttgcggaacatcatatgtgtcgtttggtttacgaaatgtaacgtaaaatgataataataataataatttac

SEQ ID NO: 69714 - DNA, 2512 bp, Zea Mays
gacatcgtagcgtaggagcaaaaaaaaaaaaaaaaaaaaaaaaaaaacggcaaacgacgcgcgcgccgcctcttcgtaacaccactctgccgccccctcgctcgttcgatcgccctgtgagcttatccgacgccgtggtcacttgagccccgatggagtttgccgccggcgctgcggtggccccgcgcccgatgcccgccgggcccggccgaaaccgccgggtgggcggtggagcgatcggcatcggttgggcccgccgcgcgaccgcgccggggctctcgctggctcccgccgtcgcgagacgggcggcctccgcgtcgggaggaggccacgggcgcgtcgtcgttcgctcaaccggcggcggctgtctgtggttccgcggcgagggcgccgacggtgatcgatcatccctggcgcgcgcgtctccgtcggatggcgcggctcctgcgcgcagttcagttcgggaacagactataggaattaagaaggagctcttcaatctggccgttccagccatagttgggcaagcgatcgaccccgtggcgcagttactggaaaccgcatatgttggccgcttaggtcctgtggagctggcttcagcagccgtcggtatgtcagtattcaacattatatcaaagctcttcaaacatacccctcctaagtatcacaacatcatttgtggctgaagatgtgtcaaaacatgactcttcacagtatgcttcgggaaatatatctggcaaggttggagaaaggaagaggcttccttcaatttcttctgctttactcttggcagctgcaattggtgtcattgaagccttggctttgattttggggtctggaatactcctcaacattatgggtgtctcacatgcatcagctatgcacaatccagcaaggctatttctttctgtaagagcacttggtgctcctgctgttgttgtttcattggctatccaaggtgtgtttcgtggactcaaagatacaaaaacacctctactttatagtggtttgggtaacatctcagctgtggttctgcttccttttttcgtgtattccttgaaccttggattgactggagctgcacttgcaactattgcttcacacaagagagcagttctattaccaccaaaaatgaaagacctagagtttgttgggtacataaaatccggtggcatgctgttagggagaaccctttcagttctgataacaatgactctcgggactgcaatggctgctcggcaaggcacagtagcgatggccgctcatcaaatatgtctgcaagtttggctggctgtatcattactttcggatgcattggctgtttctgcccaggcactgattgcaagttcatttgccaaacttgactacgaaaaagtggaggaggtcacattctatgtattaaaggcaggagtgttcgttggtatcgctttagcacttcttctgtttgtctcttttggtagacttgcagaaatattctccaaagaccccatggttatacaaattgtgaggagtggtgttttgttcgttagtgctagccagcctatcaatgccctcgcttttatctttgacggactccattttggtgtctcagacttctcgtactcagcttcctccatgatggtagttggagcaatatcctctttgtttttgctgtgtgctccacgatttttcgggcttcttggtgtttgggctggcctggctcttttcatgagtttgcgcatgactgctggatttatgagattgggatggagagcagggccttggtggtttttgcacagaaaagaacccaaatacaggctgcaatgaacaaaatgtggatctatggagccgaataaccaaatggcgagattaggatggaggatacaagttatgaaggcacactacaatggcgaaacatactttcatgttgactcccgtgtatgttttaaccagttcggttattctaattccatgtgtggtttggaatgtattttgacttgttatggatttcaaccaacttaggttttgttcggttaatcccgttacctatggattggatgagattggaaaaaaataagaagtttgacttacttgggatttaaactcatccaatcccacttaatccacatggattgagagctaaccgaacaaactctcaatatcagtcaatccacatagattaacggtgaaacgaacaagcccttaggtggttttagaacttggaatttgagagtaaagctacattggacaaattttcgcttgtatgtgtcacataggcgatgattgttcagtatctctatcctctctgtcaaactctagattgaatattgcagatttatttagacatatctgatgggttcaaactttacggttcaaacactcatacaccagattgattttagttgcagtttttacataacgaatgatagttcattatctctcctgcctcaagttattactgtttgcggaacatcatatgtgtcgtttggtttacgaaatgtaacgtaaaatgataataataataataatttac

SEQ ID NO: 69715 - DNA, 2479 bp, Zea Mays
gacatcgtagcgtaggagcaaaaaaaaaaaaaaaaaaaaaaaaaaaacggcaaacgacgcgcgcgccgcctcttcgtaacaccactctgccgccccctcgctcgttcgatcgccctgtgagcttatccgacgccgtggtcacttgagccccgatggagtttgccgccggcgctgcggtggccccgcgcccgatgcccgccgggcccggccgaaaccgccgggtgggcggtggagcgatcggcatcggttgggcccgccgcgcgaccgcgccggggctctcgctggctcccgccgtcgcgagacgggcggcctccgcgtcgggaggaggccacgggcgcgtcgtcgttcgctcaaccggcggcggctgtctgtggttccgcggcgagggcgccgacggtgatcgatcatccctggcgcgcgcgtctccgtcggatggcgcggctcctgcgcgcagttcagttcgggaacagactataggaattaagaaggagctcttcaatctggccgttccagccatagttgggcaagcgatcgaccccgtggcgcagttactggaaaccgcatatgttggccgcttaggtcctgtggagctggcttcagcagccgtcggtatgtcagtattcaacattatatcaaagctcttcaaacatacccctcctaagtatcacaacatcatttgtggctgaagatgtgtcaaaacatgactcttcacagtatgcttcgggaaatatatctggcaaggttggagaaaggaagaggcttccttcaatttcttctgctttactcttggcagctgcaattggtgtcattgaagccttggctttgattttggggtctggaatactcctcaacattatgggtgtctcacatgcatcagctatgcacaatccagcaaggctatttctttctgtaagagcacttggtgctcctgctgttgttgtttcattggctatccaaggtgtgtttcgtggactcaaagatacaaaaacacctctactttatagtggtttgggtaacatctcagctgtggttctgcttccttttttcgtgtattccttgaaccttggattgactggagctgcacttgcaactattgcttcacaatatattggtatgtttctgcttctttggtctttaagcaagagagcagttctattaccaccaaaaatgaaagacctagagtttgttgggtacataaaatccggtggcatgctgttagggagaaccctttcagttctgataacaatgactctcgggactgcaatggctgctcggcaaggcacagtagcgatggccgctcatcaaatatgtctgcaagtttggctggctgtatcattactttcggatgcattggctgtttctgcccaggcactgattgcaagttcatttgccaaacttgactacgaaaaagtggaggaggtcacattctatgtattaaagatggtagttggagcaatatcctctttgtttttgctgtgtgctccacgatttttcgggcttcttggtgtttgggctggcctggctcttttcatgagtttgcgcatgactgctggatttatgagattgggatggagagcagggccttggtggtttttgcacagaaaagaacccaaatacaggctgcaatgaacaaaatgtggatctatggagccgaataaccaaatggcgagattaggatggaggatacaagttatgaaggcacactacaatggcgaaacatactttcatgttgactcccgtgtatgttttaaccagttcggttattctaattccatgtgtggtttggaatgtattttgacttgttatggatttcaaccaacttaggttttgttcggttaatcccgttacctatggattggatgagattggaaaaaaataagaagtttgacttacttgggatttaaactcatccaatcccacttaatccacatggattgagagctaaccgaacaaactctcaatatcagtcaatccacatagattaacggtgaaacgaacaagcccttaaggcttgttcggttagctctcaatccatgtggattgagtgggattagatgagtttgaatcccaaacaagtcaaacttcttaattttctccaatcccatccaatccaaatgtattgagaataaccgaacaagcccttagcccttaggtggttttagaacttggaatttgagagtaaagctacattggacaaattttcgcttgtatgtgtcacataggcgatgattgttcagtatctctatcctctctgtcaaactctagattgaatattgcagatttatttagacatatctgatgggttcaaactttacggttcaaacactcatacaccagattgattttagttgcagtttttacataacgaatgatagttcattatctctcctgcctcaagttattactgtttgcggaacatcatatgtgtcgtttggtttacgaaatgtaacgtaaaatgataataataataataatttac

SEQ ID NO: 69716 - DNA, 2547 bp, Zea Mays
gacatcgtagcgtaggagcaaaaaaaaaaaaaaaaaaaaaaaaaaaacggcaaacgacgcgcgcgccgcctcttcgtaacaccactctgccgccccctcgctcgttcgatcgccctgtgagcttatccgacgccgtggtcacttgagccccgatggagtttgccgccggcgctgcggtggccccgcgcccgatgcccgccgggcccggccgaaaccgccgggtgggcggtggagcgatcggcatcggttgggcccgccgcgcgaccgcgccggggctctcgctggctcccgccgtcgcgagacgggcggcctccgcgtcgggaggaggccacgggcgcgtcgtcgttcgctcaaccggcggcggctgtctgtggttccgcggcgagggcgccgacggtgatcgatcatccctggcgcgcgcgtctccgtcggatggcgcggctcctgcgcgcagttcagttcgggaacagactataggaattaagaaggagctcttcaatctggccgttccagccatagttgggcaagcgatcgaccccgtggcgcagttactggaaaccgcatatgttggccgcttaggtcctgtggagctggcttcagcagccgtcggtatgtcagtattcaacattatatcaaagctcttcaaacatacccctcctaagtatcacaacatcatttgtggctgaagatgtgtcaaaacatgactcttcacagtatgcttcgggaaatatatctggcaaggttggagaaaggaagaggcttccttcaatttcttctgctttactcttggcagctgcaattggtgtcattgaagccttggctttgattttggggtctggaatactcctcaacattatgggtgtctcacatgcatcagctatgcacaatccagcaaggctatttctttctgtaagagcacttggtgctcctgctgttgttgtttcattggctatccaaggtgtgtttcgtggactcaaagatacaaaaacacctctactttatagtggtttgggtaacatctcagctgtggttctgcttccttttttcgtgtattccttgaaccttggattgactggagctgcacttgcaactattgcttcacaatatattggtatgtttctgcttctttggtctttaagcaagagagcagttctattaccaccaaaaatgaaagacctagagtttgttgggtacataaaatccggtggcatgctgttagggagaaccctttcagttctgataacaatgactctcgggactgcaatggctgctcggcaaggcacagtagcgatggccgctcatcaaatatgtctgcaagtttggctggctgtatcattactttcggatgcattggctgtttctgcccaggcactgattgcaagttcatttgccaaacttgactacgaaaaagtggaggaggtcacattctatgtattaaaggcaggagtgttcgttggtatcgctttagcacttcttctgtttgtctcttttggtagacttgcagaaatattctccaaagaccccatggttatacaaattgtgaggagtggtgttttttcgttagtgctagccagcctatcaatgccctcgcttttatctttgacggactccattttggtgtctcagacttctcgtactcagcttcctccatgatggtagttggagcaatatcctctttgtttttgctgtgtgctccacgatttttcgggcttcttggtgtttgggctggcctggctcttttcatgagtttgcgcatgactgctggatttatgagattgggatggagagcagggccttggtggtttttgcacagaaaagaacccaaatacaggctgcaatgaacaaaatgtggatctatggagccgaataaccaaatggcgagattaggatggaggatacaagttatgaaggcacactacaatggcgaaacatactttcatgttgactcccgtgtatgttttaaccagttcggttattctaattccatgtgtggtttggaatgtattttgacttgttatggatttcaaccaacttaggttttgttcggttaatcccgttacctatggattggatgagattggaaaaaaataagaagtttgacttacttgggatttaaactcatccaatcccacttaatccacatggattgagagctaaccgaacaaactctcaatatcagtcaatccacatagattaacggtgaaacgaacaagcccttaggtggttttagaacttggaatttgagagtaaagctacattggacaaattttcgcttgtatgtgtcacataggcgatgattgttcagtatctctatcctctctgtcaaactctagattgaatattgcagatttatttagacatatctgatgggttcaaactttacggttcaaacactcatacaccagattgattttagttgcagtttttacataacgaatgatagttcattatctctcctgcctcaagttattactgtttgcggaacatcatatgtgtcgtttggtttacgaaatgtaacgtaaaatgataataataataataatttac

SEQ ID NO: 69717 - DNA, 2421 bp, Zea Mays
ccaaaaccccggggcgcgggcggagcccccacccaaaacccgccgcctctccgcctccaccttcgcgtgctctctccgtcctgacatcgtagcgtaggagcaaaaaaaaaaaaaaaaaaaaaaaaaaaacggcaaacgacgcgcgcgccgcctcttcgtaacaccactctgccgccccctcgctcgttcgatcgccctgtgagcttatccgacgccgtggtcacttgagccccgatggagtttgccgccggcgctgcggtggccccgcgcccgatgcccgccgggcccggccgaaaccgccgggtgggcggtggagcgatcggcatcggttgggcccgccgcgcgaccgcgccggggctctcgctggctcccgccgtcgcgagacgggcggcctccgcgtcgggaggaggccacgggcgcgtcgtcgttcgctcaaccggcggcggctgtctgtggttccgcggcgagggcgccgacggtgatcgatcatccctggcgcgcgcgtctccgtcggatggcgcggctcctgcgcgttcagttcgggaacagactataggaattaagaaggagctcttcaatctggccgttccagccatagttgggcaagcgatcgaccccgtggcgcagttactggaaaccgcatatgttggccgcttaggtcctgtggagctggcttcagcagccgtcggtatgtcagtattcaacattatatcaaagctcttcaaacatacccctcctaagtatcacaacatcatttgtggctgaagatgtgtcaaaacatgactcttcacagtatgcttcggctgcaattggtgtcattgaagccttggctttgattttggggtctggaatactcctcaacattatgggtgtctcacatgcatcagctatgcacaatccagcaaggctatttctttctgtaagagcacttggtgctcctgctgttgttgtttcattggctatccaaggtgtgtttcgtggactcaaagatacaaaaacacctctactttatagtggtttgggtaacatctcagctgtggttctgcttccttttttcgtgtattccttgaaccttggattgactggagctgcacttgcaactattgcttcacaatatattggtatgtttctgcttctttggtctttaagcaagagagcagttctattaccaccaaaaatgaaagacctagagtttgttgggtacataaaatccggtggcatgctgttagggagaaccctttcagttctgataacaatgactctcgggactgcaatggctgctcggcaaggcacagtagcgatggccgctcatcaaatatgtctgcaagtttggctggctgtatcattactttcggatgcattggctgtttctgcccaggcactgattgcaagttcatttgccaaacttgactacgaaaaagtggaggaggtcacattctatgtattaaaggcaggagtgttcgttggtatcgctttagcacttcttctgtttgtctcttttggtagacttgcagaaatattctccaaagaccccatggttatacaaattgtgaggagtggtgttttgttcgttagtgctagccagcctatcaatgccctcgcttttatctttgacggactccattttggtgtctcagacttctcgtactcagcttcctccatgatggtagttggagcaatatcctctttgtttttgctgtgtgctccacgatttttcgggcttcttggtgtttgggctggcctggctcttttcatgagtttgcgcatgactgctggatttatgagattgggatggagagcagggccttggtggtttttgcacagaaaagaacccaaatacaggctgcaatgaacaaaatgtggatctatggagccgaataaccaaatggcgagattaggatggaggatacaagttatgaaggcacactacaatggcgaaacatactttcatgttgactcccgtgtatgttttaaccagttcggttattctaattccatgtgtggtttggaatgtattttgacttgttatggatttcaaccaactcaatatcagtcaatccacatagattaacggtgaaacgaacaagcccttaggtggttttagaacttggaatttgagagtaaagctacattggacaaattttcgcttgtatgtgtcacataggcgatgattgttcagtatctctatcctctctgtcaaactctagattgaatattgcagatttatttagacatatctgatgggttcaaactttacggttcaaacactcatacaccagattgattttagttgcagtttttacataacgaatgatagttcattatctctcctgcctcaagttattactgtttgcggaacatcatatgtgtcgtttggtttacgaaatgtaacgtaaaatgataataataataataatttac

SEQ ID NO: 69718 - DNA, 2502 bp, Zea Mays
ccaaaaccccggggcgcgggcggagcccccacccaaaacccgccgcctctccgcctccaccttcgcgtgctctctccgtcctgacatcgtagcgtaggagcaaaaaaaaaaaaaaaaaaaaaaaaaaaacggcaaacgacgcgcgcgccgcctcttcgtaacaccactctgccgccccctcgctcgttcgatcgccctgtgagcttatccgacgccgtggtcacttgagccccgatggagtttgccgccggcgctgcggtggccccgcgcccgatgcccgccgggcccggccgaaaccgccgggtgggcggtggagcgatcggcatcggttgggcccgccgcgcgaccgcgccggggctctcgctggctcccgccgtcgcgagacgggcggcctccgcgtcgggaggaggccacgggcgcgtcgtcgttcgctcaaccggcggcggctgtctgtggttccgcggcgagggcgccgacggtgatcgatcatccctggcgcgcgcgtctccgtcggatggcgcggctcctgcgcgcagttcagttcgggaacagactataggaattaagaaggagctcttcaatctggccgttccagccatagttgggcaagcgatcgaccccgtggcgcagttactggaaaccgcatatgttggccgcttaggtcctgtggagctggcttcagcagccgtcggtatgtcagtattcaacattatatcaaagctcttcaaacatacccctcctaagtatcacaacatcatttgtggctgaagatgtgtcaaaacatgactcttcacagtatgcttcgggaaatatatctggcaaggttggagaaaggaagaggcttccttcaatttcttctgctttactcttggcagctgcaattggtgtcattgaagccttggctttgattttggggtctggaatactcctcaacattatgggtgtctcacatgcatcagctatgcacaatccagcaaggctatttctttctgtaagagcacttggtgctcctgctgttgttgtttcattggctatccaaggtgtgtttcgtggactcaaagatacaaaaacacctctactttatagtggtttgggtaacatctcagctgtggttctgcttccttttttcgtgtattccttgaaccttggattgactggagctgcacttgcaactattgcttcacagtatgtctgatatattggtatgtttctgcttctttggtctttaagcaagagagcagttctattaccaccaaaaatgaaagacctagagtttgttgggtacataaaatccggtggcatgctgttagggagaaccctttcagttctgataacaatgactctcgggactgcaatggctgctcggcaaggcacagtagcgatggccgctcatcaaatatgtctgcaagtttggctggctgtatcattactttcggatgcattggctgtttctgcccaggcactgattgcaagttcatttgccaaacttgactacgaaaaagtggaggaggtcacattctatgtattaaaggcaggagtgttcgttggtatcgctttagcacttcttctgtttgtctcttttggtagacttgcagaaatattctccaaagaccccatggttatacaaattgtgaggagtggtgttttgttcgttagtgctagccagcctatcaatgccctcgcttttatctttgacggactccattttggtgtctcagacttctcgtactcagcttcctccatgatggtagttggagcaatatcctctttgtttttgctgtgtgctccacgatttttcgggcttcttggtgtttgggctggcctggctcttttcatgagtttgcgcatgactgctggatttatgagattgggatggagagcagggccttggtggtttttgcacagaaaagaacccaaatacaggctgcaatgaacaaaatgtggatctatggagccgaataaccaaatggcgagattaggatggaggatacaagttatgaaggcacactacaatggcgaaacatactttcatgttgactcccgtgtatgttttaaccagttcggttattctaattccatgtgtggtttggaatgtattttgacttgttatggatttcaaccaactcaatatcagtcaatccacatagattaacggtgaaacgaacaagcccttaggtggttttagaacttggaatttgagagtaaagctacattggacaaattttcgcttgtatgtgtcacataggcgatgattgttcagtatctctatcctctctgtcaaactctagattgaatattgcagatttatttagacatatctgatgggttcaaactttacggttcaaacactcatacaccagattgattttagttgcagtttttacataacgaatgatagttcattatctctcctgcctcaagttattactgtttgcggaacatcatatgtgtcgtttggtttacgaaatgtaacgtaaaatgataataataataataatttac

SEQ ID NO: 69719 - DNA, 2514 bp, Zea Mays
tggccacttttgctccggcctcactggtgccgtgctatgggcgcgccgcgcgcgcaagttcaggtcgaggcagacagcccagcgcgtgcgccgcgcacagccaaaaccccggggcgcgggcggagcccccacccaaaacccgccgcctctccgcctccaccttcgcgtgctctctccgtcctgacatcgtagcgtaggagcaaaaaaaaaaaaaaaaaaaaaaaaaaaacggcaaacgacgcgcgcgccgcctcttcgtaacaccactctgccgccccctcgctcgttcgatcgccctgtgagcttatccgacgccgtggtcacttgagccccgatggagtttgccgccggcgctgcggtggccccgcgcccgatgcccgccgggcccggccgaaaccgccgggtgggcggtggagcgatcggcatcggttgggcccgccgcgcgaccgcgccggggctctcgctggctcccgccgtcgcgagacgggcggcctccgcgtcgggaggaggccacgggcgcgtcgtcgttcgctcaaccggcggcggctgtctgtggttccgcggcgagggcgccgacggtgatcgatcatccctggcgcgcgcgtctccgtcggatggcgcggctcctgcgcgcagttcagttcgggaacagactataggaattaagaaggagctcttcaatctggccgttccagccatagttgggcaagcgatcgaccccgtggcgcagttactggaaaccgcatatgttggccgcttaggtcctgtggagctggcttcagcagccgtcgatgtgtcaaaacatgactcttcacagtatgcttcgggaaatatatctggcaaggttggagaaaggaagaggcttccttcaatttcttctgctttactcttggcagctgcaattggtgtcattgaagccttggctttgattttggggtctggaatactcctcaacattatgggtgtctcacatgcatcagctatgcacaatccagcaaggctatttctttctgtaagagcacttggtgctcctgctgttgttgtttcattggctatccaaggtgtgtttcgtggactcaaagatacaaaaacacctctactttatagtggtttgggtaacatctcagctgtggttctgcttccttttttcgtgtattccttgaaccttggattgactggagctgcacttgcaactattgcttcacaatatattggtatgtttctgcttctttggtctttaagcaagagagcagttctattaccaccaaaaatgaaagacctagagtttgttgggtacataaaatccggtggcatgctgttagggagaaccctttcagttctgataacaatgactctcgggactgcaatggctgctcggcaaggcacagtagcgatggccgctcatcaaatatgtctgcaagtttggctggctgtatcattactttcggatgcattggctgtttctgcccaggcactgattgcaagttcatttgccaaacttgactacgaaaaagtggaggaggtcacattctatgtattaaaggcaggagtgttcgttggtatcgctttagcacttcttctgtttgtctcttttggtagacttgcagaaatattctccaaagaccccatggttatacaaattgtgaggagtggtgttttgttcgttagtgctagccagcctatcaatgccctcgcttttatctttgacggactccattttggtgtctcagacttctcgtactcagcttcctccatgatggtagttggagcaatatcctctttgtttttgctgtgtgctccacgatttttcgggcttcttggtgtttgggctggcctggctcttttcatgagtttgcgcatgactgctggatttatgagattgggatggagagcagggccttggtggtttttgcacagaaaagaacccaaatacaggctgcaatgaacaaaatgtggatctatggagccgaataaccaaatggcgagattaggatggaggatacaagttatgaaggcacactacaatggcgaaacatactttcatgttgactcccgtgtatgttttaaccagttcggttattctaattccatgtgtggtttggaatgtattttgacttgttatggatttcaaccaactcaatatcagtcaatccacatagattaacggtgaaacgaacaagcccttaggtggttttagaacttggaatttgagagtaaagctacattggacaaattttcgcttgtatgtgtcacataggcgatgattgttcagtatctctatcctctctgtcaaactctagattgaatattgcagatttatttagacatatctgatgggttcaaactttacggttcaaacactcatacaccagattgattttagttgcagtttttacataacgaatgatagttcattatctctcctgcctcaagttattactgtttgcggaacatcatatgtgtcgtttggtttacgaaatgtaacgtaaaatgataataataataataatttac

SEQ ID NO: 69720 - DNA, 2576 bp, Zea Mays
tggccacttttgctccggcctcactggtgccgtgctatgggcgcgccgcgcgcgcaagttcaggtcgaggcagacagcccagcgcgtgcgccgcgcacagccaaaaccccggggcgcgggcggagcccccacccaaaacccgccgcctctccgcctccaccttcgcgtgctctctccgtcctgacatcgtagcgtaggagcaaaaaaaaaaaaaaaaaaaaaaaaaaaacggcaaacgacgcgcgcgccgcctcttcgtaacaccactctgccgccccctcgctcgttcgatcgccctgtgagcttatccgacgccgtggtcacttgagccccgatggagtttgccgccggcgctgcggtggccccgcgcccgatgcccgccgggcccggccgaaaccgccgggtgggcggtggagcgatcggcatcggttgggcccgccgcgcgaccgcgccggggctctcgctggctcccgccgtcgcgagacgggcggcctccgcgtcgggaggaggccacgggcgcgtcgtcgttcgctcaaccggcggcggctgtctgtggttccgcggcgagggcgccgacggtgatcgatcatccctggcgcgcgcgtctccgtcggatggcgcggctcctgcgcgcagttcagttcgggaacagactataggaattaagaaggagctcttcaatctggccgttccagccatagttgggcaagcgatcgaccccgtggcgcagttactggaaaccgcatatgttggccgcttaggtcctgtggagctggcttcagcagccgtcggtatgtcagtattcaacattatatcaaagctcttcaaacatacccctcctaagtatcacaacatcatttgtggctgaagatgtgtcaaaacatgactcttcacagtatgcttcgggttggagaaaggaagaggcttccttcaatttcttctgctttactcttggcagctgcaattggtgtcattgaagccttggctttgattttggggtctggaatactcctcaacattatgggtgtctcacatgcatcagctatgcacaatccagcaaggctatttctttctgtaagagcacttggtgctcctgctgttgttgtttcattggctatccaaggtgtgtttcgtggactcaaagatacaaaaacacctctactttatagtggtttgggtaacatctcagctgtggttctgcttccttttttcgtgtattccttgaaccttggattgactggagctgcacttgcaactattgcttcacaatatattggtatgtttctgcttctttggtctttaagcaagagagcagttctattaccaccaaaaatgaaagacctagagtttgttgggtacataaaatccggtggcatgctgttagggagaaccctttcagttctgataacaatgactctcgggactgcaatggctgctcggcaaggcacagtagcgatggccgctcatcaaatatgtctgcaagtttggctggctgtatcattactttcggatgcattggctgtttctgcccaggcactgattgcaagttcatttgccaaacttgactacgaaaaagtggaggaggtcacattctatgtattaaaggcaggagtgttcgttggtatcgctttagcacttcttctgtttgtctcttttggtagacttgcagaaatattctccaaagaccccatggttatacaaattgtgaggagtggtgttttgttcgttagtgctagccagcctatcaatgccctcgcttttatctttgacggactccattttggtgtctcagacttctcgtactcagcttcctccatgatggtagttggagcaatatcctctttgtttttgctgtgtgctccacgatttttcgggcttcttggtgtttgggctggcctggctcttttcatgagtttgcgcatgactgctggatttatgagattgggatggagagcagggccttggtggtttttgcacagaaaagaacccaaatacaggctgcaatgaacaaaatgtggatctatggagccgaataaccaaatggcgagattaggatggaggatacaagttatgaaggcacactacaatggcgaaacatactttcatgttgactcccgtgtatgttttaaccagttcggttattctaattccatgtgtggtttggaatgtattttgacttgttatggatttcaaccaactcaatatcagtcaatccacatagattaacggtgaaacgaacaagcccttaggtggttttagaacttggaatttgagagtaaagctacattggacaaattttcgcttgtatgtgtcacataggcgatgattgttcagtatctctatcctctctgtcaaactctagattgaatattgcagatttatttagacatatctgatgggttcaaactttacggttcaaacactcatacaccagattgattttagttgcagtttttacataacgaatgatagttcattatctctcctgcctcaagttattactgtttgcggaacatcatatgtgtcgtttggtttacgaaatgtaacgtaaaatgataataataataataatttac

SEQ ID NO: 69721 - DNA, 740 bp, Zea Mays
cgctgctgcacactgccccactctcctctacctccgcgccaatgcgcctccccaacatttaaacggccaaaccagcccaaaccccaaccccaaccccacagcagttggactgccagtcaacacagggactgagctcgtcgttctgccctgccgccaagtgcggagacatgttcctcggcaacacatcctcctccacctcatcctgcgagagcacagcatgctcctacgccgggtacaccaacagcacatcgttcgccatcctcgccaatgtgaccaccaccaacgtgtgtaacgctgggatgactccgacggcgcagccggctcactcttcggcgcttcggttggagccggtgtggctgagatggacggagctggttgccttgtctctcttcacgctgtctttcttcgtctaggctatctgcggcaaaagactgaacgttgtcgccaagcgtctgtcgttagaatctggccctctgattcctagtttgatgttgtgagtaatatctgcagtgtttgcgcgactttgatctgtaactggttggatttgtaagggcaaactctagggtaacacttctgtgttagacggtagatcaggaaacatttgtacttcgtcaaacttttgcaaagataatttcttctgttatcaccatagcctttttcgtgttctagaatctggagtattgtttggctctagcattccaacgtatggattcaacatcattgcctgtaatttcagctcc

SEQ ID NO: 69722 - DNA, 2254 bp, Zea Mays
gttgggcccgtcccatgccccccactaaaatactccaagccgctgggccgccgtggcccacccaccgccgtcgtcaccctcccgccccgccggccgccgcagatgggccagccgcggcggcgcggctacccgcacggccgccaccaccggtgcccgcgcggcattgcgctgccggcggccggagcgggcctgctcttcctctccgtctcgctcctctccgtctcactcctctccgcgccgccgctcgcggacccgcgcccgggcctcggcacctcctcctcctctcgacggttcctccgccgccatccgacaaacggctctgacggcgaactggagggctccgagagcggcgacgcgttcagtgttccggcacgcggtggatggactgggcaggatgatctttggggatcgaagcttgctagcaacttccacggatgcagcaactctagtagtagatttcttgattctggtattaccacacaaccagatcgatacttgattgttgttacaagtggaggtctcaatcagcagagaacagggatagttgatgctgtagttgctgcacgtatattgaatgctacacttgttgttcccaaactggatcaaacatctttctggaaagattcaagcaatttttcagaaatctttgatatggactggttcatctcatttcttgcaaaggatgtcagaattatcaaagagcctccagaaaaaggaggtaaagcaatgaaaccttataaaatgcgtgtcccccgaaaatgtactccacggtgttacttgaaccgtgtcttaccagcacttctgaagaaacatagtcaattatcattctttgagatttactgacccaatacaagaattggctgaaaagctaatacaacgaatgcgagaaaagaacagatattttattgctcttcacctgagatttgaacctgacatgcttgccttttctgggtgctattatggtggtggagaaaaggagaggagagaattagctgcaattcgcagacgatggagaaccttgcatgtacaagctgtgtgatgtgtaatcattactcgcttactgagatagaattaccttttgctaaaagttttcatattctagatacgtgacccggagaaaggaagacggcaaggcaggtgtccactaactcctgaggaggtagggttgatgctgagggcattaggctacagaagtgatgtgcacatttatgttgcttctggtgagatatatggaggggaagatacattagcatccctgaaagcgctctttcctaatttccatacaaaagaaacactatcaagccaagaggagcttgctcctttcctgaagttctcatctcgcatggctgcaatcgatttcattgtctgtgaggaaagtgatgcttttgtggctaacaacattgggaacatggccaaaattctggctgggcaaaggagatattttggacacaagagaacaatccggccaaatgctaaacagctctatcccttattcatgaagaggggaaatatgtcatgggatgcatttgcctcacaggtgcgaacaatccagaaaggatatatgggagaacccatggaaatcacaccaggaagaggcgaatttcatgcaaaccctgccgcctgtatatgtgaaaagaccagcagaaactcagcaatagtcaagtccatttctggaaataacctggaacctgtaactgacagtggaataaggaaaaccattggcattagtagaccaccatatcctgtttatactgatgaagaggcagatggatctgatacagaagaagatccggacagcagtgggagaggagaggtgattgacactgaacctgacgatgattctgcggtcagacaggaggaccctgagctagaggagatcctgtcagattagttcagttgtgcggctgtttcccccggttaagctatgctaatctgactgcatatacatgtgttgtatgtggcagcaattttatggtttgggcatcaccgaactagcttagatctgcagccgctggtgtacatagattttgtggtgtgcagctgtccaccctctttctcttagctgaatgagggcatgatcatgtttgtcacctgtgcaagccagatttgcttaccttttcttagtatcccgccatcgctcaaccctcaagcaaatgtgcaaataaaagagaataaaaaaacaagagaagttggttctccagtgccgttcaccatcttgggcattggacggcgcatatgatatggaccggaacct

SEQ ID NO: 69723 - DNA, 2190 bp, Zea Mays
gttgggcccgtcccatgccccccactaaaatactccaagccgctgggccgccgtggcccacccaccgccgtcgtcaccctcccgccccgccggccgccgcagatgggccagccgcggcggcgcggctacccgcacggccgccaccaccggtgcccgcgcggcattgcgctgccggcggccggagcgggcctgctcttcctctccgtctcgctcctctccgtctcactcctctccgcgccgccgctcgcggacccgcgcccgggcctcggcacctcctcctcctctcgacggttcctccgccgccatccggcacgcggtggatggactgggcaggatgatctttggggatcgaagcttgctagcaacttccacggatgcagcaactctagtagtagatttcttgattctggtattaccacacaaccagatcgatacttgattgttgttacaagtggaggtctcaatcagcagagaacagggatagttgatgctgtagttgctgcacgtatattgaatgctacacttgttgttcccaaactggatcaaacatctttctggaaagattcaagcaatttttcagaaatctttgatatggactggttcatctcatttcttgcaaaggatgtcagaattatcaaagagcctccagaaaaaggaggtaaagcaatgaaaccttataaaatgcgtgtcccccgaaaatgtactccacggtgttacttgaaccgtgtcttaccagcacttctgaagaaacatgttattcgaatgactaaatatgattatagactctcaaataagttggacactgacctgcaaaaactacgttgcagagtcaattatcattctttgagatttactgacccaatacaagaattggctgaaaagctaatacaacgaatgcgagaaaagaacagatattttattgctcttcacctgagatttgaacctgacatgcttgccttttctgggtgctattatggtggtggagaaaaggagaggagagaattagctgcaattcgcagacgatggagaaccttgcatatacgtgacccggagaaaggaagacggcaaggcaggtgtccactaactcctgaggaggtagggttgatgctgagggcattaggctacagaagtgatgtgcacatttatgttgcttctggtgagatatatggaggggaagatacattagcatccctgaaagcgctctttcctaatttccatacaaaagaaacactatcaagccaagaggagcttgctcctttcctgaagttctcatctcgcatggctgcaatcgatttcattgtctgtgaggaaagtgatgcttttgtggctaacaacattgggaacatggccaaaattctggctgggcaaaggagatattttggacacaagagaacaatccggccaaatgctaaacagctctatcccttattcatgaagaggggaaatatgtcatgggatgcatttgcctcacaggtgcgaacaatccagaaaggatatatgggagaacccatggaaatcacaccaggaagaggcgaatttcatgcaaaccctgccgcctgtatatgtgaaaagaccagcagaaactcagcaatagtcaagtccatttctggaaataacctggaacctgtaactgacagtggaataaggaaaaccattggcattagtagaccaccatatcctgtttatactgatgaagaggcagatggatctgatacagaagaagatccggacagcagtgggagaggagaggtgattgacactgaacctgacgatgattctgcggtcagacaggaggaccctgagctagaggagatcctgtcagattagttcagttgtgcggctgtttcccccggttaagctatgctaatctgactgcatatacatgtgttgtatgtggcagcaattttatggtttgggcatcaccgaactagcttagatctgcagccgctggtgtacatagattttgtggtgtgcagctgtccaccctctttctcttagctgaatgagggcatgatcatgtttgtcacctgtgcaagccagatttgcttaccttttcttagtatcccgccatcgctcaaccctcaagcaaatgtgcaaataaaagagaataaaaaaacaagagaagttggttctccagtgccgttcaccatcttgggcattggacggcgcatatgatatggaccggaacct

SEQ ID NO: 69724 - DNA, 2239 bp, Zea Mays
gttgggcccgtcccatgccccccactaaaatactccaagccgctgggccgccgtggcccacccaccgccgtcgtcaccctcccgccccgccggccgccgcagatgggccagccgcggcggcgcggctacccgcacggccgccaccaccggtgcccgcgcggcattgcgctgccggcggccggagcgggcctgctcttcctctccgtctcgctcctctccgtctcactcctctccgcgccgccgctcgcggacccgcgcccgggcctcggcacctcctcctcctctcgacggttcctccgccgccatccgacaaacggctctgacggcgaactggagggctccgagagcggcgacgcgttcagtgttccggcacgcggtggatggactgggcaggatgatctttggggatcgaagcttgctagcaacttccacggatgcagcaactctagtagtagatttcttgattctggtattaccacacaaccagatcgatacttgattgttgttacaagtggaggtctcaatcagcagagaacagggatagttgatgctgtagttgctgcacgtatattgaatgctacacttgttgttcccaaactggatcaaacatctttctggaaagattcaagaaatctttgatatggactggttcatctcatttcttgcaaaggatgtcagaattatcaaagagcctccagaaaaaggaggtaaagcaatgaaaccttataaaatgcgtgtcccccgaaaatgtactccacggtgttacttgaaccgtgtcttaccagcacttctgaagaaacatgttattcgaatgactaaatatgattatagactctcaaataagttggacactgacctgcaaaaactacgttgcagagtcaattatcattctttgagatttactgacccaatacaagaattggctgaaaagctaatacaacgaatgcgagaaaagaacagatattttattgctcttcacctgagatttgaacctgacatgcttgccttttctgggtgctattatggtggtggagaaaaggagaggagagaattagctgcaattcgcagacgatggagaaccttgcatatacgtgacccggagaaaggaagacggcaaggcaggtgtccactaactcctgaggaggtagggttgatgctgagggcattaggctacagaagtgatgtgcacatttatgttgcttctggtgagatatatggaggggaagatacattagcatccctgaaagcgctctttcctaatttccatacaaaagaaacactatcaagccaagaggagcttgctcctttcctgaagttctcatctcgcatggctgcaatcgatttcattgtctgtgaggaaagtgatgcttttgtggctaacaacattgggaacatggccaaaattctggctgggcaaaggagatattttggacacaagagaacaatccggccaaatgctaaacagctctatcccttattcatgaagaggggaaatatgtcatgggatgcatttgcctcacaggtgcgaacaatccagaaaggatatatgggagaacccatggaaatcacaccaggaagaggcgaatttcatgcaaaccctgccgcctgtatatgtgaaaagaccagcagaaactcagcaatagtcaagtccatttctggaaataacctggaacctgtaactgacagtggaataaggaaaaccattggcattagtagaccaccatatcctgtttatactgatgaagaggcagatggatctgatacagaagaagatccggacagcagtgggagaggagaggtgattgacactgaacctgacgatgattctgcggtcagacaggaggaccctgagctagaggagatcctgtcagattagttcagttgtgcggctgtttcccccggttaagctatgctaatctgactgcatatacatgtgttgtatgtggcagcaattttatggtttgggcatcaccgaactagcttagatctgcagccgctggtgtacatagattttgtggtgtgcagctgtccaccctctttctcttagctgaatgagggcatgatcatgtttgtcacctgtgcaagccagatttgcttaccttttcttagtatcccgccatcgctcaaccctcaagcaaatgtgcaaataaaagagaataaaaaaacaagagaagttggttctccagtgccgttcaccatcttgggcattggacggcgcatatgatatggaccggaacct

SEQ ID NO: 69725 - DNA, 2278 bp, Zea Mays
gttgggcccgtcccatgccccccactaaaatactccaagccgctgggccgccgtggcccacccaccgccgtcgtcaccctcccgccccgccggccgccgcagatgggccagccgcggcggcgcggctacccgcacggccgccaccaccggtgcccgcgcggcattgcgctgccggcggccggagcgggcctgctcttcctctccgtctcgctcctctccgtctcactcctctccgcgccgccgctcgcggacccgcgcccgggcctcggcacctcctcctcctctcgacggttcctccgccgccatccgacaaacggctctgacggcgaactggagggctccgagagcggcgacgcgttcagtgttccggcacgcggtggatggactgggcaggatgatctttggggatcgaagcttgctagcaacttccacggatgcagcaactctagtagtagatttcttgattctggtattaccacacaaccagatcgatacttgattgttgttacaagtggaggtctcaatcagcagagaacagggacgaattataacccctgctgctctctagatagttgatgctgtagttgctgcacgtatattgaatgctacacttgttgttcccaaactggatcaaacatctttctggaaagattcaagcaatttttcagaaatctttgatatggactggttcatctcatttcttgcaaaggatgtcagaattatcaaagagcctccagaaaaaggaggtaaagcaatgaaaccttataaaatgcgtgtcccccgaaaatgtactccacggtgttacttgaaccgtgtcttaccagcacttctgaagaaacatgttattcgaatgactaaatatgattatagactctcaaataagttggacactgacctgcaaaaactacgttgcagagtcaattatcattctttgagatttactgacccaatacaagaattggctgaaaagctaatacaacgaatgcgagaaaagaacagatattttattgctcttcacctgagatttgaacctgacatgcttgccttttctgggtgctattatggtggtggagaaaaggagaggagagaattagctgcaattcgcagacgatggagaaccttgcatatacgtgacccggagaaaggaagacggcaaggcaggtgtccactaactcctgaggaggtagggttgatgctgagggcattaggctacagaagtgatgtgcacatttatgttgcttctggtgagatatatggaggggaagatacattagcatccctgaaagcgctctttcctaatttccatacaaaagaaacactatcaagccaagaggagcttgctcctttcctgaagttctcatctcgcatggctgcaatcgatttcattgtctgtgaggaaagtgatgcttttgtggctaacaacattgggaacatggccaaaattctggctgggcaaaggagatattttggacacaagagaacaatccggccaaatgctaaacagctctatcccttattcatgaagaggggaaatatgtcatgggatgcatttgcctcacaggtgcgaacaatccagaaaggatatatgggagaacccatggaaatcacaccaggaagaggcgaatttcatgcaaaccctgccgcctgtatatgtgaaaagaccagcagaaactcagcaatagtcaagtccatttctggaaataacctggaacctgtaactgacagtggaataaggaaaaccattggcattagtagaccaccatatcctgtttatactgatgaagaggcagatggatctgatacagaagaagatccggacagcagtgggagaggagaggtgattgacactgaacctgacgatgattctgcggtcagacaggaggaccctgagctagaggagatcctgtcagattagttcagttgtgcggctgtttcccccggttaagctatgctaatctgactgcatatacatgtgttgtatgtggcagcaattttatggtttgggcatcaccgaactagcttagatctgcagccgctggtgtacatagattttgtggtgtgcagctgtccaccctctttctcttagctgaatgagggcatgatcatgtttgtcacctgtgcaagccagatttgcttaccttttcttagtatcccgccatcgctcaaccctcaagcaaatgtgcaaataaaagagaataaaaaaacaagagaagttggttctccagtgccgttcaccatcttgggcattggacggcgcatatgatatggaccggaacct

SEQ ID NO: 69726 - DNA, 2357 bp, Zea Mays
aaagctccgaaactattacaggcgtcgtcgaggcggccaatcgaataacgaccccggtcaacgaaccgccgaccagggcgtgtccagggctgccaccaccttttgctgttgggcccgtcccatgccccccactaaaatactccaagccgctgggccgccgtggcccacccaccgccgtcgtcaccctcccgccccgccggccgccgcagatgggccagccgcggcggcgcggctacccgcacggccgccaccaccggtgcccgcgcggcattgcgctgccggcggccggagcgggcctgctcttcctctccgtctcgctcctctccgtctcactcctctccgcgccgccgctcgcggacccgcgcccgggcctcggcacctcctcctcctctcgacggttcctccgccgccatccgacaaacggctctgacggcgaactggagggctccgagagcggcgacgcgttcagtgttccggcacgcggtggatggactgggcaggatgatctttggggatcgaagcttgctagcaacttccacggatgcagcaactctagtagtagatttcttgattctggtattaccacacaaccagatcgatacttgattgttgttacaagtggaggtctcaatcagcagagaacagggatagttgatgctgtagttgctgcacgtatattgaatgctacacttgttgttcccaaactggatcaaacatctttctggaaagattcaagcaatttttcagaaatctttgatatggactggttcatctcatttcttgcaaaggatgtcagaattatcaaagagcctccagaaaaaggaggtaaagcaatgaaaccttataaaatgcgtgtcccccgaaaatgtactccacggtgttacttgaaccgtgtcttaccagcacttctgaagaaacatgttattcgaatgactaaatatgattatagactctcaaataagttggacactgacctgcaaaaactacgttgcagagtcaattatcattctttgagatttactgacccaatacaagaattggctgaaaagctaatacaacgaatgcgagaaaagaacagatattttattgctcttcacctgagatttgaacctgacatgcttgccttttctgggtgctattatggtggtggagaaaaggagaggagagaattagctgcaattcgcagacgatggagaaccttgcatatacgtgacccggagaaaggaagacggcaaggcaggtgtccactaactcctgaggaggtagggttgatgctgagggcattaggctacagaagtgatgtgcacatttatgttgcttctggtgagatatatggaggggaagatacattagcatccctgaaagcgctctttcctaatttccatacaaaagaaacactatcaagccaagaggagcttgctcctttcctgaagttctcatctcgcatggctgcaatcgatttcattgtctgtgaggaaagtgatgcttttgtggctaacaacattgggaacatggccaaaattctggctgggcaaaggagatattttggacacaagagaacaatccggccaaatgctaaacagctctatcccttattcatgaagaggggaaatatgtcatgggatgcatttgcctcacaggtgcgaacaatccagaaaggatatatgggagaacccatggaaatcacaccaggaagaggcgaatttcatgcaaaccctgccgcctgtatatgtgaaaagaccagcagaaactcagcaatagtcaagtccatttctggaaataacctggaacctgtaactgacagtggaataaggaaaaccattggcattagtagaccaccatatcctgtttatactgatgaagaggcagatggatctgatacagaagaagatccggacagcagtgggagaggagaggtgattgacactgaacctgacgatgattctgcggtcagacaggaggaccctgagctagaggagatcctgtcagattagttcagttgtgcggctgtttcccccggttaagctatgctaatctgactgcatatacatgtgttgtatgtggcagcaattttatggtttgggcatcaccgaactagcttagatctgcagccgctggtgtacatagattttgtggtgtgcagctgtccaccctctttctcttagctgaatgagggcatgatcatgtttgtcacctgtgcaagccagatttgcttaccttttcttagtatcccgccatcgctcaaccctcaagcaaatgtgcaaataaaagagaataaaaaaacaagagaagttggttctccagtgccgttcaccatcttgggcattggacggcgcatatgatatggaccggaacct

SEQ ID NO: 69727 - DNA, 952 bp, Zea Mays
agacgaaaacaagagccagacgcggcagatcaccggggagacggtgggcgaggtgcgggccgtggcggggatgcaccagcgcaaggcggagatggcgcgcaactccgatgccttcatcgcgctcccgggcgggtacgggacgctggacgagctcctggaggtgatcgcgtgggcgcagctgggcatccacagcaagccggtgggcctgctgaacgtggacgggtactacgacttcctgctggcgttcatcgacaaggcggtggacgacgggttcatcaagccctcccagcgccacatcttcgtcagcgcccccgacgccagggaactcgtccagaagctggaggggtacgaggccgtgcaggacgaggacccggcgacgcccaagctgcggtgggagatcgagcaggtcggctacaacgcctcgctcctggccgagatcgcccgctgatcggccgcgcgacgatcgctgctgctgcgggagctctggtggctccagtccacgcatcgtctgccggccaggccactggcctccacctgctgctatctaccctacccctactaccccatcgatgatcgatgcgatgatcctgcgtatcagatcaacagaagcacgcattcatatgtgtgtgtttctcaagtgtgaccgcagaaacggggcaccggtgagcaagacgcacgcgaggacttgttttttttaggggtgtgcgttctgctcctagtcctagcagctagcagcggcttgatcgtcctgccgcatgtactctgctcctagccacgtactcgtactcatattcctgatcgacgatcacgtgtttgtttactacccagcagcagctagtactaatgtactaagttaatcgtcgtcccctggtaatgtaactgacctccagctccagctagctagctgcgacattattctgtgcatacctctcgcctcaatggcgtattggcg

SEQ ID NO: 69728 - DNA, 1356 bp, Zea Mays
aagaactcatgtttccgcggggccccggctccggccccagcccaaaagcgcgcctattattatttatttatttatttatttatttatttatatatacatccgccggccaatccatcggccacacagcgccacgccacacgcaacgcaagcagctgcttctctctttccgctccgcaggccgcagcgcccatcaagagcgagaagccctgtcgcgcgcggagacgatggaagggccggcggcggcggaggcggagaacggcggcgcgggcaaggggtccggcagcaggttcaggcgggtgtgcgtgttctgcgggagcagctccggcaagcgcagcagctaccgcgacgccgccgtcgagctcggcaaggagctggtgtcgaggaaggtggatttggtgtacggcggaggcagcctggggctcatgggggaggtctccgaggccgtgcacaggggcggcggccatgtcattggcatcataccgaccagtctcatgggaaaggagatcaccggggagacggtgggcgaggtgcgggccgtggcggggatgcaccagcgcaaggcggagatggcgcgcaactccgatgccttcatcgcgctcccgggtgggcctgctgaacgtggacgggtactacgacttcctgctggcgttcatcgacaaggcggtggacgacgggttcatcaagccctcccagcgccacatcttcgtcagcgcccccgacgccagggaactcgtccagaagctggaggggtacgaggccgtgcaggacgaggacccggcgacgcccaagctgcggtgggagatcgagcaggtcggctacaacgcctcgctcctggccgagatcgcccgctgatcggccgcgcgacgatcgctgctgctgcgggagctctggtggctccagtccacgcatcgtctgccggccaggccactggcctccacctgctgctatctaccctacccctactaccccatcgatgatcgatgcgatgatcctgcgtatcagatcaacagaagcacgcattcatatgtgtgtgtttctcaagtgtgaccgcagaaacggggcaccggtgagcaagacgcacgcgaggacttgttttttttaggggtgtgcgttctgctcctagtcctagcagctagcagcggcttgatcgtcctgccgcatgtactctgctcctagccacgtactcgtactcatattcctgatcgacgatcacgtgtttgtttactacccagcagcagctagtactaatgtactaagttaatcgtcgtcccctggtaatgtaactgacctccagctccagctagctagctgcgacattattctgtgcatacctctcgcctcaatggcgtattggcg

SEQ ID NO: 69729 - DNA, 1817 bp, Zea Mays
aagaactcatgtttccgcggggccccggctccggccccagcccaaaagcgcgcctattattatttatttatttatttatttatttatttatatatacatccgccggccaatccatcggccacacagcgccacgccacacgcaacgcaagcagctgcttctctctttccgctccgcaggccgcagcgcccatcaagagcgagaagccctgtcgcgcgcggagacgatggaagggccggcggcggcggaggcggagaacggcggcgcgggcaaggggtccggcagcaggttcaggcgggtgtgcgtgttctgcgggagcagctccggcaagcgcagcagctaccgcgacgccgccgtcgagctcggcaaggagctggtgtcgaggaaggtggatttggtgtacggcggaggcagcctggggctcatgggggaggtctccgaggccgtgcacaggggcggcggccatgtcattggcatcataccgaccagtctcatgggaaaggagatcaccggggagacggtgggcgaggtgcgggccgtggcggggatgcaccagcgcaaggcggagatggcgcgcaactccgatgccttcatcgcgctcccgggcgggtacgggacgctggacgagctcctggaggtgatcgcgtgggcgcagctgggcatccacagcaagccggtgggcctgctgaacgtggacgggtactacgacttcctgctggcgttcatcgacaaggcggtggacgacgggttcatcaagccctcccagcgccacatcttcgtcagcgcccccgacgccagggaactcgtccagaagctggaggtatgtatagtatagattgatttgtcgaatcatcatcaccatccaaagtcgcttggtgccgctgccgccacgggactcgctggccgtcgtccttgatggatgatgacttggtcaggcctggcacgaggcacgcacggcctctttttttttggtctggtcgtcatccaaacagaacagccacacacaggcggcgcggcagtgtcacattccacgctcgcctgctttctctctgcctgctgcttgctgctgcgctgccctgtgcgcaacggcatcggttcctttggtttccacacgcacgcacgctccccaaaagcgtccacagactgagattcttctctcctttctttcacctctacactcgctagagatgaattgaaacagtcttggccggggtacgaggccgtgcaggacgaggacccggcgacgcccaagctgcggtgggagatcgagcaggtcggctacaacgcctcgctcctggccgagatcgcccgctgatcggccgcgcgacgatcgctgctgctgcgggagctctggtggctccagtccacgcatcgtctgccggccaggccactggcctccacctgctgctatctaccctacccctactaccccatcgatgatcgatgcgatgatcctgcgtatcagatcaacagaagcacgcattcatatgtgtgtgtttctcaagtgtgaccgcagaaacggggcaccggtgagcaagacgcacgcgaggacttgttttttttaggggtgtgcgttctgctcctagtcctagcagctagcagcggcttgatcgtcctgccgcatgtactctgctcctagccacgtactcgtactcatattcctgatcgacgatcacgtgtttgtttactacccagcagcagctagtactaatgtactaagttaatcgtcgtcccctggtaatgtaactgacctccagctccagctagctagctgcgacattattctgtgcatacctctcgcctcaatggcgtattggcg

SEQ ID NO: 69730 - DNA, 2867 bp, Zea Mays
taatcatggactccgaaccccaagaattgccgccgccggaggccgtctcacgttgtggtggctcagaacggccggcgccagcctgcgacgttcattcgtggcaccatcagcagtaaccaccaactcaaataatctaggtaaataaacatgactcacattattggcatgaccaataaatataaaatttagatattattattattatttagattatataatctataggctaaataaacaggaacttagtgacataccaattcatataaaattcagatattattattattattattattattattatgagtaaattcatgttttacgcccggccctcacgttattggccgaattgttgagacggaaaaaccaaaaaaaagaggaaaagaggaaggtaccccacaaaacctgatcttccctgtaacccctcatgtgttgtcgccaccagcctcctcctatccaccgctcctgtgccgctgccccagcctcctcctatgtcgccgctcccagcctccttctgtgcttgcgccctctgcaggctgtaacatcctaagtgtttatcgtctgctcgatcacgagtgtggactttaacacgtgatagcggtgaataaaatggacaccaaattttaatcatctttgtctatcatgattttgatatcgtgtctgtctccatctgtttaaattgtcctaaattattttgcaaaaattcagactttagtaatctttcgaaacaacaaatccaatatcgtttgggttgagccatcgatgtcttgcccaaactctaatccttggaatcggatctgattccttaaacttcgtttgaaattctttcacgcttgtgttgcacgtgtctctctgtggcctgacgatgtgacgcgtgtggcaggtgctaaccggtgtctggatcgcgcacaacctcttgccacgtgaacgatgcatgacgtcgcttccgaaagtatcacagttgcgatgccgcatcgatctcgtgtacttatttcgtgaaatgtcgagtcttgtgtccgtttaaaatttatcaattaagtgaatacgagtttggaacctcgacccactcttgtgatttttgactcgagtaaattttattagaagctcgacgacaagagtgttgatgcgagattaaatttgatcgagataattagagtcgatattgagtattcataatttgtttccctgttcagactgtggataaaattattgggtttcaaatcaaatcaaattaagcacagtcttaatatatcgactctgatgtcgtttggtttggtccgtgcgtttctcgtccagatctaaatattcgaaaataaataacgggtaaaaattcatctgaatccaaagtattcaccaaataaaatcatgtctaaattatgtactcaaaattatgttggtctaacttgtttttgtctctttttaaccctaatacaatcgtgtatatctgcgtcacttgtgtaaaaaaatcaagaatgcttccttatcctttcacctctctactcatctgtctgctgccctatcttcaccccgctcaccaggagctttgtttcttcacgtcacctcctccccaaaccttttccctttcacctctcgatccatggacgctccctggccggtgccctctcccatggccgcgccctccctgctcgctcagccatctcctccctccccagtcgctccctccatctctccccacgcagaagtcgcccctacccctcccatggccgccctggatctccatggttgagctccccctgtaggatccccttccatggcgcctggtcttcttccctagccgagctcacccagctgtttctctgctgatggctgatgcccctctagctactgctcgatgctgccctctcgatcccggagtctagcgctgtccccctggtttcagccctcaaaccctagcgtcgatctccctcgtcttgctgtcggtttaccgtggaagaggaaagtccattcggcgcgctctaggtgtttggcaaaaagcttaaaccggaaatcgtcatcgcccttacacatatcgatttggtttatgacatgaagtggataaggccggtagatgggctagaaaccactatctgtcatcagcagctcttccttctatcaagggagacaagttaatcgttccccatgagagtctggatatatcaattgagaggctgaaggaacatggtataacaactaagaaatcctctcaaaatctgaagaaaattggggcttgccacatgagcatcagtcaaaggtgttttatgttaagcatctagaagtattggctttatttgctctcccagcatgtgctatctgcttcttttgttctgatgttgtcctgcgctgaatattgttctaatattgcccaaatttgcatattctaactttgctcatgtattttgagcacatgaacaaaaagagcagaacacgcatattcatcctgttgaccgtactgatcttcacaggcttaccttaagttaagatgtcatcctgctgtctaatctgagcaaattctcagcagggagggcaggttgcagttcgttccactaccgggtacccaaacggtcatagggtaaaggagccccgccgggtagcaccacacaggtgatagacactgcagtggccagcaagaatggagtcatggaacatcggcagggaggggtgcggcagcgttaaccgatttatcccttggacaatctggttttgacatcatgcaaaatcaatctgctgtacattgtattctgcacttgcacagattgtttggctaattacaagattatctcagtgttttggtttgaatttagagtacacttatgtatgaaatattgattggtactcatctatattatattaattatattattattaaa

SEQ ID NO: 69731 - DNA, 3617 bp, Zea Mays
cctcgctctgcgtgctctgaggcggctgtcagaacccttcgggggccagcctacgaacccttgatcagtagtgggtgcggagcccgagtggcctgaggcggccgttgaacccttccgaggggatagccttcgaacctctgaccagtagtgggggcggagcccgagtgctctgaggcggctgttgaacccttccgaggggccagccttcgaacctctgatcagtaggggggctcggggcccgcttccttcgcggagaaggatccttttcggagtatcccctttcccggtccctatggcaagagagagaaagaggaagtggaaaaggatacgaaatcgaatgacgtggcacaccttttttgacgcggtcatcatggcggaggtgaagcgtcgcctgcttcgcctgccaaaggtgccgcctatcctgccacagagttaatgcgacgggacgagtggttcgcggggcggccgttcactactacatatatgactatttaagacacaccattaaagactcatataagtacattttatagaagtgtcttatatcatacgatgttgagtaagataagacaactttttggaaatccgtcttaattggaaaagttttttgagacagttacgtcgtaaaaaatgtcttatattgatttaagacatgtttttattattaactgtctcaaataaggatagtatttgagtcatccctactttaacaactgtcttagatggcaatgagtatttgagatacttctatgtatgaaaccatctcaaataagaatactattagagtcgtctagactataagaaccgtcatagatgttagtgagtatactagacacttataaatatggaaccgtcttcacatgatagtctgacaagatgtatatgaaaaatgtagcaaatggtgaaatcaccttgagttgatgatatatacaaacgctatcattttgtttccatcccgcgacgccttctcaccatacacacccaatgcctccctcgggaacgaccgctgccgcccaataatcatggactccgaaccccaagaattgccgccgccggaggccgtctcacgttgtggtggctcagaacggccggcgccagcctgcgacgttcattcgtggcaccatcagcagtaaccaccaactcaaataatctaggtaaataaacatgactcacattattggcatgaccaataaatataaaatttagatattattattattatttagattatataatctataggctaaataaacaggaacttagtgacataccaattcatataaaattcagatattattattattattattattattattatgagtaaattcatgttttacgcccggccctcacgttattggccgaattgttgagacggaaaaaccaaaaaaaagaggaaaagaggaaggtaccccacaaaacctgatcttccctgtaacccctcatgtgttgtcgccaccagcctcctcctatccaccgctcctgtgccgctgccccagcctcctcctatgtcgccgctcccagcctccttctgtgcttgcgccctctgcaggctgtaacatcctaagtgtttatcgtctgctcgatcacgagtgtggactttaacacgtgatagcggtgaataaaatggacaccaaattttaatcatctttgtctatcatgattttgatatcgtgtctgtctccatctgtttaaattgtcctaaattattttgcaaaaattcagactttagtaatctttcgaaacaacaaatccaatatcgtttgggttgagccatcgatgtcttgcccaaactctaatccttggaatcggatctgattccttaaacttcgtttgaaattctttcacgcttgtgttgcacgtgtctctctgtggcctgacgatgtgacgcgtgtggcaggtgctaaccggtgtctggatcgcgcacaacctcttgccacgtgaacgatgcatgacgtcgcttccgaaagtatcacagttgcgatgccgcatcgatctcgtgtacttatttcgtgaaatgtcgagtcttgtgtccgtttaaaatttatcaattaagtgaatacgagtttggaacctcgacccactcttgtgatttttgactcgagtaaattttattagaagctcgacgacaagagtgttgatgcgagattaaatttgatcgagataattagagtcgatattgagtattcataatttgtttccctgttcagactgtggataaaattattgggtttcaaatcaaatcaaattaagcacagtcttaatatatcgactctgatgtcgtttggtttggtccgtgcgtttctcgtccagatctaaatattcgaaaataaataacgggtaaaaattcatctgaatccaaagtattcaccaaataaaatcatgtctaaattatgtactcaaaattatgttggtctaacttgtttttgtctctttttaaccctaatacaatcgtgtatatctgcgtcacttgtgtaaaaaaatcaagaatgcttccttatcctttcacctctctactcatctgtctgctgccctatcttcaccccgctcaccaggagctttgtttcttcacgtcacctcctccccaaaccttttccctttcacctctcgatccatggacgctccctggccggtgccctctcccatggccgcgccctccctgctcgctcagccatctcctccctccccagtcgctccctccatctctccccacgcagaagtcgcccctacccctcccatggccgccctggatctccatggttgagctccccctgtaggatccccttccatggcgcctggtcttcttccctagccgagctcacccagctgtttctctgctgatggctgatgcccctctagctactgctcgatgctgccctctcgatcccggagtctagcgctgtccccctggtttcagccctcaaaccctagcgtcgatctccctcgtcttgctgtcggtttaccgtggaagaggaaagtccattcggcgcgctctaggtgtttggcaaaaagcttaaaccggaaatcgtcatcgcccttacacatatcgatttggtttatgacatgaagtggataaggccggtagatgggctagaaaccactatctgtcatcagcagctcttccttctatcaagggagacaagttaatcgttccccatgagagtctggatatatcaattgagaggctgaaggaacatggtataacaactaagaaatcctctcaaaatctgaagaaaattggggcttgccacatgagcatcagtcaaagggagggcaggttgcagttcgttccactaccgggtacccaaacggtcatagggtaaaggagccccgccgggtagcaccacacaggtgatagacactgcagtggccagcaagaatggagtcatggaacatcggcagggaggggtgcggcagcgttaaccgatttatcccttggacaatctggttttgacatcatgcaaaatcaatctgctgtacattgtattctgcacttgcacagattgtttggctaattacaagattatctcagtgttttggtttgaatttagagtacacttatgtatgaaatattgattggtactcatctatattatattaattatattattattaaa

SEQ ID NO: 69732 - DNA, 1398 bp, Zea Mays
actcaagcttgtttttgaaataaatgtaagattatgtaattcgcttccgcatttctttatctccgatgttctgtaatgtctgcaagacgggtgaaacgttcctggtaaggtaaggaaagataccgaacttgtcaagtagttcaggggcacctacagggttgtctgaagtccgttggacaaggacaactgtaggtgggcctaattacttgggaggttccgtcacagtgttgcacgcaactactttggatgaggcaaaccctcagggactttggctacaatctgagaaaagtcccactcctatgtgacaatgagagtgctatccgcatggcggaaaatcctgttgagcacagccgcacaaagcacatagacatccgacatcactttttgagagaccatcagcaaaagggagatatcgaagtgtttcatgttagcaccgagaaccagctagccgatatctttaccaagcctctagatgagaagaccttttgcaggctgcgtagtgagctaaatgtcttagattcgcggaacttggattgaattgtagcatacatgtatttatgctcttgatcatgttcctttttgcattttgttgcttattatggtgctcaagttgtacaaacactccctggacctcacaagtccgttgcaaagtgatgcacatgtttagggggagatgtgttacaacttgacccttggagactaaccatgtgcttgagtttgatgatttagtctcgaaggaggattgaaagggaaaaaggtggacttggaccatgaaagacttccactgcactccgatgagagggtaacttattccaagttcatctttaaactcttattgcctatttgctcttaattgaagattttggtgaggcaatggggttaaagggccaagattgatcctgttttggtgcttgatgccaaagggggagaaaataaaggccaaagcgataaatggatcagctaccacttgagagattttgaaaatagtagaatagagctttttgttttgtcaaaactcttgcattgtctcttttgtcaaaagttggcctcttgtggggagaagtgttgattaaggggaaaagggggagtttttggaatcttgaatcaattttctttggaaaacctctctttatgtctctacaagtggatttgacttagagataggattttgagtttgatttgcaaaaacaaaccaagtggtggcaaaggatgatccatatatgccaaattgaatcaaaatgaatttgagtttttatttgaagtgatattgcacttgttctagttactttatgttgtgctggcataaatcaccaaaaagggggagattgaaagggaaatgtgcctttgggccatttctaagtattttggtgattgagtgccaacacaagtgcttaaatg

SEQ ID NO: 69733 - DNA, 2523 bp, Zea Mays
ctcaaactgtctctctcggtctgatcttctcgccgctcagaaacaaaaaaatcgcgccgcccctggttccttttattcacgcgcgcctcctctgcttctcctccaggggagtcttccctgcgcgcgcttggccggccgtgtctgttgctcgtccgagcgctcctcccggccccggctcaacgaccttctccccagccaggatgcctccgtggccgcgcgccctgaagctccagttgacacgtcccgaccaagccccagctcggattccccttcccatggcggcgcccacctccctgtgctccctgttccagctcgtcggggatgccccttcctccagccgtgttctgcttctctccctgcgcccctattcatctcctgcgcgccttggttttggtcccaagctccatggccgccgcgctgcagctctctggtgctcggtcgccaagtctccctgctctatgcgttcttcttcctccctggctcctgctcgtccaacgacgccgtcggccggacctctctgcttctcctgcgcccgcgtcgtggctcttcactgcgcgtagtggtgcttcagttctgctctgtccattttcctgtgccgcgccactgcagctcgcctcggctcctcgcctcatccacggccgagcgccctctgcccagcctgtcgaagctcctctgccggctgcaagctcctgctcaagcttgctctcggcgctcgcccctgatttctgcgctcagctccaccgcgccgtgaagtccctgcgcccaagctatctgttggccgcgcgcaaactcctctgcttggcccgtcgtcgttctccagcgcactcgatggtttcgtcgtctcgtcttgatgtcagtccctacgtgacatctccgacgtgggttcacgccgacaaaagaatcccaagaagatatagagaagcaagcctttgatcaatgttcaagtggtcggcgaaaggccagaacaagaatcatcaccgtttatacggagttctacttaatatgaaaagattccaagaattatggatagaagagaaagtgaagcttcgtgctatactcgtcagctgctcgatcgaagacttcaatcgaagactatcgtcgttcccgccaacactgaatcaagttgataacggtgagccaaatcactatttttaatatggattttatgatcgtgaaataagacgcttagtttgcgtaggaagttaaaattagaaatacccgtgaggcgaggtgtgcttcgaggggtttagtggtcgaatatattcgaactagttctattttgtagaatatagtattttggtgacgcgtaggttaaattcaggattttatgcttttgtcgatagctctatcaatgctaatggtgttcaatgcacgtaggctgaagtcgatgtcctgcactagtagttagtattgtctaggtttgtgatcgataatgttgaagtaggagatgatcgacgattttcttatccagtgattggtgtgatgatatgttgtttaaaatatgtttggtaaaaatatatgtagtaatatgattctgttaataaatcataaaagaaagtagagcgtgaataaatatatatactattgttttgtggtatataaaatacctttgaataggctagagaagcgtaattattgtgcttagtcgtacatcgataattagtgcctccgtatgaaattgttcaacgccccgccgctaggtatttaattcgctatcgcgtagcactatttaggcttgtggtattcctgtcgatatgcattcatgtgcataatgcattccattcaggtacgttaaataatcgcgtgatgcggaagacgatccaagtcgactccaagcgtgggctaatccgcaggatgaagctgatggacaatggagcgagtatcggaataaaggctgatcgtcaagtggacgtcatctaacaacactaacctagtgttattcaggcaagccccggtgcacgcaacccctttccttgtgtttttaaatacttttcgcacacttaagtctagtaaaatgtgcattaggttcataggagttacttgaaaccatttgatgcattgctttccttgatatccatacctttatagatacttctgtgaagtatcaaaatatgatttacaaaaatgcttagccttgcttagatcttgtggatagaggttgtcctcaatttaaccatggagaggatggcttctacctgcaagaatattttcatttggagcaatggtgggatcttactgcaaagttccctgtgatgctcttttcatcctaaggaacagaaacaatcctaaggatggaagtacttaaatcgagacttgggctaggaacaggtgatgctccgcccgggtcaattaaggattggatgcgtatgtaggcctgttgatcaaggactatcttatctagccacatgccctgagaatgggacagggtaagcttgaacccggctattccatacatgaaaagacaatcgcgcactgggcgtggagagatggcgagagtggcacgtaccctcctggcaacggatc

SEQ ID NO: 69734 - DNA, 4172 bp, Zea Mays
ccaacgcccacagccagtctatactctagagccccccaacacagcacacaacactcgctcgcggcgcagcgcttcgctcgttgccaccgcccgcctttccccgcgcccgacggaagagccccacgcccccaccgccgcgggagggggaggggcgcggaggagcatgcgcgcaggctgtcaccgcggccagagaaagagaaggaggacctgcgccgcgcgcaccgcgacgagccgctctccgctggcacccacgccaaaaggcgaagattctcggccgagcccccgtcccttccaccatcccccgctgtaggtagccgccacccagatctgctcccctccgcacccgcccgccgctctccccttagattcgcaccacccgccgccatgcgtttgccgccgccgccgctgtgactgggctctcctcctttgtgaggcaggaataaaaggcggttcttgcgggcggttgccatggggtgcggccagtccaagacggaggaggagtacgccgtgcagcactgccgggcgcgctccgagctcctggcgctggccatccgccagcgctacatgctcgccgacgcgcaccacgcctacgccgagtcgctgcgcgccgtcggcgccctgctgcacgacttcctccgcggcgtccagtcgctgccgccgccgccgcccgagcccgcgctccgcctcccgctgcagcggaagggcgacggcctccccgccgcgtcgccgccgccgcccgcaatcgcgtcctcctcctccgccgccaagcaggtccgcatcgcccccaacgacggccatatccagttctccgacgacgactccgattccgatgacggacacatcaagttccactccgacgaagagcccgacccggctcgccgccgcccggatgtcgtccactcagccggggcgcctggtcctccgccgccgcagatgggaccaccctattcctccgggtatgctccgccgccgtatggtcctggatacggctacgggtacgccaatgggcctgggccgggtcctggtcccgattatggcggtattggcatgagcagcggcggcggcggtggttacgggcaaagctatgggggcatgggtggtggtggcagcggcggcggtgccggctacaatgaccagagctatggtggcatgggcagtggcggcggcgctggcggctatgaccaaggctacggtggcatgggtggatatgggcagagcttctttaacatcaactacgcgcgcagccagccacctccaccgtcaatctcgcacgagcaacgcctgcaggccactaacgccagggtccactactattccggcaatgacgagctgcagccacccccgcgcggctatggtggtgggtactcctacccaccacagagctcgagctcatataatcagtatgcctatggtggttactatggaggtggttctgctcctgcaccaccagcagacatcccctcctcctcccgcgagccagccgcagcaccaccgcctccatctcctcccagggtgtccacctgggacttcctgaacccgtttgaaacttatgatagctactacgagcaaccaactgctacagcagctccatactctcccagcaggagttcaaaggatgtgcgcgaggaggaggggattccggacttggaggatgaagacatggaggtagtcaaggaagcttatggtgatgagaagcacccaatgaagggttacatgggaaacgggaaggcgacaaaggaagatggtaggagcagtacgagagatgaactgccccgcaagtccaagtcatctgaggccagcagtagtgggagcagcttggagcatgacgtgcatgtagtagagaagagtgttgtcggagagcaagttcaacactcagagccacagcagcatgttgccggtctgccacccacaggatcggacaagatatacatcgatgacactgaggtggtggtggagatcaggactcaatttgagcgtgcctcacaatcagctagtgaggtatccaagatgcttgaggtcggaaagatgccttactaccagaagagttcaggtttcaaagtctctgcaatgatggtctgtggtataccgacaatggaggaggagtttctgcgttttgaagaggacaaggcgatgggatccggcaacctctcctctacgctacagaagttgtacatgtgggagaagaagcttcttgaggaagttaagaggagaggatgcgggtactgtatgacagaaaacgtgaggagctgaaaatgttagatgagaaaggtgcagaagctcataagcttgaggccactgagctttacatcaggaaactatcaactaagattagcatagccatccaggttgtaaacactatttcagaaaagattagtaagttgagggatgaagagttgtggccacaaacatgtgagctcattcaagggttgatgaggatgtggagcgttatgctagaatgccatcagatacaattgcatgccatatcccaagctagatacatagactccatgatagacactgcaaagttcggtgatgatcatatggacttgatcaagcggttagagcttcagctattggattggattgcttgttttgctgcatgggttagcgctcaaaagaattatgtcaaaactttaaataagtggctgacaaatggtgtcatctatgtacccgaggaaaccgaggacggggcgcctccattttctcctggaaggttaggagggccaccgatattcgtcatatgcaataactgggctgccagtgtggacagggtatctgagaaagaagtggtcgaggcaatgcaggcctttgcgtccaacgtcctgaacctctgggagaggcacaggtcggagcaaaggcagggtctgatggcgaacaaaggcatggacagagatcttagggtgatggaaagagacgagcaatcgatgcgcaaggctctggaggcacagaacaagaagcttgtgctcatttcgaaccagggcagcgtgtccttgtctgcacaagcgttacatgagcgaggccctggcgctgaagccggtggtagtctgcagacaggtctgaggaatattttcgaagcgatggagaacttcacctctgcatctgcaaatacgtacagggagctccatcttcgcgccgaagaagagaaagcccgggttgcgcaggagagcggcagcgtttcctagttccacatgaggacatgagcatttgtcggtggaaagaagggggactaacgccagtggcagcgtttctacggcacagtggcacaaccaacccctagtggcagctgatgcaccttgctcgccaggtgcctcagttttttgggttccaagctctctctgatgtagaggcctgtggtacttggtggagttaacaggttgtgacatgggggtgctgcatttctttgatcgggatgaacaggcattctcctcagaccgtaattgggaagcgcagttgtgaaattaggtaatcgccagacacatcctggtagttgggagaccccgcctgaagggaccgagtgaagagcagatgcccttgtgcatctgagaagccgcagatgatctcttagttcagatgctgttatcatgaacccaagattcatggaacgctcccaatcccatgcatgtcagcgcccaacacacagggaagaggccaggctaccaggtttatcagaagctgtttcaataaccgcagaattttttttcccatgccaatgcacactgtacagaggtgatgcgggacgaatcgagctggagccttgtgtccgctgccgagaagcccgagacgatgtcgctttgagcttcctctaaggtgttcggactgcggcttcgccgtgccaccgcgctggaagtacactcgtagggtttagcagagttcgatgagcttgtagggtagacgccctgaccccgttctgttgcagatcatctaaccaccgctccggatttgtttttttgttttattttgttttgtttatttaatatacatattaattcatttgtagcaccccccgtgtacagcagctgctggctaacttaaacctgctgtgccatattttattcattctattcacaccctggtttgccaatcttgtggatcgctgaaagctccgagccgcctgtggtgatcgcccgttgggtgtaggtgtaataaacggtagttagcggtagagcattgcg

SEQ ID NO: 69735 - DNA, 3952 bp, Zea Mays
ccaacgcccacagccagtctatactctagagccccccaacacagcacacaacactcgctcgcggcgcagcgcttcgctcgttgccaccgcccgcctttccccgcgcccgacggaagagccccacgcccccaccgccgcgggagggggaggggcgcggaggagcatgcgcgcaggctgtcaccgcggccagagaaagagaaggaggacctgcgccgcgcgcaccgcgacgagccgctctccgctggcacccacgccaaaaggcgaagattctcggccgagcccccgtcccttccaccatcccccgctgtaggtagccgccacccagatctgctcccctccgcacccgcccgccgctctccccttagattcgcaccacccgccgccatgcgtttgccgccgccgccgctgtgactgggctctcctcctttgtgaggcaggaataaaaggcggttcttgcgggcggttgccatggggtgcggccagtccaagacggaggaggagtacgccgtgcagcactgccgggcgcgctccgagctcctggcgctggccatccgccagcgctacatgctcgccgacgcgcaccacgcctacgccgagtcgctgcgcgccgtcggcgccctgctgcacgacttcctccgcggcgtccagtcgctgccgccgccgccgcccgagcccgcgctccgcctcccgctgcagcggaagggcgacggcctccccgccgcgtcgccgccgccgcccgcaatcgcgtcctcctcctccgccgccaagcaggtccgcatcgcccccaacgacggccatatccagttctccgacgacgactccgattccgatgacggacacatcaagttccactccgacgaagagcccgacccggctcgccgccgcccggatgtcgtccactcagccggggcgcctggtcctccgccgccgcagatgggaccaccctattcctccgggtatgctccgccgccgtatggtcctggatacggctacgggtacgccaatgggcctgggccgggtcctggtcccgattatggcggtattggcatgagcagcggcggcggcggtggttacgggcaaagctatgggggcatgggtggtggtggcagcggcggcggtgccggctacaatgaccagagctatggtggcatgggcagtggcggcggcgctggcggctatgaccaaggctacggtggcatgggtggatatgggcagagcttctttaacatcaactacgcgcgcagccagccacctccaccgtcaatctcgcacgagcaacgcctgcaggccactaacgccagggtccactactattccggcaatgacgagctgcagccacccccgcgcggctatggtggtgggtactcctacccaccacagagctcgagctcatataatcagtatgcctatggtggttactatggaggtggttctgctcctgcaccaccagcagacatcccctcctcctcccgcgagccagccgcagcaccaccgcctccatctcctcccagggtgtccacctgggacttcctgaacccgtttgaaacttatgatagctactacgagcaaccaactgctacagcagctccatactctcccagcaggagttcaaaggatgtgcgcgaggaggaggggattccggacttggaggatgaagacatggaggtagtcaaggaagcttatggtgatgagaagcacccaatgaagggttacatgggaaacgggaaggcgacaaaggaagatggtaggagcagtacgagagatgaactgccccgcaagtccaagtcatctgaggccagcagtagtgggagcagcttggagcatgacgtgcatgtagtagagaagagtgttgtcggagagcaagttcaacactcagagccacagcagcatgttgccggtctgccacccacaggatcggacaagatatacatcgatgacactgaggtggtggtggagatcaggactcaatttgagcgtgcctcacaatcagctagtgaggtatccaagatgcttgaggtcggaaagatgccttactaccagaagagttcaggtttcaaagtctctgcaatgatggtctgtggtataccgacaatggaggaggagtttctgcgttttgaagaggacaaggcgatgggatccggcaacctctcctctacgctacagaagttgtacatgtgggagaagaagcttcttgaggaagttaaggttgatgaggatgtggagcgttatgctagaatgccatcagatacaattgcatgccatatcccaagctagatacatagactccatgatagacactgcaaagttcggtgatgatcatatggacttgatcaagcggttagagcttcagctattggattggattgcttgttttgctgcatgggttagcgctcaaaagaattatgtcaaaactttaaataagtggctgacaaatggtgtcatctatgtacccgaggaaaccgaggacggggcgcctccattttctcctggaaggttaggagggccaccgatattcgtcatatgcaataactgggctgccagtgtggacagggtatctgagaaagaagtggtcgaggcaatgcaggcctttgcgtccaacgtcctgaacctctgggagaggcacaggtcggagcaaaggcagggtctgatggcgaacaaaggcatggacagagatcttagggtgatggaaagagacgagcaatcgatgcgcaaggctctggaggcacagaacaagaagcttgtgctcatttcgaaccagggcagcgtgtccttgtctgcacaagcgttacatgagcgaggccctggcgctgaagccggtggtagtctgcagacaggtctgaggaatattttcgaagcgatggagaacttcacctctgcatctgcaaatacgtacagggagctccatcttcgcgccgaagaagagaaagcccgggttgcgcaggagagcggcagcgtttcctagttccacatgaggacatgagcatttgtcggtggaaagaagggggactaacgccagtggcagcgtttctacggcacagtggcacaaccaacccctagtggcagctgatgcaccttgctcgccaggtgcctcagttttttgggttccaagctctctctgatgtagaggcctgtggtacttggtggagttaacaggttgtgacatgggggtgctgcatttctttgatcgggatgaacaggcattctcctcagaccgtaattgggaagcgcagttgtgaaattaggtaatcgccagacacatcctggtagttgggagaccccgcctgaagggaccgagtgaagagcagatgcccttgtgcatctgagaagccgcagatgatctcttagttcagatgctgttatcatgaacccaagattcatggaacgctcccaatcccatgcatgtcagcgcccaacacacagggaagaggccaggctaccaggtttatcagaagctgtttcaataaccgcagaattttttttcccatgccaatgcacactgtacagaggtgatgcgggacgaatcgagctggagccttgtgtccgctgccgagaagcccgagacgatgtcgctttgagcttcctctaaggtgttcggactgcggcttcgccgtgccaccgcgctggaagtacactcgtagggtttagcagagttcgatgagcttgtagggtagacgccctgaccccgttctgttgcagatcatctaaccaccgctccggatttgtttttttgttttattttgttttgtttatttaatatacatattaattcatttgtagcaccccccgtgtacagcagctgctggctaacttaaacctgctgtgccatattttattcattctattcacaccctggtttgccaatcttgtggatcgctgaaagctccgagccgcctgtggtgatcgcccgttgggtgtaggtgtaataaacggtagttagcggtagagcattgcg

SEQ ID NO: 69736 - DNA, 4322 bp, Zea Mays
agcagcgcagacgcgcctcgatgcctcgtgctccataaccaacgcccacagccagtctatactctagagccccccaacacagcacacaacactcgctcgcggcgcagcgcttcgctcgttgccaccgcccgcctttccccgcgcccgacggaagagccccacgcccccaccgccgcgggagggggaggggcgcggaggagcatgcgcgcaggctgtcaccgcggccagagaaagagaaggaggacctgcgccgcgcgcaccgcgacgagccgctctccgctggcacccacgccaaaaggcgaagattctcggccgagcccccgtcccttccaccatcccccgctgtaggtagccgccacccagatctgctcccctccgcacccgcccgccgctctccccttagattcgcaccacccgccgccatgcgtttgccgccgccgccgctgtgactgggctctcctcctttgtgaggcaggaataaaaggcggttcttgcgggcggttgccatggggtgcggccagtccaagacggaggaggagtacgccgtgcagcactgccgggcgcgctccgagctcctggcgctggccatccgccagcgctacatgctcgccgacgcgcaccacgcctacgccgagtcgctgcgcgccgtcggcgccctgctgcacgacttcctccgcggcgtccagtcgctgccgccgccgccgcccgagcccgcgctccgcctcccgctgcagcggaagggcgacggcctccccgccgcgtcgccgccgccgcccgcaatcgcgtcctcctcctccgccgccaagcaggtccgcatcgcccccaacgacggccatatccagttctccgacgacgactccgattccgatgacggacacatcaagttccactccgacgaagagcccgacccggctcgccgccgcccggatgtcgtccactcagccggggcgcctggtcctccgccgccgcagatgggaccaccctattcctccgggtatgctccgccgccgtatggtcctggatacggctacgggtacgccaatgggcctgggccgggtcctggtcccgattatggcggtattggcatgagcagcggcggcggcggtggttacgggcaaagctatgggggcatgggtggtggtggcagcggcggcggtgccggctacaatgaccagagctatggtggcatgggcagtggcggcggcgctggcggctatgaccaaggctacggtggcatgggtggatatgggcagagcttctttaacatcaactacgcgcgcagccagccacctccaccgtcaatctcgcacgagcaacgcctgcaggccactaacgccagggtccactactattccggcaatgacgagctgcagccacccccgcgcggctatggtggtgggtactcctacccaccacagagctcgagctcatataatcagtatgcctatggtggttactatggaggtggttctgctcctgcaccaccagcagacatcccctcctcctcccgcgagccagccgcagcaccaccgcctccatctcctcccagggtgtccacctgggacttcctgaacccgtttgaaacttatgatagctactacgagcaaccaactgctacagcagctccatactctcccagcaggagttcaaaggatgtgcgcgaggaggaggggattccggacttggaggatgaagacatggaggtagtcaaggaagcttatggtgatgagaagcacccaatgaagggttacatgggaaacgggaaggcgacaaaggaagatggtaggagcagtacgagagatgaactgccccgcaagtccaagtcatctgaggccagcagtagtgggagcagcttggagcatgacgtgcatgtagtagagaagagtgttgtcggagagcaagttcaacactcagagccacagcagcatgttgccggtctgccacccacaggatcggacaagatatacatcgatgacactgaggtggtggtggagatcaggactcaatttgagcgtgcctcacaatcagctagtgaggtatccaagatgcttgaggtcggaaagatgccttactaccagaagagttcaggtttcaaagtctctgcaatgatggtctgtggtataccgacaatggaggaggagtttctgcgttttgaagaggacaaggcgatgggatccggcaacctctcctctacgctacagaagttgtacatgtgggagaagaagcttcttgaggaagttaagatcttaattgagagtgcacagtcaaaatctcatcaagtagttagtataggttatgattatgaatgtgcctgcaccaattcctactttggagtgcctattcatgtgtcaacagaggagaggatgcgggtactgtatgacagaaaacgtgaggagctgaaaatgttagatgagaaaggtgcagaagctcataagcttgaggccactgagctttacatcaggaaactatcaactaagattagcatagccatccaggttgtaaacactatttcagaaaagattagtaagttgagggatgaagagttgtggccacaaacatgtgagctcattcaagggttgatgaggatgtggagcgttatgctagaatgccatcagatacaattgcatgccatatcccaagctagatacatagactccatgatagacactgcaaagttcggtgatgatcatatggacttgatcaagcggttagagcttcagctattggattggattgcttgttttgctgcatgggttagcgctcaaaagaattatgtcaaaactttaaataagtggctgacaaatggtgtcatctatgtacccgaggaaaccgaggacggggcgcctccattttctcctggaaggttaggagggccaccgatattcgtcatatgcaataactgggctgccagtgtggacagggtatctgagaaagaagtggtcgaggcaatgcaggcctttgcgtccaacgtcctgaacctctgggagaggcacaggtcggagcaaaggcagggtctgatggcgaacaaaggcatggacagagatcttagggtgatggaaagagacgagcaatcgatgcgcaaggctctggaggcacagaacaagaagcttgtgctcatttcgaaccagggcagcgtgtccttgtctgcacaagcgttacatgagcgaggccctggcgctgaagccggtggtagtctgcagacaggtctgaggaatattttcgaagcgatggagaacttcacctctgcatctgcaaatacgtacagggagctccatcttcgcgccgaagaagagaaagcccgggttgcgcaggagagcggcagcgtttcctagttccacatgaggacatgagcatttgtcggtggaaagaagggggactaacgccagtggcagcgtttctacggcacagtggcacaaccaacccctagtggcagctgatgcaccttgctcgccaggtgcctcagttttttgggttccaagctctctctgatgtagaggcctgtggtacttggtggagttaacaggttgtgacatgggggtgctgcatttctttgatcgggatgaacaggcattctcctcagaccgtaattgggaagcgcagttgtgaaattaggtaatcgccagacacatcctggtagttgggagaccccgcctgaagggaccgagtgaagagcagatgcccttgtgcatctgagaagccgcagatgatctcttagttcagatgctgttatcatgaacccaagattcatggaacgctcccaatcccatgcatgtcagcgcccaacacacagggaagaggccaggctaccaggtttatcagaagctgtttcaataaccgcagaattttttttcccatgccaatgcacactgtacagaggtgatgcgggacgaatcgagctggagccttgtgtccgctgccgagaagcccgagacgatgtcgctttgagcttcctctaaggtgttcggactgcggcttcgccgtgccaccgcgctggaagtacactcgtagggtttagcagagttcgatgagcttgtagggtagacgccctgaccccgttctgttgcagatcatctaaccaccgctccggatttgtttttttgttttattttgttttgtttatttaatatacatattaattcatttgtagcaccccccgtgtacagcagctgctggctaacttaaacctgctgtgccatattttattcattctattcacaccctggtttgccaatcttgtggatcgctgaaagctccgagccgcctgtggtgatcgcccgttgggtgtaggtgtaataaacggtagttagcggtagagcattgcg

SEQ ID NO: 69737 - DNA, 4196 bp, Zea Mays
ccacccccgcgatcctccgtctccgtctccgttcgttcgtccgcccccgccgccccgtccgttagatgattcccagcccttttttcccggtaaaaccaccgcaccaaaagggcagcagcgcagacgcgcctcgatgcctcgtgctccataaccaacgcccacagccagtctatactctagagccccccaacacagcacacaacactcgctcgcggcgcagcgcttcgctcgttgccaccgcccgcctttccccgcgcccgacggaagagccccacgcccccaccgccgcgggagggggaggggcgcggaggagcatgcgcgcaggctgtcaccgcggccagagaaagagaaggaggacctgcgccgcgcgcaccgcgacgagccgctctccgctggcacccacgccaaaaggcgaagattctcggccgagcccccgtcccttccaccatcccccgctgaataaaaggcggttcttgcgggcggttgccatggggtgcggccagtccaagacggaggaggagtacgccgtgcagcactgccgggcgcgctccgagctcctggcgctggccatccgccagcgctacatgctcgccgacgcgcaccacgcctacgccgagtcgctgcgcgccgtcggcgccctgctgcacgacttcctccgcggcgtccagtcgctgccgccgccgccgcccgagcccgcgctccgcctcccgctgcagcggaagggcgacggcctccccgccgcgtcgccgccgccgcccgcaatcgcgtcctcctcctccgccgccaagcaggtccgcatcgcccccaacgacggccatatccagttctccgacgacgactccgattccgatgacggacacatcaagttccactccgacgaagagcccgacccggctcgccgccgcccggatgtcgtccactcagccggggcgcctggtcctccgccgccgcagatgggaccaccctattcctccgggtatgctccgccgccgtatggtcctggatacggctacgggtacgccaatgggcctgggccgggtcctggtcccgattatggcggtattggcatgagcagcggcggcggcggtggttacgggcaaagctatgggggcatgggtggtggtggcagcggcggcggtgccggctacaatgaccagagctatggtggcatgggcagtggcggcggcgctggcggctatgaccaaggctacggtggcatgggtggatatgggcagagcttctttaacatcaactacgcgcgcagccagccacctccaccgtcaatctcgcacgagcaacgcctgcaggccactaacgccagggtccactactattccggcaatgacgagctgcagccacccccgcgcggctatggtggtgggtactcctacccaccacagagctcgagctcatataatcagtatgcctatggtggttactatggaggtggttctgctcctgcaccaccagcagacatcccctcctcctcccgcgagccagccgcagcaccaccgcctccatctcctcccagggtgtccacctgggacttcctgaacccgtttgaaacttatgatagctactacgagcaaccaactgctacagcagctccatactctcccagcaggagttcaaaggatgtgcgcgaggaggaggggattccggacttggaggatgaagacatggaggtagtcaaggaagcttatggtgatgagaagcacccaatgaagggttacatgggaaacgggaaggcgacaaaggaagatggtaggagcagtacgagagatgaactgccccgcaagtccaagtcatctgaggccagcagtagtgggagcagcttggagcatgacgtgcatgtagtagagaagagtgttgtcggagagcaagttcaacactcagagccacagcagcatgttgccggtctgccacccacaggatcggacaagatatacatcgatgacactgaggtggtggtggagatcaggactcaatttgagcgtgcctcacaatcagctagtgaggtatccaagatgcttgaggtcggaaagatgccttactaccagaagagttcaggtttcaaagtctctgcaatgatggtctgtggtataccgacaatggaggaggagtttctgcgttttgaagaggacaaggcgatgggatccggcaacctctcctctacgctacagaagttgtacatgtgggagaagaagcttcttgaggaagttaagacagaggagaggatgcgggtactgtatgacagaaaacgtgaggagctgaaaatgttagatgagaaaggtgcagaagctcataagcttgaggccactgagctttacatcaggaaactatcaactaagattagcatagccatccaggttgtaaacactatttcagaaaagattagtaagttgagggatgaagagttgtggccacaaacatgtgagctcattcaagggttgatgaggatgtggagcgttatgctagaatgccatcagatacaattgcatgccatatcccaagctagatacatagactccatgatagacactgcaaagttcggtgatgatcatatggacttgatcaagcggttagagcttcagctattggattggattgcttgttttgctgcatgggttagcgctcaaaagaattatgtcaaaactttaaataagtggctgacaaatggtgtcatctatgtacccgaggaaaccgaggacggggcgcctccattttctcctggaaggttaggagggccaccgatattcgtcatatgcaataactgggctgccagtgtggacagggtatctgagaaagaagtggtcgaggcaatgcaggcctttgcgtccaacgtcctgaacctctgggagaggcacaggtcggagcaaaggcagggtctgatggcgaacaaaggcatggacagagatcttagggtgatggaaagagacgagcaatcgatgcgcaaggctctggaggcacagaacaagaagcttgtgctcatttcgaaccagggcagcgtgtccttgtctgcacaagcgttacatgagcgaggccctggcgctgaagccggtggtagtctgcagacaggtctgaggaatattttcgaagcgatggagaacttcacctctgcatctgcaaatacgtacagggagctccatcttcgcgccgaagaagagaaagcccgggttgcgcaggagagcggcagcgtttcctagttccacatgaggacatgagcatttgtcggtggaaagaagggggactaacgccagtggcagcgtttctacggcacagtggcacaaccaacccctagtggcagctgatgcaccttgctcgccaggtgcctcagttttttgggttccaagctctctctgatgtagaggcctgtggtacttggtggagttaacaggttgtgacatgggggtgctgcatttctttgatcgggatgaacaggcattctcctcagaccgtaattgggaagcgcagttgtgaaattaggtaatcgccagacacatcctggtagttgggagaccccgcctgaagggaccgagtgaagagcagatgcccttgtgcatctgagaagccgcagatgatctcttagttcagatgctgttatcatgaacccaagattcatggaacgctcccaatcccatgcatgtcagcgcccaacacacagggaagaggccaggctaccaggtttatcagaagctgtttcaataaccgcagaattttttttcccatgccaatgcacactgtacagaggtgatgcgggacgaatcgagctggagccttgtgtccgctgccgagaagcccgagacgatgtcgctttgagcttcctctaaggtgttcggactgcggcttcgccgtgccaccgcgctggaagtacactcgtagggtttagcagagttcgatgagcttgtagggtagacgccctgaccccgttctgttgcagatcatctaaccaccgctccggatttgtttttttgttttattttgttttgtttatttaatatacatattaattcatttgtagcaccccccgtgtacagcagctgctggctaacttaaacctgctgtgccatattttattcattctattcacaccctggtttgccaatcttgtggatcgctgaaagctccgagccgcctgtggtgatcgcccgttgggtgtaggtgtaataaacggtagttagcggtagagcattgcg

SEQ ID NO: 69738 - DNA, 1454 bp, Zea Mays
tccctcgagcgcccacctgcggggcccgcctgtccaatactccaatccacggagttcgtcccttccccccgagttgtggatgggcttgccgtcgtagactcggcggtcaccggtcatcgtggcgacggcggacctcgtcaagctggcgctcgatactcgatagttccggtttcttgccttcgtggtaagttcatcctagatgcgcccgttgaaggtacgcgttccgcgccttatcttcagtttttagtccccgtgctcggttctgctccttgagaccttagacccaacgaaggttacaggcacgtttcgtagctagctcttcttgctcttcgtttccagttgattggatctcttgtctttgtcatgttgtccccatcgacaagtggcgagaacatgcatgcactttatctcctcactggtcagcattggaggcttcgacggttaatacgaccatgactggttgaattcaacccgttggctgctccatttcctcagtatcatcaattcattgtcctgtcacagtcctattcttctgaatttcagcggaatattctgtcacagtcttatcttctaatatttaccggctgccttctgtttggttatagtttcatcagtagtcatcaatttcacaccaagcatgattgtacaagaattccgataaggtgctttgctggtaccacactaccagcccattcccctgagtttgctgagtcagagaacgatatccataggaaacatgatttaagttgttgacccaaacgcagggatatttagtagtacgtgtgtcacaaaaaggtaaatagaacatttgtggtaatttgggcggaacaaaatgacatgacagaaggttgttttggaaagaaaatgattgatttcggactaatttgttgtatatataaatgtatcctacactcagttgttgcaagaagttttcagacattggggtatgccccccctcccaagtgaacgaataccttagtatgtaattaccaacatgaattaatcagatgtcaattaaatgagctgccctgtcggtaatttcccattaggactgagcttttttttctctcctgtaacttttaaacttgtgaagttggagtttgatttaatgatcgatcaacatgagaatctggtaaaaccagttcaactcctgcttcattgactggctggtaacttgaatttgatctttaatttacttctgtgattctttgtactgtatttattcctgatttttcccttgtgctttttatgttggtgcacacaacatgcaggtttaagttggtagtactgaattaatagctttgactcaacatgtttctttttcttcttggcattcttgggcaatagtcttgtttgactttgtgtggcatgccttgctgacctgtattagaatagtaggttctttaatttgggtgtgaacgtttttgaaatttaggcttactgttaagtgagaa

SEQ ID NO: 69739 - DNA, 1644 bp, Zea Mays
cttggagtaccccgcgctgcatggccaagctcatcttcaacagttgcatcaacacccaaagaaaggaggtggcctgacagtcatggaggagccctcgtcatgagcgggtaagtattggcatctttctctggcatcccagagctgggtcgaagtaagacaggagccaaatcagcccttgaggtgtccttatggggcgagcgtaacccagccatctccagcgacctatcaaacatatactgctggggcgaaggcggtctaggtgagcccaatggcccaatagaccgcgggtcttcaactaagttgtcctaatggggtgagctcagcctagccatctccagcggcccatcaaaagatatgagctgaggtgaaggtggtctggttgagcctagcggcccaaaatgtctcggatcttcgatcagggtgtcctgatggggcgagcttagcttagccatctccaacggcccagcaaaagaaacatgctggggcaaaggtggcctggttgagcccagcgtcccattctgcagtgcagaggttttcgagtcaggttggcctgatggcacgagctcgccatagtcccctccaggctccagcggcccagcaaataagctatgctggggcgaagcatgtctccttgtcttctaaagcttgtggtggcgtcaaccccacatccctagtcgcattcatgacacgctcgtggcctgaaggctgttgccgtcccagtcgatgctggataggctaccgagaatcctcggtcatgtccggacgtcgaggatggaagtcctagttaccgacttaccgcggtcctctccttcatcaggcctcttgctagtcgccaaggaggggagaggtggagcatctaagactgttgagtgtaaattcattggagttgctctaatggagatcttatatgtcaaacatctcttctcatgagtggctaaccccgattcaatggtatgcatctccatgtcatgatgtagtctttctagatcaaagctccacgctcacaccaaaaaggacaaaagaactctcttttcaactgtatcttggtgtaattgtgtaatccaacatgagtccctcaagatgtgctcggatgtagatcaaaaccaagcatgttctgggatacctcagatttcaatatccaccggcttggacatggttgccaacgaagcatgggcgaacctcgaccaacgcttgaactggagagtaaactgtggtcctctgagcgcttttccaccattgaggacccttgtgttggcttctaagaaaggaccaatccgtcgctagaacactcagcctcacgttaacactcacatgtgtggagggaatggatgaacacagagaagctcacagggagaatttttggcgcagcaaaacccacactgcattttctattttatctcccatttattgacccactcttaggtgtttctcagatccaggacgcatgcaccagtgcactaaacttgccatgccatcccacgacgaaaacatggttactgcgcccctggatttcagctccaccacttcaacgctgcatgcaagcaaaaggacccggtctcagccgtggcatgcacgcacatgagcaccacgtctgactaaccactacacctaaacttaagcaccaagactaagggcctgtttgtt

SEQ ID NO: 69740 - DNA, 1156 bp, Zea Mays
ttcacaccatttcagcattgtaccctatgttcatgccaccatggaagggcttcgtattggagcaccgattatgcaggtttatcatgagaaatcttttatcttacctgatgtttcaagggtgcttgcttgcctttatgagaaggatgtcaagtttgagactcacacagcctcatacaggagcctactcggattgcaggcatcatctcatgctccagttccattctatgaaggccctacttttctagaagaatccagagaaatctgccgttatatagcagaaaagtatgaaaatcaaggatatccgttcctccttggaaaggatgcccttgagagggcttcaattgaacaatggctccacaacgaggagcatgctttcaaccctccgagccgggccttgttctttcatttggcctttcccctgggtgaaggagaagatgatgatattgatgttcatacaaggaagctagaagaggaggtggtgggatgctatttctgaccggagttcttggaagaaagtgctgaggtatatgaagagcgtggaggagaagaacaaacaagaagaactcaagaagcagcagcagcagcaggaagaggctcctagaacctccaccgacccaactcgggtagactcgagaaagcagagcagaacagagcctcggacaatattggttcctcctgctgataacgagtcatcagcttcgatagttcctcgaacaaagaagcctcttcctggtgatcacttagtgtctactcaacaaattgatggtgttggtatgccagccacaaattgatggtgatggtcgtcttagtggtgtttgtcttgtcttttattgtttggttctttaacaagagttatatttttaccttctgaccaaagagttgtttaacaggatagtcattgtacgacagtgggccaaatttgtttatcttgtcttttttttcttgaaatgtgcaggtgaactacgccctattatatattaagcataggaaaaagatgtctaaaaaagaccaggtacaaaagccgattttcgccagagaagaattcagctgaccctagttgagctcaactggattgaactgaagttcaacaggttttcaccagtgaacttcaagaagattgagacttttatatggctattattatgccattctcaac

SEQ ID NO: 69741 - DNA, 1892 bp, Zea Mays
taaacctatgcacagttggatttctcactgggaaggtttatatcttcaaaagtcttctgacatctctgcttggtgagcttggtctcaacattcaagaagcacatgcattttcaacaaatgatggctactcacttgatgtatttgttgttgttggttggcatgatgaggaaacagaggatttagtagaagcagtgcagaaggaaattggcaggattgaagagacacaagcatggtcttcatctcattcatggtctactccagttgaaaacatgcagattgctgagatttcagcagctggccgtgttgagataccaacagatggtgctagtgaatgggaaattgatgtaaaactgctcaagtttgggaataaagtagcatcaggatcatatggtgatctttaccggggtacatattgcagtcaagatgttgctattaaagtgctgaaacctgagagaataaatgcagacatgcagcgtgaatttgcccaggaagtatatatcatgaggaaggtacgtcacaagaatgttgtgcaatttattggtgcttccactaaacccccaaatctatatatagtgacagaatttatgtccggtggaagtgtgtatgattacctccataaacataaaggtgttttcaaacttcctactttagttggagttgctatggatgtgtcaaaaggcatgagctacttacaccagaataatattattcatcgtgatttgaaaactgcgaaccttctgatggatgaaaatgggactgttaaagttgctgattttggtgtcgcacgtgttaaagctcaatctggagtcatgactgcagaaactggtacttaccgttggatggccccagaggtcatagagcataaaccctatgatcagaaggctgatgtttttagttttggaattttgatgtgggagctactcacagggaagattccttatgagtatctgactccactacaagcagctgttggcgtggtgcagaagggattacggcctacaattccgaaacatacttatgcaatgctttctgagcttcttcagaaatgttggcagcaagaccccgctcaaagaccagacttttccgaaatattagaaactcttcagagaatagcagaggaagtcggagacgagcacgaggggaagcacaaggacagaacactgggtggtttcttttcagctctgagggggcggagccattgagacacggttgaagacttgaaatgtacatggcctcggtccatcctggaaggatctgaactacaaccagctcctgttccccgcacatagcgacagtacacagaaatactgtacagacatgctgcagccggagttgactaagtggcaattttttagcggcagccatcgcttttcgcctatctgcttgttactcctgagttccatcacaatgagaggaagcttgggaactgtgcatcataaccagtctgatttctctaacagagtctaatcttgctgtagatgaaaataataagccagatccaggccgtggcatgattcttttaaggttccatcttttagcatattttcttctacgtgccgtcattcttttctggacatgctccacccctctgttgtggaacaacgcggcaagcttgagttagctgagcaaggcacctgcatctgcatgggatctgctcggaacaaagttgggttatcttgtgctaagcttttgttccccagtttccgtgactacaaatgatatcaatttattttaaagaaatggaaaaaacatgtgtatagtctgcatctgacagttcgacactaacgattcgaagcgtggcaccagaaagaggtaggtttgtgatgccaaacttgctgatttttaaaatttattttttgggtcaaaatatcatgtttacattcctggagata

SEQ ID NO: 69742 - DNA, 1838 bp, Zea Mays
ctgtccagtacgtcccagtaacagcaaggatgcacctgcagcaggggatctgctgcaaccattactggaccacatatttctggcccatgcatgaaatcaccttttcaaccattgacaagccaaaacttctcagtgagctgacatctctgcttggtgagcttggtctcaacattcaagaagcacatgcattttcaacaaatgatggctactcacttgatgtatttgttgttgttggttggcatgatgaggaaacagaggatttagtagaagcagtgcagaaggaaattggcaggattgaagagacacaagcatggtcttcatctcattcatggtctactccagttgaaaacatgcagattgctgagatttcagcagctggccgtgttgagataccaacagatggtgctagtgaatgggaaattgatgtaaaactgctcaagtttgggaataaagtagcatcaggatcatatggtgatctttaccggggtacatattgcagtcaagatgttgctattaaagtgctgaaacctgagagaataaatgcagacatgcagcgtgaatttgcccaggaagtatatatcatgaggaaggtacgtcacaagaatgttgtgcaatttattggtgcttccactaaacccccaaatctatatatagtgacagaatttatgtccggtggaagtgtgtatgattacctccataaacataaaggtgttttcaaacttcctactttagttggagttgctatggatgtgtcaaaaggcatgagctacttacaccagaataatattattcatcgtgatttgaaaactgcgaaccttctgatggatgaaaatgggactgttaaagttgctgattttggtgtcgcacgtgttaaagctcaatctggagtcatgactgcagaaactggtacttaccgttggatggccccagaggtcatagagcataaaccctatgatcagaaggctgatgtttttagttttggaattttgatgtgggagctactcacagggaagattccttatgagtatctgactccactacaagcagctgttggcgtggtgcagaaggtcggagacgagcacgaggggaagcacaaggacagaacactgggtggtttcttttcagctctgagggggcggagccattgagacacggttgaagacttgaaatgtacatggcctcggtccatcctggaaggatctgaactacaaccagctcctgttccccgcacatagcgacagtacacagaaatactgtacagacatgctgcagccggagttgactaagtggcaattttttagcggcagccatcgcttttcgcctatctgcttgttactcctgagttccatcacaatgagaggaagcttgggaactgtgcatcataaccagtctgatttctctaacagagtctaatcttgctgtagatgaaaataataagccagatccaggccgtggcatgattcttttaaggttccatcttttagcatattttcttctacgtgccgtcattcttttctggacatgctccacccctctgttgtggaacaacgcggcaagcttgagttagctgagcaaggcacctgcatctgcatgggatctgctcggaacaaagttgggttatcttgtgctaagcttttgttccccagtttccgtgactacaaatgatatcaatttattttaaagaaatggaaaaaacatgtgtatagtctgcatctgacagttcgacactaacgattcgaagcgtggcaccagaaagaggtaggtttgtgatgccaaacttgctgatttttaaaatttattttttgggtcaaaatatcatgtttacattcctggagata

SEQ ID NO: 69743 - DNA, 2207 bp, Zea Mays
cgaacccctgccagctaggtgcaaatttgctccctagccagtgcaaccagctagagtacatgaaaaaaaccaagcccttggtgcaagacctccctgaggcattgatggaaaggtagaagattctcttccccagtgtccagaaaaggcaaagaatcctggctgtccagtacgtcccagtaacagcaaggatgcacctgcagcaggggatctgctgcaaccattactggaccacatatttctggcccatgcatgaaatcaccttttcaaccattgacaagccaaaacttctcagtgagctgacatctctgcttggtgagcttggtctcaacattcaagaagcacatgcattttcaacaaatgatggctactcacttgatgtatttgttgttgttggttggcatgatgaggaaacagaggatttagtagaagcagtgcagaaggaaattggcaggattgaagagacacaagcatggtcttcatctcattcatggtctactccagttgaaaacatgcagattgctgagatttcagcagctggccgtgttgagataccaacagatggtgctagtgaatgggaaattgatgtaaaactgctcaagtttgggaataaagtagcatcaggatcatatggtgatctgtgagtgtttgttgctagttattatggggaaaatcccttaagtttatttcacttaacaatatgtctctgttccagttaccggggtacatattgcagtcaagatgttgctattaaagtgctgaaacctgagagaataaatgcagacatgcagcgtgaatttgcccaggaagtatatatcatgaggaaggtacgtcacaagaatgttgtgcaatttattggtgcttccactaaacccccaaatctatatatagtgacagaatttatgtccggtggaagtgtgtatgattacctccataaacataaaggtgttttcaaacttcctactttagttggagttgctatggatgtgtcaaaaggcatgagctacttacaccagaataatattattcatcgtgatttgaaaactgcgaaccttctgatggatgaaaatgggactgttaaagttgctgattttggtgtcgcacgtgttaaagctcaatctggagtcatgactgcagaaactggtacttaccgttggatggccccagaggtcatagagcataaaccctatgatcagaaggctgatgtttttagttttggaattttgatgtgggagctactcacagggaagattccttatgagtatctgactccactacaagcagctgttggcgtggtgcagaagggattacggcctacaattccgaaacatacttatgcaatgctttctgagcttcttcagaaatgttggcagcaagaccccgctcaaagaccagacttttccgaaatattagaaactcttcagagaatagcagaggaagtcggagacgagcacgaggggaagcacaaggacagaacactgggtggtttcttttcagctctgagggggcggagccattgagacacggttgaagacttgaaatgtacatggcctcggtccatcctggaaggatctgaactacaaccagctcctgttccccgcacatagcgacagtacacagaaatactgtacagacatgctgcagccggagttgactaagtggcaattttttagcggcagccatcgcttttcgcctatctgcttgttactcctgagttccatcacaatgagaggaagcttgggaactgtgcatcataaccagtctgatttctctaacagagtctaatcttgctgtagatgaaaataataagccagatccaggccgtggcatgattcttttaaggttccatcttttagcatattttcttctacgtgccgtcattcttttctggacatgctccacccctctgttgtggaacaacgcggcaagcttgagttagctgagcaaggcacctgcatctgcatgggatctgctcggaacaaagttgggttatcttgtgctaagcttttgttccccagtttccgtgactacaaatgatatcaatttattttaaagaaatggaaaaaacatgtgtatagtctgcatctgacagttcgacactaacgattcgaagcgtggcaccagaaagaggtaggtttgtgatgccaaacttgctgatttttaaaatttattttttgggtcaaaatatcatgtttacattcctggagata

SEQ ID NO: 69744 - DNA, 2009 bp, Zea Mays
ctttttcttactgtacttatgtcatctgtgtcaaggctgcactgctggactcacctgagttgtatctccaattcttgatgggaatcagactgatgctgattcgaatactgcaggggaggaagtcgcttcaagactgttgaacaggcagcagagcatacatcctcctcctgcctttggttcttctacaaatcttgaggcccttgctcttgaagctagcaagtctcatcaagatcacgatagcacctctgataattgtcgatccctgtacagctgacatctctgcttggtgagcttggtctcaacattcaagaagcacatgcattttcaacaaatgatggctactcacttgatgtatttgttgttgttggttggcatgatgaggaaacagaggatttagtagaagcagtgcagaaggaaattggcaggattgaagagttgaaaacatgcagattgctgagatttcagcagctggccgtgttgagataccaacagatggtgctagtgaatgggaaattgatgtaaaactgctcaagtttgggaataaagtagcatcaggatcatatggtgatctttaccggggtacatattgcagtcaagatgttgctattaaagtgctgaaacctgagagaataaatgcagacatgcagcgtgaatttgcccaggaagtatatatcatgaggaaggtacgtcacaagaatgttgtgcaatttattggtgcttccactaaacccccaaatctatatatagtgacagaatttatgtccggtggaagtgtgtatgattacctccataaacataaaggtgttttcaaacttcctactttagttggagttgctatggatgtgtcaaaaggcatgagctacttacaccagaataatattattcatcgtgatttgaaaactgcgaaccttctgatggatgaaaatgggactgttaaagttgctgattttggtgtcgcacgtgttaaagctcaatctggagtcatgactgcagaaactggtacttaccgttggatggccccagaggtcatagagcataaaccctatgatcagaaggctgatgtttttagttttggaattttgatgtgggagctactcacagggaagattccttatgagtatctgactccactacaagcagctgttggcgtggtgcagaagaaatgttggcagcaagaccccgctcaaagaccagacttttccgaaatattagaaactcttcagagaatagcagaggaagtcggagacgagcacgaggggaagcacaaggacagaacactgggtggtttcttttcagctctgagggggcggagccattgagacacggttgaagacttgaaatgtacatggcctcggtccatcctggaaggatctgaactacaaccagctcctgttccccgcacatagcgacagtacacagaaatactgtacagacatgctgcagccggagttgactaagtggcaattttttagcggcagccatcgcttttcgcctatctgcttgttactcctgagttccatcacaatgagaggaagcttgggaactgtgcatcataaccagtctgatttctctaacagagtctaatcttgctgtagatgaaaataataagccagatccaggccgtggcatgattcttttaaggttccatcttttagcatattttcttctacgtgccgtcattcttttctggacatgctccacccctctgttgtggaacaacgcggcaagcttgagttagctgagcaaggcacctgcatctgcatgggatctgctcggaacaaagttgggttatcttgtgctaagcttttgttccccagtttccgtgactacaaatgatatcaatttattttaaagaaatggaaaaaacatgtgtatagtctgcatctgacagttcgacactaacgattcgaagcgtggcaccagaaagaggtaggtttgtgatgccaaacttgctgatttttaaaatttattttttgggtcaaaatatcatgtttacattcctggagata

SEQ ID NO: 69745 - DNA, 2569 bp, Zea Mays
ctctttcgctccgctttctcaatcactgggcctgggggagatcgagacctagagcggaggacgggtgggcggcgctgagggccttaggcgaatggcggtagaggaggccgcggagagctgcggcagccacgccgcggccgctgcgtccggcggcggcgcggcggagctcgctacgtcctcgtcatcggccgccgcggcggtgcaggcgcggaagcagcagcagcagcagcgccataagctcgaggtgtacacagaggttctccggcgcctccacgacgccggcctgcccgacgcgcgggcgcccgggttcgacgacgagctctggaaccacttcaaccgcctccccgcccgatacgccatggatgtgaacgtggagagggcggaggacgtgctcacgcacaagcggcttctggagcaggccaaggatccggctcagcgcccggctttcgcggtgcgggccgtgcaggtatctccaattcttgatgggaatcagactgatgctgattcgaatactgcaggggaggaagtcgcttcaagactgttgaacaggcagcagagcatacatcctcctcctgcctttggttcttctacaaatcttgaggcccttgctcttgaagctagcaagtctcatcaagatcacgatagcacctctgataattgtcgatccctgtacaggcccatgcatgaaatcaccttttcaaccattgacaagccaaaacttctcagtgagctgacatctctgcttggtgagcttggtctcaacattcaagaagcacatgcattttcaacaaatgatggctactcacttgatgtatttgttgttgttggttggcatgatgaggaaacagaggatttagtagaagcagtgcagaaggaaattggcaggattgaagagcagacacaagcatggtcttcatctcattcatggtctactccagttgaaaacatgcagattgctgagatttcagcagctggccgtgttgagataccaacagatggtgctagtgaatgggaaattgatgtaaaactgctcaagtttgggaataaagtagcatcaggatcatatggtgatctttaccggggtacatattgcagtcaagatgttgctattaaagtgctgaaacctgagagaataaatgcagacatgcagcgtgaatttgcccaggaagtatatatcatgaggaaggtacgtcacaagaatgttgtgcaatttattggtgcttccactaaacccccaaatctatatatagtgacagaatttatgtccggtggaagtgtgtatgattacctccataaacataaaggtgttttcaaacttcctactttagttggagttgctatggatgtgtcaaaaggcatgagctacttacaccagaataatattattcatcgtgatttgaaaactgcgaaccttctgatggatgaaaatgggactgttaaagttgctgattttggtgtcgcacgtgttaaagctcaatctggagtcatgactgcagaaactggtacttaccgttggatggccccagaggtcatagagcataaaccctatgatcagaaggctgatgtttttagttttggaattttgatgtgggagctactcacagggaagattccttatgagtatctgactccactacaagcagctgttggcgtggtgcagaagggattacggcctacaattccgaaacatacttatgcaatgctttctgagcttcttcagaaatgttggcagcaagaccccgctcaaagaccagacttttccgaaatattagaaactcttcagagaatagcagaggaagtcggagacgagcacgaggggaagcacaaggacagaacactgggtggtttcttttcagctctgagggggcggagccattgagacacggttgaagacttgaaatgtacatggcctcggtccatcctggaaggatctgaactacaaccagctcctgttccccgcacatagcgacagtacacagaaatactgtacagacatgctgcagccggagttgactaagtggcaattttttagcggcagccatcgcttttcgcctatctgcttgttactcctgagttccatcacaatgagaggaagcttgggaactgtgcatcataaccagtctgatttctctaacagagtctaatcttgctgtagatgaaaataataagccagatccaggccgtggcatgattcttttaaggttccatcttttagcatattttcttctacgtgccgtcattcttttctggacatgctccacccctctgttgtggaacaacgcggcaagcttgagttagctgagcaaggcacctgcatctgcatgggatctgctcggaacaaagttgggttatcttgtgctaagcttttgttccccagtttccgtgactacaaatgatatcaatttattttaaagaaatggaaaaaacatgtgtatagtctgcatctgacagttcgacactaacgattcgaagcgtggcaccagaaagaggtaggtttgtgatgccaaacttgctgatttttaaaatttattttttgggtcaaaatatcatgtttacattcctggagata

SEQ ID NO: 69746 - DNA, 2457 bp, Zea Mays
ctctttcgctccgctttctcaatcactgggcctgggggagatcgagacctagagcggaggacgggtgggcggcgctgagggccttaggcgaatggcggtagaggaggccgcggagagctgcggcagccacgccgcggccgctgcgtccggcggcggcgcggcggagctcgctacgtcctcgtcatcggccgccgcggcggtgcaggcgcggaagcagcagcagcagcagcgccataagctcgaggtgtacacagaggttctccggcgcctccacgacgccggcctgcccgacgcgcgggcgcccgggttcgacgacgagctctggaaccacttcaaccgcctccccgcccgatacgccatggatgtgaacgtggagagggcggaggacgtgctcacgcacaagcggcttctggagcaggccaaggatccggctcagcgcccggctttcgcggtgcgggccgtgcaggggaggaagtcgcttcaagactgttgaacaggcagcagagcatacatcctcctcctgcctttggttcttctacaaatcttgaggcccttgctcttgaagctagcaagtctcatcaagatcacgatagcacctctgataattgtcgatccctgtacaggcccatgcatgaaatcaccttttcaaccattgacaagccaaaacttctcagtgagctgacatctctgcttggtgagcttggtctcaacattcaagaagcacatgcattttcaacaaatgatggctactcacttgatgtatttgttgttgttggttggcatgatgaggaaacagaggatttagtagaagcagtgcagaaggaaattggcaggattgaagagacacaagcatggtcttcatctcattcatggtctactccagttgaaaacatgcagattgctgagatttcagcagctggccgtgttgagataccaacagatggtgctagtgaatgggaaattgatgtaaaactgctcaagtttgggaataaagtagcatcaggatcatatggtgatctttaccggggtacatattgcagtcaagatgttgctattaaagtgctgaaacctgagagaataaatgcagacatgcagcgtgaatttgcccaggaagtatatatcatgaggaaggtacgtcacaagaatgttgtgcaatttattggtgcttccactaaacccccaaatctatatatagtgacagaatttatgtccggtggaagtgtgtatgattacctccataaacataaaggtgttttcaaacttcctactttagttggagttgctatggatgtgtcaaaaggcatgagctacttacaccagaataatattattcatcgtgatttgaaaactgcgaaccttctgatggatgaaaatgggactgttaaagttgctgattttggtgtcgcacgtgttaaagctcaatctggagtcatgactgcagaaactggtacttaccgttggatggccccagaggtcatagagcataaaccctatgatcagaaggctgatgtttttagttttggaattttgatgtgggagctactcacagggaagattccttatgagtatctgactccactacaagcagctgttggcgtggtgcagaagaaatgttggcagcaagaccccgctcaaagaccagacttttccgaaatattagaaactcttcagagaatagcagaggaagtcggagacgagcacgaggggaagcacaaggacagaacactgggtggtttcttttcagctctgagggggcggagccattgagacacggttgaagacttgaaatgtacatggcctcggtccatcctggaaggatctgaactacaaccagctcctgttccccgcacatagcgacagtacacagaaatactgtacagacatgctgcagccggagttgactaagtggcaattttttagcggcagccatcgcttttcgcctatctgcttgttactcctgagttccatcacaatgagaggaagcttgggaactgtgcatcataaccagtctgatttctctaacagagtctaatcttgctgtagatgaaaataataagccagatccaggccgtggcatgattcttttaaggttccatcttttagcatattttcttctacgtgccgtcattcttttctggacatgctccacccctctgttgtggaacaacgcggcaagcttgagttagctgagcaaggcacctgcatctgcatgggatctgctcggaacaaagttgggttatcttgtgctaagcttttgttccccagtttccgtgactacaaatgatatcaatttattttaaagaaatggaaaaaacatgtgtatagtctgcatctgacagttcgacactaacgattcgaagcgtggcaccagaaagaggtaggtttgtgatgccaaacttgctgatttttaaaatttattttttgggtcaaaatatcatgtttacattcctggagata

SEQ ID NO: 69747 - DNA, 2522 bp, Zea Mays
ctctttcgctccgctttctcaatcactgggcctgggggagatcgagacctagagcggaggacgggtgggcggcgctgagggccttaggcgaatggcggtagaggaggccgcggagagctgcggcagccacgccgcggccgctgcgtccggcggcggcgcggcggagctcgctacgtcctcgtcatcggccgccgcggcggtgcaggcgcggaagcagcagcagcagcagcgccataagctcgaggtgtacacagaggttctccggcgcctccacgacgccggcctgcccgacgcgcgggcgcccgggttcgacgacgagctctggaaccacttcaaccgcctccccgcccgatacgccatggatgtgaacgtggagagggcggaggacgtgctcacgcacaagcggcttctggagcaggccaaggatccggctcagcgcccggctttcgcggtgcgggccgtgcaggtatctccaattcttgatgggaatcagactgatgctgattcgaatactgcaggggaggaagtcgcttcaagactgttgaacaggcagcagagcatacatcctcctcctgcctttggttcttctacaaatcttgaggcccttgctcttgaagctagcaagtctcatcaagatcacgatagcacctctgataattgtcgatccctgtacaggcccatgcatgaaatcaccttttcaaccattgacaagccaaaacttctcagtgagctgacatctctgcttggtgagcttggtctcaacattcaagaagcacatgcattttcaacaaatgatggctactcacttgatgtatttgttgttgttggttggcatgatgaggaaacagaggatttagtagaagcagtgcagaaggaaattggcaggattgaagagttgaaaacatgcagattgctgagatttcagcagctggccgtgttgagataccaacagatggtgctagtgaatgggaaattgatgtaaaactgctcaagtttgggaataaagtagcatcaggatcatatggtgatctttaccggggtacatattgcagtcaagatgttgctattaaagtgctgaaacctgagagaataaatgcagacatgcagcgtgaatttgcccaggaagtatatatcatgaggtacgtcacaagaatgttgtgcaatttattggtgcttccactaaacccccaaatctatatatagtgacagaatttatgtccggtggaagtgtgtatgattacctccataaacataaaggtgttttcaaacttcctactttagttggagttgctatggatgtgtcaaaaggcatgagctacttacaccagaataatattattcatcgtgatttgaaaactgcgaaccttctgatggatgaaaatgggactgttaaagttgctgattttggtgtcgcacgtgttaaagctcaatctggagtcatgactgcagaaactggtacttaccgttggatggccccagaggtcatagagcataaaccctatgatcagaaggctgatgtttttagttttggaattttgatgtgggagctactcacagggaagattccttatgagtatctgactccactacaagcagctgttggcgtggtgcagaagggattacggcctacaattccgaaacatacttatgcaatgctttctgagcttcttcagaaatgttggcagcaagaccccgctcaaagaccagacttttccgaaatattagaaactcttcagagaatagcagaggaagtcggagacgagcacgaggggaagcacaaggacagaacactgggtggtttcttttcagctctgagggggcggagccattgagacacggttgaagacttgaaatgtacatggcctcggtccatcctggaaggatctgaactacaaccagctcctgttccccgcacatagcgacagtacacagaaatactgtacagacatgctgcagccggagttgactaagtggcaattttttagcggcagccatcgcttttcgcctatctgcttgttactcctgagttccatcacaatgagaggaagcttgggaactgtgcatcataaccagtctgatttctctaacagagtctaatcttgctgtagatgaaaataataagccagatccaggccgtggcatgattcttttaaggttccatcttttagcatattttcttctacgtgccgtcattcttttctggacatgctccacccctctgttgtggaacaacgcggcaagcttgagttagctgagcaaggcacctgcatctgcatgggatctgctcggaacaaagttgggttatcttgtgctaagcttttgttccccagtttccgtgactacaaatgatatcaatttattttaaagaaatggaaaaaacatgtgtatagtctgcatctgacagttcgacactaacgattcgaagcgtggcaccagaaagaggtaggtttgtgatgccaaacttgctgatttttaaaatttattttttgggtcaaaatatcatgtttacattcctggagata

SEQ ID NO: 69748 - DNA, 2471 bp, Zea Mays
ctctttcgctccgctttctcaatcactgggcctgggggagatcgagacctagagcggaggacgggtgggcggcgctgagggccttaggcgaatggcggtagaggaggccgcggagagctgcggcagccacgccgcggccgctgcgtccggcggcggcgcggcggagctcgctacgtcctcgtcatcggccgccgcggcggtgcaggcgcggaagcagcagcagcagcagcgccataagctcgaggtgtacacagaggttctccggcgcctccacgacgccggcctgcccgacgcgcgggcgcccgggttcgacgacgagctctggaaccacttcaaccgcctccccgcccgatacgccatggatgtgaacgtggagagggcggaggacgtgctcacgcacaagcggcttctggagcaggccaaggatccggctcagcgcccggctttcgcggtgcgggccgtgcaggtatctccaattcttgatgggaatcagactgatgctgattcgaatactgcaggggaggaagtcgcttcaagactgttgaacaggcagcagagcatacatcctcctcctgcctttggttcttctacaaatcttgaggcccttgctcttgaagctagcaagtctcatcaagatcacgatagcacctctgataattgtcgatccctgtacagctgacatctctgcttggtgagcttggtctcaacattcaagaagcacatgcattttcaacaaatgatggctactcacttgatgtatttgttgttgttggttggcatgatgaggaaacagaggatttagtagaagcagtgcagaaggaaattggcaggattgaagagttgaaaacatgcagattgctgagatttcagcagctggccgtgttgagataccaacagatggtgctagtgaatgggaaattgatgtaaaactgctcaagtttgggaataaagtagcatcaggatcatatggtgatctttaccggggtacatattgcagtcaagatgttgctattaaagtgctgaaacctgagagaataaatgcagacatgcagcgtgaatttgcccaggaagtatatatcatgaggaaggtacgtcacaagaatgttgtgcaatttattggtgcttccactaaacccccaaatctatatatagtgacagaatttatgtccggtggaagtgtgtatgattacctccataaacataaaggtgttttcaaacttcctactttagttggagttgctatggatgtgtcaaaaggcatgagctacttacaccagaataatattattcatcgtgatttgaaaactgcgaaccttctgatggatgaaaatgggactgttaaagttgctgattttggtgtcgcacgtgttaaagctcaatctggagtcatgactgcagaaactggtacttaccgttggatggccccagaggtcatagagcataaaccctatgatcagaaggctgatgtttttagttttggaattttgatgtgggagctactcacagggaagattccttatgagtatctgactccactacaagcagctgttggcgtggtgcagaagggattacggcctacaattccgaaacatacttatgcaatgctttctgagcttcttcagaaatgttggcagcaagaccccgctcaaagaccagacttttccgaaatattagaaactcttcagagaatagcagaggaagtcggagacgagcacgaggggaagcacaaggacagaacactgggtggtttcttttcagctctgagggggcggagccattgagacacggttgaagacttgaaatgtacatggcctcggtccatcctggaaggatctgaactacaaccagctcctgttccccgcacatagcgacagtacacagaaatactgtacagacatgctgcagccggagttgactaagtggcaattttttagcggcagccatcgcttttcgcctatctgcttgttactcctgagttccatcacaatgagaggaagcttgggaactgtgcatcataaccagtctgatttctctaacagagtctaatcttgctgtagatgaaaataataagccagatccaggccgtggcatgattcttttaaggttccatcttttagcatattttcttctacgtgccgtcattcttttctggacatgctccacccctctgttgtggaacaacgcggcaagcttgagttagctgagcaaggcacctgcatctgcatgggatctgctcggaacaaagttgggttatcttgtgctaagcttttgttccccagtttccgtgactacaaatgatatcaatttattttaaagaaatggaaaaaacatgtgtatagtctgcatctgacagttcgacactaacgattcgaagcgtggcaccagaaagaggtaggtttgtgatgccaaacttgctgatttttaaaatttattttttgggtcaaaatatcatgtttacattcctggagata

SEQ ID NO: 69749 - DNA, 2519 bp, Zea Mays
ctctttcgctccgctttctcaatcactgggcctgggggagatcgagacctagagcggaggacgggtgggcggcgctgagggccttaggcgaatggcggtagaggaggccgcggagagctgcggcagccacgccgcggccgctgcgtccggcggcggcgcggcggagctcgctacgtcctcgtcatcggccgccgcggcggtgcaggcgcggaagcagcagcagcagcagcgccataagctcgaggtgtacacagaggttctccggcgcctccacgacgccggcctgcccgacgcgcgggcgcccgggttcgacgacgagctctggaaccacttcaaccgcctccccgcccgatacgccatggatgtgaacgtggagagggcggaggacgtgctcacgcacaagcggcttctggagcaggccaaggatccggctcagcgcccggctttcgcggtgcgggccgtgcaggtatctccaattcttgatgggaatcagactgatgctgattcgaatactgcaggggaggaagtcgcttcaagactgttgaacaggcagcagagcatacatcctcctcctgcctttggttcttctacaaatcttgaggcccttgctcttgaagctagcaagtctcatcaagatcacgatagcacctctgataattgtcgatccctgtacaggcccatgcatgaaatcaccttttcaaccattgacaagccaaaacttctcagtgagctgacatctctgcttggtgagcttggtctcaacattcaagaagcacatgcattttcaacaaatgatggctactcacttgatgtatttgttgttgttggttggcatgatgaggaaacagaggatttagtagaagcagtgcagaaggaaattggcaggattgaagagttgaaaacatgcagattgctgagatttcagcagctggccgtgttgagataccaacagatggtgctagtgaatgggaaattgatgtaaaactgctcaagtttgggaataaagtagcatcaggatcatatgttaccggggtacatattgcagtcaagatgttgctattaaagtgctgaaacctgagagaataaatgcagacatgcagcgtgaatttgcccaggaagtatatatcatgaggaaggtacgtcacaagaatgttgtgcaatttattggtgcttccactaaacccccaaatctatatatagtgacagaatttatgtccggtggaagtgtgtatgattacctccataaacataaaggtgttttcaaacttcctactttagttggagttgctatggatgtgtcaaaaggcatgagctacttacaccagaataatattattcatcgtgatttgaaaactgcgaaccttctgatggatgaaaatgggactgttaaagttgctgattttggtgtcgcacgtgttaaagctcaatctggagtcatgactgcagaaactggtacttaccgttggatggccccagaggtcatagagcataaaccctatgatcagaaggctgatgtttttagttttggaattttgatgtgggagctactcacagggaagattccttatgagtatctgactccactacaagcagctgttggcgtggtgcagaagggattacggcctacaattccgaaacatacttatgcaatgctttctgagcttcttcagaaatgttggcagcaagaccccgctcaaagaccagacttttccgaaatattagaaactcttcagagaatagcagaggaagtcggagacgagcacgaggggaagcacaaggacagaacactgggtggtttcttttcagctctgagggggcggagccattgagacacggttgaagacttgaaatgtacatggcctcggtccatcctggaaggatctgaactacaaccagctcctgttccccgcacatagcgacagtacacagaaatactgtacagacatgctgcagccggagttgactaagtggcaattttttagcggcagccatcgcttttcgcctatctgcttgttactcctgagttccatcacaatgagaggaagcttgggaactgtgcatcataaccagtctgatttctctaacagagtctaatcttgctgtagatgaaaataataagccagatccaggccgtggcatgattcttttaaggttccatcttttagcatattttcttctacgtgccgtcattcttttctggacatgctccacccctctgttgtggaacaacgcggcaagcttgagttagctgagcaaggcacctgcatctgcatgggatctgctcggaacaaagttgggttatcttgtgctaagcttttgttccccagtttccgtgactacaaatgatatcaatttattttaaagaaatggaaaaaacatgtgtatagtctgcatctgacagttcgacactaacgattcgaagcgtggcaccagaaagaggtaggtttgtgatgccaaacttgctgatttttaaaatttattttttgggtcaaaatatcatgtttacattcctggagata

SEQ ID NO: 69750 - DNA, 2469 bp, Zea Mays
ctctttcgctccgctttctcaatcactgggcctgggggagatcgagacctagagcggaggacgggtgggcggcgctgagggccttaggcgaatggcggtagaggaggccgcggagagctgcggcagccacgccgcggccgctgcgtccggcggcggcgcggcggagctcgctacgtcctcgtcatcggccgccgcggcggtgcaggcgcggaagcagcagcagcagcagcgccataagctcgaggtgtacacagaggttctccggcgcctccacgacgccggcctgcccgacgcgcgggcgcccgggttcgacgacgagctctggaaccacttcaaccgcctccccgcccgatacgccatggatgtgaacgtggagagggcggaggacgtgctcacgcacaagcggcttctggagcaggccaaggatccggctcagcgcccggctttcgcggtgcgggccgtgcaggtatctccaattcttgatgggaatcagactgatgctgattcgaatactgcaggggaggaagtcgcttcaagactgttgaacaggcagcagagcatacatcctcctcctgcctttggttcttctacaaatcttgaggcccttgctcttgaagctagcaagtctcatcaagatcacgatagcacctctgataattgtcgatccctgtacaggcccatgcatgaaatcaccttttcaaccattgacaagccaaaacttctcagtgagctgacatctctgcttggtgagcttggtctcaacattcaagaagcacatgcattttcaacaaatgatggctactcacttgatgtatttgttgttgttggttggcatgatgaggaaacagaggatttagtagaagcagtgcagaaggaaattggcaggattgaagagttgaaaacatgcagattgctgagatttcagcagctggccgtgttgagataccaacagatggtgctagtgaatgggaaattgatgtaaaactgctcaagtttgggaataaagtagcatcaggatcatatggtgatctttaccggggtacatattgcagtcaagatgttgctattaaagtgctgaaacctgagagaataaatgcagacatgcagcgtgaatttgcccaggaagtatatatcatgaggaaggtacgtcacaagaatgttgtgcaatttattggtgcttccactaaacccccaaatctatatatagtgacagaatttatgtccggtggaagtgtgtatgattacctccataaacataaaggtgttttcaaacttcctactttagttggagttgctatggatgtgtcaaaaggcatgagctacttacaccagaataatattattcatcgtgatttgaaaactgcgaaccttctgatggatgaaaatgggactgttaaagttgctgattttggtgtcgcacgtgttaaagctcaatctggagtcatgactgcagaaactggtacttaccgttggatggccccagaggtcatagagcataaaccctatgatcagaaggctgatgtttttagttttggaattttgatgtgggagctactcacagggaagattccttatgagtatctgactccactacaagcagctgttggcgtggtgcagaagaaatgttggcagcaagaccccgctcaaagaccagacttttccgaaatattagaaactcttcagagaatagcagaggaagtcggagacgagcacgaggggaagcacaaggacagaacactgggtggtttcttttcagctctgagggggcggagccattgagacacggttgaagacttgaaatgtacatggcctcggtccatcctggaaggatctgaactacaaccagctcctgttccccgcacatagcgacagtacacagaaatactgtacagacatgctgcagccggagttgactaagtggcaattttttagcggcagccatcgcttttcgcctatctgcttgttactcctgagttccatcacaatgagaggaagcttgggaactgtgcatcataaccagtctgatttctctaacagagtctaatcttgctgtagatgaaaataataagccagatccaggccgtggcatgattcttttaaggttccatcttttagcatattttcttctacgtgccgtcattcttttctggacatgctccacccctctgttgtggaacaacgcggcaagcttgagttagctgagcaaggcacctgcatctgcatgggatctgctcggaacaaagttgggttatcttgtgctaagcttttgttccccagtttccgtgactacaaatgatatcaatttattttaaagaaatggaaaaaacatgtgtatagtctgcatctgacagttcgacactaacgattcgaagcgtggcaccagaaagaggtaggtttgtgatgccaaacttgctgatttttaaaatttattttttgggtcaaaatatcatgtttacattcctggagata

SEQ ID NO: 69751 - DNA, 2517 bp, Zea Mays
cctttcctcacctccataaaaaaactcggccacggttatttatctctttcgctccgctttctcaatcactgggcctgggggagatcgagacctagagcggaggacgggtgggcggcgctgagggccttaggcgaatggcggtagaggaggccgcggagagctgcggcagccacgccgcggccgctgcgtccggcggcggcgcggcggagctcgctacgtcctcgtcatcggccgccgcggcggtgcaggcgcggaagcagcagcagcagcagcgccataagctcgaggtgtacacagaggttctccggcgcctccacgacgccggcctgcccgacgcgcgggcgcccgggttcgacgacgagctctggaaccacttcaaccgcctccccgcccgatacgccatggatgtgaacgtggagagggcggaggacgtgctcacgcacaagcggcttctggagcaggccaaggatccggctcagcgcccggctttcgcggtgcgggccgtgcaggggaggaagtcgcttcaagactgttgaacaggcagcagagcatacatcctcctcctgcctttggttcttctacaaatcttgaggcccttgctcttgaagctagcaagtctcatcaagatcacgatagcacctctgataattgtcgatccctgtacaggcccatgcatgaaatcaccttttcaaccattgacaagccaaaacttctcagtgagctgacatctctgcttggtgagcttggtctcaacattcaagaagcacatgcattttcaacaaatgatggctactcacttgatgtatttgttgttgttggttggcatgatgaggaaacagaggatttagtagaagcagtgcagaaggaaattggcaggattgaagagttgaaaacatgcagattgctgagatttcagcagctggccgtgttgagataccaacagatggtgctagtgaatgggaaattgatgtaaaactgctcaagtttgggaataaagtagcatcaggatcatatggtgatctttaccggggtacatattgcagtcaagatgttgctattaaagtgctgaaacctgagagaataaatgcagacatgcagcgtgaatttgcccaggaagtatatatcatgaggaaggtacgtcacaagaatgttgtgcaatttattggtgcttccactaaacccccaaatctatatatagtgacagaatttatgtccggtggaagtgtgtatgattacctccataaacataaaggtgttttcaaacttcctactttagttggagttgctatggatgtgtcaaaaggcatgagctacttacaccagaataatattattcatcgtgatttgaaaactgcgaaccttctgatggatgaaaatgggactgttaaagttgctgattttggtgtcgcacgtgttaaagctcaatctggagtcatgactgcagaaactggtacttaccgttggatggccccagaggtcatagagcataaaccctatgatcagaaggctgatgtttttagttttggaattttgatgtgggagctactcacagggaagattccttatgagtatctgactccactacaagcagctgttggcgtggtgcagaagggattacggcctacaattccgaaacatacttatgcaatgctttctgagcttcttcagaaatgttggcagcaagaccccgctcaaagaccagacttttccgaaatattagaaactcttcagagaatagcagaggaagtcggagacgagcacgaggggaagcacaaggacagaacactgggtggtttcttttcagctctgagggggcggagccattgagacacggttgaagacttgaaatgtacatggcctcggtccatcctggaaggatctgaactacaaccagctcctgttccccgcacatagcgacagtacacagaaatactgtacagacatgctgcagccggagttgactaagtggcaattttttagcggcagccatcgcttttcgcctatctgcttgttactcctgagttccatcacaatgagaggaagcttgggaactgtgcatcataaccagtctgatttctctaacagagtctaatcttgctgtagatgaaaataataagccagatccaggccgtggcatgattcttttaaggttccatcttttagcatattttcttctacgtgccgtcattcttttctggacatgctccacccctctgttgtggaacaacgcggcaagcttgagttagctgagcaaggcacctgcatctgcatgggatctgctcggaacaaagttgggttatcttgtgctaagcttttgttccccagtttccgtgactacaaatgatatcaatttattttaaagaaatggaaaaaacatgtgtatagtctgcatctgacagttcgacactaacgattcgaagcgtggcaccagaaagaggtaggtttgtgatgccaaacttgctgatttttaaaatttattttttgggtcaaaatatcatgtttacattcctggagata

SEQ ID NO: 69752 - DNA, 2644 bp, Zea Mays
gcggtagtcgccgcaaaacggaaatctttcgcctccgccccgctggccgctgccgtttcattcactttccaatttcctttcctcacctccataaaaaaactcggccacggttatttatctctttcgctccgctttctcaatcactgggcctgggggagatcgagacctagagcggaggacgggtgggcggcgctgagggccttaggcgaatggcggtagaggaggccgcggagagctgcggcagccacgccgcggccgctgcgtccggcggcggcgcggcggagctcgctacgtcctcgtcatcggccgccgcggcggtgcaggcgcggaagcagcagcagcagcagcgccataagctcgaggtgtacacagaggttctccggcgcctccacgacgccggcctgcccgacgcgcgggcgcccgggttcgacgacgagctctggaaccacttcaaccgcctccccgcccgatacgccatggatgtgaacgtggagagggcggaggacgtgctcacgcacaagcggcttctggagcaggccaaggatccggctcagcgcccggctttcgcggtgcgggccgtgcaggtatctccaattcttgatgggaatcagactgatgctgattcgaatactgcaggggaggaagtcgcttcaagactgttgaacaggcagcagagcatacatcctcctcctgcctttggttcttctacaaatcttgaggcccttgctcttgaagctagcaagtctcatcaagatcacgatagcacctctgataattgtcgatccctgtacaggcccatgcatgaaatcaccttttcaaccattgacaagccaaaacttctcagtgagctgacatctctgcttggtgagcttggtctcaacattcaagaagcacatgcattttcaacaaatgatggctactcacttgatgtatttgttgttgttggttggcatgatgaggaaacagaggatttagtagaagcagtgcagaaggaaattggcaggattgaagagttgaaaacatgcagattgctgagatttcagcagctggccgtgttgagataccaacagatggtgctagtgaatgggaaattgatgtaaaactgctcaagtttgggaataaagtagcatcaggatcatatggtgatctttaccggggtacatattgcagtcaagatgttgctattaaagtgctgaaacctgagagaataaatgcagacatgcagcgtgaatttgcccaggaagtatatatcatgaggaaggtacgtcacaagaatgttgtgcaatttattggtgcttccactaaacccccaaatctatatatagtgacagaatttatgtccggtggaagtgtgtatgattacctccataaacataaaggtgttttcaaacttcctactttagttggagttgctatggatgtgtcaaaaggcatgagctacttacaccagaataatattattcatcgtgatttgaaaactgcgaaccttctgatggatgaaaatgggactgttaaagttgctgattttggtgtcgcacgtgttaaagctcaatctggagtcatgactgcagaaactggtacttaccgttggatggccccagaggtcatagagcataaaccctatgatcagaaggctgatgtttttagttttggaattttgatgtgggagctactcacagggaagattccttatgagtatctgactccactacaagcagctgttggcgtggtgcagaagggattacggcctacaattccgaaacatacttatgcaatgctttctgagcttcttcagaaatgttggcagcaagaccccgctcaaagaccagacttttccgaaatattagaaactcttcagagaatagcagaggaagtcggagacgagcacgaggggaagcacaaggacagaacactgggtggtttcttttcagctctgagggggcggagccattgagacacggttgaagacttgaaatgtacatggcctcggtccatcctggaaggatctgaactacaaccagctcctgttccccgcacatagcgacagtacacagaaatactgtacagacatgctgcagccggagttgactaagtggcaattttttagcggcagccatcgcttttcgcctatctgcttgttactcctgagttccatcacaatgagaggaagcttgggaactgtgcatcataaccagtctgatttctctaacagagtctaatcttgctgtagatgaaaataataagccagatccaggccgtggcatgattcttttaaggttccatcttttagcatattttcttctacgtgccgtcattcttttctggacatgctccacccctctgttgtggaacaacgcggcaagcttgagttagctgagcaaggcacctgcatctgcatgggatctgctcggaacaaagttgggttatcttgtgctaagcttttgttccccagtttccgtgactacaaatgatatcaatttattttaaagaaatggaaaaaacatgtgtatagtctgcatctgacagttcgacactaacgattcgaagcgtggcaccagaaagaggtaggtttgtgatgccaaacttgctgatttttaaaatttattttttgggtcaaaatatcatgtttacattcctggagata

SEQ ID NO: 69753 - DNA, 2681 bp, Zea Mays
agaaaataatatagtggaccgtgagagttgagccaacagtgttcggctggcggtagtcgccgcaaaacggaaatctttcgcctccgccccgctggccgctgccgtttcattcactttccaatttcctttcctcacctccataaaaaaactcggccacggttatttatctctttcgctccgctttctcaatcactgggcctgggggagatcgagacctagagcggaggacgggtgggcggcgctgagggccttaggcgaatggcggtagaggaggccgcggagagctgcggcagccacgccgcggccgctgcgtccggcggcggcgcggcggagctcgctacgtcctcgtcatcggccgccgcggcggtgcaggcgcggaagcagcagcagcagcagcgccataagctcgaggtgtacacagaggttctccggcgcctccacgacgccggcctgcccgacgcgcgggcgcccgggttcgacgacgagctctggaaccacttcaaccgcctccccgcccgatacgccatggatgtgaacgtggagagggcggaggacgtgctcacgcacaagcggcttctggagcaggccaaggatccggctcagcgcccggctttcgcggtgcgggccgtgcaggggaggaagtcgcttcaagactgttgaacaggcagcagagcatacatcctcctcctgcctttggttcttctacaaatcttgaggcccttgctcttgaagctagcaagtctcatcaagatcacgatagcacctctgataattgtcgatccctgtacaggcccatgcatgaaatcaccttttcaaccattgacaagccaaaacttctcagtgagctgacatctctgcttggtgagcttggtctcaacattcaagaagcacatgcattttcaacaaatgatggctactcacttgatgtatttgttgttgttggttggcatgatgaggaaacagaggatttagtagaagcagtgcagaaggaaattggcaggattgaagagacacaagcatggtcttcatctcattcatggtctactccagttgaaaacatgcagattgctgagatttcagcagctggccgtgttgagataccaacagatggtgctagtgaatgggaaattgatgtaaaactgctcaagtttgggaataaagtagcatcaggatcatatggtgatctttaccggggtacatattgcagtcaagatgttgctattaaagtgctgaaacctgagagaataaatgcagacatgcagcgtgaatttgcccaggaagtatatatcatgaggaaggtacgtcacaagaatgttgtgcaatttattggtgcttccactaaacccccaaatctatatatagtgacagaatttatgtccggtggaagtgtgtatgattacctccataaacataaaggtgttttcaaacttcctactttagttggagttgctatggatgtgtcaaaaggcatgagctacttacaccagaataatattattcatcgtgatttgaaaactgcgaaccttctgatggatgaaaatgggactgttaaagttgctgattttggtgtcgcacgtgttaaagctcaatctggagtcatgactgcagaaactggtacttaccgttggatggccccagaggtcatagagcataaaccctatgatcagaaggctgatgtttttagttttggaattttgatgtgggagctactcacagggaagattccttatgagtatctgactccactacaagcagctgttggcgtggtgcagaagggattacggcctacaattccgaaacatacttatgcaatgctttctgagcttcttcagaaatgttggcagcaagaccccgctcaaagaccagacttttccgaaatattagaaactcttcagagaatagcagaggaagtcggagacgagcacgaggggaagcacaaggacagaacactgggtggtttcttttcagctctgagggggcggagccattgagacacggttgaagacttgaaatgtacatggcctcggtccatcctggaaggatctgaactacaaccagctcctgttccccgcacatagcgacagtacacagaaatactgtacagacatgctgcagccggagttgactaagtggcaattttttagcggcagccatcgcttttcgcctatctgcttgttactcctgagttccatcacaatgagaggaagcttgggaactgtgcatcataaccagtctgatttctctaacagagtctaatcttgctgtagatgaaaataataagccagatccaggccgtggcatgattcttttaaggttccatcttttagcatattttcttctacgtgccgtcattcttttctggacatgctccacccctctgttgtggaacaacgcggcaagcttgagttagctgagcaaggcacctgcatctgcatgggatctgctcggaacaaagttgggttatcttgtgctaagcttttgttccccagtttccgtgactacaaatgatatcaatttattttaaagaaatggaaaaaacatgtgtatagtctgcatctgacagttcgacactaacgattcgaagcgtggcaccagaaagaggtaggtttgtgatgccaaacttgctgatttttaaaatttattttttgggtcaaaatatcatgtttacattcctggagata

SEQ ID NO: 69754 - DNA, 1068 bp, Zea Mays
aacatatgcaatttgtatgaaaacttttatatacctagggggtgaagcctttttagggggtggtgatggcgaacaaactttttttgaaggtgaaccctttttaggggggggtgaaggtgatcgtctttccgtgctccaggcgaactgggcatacaacatagttttcagatcgtctgatcgcctgatcgaagccactgggcgatcaggcgattagtcgcgattaggcatcgatcaaggcgattagtcgcccctgatcgaccctaatcgtccccctggtcgtcctgtgtattccaggacatatatgatatatatagagacatatagtcatatataacactatatataaatatataattatatagtatagaggactgcgggaagatgacttgaacagcagcagcacaacgtccatcaccatgatgtccatgcatatctgcgacgtcaaacatcttaatagcagagaacaaagagtaaagaacaggcaaaagcagcacaacatccataccttcagaagagctgctcatctttggttggactgctcagctgctgtttttcgcgactaaaatggcggagaaggctgctgctgactgctcacgtctaaaatgggggagaaggctggtgctgctgactgctcacgtctaaaatggcttttggcctcccaaacagcatttaaaggactgctgactgctcacgtctacccaggctgtatctgaagggattgggcgtcctttggcctcccccagacatcatttaagcctaaaatggcttttggactatcaggcctatccgctgatggaccaacgcggtgattaatcgctataaatcgcgattaggcggacgataaggacgatcagctaccctgatcgaatcgttacaccttatcgagttctaacaaccgatcagaccgactaatcgcgactaatcacgattagtcggacgatatgtaatcagaggcatacaacattatccagaagtaaatgcacccaggataaagagaaccagcataagaaacattacaattcatgagaaaaataccaaacaaccatgttcaagtagaatgtacgtcat

SEQ ID NO: 69755 - DNA, 591 bp, Zea Mays
gtagcatgagtatgtgtacacaaactggtgggaactcaaggtgggtaaactctatggaatggtctggaaaggaagcttttgtgtcctcatccgagaagcccttcacagtcgacgggaaagaagctggcgttctaaagagccacggtcctttgagtttcttgaaggttcacgatgctggtcacatggtacctatggatcaaccgaaggctgctctggagatgctgaagaggtggacttctggaaacctttcggagccatcttcaagctcccagaggcttgattttacaatgtaacaaaacacacatgctgctcatgacatttcgagcatgtacctctggatgtttgtaggctcagaaaaggtcctggtcttaggctctgaaaacctcatctggcgaccatacgttatttaccttgtatgggcgctccgcttgctggtgagacacggtgttacgagttacgactcgatgaacatgtaataaagcttttcagagaattgctaggccaggcatagatctgaagtaccttttgtgatgacttgcgtcgatacgtatggaccgtacaattcatggtatgctactaaggctccgtttg

SEQ ID NO: 69756 - DNA, 827 bp, Zea Mays
cgtgtgttggacgtcattgtcggctacgacgagcttgacgctgaagccaccggagcagcgtccaagtacatcccacacgggggttacacgcagttcctgaggaccaacggactgaggggcaagaggatcggtgtccccgacgtattttttcaaggatacgacgatatgcaactggcggtctatgagaagcatctcgatacaatgaggcaacaaggcgccgtcgtgatcatggatcttgacatcgcaacaaatttcaccgatctgggtaaccaggagattctgctcatggctgcagagttcaagataagcatcaacgcttacttgtcgggcctactgtactctccagtccgctctctcgcacaagtcatagcgttcaacgaagcgcatcctgtagaggagaggctcaaagattttgggcagccggatctgatcgccgcggagaagaccaacggcatcggcacaagggagagagctgccatccggcggctgagggagatctccaccaatgggctggagaagctgatgaaggaacgccgcctggatgcgatcgtggcgcccaacagcgacgcctcctctgttctcgccgtcgggggctatccgggcatcgccgtgccggcggggtacgatgagcaaggagtccccttcgcgatctgcttcggtgggctccagggctacgagccgaggttgattgagatcgcttatgcgttcgagcaagctacaaaagtcagaagaccgcctactttcaagagataaagatagctaactagcatgatgacacgcagtagcacatgcaggatccaagcgaggcagcgcagtccgaaaacgcc

SEQ ID NO: 69757 - DNA, 1599 bp, Zea Mays
gattgtaaggtaaaaattgcattacaacaaccatgtatatcctcaccgacaggaaacatgtattaaatatatatataatatgtatatatggtatacatagtgtatccgtatgaatcatggaagcttgccccctttggggcgcctcgtgtgatgcatgcgagaccaaatggaaagcaacaaccggaagaaatgcaatgggtacgcgcgcgtacgtagacgagcgacgacacgagtttgctggcgatacgccaacgaccaacgcctcaaccaccggctcgcgcgggcgcctcgctcaccgcgagcagagagagcggcggcgggcgcgggcggtagtagggcagccacgcctagcgaccttttcatcaacaacgaaacaaagcacaaagcaacaaggacgacgacacagcacagcacacagcagacaggcgcgctcgctagcactcgggcgtgagcgagtggtccctgcggaagtcgttgcagtagtagtagaccatgtggccctgctgcgcccagcgcatggccgcgtactgccgcggcgtgagcccggcccccgcgggggacgccggcacgggcctgcacgcgggcggggcgctggcggagcagccggcgacgacgaagcggtcgaggcgcgcgacgaagggctggtagcggtagtcggcgcggtggcggccgtcgtcggtggcccagtcggaggcgtcccagatggagccgtagacccacatggggcggtccgggaaggtgagctcggtgcggcgctcgtagcggcggacgggcacgtcgtccacgaagaaggtgatggcgtcggggttccacaggatggcgtaggtgtggtaggccgccgtggggtcgaaccagaggtggaaccgcatctcccgccccacgatgcgcccgtcgccgctgccgcgcacgtacacgttcgtctgcagcgtgtagggctcccccgggatggtgcccaggaactccatgtcgatctcgtcgtggaaaccagggtgcgcctcgttgttggagagatagaaggcggtgttggtgccggcggtgtatccggcggggagcttgatgcgagtggagaagtagccgttcctgtacgcgtgcttcgacttgaaaccactccctgcatgcaaggtctttgtcagcaccaagaccacaaccaacaatgcaaggtccgaaatagtgcatcaatggtccacatggcccacatcacaggcacgggcacgggcacgaccagtcggccacaccacagcccacagccacaacgattttttttcccttttatactcctagatatcagtaaaaataacagaacaacaacataccgcaggtcttgtcgagccagatggtgagggcggaatggtcgccggagagcgtctggtgctgcgggccccacttgttggtgtacgctcggttgaacggcaccggcctgaacctggagctcgggtagtaccccggggaaggctgcgcgtcgccggaggaggcggccatcgccgccagcagcagcagtgccggcacgacgacggcggcgcgccgcgagatgcagcggcagcagctgctgctaggacgagcaggaggagccgccgcagccattgcttgctagctagctag

SEQ ID NO: 69758 - DNA, 1203 bp, Zea Mays
gaagatgctaacataattctctctggatgttttccccccaaatcaccagatgcttacagcttttaaaccacacaccacggtcacacacggcccacacatggcccagaatgttacaatgtactccacacagcccacactcgtccactgcatccgagctctcctcctgattgttaccctggttatcggttgtgacatctcggtacctgacattcccctcttcttgagatacagcttgccctcaagctgttgttcgcatcaccaccgggatcccaaatcatgacaaagaaatgttttgcaccttggtctgctagaaactggagtagcagccactttggacttcttgcatggtagcagcagaaggacgccatgcacaaatccaagcatgcaaactccataggtggaggccatggttgctttactcccctcacaagctttgcaaaaccaggaccaaaacgagcaatgcactcctccatcaaagccacttgttcctgctcccattggtactgcttcatttgatactcttcaagctccaacttagaatccacaacacggccatgcccatggaagtaatttgcaggctgccatccctggaagcaatttgcagtctcctcatcatgggtgatcaacaagccatccttcttaagcaggcgacagaagtcctatcattccacacaagcataaacactcggacaccttctatcagcacactcctcttgagcaactccccaaagcatcaaggttatccttccagcatctgtgcggctcatacttcttgccaccagtgagcggtatcctggaaacgaagttggccggcacatattgtctgtgctgcatttcatcaagcatcacctgggcatctacctcatcagtagtgaatgatacgccagctaattgaaaggtgcccgcactgcatgcacttggtagcagcaactgatctcttgacggtgaagcgttgcatgccctactgcagtcgaaatcgttggcagaggagcattcgacgtcgccacccacacggcttgccgcgccctccgaggaggcggaccggtgcctggtcaacgtttgcgggctgctgatgtcgtcctgtccagctggccacgacaatggaactcgccagatactcggaaggtcgtcgtcgttgatagagtcgctgccaccgtccacaagtggcccgctcggcagagagcagcggcctgatggtgcgag

SEQ ID NO: 69759 - DNA, 2655 bp, Zea Mays
atgtaaagttgcaactgaaatttcggtagggatgcaacaaagccagtggtaattttaccaccaagccttaccattttcgtgtacctccctgactgttgacgccatcagccatgatcgtgcacgaccacactccaaccaccaaggcaatcaaaatgtccttaatgtgggggcaaacggctcacatgccatatactaaacatccttgagacgccctatgtcagccgccgggctatgcattgttgttgttccgtggagttcacccacccaaatcaccaagggggacaacatacaagcccttctgttcttggcccttctcatcaccattctcgcccagttcatcgctcctccaggtcgtctgaaccaggcttggacgagcagcaacatcaagaacagcaatgagcgatggttcagggttcccgggcttccacagccacagctatgaccgaagctattcgcgcccgttgttccaggttgcctccttctccgacagtggagacgagcaggagaatcatgtgtcgtcaccacagatgtgcagccatagcacgagccgcacaatgccggcaaaaccagtagcgccgtcatgcctctcaccgtcggtgagcaggctgagcatgaagaaaacacagcaagttattattgttgagaagtcaatggaggaggaagagatggagctgatgaaggagaagtacacgaagttgctgcttggggaggacatgtcggggagcggcaaaggtgtctgcactgctgtggccatatccaattccatcaccaacctatatggtatctacccgtggaaattcatcatgtgttcatcctttaaactcactttgatataatgcaggattctcttcttttgttaactgcagcaacagtgtttgggacctgccacaggttggagccactgtcccctgagaagagatcaatgtggaacagggagatggattgcctcctctccatttgtgaatacattgttgaattctcacctactgtccaggccatgcctgatggaagcacacatgatgtgatggcaacctcaccaagatcagatatcctgatgaaccttcctgcactcgaaaaactagaaacaatgctcctcggtatattggatagctttcacaagccagagttctggtatgcagaccagaggaaccaatccttcaaagaaagcaagaaatcattccagcgaagtgaggataaatggtggttacctgagccatgtgtcccagactctgggctgtctgattgcatgcaccgtgaactgcagcagaaaagagaccaggcaagccagatccacaagatggccatggaaatcaacagcagtattctctctgaaatgcaagttccattatcatacttggagacacttccaaagagtgggagggtgggtgtaggagacaccatctaccggtatatgtcttcaggcgatcagttctctccagagcacctcctcaacttcctcagtttgagctcagaacatgatgcacttgagattgcagaccgtgttgaagctgctatgtacgtgtggcgaagaaaagcaagtgcaacacatgtggtgtccaaatgggagaatgttaccgagctgaatgctgatggagacaagaatctggtccttgccagtagggccagaagcttactcctgtgcttgaagcagaggttcccaggcctgtcacagactaccctggacacaagcaagattcagtacaacaaggtaatggctaacataaaacaagaaaggaaaaattcagattattccatgtttatctgcattttccttgttaccagaaaacgttcgtgatgaaatatatatatacacacacacacacactggttgatgcttatgcaaaaagaactaaatgtactaactgttttgataatcacatcagatcagaacgaaaatatacaggttctgcgttcaagaactataatgcaatataagtaacattcttgcatcttacctgcttacaggacattggacatgcaatactggagagctactcgagggtgctggaaagtttggctcataatatagtctcatggatagatgatattctcattgccgatgaaaatgtgaaaaaaggacacaaaatcaggatgcagaagcaggtgttcagccagatttctccacaacgctgaacacagaaaactaacatacaaatacatatatattatgttgcatagaatttctgtggtttgcctcattaactttttctggagtggtgtatgcttgctcatttgtttgagatagggctgtgtgttagatataatgatgtatgttacatatgtaaatcataatggaaatggatgagagaaagggttgcaaccagaaacttacagtttgattctgttgctgtttcatggaacatattctccataatctatacaataagcattttactttaactttggaatggcataccctgggagagttataatatcaagaaatgattctgttctggtatagacatggaacactggtctatgtttttatgaatcaaaatcagttcttacaatctcggtcctccagattgctgtgaacaacaaaattagataatatgtagctccaccataagaaaacatatacatctcccaattatgaaaaagtgtatttcaagaatcggttgatgcgaaaatcttacaattgcagtatctaaatat

SEQ ID NO: 69760 - DNA, 3920 bp, Zea Mays
cgcctccctcgaggaaggactggagcattaaaaactcaggcgatgccgcgggacgatcggatagggaagctacagcgaagaagacgcccctccaacttgccgcattgcgcacggcggtactcccaagatctgatccgagcaaggcgcccttcagtctttcaggaagcttaccagcttggtgccgtcaacggctcacagcttctgcctttctttggcggcatcgcccaagctcaaggtttgggttgggtgggcgagactgctgctgccttcaagaccccaaaagagaagatagtatttgaacacttcctagtgagttatgatggagatgattctgtctgagttcacaaaacatgttatcagctcacttgtcaatttagcaagtaatgaaatagccaaagttttgtgcatcagaaacgagattagcaaactggcaagaaaacttgagagtatgagagctatcattacagatgcagaacaggcagttgtgcaaaacgaaactactagggattggctgaagaggtcacgagaaattatttatgaggctgaagacataaatgaccgatataatattgaaaaggagaagttccaaatatcacagccgcaggaatgcaatccttcatcaatctttaagtgctgcagagatgttggtattgactgcatagtcgcaagtgatatacatgaactgcatcagaaacttgacagcatcattgaagagggtaagagactgcatgtacggccggcgagtgaggatcaaataagattagatcaaacaagatcatatcttgacattccacttctagggcctgatattgttggcatggaaaacgactgtgaaaatctcattgaactactaataaagggagatgatattccccctcaaaaaaagcgagatgatattcctattcgtcctttccttgctattataggaacaattggaattggcaagactactcttgctagaaaggtataccacaagacagaaacgttttttcagattagggtatgggttcatgtctccaaagacttgcggcatatgacaatgtggtcaggtgagagattgagtaaaggagatactgcagaccagctggaagagctgcgccaaatgttacgagacaataaatatctgctggtcattgatgatgtctggggagagaatgtttgggaagggttgctaaaggaacaagcgcattatggcagccttggcagtagagtccttataacaacccggaatgagcatgttgcgaggaggacaggagcagttcatattcaccatatgaagggtttgaatgaggatgatggttggtggctacttcgtacaatggctttccttgatgagagcactggaaacatgcaagatattggtaggcgaattgtgcaaaagtgcaatggtcttccaatggcaataaggaggattggatgccatctaagggaagtggaacttaaagaagatgactgggagagaatctactccagtgatttctgtggcctttcttcgacgataagaaatgctatcaataagagctaccttgagttgccatataatctgaaaaggtgctttctttattgctcattgtatccagagggatctgtgattgatcggcagtgtatcacccagcagtggattgcggaggggtttattgtgacccagcaggacgcatctgttgaaaaggaagctaaagaatgctatgacaaattgttgggtaggggccttcttttgcaagaaaatcgaacttatggtgcagagagaacgaagatgcctcatctcttcagatcatttgcacttctccagtcacaagatgaatactttattggcaatcctcaagacataggtgatgctttgaggccgtaccgcttaactattacaactggaggtgcagaggcgatcagaaattgtattagaaagttgaagagcttgaggacaataatcctgtgtgggagttcactaaatgacaggaccctggattctatttttcagaagtacacacatctaagagttctagatcttggaggagatacacagattgaccgtgttgcaaggagtttgggatccatgatgcaccttagatatcttagctttgcaaacacccaagttagtgagattccatctgacattgagaaacttaggatgttgcagttcttaattctaaaaaattgcactcgtcttaatgctctcccagaatcccttggccgcctaacaaacttgagaacacttgacatctcaggatgtggactaaatcgagtgaaatttggattctccatgatgaaagagctcagatgtctgcagggttttcttgtaagctcaagaggttcagaaaatagaaatggttggtcatttcaagagctggggtccttgtataagctgacaagcctcaagattcttaggctagagaaaacatcaattgtggaagatgcagtacaatcagcactacaggcaaaacatgatctcaaagagcttgaactatgctgcagcactgatgatggaacggcagaaattagtagagcagcaaaaattaaagatgtgtttgaagcactcaagccaggaccttctattgtctctctcaagctagaaaactattatggtcatggattcccatcttggctagatccattccatctccgagatctagagcagttgaccattgatggctgtttgcattgccaatatctcccatctctgggtgagatgaagaatctaaaattcctagcaataaatggttccaatttgtcaactcacattggacatgaaattcgtgggacgctagatgatggggtggcatttccgaagctggagcagctggttatcagtaagatgagcaacctgaagtcatggcagggcctcaaagaaatagatatgccttcactcatgaatttcaggatcattggatgccccaagctggactcacttccttcctggctcaagcattgtacggcattgagaagtttgcatatagatcatgctgacaacctggaatcaattgagaacatacctgcacttaaagaacttgaagtttgtgagaacagcaagctgaaggtgatctcgaaccttagaagacttgaagatctgaaagtggtggcttgcttgcttttggatgttgtgcaggatgtcccctcattgtgcaccgtgcattcaaatgaaaagaattcaaccaagcttccgcagtggctacagccagaaaaacctttcatgctcaggagattggagattgttggaactgaggagctacttgataactgctcctctgcaacggccccatactggcatattatccaaaatgctgatcacgtatatgcaaatctgccagatggctccttctacttctcatatgccaaaagcagtagctacttccacagaagcgcaaggagccttgcacggtcccctttactgagcccagctagcttcagtgtgccgattcttccacaagatgaagtagtttcgactgatgaaatcagaaacatcagcgagccaattggtcaatcctcaagtcggtcatggatgaggatacttttcacagttctccttcttcttgttgctcgtatcttttcattgtcaagcgagtattgatcacggatgagttctgtgtttgggcaccctaaatgttgattactatgctattgccattctgaattctgtcgtggcttgtttgttggatcataaaattcatttactgcatctttcttaactgttttattcaattttaactagaaagagatttacaatctccttcgatccacccctaagactatctccagtagactatgaaaactaggggacgaaaaataggggacgctaactgtaaatgacactgtttgtagagataagtttaaaataggagataagataaaagattggatagaggatctactggagatagcctaatcgaataagcactaagagttgcaaaaaaaatgcgctctaatat

SEQ ID NO: 69761 - DNA, 616 bp, Zea Mays
gaggaaggactggagcattaaaaactcaggcgatgccgcgggacgatcggatagggaagctacagcgaagaagacgcccctccaacttgccgcattgcgcacggcggtactcccaagatctgatccgagcaaggcgcccttcagtctttcaggaagcttaccagcttggtgccgtcaacggctcacagcttctgcctttctttggcggcatcgcccaagctcaaggtttgggttgggtgggcgagactgctgctgccttcaagaccccaaaagagaagatagtatttgaacacttcctagtgagttatgatggagatgattctgtctgagttcacaaaacatgttatcagctcacttgtcaatttagcaagtaatgaaatagccaaagttttgtgcatcagaaacgagattagcaaactggcaagaaaacttgagagtatgagagctatcattacagatgcagaacaggcagttgtgcaaaacgaaactactagggattggctgaagaggtcacgagaaattatttatgaggctgaagacataaatgaccgatataatattgaaaaggagaagttccaaatatcacagccgcagagcgctcagagatgtggttgag

SEQ ID NO: 69762 - DNA, 3622 bp, Zea Mays
gttcacactcacgccgtcacgcgctcgcgctcggctcgttctcctctctttccggctaaattgtaaacgtccaacacacggcaccacccagcagcgacgaccgcaccaaacagataaacgttttgcagcgaccccttgttttgctctccgtcagtttgctggccagcaagcggccttgggattggattggagctctcatcagctcctatcttatcaccagagccagacagacagtcatcgtctccgatccgatccatctccgtcttcgtcctcctcgctcgacaacccaccaaggagcaagagaagaagatcgacgacgacgacggctgccctctgcgttcctcaagaataatactccgttgcgtcccgtcccttccgtgctccaagaaagatccggctgcgggccacacgatgagcaatcttaagcttggcgtcgaggttaccagcgctcacgatctcctcccgaaagagcagggcacggcgaaccctttcgtggaggtcgagttcgacggccagaagtcccgcacggccatcagggacagggacctcaaccctgtctggaacgagcagctctacttcaacgtgtctgacccgtcccgcctcccggagctgcacctcgaggcctacgtgtaccacgcgaaccgtgccgacaactccaagtcctgcctgggcaaggttcgcatatcgggcacgtccttcgtcagccagcctgatgccgaggccctgcactaccccctggagaagcgcacgatcttgtcgcgcgcgcgcggcgagcttgggctaagagtcttcctcacggacgatccatcagtgagcgtgtctgctgctaccccaggaggtcaccaccaccaggagttcgacatgctaagcacgcctaccactgctgcacaggagcagcaggcagcagcagcagccagctccgttccaaaccctttccaagagaccagagcaaacccagtgagacaggtgcagcacttgccaagggaacagcagcgtcctgcacagccatacccataccacgccgccgatggaggttcgtactacggagaccagcagcagagaagcttctccgcggtcgcgaacaaagccgcagccccagcgcctcaggttcaggtatcaaggatgtacgctccaggtccacagcagcagcccatagacttccagctgaaggagacaagcccgacgctgggtggtggccgtgttatcggcggccgggtgtaccccggcgagaaggccggggcgtacgaccttgtggagaagatgcagtacctcttcgtgcgcgtggtcaaggcccgcgacctgcccaacatggacatcaccggaagcctggatccttacgtggaggtgcgccatgggaactacaagatgaaaaccaagtacttcgagaagaaccagaggcccgagtgggacgaggtcttcgcgttccccaaggaggtcatgcagtcggcgacgctcgaggtcgtcgtcaaggacaaggacgtcatccgggacgactacgtcggccgagtgagcgttgacctgagcgaggtccccctgagggtgcccccggacagtccgctggcaccggagtggtaccgtctcgtgggcaaggacggcatgagggacagaggggagctgatgctcgcggtctggtacggcacccaggcagacgagtgcttcccgagcgccatccatgcggggtcaacgccggtggagtcccatctccacagccacatccgcgggaaggtctaccctgcgccgaggatgtggtacgtcagggtcaacgtgctagaggcgcacgacgtatacccgatggcggagaaccgcgtgcctgatgttctggtcaaggtgaggctgggccatcagctgctcaacacgaggcaggttcgctcgccgacgagaaacttcatgtggaacgacgagctcatgttcgtcgcggcagagcctttcgaggacgacctggtcgtgtcggtagaggaccgtgtggcacagaacaaagacgaggtgatcggtgaagctgtcataccactcgccaggcttccgaggcgggctgaccacaagccggtgccgccgcagtgggttgatctcaggaggccaggactgatcgacgatgtggaccagctgctcaagaagaaggaagacaagttctatgcgaaggtaagcctccgtgtctgcctcgaaggcggctaccatgtgctcgacgagtccacacagtactgcagtgatctccgtccgacgatgaagcagctgtggaagccacccatcggcatgcttgaggttggcattttaagcgccaacggccttaacccaacgaaacccagaaacgaccgtgggtcctgtgatgcgtactgtgttgccaagtatggttcaaaatgggtccggacgcgcacgatagttgacagcctgagccctcggttcaatgagcagtacacgtgggaagtcttcgatcacggaaccgtgctcaccattggtctgtttgacaactgtcacataagtggagacaacggctcctctgcaggccacatggataaacccatcgggaaagtcaggatccggctttcgacgcttgagacggggcgtgtgtacacgcactcgtatccgttgctcgtcctcggcccgtcaggagtcaagaagatgggcgagctccatctcgccatcaggttcacagccgcgtcccttatcaatgtgctcttcacatactctaggcccctcttgcccaagatgcattacgcgcagccgctgtcgatagttcagcaggagatgctgcgccaccaggctgtgcagcttgtcgcgcagcgcctggggcgcatggagccaccagttcgcaaggaggtcgttgagttcatgtcagatgctcgctcccacctgtggagcatgcggcggagcaaggctaacttcttccgtctcatgcaagtcttctcaggggtcatcgctgcgggcaagtggtttggggatgtttgccagtggaagaaccctgtcaccacagtgctggtccatgtgctctttgtcatgcttgtgttctatccagaccttatcctgccaacagtcttcctctacatgttcttgatagggctgtggaactaccggttccggccacgcttcccaccacacatgaacacaaggatctcttacgctgatgttgcaaacccagatgagcttgatgaggaattcgacacattcccaacctccaagagcccagatctcattcggatgaggtacgacaggttacggcatgttgctgggaggatacagacagttgttggggacattgccactcagggagagaggctacagtcattgctcagctggagggacccaagggcaacagctatgttcctaatattttgcttgattactgccattatactatatgtgacaccattccaagcgatcgcactctgccttgggttcttctcgatgaggcatcctcggtttcgccacaaggtgccatcagcaccagcaaacttcttcaggaggctacctgtttctgtcactcatatatcgttgtataatagccttatactttcgtttccccaaagctggtgcacgtgattattggaacgggtgaagaccagagagcggtggtcattgggaaaccgtgccgcagcgacgttctccagtgacgagggcgttgttccggcta

SEQ ID NO: 69763 - DNA, 998 bp, Zea Mays
gttcacactcacgccgtcacgcgctcgcgctcggctcgttctcctctctttccggctaaattgtaaacgtccaacacacggcaccacccagcagcgacgaccgcaccaaacagataaacgttttgcagcgaccccttgttttgctctccgtcagtttgctggccagcaagcggccttgggattggattggagctctcatcagctcctatcttatcaccagagccagacagacagtcatcgtctccgatccgatccatctccgtcttcgtcctcctcgctcgacaacccaccaaggagcaagagaagaagatcgacgacgacgacggctgccctctgcgttcctcaagggctgtggaactaccggttccggccacgcttcccaccacacatgaacacaaggatctcttacgctgatgttgcaaacccagatgagcttgatgaggaattcgacacattcccaacctccaagagcccagatctcattcggatgaggtacgacaggttacggcatgttgctgggaggatacagacagttgttggggacattgccactcagggagagaggctacagtcattgctcagctggagggacccaagggcaacagctatgttcctaatattttgcttgattactgccattatactatatgtgacaccattccaagcgatcgcactctgccttgggttcttctcgatgaggcatcctcggtttcgccacaaggtgccatcagcaccagcaaacttcttcaggaggctacctgcaaagacggattctttgctgtaaagttccttggaagacagctgttaacaatgtctaatgtacctctttgttgtacctgtttctgtcactcatatatcgttgtataatagccttatactttcgtttccccaaagctggtgcacgtgattattggaacgggtgaagaccagagagcggtggtcattgggaaaccgtgccgcagcgacgttctccagtgacgagggcgttgttccggcta

SEQ ID NO: 69764 - DNA, 1000 bp, Zea Mays
gttcacactcacgccgtcacgcgctcgcgctcggctcgttctcctctctttccggctaaattgtaaacgtccaacacacggcaccacccagcagcgacgaccgcaccaaacagataaacgttttgcagcgaccccttgttttgctctccgtcagtttgctggccagcaagcggccttgggattggattggagctctcatcagctcctatcttatcaccagagccagacagacagtcatcgtctccgatccgatccatctccgtcttcgtcctcctcgctcgacaacccaccaaggagcaagagaagaagatcgacgacgacgacggctgccctctgcgttcctcaagatgagcttgatgaggaattcgacacattcccaacctccaagagcccagatctcattcggatgaggtacgacaggttacggcatgttgctgggaggatacagacagttgttggggacattgccactcagggagagaggctacagtcattgctcagctggagggacccaagggcaacagctatgttcctaatattttgcttgattactgccattatactatatgtgacaccattccaagcgatcgcactctgccttgggttcttctcgatgaggcatcctcggtttcgccacaaggtgccatcagcaccagcaaacttcttcaggaggctacctgcaaagacggattctttgctgtaaagttccttggaagacagctgttaacaatgtctaatgtacctctttgttgtacctgtttctgtcactcatatatcgttgtataatagccttatactttcgtttcctgctttcagaaattaagaagacattgaaacttctgtatggcatgaaatgtatgtaaggtgcttgcttcaacaataatttcttcaattagtcaagtttgtcatggtgaaagactactgactttggtaaccagatatatacttacagttacgaagctgagacttcgaatatcatctcccacattagtttcaaagt

SEQ ID NO: 69765 - DNA, 3124 bp, Zea Mays
tggatccacttccctccccacgtgttttttgattgttcctccccatgttcctcgcgttcccgtgaggccgtgacgcccccctcggcctcgcctcgccatcgctcgcggcatcgccgcctgccccctttcccccacgcgaataaagcgccggaagcgcgccccccaagcaaagtcctccggcgctcaggatcgggagccaccccctagggttagggctccgttttgcctcgttccggcgtcgaccgatgcgcggcgcatggcgacggtgaactgcctctacgtcgcggccgcctccacggcggtaagcaccgctgctctgcagtggtgggcgtcctcgctcctcgacggcgacgctggggccggcggggatggagactggcttggagccgtgctgcggtcaagggtcaccgtcgcgctcctggcgaatctggcggcccacgtgttcgtcgttgtcatcctcgcgctcaagactatattttttgttcagctaacttctgtagagaccagaaaagtgttggagcacatcattaactatgtacttcacaagggaacttttctcccgctggctgtgcctccaacttctcagcaaattatcctttggtcaacttggttggtcattctttgttcactgaagatgtttcaatcattggccagagaacgtctagagcagctcaatgcttctccctcagcgactccttcaaaatattttcgtgtgtactctgcattgcttctggttttatcagctgatctactttggatgtggctcagtgtagggttctgcagatcctgtaattccaagttgttttggctcctgttctttgagccacttagtattgcctttgatacgctgcaggtaattaaatcagggctgatcgaaatgtcactcattttgagtcctttccaatggccatttggcctggaatctttattttggttaatactagctgtctgttacacctgttgtatggatcttaaatatcgctacattctgaaacactatatgtggacctttttgtcattcacaattaattatctctaaagtaaatgcaaaacattcaacagatcatcaagtcatagagattcatattataagccctatgaatacagctgtgcatggttgatcacatcctacacatagcaacacagataaaaaaacaatgcacataaaaatcccaaatggtggagcttgtcactcaaatattggatccctaggtttagctagggccctgaatgtataggttacagtcctaccagttcttttggcttttttggcttctctttggcagcttttgctgctttgtaatcctcactattcttctctttatctataagatgtgcagttctcctgcgtgttcgataaataaatcttcataagttgtaatgataaactgttaatttttaaaactgccatgaaagtttgtgtgcatactgtgcgaagctcagtacttccttagtccttcatgacttatctcacagcgatttctgttgtcagtctatcatggtgcatgggtttcagttatttgacatctggcaacgacatctaatggaaagtggtgcggactttcttgatttccagaaatcttataagcaagcagcaggatctttttctgaatggaggggcaagcttactagggactttggttttgctattgatttgataagcatgttgatgtcatttggtcattactcgatgatcttttggcttcgtggtatggcgtttcatctggttgatgcagttctcttatggaacttgcgtgctcttatagtttcctttttgaagaggattaaaacttacatcaaattacggaaggcacttagttcactcgacggagcacttccagatgctacttatgatgaaatttgtgcatatgatgatgagtgtgccatctgcaggggaccgatgggtcgagctaaaaagttgtcctgcaaccatctatttcatctagcttgtttacgatcatggttggatcaaggattaatggaaggttactcctgcccaacttgtcggagaccgctcgtattgtcatctgaagggcaaacaaggtctccgattgtggaggcagcaaatgttcagcgaatcgcagaacagcttactatggggatgaatcagcagagagtttctggtaatgaacatcctgttgaacagcagaacccttcagatgctgtttggaggggtgctggtctggatgctagctggattccaccgtggtcaagccctgtgatagataatcccagttcctctagtgcagtgaggtcagtaggtctttctggagttcagatgatgatgaggcagttggcttctgtgaccgacagttatgggcatgctgatggtacctggaacctatggcccgagcccatggcagggtcctctcttgttccatccacttcctcgatggtgcctggtagtgcatctgcttccggattgcggctccgtggtagtgcaggcacaggcaatggaagtctttcagaggtactcactatggtagatagggtgcgggaagttctacctcatattcctgacgagctaattatagaggatttgatgaggacaaacaacataaacgcgactgtgaataatcttctgctgatgcaatagtagatacgtcaatacaacatataagtatgacgtttactggctgtaaaagcttataagaaaagtatgtgtatagttaaaggcgagcctgggtgtaacaacactcttcgatcctgtaataaaatccttttctctctctttatttttgtccgcagggatttgtttgtatagtaaccatagctgtataattatcatactcggtatgctataggttagtgtatttagaaaagatcggaataaaatttgttttgggactaaatatcatgcgtctggaaagcacttgtcgacggtacgcatcatcttcaggcttctatttgggcacgcggagttctaacctgcagctatatgttgaacatttgattgaagggaaaatagtgtgtttccaatgcaatgcaaagctatctgttgtgcagtagtaatatgttctgttggtacttgaattgcatgaagtctggtgcggagtttgaaaaaggatctcctggaatatagagtatatatatgcgagcgttgggactatctatttgattgtag

SEQ ID NO: 69766 - DNA, 2460 bp, Zea Mays
tggatccacttccctccccacgtgttttttgattgttcctccccatgttcctcgcgttcccgtgaggccgtgacgcccccctcggcctcgcctcgccatcgctcgcggcatcgccgcctgccccctttcccccacgcgaataaagcgccggaagcgcgccccccaagcaaagtcctccggcgctcaggatcgggagccaccccctagggttagggctccgttttgcctcgttccggcgtcgaccgatgcgcggcgcatggcgacggtgaactgcctctacgtcgcggccgcctccacggcggtaagcaccgctgctctgcagtggtgggcgtcctcgctcctcgacggcgacgctggggccggcggggatggagactggcttggagccgtgctgcggtcaagggtcaccgtcgcgctcctggcgaatctggcggcccacgtgttcgtcgttgtcatcctcgcgctcaagactatattttttgttcagctaacttctgtagagaccagaaaagtgttggagcacatcattaactatgtacttcacaagggaacttttctcccgctggctgtgcctccaacttctcagcaaattatcctttggtcaacttgatgtttcaatcattggccagagaacgtctagagcagctcaatgcttctccctcagcgactccttcaaaatattttcgtgtgtactctgcattgcttctggttttatcagctgatctactttggatgtggctcagtgtagggttctgcagatcctgtaattccaagttgttttggctcctgttctttgagccacttagtattgcctttgatacgctgcagtctatcatggtgcatgggtttcagttatttgacatctggcaacgacatctaatggaaagtggtgcggactttcttgatttccagaaatcttataagcaagcagcaggatctttttctgaatggaggggcaagcttactagggactttggttttgctattgatttgataagcatgttgatgtcatttggtcattactcgatgatcttttggcttcgtggtatggcgtttcatctggttgatgcagttctcttatggaacttgcgtgctcttatagtttcctttttgaagaggattaaaacttacatcaaattacggaaggcacttagttcactcgacggagcacttccagatgctacttatgatgaaatttgtgcatatgatgatgagtgtgccatctgcaggggaccgatgggtcgagctaaaaagttgtcctgcaaccatctatttcatctagcttgtttacgatcatggttggatcaaggattaatggaaggttactcctgcccaacttgtcggagaccgctcgtattgtcatctgaagggcaaacaaggtctccgattgtggaggcagcaaatgttcagcgaatcgcagaacagcttactatggggatgaatcagcagagagtttctggtaatgaacatcctgttgaacagcagaacccttcagatgctgtttggaggggtgctggtctggatgctagctggattccaccgtggtcaagccctgtgatagataatcccagttcctctagtgcagtgaggtcagtaggtctttctggagttcagatgatgatgaggcagttggcttctgtgaccgacagttatgggcatgctgatggtacctggaacctatggcccgagcccatggcagggtcctctcttgttccatccacttcctcgatggtgcctggtagtgcatctgcttccggattgcggctccgtggtagtgcaggcacaggcaatggaagtctttcagaggtactcactatggtagatagggtgcgggaagttctacctcatattcctgacgagctaattatagaggatttgatgaggacaaacaacataaacgcgactgtgaataatcttctgctgatgcaatagtagatacgtcaatacaacatataagtatgacgtttactggctgtaaaagcttataagaaaagtatgtgtatagttaaaggcgagcctgggtgtaacaacactcttcgatcctgtaataaaatccttttctctctctttatttttgtccgcagggatttgtttgtatagtaaccatagctgtataattatcatactcggtatgctataggttagtgtatttagaaaagatcggaataaaatttgttttgggactaaatatcatgcgtctggaaagcacttgtcgacggtacgcatcatcttcaggcttctatttgggcacgcggagttctaacctgcagctatatgttgaacatttgattgaagggaaaatagtgtgtttccaatgcaatgcaaagctatctgttgtgcagtagtaatatgttctgttggtacttgaattgcatgaagtctggtgcggagtttgaaaaaggatctcctggaatatagagtatatatatgcgagcgttgggactatctatttgattgtag

SEQ ID NO: 69767 - DNA, 2520 bp, Zea Mays
gaaatacatatacccctcgctgccgcaacaatttttggatccacttccctccccacgtgttttttgattgttcctccccatgttcctcgcgttcccgtgaggccgtgacgcccccctcggcctcgcctcgccatcgctcgcggcatcgccgcctgccccctttcccccacgcgaataaagcgccggaagcgcgccccccaagcaaagtcctccggcgctcaggatcgggagccaccccctagggttagggctccgttttgcctcgttccggcgtcgaccgatgcgcggcgcatggcgacggtgaactgcctctacgtcgcggccgcctccacggcggtaagcaccgctgctctgcagtggtgggcgtcctcgctcctcgacggcgacgctggggccggcggggatggagactggcttggagccgtgctgcggtcaagggtcaccgtcgcgctcctggcgaatctggcggcccacgtgttcgtcgttgtcatcctcgcgctcaagactatattttttgttcagctaacttctgtagagaccagaaaagtgttggagcacatcattaactatgtacttcacaagggaacttttctcccgctggctgtgcctccaacttctcagcaaattatcctttggtcaacttggttggtcattctttgttcactgaagatgtttcaatcattggccagagaacgtctagagcagctcaatgcttctccctcagcgactccttcaaaatattttcgtgtgtactctgcattgcttctggttttatcagctgatctactttggatgtggctcagtgtagggttctgcagatcctgtaattccaagttgttttggctcctgttctttgagccacttagtattgcctttgatacgctgcagtctatcatggtgcatgggtttcagttatttgacatctggcaacgacatctaatggaaagtggtgcggactttcttgatttccagaaatcttataagcaagcagcaggatctttttctgaatggaggggcaagcttactagggactttggttttgctattgatttgataagcatgttgatgtcatttggtcattactcgatgatcttttggcttcgtggtatggcgtttcatctggttgatgcagttctcttatggaacttgcgtgctcttatagtttcctttttgaagaggattaaaacttacatcaaattacggaaggcacttagttcactcgacggagcacttccagatgctacttatgatgaaatttgtgcatatgatgatgagtgtgccatctgcaggggaccgatgggtcgagctaaaaagttgtcctgcaaccatctatttcatctagcttgtttacgatcatggttggatcaaggattaatggaaggttactcctgcccaacttgtcggagaccgctcgtattgtcatctgaagggcaaacaaggtctccgattgtggaggcagcaaatgttcagcgaatcgcagaacagcttactatggggatgaatcagcagagagtttctggtaatgaacatcctgttgaacagcagaacccttcagatgctgtttggaggggtgctggtctggatgctagctggattccaccgtggtcaagccctgtgatagataatcccagttcctctagtgcagtgaggtcagtaggtctttctggagttcagatgatgatgaggcagttggcttctgtgaccgacagttatgggcatgctgatggtacctggaacctatggcccgagcccatggcagggtcctctcttgttccatccacttcctcgatggtgcctggtagtgcatctgcttccggattgcggctccgtggtagtgcaggcacaggcaatggaagtctttcagaggtactcactatggtagatagggtgcgggaagttctacctcatattcctgacgagctaattatagaggatttgatgaggacaaacaacataaacgcgactgtgaataatcttctgctgatgcaatagtagatacgtcaatacaacatataagtatgacgtttactggctgtaaaagcttataagaaaagtatgtgtatagttaaaggcgagcctgggtgtaacaacactcttcgatcctgtaataaaatccttttctctctctttatttttgtccgcagggatttgtttgtatagtaaccatagctgtataattatcatactcggtatgctataggttagtgtatttagaaaagatcggaataaaatttgttttgggactaaatatcatgcgtctggaaagcacttgtcgacggtacgcatcatcttcaggcttctatttgggcacgcggagttctaacctgcagctatatgttgaacatttgattgaagggaaaatagtgtgtttccaatgcaatgcaaagctatctgttgtgcagtagtaatatgttctgttggtacttgaattgcatgaagtctggtgcggagtttgaaaaaggatctcctggaatatagagtatatatatgcgagcgttgggactatctatttgattgtag

SEQ ID NO: 69768 - DNA, 1575 bp, Zea Mays
tttggatccacttccctccccacgtgttttttgattgttcctccccatgttcctcgcgttcccgtgaggccgtgacgcccccctcggcctcgcctcgccatcgctcgcggcatcgccgcctgccccctttcccccacgcgaataaagcgccggaagcgcgccccccaagcaaagtcctccggcgctcaggatcgggagccaccccctagggttagggctccgttttgcctcgttccggcgtcgaccgatgcgcggcgcatggcgacggtgaactgcctctacgtcgcggccgcctccacggcggtaagcaccgctgctctgcagtggtgggcgtcctcgctcctcgacggcgacgctggggccggcggggatggagactggcttggagccgtgctgcggtcaagggtcaccgtcgcgctcctggcgaatctggcggcccacgtgttcgtcgttgtcatcctcgcgctcaagactatattttttgttcagctaacttctgtagagaccagaaaagtgttggagcacatcattaactatgtacttcacaagggaacttttctcccgctggctgtgcctccaacttctcagcaaattatcctttggtcaacttggttggtcattctttgttcactgaagatgtttcaatcattggccagagaacgtctagagcagctcaatgcttctccctcagcgactccttcaaaatattttcgtgtgtactctgcattgcttctggttttatcagctgatctactttggatgtggctcagtgtagggttctgcagatcctgtaattccaagttgttttggctcctgttctttgagccacttagtattgcctttgatacgctgcagttatttgacatctggcaacgacatctaatggaaagtggtgcggactttcttgatttccagaaatcttataagcaagcagcaggatctttttctgaatggaggggcaagcttactagggactttggttttgctattgatttgataagcatgttgatgtcatttggtcattactcgatgatcttttggcttcgtggtatggcgtttcatctggttgatgcagttctcttatggaacttgcgtgctcttatagtttcctttttgaagaggattaaaacttacatcaaattacggaaggcacttagttcactcgacggagcacttccagatgctacttatgatgaaatttgtgcatatgatgatgagtgtgccatctgcaggggaccgatgggtcgagctaaaaagttgtcctgcaaccatctatttcatctagcttgtttacgatcatggttggatcaaggattaatggaaggttactcctgcccaacttgtcggagaccgctcgtattgtcatctgaagggcaaacaaggtctccgattgtggaggcagcaaatgttcagcgaatcgcagaacagcttactatggggatgaatcagcagagagtttctggtaatgaacatcctgttgaacagcagaacccttcagatgctgtttggagatgtggttacaccttacataccgggacggagtaaaaagatacccatgtttgatttgtacatcag

SEQ ID NO: 69769 - DNA, 1498 bp, Zea Mays
tcgatgttcagcttgattcgtataataaattgccatttttcattactgtgcttgtagagatgttgtgattgcagagacgtagcatgttttttctagacaccagcagctatcatacagaaactaattatattggttgatggatttaaatctacttgtgctacaggcattccgttttagtgcagacaaagagtttctgaggcaatcaagagttgttcgagtaggtctaattcagaactcaattgctgttcccactacttgtcactttgctgaccaaaagaaggcaatcatggacaaaataaaacctctaattgatgcagccggcgcttctggtgtcaatattatgtgcttacaacctggacaatgccttttgccttctgcacacgcgagaaaagatggtgtgaatttgctgaaccagttgatggagaatctactcaattccttcaggaacttgcacagaagtataacatggtaatagtgagcccaatccttgaaagggatataaaccatggggagactatttggaatactgctgttgttattggaaacaacggcaacataattggcattcatcgaaagaatcacattccaagagttggtgatttcaatgagagcacatactacatggagggtaacactgggcatccagtgtttgaaacagcttatggcaaaataggagtgaacatttgttatggaagacatcatccccttaattggcttgcgtttggtctcaatggagctgaaatagtgttcaacccatctgcgactgttggtgaactgagtgaaccaatgtggcccattgaggcaaggaacgccgcaattgcaaacagctacttcgttggatcaattaatcgggttggcacagaagtgttccctaatcctttcacatccggtgatgggaaaccgcaacacgcagactttggccatttctatggatctagccatttctcagcacctgatgcctcctgcaccccatctctatcacgctaccgagatggcttgatcatctccgatatggacctcaacctatgccgccagatcaaagacaagtgggccttccgcatgactgctcgctatgagatgtatgcatccttgctctcagagtacttgaagccagatttcaaacctcaagtcattgttgatcccttgattaataagaaggcataaaaactgaggtatgctggatacttgggcttaaaaggaggtcatttgtgtattgacatgaacaggaaaaggtttaccatttagcagaataatgtctacgatgaagatgcaaaatggaggaagtttctttctttttttttcctttacatttccacatactgtaaaaatgtgtttggtgtagtttgagcttcttttactcaatattcgaaacagtaatgcttgttttgttgtataatttgctagagatttttcgatgaagaaattcaacaatctttaaaccaccgagaataacttagaaactccttcaaacataatgcttaattagttcaagatggtt

SEQ ID NO: 69770 - DNA, 659 bp, Zea Mays
gataaatcggtaaatcaagttaattaagatacacagtttaaagagttaattagattgtttctataattattttaagttgttggcatttaataatagcgagtctaggttttactagacctctgtaatatattttactaaaaatgataatgtgtgtttataatttattcttgcttgataataaaattagatgtgattgaacagaagaaatgtgcgtgatgtaattagtatgtatagtttattattttgtgattattgcgcgtagtcgtatgtcgataactagtgtgtccgtataaaattgtacaatgcctcgccgctaggtgtttagttcgctatcgcgtagcactatttagggtttttgatattcctgtttatatgcattcatgtgcatcgtgcatctcaattaggtacgataattgatcgtgtgatgcggaagacgagccaagtcgaccccaagcgcggactactccgcatggagatgctgataaacgaacctacctgatcaagtgctaggacaaggatgatcgtcaagtggacgtcacctaacaacactaacgtagtgtttattccaggcaagccccggtgcatgcaaccccttccttgtgtttttaaataatttttgcacactttaagtctagtgaaatgtgcattaggtttatagg

SEQ ID NO: 69771 - DNA, 5410 bp, Zea Mays
gaaatcgacgacgctttccggtccgcgcataacaccaaatatgtgacgagcaacgtactagacttcattattctatccgatcaaattttattctgggactaattcactactgcgatttacgcgcacgtcaccggcccacgttaatagcgcaagtataccaaactgacgagaaatattaaaacgaaaagcgagagcgacgacaactcaccaataacttaatatgtcttgaaggccatgagcacagctacgattttcaattctgccattacctcgagcacctcgcgagtgacactgtggacgagtcgaggacacaggatacgaaggcacggctggtggtgtcctgcagctaaagccagcgagctgcgaaggacgcagttcggcgcgcgcaaccaaggcgtacagaggaaccggggtgtcgggcgcgtgtgcgcggcaacgcacggccaacgagtaaagacggcgcgacggccatgatacaggcgagctggatgccggcaagctgacggcgctgggaaactcgcgagcaggatctggagcagccatggcgagctagagacgaacggtcggacatggagcagcacaacagcgcacgacgaggagtctagctcggcagcttctgggagccaagcacaaatggcagagaagggttgcggcctgaggaagaagtgctgagacgagtgccgagaggagcagagaaaagaatgctaagacgcctgagtgaacgctggagacgtgtaagaaataagctcctgctgagcgatggatggataagaaagagaatgagatttttttcagaaaatggatcaggccgatgagcgttatatacagacaagggcctgagaaaatatcctgatggagggcggcgggacaatacaaagaagaggcttatgctcgcgtagaagaaaagaatttggtctctggcatgcgtagaagaaaagaatttggtccctcgcatgcgtccagaaactgggcaaggacataaggttgagcgtgtcttcaagagttttccaaggtcgagggctattagaaaaataggatatttcttctttctttcttaagaaatactggtgctagaattagagtttgggtgagatataaatgaaccggactaaaacaaatatactacttgagacaccattaatttagttgaacccagataaaagttatctgttatttatatctgaagatttggatataggcgaggaacacacgaacccaaccaaacaagatcggcttggataattcaaactatgtcaaatttggtttaaaacagataaacctcatctgttctgaatattgggatttggatttaaaataaggagtaaacgggccaatttaaagcgctatcgccaatttaaagcgctatcgaataatagattattttctcggatttttaaataggaaagcgaatcggctaaccattgttctggttttggttagttcgagtttggtttatttaaatagcccgcccctagtagtgtttctaccaaattcgtagggatcgctcgaacagagcgaaatacttagttgacctttccagttcgtctaaatcgattaactttatttaaactagtaccagaccacgtcattatctttgatatcttagactgcgctagattggatttaattcaaaaccggaaacttttatccgtggtctcgacacccgtttccacggccacagataatttacgcggagaatcggatctcaattataattccttggacgcgacttctcagttgacgagtggggacataattatttgcatcgaaaacttagtcgtcgagttctacttaatctgttcgaggtaaaatcatccgagtggatcggacttccgaattcgtattcacgcgagcgatgaattttaaataatcaccggacgcaccgatttttggaacaactatgttccgaacagcacgaaaatttaggacgagcccggatagataaaaataaaaaaaacgatgtcgcactcgcgacagacgaaatagatgcgatataaaatcgcgatagagagaataattaaaatttaacatttgttttatccactgatattacgtgcttaaatccatactcgttgtcgagcggaatataaacaccaagggtgttacacccctccccccttaaaagaatctcgtcccgagatttgaaacgaaagacttctaagagtagagaagcatgtaacccatgtccatatcagcgataatcatgagacatttccaaataaaggcgagtgtctcaggatgttgtttctctagtggacataacatgtatcgccttaggctaatttagagatgtccaacaatagagacaatgtctgccagaggaacacataaggttccatgtgtgcagtttgctttttctgatgacattgcactatctgagtctattgagcgagcggcaattacgcgattttaccaaaacagaatcagatgcaacctcttgggtaaaacatacagaaagaggtttaccaacaagtggtcacggtaagttcatagcacacgagatgggtgtgaatgtcgaataacatcacagttgacccgtggctagccagaaaatccaagtccctgaaaggtgatatagattcgagaacatcaccaacggagggatctgtaaatgttgtttttgtaacaaatccattttatcgagcactaatcatggcttgatatggtcacacatgctggaaaagcacacgtgaggcgatcgagacatgactagagcaatggctaggtggttattagttgacctaatctcgattttcgtaagtactttcttaggatgggttgaactaaagtgagtttagataactcgataaaacaatctctaaactcaaactttattcacaatgcagttacaagttagtaaaaaccaacttgttgaactacttttgacattgagtcggtcctctcagtaccatcggtaagccaacgatcgagagtttactttggctaacaggagatcatgcacttgggtggaaattcatttggtcaggttgttcatctgtttcttcatgcgagatgaattatccactgacttggtttgggaataaatggattgaataagagagtgaatgaacaaactcctgcatctccacagcaggggaaaaagccaatctccattttgggagctaatcagctgtctctcgacactaaacgctctaaggattcatctttacacaaaggatgtaaagggaacttgtatgagtagtcactaccaagatcaaaagaaataagaccacacatgaaagtgttatgtccatttgatccggcaaagatgatagatgttgcttgataacttgagaaacaacatagaaactgtttcaaagaaggagtccacggaagaccacacatcggtgtagttccacaatggatcatgactagaggctccgataccagcatgcgccaagcagcagaatcctgtgtgcacattcacaggaggctcttagtttccccggggtatcataagtcattaatcgagacgccattatcgaactggcactaataatgaatctcgcagggtaagaataatctacgtaaagataacatatcgatatagtctaataatggattatgactactaacggtgataccagcggatgccaagtagcgcaaccatgtgtgtgcatccataggaggccctcggtttcgtcacggcaccattggttttagtcataacgccattaccagacgtaaccaataagaaatctcgcgcgacacaaatagactgagcaaggatggcaatatacaaaaatagactccacttgtaagaatggttacaagtagagagccaaatagatcatggcccgatgaaatgaacaaggcatggccataacctaaatttgatgaaaggagtacgacgggagactgttgcttcagccccaagcatatttctatgcccatcgtagagatcacaaggtcaaggatcagtatctgactagatacaggggaaaacaatattaagattaagttggaatgccttcgatagatatgggggaaaccaaagacatcaaattccagaaaaatggttggacatgtctttcctaggttgggtcgataaagtaacatggtaatccacaaggagaggccaaataccatagagacctcaacttgcatcaactgaacaaggaaatggttctagaaggagacatggtttgagatccttgatttaaggttgggtacattttatgtccaacaaagaaattatctaaacattcatttacatgagtttagtcgtagagggataatggtaaattcaaatttgggtctcagtttacctaataagaacatggcctaattttgggtttaggcaaaacaagtcactaaccttctatcgacacatcaagcacaagggcaaacacatatagcatctaaacataatacctaaggaacggagaacaactattttatcgaagttcataatacaacattacaccacattatctacaatcactggttactggaataaggatgagagaagcatcttgggtgtataggtgacaaacatgatgcaacaatcaggatgcatgctcgtcctacacgtcctcacgagttttgccaacataatgtggcattagcgttctatctcggtggcatatttacgactctcacggtattttgctagtcgtcagctacacatacgttttcgaggttagtatacctgcagaaaattcatcacagcccaattccccatgatgcaattcacacatgacagtttatcacagtttatactccatatattgctatatggaggccagctcatcattaagcgccgagccacgcataggcgctgttgccacactttaaccatagggcaactcattatggtaactcaccttcttacctgagcgtaggtgcgtcgttacaagtacattacatttctcagtattcccatgtctgtatacccatacacatccatggggtacagaattcccagaaaagtaaatactccacatcgcagccttcatatatacatatgtggaacatgtatataatcaagcgctttttatgctcttccctagaccgacgtttgttcggtcatgctctcacatctcaccttacctgagcatcgatccattcaaaactgaatggccttaaaaataacaatacacatgtatgcaatacccacccggttgtggttttcaactaagccacctgatagtccttaatttagggcttaagagaggatgtcgctagcattatagtttttcaaatctgattttcaaaaccaaacaatgtgtttagttgaagataggtgttctaaaaccaaaacttttgttttgaaaatacgtatgtgatcgtacatacttaatccagctccgataccagctgtggcagaacctccaagttatcgggcccacatgcacctgtccttgtctcaaagacctcagacggccgtgcatgtgcaccagataactta

SEQ ID NO: 69772 - DNA, 5378 bp, Zea Mays
ccggggcttgcctggaataaacactacgttagtgttgttaggtgacgtccacttgacgatcatccttgtcctagcacttgatcaggtaggttcgtttatcagcatctccatgcggagtagtccgcgcttggggtcgacttggctcgtcttccgcatcacacgatcaattatcgtaccaataacttaatatgtcttgaaggccatgagcacagctacgattttcaattctgccattacctcgagcacctcgcgagtgacactgtggacgagtcgaggacacaggatacgaaggcacggctggtggtgtcctgcagctaaagccagcgagctgcgaaggacgcagttcggcgcgcgcaaccaaggcgtacagaggaaccggggtgtcgggcgcgtgtgcgcggcaacgcacggccaacgagtaaagacggcgcgacggccatgatacaggcgagctggatgccggcaagctgacggcgctgggaaactcgcgagcaggatctggagcagccatggcgagctagagacgaacggtcggacatggagcagcacaacagcgcacgacgaggagtctagctcggcagcttctgggagccaagcacaaatggcagagaagggttgcggcctgaggaagaagtgctgagacgagtgccgagaggagcagagaaaagaatgctaagacgcctgagtgaacgctggagacgtgtaagaaataagctcctgctgagcgatggatggataagaaagagaatgagatttttttcagaaaatggatcaggccgatgagcgttatatacagacaagggcctgagaaaatatcctgatggagggcggcgggacaatacaaagaagaggcttatgctcgcgtagaagaaaagaatttggtctctggcatgcgtagaagaaaagaatttggtccctcgcatgcgtccagaaactgggcaaggacataaggttgagcgtgtcttcaagagttttccaaggtcgagggctattagaaaaataggatatttcttctttctttcttaagaaatactggtgctagaattagagtttgggtgagatataaatgaaccggactaaaacaaatatactacttgagacaccattaatttagttgaacccagataaaagttatctgttatttatatctgaagatttggatataggcgaggaacacacgaacccaaccaaacaagatcggcttggataattcaaactatgtcaaatttggtttaaaacagataaacctcatctgttctgaatattgggatttggatttaaaataaggagtaaacgggccaatttaaagcgctatcgccaatttaaagcgctatcgaataatagattattttctcggatttttaaataggaaagcgaatcggctaaccattgttctggttttggttagttcgagtttggtttatttaaatagcccgcccctagtagtgtttctaccaaattcgtagggatcgctcgaacagagcgaaatacttagttgacctttccagttcgtctaaatcgattaactttatttaaactagtaccagaccacgtcattatctttgatatcttagactgcgctagattggatttaattcaaaaccggaaacttttatccgtggtctcgacacccgtttccacggccacagataatttacgcggagaatcggatctcaattataattccttggacgcgacttctcagttgacgagtggggacataattatttgcatcgaaaacttagtcgtcgagttctacttaatctgttcgaggtaaaatcatccgagtggatcggacttccgaattcgtattcacgcgagcgatgaattttaaataatcaccggacgcaccgatttttggaacaactatgttccgaacagcacgaaaatttaggacgagcccggatagataaaaataaaaaaaacgatgtcgcactcgcgacagacgaaatagatgcgatataaaatcgcgatagagagaataattaaaatttaacatttgttttatccactgatattacgtgcttaaatccatactcgttgtcgagcggaatataaacaccaagggtgttacacccctccccccttaaaagaatctcgtcccgagatttgaaacgaaagacttctaagagtagagaagcatgtaacccatgtccatatcagcgataatcatgagacatttccaaataaaggcgagtgtctcaggatgttgtttctctagtggacataacatgtatcgccttaggctaatttagagatgtccaacaatagagacaatgtctgccagaggaacacataaggttccatgtgtgcagtttgctttttctgatgacattgcactatctgagtctattgagcgagcggcaattacgcgattttaccaaaacagaatcagatgcaacctcttgggtaaaacatacagaaagaggtttaccaacaagtggtcacggtaagttcatagcacacgagatgggtgtgaatgtcgaataacatcacagttgacccgtggctagccagaaaatccaagtccctgaaaggtgatatagattcgagaacatcaccaacggagggatctgtaaatgttgtttttgtaacaaatccattttatcgagcactaatcatggcttgatatggtcacacatgctggaaaagcacacgtgaggcgatcgagacatgactagagcaatggctaggtggttattagttgacctaatctcgattttcgtaagtactttcttaggatgggttgaactaaagtgagtttagataactcgataaaacaatctctaaactcaaactttattcacaatgcagttacaagttagtaaaaaccaacttgttgaactacttttgacattgagtcggtcctctcagtaccatcggtaagccaacgatcgagagtttactttggctaacaggagatcatgcacttgggtggaaattcatttggtcaggttgttcatctgtttcttcatgcgagatgaattatccactgacttggtttgggaataaatggattgaataagagagtgaatgaacaaactcctgcatctccacagcaggggaaaaagccaatctccattttgggagctaatcagctgtctctcgacactaaacgctctaaggattcatctttacacaaaggatgtaaagggaacttgtatgagtagtcactaccaagatcaaaagaaataagaccacacatgaaagtgttatgtccatttgatccggcaaagatgatagatgttgcttgataacttgagaaacaacatagaaactgtttcaaagaaggagtccacggaagaccacacatcggtgtagttccacaatggatcatgactagaggctccgataccagcatgcgccaagcagcagaatcctgtgtgcacattcacaggaggctcttagtttccccggggtatcataagtcattaatcgagacgccattatcgaactggcactaataatgaatctcgcagggtaagaataatctacgtaaagataacatatcgatatagtctaataatggattatgactactaacggtgataccagcggatgccaagtagcgcaaccatgtgtgtgcatccataggaggccctcggtttcgtcacggcaccattggttttagtcataacgccattaccagacgtaaccaataagaaatctcgcgcgacacaaatagactgagcaaggatggcaatatacaaaaatagactccacttgtaagaatggttacaagtagagagccaaatagatcatggcccgatgaaatgaacaaggcatggccataacctaaatttgatgaaaggagtacgacgggagactgttgcttcagccccaagcatatttctatgcccatcgtagagatcacaaggtcaaggatcagtatctgactagatacaggggaaaacaatattaagattaagttggaatgccttcgatagatatgggggaaaccaaagacatcaaattccagaaaaatggttggacatgtctttcctaggttgggtcgataaagtaacatggtaatccacaaggagaggccaaataccatagagacctcaacttgcatcaactgaacaaggaaatggttctagaaggagacatggtttgagatccttgatttaaggttgggtacattttatgtccaacaaagaaattatctaaacattcatttacatgagtttagtcgtagagggataatggtaaattcaaatttgggtctcagtttacctaataagaacatggcctaattttgggtttaggcaaaacaagtcactaaccttctatcgacacatcaagcacaagggcaaacacatatagcatctaaacataatacctaaggaacggagaacaactattttatcgaagttcataatacaacattacaccacattatctacaatcactggttactggaataaggatgagagaagcatcttgggtgtataggtgacaaacatgatgcaacaatcaggatgcatgctcgtcctacacgtcctcacgagttttgccaacataatgtggcattagcgttctatctcggtggcatatttacgactctcacggtattttgctagtcgtcagctacacatacgttttcgaggttagtatacctgcagaaaattcatcacagcccaattccccatgatgcaattcacacatgacagtttatcacagtttatactccatatattgctatatggaggccagctcatcattaagcgccgagccacgcataggcgctgttgccacactttaaccatagggcaactcattatggtaactcaccttcttacctgagcgtaggtgcgtcgttacaagtacattacatttctcagtattcccatgtctgtatacccatacacatccatggggtacagaattcccagaaaagtaaatactccacatcgcagccttcatatatacatatgtggaacatgtatataatcaagcgctttttatgctcttccctagaccgacgtttgttcggtcatgctctcacatctcaccttacctgagcatcgatccattcaaaactgaatggccttaaaaataacaatacacatgtatgcaatacccacccggttgtggttttcaactaagccacctgatagtccttaatttagggcttaagagaggatgtcgctagcattatagtttttcaaatctgattttcaaaaccaaacaatgtgtttagttgaagataggtgttctaaaaccaaaacttttgttttgaaaatacgtatgtgatcgtacatacttaatccagctccgataccagctgtggcagaacctccaagttatcgggcccacatgcacctgtccttgtctcaaagacctcagacggccgtgcatgtgcaccagataactta

SEQ ID NO: 69773 - DNA, 22306 bp, Zea Mays
tttcttatttcaattctataagagcgatatcccccaaagatgtaaatgtaaaagctgagaacgcaccatcgagtgcaaaggaaaaaagaaaagaaaacagggagaagctcaaaagtcgttcctaagggaatgcagagcttgcagcgaaaaataaacgctaattccgccgaaagtaaaaggcgaagaagctcctaagggaggcttgcagcgaaaaataaacgctgattccgccgaaagtaaaaggcgaagaagctcctaagggaggcttacagcgaaaagttagcgctgatacaccgaaaagtaaacggtgaagccaaaaaataaacagcaaaaagatttgagtcattcccaagggaatgaaggctatgattatggtttcgaatatacattcggatattcatttgcacgatacattacatcatgacatttgcattcataaacattcatttagacatatataggatcattatcatcatatcatacagaaaaggcagatgcttcggttatgaggaaaacatttcggagaaaaaggaaattctcatgcttcgttgcgtacgaaaagaagggaaggtgtttttcgccttcggctcaaaaataaaatttcgtcgacagcaaagcagatcgtacacgaataaaggggaaaagatatattacaaggtacgcacaaatttacataagtttttatacaattatattacaacaatttttctagaatcttttgcagaaaaagtcctttggagcatctgttaagcttcagcttgtcattcttcagtttcatcatcctgcacatattaaaatgaaataagaaatgtgcagagttcaaggagaaggtaaaagtaacaagtataagtttctcactggcttaaggtggctccgagcttcgtcaccagctatttttcgcccgccgtttacccaaatctgggtcataaacctgtttcctatgcttcgggctaggcttgggatgtcaaccaaatctgccggcgacaaactgaagtttggcctatttacaatctttccgtgtgtgcagccagccttcaggaaagcggtagccgtgcctcgagaagctagcagggtgcagaaatcagcatgcccaacaataacttcgtcaagtgcatcaacttcgccctcaatgaattccaaggtgcttggcaggttttcagctgaaggtgtaaacttatcagagctggctccaattaagtgaaacacatccttcagccgctgcacacatcggctcccgaaatctaagcatttctcctgaagctccttcaatgatttttgcaaatttgaattcttctcgattttggtcttgagatttgtttagatattcttcttttcctgctcagatttttctgacttcataagtaattcattatttaatttgttattttcggcttgggcttcagccagtgaaccttccatagaaccaatgacgaagtctttcttttccaaggcagcttcgtgatctttaactttgatttcaaggccttgaatgacggagtctttttgtttcagagcagcttcgtaatttctaactttgttttctagatctttgatggtagcttcgtttttctcatcttcaagatcttgttgcattctcagcactatacttagaagtatactctgccaaaacaactttcgttagaaaatatattaattcaaaaaacaataaaaagtcgagtttttaccttgaaattagcatagagcaagctactggcaatatgttgtcgctggtacctgcagaggtccgcttctatcttcggcaggccaacgctttttgagaaggtcctaacaactttggcctcggttcggttgcgaaggcatctcagcttcccttcattgaccccaccaaatagcagagaccctggtttgtatccacaggatatagcatatttctttagctcttccttttcagcgtctgttaactcttgtccaagtatatcttgaaaattaaaatttccttcttccaaagtgtcctcaatctgctcttttcctttttcagttgtcatgttcaccgcaaccacaacagcttcttcttcagccattttcaaaagtatattgtcaatatcatcaagcgtggtttccaggttaggatcttcggtggccccggcttcggctccggtggcttcggctccgccggtttcggctccggtggtttcggctccgatggctgtggtttcggccatgacaatttttgacgccgatgtcggtggcggtgtctgatgaatcacatcagccacttggataattcttcgctttttcggctttgcgggactttctgctgtcgaagcttctttgtccttctgaaaaaacttcgtcagttctggcgccagcggacttagcttgacaggcaaaagttcagtcattaccttcagaatctcttccacttcggcagcagaaggtgttgcaggagcttcctcctctcgggccgatgtctttgattttggagatgcaggttttggagatgcaacttttcttttccttggagcagccatctttggctcagggctctgtttttcagaaatttctttttcctttttagccaatttggtgctttctttgcccagggcgctggcaatcctctttctcttcgggccttcggcatctctgcccagttgttcataatcagggtaatcaaaattcaaagcatctagcacacgattcaatcttcgcttcggacgggtgccgaaagctgcagtcatcaactgatcttctttcttagaataatttccgaggatatcgttgcacataatctcgattgtgtccaaccactcctggcagggttttttaaagtgtttcttaaacttgtagtaataaggcaatcgaacaagttctccctttttcttctcaccctccagcttcggcatctcccactccctcattgttgggaacactttaaaagccagaaattcctgcaccaagtctctagtgccaatatgatctgaaatcacgcgaaattcagccaaagcaagctggcttgggctcccccttatcatgttgcatcggggtctcgtctctccgaaggttagctctagcggactctggaccaacttatcttcatctttatcaactttaacataaaaccattcagacttccatccggctggccatttgcttcggtagcttatcactggaaacttcgtagtcttgcgataagcaaagttgtaacagccaaaattctcatgcagaccatctcctctggctttagtctggtagtgtaattcatgaactcggcagaaaccctcaccgaacggttccactccctggctacgaagggcccaaatataaacacttaatctaacgatagcattaggggtcagctgatgaaggtaaaccccaaacttcttcaaaacatcagcaatcatctcattcaaaggaaatcttaatcctgctttaaagaagcttttgaacactacaacctcattcttttccggcttcggagtaatttcctcttcgccaaaacgaatcagctccttttttgcttcactgaagtagcccagcttcaccattttgggaagatcagcttcaaagatggtggactttccaaactccaagtgactaggtttacttggcatcccgcagctgtactcatctttggaaccaacttcttcaacatcagcttgtgttgcttcggcagcaggtgtgtcctctgatgaaaccagcccagaacgcctcattgcttcggagatcggaatagtttcagcggcttcggtctcatctccatcacgctcaaccctagcagtggagcgtactctggccatttgaatttaaacttcttgagaatcctttggaaattaataaccttctttccgaagctcttctcgtgacgaagcaaaattaaaaactggagcttcgtttgaatgcaaaagtcaagcttcggctatggttaattttttggcagcaaaacagtgcaatagcaatgaatgctgtggtaacttcacacctacctgtctgtttatacagtgttgcaggtaagaaggtgaatcgtcaagatttttacaccggacaaatagtcgctcgcacccactgaacggtgggccgcaaaaatcaagtgaacctgcatggtgggaccgctccacgctcagaaactgtatcgtttctcagcaacgagctcagggaaggtgtttttcggaccttcggcttcccgaagcctaagagacttttttcacggatcaagctcgttacgaaaaacgatctagcaccgcgaaggggctactgttgggaccatgcttcatcgccgaaggtcctgcaaggagaaacagcttcggcaaaaagctgcttatatgtaatgccgaagctaccactcatgaagcttcggtgttatagcgtatccgaagatgaaggatcgaaccgacttaaagatggaatgaccttttagtccataagggtctgagtcattgttgtaaacttttataaggggtacgattgtaattccttacaggctgtgtcctgtgcctataaatagtgaacagtattcctttactgttcacgttattttttctgtacttgcaaacacattgctttggaattattgtctcctgtcaaggctaaggtatcaatatgcctaagtattatgttttgatatttgaattcatataataaaatatgtgaataatgttatctatctatggcatatctctttctaatacttcatgttttatattttatttcacattttttataagtctgttcacgaaggtatggccttcgtaatattttactcatggtcttcgtccgaagttcattaaatccttggggagataatgcttcagcggacgaagggcattaatgtttaatattttatgttgccttgttcttgaatcatagcatttgagaacaagtccccaacaatgccatcccccgcaggagtcctcaccgtgcggggtgaccgcaccgccgctctggcggctgttgaaaaactacacaccctagcggctgagaccgctcggccaaacgacggaggaagaagctccttagcccccggcgccaaagcaccgaaggtgcaaccaaccgaagcagacgacgggcactcaaaggtgactgcgaagaccatccaggtcggcgcagacccatcccgggaccacccgcatcgcgggagatctgggagagaaataggaactcgcgctcgtcaccttcctccgggcaaattccgacgtattcgcttgggagccatcgcagatgcctgggatccccggggaggtgattgagcaccatttgaagatatatccgaacgccaagccagtaagccagaagcctcggagacagtccgtggaacgacatgacttcatccgtgaggaggttcaaaaactgttgcacgctggcttcattgaagatgttcaccaccccgtgtggctgaccaacccagtcatcgtgccaaaagcaaacgggaaacttcggatgtgcatcgactacaccagcctgaataaggcatgccccaaggacccgtacccacttccacgtatagatcagatcgtggactctacctcagggtgtgactttttgtctttcctagatgcctactccggttttcatcaaatccggatgtctagggaagataggaagcacactgcttttgtaacggtagatgggttgtactgttatgttgtgatgccttatggtctgaaaaatgccctgccaacatttgttcgggcgatgagtaagacctttggggacctgatccgggacaaggtggaagtttacgtcgatgacatcgtggtcaagactagaagggggtcgactgtagtagaagatctaaccctggtcttcgacaagctgcgggcaacccgcaccaaactgaacccggagaaatgcatcttcggcgttttcgcaggaaagctgctgggtttcctggtttcataccggggcattaacccagaaaaaatcaaggctatcaagataatgaggcctcccgcccgtgtcaaggacatccagaagcttacaggatctttggctgctctgagccgcttcatttcaaggctgactgagagggctctgcccttcttcaagctcctacggaaatctggcccttttgcttggaccggagaggcggaacaagccttccgggaattgaaacaacacctaacctccctgccaatcctggttgccccagatccaggagaaatgctgtacttgtacattgcggcggctgcagaagcagtgagcatggtgttagtcgccgaaagggcgacactagaaggacagagacctgagaactcagaaccagcatccggcgcccggaccgtccagaaaccagtttattacgtcagcgaggtcctccatgaagcgaaggtcaggtacctcgagacacataagctcctctatgctgtcctggtcgcgtccaggaagttacgccactacttccaggcgcaaagagttgtggtggtgacctcctttccattgagggccatcctccacaactcaaacgccactggcaacatcaccaaatgggcagcggagctcgccgaattccagccccgccacgctatcaagagtcaggtcctagccgacttcattgtggagtggactccacccccgtacgcccctgggggcccggaccccgagccaggccccacacctgcggggcgcgggggcccagtcttcaccgaacaccactggacactcttcttcgacgggtctacccgccaagagagtgctggcgcaggagtggtcctcgtcggcccagacggggaccagttgaagtatgtggtacgcctcgagttcaaagccaccaacaacatggaagaatatgaggcactgatcttcggcctatctacggccctatccctgggggtccgccagctccttgtgaagggggactctcagctaatcatcaagcagacccgtggggaatgcagctgcaatgagcccaggctcgcagcttacctccttcatgtaaagaagctagagaaggactttgcggccttggaactacaacatgttcccagggccgacaactcaacgacagatgacctctcccagagagcatcaactcgagcacccgcgcccgagggcgccttcaaaaggcggttactgagacccaccgcccggccagccaaactgagcgaggggggcgagaccggcacctcgaagccgacggtcccgatggcgtcccaggacccaccaaaggtggtgtgtgcactggggggattcaccagcccctagctccgcaaccaacaactcagagtggtcccgatgcatggatctccgagatccgggactacctgaaggaaaatatccttcctgaagaccatgtctccgcagaacgcatagtacggttggctaaacggtacacgacggtagaaggggatctctaccaccacggcgccaatggtattcttatgcggtgcatcacccaggaggagggctgtgagttactcacggagatccatggaggggagtgcagaagtcattcttcatcccgcacgctggtcggtaaggccttccagcatggtttttactggccaaccgccctccaggatgcagccgagctagtaaagtcctgcgaagcgtgccagtaccacgcaaagctgatacacacaccggctcaggctctgcaaatgattctgccctcctggtcgttcgccgtatggggggtggatatcctgggaccatttcccagggccatcggtggctaccggtacctctttgtcgccatcgacaagttcaccaagtggccagaggccacccctgtggtcaacattacccagagtgctgctgtcgccttcctcaagtcgatcgtatgtagattcgaggtcccatgccatatcattatagacaacgggacccagtttacaagtcggatctttcaggaatactgcgaggacatcgacacccagctctgcttcgcatctgtggcccaccccagaagtaacaggcaggtggagagggcaaatgcagaaatcctcaagggactcaagacgcgcacctatgactgcttaaaaaagcatggcgcaaattgggtcagtgagctcccatccgtgttatgggggaaccggaccacgcccagccgagccaccggggagaccccattcttcctggtatacggggctaaagcttgccttcctccggaaatcattatgggctccccacgagtccagtcttttgatgagtctgcgtaggaacagctgcgacgtgaagatgtggacttcatcgacgaacacaggtgacaagcgtcaatccgaaatgcacgatacaaccaggcgctcaggtgctaccaccagcggttcgtgcatagtaggaagcttggggtcggggatctggtcctgaggcaaatactgaaccgagaagggctccataagctctctcccagttgggaaggatccttcaaagtgacagaaatatgctgccccggatgcgtccgccttgccacagccaacggagtacctcttcccaaaccttggaacatagaacatctccataagtttttcccataaagacataattgggggttcggtccctttccctgtaaccaagaagcacacttataagcgccagcccggggaggtccgccctcaaataaacccggcctgttggcctgcgcctgtgtatatcgagttataaggaaggggttcgacccacataactgttcttatgtggattttaatcatacagtttgcgaccattattgctatctcaccactcatgcagttttattccctggctggtattgtgacatccgagctgagtagccagacccggtaaccaggcggtgggatggttaggggtcgtgaagtcgcttggtatggtcaagtaccgtaagcctacacgccccaccgccccacgatcggtcctattgcgtaaatcaaaggataagaaataccagccggcggaccctatgggcgcactactaaaaataccttgccaagactgtgtgcaggtcaagtcccagttgggagctccccttgagggtcacgacatcagttgccaattacgaatcctggtatccagccccgacgcgtcgaggccatatcccaggggggccaagtaccaaggaagaagttggtaacggtgcacgcagcaaaggaaaagtggtgtgcagataagttataatattgcccagtaagtagtacctgaagagtatcttgtgaaatcaatggtatattacaacccgctccccagcggaaacctcgttttctccacgcaggcctagctactcatcaccagtaggatcccgctgaaagcgctcggccaccgcgtccacaacgtcctgcacgccctcacgagcagcatcttcagcgttggccaccggacctgcgatgactggccccaaggagacagccggatcatggctccggaagcatgtcaagacgtattctattgccgaccggcaaagtctgctgccctcggcctccaagcgggcgccaagaatccgatccagacgtcgaaggcgatcaacagtagaatccagtaccgggagcgcgtcggagatagacgccggccgcaccagtgccgggatggggctcacccccaacggcactagcgtcgtgcttgcctcgccggcccaggcagcgatgcgctgggccccggcacgttgctcagcccgcaggtcgtcgagtatcttctgcatcgcctccactgcctaggggcccgaggctgtctgcgtcgcctgagcaacttgcgctgcccgaaactggcggacctgctcctccagagcccacactttctcctccaaacgcttcctcctctcctcgtcctcgagctcaagctcatccagcagcttgttctgccttgcccacatctcctccctgaaggcgaggtcctcctcctgccgggtaagaccagctgcccgtttcacaagggaagcttcccccgaggcttccctcggcacgagcaatgtcgctggccctgtcggcgagctcctgctgcagcttctgcagcttcacctcaaccgcagcctgcttgacccgctgtttctccagcaccgtattataagctttcagcttagcttggagcgctgtgacggtctcctccctttggtctaagcgtatctccttcctagccaggcttttcttcttctggatcacctcgtcctcctggtcagacaccttccggatgtcctccttgaagtcctcacgctcctgctcaaactcggcccgttctgaggcaaaatggcaggacaccgccttagtgcgctcctccagttgggtgcaccagtcgccaaggcgctggtgctcggtctcgagcgcctcccactcccgccggatagccacctcggtttcccggagagcctggtgagcgcgggacagcacccgagggaggggagtcagcgttgcttcagattcggtgccagaccggagcggttgcccaaggataacctccagagaccccgtagttggtggtggaacagagctgggcgcgcctcccacgcctgtcgccgacggtgcatccaacggtatccccgccgctaggccctcagcggctgttggcaacagcgttacctctggaccctcagctggaactcggggacccgaaggtgccgcctcgacagtgacaggcggatcctgggggttcaacggcgccaccccagcaccagtgccacccagcgcggtggaggtaagtataatgggaacctcttcgaccactgtcaatggaggatttggcaccgacgctgatgctgaagatgcggtagccgctgacagatcgccgacaacgtcctcggcgggtgtacgctgctgggaaccagacccaccggcgggcacgacgaccgaaggggtacgagcgcctgtggaagttgaagaaggaggggccctgacaggaaaagggcggtccatgacccgtcagctaaaaactatgctcgaaatatgacattaggaagagcttaagcttacttggtgccatgaacttcccagtggccttggaagcggggcacccgttgtcgttgctgccgctgcccctgcgatggtgacgattggtccgtcatgggcggcggcggtggtggagtcaaatccaaaggaggtagcgttggagggctcacgcccctctgcctgtcctgggcctgaggttcggcctcctttgccccaccaaccgttttctggcgcttctgggaggagcccgatcaaggggtgggtccgagacaaaagacccatcggcgcgacgcagtcgatgtcgtctttcttccccccgacctcccggtggccgaatcaaggggtgggtccgaaacaaaggacccatcggcgcgatgtagtcgaggtcgcccctcttccccctgcctctcggcgacgtccggggtaaaggagctgcatgcaggctccttgcctttgcccgagaagctgggccccacagggggaccctgagggccacatcaacaggctgggggcctccggctggtgtaccaggaatatggatcccccaatgggggtcccggccgccggtctggagaaccgccacaccactctcatcaagggtcggcagccggaccagcaccgctgaccgcaaccctgggtcgtcgcagagtggtgaaatgccctggggaggcatcaaggatttggggatgaaagcctcaccggtaatccccctcacgaaaatttccaactcctcccaggtcaggtcagtcctaggcccgcgcaggatcctaccaatgtcactggagccggtgaaccaacatcacagacgcggccttccctgcagtgacatgactcggcgcctcaggaaatcaccgagtacgtgcattgaggttaggccgccaaccgctagttccttgatcctatccaggatgggcacaaactctagcaccaagcgtggtttttccctccactgcttccggctgagattgggcccgtcactcggaagggcaagacggtcgctgacctcagtatgggcaatcacccagttgtgtcgccagttctcccacctcgtgttgccaagagaggcgatgtaggtcactgtcggatctgaccttgtctggaaatagtaggccccaacgtggtctttgcccttcccagacctcaccaacacaaaaaactggcgaaagagggaagtacaagctgccactcccacgaacatctcacaaaaatgaacaaagatggctacatggagaatggagtggggcgtgagatgctggagttggagcccgaactcctccaacaacaacagaaagaacggcgaaatcggcagcgccaatccgcagaagagataggagacgaagagcacaaactcccccacgacaagattgccgaggggaatagtgctggcctggatcctcccggcgagcgcaggcgaaccccatccgagcatacggcgcaccgagtcgagcgcctcctcagtctggtagtgatcagggcgaaccagcgaggccatggcaaccgcggcggccggaaactgaggagcacgaacacggagaagcgaggaaagctcggaggcgaaaaggcagagcagttaggaaagaatgcggaggcaaaaccactgcgcacaagagaccctccttcaagagatggctcctcacacgctccggaaaaatccgcgtggcgcgtacctagcgcccgagcaactcagtcgctgacagaggaacccgagcctgcaagtcacatggctggggcgctggtctccatgcgcaggaagaacaaaccgccgtgcgctcccatgccgccttggggccgctgctgaaaagtattctcaacatgggcggtgccaacagggcgccccacgcgcgcggggcacgaccgaaccgccatgcgtggggggccacacaccagtttaccgcaaagacgggcgcaacggttggggtgaccagtagcaaactgacagcgtgtgtgaaagtcgcctagaggggggggtgaatagggcgaatctgaaatttacaaacttaatcacaactacaagccgggttagcgttagaaatataatcgagtccgagagagagggtgcaaaacaaatcgcaagcgaatagagagtgtgacacgcggatttgttttaccgaggttcggttctcgcaaacctactccccgttgaggtggtcacagagaccgggtctctttcaaccctttccctctcgcaaacggtccctcggaccgagtgagcttcttcttctcaatcaaacgggaacgaacttccccgcaaggaccaccacacaattggtgtctcttgcctcggttacaattgagttgttcgcaagaaagagtgaaagaaagaagcaatccaagcgcaagagctcaaaagaacacaacaaatctctctcacttaacactaaagcttttgtcgaattgggagaggatttgatcacttgggtgtgtctagaattgaatgcaagagctcttgtaagtagttggaaggtggaaaacttggatgacttgaatgtggggtggttgggggtatttataaccccaaccaccaaactagccgtttggtggaggctgctgtcgcatggcgcaccggacagtccggtgcgccaccggacactgtccggtgcgccagccacgtcaccaggtcgttgggtttcgaccgttggagctctgtcttatgggcccacatggctgtccggtggcgcaccggacaagtcctgtagactgtccggtgtgccactcgcgtgtgctctgtcctctgcgcgcgcaggcacgcatttaatgcgttgcagtcgaccgttgcgcgcgaagtagccgttgcaccgctggctcaccggacagtccggtgtgcaccagacatgtctggtgaattatagcggagcggattcccgaagctggtgacttcagagtcgctcttccttggagcaccggacactgtccggtggtgcaccggatagtccggtgaattatagcggagcgcctctgagaattcccgaaggtgttgagttgggcttggagttccctggtgcaccggacactatccggtggcacaccggacagtccggtgcgccagaccagggcacacttcggttgtcccttgctctttttgttgaacccttttctttgtctttttattggctttttgtgaacctttggcacctgtataacttatagactagagtaaactagttagtccaattatttgtgttgggcaattcaaccaccaaaatcaattaggaaaataggtgtaagcctaattccctttcaatctccccctttttggtgattgatgccaacacaaaccaaagcaagtatagaagcacataattgaactagtttgcataatgtaagtgcaaaggttacttagaattgagccaatataaatacttataagatacacatggattgtttctttagttttaacattttggaccacgcttgcaccacttgttttgtttttgcaaattcttttgtaaatccttttcaaggtccttttgcaaatagtcaaaggtaaatgaataagattttgcgaagcattttcaagatttgaaattttctccccctgtttcaaatgcttttactttgactaaacaaaactcccccttaatgaaatcctcctcttagtgttcaagagggttttgatgttaattttgaagagggtataccaatttgaaattatataacacataaaataccaatttgaaaatacttctttaaaaccaaattgaaagactaaaatttttgaaattggtggtggtgcggtccttttgctttgggctcatgctctctccccctttggcataaatcgccaaaaacgaaatcattagagccctttttaaactacttttgcaccctttggtaaataacatgtgagtgaagattataccaaagatgaagagttgctcggagcgacagcgaaggatgagttacggagtggaagcctttgtcttcaccgatgtggcagaacctccaagttatcgggcccacatgcacctgtccttgtctcaaagacctcagacggtcgtgcatgtgcaccagataacttaacaggatccgtccgattgccccaaggacaccggataaaccacttacaaccagaaccgcgagattaagtaacacaaatcacacacaccaatatttttgcagcggaaatcttattaccaaattttacaagttacaaaaattttatattattttatcggagtgattacaaaagtataagtttgaaatatatgctagctcaaatgaccatcatcagtaagaagataaagacgggttatacttatataagaaggtcgagcccaccggcacttaacaccatcaaaagcagcacaaagttagaacctgaaaaacaacagggaataaaaccctgagtatggaattactcagcaagacttacccgactaaagaaaagactctcaagggtatgctggatttaggaatcaaggagaggctttagcaagaatcaacttagatacttttgcagaaatagcttactaaagtgagttcttactttcaatattttaatgccagattaaatattaatagactctatttgcatctggtctaatttcatcatctcatcaatacaacatcatttttattcatgaggttcacatcctgacttaggttgcaggtcagtgatcaagtctccactcttcggggatataacggcgatccgaatcgatttactcagctgaggatctctaaccacacgacatatgtagcacttaacccttgcatatgtcaaccgttcccacagatcctccacaacgtgaaccggtccgcgctacccgggagcacagtactcctccatccagcctctagccaggagggcacacgctactcccaccatctcccacgcccagtgcgcggttgtcttttcacgtatggaatagccgggttcaagcttaccctgtcccatttccagggcatgtggccagttaagatagtccttgatctatcaggcctacatacacatccaatccttaattgacccgggcggagcatcacctgttcctagcccaagtcccgatttaagtacttccatccttaggagtgtttgtgctccctaggatgaaaagagcattatagggaactttgcagtaagatcccaccacggtctcaatgaaaatattcttgcaggtagaagccatctttcctcaggataacccctgagcaaggccttaacgcaaaagacaacctctatccacaagatctgagcagggctaagcatttttgtaaatcatattttgatacttcaccagaagtatctataaaggtatggatttcaaggaaggcaatgcatcaaagggtttccaagcaactcctataaacctaatgcacatttcactagacttaaagtgtgcaaaaattatttaaaaacacaaggaaggggttgcatgcaccggggcttgcctggaataaacactacgttagtgttgttaggtgacgtccacttgacgatcatccttgtcctagcacttgatcaggtaggttcgtttatcagcatctccatgcggagtagtccgcgcttggggtcgacttggctcgtcttccgcatcacacgatcaattatcgtacctaattgagatacacgatgcacatgaatgcatataaacaggaatatcaaaaaccctaaatagtgctacgcgatagcgaactaaacacctagcggcgaggcattgtacaattttatacggacacactagttatcgacatacgactacgcgcaataatcacaaaataataaactatacatactaattacatcacgcacatttcttctgttcaatcacatctaattttattatcaagcaagattaaattataaacacacattatcatttttagtaaaatatatttcagaggtctagtaaaacctagactcgctattattaaatgccaacaacttaaaataattatagaaacaatctaattaactctttaaactgtgtatcttaattaacttgatttaccgatttatctaaatcgaacatcacaatatacatatgctaaattaataacaattatcgcgaccaacaattatatttaatctatttatatacctagttgactggaataatgaatcaacttaccctcattaattccgacttgaaaccacgaaatcgacgacgctttccggtccgcgcataacaccaaatatgtgacgagcaacgtactagacttcattattctatccgatcaaattttattctgggactaattcactactgcgatttacgcgcacgtcaccggcccacgttaatagcgcaagtataccaaactgacgagaaatattaaaacgaaaagcgagagcgacgacaactcaccaataacttaatatgtcttgaaggccatgagcacagctacgattttcaattctgccattacctcgagcacctcgcgagtgacactgtggacgagtcgaggacacaggatacgaaggcacggctggtggtgtcctgcagctaaagccagcgagctgcgaaggacgcagttcggcgcgcgcaaccaaggcgtacagaggaaccggggtgtcgggcgcgtgtgcgcggcaacgcacggccaacgagtaaagacggcgcgacggccatgatacaggcgagctggatgccggcaagctgacggcgctgggaaactcgcgagcaggatctggagcagccatggcgagctagagacgaacggtcggacatggagcagcacaacagcgcacgacgaggagtctagctcggcagcttctgggagccaagcacaaatggcagagaagggttgcggcctgaggaagaagtgctgagacgagtgccgagaggagcagagaaaagaatgctaagacgcctgagtgaacgctggagacgtgtaagaaataagctcctgctgagcgatggatggataagaaagagaatgagatttttttcagaaaatggatcaggccgatgagcgttatatacagacaagggcctgagaaaatatcctgatggagggcggcgggacaatacaaagaagaggcttatgctcgcgtagaagaaaagaatttggtctctggcatgcgtagaagaaaagaatttggtccctcgcatgcgtccagaaactgggcaaggacataaggttgagcgtgtcttcaagagttttccaaggtcgagggctattagaaaaataggatatttcttctttctttcttaagaaatactggtgctagaattagagtttgggtgagatataaatgaaccggactaaaacaaatatactacttgagacaccattaatttagttgaacccagataaaagttatctgttatttatatctgaagatttggatataggcgaggaacacacgaacccaaccaaacaagatcggcttggataattcaaactatgtcaaatttggtttaaaacagataaacctcatctgttctgaatattgggatttggatttaaaataaggagtaaacgggccaatttaaagcgctatcgccaatttaaagcgctatcgaataatagattattttctcggatttttaaataggaaagcgaatcggctaaccattgttctggttttggttagttcgagtttggtttatttaaatagcccgcccctagtagtgtttctaccaaattcgtagggatcgctcgaacagagcgaaatacttagttgacctttccagttcgtctaaatcgattaactttatttaaactagtaccagaccacgtcattatctttgatatcttagactgcgctagattggatttaattcaaaaccggaaacttttatccgtggtctcgacacccgtttccacggccacagataatttacgcggagaatcggatctcaattataattccttggacgcgacttctcagttgacgagtggggacataattatttgcatcgaaaacttagtcgtcgagttctacttaatctgttcgaggtaaaatcatccgagtggatcggacttccgaattcgtattcacgcgagcgatgaattttaaataatcaccggacgcaccgatttttggaacaactatgttccgaacagcacgaaaatttaggacgagcccggatagataaaaataaaaaaaacgatgtcgcactcgcgacagacgaaatagatgcgatataaaatcgcgatagagagaataattaaaatttaacatttgttttatccactgatattacgtgcttaaatccatactcgttgtcgagcggaatataaacaccaagggtgttacacccctccccccttaaaagaatctcgtcccgagatttgaaacgaaagacttctaagagtagagaagcatgtaacccatgtccatatcagcgataatcatgagacatttccaaataaaggcgagtgtctcaggatgttgtttctctagtggacataacatgtatcgccttaggctaatttagagatgtccaacaatagagacaatgtctgccagaggaacacataaggttccatgtgtgcagtttgctttttctgatgacattgcactatctgagtctattgagcgagcggcaattacgcgattttaccaaaacagaatcagatgcaacctcttgggtaaaacatacagaaagaggtttaccaacaagtggtcacggtaagttcatagcacacgagatgggtgtgaatgtcgaataacatcacagttgacccgtggctagccagaaaatccaagtccctgaaaggtgatatagattcgagaacatcaccaacggagggatctgtaaatgttgtttttgtaacaaatccattttatcgagcactaatcatggcttgatatggtcacacatgctggaaaagcacacgtgaggcgatcgagacatgactagagcaatggctaggtggttattagttgacctaatctcgattttcgtaagtactttcttaggatgggttgaactaaagtgagtttagataactcgataaaacaatctctaaactcaaactttattcacaatgcagttacaagttagtaaaaaccaacttgttgaactacttttgacattgagtcggtcctctcagtaccatcggtaagccaacgatcgagagtttactttggctaacaggagatcatgcacttgggtggaaattcatttggtcaggttgttcatctgtttcttcatgcgagatgaattatccactgacttggtttgggaataaatggattgaataagagagtgaatgaacaaactcctgcatctccacagcaggggaaaaagccaatctccattttgggagctaatcagctgtctctcgacactaaacgctctaaggattcatctttacacaaaggatgtaaagggaacttgtatgagtagtcactaccaagatcaaaagaaataagaccacacatgaaagtgttatgtccatttgatccggcaaagatgatagatgttgcttgataacttgagaaacaacatagaaactgtttcaaagaaggagtccacggaagaccacacatcggtgtagttccacaatggatcatgactagaggctccgataccagcatgcgccaagcagcagaatcctgtgtgcacattcacaggaggctcttagtttccccggggtatcataagtcattaatcgagacgccattatcgaactggcactaataatgaatctcgcagggtaagaataatctacgtaaagataacatatcgatatagtctaataatggattatgactactaacggtgataccagcggatgccaagtagcgcaaccatgtgtgtgcatccataggaggccctcggtttcgtcacggcaccattggttttagtcataacgccattaccagacgtaaccaataagaaatctcgcgcgacacaaatagactgagcaaggatggcaatatacaaaaatagactccacttgtaagaatggttacaagtagagagccaaatagatcatggcccgatgaaatgaacaaggcatggccataacctaaatttgatgaaaggagtacgacgggagactgttgcttcagccccaagcatatttctatgcccatcgtagagatcacaaggtcaaggatcagtatctgactagatacaggggaaaacaatattaagattaagttggaatgccttcgatagatatgggggaaaccaaagacatcaaattccagaaaaatggttggacatgtctttcctaggttgggtcgataaagtaacatggtaatccacaaggagaggccaaataccatagagacctcaacttgcatcaactgaacaaggaaatggttctagaaggagacatggtttgagatccttgatttaaggttgggtacattttatgtccaacaaagaaattatctaaacattcatttacatgagtttagtcgtagagggataatggtaaattcaaatttgggtctcagtttacctaataagaacatggcctaattttgggtttaggcaaaacaagtcactaaccttctatcgacacatcaagcacaagggcaaacacatatagcatctaaacataatacctaaggaacggagaacaactattttatcgaagttcataatacaacattacaccacattatctacaatcactggttactggaataaggatgagagaagcatcttgggtgtataggtgacaaacatgatgcaacaatcaggatgcatgctcgtcctacacgtcctcacgagttttgccaacataatgtggcattagcgttctatctcggtggcatatttacgactctcacggtattttgctagtcgtcagctacacatacgttttcgaggttagtatacctgcagaaaattcatcacagcccaattccccatgatgcaattcacacatgacagtttatcacagtttatactccatatattgctatatggaggccagctcatcattaagcgccgagccacgcataggcgctgttgccacactttaaccatagggcaactcattatggtaactcaccttcttacctgagcgtaggtgcgtcgttacaagtacattacatttctcagtattcccatgtctgtatacccatacacatccatggggtacagaattcccagaaaagtaaatactccacatcgcagccttcatatatacatatgtggaacatgtatataatcaagcgctttttatgctcttccctagaccgacgtttgttcggtcatgctctcacatctcaccttacctgagcatcgatccattcaaaactgaatggccttaaaaataacaatacacatgtatgcaatacccacccggttgtggttttcaactaagccacctgatagtccttaatttagggcttaagagaggatgtcgctagcattatagtttttcaaatctgattttcaaaaccaaacaatgtgtttagttgaagataggtgttctaaaaccaaaacttttgttttgaaaatacgtatgtgatcgtacatacttaatccagctccgataccagctgtggcagaacctccaagttatcgggcccacatgcacctgtccttgtctcaaagacctcagacggccgtgcatgtgcaccagataactta

SEQ ID NO: 69774 - DNA, 3042 bp, Zea Mays
gtgcctgctgccatgctcgcgccggtcacctgttgttgcgcccgcgcctactcgacgtcgcgctcgcgccaccgccggtggtactgttgttctatatgatcgtaaagttgtccggaacttccgtaaagatggccataactggaagaaaaagaaagatggcaagactgtccaagaagcccatgaaaaactaaagattggtaatgaagaaaaggttcatgtgtattatgctcgaggagaggatgatccaaatttctttcgcagatgctactggctacttgacaaagagttggagcgcattgtcctcgtgcattatcgtcaaacatctgaggaaagtgccttaccaccttcgcatgtagaagctgaagttgcagaagtgcctcggatcaatatgattcattacacctcctcaacagattcagcctctgctcatactgagctatcttcttctgctgctgctgcaccagaagatatcaactcaaatggtggtggggcggtttctagtgaaaccgacaatcaaggttctagcctggaatcattttgggtagatctattggagtcatctatgaaaaatgatactcctgttgatgcttctgcttgcggtggatctttggtatcaaatcagcagactaataatgggatgggagattctggaaataatatcttgtatattaatgccacaagtaatgctatcttttctccaccaactaatgtggtttcagaagcttatgctaatcctggccttagtcaagtatcagagagttactttggatctctgaaagatcaagcaaaccatgctccatctcttttaacatcagatctggattcacaatcaaagcaacatacaaattctttgatgaaaactccggtgtctgataacatgccaaatgatgtacctgctaggcagaacagtcttgggttatggaaatacttggatgatgatattagtttagatgataatccaagctcgggcatactccccactgaacaggtgactggcgaaataccctttcagatcactgagatatcctcagaatgggcttattgtactgaggacacaaaggtccttgtggttggatgtttccatgagaactacagacatctggctgggaccaatctcttctgtgtcattggtgaccagtgtgttgatgcaaatattgttcaaactggcgtttaccgtttcattgctagaccacatgctcctggacgagtcaatctttatttgactttggatgggaaaacaccaatcagtgaggttttgagttttcactatcgtatggtgcctgacagtcaaaacttggctgaggatgagccccaaaagtcaaagcttcagatgcagatgagactagctcgattgttgttcaccacaaacaagaaaaagatagcacccaagttacttgtagaaggaagcaaggtttccaatctcttatcagcatcgacagagaaggaatggatggatctgtcaaaatttgttactgattctaaaggcacttatgttccggccactgagggattgcttgaactagtactgcgtaatagattgcaagagtggcttgttgaaaaattaattgaaggccacaagtcgactggccgcgatgatctaggacaagggcctatccatctgtgttcttgcttgggctatacttgggccattcacttattttctttgtcaggattctccttggatttccgtgattcttctggttggacagctttgcattgggccgcatactgtggaagggaaaaaatggttgctgctcttttgtctgctggagcaaatccaagcttggttacagatcctactcatgatgtccctggtggacaaactgctggtgatctggctgctggacaaggttatcatggcttagctgcatatctttctgagaaagggctgactgctcattttgaggctatgtcactgtccaagggtaagcgatcaacatcaaggacagagtcactaaaacggaataccaaggaatttgaaaaccttagtgaacaagaattgtgcttacgagaatctttagcagcctaccgcaatgctgctgatgctgctagcaacatacaagccgcactcagggagcgaactcttaagcttcaaacaaaagcaattcagttggccaatcccgagaatgatgcatctgcaatagttgctgctatgaggattcagcacgcataccggaactacaacagaaagaaaatgatgagagctgctgcaagaatacagagtcatttccgaacatggcagattaggaggaacttcatgaacatgcgaagacaagctatcaaaatacaagctgcatacagaggtcaccaagtgagaaggcagtaccgcaaggtattatggtccgttggagtagtggaaaaagctatcttgcggtggaggaagaagagaaaaggcctgcgtggcattgcaactggaatgccagtagcaatggccacagacgcagaagcagcaagcactgcagaggaggactactaccaggttggtcggcaacaagccgaggacaggttcaatagatcagtggtacgtgtccaagctttgttccgttctcatcgggcgcagcaggagtaccggaggatgaaggttgctcatgaggaggccaaggtggagttcggtcgaaagtagttaagacgggcatagattcaagatctgaagtgacttgttgttccttgtagggggttggctagttcttctagttctttgtatatccgaaggaacaggcgtagcttgcggatgacgtacattctaggaacatctgacgctcgtagtcagtctgccaactgccgttaggcttcttctgtggtgtgtatttggctgggttttagttgggcgaaaacggcattgtgctttattaggtttgatttgtatggacggacgcgagtacgaataaggttgtaaatgctgataataatttcacctgactataaatccaggtggattgcaggcaccatttgttttttttctttatttgatgttttttccttggcagtaccgctacgtacaaccattatacgtcttgcttttgtgataattcactccagcac

SEQ ID NO: 69775 - DNA, 3249 bp, Zea Mays
tcgtcttctcccccccgtcagagcgagactgcgagagacagcgcgaaggtagagagagtgtgtggaacagtggaagcagcagcaaacgcgaccatggcgggtggcgccggcgggcgggacccgctcgtcgcctccgagatccacggcttcctcacctgcgcagacttgaactttgacaagctgatgatggaggctgggacacgctggttccggccgaatgagatctatgcggtgctggcgaactatgcaaggttcaaggtccatgctcagcccatcgacaaaccaattagtggtactgttgttctatatgatcgtaaagttgtccggaacttccgtaaagatggccataactggaagaaaaagaaagatggcaagactgtccaagaagcccatgaaaaactaaagattggtaatgaagaaaaggttcatgtgtattatgctcgaggagaggatgatccaaatttctttcgcagatgctactggctacttgacaaagagttggagcgcattgtcctcgtgcattatcgtcaaacatctgaggaaagtgccttaccaccttcgcatgtagaagctgaagttgcagaagtgcctcggatcaatatgattcattacacctcctcaacagattcagcctctgctcatactgagctatcttcttctgctgctgctgcaccagaagatatcaactcaaatggtggtggggcggtttctagtgaaaccgacaatcaaggttctagcctggaatcattttgggtagatctattggagtcatctatgaaaaatgatactcctgttgatgcttctgcttgcggtggatctttggtatcaaatcagcagactaataatgggatgggagattctggaaataatatcttgtatattaatgccacaagctatcttttctccaccaactaatgtggtttcagaagcttatgctaatcctggccttagtcaagtatcagagagttactttggatctctgaaagatcaagcaaaccatgctccatctcttttaacatcagatctggattcacaatcaaagcaacatacaaattctttgatgaaaactccggtgtctgataacatgccaaatgatgtacctgctaggcagaacagtcttgggttatggaaatacttggatgatgatattagtttagatgataatccaagctcgggcatactccccactgaacaggtgactggcgaaataccctttcagatcactgagatatcctcagaatgggcttattgtactgaggacacaaaggtccttgtggttggatgtttccatgagaactacagacatctggctgggaccaatctcttctgtgtcattggtgaccagtgtgttgatgcaaatattgttcaaactggcgtttaccgtttcattgctagaccacatgctcctggacgagtcaatctttatttgactttggatgggaaaacaccaatcagtgaggttttgagttttcactatcgtatggtgcctgacagtcaaaacttggctgaggatgagccccaaaagtcaaagcttcagatgcagatgagactagctcgattgttgttcaccacaaacaagaaaaagatagcacccaagttacttgtagaaggaagcaaggtttccaatctcttatcagcatcgacagagaaggaatggatggatctgtcaaaatttgttactgattctaaaggcacttatgttccggccactgagggattgcttgaactagtactgcgtaatagattgcaagagtggcttgttgaaaaattaattgaaggccacaagtcgactggccgcgatgatctaggacaagggcctatccatctgtgttcttgcttgggctatacttgggccattcacttattttctttgtcaggattctccttggatttccgtgattcttctggttggacagctttgcattgggccgcatactgtggaagggaaaaaatggttgctgctcttttgtctgctggagcaaatccaagcttggttacagatcctactcatgatgtccctggtggacaaactgctggtgatctggctgctggacaaggttatcatggcttagctgcatatctttctgagaaagggctgactgctcattttgaggctatgtcactgtccaagggtaagcgatcaacatcaaggacagagtcactaaaacggaataccaaggaatttgaaaaccttagtgaacaagaattgtgcttacgagaatctttagcagcctaccgcaatgctgctgatgctgctagcaacatacaagccgcactcagggagcgaactcttaagcttcaaacaaaagcaattcagttggccaatcccgagaatgatgcatctgcaatagttgctgctatgaggattcagcacgcataccggaactacaacagaaagaaaatgatgagagctgctgcaagaatacagagtcatttccgaacatggcagattaggaggaacttcatgaacatgcgaagacaagctatcaaaatacaagctgcatacagaggtcaccaagtgagaaggcagtaccgcaaggtattatggtccgttggagtagtggaaaaagctatcttgcggtggaggaagaagagaaaaggcctgcgtggcattgcaactggaatgccagtagcaatggccacagacgcagaagcagcaagcactgcagaggaggactactaccaggttggtcggcaacaagccgaggacaggttcaatagatcagtggtacgtgtccaagctttgttccgttctcatcgggcgcagcaggagtaccggaggatgaaggttgctcatgaggaggccaaggtggagttcggtcgaaagtagttaagacgggcatagattcaagatctgaagtgacttgttgttccttgtagggggttggctagttcttctagttctttgtatatccgaaggaacaggcgtagcttgcggatgacgtacattctaggaacatctgacgctcgtagtcagtctgccaactgccgttaggcttcttctgtggtgtgtatttggctgggttttagttgggcgaaaacggcattgtgctttattaggtttgatttgtatggacggacgcgagtacgaataaggttgtaaatgctgataataatttcacctgactataaatccaggtggattgcaggcaccatttgttttttttctttatttgatgttttttccttggcagtaccgctacgtacaaccattatacgtcttgcttttgtgataattcactccagcac

SEQ ID NO: 69776 - DNA, 3268 bp, Zea Mays
tcgtcttctcccccccgtcagagcgagactgcgagagacagcgcgaaggtagagagagtgtgtggaacagtggaagcagcagcaaacgcgaccatggcgggtggcgccggcgggcgggacccgctcgtcgcctccgagatccacggcttcctcacctgcgcagacttgaactttgacaagctgatgatggaggctgggacacgctggttccggccgaatgagatctatgcggtgctggcgaactatgcaaggttcaaggtccatgctcagcccatcgacaaaccaattagtggtactgttgttctatatgatcgtaaagttgtccggaacttccgtaaagatggccataactggaagaaaaagaaagatggcaagactgtccaagaagcccatgaaaaactaaagattggtaatgaagaaaaggttcatgtgtattatgctcgaggagaggatgatccaaatttctttcgcagatgctactggctacttgacaaagagttggagcgcattgtcctcgtgcattatcgtcaaacatctgaggaaagtgccttaccaccttcgcatgtagaagctgaagttgcagaagtgcctcggatcaatatgattcattacacctcctcaacagattcagcctctgctcatactgagctatcttcttctgctgctgctgcaccagaagatatcaactcaaatggtggtggggcggtttctagtgaaaccgacaatcaaggttctagcctggaatcattttgggtagatctattggagtcatctatgaaaaatgatactcctgttgatgcttctgcttgcggtggatctttggtatcaaatcagcagactaataatgggatgggagattctggaaataatatcttgtatattaatgccacaagtaatgctatcttttctccaccaactaatgtggtttcagaagcttatgctaatcctggccttagtcaagtatcagagagttactttggatctctgaaagatcaagcaaaccatgctccatctcttttaacatcagatctggattcacaatcaaagcaacatacaaattctttgatgaaaactccggtgtctgataacatgccaaatgatgtacctgctaggcagaacagtcttgggttatggaaatacttggatgatgatattagtttagatgataatccaagctcgggcatactccccactgaacaggtgactggcgaaataccctttcagatcactgagatatcctcagaatgggcttattgtactgaggacacaaaggtccttgtggttggatgtttccatgagaactacagacatctggctgggaccaatctcttctgtgtcattggtgaccagtgtgttgatgcaaatattgttcaaactggcgtttaccgtttcattgctagaccacatgctcctggacgagtcaatctttatttgactttggatgggaaaacaccaatcagtgaggttttgagttttcactatcgtatggtgcctgacagtcaaaacttggctgaggatgagccccaaaagtcaaagcttcagatgcagatgagactagctcgattgttgttcaccacaaacaagaaaaagatagcacccaagttacttgtagaaggaagcaaggtttccaatctcttatcagcatcgacagagaaggaatggatggatctgtcaaaatttgttactgattctaaaggcacttatgttccggccactgagggattgcttgaactagtactgcgtaatagattgcaagagtggcttgttgaaaaattaattgaaggccacaagtcgactggccgcgatgatctaggacaagggcctatccatctgtgttcttgcttgggctatacttgggccattcacttattttctttgtcaggattctccttggatttccgtgattcttctggttggacagctttgcattgggccgcatactgtggaagttttcttttgctagggaaaaaatggttgctgctcttttgtctgctggagcaaatccaagcttggttacagatcctactcatgatgtccctggtggacaaactgctggtgatctggctgctggacaaggttatcatggcttagctgcatatctttctgagaaagggctgactgctcattttgaggctatgtcactgtccaagggtaagcgatcaacatcaaggacagagtcactaaaacggaataccaaggaatttgaaaaccttagtgaacaagaattgtgcttacgagaatctttagcagcctaccgcaatgctgctgatgctgctagcaacatacaagccgcactcagggagcgaactcttaagcttcaaacaaaagcaattcagttggccaatcccgagaatgatgcatctgcaatagttgctgctatgaggattcagcacgcataccggaactacaacagaaagaaaatgatgagagctgctgcaagaatacagagtcatttccgaacatggcagattaggaggaacttcatgaacatgcgaagacaagctatcaaaatacaagctgcatacagaggtcaccaagtgagaaggcagtaccgcaaggtattatggtccgttggagtagtggaaaaagctatcttgcggtggaggaagaagagaaaaggcctgcgtggcattgcaactggaatgccagtagcaatggccacagacgcagaagcagcaagcactgcagaggaggactactaccaggttggtcggcaacaagccgaggacaggttcaatagatcagtggtacgtgtccaagctttgttccgttctcatcgggcgcagcaggagtaccggaggatgaaggttgctcatgaggaggccaaggtggagttcggtcgaaagtagttaagacgggcatagattcaagatctgaagtgacttgttgttccttgtagggggttggctagttcttctagttctttgtatatccgaaggaacaggcgtagcttgcggatgacgtacattctaggaacatctgacgctcgtagtcagtctgccaactgccgttaggcttcttctgtggtgtgtatttggctgggttttagttgggcgaaaacggcattgtgctttattaggtttgatttgtatggacggacgcgagtacgaataaggttgtaaatgctgataataatttcacctgactataaatccaggtggattgcaggcaccatttgttttttttctttatttgatgttttttccttggcagtaccgctacgtacaaccattatacgtcttgcttttgtgataattcactccagcac

SEQ ID NO: 69777 - DNA, 3131 bp, Zea Mays
tcgtcttctcccccccgtcagagcgagactgcgagagacagcgcgaaggtagagagagtgtgtggaacagtggaagcagcagcaaacgcgaccatggcgggtggcgccggcgggcgggacccgctcgtcgcctccgagatccacggcttcctcacctgcgcagacttgaactttgacaagctgatgatggaggctgggacacgctggttccggccgaatgagatctatgcggtgctggcgaactatgcaaggttcaaggtccatgctcagcccatcgacaaaccaattagtggtactgttgttctatatgatcgtaaagttgtccggaacttccgtaaagatggccataactggaagaaaaagaaagatggcaagactgtccaagaagcccatgaaaaactaaagattggtaatgaagaaaaggttcatgtgtattatgctcgaggagaggatgatccaaatttctttcgcagatgctactggctacttgacaaagagttggagcgcattgtcctcgtgcattatcgtcaaacatctgaggaaagtgccttaccaccttcgcatgtagaagctgaagttgcagaagtgcctcggatcaatatgattcattacacctcctcaacagattcagcctctgctcatactgagctatcttcttctgctgctgctgcaccagaagatatcaactcaaatggtggtggggcggtttctagtgaaaccgacaatcaaggttctagcctggaatcattttgggtagatctattggagtcatctatgaaaaatgatactcctgttgatgcttctgcttgcggtggatctttggtatcaaatcagcagactaataatgggatgggagattctggaaataatatcttgtatattaatgccacaagtaatgctatcttttctccaccaactaatgtggtttcagaagcttatgctaatcctggccttagtcaagtatcagagagttactttggatctctgaaagatcaagcaaaccatgctccatctcttttaacatcagatctggattcacaatcaaagcaacatacaaattctttgatgaaaactccggtgtctgataacatgccaaatgatgtacctgctaggcagaacagtcttgggttatggaaatacttggatgatgatattagtttagatgataatccaagctcgggcatactccccactgaacaggtgactggcgaaataccctttcagatcactgagatatcctcagaatgggcttattgtactgaggacacaaaggtccttgtggttggatgtttccatgagaactacagacatctggctgggaccaatctcttctgtgtcattggtgaccagtgtgttgatgcaaatattgttcaaactggcgtttaccgtttcattgctagaccacatgctcctggacgagtcaatctttatttgactttggatgggaaaacaccaatcagtgaggttttgagttttcactatcgtatggtgcctgacagtcaaaacttggctgaggatgagccccaaaagtcaaagcttcagatgcagatgagactagctcgattgttgttcaccacaaacaagaaaaagatagcacccaagttacttgtagaaggaagcaaggtttccaatctcttatcagcatcgacagagaaggaatggatggatctgtcaaaatttgttactgattctaaaggcacttatgttccggccactgagggattgcttgaactagtactgcgtaatagattgcaagagtggcttgttgaaaaattaattgaaggccacaagtcgactggccgcgatgatctaggacaagggcctatccatctgtgttcttgcttgggctatacttgggccattcacttattttctttgtcaggattctccttggatttccgtgattcttctggttggacagctttgcattgggccgcatactgtggaagggaaaaaatggttgctgctcttttgtctgctggagcaaatccaagcttggttacagatcctactcatgatgtccctggtggacaaactgctggtgatctggctgctggacaaggttatcatggcttagctgcatatctttctgagaaagggctgactgctcattttgaggctatgtcactgtccaagggtaagcgatcaacatcaaggacagagtcactaaaacggaataccaaggaatttgaaaaccttagtgaacaagaattgtgcttacgagaatctttagcagcctaccgcaatgctgctgatgctgctagcaacatacaagccgcactcagggagcgaactcttaagcttcaaacaaaagcaattcagttggccaatcccgagaatgatgcatctgcaatagttgctgctatgaggattcagcacgcataccggaactacaacagaaagaaaatgatgagagctgctgcaagaatacagagtcatttccgaacatggcagattaggaggaacttcatgaacatgcgaagacaagctatcaaaatacaagctgcatacagaggtcaccaagtgagaaggcagtaccgcaaggtattatggtccgttggagtagtggaaaaagctatcttgcggtggaggaagaagagaaaaggcctgcgtggcattgcaactggaatgccagtagcaatggccacagacgcagaagcagcaagcactgcagaggaggactactaccaggtggagttcggtcgaaagtagttaagacgggcatagattcaagatctgaagtgacttgttgttccttgtagggggttggctagttcttctagttctttgtatatccgaaggaacaggcgtagcttgcggatgacgtacattctaggaacatctgacgctcgtagtcagtctgccaactgccgttaggcttcttctgtggtgtgtatttggctgggttttagttgggcgaaaacggcattgtgctttattaggtttgatttgtatggacggacgcgagtacgaataaggttgtaaatgctgataataatttcacctgactataaatccaggtggattgcaggcaccatttgttttttttctttatttgatgttttttccttggcagtaccgctacgtacaaccattatacgtcttgcttttgtgataattcactccagcac

SEQ ID NO: 69778 - DNA, 2993 bp, Zea Mays
tcgtcttctcccccccgtcagagcgagactgcgagagacagcgcgaaggtagagagagtgtgtggaacagtggaagcagcagcaaacgcgaccatggcgggtggcgccggcgggcgggacccgctcgtcgcctccgagatccacggcttcctcacctgcgcagacttgaactttgacaagctgatgatggaggctgggacacgctggttccggccgaatgagatctatgcggtgctggcgaactatgcaaggttcaaggtccatgctcagcccatcgacaaaccaattagtggtactgttgttctatatgatcgtaaagttgtccggaacttccgtaaagatggccataactggaagaaaaagaaagatggcaagactgtccaagaagcccatgaaaaactaaagattggtaatgaagaaaaggttcatgtgtattatgctcgaggagaggatgatccaaatttctttcgcagatgctactggctacttgacaaagagttggagcgcattgtcctcgtgcattatcgtcaaacatctgagaaaccgacaatcaaggttctagcctggaatcattttgggtagatctattggagtcatctatgaaaaatgatactcctgttgatgcttctgcttgcggctatcttttctccaccaactaatgtggtttcagaagcttatgctaatcctggccttagtcaagtatcagagagttactttggatctctgaaagatcaagcaaaccatgctccatctcttttaacatcagatctggattcacaatcaaagcaacatacaaattctttgatgaaaactccggtgtctgataacatgccaaatgatgtacctgctaggcagaacagtcttgggttatggaaatacttggatgatgatattagtttagatgataatccaagctcgggcatactccccactgaacaggtgactggcgaaataccctttcagatcactgagatatcctcagaatgggcttattgtactgaggacacaaaggtccttgtggttggatgtttccatgagaactacagacatctggctgggaccaatctcttctgtgtcattggtgaccagtgtgttgatgcaaatattgttcaaactggcgtttaccgtttcattgctagaccacatgctcctggacgagtcaatctttatttgactttggatgggaaaacaccaatcagtgaggttttgagttttcactatcgtatggtgcctgacagtcaaaacttggctgaggatgagccccaaaagtcaaagcttcagatgcagatgagactagctcgattgttgttcaccacaaacaagaaaaagatagcacccaagttacttgtagaaggaagcaaggtttccaatctcttatcagcatcgacagagaaggaatggatggatctgtcaaaatttgttactgattctaaaggcacttatgttccggccactgagggattgcttgaactagtactgcgtaatagattgcaagagtggcttgttgaaaaattaattgaaggccacaagtcgactggccgcgatgatctaggacaagggcctatccatctgtgttcttgcttgggctatacttgggccattcacttattttctttgtcaggattctccttggatttccgtgattcttctggttggacagctttgcattgggccgcatactgtggaagggaaaaaatggttgctgctcttttgtctgctggagcaaatccaagcttggttacagatcctactcatgatgtccctggtggacaaactgctggtgatctggctgctggacaaggttatcatggcttagctgcatatctttctgagaaagggctgactgctcattttgaggctatgtcactgtccaagggtaagcgatcaacatcaaggacagagtcactaaaacggaataccaaggaatttgaaaaccttagtgaacaagaattgtgcttacgagaatctttagcagcctaccgcaatgctgctgatgctgctagcaacatacaagccgcactcagggagcgaactcttaagcttcaaacaaaagcaattcagttggccaatcccgagaatgatgcatctgcaatagttgctgctatgaggattcagcacgcataccggaactacaacagaaagaaaatgatgagagctgctgcaagaatacagagtcatttccgaacatggcagattaggaggaacttcatgaacatgcgaagacaagctatcaaaatacaagctgcatacagaggtcaccaagtgagaaggcagtaccgcaaggtattatggtccgttggagtagtggaaaaagctatcttgcggtggaggaagaagagaaaaggcctgcgtggcattgcaactggaatgccagtagcaatggccacagacgcagaagcagcaagcactgcagaggaggactactaccaggttggtcggcaacaagccgaggacaggttcaatagatcagtggtacgtgtccaagctttgttccgttctcatcgggcgcagcaggagtaccggaggatgaaggttgctcatgaggaggccaaggtggagttcggtcgaaagtagttaagacgggcatagattcaagatctgaagtgacttgttgttccttgtagggggttggctagttcttctagttctttgtatatccgaaggaacaggcgtagcttgcggatgacgtacattctaggaacatctgacgctcgtagtcagtctgccaactgccgttaggcttcttctgtggtgtgtatttggctgggttttagttgggcgaaaacggcattgtgctttattaggtttgatttgtatggacggacgcgagtacgaataaggttgtaaatgctgataataatttcacctgactataaatccaggtggattgcaggcaccatttgttttttttctttatttgatgttttttccttggcagtaccgctacgtacaaccattatacgtcttgcttttgtgataattcactccagcac

SEQ ID NO: 69779 - DNA, 3527 bp, Zea Mays
cttcctcctccccgctcgtcgtcttctcccccccgtcagagcgagactgcgagagacagcgcgaaggtagagagagtgtgtggaacagtggaagcagcagcaaacgcgaccatggcgggtggcgccggcgggcgggacccgctcgtcgcctccgagatccacggcttcctcacctgcgcagacttgaactttgacaagctgatgatggaggctgggacacgctggttccggccgaatgagatctatgcggtgctggcgaactatgcaaggttcaaggtccatgctcagcccatcgacaaaccaattagtggtactgttgttctatatgatcgtaaagttgtccggaacttccgtaaagatggccataactggaagaaaaagaaagatggcaagactgtccaagaagcccatgaaaaactaaagattggtaatgaagaaaaggttcatgtgtattatgctcgaggagaggatgatccaaatttctttcgcagatgctactggctacttgacaaagagttggagcgcattgtcctcgtgcattatcgtcaaacatctgaggaaagtgccttaccaccttcgcatgtagaagctgaagttgcagaagtgcctcggatcaatatgattcattacacctcctcaacagattcagcctctgctcatactgagctatcttcttctgctgctgctgcaccagaagatatcaactcaaatggtggtggggcggtttctagtggtgagagatgcttagatcccagcatttctttatttgattatatgtatacttctatgccattttctacatctccaagttttgaaatatgtaaatataggttttgaaactagacatttttgtagtgtttagtttatactacttaccgataaatgccagaatgttcaaaagtatactgtttaacttcatacgaaatttgatttctaactctttatttttgagagtatacttctgtatcttcttttggtgagtttgcagaaaccgacaatcaaggttctagcctggaatcattttgggtagatctattggagtcatctatgaaaaatgatactcctgttgatgcttctgcttgcggtggatctttggtatcaaatcagcagactaataatgggatgggagattctggaaataatatcttgtatattaatgccacaagtaatgctatcttttctccaccaactaatgtggtttcagaagcttatgctaatcctggccttagtcaagtatcagagagttactttggatctctgaaagatcaagcaaaccatgctccatctcttttaacatcagatctggattcacaatcaaagcaacatacaaattctttgatgaaaactccggtgtctgataacatgccaaatgatgtacctgctaggcagaacagtcttgggttatggaaatacttggatgatgatattagtttagatgataatccaagctcgggcatactccccactgaacaggtgactggcgaaataccctttcagatcactgagatatcctcagaatgggcttattgtactgaggacacaaaggtccttgtggttggatgtttccatgagaactacagacatctggctgggaccaatctcttctgtgtcattggtgaccagtgtgttgatgcaaatattgttcaaactggcgtttaccgtttcattgctagaccacatgctcctggacgagtcaatctttatttgactttggatgggaaaacaccaatcagtgaggttttgagttttcactatcgtatggtgcctgacagtcaaaacttggctgaggatgagccccaaaagtcaaagcttcagatgcagatgagactagctcgattgttgttcaccacaaacaagaaaaagatagcacccaagttacttgtagaaggaagcaaggtttccaatctcttatcagcatcgacagagaaggaatggatggatctgtcaaaatttgttactgattctaaaggcacttatgttccggccactgagggattgcttgaactagtactgcgtaatagattgcaagagtggcttgttgaaaaattaattgaaggccacaagtcgactggccgcgatgatctaggacaagggcctatccatctgtgttcttgcttgggctatacttgggccattcacttattttctttgtcaggattctccttggatttccgtgattcttctggttggacagctttgcattgggccgcatactgtggaagggaaaaaatggttgctgctcttttgtctgctggagcaaatccaagcttggttacagatcctactcatgatgtccctggtggacaaactgctggtgatctggctgctggacaaggttatcatggcttagctgcatatctttctgagaaagggctgactgctcattttgaggctatgtcactgtccaagggtaagcgatcaacatcaaggacagagtcactaaaacggaataccaaggaatttgaaaaccttagtgaacaagaattgtgcttacgagaatctttagcagcctaccgcaatgctgctgatgctgctagcaacatacaagccgcactcagggagcgaactcttaagcttcaaacaaaagcaattcagttggccaatcccgagaatgatgcatctgcaatagttgctgctatgaggattcagcacgcataccggaactacaacagaaagaaaatgatgagagctgctgcaagaatacagagtcatttccgaacatggcagattaggaggaacttcatgaacatgcgaagacaagctatcaaaatacaagctgcatacagaggtcaccaagtgagaaggcagtaccgcaaggtattatggtccgttggagtagtggaaaaagctatcttgcggtggaggaagaagagaaaaggcctgcgtggcattgcaactggaatgccagtagcaatggccacagacgcagaagcagcaagcactgcagaggaggactactaccaggttggtcggcaacaagccgaggacaggttcaatagatcagtggtacgtgtccaagctttgttccgttctcatcgggcgcagcaggagtaccggaggatgaaggttgctcatgaggaggccaaggtggagttcggtcgaaagtagttaagacgggcatagattcaagatctgaagtgacttgttgttccttgtagggggttggctagttcttctagttctttgtatatccgaaggaacaggcgtagcttgcggatgacgtacattctaggaacatctgacgctcgtagtcagtctgccaactgccgttaggcttcttctgtggtgtgtatttggctgggttttagttgggcgaaaacggcattgtgctttattaggtttgatttgtatggacggacgcgagtacgaataaggttgtaaatgctgataataatttcacctgactataaatccaggtggattgcaggcaccatttgttttttttctttatttgatgttttttccttggcagtaccgctacgtacaaccattatacgtcttgcttttgtgataattcactccagcac

SEQ ID NO: 69780 - DNA, 3189 bp, Zea Mays
ctccttcctcctccccgctcgtcgtcttctcccccccgtcagagcgagactgcgagagacagcgcgaaggtagagagagtgtgtggaacagtggaagcagcagcaaacgcgaccatggcgggtggcgccggcgggcgggacccgctcgtcgcctccgagatccacggcttcctcacctgcgcagacttgaactttgacaagctgatgatggaggctgggacacgctggttccggccgaatgagatctatgcggtgctggcgaactatgcaaggttcaaggtccatgctcagcccatcgacaaaccaattagtggtactgttgttctatatgatcgtaaagttgtccggaacttccgtaaagatggccataactggaagaaaaagaaagatggcaagactgtccaagaagcccatgaaaaactaaagattggtaatgaagaaaaggttcatgtgtattatgctcgaggagaggatgatccaaatttctttcgcagatgctactggctacttgacaaagagttggagcgcattgtcctcgtgcattatcgtcaaacatctgaggaaagtgccttaccaccttcgcatgtagaagctgaagttgcagaagtgcctcggatcaatatgattcattacacctcctcaacagattcagcctctgctcatactgagctatcttcttctgctgctgctgcaccagaagatatcaactcaaatggtggtggggcggtttctagtgaaaccgacaatcaaggttctagcctggaatcattttgggtagatctattggagtcatctatgaaaaatgatactcctgttgatgcttctgcttgcggctatcttttctccaccaactaatgtggtttcagaagcttatgctaatcctggccttagtcaagtatcagagagttactttggatctctgaaagatcaagcaaaccatgctccatctcttttaacatcagatctggattcacaatcaaagcaacatacaaattctttgatgaaaactccggtgtctgataacatgccaaatgatgtacctgctaggcagaacagtcttgggttatggaaatacttggatgatgatattagtttagatgataatccaagctcgggcatactccccactgaacaggtgactggcgaaataccctttcagatcactgagatatcctcagaatgggcttattgtactgaggacacaaaggtccttgtggttggatgtttccatgagaactacagacatctggctgggaccaatctcttctgtgtcattggtgaccagtgtgttgatgcaaatattgttcaaactggcgtttaccgtttcattgctagaccacatgctcctggacgagtcaatctttatttgactttggatgggaaaacaccaatcagtgaggttttgagttttcactatcgtatggtgcctgacagtcaaaacttggctgaggatgagccccaaaagtcaaagcttcagatgcagatgagactagctcgattgttgttcaccacaaacaagaaaaagatagcacccaagttacttgtagaaggaagcaaggtttccaatctcttatcagcatcgacagagaaggaatggatggatctgtcaaaatttgttactgattctaaaggcacttatgttccggccactgagggattgcttgaactagtactgcgtaatagattgcaagagtggcttgttgaaaaattaattgaaggccacaagtcgactggccgcgatgatctaggacaagggcctatccatctgtgttcttgcttgggctatacttgggccattcacttattttctttgtcaggattctccttggatttccgtgattcttctggttggacagctttgcattgggccgcatactgtggaagggaaaaaatggttgctgctcttttgtctgctggagcaaatccaagcttggttacagatcctactcatgatgtccctggtggacaaactgctggtgatctggctgctggacaaggttatcatggcttagctgcatatctttctgagaaagggctgactgctcattttgaggctatgtcactgtccaagggtaagcgatcaacatcaaggacagagtcactaaaacggaataccaaggaatttgaaaaccttagtgaacaagaattgtgcttacgagaatctttagcagcctaccgcaatgctgctgatgctgctagcaacatacaagccgcactcagggagcgaactcttaagcttcaaacaaaagcaattcagttggccaatcccgagaatgatgcatctgcaatagttgctgctatgaggattcagcacgcataccggaactacaacagaaagaaaatgatgagagctgctgcaagaatacagagtcatttccgaacatggcagattaggaggaacttcatgaacatgcgaagacaagctatcaaaatacaagctgcatacagaggtcaccaagtgagaaggcagtaccgcaaggtattatggtccgttggagtagtggaaaaagctatcttgcggtggaggaagaagagaaaaggcctgcgtggcattgcaactggaatgccagtagcaatggccacagacgcagaagcagcaagcactgcagaggaggactactaccaggttggtcggcaacaagccgaggacaggttcaatagatcagtggtacgtgtccaagctttgttccgttctcatcgggcgcagcaggagtaccggaggatgaaggttgctcatgaggaggccaaggtggagttcggtcgaaagtagttaagacgggcatagattcaagatctgaagtgacttgttgttccttgtagggggttggctagttcttctagttctttgtatatccgaaggaacaggcgtagcttgcggatgacgtacattctaggaacatctgacgctcgtagtcagtctgccaactgccgttaggcttcttctgtggtgtgtatttggctgggttttagttgggcgaaaacggcattgtgctttattaggtttgatttgtatggacggacgcgagtacgaataaggttgtaaatgctgataataatttcacctgactataaatccaggtggattgcaggcaccatttgttttttttctttatttgatgttttttccttggcagtaccgctacgtacaaccattatacgtcttgcttttgtgataattcactccagcac

SEQ ID NO: 69781 - DNA, 3190 bp, Zea Mays
ctccttcctcctccccgctcgtcgtcttctcccccccgtcagagcgagactgcgagagacagcgcgaaggtagagagagtgtgtggaacagtggaagcagcagcaaacgcgaccatggcgggtggcgccggcgggcgggacccgctcgtcgcctccgagatccacggcttcctcacctgcgcagacttgaactttgacaagctgatgatggaggctgggacacgctggttccggccgaatgagatctatgcggtgctggcgaactatgcaaggttcaaggtccatgctcagcccatcgacaaaccaattagtggtactgttgttctatatgatcgtaaagttgtccggaacttccgtaaagatggccataactggaagaaaaagaaagatggcaagactgtccaagaagcccatgaaaaactaaagattggtaatgaagaaaaggttcatgtgtattatgctcgaggagaggatgatccaaatttctttcgcagatgctactggctacttgacaaagagttggagcgcattgtcctcgtgcattatcgtcaaacatctgagattcagcctctgctcatactgagctatcttcttctgctgctgctgcaccagaagatatcaactcaaatggtggtggggcggtttctagtgaaaccgacaatcaaggttctagcctggaatcattttgggtagatctattggagtcatctatgaaaaatgatactcctgttgatgcttctgcttgcggtggatctttggtatcaaatcagcagactaataatgggatgggagattctggaaataatatcttgtatattaatgccacaagtaatgctatcttttctccaccaactaatgtggtttcagaagcttatgctaatcctggccttagtcaagtatcagagagttactttggatctctgaaagatcaagcaaaccatgctccatctcttttaacatcagatctggattcacaatcaaagcaacatacaaattctttgatgaaaactccggtgtctgataacatgccaaatgatgtacctgctaggcagaacagtcttgggttatggaaatacttggatgatgatattagtttagatgataatccaagctcgggcatactccccactgaacaggtgactggcgaaataccctttcagatcactgagatatcctcagaatgggcttattgtactgaggacacaaaggtccttgtggttggatgtttccatgagaactacagacatctggctgggaccaatctcttctgtgtcattggtgaccagtgtgttgatgcaaatattgttcaaactggcgtttaccgtttcattgctagaccacatgctcctggacgagtcaatctttatttgactttggatgggaaaacaccaatcagtgaggttttgagttttcactatcgtatggtgcctgacagtcaaaacttggctgaggatgagccccaaaagtcaaagcttcagatgcagatgagactagctcgattgttgttcaccacaaacaagaaaaagatagcacccaagttacttgtagaaggaagcaaggtttccaatctcttatcagcatcgacagagaaggaatggatggatctgtcaaaatttgttactgattctaaaggcacttatgttccggccactgagggattgcttgaactagtactgcgtaatagattgcaagagtggcttgttgaaaaattaattgaaggccacaagtcgactggccgcgatgatctaggacaagggcctatccatctgtgttcttgcttgggctatacttgggccattcacttattttctttgtcaggattctccttggatttccgtgattcttctggttggacagctttgcattgggccgcatactgtggaagggaaaaaatggttgctgctcttttgtctgctggagcaaatccaagcttggttacagatcctactcatgatgtccctggtggacaaactgctggtgatctggctgctggacaaggttatcatggcttagctgcatatctttctgagaaagggctgactgctcattttgaggctatgtcactgtccaagggtaagcgatcaacatcaaggacagagtcactaaaacggaataccaaggaatttgaaaaccttagtgaacaagaattgtgcttacgagaatctttagcagcctaccgcaatgctgctgatgctgctagcaacatacaagccgcactcagggagcgaactcttaagcttcaaacaaaagcaattcagttggccaatcccgagaatgatgcatctgcaatagttgctgctatgaggattcagcacgcataccggaactacaacagaaagaaaatgatgagagctgctgcaagaatacagagtcatttccgaacatggcagattaggaggaacttcatgaacatgcgaagacaagctatcaaaatacaagctgcatacagaggtcaccaagtgagaaggcagtaccgcaaggtattatggtccgttggagtagtggaaaaagctatcttgcggtggaggaagaagagaaaaggcctgcgtggcattgcaactggaatgccagtagcaatggccacagacgcagaagcagcaagcactgcagaggaggactactaccaggttggtcggcaacaagccgaggacaggttcaatagatcagtggtacgtgtccaagctttgttccgttctcatcgggcgcagcaggagtaccggaggatgaaggttgctcatgaggaggccaaggtggagttcggtcgaaagtagttaagacgggcatagattcaagatctgaagtgacttgttgttccttgtagggggttggctagttcttctagttctttgtatatccgaaggaacaggcgtagcttgcggatgacgtacattctaggaacatctgacgctcgtagtcagtctgccaactgccgttaggcttcttctgtggtgtgtatttggctgggttttagttgggcgaaaacggcattgtgctttattaggtttgatttgtatggacggacgcgagtacgaataaggttgtaaatgctgataataatttcacctgactataaatccaggtggattgcaggcaccatttgttttttttctttatttgatgttttttccttggcagtaccgctacgtacaaccattatacgtcttgcttttgtgataattcactccagcac

SEQ ID NO: 69782 - DNA, 3315 bp, Zea Mays
caatctcgttccgtcaatcctactaacctcgtgaaaccttctccttcctcctccccgctcgtcgtcttctcccccccgtcagagcgagactgcgagagacagcgcgaaggtagagagagtgtgtggaacagtggaagcagcagcaaacgcgaccatggcgggtggcgccggcgggcgggacccgctcgtcgcctccgagatccacggcttcctcacctgcgcagacttgaactttgacaagctgatgatggaggctgggacacgctggttccggccgaatgagatctatgcggtgctggcgaactatgcaaggttcaaggtccatgctcagcccatcgacaaaccaattagtggtactgttgttctatatgatcgtaaagttgtccggaacttccgtaaagatggccataactggaagaaaaagaaagatggcaagactgtccaagaagcccatgaaaaactaaagattggtaatgaagaaaaggttcatgtgtattatgctcgaggagaggatgatccaaatttctttcgcagatgctactggctacttgacaaagagttggagcgcattgtcctcgtgcattatcgtcaaacatctgaggaaagtgccttaccaccttcgcatgtagaagctgaagttgcagaagtgcctcggatcaatatgattcattacacctcctcaacagattcagcctctgctcatactgagctatcttcttctgctgctgctgcaccagaagatatcaactcaaatggtggtggggcggtttctagtgaaaccgacaatcaaggttctagcctggaatcattttgggtagatctattggagtcatctatgaaaaatgatactcctgttgatgcttctgcttgcggtggatctttggtatcaaatcagcagactaataatgggatgggagattctggaaataatatcttgtatattaatgccacaagtaatgctatcttttctccaccaactaatgtggtttcagaagcttatgctaatcctggccttagtcaagtatcagagagttactttggatctctgaaagatcaagcaaaccatgctccatctcttttaacatcagatctggattcacaatcaaagcaacatacaaattctttgatgaaaactccggtgtctgataacatgccaaatgatgtacctgctaggcagaacagtcttgggttatggaaatacttggatgatgatattagtttagatgataatccaagctcgggcatactccccactgaacaggtgactggcgaaataccctttcagatcactgagatatcctcagaatgggcttattgtactgaggacacaaaggtccttgtggttggatgtttccatgagaactacagacatctggctgggaccaatctcttctgtgtcattggtgaccagtgtgttgatgcaaatattgttcaaactggcgtttaccgtttcattgctagaccacatgctcctggacgagtcaatctttatttgactttggatgggaaaacaccaatcagtgaggttttgagttttcactatcgtatggtgcctgacagtcaaaacttggctgaggatgagccccaaaagtcaaagcttcagatgcagatgagactagctcgattgttgttcaccacaaacaagaaaaagatagcacccaagttacttgtagaaggaagcaaggtttccaatctcttatcagcatcgacagagaaggaatggatggatctgtcaaaatttgttactgattctaaaggcacttatgttccggccactgagggattgcttgaactagtactgcgtaatagattgcaagagtggcttgttgaaaaattaattgaaggccacaagtcgactggccgcgatgatctaggacaagggcctatccatctgtgttcttgcttgggctatacttgggccattcacttattttctttgtcaggattctccttggatttccgtgattcttctggttggacagctttgcattgggccgcatactgtggaagggaaaaaatggttgctgctcttttgtctgctggagcaaatccaagcttggttacagatcctactcatgatgtccctggtggacaaactgctggtgatctggctgctggacaaggttatcatggcttagctgcatatctttctgagaaagggctgactgctcattttgaggctatgtcactgtccaagggtaagcgatcaacatcaaggacagagtcactaaaacggaataccaaggaatttgaaaaccttagtgaacaagaattgtgcttacgagaatctttagcagcctaccgcaatgctgctgatgctgctagcaacatacaagccgcactcagggagcgaactcttaagcttcaaacaaaagcaattcagttggccaatcccgagaatgatgcatctgcaatagttgctgctatgaggattcagcacgcataccggaactacaacagaaagaaaatgatgagagctgctgcaagaatacagagtcatttccgaacatggcagattaggaggaacttcatgaacatgcgaagacaagctatcaaaatacaagctgcatacagaggtcaccaagtgagaaggcagtaccgcaaggtattatggtccgttggagtagtggaaaaagctatcttgcggtggaggaagaagagaaaaggcctgcgtggcattgcaactggaatgccagtagcaatggccacagacgcagaagcagcaagcactgcagaggaggactactaccaggttggtcggcaacaagccgaggacaggttcaatagatcagtggtacgtgtccaagctttgttccgttctcatcgggcgcagcaggagtaccggaggatgaaggttgctcatgaggaggccaaggtggagttcggtcgaaagtagttaagacgggcatagattcaagatctgaagtgacttgttgttccttgtagggggttggctagttcttctagttctttgtatatccgaaggaacaggcgtagcttgcggatgacgtacattctaggaacatctgacgctcgtagtcagtctgccaactgccgttaggcttcttctgtggtgtgtatttggctgggttttagttgggcgaaaacggcattgtgctttattaggtttgatttgtatggacggacgcgagtacgaataaggttgtaaatgctgataataatttcacctgactataaatccaggtggattgcaggcaccatttgttttttttctttatttgatgttttttccttggcagtaccgctacgtacaaccattatacgtcttgcttttgtgataattcactccagcac

SEQ ID NO: 69783 - DNA, 617 bp, Zea Mays
agtaatgtcatctggagaaatatttatgctgaggaaggttcagaggctatggatgttgctgctgcccctgctgtgcaggcattggcaagatacacacgacgagaggcaacttgtctgtcattgactgacagagattctatgttctctggaaacttcaaattcacaaccctggtgccggcaactcccagccccagcccaaagaagcatgggcgatgaactgccgtggtacatcaatatttcatacgaagatttttaaacagcaggatcagtggatatatgtcattctctcagcaatacaaataacaggcttcttccattgattgtttattccggggtcctcacgattcgaacccttttgatggaaatacttcgttctagataggatttttttatttaactcaagtgtatttgctctagtagaccacccaccagaatggaccctttttgtctcttttcatggtatcatagtagttgatagaatttacgttgattaaagtttatcaaatttagctggatttataaaagaaatatcaacaatatttgtatttttcaagtaaatttattataagaataaatttaaggatacatctagaaataataattatataatataaaat

SEQ ID NO: 69784 - DNA, 863 bp, Zea Mays
gcgaactggacggcatccagtccgttccgttccggctgcgggctctcggcgcacgggccgaggtggaccgcgcccagccgcaggctgaggctacggatgggaggacctacgcgtcagtgagccaagagcgccgcgtcgcatctgctgctaggcccgtgcctcctgatcacgctcagtccagggcggtgagccataaccatctccttctccgttccccccaagcagccgccgagacgcgaagcgcgagcgggagaccatgtcacggtggcgcgcggccgcctccagcatctccgccgccgccgcgtcccgcaactccgcggcggaggcccgcgtcctctccagggcattggcgaaggccccctcgccacctccgcttcctccccaaaccctctcgagaaccttcgccaagtccgctgccgccactgccaccgccacgtcgcccggccctggcgccacctccccgcccgccgggacgtggtccgagatcagactgaattctatgttcttatccaagccctgttcattagcgttgccacctgactctcctcatagagcagtggatccacaatttaaaggcatcaggcgattccttctcacactgttgttgttctacagtaagcaaagcaagtccatcagaggagcaaatgttgtttatgatcgaatcacttctcaagttgatacacctgccatttatgatgttggagaaaacatttaagacaacattttcgttgcttgttctccatatgtggcttgttctacgccgcttgaaggaagaagggaaggatggtgttaagtttggacagtacatctacgaaatgtacaaccacgatgtagagctcagagtttctaaagctggggtaagc

SEQ ID NO: 69785 - DNA, 828 bp, Zea Mays
acccgagttttggttacccattgtcatggatgttcatgggcacacggccaccacaccgcggcgcgtggccagcgcagcgaatccatccccatcctcatgattataaataaataataattttacacgcccccttctctctcgatttctcgcggagcggccctccacctttatcgccgccgccgccgttgctgtgttccgtctcttcgccgatggcttcggccaagttcggtgctgcccagcaggtggagaaccgaggcgcgctgtccaaaaggtcacgtaacgacgagaatgatgtcaggacctcctgcttctggacctgtcccaaatgcgacaacattaacttttccttcagaagcacttgcaacatgaagaaatgtggagccccgaggccaactccgggaggtaacacgagctcatctcgcaaggacaacagcaataaggaagcccctgaaggaagctggacctgcccagagtgcaacaacctgaactacccattccgcacggtgtgtaacaggaaaggatgctcgtacagcaagccagccccggcgaacaactgaacccaaccttcgcgcatcgtcgagatattgttgtacccgtagattgtatcctagtcgtgtgcaatctttgaactgcacaaagatgtttgtgcctggagacgagagattcgattcgttacgcttaatttactattatacttttttattaaatgatgaaaactagggaagagcattatatctataaactcttagtagtctgctatacacagcaattgacatcaattgttgcagctctcgagacattaatccttgaaccacgcaacatgttctc

SEQ ID NO: 69786 - DNA, 1241 bp, Zea Mays
acccgagttttggttacccattgtcatggatgttcatgggcacacggccaccacaccgcggcgcgtggccagcgcagcgaatccatccccatcctcatgattataaataaataataattttacacgcccccttctctctcgatttctcgcggagcggccctccacctttatcgccgccgccgccgttgctgtgttccgtctcttcgccgatggcttcggccaagtgtctgtaagggagggggactggaattgtcctcagtgtggtaatgtcaacttcagttttagaaatgtttgcaaccgtggagcctgtggtgcaccccgtccatcaccgagtccaagtccaagaatgatgtcaggacctcctgcttctggatatgaccggtcacctctattttacggaggaggtggtggcgccccacctccaattccgcttggaactggtagctatggtgctccatatccacaccttgggatgcgatatggctatggtccaccagtaggacctcctggttcatacggtcttttctcttcatatggtccacctgggccaatgagtggtatgggatatggcccaggacctgagctaggccgatatagctatgggtttagaggttctccaatgccggtttctagtccatggtctggtggagcattagctgaaaacaatgacaacattgcttcacgaaagcgccgtggaggccctgatggactttctgagggtgactggacctgtcccaaatgcgacaacattaacttttccttcagaagcacttgcaacatgaagaaatgtggagccccgaggccaactccgggaggtaacacgagctcatctcgcaaggacaacagcaataaggaagcccctgaaggaagctggacctgcccagagtgcaacaacctgaactacccattccgcacggtgtgtaacaggaaaggatgctcgtacagcaagccagccccggcgaacaactgaacccaaccttcgcgcatcgtcgagatattgttgtacccgtagattgtatcctagtcgtgtgcaatctttgaactgcacaaagatgtttgtgcctggagacgagagattcgattcgttacgcttaatttactattatacttttttattaaatgatgaaaactagggaagagcattatatctataaactcttagtagtctgctatacacagcaattgacatcaattgttgcagctctcgagacattaatccttgaaccacgcaacatgttctc

SEQ ID NO: 69787 - DNA, 1201 bp, Zea Mays
acccgagttttggttacccattgtcatggatgttcatgggcacacggccaccacaccgcggcgcgtggccagcgcagcgaatccatccccatcctcatgattataaataaataataattttacacgcccccttctctctcgatttctcgcggagcggccctccacctttatcgccgccgccgccgttgctgtgttccgtctcttcgccgatggcttcggccaagttcggtgctgcccagcaggtggagaaccgaggcgcgctgtccaaaaggtcacgtaacgacgagaatgatgtcaggacctcctgcttctggatatgaccggtcacctctattttacggaggaggtggtggcgccccacctccaattccgcttggaactggtagctatggtgctccatatccacaccttgggatgcgatatggctatggtccaccagtaggacctcctggttcatacggtcttttctcttcatatggtccacctgggccaatgagtggtatgggatatggcccaggacctgagctaggccgatatagctatgggtttagaggttctccaatgccggtttctagtccatggtctggtggagcattagctgaaaacaatgacaacattgcttcacgaaagcgccgtggagctgttttaaaaaaattaggccctgatggactttctgagggtgactggacctgtcccaaatgcgacaacattaacttttccttcagaagcacttgcaacatgaagaaatgtggagccccgaggccaactccgggaggtaacacgagctcatctcgcaaggacaacagcaataaggaagcccctgaaggaagctggacctgcccagagtgcaacaacctgaactacccattccgcacggtgtgtaacaggaaaggatgctcgtacagcaagccagccccggcgaacaactgaacccaaccttcgcgcatcgtcgagatattgttgtacccgtagattgtatcctagtcgtgtgcaatctttgaactgcacaaagatgtttgtgcctggagacgagagattcgattcgttacgcttaatttactattatacttttttattaaatgatgaaaactagggaagagcattatatctataaactcttagtagtctgctatacacagcaattgacatcaattgttgcagctctcgagacattaatccttgaaccacgcaacatgttctc

SEQ ID NO: 69788 - DNA, 767 bp, Zea Mays
acccgagttttggttacccattgtcatggatgttcatgggcacacggccaccacaccgcggcgcgtggccagcgcagcgaatccatccccatcctcatgattataaataaataataattttacacgcccccttctctctcgatttctcgcggagcggccctccacctttatcgccgccgccgccgttgctgtgttccgtctcttcgccgatggcttcggccaagagaatgatgtcaggacctcctgcttctggacctgtcccaaatgcgacaacattaacttttccttcagaagcacttgcaacatgaagaaatgtggagccccgaggccaactccgggaggtaacacgagctcatctcgcaaggacaacagcaataaggaagcccctgaaggaagctggacctgcccagagtgcaacaacctgaactacccattccgcacggtgtgtaacaggaaaggatgctcgtacagcaagccagccccggcgaacaactgaacccaaccttcgcgcatcgtcgagatattgttgtacccgtagattgtatcctagtcgtgtgcaatctttgaactgcacaaagatgtttgtgcctggagacgagagattcgattcgttacgcttaatttactattatacttttttattaaatgatgaaaactagggaagagcattatatctataaactcttagtagtctgctatacacagcaattgacatcaattgttgcagctctcgagacattaatccttgaaccacgcaacatgttctc

SEQ ID NO: 69789 - DNA, 1299 bp, Zea Mays
agaacatcccaccgcacccgagttttggttacccattgtcatggatgttcatgggcacacggccaccacaccgcggcgcgtggccagcgcagcgaatccatccccatcctcatgattataaataaataataattttacacgcccccttctctctcgatttctcgcggagcggccctccacctttatcgccgccgccgccgttgctgtgttccgtctcttcgccgatggcttcggccaaggtggagaaccgaggcgcgctgtccaaaaggtcacgtaacgacgtgtctgtaagggagggggactggaattgtcctcagtgtggtaatgtcaacttcagttttagaaatgtttgcaaccgtggagcctgtggtgcaccccgtccatcaccgagtccaagtccaagaatgatgtcaggacctcctgcttctggatatgaccggtcacctctattttacggaggaggtggtggcgccccacctccaattccgcttggaactggtagctatggtgctccatatccacaccttgggatgcgatatggctatggtccaccagtaggacctcctggttcatacggtcttttctcttcatatggtccacctgggccaatgagtggtatgggatatggcccaggacctgagctaggccgatatagctatgggtttagaggttctccaatgccggtttctagtccatggtctggtggagcattagctgaaaacaatgacaacattgcttcacgaaagcgccgtggaggccctgatggactttctgagggtgactggacctgtcccaaatgcgacaacattaacttttccttcagaagcacttgcaacatgaagaaatgtggagccccgaggccaactccgggaggtaacacgagctcatctcgcaaggacaacagcaataaggaagcccctgaaggaagctggacctgcccagagtgcaacaacctgaactacccattccgcacggtgtgtaacaggaaaggatgctcgtacagcaagccagccccggcgaacaactgaacccaaccttcgcgcatcgtcgagatattgttgtacccgtagattgtatcctagtcgtgtgcaatctttgaactgcacaaagatgtttgtgcctggagacgagagattcgattcgttacgcttaatttactattatacttttttattaaatgatgaaaactagggaagagcattatatctataaactcttagtagtctgctatacacagcaattgacatcaattgttgcagctctcgagacattaatccttgaaccacgcaacatgttctc

SEQ ID NO: 69790 - DNA, 1199 bp, Zea Mays
gagaacatcccaccgcacccgagttttggttacccattgtcatggatgttcatgggcacacggccaccacaccgcggcgcgtggccagcgcagcgaatccatccccatcctcatgattataaataaataataattttacacgcccccttctctctcgatttctcgcggagcggccctccacctttatcgccgccgccgccgttgctgtgttccgtctcttcgccgatggcttcggccaagttcggtgctgcccagcaggtggagaaccgaggcgcgctgtccaaaaggtcacgtaacgacgagaatgatgtcaggacctcctgcttctggatatgaccggtcacctctattttacggaggaggtggtggcgccccacctccaattccgcttggaactggtagctatggtgctccatatccacaccttgggatgcgatatggctatggtccaccagtaggacctcctggttcatacggtcttttctcttcatatggtccacctgggccaatgagtggtatgggatatggcccaggacctgagctaggccgatatagctatgggtttagaggttctccaatgccggtttctagtccatggtctggtggagcattagctgaaaacaatgacaacattgcttcacgaaagcgccgtggaggccctgatggactttctgagggtgactggacctgtcccaaatgcgacaacattaacttttccttcagaagcacttgcaacatgaagaaatgtggagccccgaggccaactccgggaggtaacacgagctcatctcgcaaggacaacagcaataaggaagcccctgaaggaagctggacctgcccagagtgcaacaacctgaactacccattccgcacggtgtgtaacaggaaaggatgctcgtacagcaagccagccccggcgaacaactgaacccaaccttcgcgcatcgtcgagatattgttgtacccgtagattgtatcctagtcgtgtgcaatctttgaactgcacaaagatgtttgtgcctggagacgagagattcgattcgttacgcttaatttactattatacttttttattaaatgatgaaaactagggaagagcattatatctataaactcttagtagtctgctatacacagcaattgacatcaattgttgcagctctcgagacattaatccttgaaccacgcaacatgttctc

SEQ ID NO: 69791 - DNA, 1377 bp, Zea Mays
gtgaacttatcgtgggttctaaatgccaaatatacttttaatcttgctgcttctaatagaccgaaggagtggaggtcaaatagcgaaaggacgcacgaaccccaggaggcaccgtctccaaagtccaaaccctaaccctagcgcccccaactcgtcgccgggagatggccatggacgcggagcggcggcaagcggagctgatcgcgcagttctcctctcaggcggtggctctttcgtccgcgcagcagctcgccgctctggtgctcgaggccacctcccacccggccctcttcgccttctccgagctcctcgccctcccggccctctccatgctcgctggcactcagtactcgtcttcactggacttgctccggctcttcgcctatggcaccttgaaggactataagaataattcgggatcccttccagcattgttgcctgatcaggtccgaaagctaaagcaactcagtgtgctaactctggcagagtcaactaagatactaccatatgatcagctcatgcaagagttggatgtttccaacggtatcgtcagaggcaaactggatcagctgagaagatgctttgaagtacaatttgcagctggaagagatcttacacctgatcagctaaacaacatgatagagatcttatctgactggttgggaacatcagatagcctgttgcatcaaattcaggagaaaatcaaatgggctgacacaatgagtgatgtgaacaagaagcaccagaaagaatttgaagacagagtggaagaggccaaaaaatcaattaagaagttgaacaatttaagcaggcagacatcgacatacgagggcatgacgactacctctctgaatctgtaggaataatggattttgaagaggaccgtgtccgaccaaagaggaggcgacaaccactggcgtagtttcaattaagcccttacaaatctctcctacaatgggaactgctgataccttgattgagacattttgacgccagagcgaggaagcattgtacatttgtcatataatgcctccagtagtccagtgtagcgagtcagatattttgccttctggtcaaactgctcgcgtgtgtgtgttttggtagggaatgtacaggttcaaaccttgacgttatgttgtattttttggtagatgacccatggtagaaatagcgctgttatggttatggcactgggtttttctccaagtttcatttcgttctgtcatgttttgatgttttgtgtggtggggtgctcgcagggtcgtggccatgggcgctgcaggtgccctatttgccattgatgtgacgtgaatcttcgccgtttttaattttaagatgatatagatccgttccaatttttggctgtgattttatacc

SEQ ID NO: 69792 - DNA, 1401 bp, Zea Mays
gtgaacttatcgtgggttctaaatgccaaatatacttttaatcttgctgcttctaatagaccgaaggagtggaggtcaaatagcgaaaggacgcacgaaccccaggaggcaccgtctccaaagtccaaaccctaaccctagcgcccccaactcgtcgccgggagatggccatggacgcggagcggcggcaagcggagctgatcgcgcagttctcctctcaggcggtggctctttcgtccgcgcagcagctcgccgctctggtgctcgaggccacctcccacccggccctcttcgccttctccgagctcctcgccctcccggccctctccatgctcgctggcactcagtactcgtcttcactggacttgctccggctcttcgcctatggcaccttgaaggactataagacattgttgcctgatcaggtccgaaagctaaagcaactcagtgtgctaactctggcagagtcaactaagatactaccatatgatcagctcatgcaagagttggatgtttccaacgtaagagaactcgaagattttctaatcaatgagtgcatgtattcaggtatcgtcagaggcaaactggatcagctgagaagatgctttgaagtacaatttgcagctggaagagatcttacacctgatcagctaaacaacatgatagagatcttatctgactggttgggaacatcagatagcctgttgcatcaaattcaggagaaaatcaaatgggctgacacaatgagtgatgtgaacaagaagcaccagaaagaatttgaagacagagtggaagaggccaaaaaatcaattaagaagttgaacaatttaagcaggcagacatcgacatacgagggcatgacgactacctctctgaatctgtaggaataatggattttgaagaggaccgtgtccgaccaaagaggaggcgacaaccactggcgtagtttcaattaagcccttacaaatctctcctacaatgggaactgctgataccttgattgagacattttgacgccagagcgaggaagcattgtacatttgtcatataatgcctccagtagtccagtgtagcgagtcagatattttgccttctggtcaaactgctcgcgtgtgtgtgttttggtagggaatgtacaggttcaaaccttgacgttatgttgtattttttggtagatgacccatggtagaaatagcgctgttatggttatggcactgggtttttctccaagtttcatttcgttctgtcatgttttgatgttttgtgtggtggggtgctcgcagggtcgtggccatgggcgctgcaggtgccctatttgccattgatgtgacgtgaatcttcgccgtttttaattttaagatgatatagatccgttccaatttttggctgtgattttatacc

SEQ ID NO: 69793 - DNA, 1807 bp, Zea Mays
tgatgttcgccgtcgctcccgttcacttcccgcacatcacaccagtggacgtgccttgtgcacgctctcttctccggggtcaggaacctgtggccccaaatcctccacctttccgctttccagaccaagtttgttcttgtatcatctgtgtgcagcatggcgctgccagttccccgctgctagcctcgtcgccgtcgccatggcaatggtcaccgccacgatctcttgctcttatccacagctccggtatcgcccctctcctcgatgccggcgccacggccccgcagcggccaccgtggccgccttggcgacgccgcggtcggagcaggacatcgtcatcgtcggcgcgggcgtcgcggggctggccacggcggtggcgctgcggcggctcggcgtgggcgccgccgtgctggagcagggcgacgccctgcgcgcgggcggcacgtccctgacgctgttcaagaacgggtggcgcgtgctggacgccatcggcgtcgccgacgagctccgccccaagtacctccgcatccagggctggccgccgcaggatgaggatgaggtcgccggggcgggatctgcgcgagttctccttcgacgaggaagctcccgggaggtacgcgcggtggagaggagagcgcttctcgagacgcttgcttctaagctgccaccaggcgccatatcgttctcgtcgaagctgaaatcgatctcggagcaagggcgtgcaggcaccctgctcgaactggaagacgggaggcagattcttgccaagatcgtggtcggctgcgacggagtgaactcgccgatcgcgaggtggatgggtttctcggagccccggtacgtcgggcacatggcgttccggggcctcgcggagtacgccgacggccagccgttcgagcccaaggtgaactacatctacggccgaggcgtccgtgccggctttgtccccgtctccgcaaccaaagtctactggttcatctgcttcaacagacaagatccaggtaacagatgtggcacggatgctcagaccaccaccagtccaccaccacacacaaaaaaacaaagcacgtaggtataatgttgttggcacttggcagggcctaagatcaccgaccccacggcgctcaagaccgaggcgctggagctcgtccgcggctggccatcggacctcctggcggtgatgcgcagcacgcccgagggcgccgtggtgaggacgccgctggtggaccggtggctctggcccgggctggccccggccgcgtcgaggggcggccgggtggtgctggccggcgacgcgtggcatcccatgacgcccaacctcgggcagggcgcctgctgcgcgctcgaggacgccatcgtactggcgcgccgcctcgccgacgccggcgcggacggggcccaggccgccgccgccatgcgcgcgtacgaggcggagcggtgggcgcgcgtgttcccgctcacggcgcgcgcggggctggtgggtgcgctcgtgcagtgggagaacgcggcggtgtgcgcggcccgcgacggcgtggtcatccccaggctcgtcaggctgggaccgttcctggagcacaccaacttcgagtgcgacctgctcgaaccggcgccgggagtcgccatgacaccggcacactagctttctccggcacaatgtaactagtagtatattgattaacctcttcttcgaaagatcgattaacctctgattgacatgtactccctctatctcatctcaaaatagtatttattttagggtgaatttatacaatatttgatatatatgaatttatatatgtatatgttatat

SEQ ID NO: 69794 - DNA, 1716 bp, Zea Mays
gtgatgttcgccgtcgctcccgttcacttcccgcacatcacaccagtggacgtgccttgtgcacgctctcttctccggggtcaggaacctgtggccccaaatcctccacctttccgctttccagaccaagtttgttcttgtatcatctgtgtgcagcatggcgctgccagttccccgctgctagcctcgtcgccgtcgccatggcaatggtcaccgccacgatctcttgctcttatccacagctccggtatcgcccctctcctcgatgccggcgccacggccccgcagcggccaccgtggccgccttggcgacgccgcggtcggagcaggacatcgtcatcgtcggcgcgggcgtcgcggggctggccacggcggtggcgctgcggcggctcggcgtgggcgccgccgtgctggagcagggcgacgccctgcgcgcgggcggcacgtccctgacgctgttcaagaacgggtggcgcgtgctggacgccatcggcgtcgccgacgagctccgccccaagtacctccgcatccagggctggccgccgcaggatgaggatgaggtcgccggggcgggatctgcgcgagttctccttcgacgaggaagctcccgggcaggaggtacgcgcggtggagaggagagcgcttctcgagacgcttgcttctaagctgccaccaggcgccatatcgttctcgtcgaagctgaaatcgatctcggagcaagggcgtgcaggcaccctgctcgaactggaagacgggaggcagattcttgccaagatcgtggtcggctgcgacggagtgaactcgccgatcgcgaggtggatgggtttctcggagccccggtacgtcgggcacatggcgttccggggcctcgcggagtacgccgacggccagccgttcgagcccaaggtgaactacatctacggccgaggcgtccgtgccggctttgtccccgtctccgcaaccaaagtctactggttcatctgcttcaacagacaagatccagggcctaagatcaccgaccccacggcgctcaagaccgaggcgctggagctcgtccgcggctggccatcggacctcctggcggtgatgcgcagcacgcccgagggcgccgtggtgaggacgccgctggtggaccggtggctctggcccgggctggccccggccgcgtcgaggggcggccgggtggtgctggccggcgacgcgtggcatcccatgacgcccaacctcgggcagggcgcctgctgcgcgctcgaggacgccatcgtactggcgcgccgcctcgccgacgccggcgcggacggggcccaggccgccgccgccatgcgcgcgtacgaggcggagcggtgggcgcgcgtgttcccgctcacggcgcgcgcggggctggtgggtgcgctcgtgcagtgggagaacgcggcggtgtgcgcggcccgcgacggcgtggtcatccccaggctcgtcaggctgggaccgttcctggagcacaccaacttcgagtgcgacctgctcgaaccggcgccgggagtcgccatgacaccggcacactagctttctccggcacaatgtaactagtagtatattgattaacctcttcttcgaaagatcgattaacctctgattgacatgtactccctctatctcatctcaaaatagtatttattttagggtgaatttatacaatatttgatatatatgaatttatatatgtatatgttatat

SEQ ID NO: 69795 - DNA, 1748 bp, Zea Mays
cagcaagtcactcagcagcatgcaaccttgggtgatgttcgccgtcgctcccgttcacttcccgcacatcacaccagtggacgtgccttgtgcacgctctcttctccggggtcaggaacctgtggccccaaatcctccacctttccgctttccagaccaagtttgttcttgtatcatctgtgtgcagcatggcgctgccagttccccgctgctagcctcgtcgccgtcgccatggcaatggtcaccgccacgatctcttgctcttatccacagctccggtatcgcccctctcctcgatgccggcgccacggccccgcagcggccaccgtggccgccttggcgacgccgcggtcggagcaggacatcgtcatcgtcggcgcgggcgtcgcggggctggccacggcggtggcgctgcggcggctcggcgtgggcgccgccgtgctggagcagggcgacgccctgcgcgcgggcggcacgtccctgacgctgttcaagaacgggtggcgcgtgctggacgccatcggcgtcgccgacgagctccgccccaagtacctccgcatccaggggatgaggatgaggtcgccggggcgggatctgcgcgagttctccttcgacgaggaagctcccggtgctactgctacaggcaggaggtacgcgcggtggagaggagagcgcttctcgagacgcttgcttctaagctgccaccaggcgccatatcgttctcgtcgaagctgaaatcgatctcggagcaagggcgtgcaggcaccctgctcgaactggaagacgggaggcagattcttgccaagatcgtggtcggctgcgacggagtgaactcgccgatcgcgaggtggatgggtttctcggagccccggtacgtcgggcacatggcgttccggggcctcgcggagtacgccgacggccagccgttcgagcccaaggtgaactacatctacggccgaggcgtccgtgccggctttgtccccgtctccgcaaccaaagtctactggttcatctgcttcaacagacaagatccagggcctaagatcaccgaccccacggcgctcaagaccgaggcgctggagctcgtccgcggctggccatcggacctcctggcggtgatgcgcagcacgcccgagggcgccgtggtgaggacgccgctggtggaccggtggctctggcccgggctggccccggccgcgtcgaggggcggccgggtggtgctggccggcgacgcgtggcatcccatgacgcccaacctcgggcagggcgcctgctgcgcgctcgaggacgccatcgtactggcgcgccgcctcgccgacgccggcgcggacggggcccaggccgccgccgccatgcgcgcgtacgaggcggagcggtgggcgcgcgtgttcccgctcacggcgcgcgcggggctggtgggtgcgctcgtgcagtgggagaacgcggcggtgtgcgcggcccgcgacggcgtggtcatccccaggctcgtcaggctgggaccgttcctggagcacaccaacttcgagtgcgacctgctcgaaccggcgccgggagtcgccatgacaccggcacactagctttctccggcacaatgtaactagtagtatattgattaacctcttcttcgaaagatcgattaacctctgattgacatgtactccctctatctcatctcaaaatagtatttattttagggtgaatttatacaatatttgatatatatgaatttatatatgtatatgttatat

SEQ ID NO: 69796 - DNA, 691 bp, Zea Mays
cttttacagcgcaacaacataacagaagggatgaagttcatgaacgtggagaggtccttcgcgcagcagcactacgctgacctttccgacaagcctttcttccccgggttggtggagtacatcatttccggccccgtggtggcgatggtgtgggaggggaaggacgtcgtgttgactggccgcaggatcattggggccaccaggccttgggaggcagcccccggtaccattcgtggggactacgccgtggaagtcggcaggaatgtcatccatggaagcgactccgtggagaacgggaagaaggagatcgctctctggttccctgaaggtgtggcacagtggaagagcaaccttcatccctggatctacgaggcttgagcagttgagcttggatgccttgcctgcttccatggaaaccagagttttgtttgagtattatctgttggctctggctgaagagtcataatttagcgctctgtgtgttacaccagagttaagtctgcctgaacttatgtggcatttgtttgagtttctaccttcgtgccctgttttctaatgtaccgtggttgtgaaccggtcaatgtgatctgaaataaaacattgcgtgccaagtttgtgttacaagtttgatgcactgggaatgccaggcaactaatgtggtaataaacattttgccaatctttttttttcc

SEQ ID NO: 69797 - DNA, 693 bp, Zea Mays
cgaacattccctttccatttcagcgtcaagggatgaagttcatgaacgtggagaggtccttcgcgcagcagcactacgctgacctttccgacaagcctttcttccccgggttggtggagtacatcatttccggccccgtggtggcgatggtgtgggaggggaaggacgtcgtgttgactggccgcaggatcattggggccaccaggccttgggaggcagcccccggtaccattcgtggggactacgccgtggaagtcggcaggaatgtcatccatggaagcgactccgtggagaacgggaagaaggagatcgctctctggttccctgaaggtgtggcacagtggaagagcaaccttcatccctggatctacgaggcttgagcagttgagcttggatgccttgcctgcttccatggaaaccagagttttgtttgagtattatctgttggctctggctgaagagtcataatttagcgctctgtgtgttacaccagagttaagtctgcctgaacttatgtggcatttgtttgagtttctaccttcgtgccctgttttctaatgtaccgtggttgtgaaccggtcaatgtgatctgaaataaaacattgcgtgccaagtttgtgttacaagtttgatgcactgggaatgccaggcaactaatgtggtaataaacattttgccaatctttttttttcc

SEQ ID NO: 69798 - DNA, 1069 bp, Zea Mays
gagtgcagatagcctaaaacccggcgccggctgcgagccgttggccgcatcccccggtgaggtgagcagaccacacctcccctccctctcgtgtcggagcctccgcctcggcttgtccccaccaacccgcagctcgctcccaccaaacccacacccgaacaatggcgtcggcgtccaaggaggaggtgatcgggaagctcaacgtccgcgtggtgcggggcaacaacctggtcatcgccgacccgctcacccacaccagcgacccctacgtcgtcctccagtacggcgctcagaaggtgaagactagtgtccagaagaagaaccccaatccagtgtgaaacgaagtactgcagctctcagtaacaaatcctacgaagccagtgcaccttaaatatggatggtatggaaccatgtctgccattggtccgctgatatcgccgccacaaatacgaacaaattgaccgaagtttttgatgaagacaagttcacagcagacgacagcatgggtgttgctgagatcaacattactgacatctacgatgctgcgaagctggacctgaagcacgcctctgatgggacaaggatcaagacgatctaccctgtcggagtaaactaccttggcggcgagagccatgttcagtggaaggatggcaaggtggtccaggacttgattctgaagctgaggaaggtcgagagtggcctgattgtggtgcagctggagtgggttcatgttcctggcgtgaagctgtgaaggccctgtctgaatgagggctgatggagctgcagttgctgtgtccctggtttgattgtttggttgtaaacgatatcctgaacgtggtgatatgcggtgtatgagtgaggtttgagtgtgatgctttgtttggggtacttcctggtgacatgatgtgggtatgactgccaaaggttgtggcgcaccaataagaaacgccctgtcagcatgacagcatgttgtgagatgtaaactaagactttagaacctaaatatacaggtgattgggcgttaattgctttcacgttgttcctgcaaagtttttttgttagctcctat

SEQ ID NO: 69799 - DNA, 1967 bp, Zea Mays
cacgccgtgtcccgcttcgcgcacaagggcaggatccagagtccatgcttcgtctgagattgttacgccagagaggtacagttgaggatgaaccgtggagtctactaaagccggttaggccacaccaacaaaaacatgtgggcaagttgaggtacgatagcagggacacagacttacaaaaagcaaacaattcctgtcaacaaaataatagcaagtgcatgcctgacgaacaactttataacgatagagttccagctgaggaaaaatcaaatgatatatccgctgaaggccttgttgatggttcaggaaatctacagtgtgatgagcagatgaaagcaaagggggatacatgtcagaaagattgtgaaaacttttgtgttcatagtcaacactattctgaagcatcaagctttgcaaggtatggtgagcatagtactatcgatgagaatcagtttgtggaagatatctccccaagcactacaagcacgttgcatgaactagaaactccatcgtccagaggagataatcttcgcgaagaagacaaccaaagcataaacggttcctgggaagagagagggttatggataagcagcctaggttggcctgcaccaattgatactatgagtccggatagctggcatcaggaaacaatgggtgatattgagaatcataataatccaattcaattcaatgaccgcccctggatagagtcccctaactcgtggagatcactatgtgttgtcacgcaatcagactgtcatgctctgtcacacaatgctgacatttgcaaccttcttgagagaaaaaaggtctcaaagtctcttgagagtgacttcagcaataaaatgaaccagctgttgctaacagctctgcaaaaacaaaggcaacaacggatgatggatgactttggaggatactatgatgaacgcatgtactggagacaaaatgatgaaattcgtgatgctgataaggaggcatctgctccatgttcattagcccctgtcgcacatcttggagctcatcagcaagagagttggcagcattcttcatttggaagtcaacatcaacaccacgataaccaaaatttacttgaaatggaagtcagggtaaggggtgaaatgtcccagattcatcaggaaatatatcaactgcggaagttggtggaaagttgcattgcatcccaagtaaagatgcagcactccattaaagaagaggtgtgcagtgcacttcgtgaggcaggcttgatgcgaagccaacccgacacagcagcagcaaaaaggggtaactgctgcatctgccatcgaatgcaagttgactctctactttacaggtgtgggcatgtgtgcacctgttttgactgcgccgatcagctgaaatcgagcggcatgagctgcccaatctgtcaatctcctattgatgatgttgttctggcgcggttgaatttttgagcttagaatttaggaaaggccaagagaaaaagagccggcactcccagatttagacgtggagtttgcgaagccctggttttgaggcggcttcttacctttttgcttaaccaccactaaagaaatacgagctagttcttggagaaaatgtaaatatgtttttttggcgcaagagcggtgtgcttgtatcgcactaaaggaaaacagagttctaattaaaatgctggttgtattccccgtatgtaccacatcacttgttcacggagagaatgtaatggttctggttctatttgcgcgataggtttgaactcacagcattgatactcttcactcaggcctatttgaacaaattcaacgccaactaataatatgtttggtttgaggaatgagttagtctattatattcttacttggtttgaaaaatggaacgagtccttcaccatttcatttatcatatactaataaaattaataataatatgagaaatacatttattacatcaaatttatgtaatgaactaat

SEQ ID NO: 69800 - DNA, 2998 bp, Zea Mays
ccgggcctcgtcgctcatccagcgctggcgcgcgatcgaggccgtcgggcccgccacgccgcgccccggtagcgccgccgaccccgccacgccgcgccccggcagcgccgccgacccggcctccgcctccgactccgacaccggctcgccgcgcggccgcgtcggctgcatcgtcaagaagctcagcggggcgtcgtcgctgcccgaggatgagctcgacgacgccgccaagtccgagctctcgctctcgcagtccgcgcccccgtcgcccgcgcccacgcgcgacgcctcgcagtacccgccgtacgcgtcgggcgcgatcaactgcccccgcccgccgcagctcgtcgtccggacggtgcgcggccgccgcgccatggaggagctcgtcgccgccatcgcgcaccggcggaggcgcgaggtcgccgcgctcgccgagaggcacgccgtgtcccgcttcgcgcacaagggcaggatccagtccatgcttcgtctgagattgttacgccagagaggtacagttgaggatgaaccgtggagtctactaaagccggttaggccacaccaacaaaaacatgtgggcaagttgaggtacgatagcagggacacagacttacaaaaagcaaacaattcctgtcaacaaaataatagcaagtgcatgcctgacgaacaactttataacgatagagttccagctgaggaaaaatcaaatgatatatccgctgaaggccttgttgatggttcaggaaatctacagtgtgatgagcagatgaaagcaaagggggatacatgtcagaaagattgtgaaaacttttgtgttcatagtcaacactattctgaagcatcaagctttgcaaggtatggtgagcatagtactatcgatgagaatcagtttgtggaagatatctccccaagcactacaagcacgttgcatgaactagaaactccatcgtccagaggagataatcttcgcgaagaagacaaccaaagcataaacggttcctgggaagagagagggttatggataagcagcctaggttggcctgcaccaattgatactatgagtccggatagctggcatcaggaaacaatgggtgatattgagaatcataataatccaattcaattcaatgaccgcccctggatagagtcccctaactcgtggagatcactatgtgttgtcacgcaatcagactgtcatgctctgtcacacaatgctgacatttgcaaccttcttgagagaaaaaaggtctcaaagtctcttgagagtgacttcagcaataaaatgaaccagctgttgctaacagctctgcaaaaacaaaggcaacaacggatgatggatgactttggaggatactatgatgaacgcatgtactggagacaaaatgatgaaattcgtgatgctgataaggaggcatctgctccatgttcattagcccctgtcgcacatcttggagctcatcagcaagagagttggcagcattcttcatttggaagtcaacatcaacaccacgataaccaaaatttactttcagggtaaggggtgaaatgtcccagattcatcaggaaatatatcaactgcggaagttggtggaaagttgcattgcatcccaagtaaagatgcagcactccattaaagaagaggtgtgcagtgcacttcgtgaggcaggtgagttgtgctttttttaagtttgtcttttatgtatgcaacaaagaaaaaaactgtgctctattaaagcaactagtttccatataggaagtaggaactgctcctatctgtttgtaaaaagaaacaaaagatagaatatgataactattacactgagccagtcgcggtgtgaaatgttgcatttggctttcaaggccacactgctttttttcggagctgtcagggcaagtgagctcggttgcttttaaaagtccagttagctgagatctcaattgagaagggtatagctatgtttggggaggcaatactgggaaggagttgttctagtctttgaagcaagactatgtgctgcactcttgttgcttagatcttgggctggaccagcctaccgctgcatatcttcaatgctctgtatcgtacctttggtccactttgatgaattaactgattgtgtgatgagtcctgtgcactaccttatgaacttagtttggttatctttgctagtgccccaccgtctattgcaccatctttaccgtattttatttgtaatcattgatgcgcatcttcacgctttttttttctgatgccatttcttgaacaggcttgatgcgaagccaacccgacacagcagcagcaaaaaggggtaactgctgcatctgccatcgaatgcaagttgactctctactttacaggtgtgggcatgtgtgcacctgttttgactgcgccgatcagctgaaatcgagcggcatgagctgcccaatctgtcaatctcctattgatgatgttgttctggcgcggttgaatttttgagcttagaatttaggaaaggccaagagaaaaagagccggcactcccagatttagacgtggagtttgcgaagccctggttttgaggcggcttcttacctttttgcttaaccaccactaaagaaatacgagctagttcttggagaaaatgtaaatatgtttttttggcgcaagagcggtgtgcttgtatcgcactaaaggaaaacagagttctaattaaaatgctggttgtattccccgtatgtaccacatcacttgttcacggagagaatgtaatggttctggttctatttgcgcgataggtttgaactcacagcattgatactcttcactcaggcctatttgaacaaattcaacgccaactaataatatgtttggtttgaggaatgagttagtctattatattcttacttggtttgaaaaatggaacgagtccttcaccatttcatttatcatatactaataaaattaataataatatgagaaatacatttattacatcaaatttatgtaatgaactaat

SEQ ID NO: 69801 - DNA, 2504 bp, Zea Mays
cgcctccttcacggccgcgcccgcggctccggcggcggcgggcggcggccaccgccgccgccgttgccacgccctccgagctcccgcccgcggggccccgggcctcgtcgctcatccagcgctggcgcgcgatcgaggccgtcgggcccgccacgccgcgccccggtagcgccgccgaccccgccacgccgcgccccggcagcgccgccgacccggcctccgcctccgactccgacaccggctcgccgcgcggccgcgtcggctgcatcgtcaagaagctcagcggggcgtcgtcgctgcccgaggatgagctcgacgacgccgccaagtccgagctctcgctctcgcagtccgcgcccccgtcgcccgcgcccacgcgcgacgcctcgcagtacccgccgtacgcgtcgggcgcgatcaactgcccccgcccgccgcagctcgtcgtccggacggtgcgcggccgccgcgccatggaggagctcgtcgccgccatcgcgcaccggcggaggcgcgaggtcgccgcgctcgccgagaggcacgccgtgtcccgcttcgcgcacaagggcaggatccagtccatgcttcgtctgagattgttacgccagagaggtacagttgaggatgaaccgtggagtctactaaagccggttaggccacaccaacaaaaacatgtgggcaagttgaggtacgatagcagggacacagacttacaaaaagcaaacaattcctgtcaacaaaataatagcaagtgcatgcctgacgaacaactttataacgatagagttccagctgaggaaaaatcaaatgatatatccgctgaaggccttgttgatggttcaggaaatctacagtgtgatgagcagatgaaagcaaagggggatacatgtcagaaagattgtgaaaacttttgtgttcatagtcaacactattctgaagcatcaagctttgcaaggtatggtgagcatagtactatcgatgagaatcagtttgtggaagatatctccccaagcactacaagcacgttgcatgaactagaaactccatcgtccagaggagataatcttcgcgaagaagacaaccaaagcataaacggttcctgggaagagagagggttatggataagcagcctaggttggcctgcaccaattgatactatgagtccggatagctggcatcaggaaacaatgggtgatattgagaatcataataatccaattcaattcaatgaccgcccctggatagagtcccctaactcgtggagatcactatgtgttgtcacgcaatcagactgtcatgctctgtcacacaatgctgacatttgcaaccttcttgagagaaaaaaggtctcaaagtctcttgagagtgacttcagcaataaaatgaaccagctgttgctaacagctctgcaaaaacaaaggcaacaacggatgatggatgactttggaggatactatgatgaacgcatgtactggagacaaaatgatgaaattcgtgatgctgataaggaggcatctgctccatgttcattagcccctgtcgcacatcttggagctcatcagcaagagagttggcagcattcttcatttggaagtcaacatcaacaccacgataaccaaaatttacttgaaatggaagtcagggtaaggggtgaaatgtcccagattcatcaggaaatatatcaactgcggaagttggtggaaagttgcattgcatcccaagtaaagatgcagcactccattaaagaagaggtgtgcagtgcacttcgtgaggcaggcttgatgcgaagccaacccgacacagcagcagcaaaaaggggtaactgctgcatctgccatcgaatgcaagttgactctctactttacaggtgtgggcatgtgtgcacctgttttgactgcgccgatcagctgaaatcgagcggcatgagctgcccaatctgtcaatctcctattgatgatgttgttctggcgcggttgaatttttgagcttagaatttaggaaaggccaagagaaaaagagccggcactcccagatttagacgtggagtttgcgaagccctggttttgaggcggcttcttacctttttgcttaaccaccactaaagaaatacgagctagttcttggagaaaatgtaaatatgtttttttggcgcaagagcggtgtgcttgtatcgcactaaaggaaaacagagttctaattaaaatgctggttgtattccccgtatgtaccacatcacttgttcacggagagaatgtaatggttctggttctatttgcgcgataggtttgaactcacagcattgatactcttcactcaggcctatttgaacaaattcaacgccaactaataatatgtttggtttgaggaatgagttagtctattatattcttacttggtttgaaaaatggaacgagtccttcaccatttcatttatcatatactaataaaattaataataatatgagaaatacatttattacatcaaatttatgtaatgaactaat

SEQ ID NO: 69802 - DNA, 3105 bp, Zea Mays
cgcctccttcacggccgcgcccgcggctccggcggcggcgggcggcggccaccgccgccgccgttgccacgccctccgagctcccgcccgcggggccccgggcctcgtcgctcatccagcgctggcgcgcgatcgaggccgtcgggcccgccacgccgcgccccggtagcgccgccgaccccgccacgccgcgccccggcagcgccgccgacccggcctccgcctccgactccgacaccggctcgccgcgcggccgcgtcggctgcatcgtcaagaagctcagcggggcgtcgtcgctgcccgaggatgagctcgacgacgccgccaagtccgagctctcgctctcgcagtccgcgcccccgtcgcccgcgcccacgcgcgacgcctcgcagtacccgccgtacgcgtcgggcgcgatcaactgcccccgcccgccgcagctcgtcgtccggacggtgcgcggccgccgcgccatggaggagctcgtcgccgccatcgcgcaccggcggaggcgcgaggtcgccgcgctcgccgagaggcacgccgtgtcccgcttcgcgcacaagggcaggatccagtccatgcttcgtctgagattgttacgccagagaggtacagttgaggatgaaccgtggagtctactaaagccggttaggccacaccaacaaaaacatgtgggcaagttgaggtacgatagcagggacacagacttacaaaaagcaaacaattcctgtcaacaaaataatagcaagtgcatgcctgacgaacaactttataacgatagagttccagctgaggaaaaatcaaatgatatatccgctgaaggccttgttgatggttcaggaaatctacagtgtgatgagcagatgaaagcaaagggggatacatgtcagaaagattgtgaaaacttttgtgttcatagtcaacactattctgaagcatcaagctttgcaaggtatggtgagcatagtactatcgatgagaatcagtttgtggaagatatctccccaagcactacaagcacgttgcatgaactagaaactccatcgtccagaggagataatcttcgcgaagaagacaaccaaagcataaacggttcctgggaagagagagggttatggataagcagcctaggttggcctgcaccaattgatactatgagtccggatagctggcatcaggaaacaatgggtgatattgagaatcataataatccaattcaattcaatgaccgcccctggatagagtcccctaactcgtggagatcactatgtgttgtcacgcaatcagactgtcatgctctgtcacacaatgctgacatttgcaaccttcttgagagaaaaaaggtctcaaagtctcttgagagtgacttcagcaataaaatgaaccagctgttgctaacagctctgcaaaaacaaaggcaacaacggatgatggatgactttggaggatactatgatgaacgcatgtactggagacaaaatgatgaaattcgtgatgctgataaggaggcatctgctccatgttcattagcccctgtcgcacatcttggagctcatcagcaagagagttggcagcattcttcatttggaagtcaacatcaacaccacgataaccaaaatttacttgaaatggaagtcagggtaaggggtgaaatgtcccagattcatcaggaaatatatcaactgcggaagttggtggaaagttgcattgcatcccaagtaaagatgcagcactccattaaagaagaggtgtgcagtgcacttcgtgaggcaggtgagttgtgctttttttaagtttgtcttttatgtatgcaacaaagaaaaaaactgtgctctattaaagcaactagtttccatataggaagtaggaactgctcctatctgtttgtaaaaagaaacaaaagatagaatatgataactattacactgagccagtcgcggtgtgaaatgttgcatttggctttcaaggccacactgctttttttcggagctgtcagggcaagtgagctcggttgcttttaaaagtccagttagctgagatctcaattgagaagggtatagctatgtttggggaggcaatactgggaaggagttgttctagtctttgaagcaagactatgtgctgcactcttgttgcttagatcttgggctggaccagcctaccgctgcatatcttcaatgctctgtatcgtacctttggtccactttgatgaattaactgattgtgtgatgagtcctgtgcactaccttatgaacttagtttggttatctttgctagtgccccaccgtctattgcaccatctttaccgtattttatttgtaatcattgatgcgcatcttcacgctttttttttctgatgccatttcttgaacaggcttgatgcgaagccaacccgacacagcagcagcaaaaaggggtaactgctgcatctgccatcgaatgcaagttgactctctactttacaggtgtgggcatgtgtgcacctgttttgactgcgccgatcagctgaaatcgagcggcatgagctgcccaatctgtcaatctcctattgatgatgttgttctggcgcggttgaatttttgagcttagaatttaggaaaggccaagagaaaaagagccggcactcccagatttagacgtggagtttgcgaagccctggttttgaggcggcttcttacctttttgcttaaccaccactaaagaaatacgagctagttcttggagaaaatgtaaatatgtttttttggcgcaagagcggtgtgcttgtatcgcactaaaggaaaacagagttctaattaaaatgctggttgtattccccgtatgtaccacatcacttgttcacggagagaatgtaatggttctggttctatttgcgcgataggtttgaactcacagcattgatactcttcactcaggcctatttgaacaaattcaacgccaactaataatatgtttggtttgaggaatgagttagtctattatattcttacttggtttgaaaaatggaacgagtccttcaccatttcatttatcatatactaataaaattaataataatatgagaaatacatttattacatcaaatttatgtaatgaactaat

SEQ ID NO: 69803 - DNA, 1598 bp, Zea Mays
tttttgtttgggctttggccagcaaagctcctcggcacgggctgtgtagtgtagggcccaccgcgcaatgcccgagatctgcttcgctcgcccaaccgcgcccgccaccgcctcccatggcaccgccggcgaggagcccgacagcggggcctcggcggcgcgccctcgtcgtcctcgccctcgccctcctcctgcttctgcccctgctgctgctcctccacctcatctcctcgccttcgcctcgacacctccccgcgccccgcacgccctcccagtctcaggcctgcgactactccgccggcgagtgggtgcgcgaccccttcgcgggctcctcgctccgctacgaccatacctgcaaggagatcttcaagggatggaactgcatcgccaatggcaagggatttgtgggtgattcgttgaaccgcaacatgtttgcctcattagtctgcatgctcaggggagtcaatggtgaggttcgcaaatggcgtcctgctggggcagaccgtggcttcaccttcctacgctataacctcactgtggcataccacagaacaaatctcttggtacgctacggtggtcaaggaatccaaatggaggccctctagaatctcttggatataagcaaggttacagagttgatgtggatattcctgaccaaacatgggtagaggtggtgggcaccctcaaaatttgatccaatacggtcaccaatgctgttctttgagaaggggaggccaattgtacctcctttactgccaccggctggactggatctggctcttcaaaacatgatatccttcgcgaacaaagcaacaagaccaaacacagtgaaattcttccgcactcaatctcctagacatttcgaaggtggtgactggaatgaaggtggatcttgccaatgtaatcagcccttgtcgtcaaaagaggtggaagaaattttctctttggacaataacagcactaatgtagaagcacgcttggtaaaccaacacttggtgaaggctcttcaacagactagtttcagagttctggacatcactcgcatgagtgaattcagagctgatgcccacccttcaacaactggcgggaaaaaacacgatgattgcatgcattggtgtttgccaggaccaacggatacatggaacgatttgctagctttgagtctcgaggcacttgagagctagttgagagagctcaagagctcaccggagaaaatatccctaacttttttttcagggggaatatgagtatgaagcatgaatctactggtagaatagaattttgctgatagctggttttagggcttttgttgcagcttgtttcatataaaggccaggagcattttcccccacttgtttgaccctgtatgttttaatatcactgtagagttccactgacgaatgacgatatacgaatgctataatcggtcggatccattttcttgaccaacagatagatggagcgtcttttggcccagacaacattattgacatttcattcctgcaaatttgaattggattcatgagtcccggtgaaatacctccaaagcacccacccctagtaatttcattctcttgccctttttctcttcagctgag

SEQ ID NO: 69804 - DNA, 1709 bp, Zea Mays
tttttgtttgggctttggccagcaaagctcctcggcacgggctgtgtagtgtagggcccaccgcgcaatgcccgagatctgcttcgctcgcccaaccgcgcccgccaccgcctcccatggcaccgccggcgaggagcccgacagcggggcctcggcggcgcgccctcgtcgtcctcgccctcgccctcctcctgcttctgcccctgctgctgctcctccacctcatctcctcgccttcgcctcgacacctccccgcgccccgcacgccctcccagtctcaggcctgcgactactccgccggcgagtgggtgcgcgaccccttcgcgggctcctcgctccgctacgaccatacctgcaaggagatcttcaagggatggaactgcatcgccaatggcaagggtaacgcccgcgacttgctcagctggcggtggacgcccgcggggcccgggtgcgagctcccccgcctcgacccgcgccggttcctggagcgccacagggacaccagtatcggatttgtgggtgattcgttgaaccgcaacatgtttgcctcattagtctgcatgctcaggggagtcaatggtgaggttcgcaaatggcgtcctgctggggcagaccgtggcttcaccttcctacgctataacctcactgtggcataccacagaacaaatctcttggtacgctacggtggtcaaggaatccaaatggaggccctctagaatctcttggatataagcaaggttacagagttgatgtggatattcctgaccaaacatgggtagaggtggtgggcaccctcaaaatttgatccaatacggtcaccaatgctgttctttgagaaggggaggccaattgtacctcctttactgccaccggctggactggatctggctcttcaaaacatgatatccttcgcgaacaaagcaacaagaccaaacacagtgaaattcttccgcactcaatctcctagacatttcgaaggtggtgactggaatgaaggtggatcttgccaatgtaatcagcccttgtcgtcaaaagaggtggaagaaattttctctttggacaataacagcactaatgtagaagcacgcttggtaaaccaacacttggtgaaggctcttcaacagactagtttcagagttctggacatcactcgcatgagtgaattcagagctgatgcccacccttcaacaactggcgggaaaaaacacgatgattgcatgcattggtgtttgccaggaccaacggatacatggaacgatttgctagctttgagtctcgaggcacttgagagctagttgagagagctcaagagctcaccggagaaaatatccctaacttttttttcagggggaatatgagtatgaagcatgaatctactggtagaatagaattttgctgatagctggttttagggcttttgttgcagcttgtttcatataaaggccaggagcattttcccccacttgtttgaccctgtatgttttaatatcactgtagagttccactgacgaatgacgatatacgaatgctataatcggtcggatccattttcttgaccaacagatagatggagcgtcttttggcccagacaacattattgacatttcattcctgcaaatttgaattggattcatgagtcccggtgaaatacctccaaagcacccacccctagtaatttcattctcttgccctttttctcttcagctgag

SEQ ID NO: 69805 - DNA, 1753 bp, Zea Mays
tttttgtttgggctttggccagcaaagctcctcggcacgggctgtgtagtgtagggcccaccgcgcaatgcccgagatctgcttcgctcgcccaaccgcgcccgccaccgcctcccatggcaccgccggcgaggagcccgacagcggggcctcggcggcgcgccctcgtcgtcctcgccctcgccctcctcctgcttctgcccctgctgctgctcctccacctcatctcctcgccttcgcctcgacacctccccgcgccccgcacgccctcccagtctcaggcctgcgactactccgccggcgagtgggtgcgcgaccccttcgcgggctcctcgctccgctacgaccatacctgcaaggagatcttcaagggatggaactgcatcgccaatggcaagggtaacgcccgcgacttgctcagctggcggtggacgcccgcggggcccgggtgcgagctcccccgcctcgacccgcgccggttcctggagcgccacagggacaccagtatcggatttgtgggtgattcgttgaaccgcaacatgtttgcctcattagtctgcatgctcaggggagtcaatggtgaggttcgcaaatggcgtcctgctggggcagaccgtggcttcaccttcctacgctataacctcactgtggcataccacagaacaaatctcttggtacgctacggtggtcaaggaatccaaatggaggccctctagaatctcttggatataagcaaggttacagagttgatgtggatattcctgaccaaacatgggtagaggcatgtagcttccatgatgttcttattttcaacactgggcattggtggtgggcaccctcaaaatttgatccaatacggtcaccaatgctgttctttgagaaggggaggccaattgtacctcctttactgccaccggctggactggatctggctcttcaaaacatgatatccttcgcgaacaaagcaacaagaccaaacacagtgaaattcttccgcactcaatctcctagacatttcgaaggtggtgactggaatgaaggtggatcttgccaatgtaatcagcccttgtcgtcaaaagaggtggaagaaattttctctttggacaataacagcactaatgtagaagcacgcttggtaaaccaacacttggtgaaggctcttcaacagactagtttcagagttctggacatcactcgcatgagtgaattcagagctgatgcccacccttcaacaactggcgggaaaaaacacgatgattgcatgcattggtgtttgccaggaccaacggatacatggaacgatttgctagctttgagtctcgaggcacttgagagctagttgagagagctcaagagctcaccggagaaaatatccctaacttttttttcagggggaatatgagtatgaagcatgaatctactggtagaatagaattttgctgatagctggttttagggcttttgttgcagcttgtttcatataaaggccaggagcattttcccccacttgtttgaccctgtatgttttaatatcactgtagagttccactgacgaatgacgatatacgaatgctataatcggtcggatccattttcttgaccaacagatagatggagcgtcttttggcccagacaacattattgacatttcattcctgcaaatttgaattggattcatgagtcccggtgaaatacctccaaagcacccacccctagtaatttcattctcttgccctttttctcttcagctgag

SEQ ID NO: 69806 - DNA, 1743 bp, Zea Mays
tttttgtttgggctttggccagcaaagctcctcggcacgggctgtgtagtgtagggcccaccgcgcaatgcccgagatctgcttcgctcgcccaaccgcgcccgccaccgcctcccatggcaccgccggcgaggagcccgacagcggggcctcggcggcgcgccctcgtcgtcctcgccctcgccctcctcctgcttctgcccctgctgctgctcctccacctcatctcctcgccttcgcctcgacacctccccgcgccccgcacgccctcccagtctcaggcctgcgactactccgccggcgagtgggtgcgcgaccccttcgcgggctcctcgctccgctacgaccatacctgcaaggagatcttcaagggatggaactgcatcgccaatggcaagggtaacgcccgcgacttgctcagctggcggtggacgcccgcggggcccgggtgcgagctcccccgcctcgacccgcgccggttcctggagcgccacagggacaccagtatcggatttgtgggtgattcgttgaaccgcaacatgtttgcctcattagtctgcatgctcaggggagtcaatggtgaggttcgcaaatggcgtcctgctggggcagaccgtggcttcaccttcctacgctataacctcactgtggcataccacagaacaaatctcttggtggtcaaggaatccaaatggaggccctctagaatctcttggatataagcaaggttacagagttgatgtggatattcctgaccaaacatgggtagaggcatgtagcttccatgatgttcttattttcaacactgggcattggtggtgggcaccctcaaaatttgatccaatacggtcaccaatgctgttctttgagaaggggaggccaattgtacctcctttactgccaccggctggactggatctggctcttcaaaacatgatatccttcgcgaacaaagcaacaagaccaaacacagtgaaattcttccgcactcaatctcctagacatttcgaaggtggtgactggaatgaaggtggatcttgccaatgtaatcagcccttgtcgtcaaaagaggtggaagaaattttctctttggacaataacagcactaatgtagaagcacgcttggtaaaccaacacttggtgaaggctcttcaacagactagtttcagagttctggacatcactcgcatgagtgaattcagagctgatgcccacccttcaacaactggcgggaaaaaacacgatgattgcatgcattggtgtttgccaggaccaacggatacatggaacgatttgctagctttgagtctcgaggcacttgagagctagttgagagagctcaagagctcaccggagaaaatatccctaacttttttttcagggggaatatgagtatgaagcatgaatctactggtagaatagaattttgctgatagctggttttagggcttttgttgcagcttgtttcatataaaggccaggagcattttcccccacttgtttgaccctgtatgttttaatatcactgtagagttccactgacgaatgacgatatacgaatgctataatcggtcggatccattttcttgaccaacagatagatggagcgtcttttggcccagacaacattattgacatttcattcctgcaaatttgaattggattcatgagtcccggtgaaatacctccaaagcacccacccctagtaatttcattctcttgccctttttctcttcagctgag

SEQ ID NO: 69807 - DNA, 476 bp, Zea Mays
gttgtcctggcgcccgattccgtctggtctgcggtacacctgcccccgcggtgtttcgatccatgggagcatttgttggggatgggtctcggtgcagtgtttgtgaaccagctggtaaagtttgatgagaagctcaaggaggacctcgacaagatgcttgagcgcgccaggctagccaacgagcagcgctacattgacgatgatgaatagatgcccagatttatttgccagcgacctgtattttttttgcaacatgttgtcagtacacatggccaggactgatgatcccccatcgtcttagttctctcagctttccgcatttcaactgtgatcttgtaataagatgtcggatctcatggattaccaatgtaatacaccaattatgggttcttgatctgatggttggctttctctgataaaattactcaattaaaatgattgtgtttttgcaatgtcaacttttctcgtacactcta

SEQ ID NO: 69808 - DNA, 2551 bp, Zea Mays
gcgcgcgcgcctgatcggccggaaattgttcgtacgaacaagtgcggacgcgggcagatctggctcctcgtcggcagcccggcgtcaacgaaccaatccgggcaggcagtcagttgtcagcatcagccacgaccagcaaacctccgtccccggggtccagcgtcgccctcctcccacgcgctgcggcgctggagaataatttgggcaaaaggcaaacgcattgtcggctgtaaagggtagaacgtctccactctcccgtacgccgatacccactgacgccaccgcccgaagcctccccgagaaacaggagccggcgcggggatgtcgtccatctcgcggaatctccggcgatccctcgccccggaccgcctgcgccgcctctcccagcacccgcgagagtatgtgacgtcggagtgccaccgccccgtcgtcctccacaagcgcggccccgacatcctccacgacccctggttcaaccggtgcttgatctgaaacggctgcagagatatgcaagagatggcccgtctgatacttatccattggcaaaatggcgcatccttaacagattgcatgacagaaatgaaacgatgtactacaaggtactaatagataacattgaggagtatgcacctatcgtttacacaccaaccgttggacttgtttgccaaaactacagtggtctgtttcgacgccctaggggaatgtactttagtgcagaagatcgtggggagatgatgtccatggtgtacaattggccagctgatcaggttgacatgatagtggtgactgatggaagcaggatattgggtcttggtgatcttggggtgcatggtattggcattgctattggaaaattggatttatatgttgctgctgctggaataaatcctcaaagggttcttcctgttatgattgatgtcggaacgaacaacgagaagctccttaaggatcctctttatcttgggctacaagagcaccgtcttgagggagatgaatatgtttcagttattgatgaattcatggaagctgtttttactcgctggcctaatgttattgtacagtttgaagatttccaaagtaaatgggcctttaggttgttgcagcgttacagaaagacttatcgcatgtttaatgatgatgttcagggaactgctggtgtcgcaatagcaggccttttaggagctgtacgggcacaagggaggccaatgatagattttccaaagcaaaggattgttgttgctggcgctggcagtgctggtattggagtggtgaatgctgcaagcagaaccatggcaagaatgttgggaaacaatgacgttgcttttgagagtgcgaggagtcaattctggatagtggatgcccatggcctaataacagaagaccgagaagatatcgatccagatgcacggccttttgctagaagaaagagtgagcttggtcaccagggcctaagtgagggggcaagcttagttgaagtggttaaaaaggtgaagcctgatgtcatacttggattatctgctgttggtggtttgttctcgaaggaggttctagaggcactaaaagattcgtcctcgtcaaggccagcaatttttgcaatgtccaatccaactaagaatgctgagtgtacacctggggaagcattttcaattctaggtgaaaaggtcatctttgctagtgggagcccatttcatgatgtggatcttggtgatgggaagattggccattccaatcaagggaacaacatgtacctctttcctggaatagggcttggaacccttctgtctggtgctcgggttatctctgatggaatgctgcaggctgcagctgaacgtttggcttcatacatgaaagaggaggaggttctcgaagggataatttatcctccaatttccagaatacgtgacatcactaaggaggtggcagcagcagttgtgagggaggcagtagcagaggatctagctgagggataccgtgacatggatgcacgtgagcttgcacgactcagtgaggaagaaactaatgaatatgtcaagacgaacatgtggagtcctgtctatccaacaataatatacaagaaggactagatagctctatttgctattttgcatatgttcaatgatcatgtatgatatactttaggctgcgttctggaaggcactccagaagtgtaggcacgttagttataagaaaacagccttcattgttcattgaccttacttttaattgaatttagtacacgagacaccttaggccacagttcctgacgtactccatggtgctgaaacatttcccatctcaaatatcatcaactgtaccactactggaactgtagtccaatccctctcagatgttaaaatcctgtgtgtaactttgaacacagaccaaataacaaagccagaaatttgccagaggaaatctgttctggcaacttgtttgcctgaaatcgtttgatggttatctctcttatcttacaatgtatttgtgtcatctgaaatgtcagttctgagtttttatttgttgttgttgaggtttttttttttttttttttttg

SEQ ID NO: 69809 - DNA, 2541 bp, Zea Mays
gcgcgcgcgcctgatcggccggaaattgttcgtacgaacaagtgcggacgcgggcagatctggctcctcgtcggcagcccggcgtcaacgaaccaatccgggcaggcagtcagttgtcagcatcagccacgaccagcaaacctccgtccccggggtccagcgtcgccctcctcccacgcgctgcggcgctggagaataatttgggcaaaaggcaaacgcattgtcggctgtaaagggtagaacgtctccactctcccgtacgccgatacccactgacgccaccgcccgaagcctccccgagaaacaggagccggcgcggggatgtcgtccatctcgcggaatctccggcgatccctcgccccggaccgcctgcgccgcctctcccagcacccgcgagaggcacggcgttctcgatgaccgagagggaccgcctcggcctccgcggcctgctcccgcccaacgtcgtctcctcgcagcagcagatcgacagattcatgcttgatctgaaacggctgcagagatatgcaagagatggcccgtctgatacttatccattggcaaaatggcgcatccttaacagattgcatgacagaaatgaaacgatgtactacaaggtactaatagataacattgaggagtatgcacctatcgtttacacaccaaccgttggacttgtttgccaaaactacagtggtctgtttcgacgccctaggggaatgtactttagtgcagaagatcgtggggagatgatgtccatggtgtacaattggccagctgatcaggttgacatgatagtggtgactgatggaagcaggatattgggtcttggtgatcttggggtgcatggtattggcattgctattggaaaattggatttatatgttgctgctgctggaataaatcctcaaagggttcttcctgttatgattgatgtcggaacgaacaacgagaagctccttaaggatcctctttatcttgggctacaagagcaccgtcttgagggagatgaatatgtttcagttattgatgaattcatggaagctgtttttactcgctggcctaatgttattgtacagtttgaagatttccaaagtaaatgggcctttaggttgttgcagcgttacagaaagacttatcgcatgtttaatgatgatgttcaggccttttaggagctgtacgggcacaagggaggccaatgatagattttccaaagcaaaggattgttgttgctggcgctggcagtgctggtattggagtggtgaatgctgcaagcagaaccatggcaagaatgttgggaaacaatgacgttgcttttgagagtgcgaggagtcaattctggatagtggatgcccatggcctaataacagaagaccgagaagatatcgatccagatgcacggccttttgctagaagaaagagtgagcttggtcaccagggcctaagtgagggggcaagcttagttgaagtggttaaaaaggtgaagcctgatgtcatacttggattatctgctgttggtggtttgttctcgaaggaggttctagaggcactaaaagattcgtcctcgtcaaggccagcaatttttgcaatgtccaatccaactaagaatgctgagtgtacacctggggaagcattttcaattctaggtgaaaaggtcatctttgctagtgggagcccatttcatgatgtggatcttggtgatgggaagattggccattccaatcaagggaacaacatgtacctctttcctggaatagggcttggaacccttctgtctggtgctcgggttatctctgatggaatgctgcaggctgcagctgaacgtttggcttcatacatgaaagaggaggaggttctcgaagggataatttatcctccaatttccagaatacgtgacatcactaaggaggtggcagcagcagttgtgagggaggcagtagcagaggatctagctgagggataccgtgacatggatgcacgtgagcttgcacgactcagtgaggaagaaactaatgaatatgtcaagacgaacatgtggagtcctgtctatccaacaataatatacaagaaggactagatagctctatttgctattttgcatatgttcaatgatcatgtatgatatactttaggctgcgttctggaaggcactccagaagtgtaggcacgttagttataagaaaacagccttcattgttcattgaccttacttttaattgaatttagtacacgagacaccttaggccacagttcctgacgtactccatggtgctgaaacatttcccatctcaaatatcatcaactgtaccactactggaactgtagtccaatccctctcagatgttaaaatcctgtgtgtaactttgaacacagaccaaataacaaagccagaaatttgccagaggaaatctgttctggcaacttgtttgcctgaaatcgtttgatggttatctctcttatcttacaatgtatttgtgtcatctgaaatgtcagttctgagtttttatttgttgttgttgaggtttttttttttttttttttttg

SEQ ID NO: 69810 - DNA, 2623 bp, Zea Mays
gcgcgcgcgcctgatcggccggaaattgttcgtacgaacaagtgcggacgcgggcagatctggctcctcgtcggcagcccggcgtcaacgaaccaatccgggcaggcagtcagttgtcagcatcagccacgaccagcaaacctccgtccccggggtccagcgtcgccctcctcccacgcgctgcggcgctggagaataatttgggcaaaaggcaaacgcattgtcggctgtaaagggtagaacgtctccactctcccgtacgccgatacccactgacgccaccgcccgaagcctccccgagaaacaggagccggcgcggggatgtcgtccatctcgcggaatctccggcgatccctcgccccggaccgcctgcgccgcctctcccagcacccgcgagagtatgtgacgtcggagtgccaccgccccgtcgtcctccacaagcgcggccccgacatcctccacgacccctggttcaaccggggcacggcgttctcgatgaccgagagggaccgcctcggcctccgcggcctgctcccgcccaacgtcgtctcctcgcagcagcagatcgacagattcatgcttgatctgaaacggctgcagagatatgcaagagatggcccgtctgatacttatccattggcaaaatggcgcatccttaacagattgcatgacagaaatgaaacgatgtactacaaggtactaatagataacattgaggagtatgcacctatcgtttacacaccaaccgttggacttgtttgccaaaactacagtggtctgtttcgacgccctaggggaatgtactttagtgcagaagatcgtggggagatgatgtccatggtgtacaattggccagctgatcaggttgacatgatagtggtgactgatggaagcaggatattgggtcttggtgatcttggggtgcatggtattggcattgctattggaaaattggatttatatgttgctgctgctggaataaatcctcaaagggttcttcctgttatgattgatgtcggaacgaacaacgagaagctccttaaggatcctctttatcttgggctacaagagcaccgtcttgagggagatgaatatgtttcagttattgatgaattcatggaagctgtttttactcgctggcctaatgttattgtacagtttgaagatttccaaagtaaatgggcctttaggttgttgcagcgttacagaaagacttatcgcatgtttaatgatgatgttcaggccttttaggagctgtacgggcacaagggaggccaatgatagattttccaaagcaaaggattgttgttgctggcgctggcagtgctggtattggagtggtgaatgctgcaagcagaaccatggcaagaatgttgggaaacaatgacgttgcttttgagagtgcgaggagtcaattctggatagtggatgcccatggcctaataacagaagaccgagaagatatcgatccagatgcacggccttttgctagaagaaagagtgagcttggtcaccagggcctaagtgagggggcaagcttagttgaagtggttaaaaaggtgaagcctgatgtcatacttggattatctgctgttggtggtttgttctcgaaggaggttctagaggcactaaaagattcgtcctcgtcaaggccagcaatttttgcaatgtccaatccaactaagaatgctgagtgtacacctggggaagcattttcaattctaggtgaaaaggtcatctttgctagtgggagcccatttcatgatgtggatcttggtgatgggaagattggccattccaatcaagggaacaacatgtacctctttcctggaatagggcttggaacccttctgtctggtgctcgggttatctctgatggaatgctgcaggctgcagctgaacgtttggcttcatacatgaaagaggaggaggttctcgaagggataatttatcctccaatttccagaatacgtgacatcactaaggaggtggcagcagcagttgtgagggaggcagtagcagaggatctagctgagggataccgtgacatggatgcacgtgagcttgcacgactcagtgaggaagaaactaatgaatatgtcaagacgaacatgtggagtcctgtctatccaacaataatatacaagaaggactagatagctctatttgctattttgcatatgttcaatgatcatgtatgatatactttaggctgcgttctggaaggcactccagaagtgtaggcacgttagttataagaaaacagccttcattgttcattgaccttacttttaattgaatttagtacacgagacaccttaggccacagttcctgacgtactccatggtgctgaaacatttcccatctcaaatatcatcaactgtaccactactggaactgtagtccaatccctctcagatgttaaaatcctgtgtgtaactttgaacacagaccaaataacaaagccagaaatttgccagaggaaatctgttctggcaacttgtttgcctgaaatcgtttgatggttatctctcttatcttacaatgtatttgtgtcatctgaaatgtcagttctgagtttttatttgttgttgttgaggtttttttttttttttttttttg

SEQ ID NO: 69811 - DNA, 929 bp, Zea Mays
gtcttctcctctcccctttcaatttcagtttcaggtgccgcgtggtggtgtcgtggcgtgacgcgaatccgtgcctaatttggcgcgctcatgaagctgtggcagctgtgttgcgtttcggtgcagtaggatgcaggggagtctgattctgatagtgaagcatcggatgttagcggctctgatggagaagacacctcatggatttcatggtattgcaacttaagagggaatgagttcttctgtgaagtcgacgatgattatattcaagacgacttcaacctttgtggtctcagcagccaagttccttattatgattatgctctcgatctcattttagatatcgagtcatctcatggtgatatgttcactgaggaacaaaatgagctcgtagaatcagctgcagagatgctttatggtctgatacatgcacgatacattctgaccagtaaaggactggctgcaatgctggagaagtataagaactatgactttgggcggtgcccgcgtgtttactgctgtggtcaaccatgcctgccagttggacaatcagacatccatcgatctagtaccgtgaagatatactgccccaagtgtgaagacatctactacccacggtccaagtaccaaggcaacatcgacggcgcatactttgggacaacgttccctcatctgttcctgatgacatacgagcacctcaagccacagaagctctcgcagcgctatgttcctcgtgtctttggcttcaagctccacaagccatgaacctcatgtatttgtcttttaaactcctcaagacgtggcactgggggcatgcgggagttttgcaatccttgaagacttgcatataagagcgccattggcaggaatgtggggttggtttatgaagcgatcgagacaatctgacaatggtattaggtgatgaagatgtg

SEQ ID NO: 69812 - DNA, 1233 bp, Zea Mays
gtttcctttcctttttgcattcccacccacccatcccctcaaaattcgcagcgtgtctcttcctccatcgcagcgtgtctcgtgctccccccaggctcctcttcctcgctttccctccaccccgggcgcaaaccctaaccctaccgtcgctcgccccgcggcgtctgccaatggcgcgccccgtgtgagtgtgcgcgagagaggggtagaccttgaggccgctacccggggaggagagcgagagatgtataaacaggggggagcggggggaggggctgggctggaccggaagcggatcaacgacgcgctggataagcatctcgagaaggcggtcgcgtcgccgtccacgtcgagggggtcggcgggcggcgggcgcgaccaccaccgcctcgtcgtgccgtcctccgtgtcgtccatccccaagggccgctgctccgaaggggagtctgattctgatagtgaagcatcggatgttagcggctctgatggagaagacacctcatggatttcatggtattgcaacttaagagggaatgagttcttctgtgaagtcgacgatgattatattcaagacgacttcaacctttgtggtctcagcagccaagttccttattatgattatgctctcgatctcattttagatatcgagtcatctcatggtgatatgttcactgaggaacaaaatgagctcgtagaatcagctgcagagatgctttatggtctgatacatgcacgatacattctgaccagtaaaggactggctgcaatgctggagaagtataagaactatgactttgggcggtgcccgcgtgtttactgctgtggtcaaccatgcctgccagttggacaatcagacatccatcgatctagtaccgtgaagatatactgccccaagtgtgaagacatctactacccacggtccaagtaccaaggcaacatcgacggcgcatactttgggacaacgttccctcatctgttcctgatgacatacgagcacctcaagccacagaagctctcgcagcgctatgttcctcgtgtctttggcttcaagctccacaagccatgaacctcatgtatttgtcttttaaactcctcaagacgtggcactgggggcatgcgggagttttgcaatccttgaagacttgcatataagagcgccattggcaggaatgtggggttggtttatgaagcgatcgagacaatctgacaatggtattaggtgatgaagatgtg

SEQ ID NO: 69813 - DNA, 1068 bp, Zea Mays
gttgcgtttcggtgcagtaggatgcaggggagtctgattctgatagtgaagcatcggatgttagcggctctgatggagaagacacctcatggatttcatggtattgcaacttaagagggaatgagttcttctgtgaagtcgacgatgattatattcaagacgacttcaacctttgtggtctcagcagccaagttccttattatgattatgctctcgatctcattttagatatcgagtcatctcatggtgatatgttcactgaggaacaaaatgagctcgtagaatcagctgcagagatgctttatggtctgatacatgcacgatacattctgaccagtaaaggactggctgcaatgctggagaagtataagaactatgactttgggcggtgcccgcgtgtttactgctgtggtcaaccatgcctgccagttggacaatcagacatccatcgatctagtaccgtgaagatatactgccccaagtgtgaagacatctactacccacggtccaagtaccaaggcagtatcctaaccatactcttatcagactgtcttaatgcgtatatgtttcaaacttcgacctcttgacatcgacggcgcatactttgggacaacgttccctcatctgttcctgatgacatacgagcacctcaagccacagaagctctcgcagcgctatgttcctcgtgtctttggcttcaagctccacaagccatgaacctcatgtatttgtcttttaaactcctcaagacgtggcactgggggcatgcgggagttttgcaatccttgaagacttgcatataagagcgccattggcaggtcagtggattggtaaaattctatcatgctgcagcgtgcttgtaccttagctggctggcacctatccaacatttgaatgtagctctaaggatatcaatgttgtaacctaactgctattgttctttgattagtaaaccaggagccccccctacaatgtagaatatggcaattatttatggctttgcagaaaataacaacccttcatctgcttggttctccaaaaagctatttatctaaaaaaatatcaaaa

SEQ ID NO: 69814 - DNA, 1049 bp, Zea Mays
cgcgaatccgtgcctaatttggcgcgctcatgaagctgtggcagctgtgttgcgtttcggtgcagtaggatgcaggggagtctgattctgatagtgaagcatcggatgttagcggctctgatggagaagacacctcatggatttcatggtattgcaacttaagagggaatgagttcttctgtgaagtcgacgatgattatattcaagacgacttcaacctttgtggtctcagcagccaagttccttattatgattatgctctcgatctcattttagatatcgagtcatctcatggtgatatgttcactgaggaacaaaatgagctcgtagaatcagctgcagagatgctttatggtctgatacatgcacgatacattctgaccagtaaaggactggctgcaatgctggagaagtataagaactatgactttgggcggtgcccgcgtgtttactgctgtggtcaaccatgcctgccagttggacaatcagacatccatcgatctagtaccgtgaagatatactgccccaagtgtgaagacatctactacccacggtccaagtaccaagacatcgacggcgcatactttgggacaacgttccctcatctgttcctgatgacatacgagcacctcaagccacagaagctctcgcagcgctatgttcctcgtgtctttggcttcaagctccacaagccatgaacctcatgtatttgtcttttaaactcctcaagacgtggcactgggggcatgcgggagttttgcaatccttgaagacttgcatataagagcgccattggcaggtcagtggattggtaaaattctatcatgctgcagcgtgcttgtaccttagctggctggcacctatccaacatttgaatgtagctctaaggatatcaatgttgtaacctaactgctattgttctttgattagtaaaccaggagccccccctacaatgtagaatatggcaattatttatggctttgcagaaaataacaacccttcatctgcttggttctccaaaaagctatttatctaaaaaaatatcaaaa

SEQ ID NO: 69815 - DNA, 1052 bp, Zea Mays
cgcgaatccgtgcctaatttggcgcgctcatgaagctgtggcagctgtgttgcgtttcggtgcagtaggatgcaggggagtctgattctgatagtgaagcatcggatgttagcggctctgatggagaagacacctcatggatttcatggtattgcaacttaagagggaatgagttcttctgtgaagtcgacgatgattatattcaagacgacttcaacctttgtggtctcagcagccaagttccttattatgattatgctctcgatctcattttagatatcgagtcatctcatggtgatatgttcactgaggaacaaaatgagctcgtagaatcagctgcagagatgctttatggtctgatacatgcacgatacattctgaccagtaaaggactggctgcaatgctggagaagtataagaactatgactttgggcggtgcccgcgtgtttactgctgtggtcaaccatgcctgccagttggacaatcagacatccatcgatctagtaccgtgaagatatactgccccaagtgtgaagacatctactacccacggtccaagtaccaaggcaacatcgacggcgcatactttgggacaacgttccctcatctgttcctgatgacatacgagcacctcaagccacagaagctctcgcagcgctatgttcctcgtgtctttggcttcaagctccacaagccatgaacctcatgtatttgtcttttaaactcctcaagacgtggcactgggggcatgcgggagttttgcaatccttgaagacttgcatataagagcgccattggcaggtcagtggattggtaaaattctatcatgctgcagcgtgcttgtaccttagctggctggcacctatccaacatttgaatgtagctctaaggatatcaatgttgtaacctaactgctattgttctttgattagtaaaccaggagccccccctacaatgtagaatatggcaattatttatggctttgcagaaaataacaacccttcatctgcttggttctccaaaaagctatttatctaaaaaaatatcaaaa

SEQ ID NO: 69816 - DNA, 1580 bp, Zea Mays
ctcctctcccctttcaatttcagtttcaggtgccgcgtggtggtgtcgtggcgtgacgcgaatccgtgcctaatttggcgcgctcatgaagctgtggcagctgtgttgcgtttcggtgcagtaggatgcaggggagtctgattctgatagtgaagcatcggatgttagcggctctgatggagaagacacctcatggatttcatggtattgcaacttaagagggaatgagttcttctgtgaagtcgacgatgattatattcaagacgacttcaacctttgtggtctcagcagccaagttccttattatgattatgctctcgatctcattttagatatcgagtcatctcatggtgatatgttcactgaggaacaaaatgagctcgtagaatcagctgcagagatgctttatggtctgatacatgcacgatacattctgaccagtaaaggactggctgcaatgctggagaagtataagaactatgactttgggcggtgcccgcgtgtttactgctgtggtcaaccatgcctgccagttggacaatcagacatccatcgatctagtaccgtgaagatatactgccccaagtgtgaagacatctactacccacggtccaagtaccaaggcagtatcctaaccatactcttatcagactgtcttaatgcgtatatgtttcaaacttcgacctcttggtgagaactcaaaccaagggtattttttgtaccaagtctgacacagaatgggctgcccatgttctcagatgtgttagcacccactcacccacagctctcgtcggttgaaacaaaacattaaggactagcttgggaacctcatttttccaagtgattttcatttttccatggaaaatgaactatttttttgggaaaatgaaaaccccttgggaaattgaggttcccaaactagccctaaacatgaaatctgtctagtgcgcccatcaatcaccatgtgttttcaacccccatagattaatattgtttagtacctgaggtgcacaagctctcttctgtgttattgtggttctgtagttgcagaatgtttgccattttgttatatcctgctattttcttaaccttgttcagacatcgacggcgcatactttgggacaacgttccctcatctgttcctgatgacatacgagcacctcaagccacagaagctctcgcagcgctatgttcctcgtgtctttggcttcaagctccacaagccatgaacctcatgtatttgtcttttaaactcctcaagacgtggcactgggggcatgcgggagttttgcaatccttgaagacttgcatataagagcgccattggcaggtcagtggattggtaaaattctatcatgctgcagcgtgcttgtaccttagctggctggcacctatccaacatttgaatgtagctctaaggatatcaatgttgtaacctaactgctattgttctttgattagtaaaccaggagccccccctacaatgtagaatatggcaattatttatggctttgcagaaaataacaacccttcatctgcttggttctccaaaaagctatttatctaaaaaaatatcaaaa

SEQ ID NO: 69817 - DNA, 1889 bp, Zea Mays
gtttcctttcctttttgcattcccacccacccatcccctcaaaattcgcagcgtgtctcttcctccatcgcagcgtgtctcgtgctccccccaggctcctcttcctcgctttccctccaccccgggcgcaaaccctaaccctaccgtcgctcgccccgcggcgtctgccaatggcgcgccccgtgtgagtgtgcgcgagagaggggtagaccttgaggccgctacccggggaggagagcgagagatgtataaacaggggggagcggggggaggggctgggctggaccggaagcggatcaacgacgcgctggataagcatctcgagaaggcggtcgcgtcgccgtccacgtcgagggggtcggcgggcggcgggcgcgaccaccaccgcctcgtcgtgccgtcctccgtgtcgtccatccccaagggccgctgctccgaaggggagtctgattctgatagtgaagcatcggatgttagcggctctgatggagaagacacctcatggatttcatggtattgcaacttaagagggaatgagttcttctgtgaagtcgacgatgattatattcaagacgacttcaacctttgtggtctcagcagccaagttccttattatgattatgctctcgatctcattttagatatcgagtcatctcatggtgatatgttcactgaggaacaaaatgagctcgtagaatcagctgcagagatgctttatggtctgatacatgcacgatacattctgaccagtaaaggactggctgcaatgctggagaagtataagaactatgactttgggcggtgcccgcgtgtttactgctgtggtcaaccatgcctgccagttggacaatcagacatccatcgatctagtaccgtgaagatatactgccccaagtgtgaagacatctactacccacggtccaagtaccaaggcagtatcctaaccatactcttatcagactgtcttaatgcgtatatgtttcaaacttcgacctcttggtgagaactcaaaccaagggtattttttgtaccaagtctgacacagaatgggctgcccatgttctcagatgtgttagcacccactcacccacagctctcgtcggttgaaacaaaacattaaggactagcttgggaacctcatttttccaagtgattttcatttttccatggaaaatgaactatttttttgggaaaatgaaaaccccttgggaaattgaggttcccaaactagccctaaacatgaaatctgtctagtgcgcccatcaatcaccatgtgttttcaacccccatagattaatattgtttagtacctgaggtgcacaagctctcttctgtgttattgtggttctgtagttgcagaatgtttgccattttgttatatcctgctattttcttaaccttgttcagacatcgacggcgcatactttgggacaacgttccctcatctgttcctgatgacatacgagcacctcaagccacagaagctctcgcagcgctatgttcctcgtgtctttggcttcaagctccacaagccatgaacctcatgtatttgtcttttaaactcctcaagacgtggcactgggggcatgcgggagttttgcaatccttgaagacttgcatataagagcgccattggcaggtcagtggattggtaaaattctatcatgctgcagcgtgcttgtaccttagctggctggcacctatccaacatttgaatgtagctctaaggatatcaatgttgtaacctaactgctattgttctttgattagtaaaccaggagccccccctacaatgtagaatatggcaattatttatggctttgcagaaaataacaacccttcatctgcttggttctccaaaaagctatttatctaaaaaaatatcaaaa

SEQ ID NO: 69818 - DNA, 1256 bp, Zea Mays
tagactctatgattcgacctagtcgacttgaatgccaaggagcccagtcagatttacctggcttcacacgtagtgttttcaaaagggatcatgctttaataacaccagagagtcatgtattcagtcctttgcctgattggatcaatacagtaggagcatatttgatcagtccagctattggtgcacacttcattatgtatctagcaaacatgcaagatggttcaaaatcagccctaccaccgaaagatgttgaaaggtttgtttttgtactacaagggagcatttcattgactgtggggactggaactatccattctctgctgtaaataagtgcaggtggattcttatggatatcttcctgcaaacacaaagcattctatgatctcagatgaaccaaccactcttgtaatatttgagaggaggtacaatgccattgaggattcccatcctgatctaattgtgggttcaacagataagcaaccccttctcgaaaccccgggagaggtatttcaactaaggaagctgctaccgacttctctgtcctatgactttaatatccatataatggactttcaaccaggcgaatatctcaatgtaaaggaggttcattataatcaacatggacttcttcttttagaggggcaaggaatataccgactgggagagagttggtatcccgtgcaagctggggataccatttggatggcaccgtttgttcctcagtggtatgctgcccttggtaagaccaggacgagatacttgctgtacaaagatgtcaataggaatccattgatatgatcaagaaaccagaacaaggagggaataaatcaaatgtcgagctgtgccaggtataaagaatttcaatgggagatgatcacaggaatgagaaaaggagatcttattgtatgctgaaaaatcttgaaaccaaaaataacgtgggaagttgaatgtgtacttgtgatgtccataactgtcaatctttggtgactagtgcgactggaattgtgatgtaacgtattctggacagcagatgccaagttggatatgctgtgacatttgtgaatggctaatcccatgaatttaggtgatgtttggtttagaaatgataatgcatatgtaaacggtatgagatccaggggcaatgattacaggacaaacagttttccattttgttcggttccaccgtagatagtgttcaggtacgtgtaccgctcaccgttcgggcttgttcggttagagttagattgaaggaggtt

SEQ ID NO: 69819 - DNA, 1590 bp, Zea Mays
atgccatccaagtcaccatgtggcccaccaccaaaccactgtccacgagtgtgctcatctcgtggcctcagcttcatttataaaaatcacaagcatttttaaaaaagaaatacagaaaaagaacgaacgatgccatccaagtcaccatgtggcccaccaccaaaccactgtccacgagaccacgagtgtcctcacactgccaccagtaccgccaccaaccttgtccttgtgcgttccttgtagccatctccgactccgcgcctccgctgcctcccgaaagcattgccagttcctccgcacaacatgacgcgcatccaccgcctccgccccctcttcctcttcgttctcttggcgtcgctgcaatgcggtgcggcgacggcggcggctggatacggaggtggcgccgaggggttctgctcggcggagccgtccagcaagtgctccggggatcagccgctctactggaaggtcacccatcccaccctcgcgcccgcgcacctccaagatttacctggcttcacacgtagtgttttcaaaagggatcatgctttaataacaccagagagtcatgtattcagtcctttgcctgattggatcaatacagtaggagcatatttgatcagtccagctattggtgcacacttcattatgtatctagcaaacatgcaaggtggattcttatggatatcttcctgcaaacacaaagcattctatgatctcagatgaaccaaccactcttgtaatatttgagaggaggtacaatgccattgaggattcccatcctgatctaattgtgggttcaacagataagcaaccccttctcgaaaccccgggagaggtatttcaactaaggaagctgctaccgacttctctgtcctatgactttaatatccatataatggactttcaaccaggcgaatatctcaatgtaaaggaggttcattataatcaacatggacttcttcttttagaggggcaaggaatataccgactgggagagagttggtatcccgtgcaagctggggataccatttggatggcaccgtttgttcctcagtggtatgctgcccttggtaagaccaggacgagatacttgctgtacaaagatgtcaataggaatccattgatatgatcaagaaaccagaacaaggagggaataaatcaaatgtcgagctgtgccaggtataaagaatttcaatgggagatgatcacaggaatgagaaaaggagatcttattgtatgctgaaaaatcttgaaaccaaaaataacgtgggaagttgaatgtgtacttgtgatgtccataactgtcaatctttggtgactagtgcgactggaattgtgatgtaacgtattctggacagcagatgccaagttggatatgctgtgacatttgtgaatggctaatcccatgaatttaggtgatgtttggtttagaaatgataatgcatatgtaaacggtatgagatccaggggcaatgattacaggacaaacagttttccattttgttcggttccaccgtagatagtgttcaggtacgtgtaccgctcaccgttcgggcttgttcggttagagttagattgaaggaggtt

SEQ ID NO: 69820 - DNA, 1548 bp, Zea Mays
atgccatccaagtcaccatgtggcccaccaccaaaccactgtccacgagtgtgctcatctcgtggcctcagcttcatttataaaaatcacaagcatttttaaaaaagaaatacagaaaaagaacgaacgatgccatccaagtcaccatgtggcccaccaccaaaccactgtccacgagaccacgagtgtcctcacactgccaccagtaccgccaccaaccttgtccttgtgcgttccttgtagccatctccgactccgcgcctccgctgcctcccgaaagcattgccagttcctccgcacaacatgacgcgcatccaccgcctccgccccctcttcctcttcgttctcttggcgtcgctgcaatgcggtgcggcgacggcggcggctggatacggaggtggcgccgaggggttctgctcggcggagccgtccagcaagtgctccggggatcagccgctctactggaaggtcacccatcccaccctcgcgcccgcgcacctccaagatttacctggcttcacacgtagtgttttcaaaagggatcatgctttaataacaccagagagtcatgtattcagtcctttgcctgattggatcaatacagtaggagcatatttgatcagtccagctattggtgcacacttcattatgtatctagcaaacatgcaagatggttcaaaatcagccctaccaccgaaagatgttgaaaggtggattcttatggatatcttcctgcaaacacaaagcattctatgatctcagatgaaccaaccactcttgtaatatttgagaggaggtatttcaactaaggaagctgctaccgacttctctgtcctatgactttaatatccatataatggactttcaaccaggcgaatatctcaatgtaaaggaggttcattataatcaacatggacttcttcttttagaggggcaaggaatataccgactgggagagagttggtatcccgtgcaagctggggataccatttggatggcaccgtttgttcctcagtggtatgctgcccttggtaagaccaggacgagatacttgctgtacaaagatgtcaataggaatccattgatatgatcaagaaaccagaacaaggagggaataaatcaaatgtcgagctgtgccaggtataaagaatttcaatgggagatgatcacaggaatgagaaaaggagatcttattgtatgctgaaaaatcttgaaaccaaaaataacgtgggaagttgaatgtgtacttgtgatgtccataactgtcaatctttggtgactagtgcgactggaattgtgatgtaacgtattctggacagcagatgccaagttggatatgctgtgacatttgtgaatggctaatcccatgaatttaggtgatgtttggtttagaaatgataatgcatatgtaaacggtatgagatccaggggcaatgattacaggacaaacagttttccattttgttcggttccaccgtagatagtgttcaggtacgtgtaccgctcaccgttcgggcttgttcggttagagttagattgaaggaggtt

SEQ ID NO: 69821 - DNA, 2740 bp, Zea Mays
catgatcccacagaacgctttgaggtggatcctctttcccaccaagtcaaggtttgtgaattcgggagtgctagaatcttgatcttccacaagagaatgtctccagaagcaatggataggcttctagaaaaagataaagtgccaaacccatgctatagagtatagactgagtttcaacattggaaggctcaactaaatataccagttccggatacacactacaggacaaaggtgcacagcacccgatagcgcgctgccttttttagtgtagaactagaaaaccaacgcacaacacaaaccagagagttctccatggacgtcggtggcggcgccaccggcacacgctgccgagaccccaccgctgacccctcgtcccagttcttcgttgacgctggccatccatacgcagtcgctgcagccactgcgctcacctcccaccgcaccaagtccaagtggtcccacctctcttcggtccccgtcccctcccccttcctggcctccgccgccgccggcgtgctcctcctcctccgccaccgaccgcacaccgcgctccgcttccatgccttcgccatccgccgcctccttccctcccgctcccctccccctctcgtcttctctgccgccgcagcccacgtcgcggcggcctcccgccttcggggccctgccctctccatccttgcctctgcctcccgccactgctcaccggcccagatcttcaatgccctcgctgccacctaccgctgctttgcctccgccccattcatcttcgacctcctcctcctcgcctaccttcgctcccgccgcgacgtcctcgctgcggcctccgtcgcccgccgcatcctcgctgccggcgcacggccgctcccctccactgcggcagctcttcttcgttcactcccttccgccaccgcggccctcgacatgtatcatcaaatctacacgcatccaagtccacggagcaatcacctcctcctgccgactgttcacaccttcaattccctcctccttgctttccaccgcgaaggcaagtgtgatgaattcaagattgtgctccaggaaatggacaaatattcctgcaagcacaacgtgtgcacctacagcatcaggatgtctgggtactgcaatggcgggcatgtggataaggcgcgaacactatgggatgagatgattcaggaagggatccagcctgatataactgcgtacaacacaatgattagtgggtattgccattctggggaggtaggggtggcagaggagatgtttaaaaatatgttgatgggtgggattgattcaagtgccacgacgttcgaatggttggtcagagggcattgtatggcacgggatgtcgaggcagcaatgcttgtgcgtgcagacatgaaaaggaaggggtttgggttggcgccagaggttgttgaggaattgctggatggattatgtcaaaatgggagggttgaggatggcttgagtgttttgcgagaggagatgaagagggaagaatttgtgccaacccggaggagttacgaggtgttgattatggggttttgtgatggagggaaggtggaggtggcaatcagactccaagcagagatggctggaaaaggattcactgctggcagcgaggtgtactatgcatttattagtgcttatgagaagtctgaaaattatgagatggtcgagaagttgaggaaggaaatgtcggcgatgggcacttagagcatgtctagcagctcaccaataattcatccctaataaaatggtattggtggtcaccaatagtgctttttttggaatattggggagactctatagtagattaccaataatctttcccaatacatgggacccacatgtcagaatagaggatgtgggaggaagaagatgacgacagttgttgtggtcccaacacctatagagggagatgcaactccccttttatttgaggggagatgggagatttgttttggtgaccaccaaaaaaagggagagctattggggagctgttggagcaatggaattgcctcatctcccccaatatgacagttttatggggatgagggatggtattggagagctactggatgctctatcggatctgatatttggcttggatattgcacagtgatgcatggatatcaacctcacctaattgcagttgagaactatgagtggtgcaacaaattctgaattggttgaaggagttctctcctagcactatcctggagacggatgttggagaaatatgactgctggatctgcaataggataatgtcttttagtcgatcccttttgtgcttgtttggtgaacttgtgtccccaatctgttgaactctgtaaacatttgctttccataaaagcagagatattctccttaaaaactcagtccagaatggtgatatatgaatgatccctgagagtttataaggtacaaccgtacaagtccaggtgctagagacttctcaatttgctggaaaatgctgtagtattttgtgttgacttgctgtttgatatatgctcagtacctcactgtaaaatgtggttctcttgtttgcctcttaacaaaatcctgagaaatgacatgagaacaaattgagaattagtagatcagtacttaactgcaaaacttttgtagttggaattaatttccagtctctagcaaagtagcaatagctgagagagctaaacttgagctattgtgtaatcgaaaatggaggcaccattgcagccaaacttatgaactaac

SEQ ID NO: 69822 - DNA, 2891 bp, Zea Mays
gttccagcggtatgacatgatcccacagaacgctttgagcagaggaaggaggaacgaggaagggtttatagtttggattatatgattggatgatcggatggttagtagtttggattggaagattggatcacatcgcgtagtccacctctcctctccagtttccacgagaaaaaaagtggatcctctttcccaccaagtcaaggtttgtgaattcgggagtgctagaatcttgatcttccacaagagaatgtctccagaagcaatggataggcttctagaaaaagataaagtgccaaacccatgctatagagtatagactgagtttcaacattggaaggctcaactaaatataccagttccggatacacactacaggacaaaggtgcacagcacccgatagcgcgctgccttttttagtgtagaactagaaaaccaacgcacaacacaaaccagagagttctccatggacgtcggtggcggcgccaccggcacacgctgccgagaccccaccgctgacccctcgtcccagttcttcgttgacgctggccatccatacgcagtcgctgcagccactgcgctcacctcccaccgcaccaagtccaagtggtcccacctctcttcggtccccgtcccctcccccttcctggcctccgccgccgccggcgtgctcctcctcctccgccaccgaccgcacaccgcgctccgcttccatgccttcgccatccgccgcctccttccctcccgctcccctccccctctcgtcttctctgccgccgcagcccacgtcgcggcggcctcccgccttcggggccctgccctctccatccttgcctctgcctcccgccactgctcaccggcccagatcttcaatgccctcgctgccacctaccgctgctttgcctccgccccattcatcttcgacctcctcctcctcgcctaccttcgctcccgccgcgacgtcctcgctgcggcctccgtcgcccgccgcatcctcgctgccggcgcacggccgctcccctccactgcggcagctcttcttcgttcactcccttccgccaccgcggccctcgacatgtatcatcaaatctacacgcatccaagtccacggagcaatcacctcctcctgccgactgttcacaccttcaattccctcctccttgctttccaccgcgaaggcaagtgtgatgaattcaagattgtgctccaggaaatggacaaatattcctgcaagcacaacgtgtgcacctacagcatcaggatgtctgggtactgcaatggcgggcatgtggataaggcgcgaacactatgggatgagatgattcaggaagggatccagcctgatataactgcgtacaacacaatgattagtgggtattgccattctggggaggtaggggtggcagaggagatgtttaaaaatatgttgatgggtgggattgattcaagtgccacgacgttcgaatggttggtcagagggcattgtatggcacgggatgtcgaggcagcaatgcttgtgcgtgcagacatgaaaaggaaggggtttgggttggcgccagaggttgttgaggaattgctggatggattatgtcaaaatgggagggttgaggatggcttgagtgttttgcgagaggagatgaagagggaagaatttgtgccaacccggaggagttacgaggtgttgattatggggttttgtgatggagggaaggtggaggtggcaatcagactccaagcagagatggctggaaaaggattcactgctggcagcgaggtgtactatgcatttattagtgcttatgagaagtctgaaaattatgagatggtcgagaagttgaggaaggaaatgtcggcgatgggcacttagagcatgtctagcagctcaccaataattcatccctaataaaatggtattggtggtcaccaatagtgctttttttggaatattggggagactctatagtagattaccaataatctttcccaatacatgggacccacatgtcagaatagaggatgtgggaggaagaagatgacgacagttgttgtggtcccaacacctatagagggagatgcaactccccttttatttgaggggagatgggagatttgttttggtgaccaccaaaaaaagggagagctattggggagctgttggagcaatggaattgcctcatctcccccaatatgacagttttatggggatgagggatggtattggagagctactggatgctctatcggatctgatatttggcttggatattgcacagtgatgcatggatatcaacctcacctaattgcagttgagaactatgagtggtgcaacaaattctgaattggttgaaggagttctctcctagcactatcctggagacggatgttggagaaatatgactgctggatctgcaataggataatgtcttttagtcgatcccttttgtgcttgtttggtgaacttgtgtccccaatctgttgaactctgtaaacatttgctttccataaaagcagagatattctccttaaaaactcagtccagaatggtgatatatgaatgatccctgagagtttataaggtacaaccgtacaagtccaggtgctagagacttctcaatttgctggaaaatgctgtagtattttgtgttgacttgctgtttgatatatgctcagtacctcactgtaaaatgtggttctcttgtttgcctcttaacaaaatcctgagaaatgacatgagaacaaattgagaattagtagatcagtacttaactgcaaaacttttgtagttggaattaatttccagtctctagcaaagtagcaatagctgagagagctaaacttgagctattgtgtaatcgaaaatggaggcaccattgcagccaaacttatgaactaac

SEQ ID NO: 69823 - DNA, 3421 bp, Zea Mays
gcgttccagcggtatgacatgatcccacagaacgctttgagagtagcagaggaaggaggaacgaggaagggtttatagtttggattatatgattggatgatcggatggtggatcctctttcccaccaagtcaaggtttgtgaattcgggagtgctagaatcttgatcttccacaagagaatgtctccagaagcaatggataggcttctagaaaaagataaagtgccaaacccatgctatagagtatagactgagtttcaacattggaaggctcaactaaatataccagttccggatacacactacaggacaaaggtgcacagcacccgatagcgcgctgccttttttagtgtagaactagaaaaccaacgcacaacacaaaccagagagttctccatggacgtcggtggcggcgccaccggcacacgctgccgagaccccaccgctgacccctcgtcccagttcttcgttgacgctggccatccatacgcagtcgctgcagccactgcgctcacctcccaccgcaccaagtccaagtggtcccacctctcttcggtccccgtcccctcccccttcctggcctccgccgccgccggcgtgctcctcctcctccgccaccgaccgcacaccgcgctccgcttccatgccttcgccatccgccgcctccttccctcccgctcccctccccctctcgtcttctctgccgccgcagcccacgtcgcggcggcctcccgccttcggggccctgccctctccatccttgcctctgcctcccgccactgctcaccggcccagatcttcaatgccctcgctgccacctaccgctgctttgcctccgccccattcatcttcgacctcctcctcctcgcctaccttcgctcccgccgcgacgtcctcgctgcggcctccgtcgcccgccgcatcctcgctgccggcgcacggccgctcccctccactgcggcagctcttcttcgttcactcccttccgccaccgcggccctcgacatgtatcatcaaatctacacgcatccaagtccacggagcaatcacctcctcctgccgactgttcacaccttcaattccctcctccttgctttccaccgcgaaggcaagtgtgatgaattcaagattgtgctccaggaaatggacaaatattcctgcaagcacaacgtgtgcacctacagcatcaggatgtctgggtactgcaatggcgggcatgtggataaggcgcgaacactatgggatgagatgattcaggaagggatccagcctgatataactgcgtacaacacaatgattagtgggtattgccattctggggaggtaggggtggcagaggagatgtttaaaaatatgttgatgggtgggattgattcaagtgccacgacgttcgaatggttggtcagagggcattgtatggcacgggatgtcgaggcagcaatgcttgtgcgtgcagacatgaaaaggaaggggtttgggttggcgccagaggttgttgaggaattgctggatggattatgtcaaaatgggagggttgaggatggcttgagtgttttgcgagaggagatgaagagggaagaatttgtgccaacccggaggagttacgaggtgttgattatggggttttgtgatggagggaaggtggaggtggcaatcagactccaagcagagatggctggaaaaggattcactgctggcagcgaggtgtactatgcatttattagtgcttatgagaagtctgaaaattatgagatggtcgagaagttgaggaaggaaatgtcggcgatgggcacttagagcatgtctagcagctcaccaataattcatccctaataaaatggtattggtggtcaccaatagtgctttttttggaatattggggagactctatagtagattaccaataatctttcccaatacatgggacccacatgtcagaatagaggatgtgggaggaagaagatgacgacagttgttgtggtcccaacacctatagagggagatgcaactccccttttatttgaggggagatgggagatttgttttggtgaccaccaaaaaaagggagagctattggggagctgttggagcaatggaattgcctcatctcccccaatatgacagttttatggggatgagggatggtattggagagctactggatgctctatcggatctgatatttggcttggatattgcacagtgatgcatggatatcaacctcacctaattgcagttgagaactatggtaaatcacttatctttacatcactcctcttcctttgattaagttgcttagttttaaaaccagccatttgttctctcttgaatctgtttcttcttgtagtttgttatttgttctgcatggcatgttataaccatttatttcagaaaattttgatgtctagtattgaaacttgaaacttcaaataatccaaaattggtgctaacttgttctctaggtgagaggtgtgtaaagcttgtttgcttcaaaccgatggtaacaactggtatggaaacatcatgttagagcaggcattagttccatattccactcagtcacattcatctaaatgtaagcgtctattgtagttatgtagttggcatgaatatttatacctgtaaattatgattcatagatgatgaacaatcacttaaacaatataagtctggtgccaaatgctatttcagatgatacctaaatgttacagcacatagttttgatacatgcagggtatccttagaaaagcaagtaaattatgtaatagttgaaagataattctcaatatcatatgtcagatgttctttctggttcacttctctatctggttcacaattcattccagagtggtgcaacaaattctgaattggttgaaggagttctctcctagcactatcctggagacggatgttggagaaatatgactgctggatctgcaataggataatgtcttttagtcgatcccttttgtgcttgtttggtgaacttgtgtccccaatctgttgaactctgtaaacatttgctttccataaaagcagagatattctccttaaaaactcagtccagaatggtgatatatgaatgatccctgagagtttataaggtacaaccgtacaagtccaggtgctagagacttctcaatttgctggaaaatgctgtagtattttgtgttgacttgctgtttgatatatgctcagtacctcactgtaaaatgtggttctcttgtttgcctcttaacaaaatcctgagaaatgacatgagaacaaattgagaattagtagatcagtacttaactgcaaaacttttgtagttggaattaatttccagtctctagcaaagtagcaatagctgagagagctaaacttgagctattgtgtaatcgaaaatggaggcaccattgcagccaaacttatgaactaac

SEQ ID NO: 69824 - DNA, 1938 bp, Zea Mays
gcgttccagcggtatgacatgatcccacagaacgctttgagagtagcagaggaaggaggaacgaggaagggtttatagtttggattatatgattggatgatcggatggtggatcctctttcccaccaagtcaaggtttgtgaattcgggagtgctagaatcttgatcttccacaagagaatgtctccagaagcaatggataggcttctagaaaaagataaagtgccaaacccatgctatagagtatagactgaggaaatggacaaatattcctgcaagcacaacgtgtgcacctacagcatcaggatgtctgggtactgcaatggcgggcatgtggataaggcgcgaacactatgggatgagatgattcaggaagggatccagcctgatataactgcgtacaacacaatgattagtgggtattgccattctggggaggtaggggtggcagaggagatgtttaaaaatatgttgatgggtgggattgattcaagtgccacgacgttcgaatggttggtcagagggcattgtatggcacgggatgtcgaggcagcaatgcttgtgcgtgcagacatgaaaaggaaggggtttgggttggcgccagaggttgttgaggaattgctggatggattatgtcaaaatgggagggttgaggatggcttgagtgttttgcgagaggagatgaagagggaagaatttgtgccaacccggaggagttacgaggtgttgattatggggttttgtgatggagggaaggtggaggtggcaatcagactccaagcagagatggctggaaaaggattcactgctggcagcgaggtgtactatgcatttattagtgcttatgagaagtctgaaaattatgagatggtcgagaagttgaggaaggaaatgtcggcgatgggcacttagagcatgtctagcagctcaccaataattcatccctaataaaatggtattggtggtcaccaatagtgctttttttggaatattggggagactctatagtagattaccaataatctttcccaatacatgggacccacatgtcagaatagaggatgtgggaggaagaagatgacgacagttgttgtggtcccaacacctatagagggagatgcaactccccttttatttgaggggagatgggagatttgttttggtgaccaccaaaaaaagggagagctattggggagctgttggagcaatggaattgcctcatctcccccaatatgacagttttatggggatgagggatggtattggagagctactggatgctctatcggatctgatatttggcttggatattgcacagtgatgcatggatatcaacctcacctaattgcagttgagaactatgagtggtgcaacaaattctgaattggttgaaggagttctctcctagcactatcctggagacggatgttggagaaatatgactgctggatctgcaataggataatgtcttttagtcgatcccttttgtgcttgtttggtgaacttgtgtccccaatctgttgaactctgtaaacatttgctttccataaaagcagagatattctccttaaaaactcagtccagaatggtgatatatgaatgatccctgagagtttataaggtacaaccgtacaagtccaggtgctagagacttctcaatttgctggaaaatgctgtagtattttgtgttgacttgctgtttgatatatgctcagtacctcactgtaaaatgtggttctcttgtttgcctcttaacaaaatcctgagaaatgacatgagaacaaattgagaattagtagatcagtacttaactgcaaaacttttgtagttggaattaatttccagtctctagcaaagtagcaatagctgagagagctaaacttgagctattgtgtaatcgaaaatggaggcaccattgcagccaaacttatgaactaac

SEQ ID NO: 69825 - DNA, 3282 bp, Zea Mays
gcgttccagcggtatgacatgatcccacagaacgctttgagagtagcagaggaaggaggaacgaggaagggtttatagtttggattatatgattggatgatcggatggttagtagtttggattggaagattggatcacatcgcgtagtccacctctcctctccagtttccacgagaaaaaaagtggatcctctttcccaccaagtcaaggtttgtgaattcgggagtgctagaatcttgatcttccacaagagaatgtctccagaagcaatggataggcttctagaaaaagataaagtgccaaacccatgctatagagtatagactgagtttcaacattggaaggctcaactaaatataccagttccggatacacactacaggacaaaggtgcacagcacccgatagcgcgctgccttttttagtgtagaactagaaaaccaacgcacaacacaaaccagagagttctccatggacgtcggtggcggcgccaccggcacacgctgccgagaccccaccgctgacccctcgtcccagttcttcgttgacgctggccatccatacgcagtcgctgcagccactgcgctcacctcccaccgcaccaagtccaagtggtcccacctctcttcggtccccgtcccctcccccttcctggcctccgccgccgccggcgtgctcctcctcctccgccaccgaccgcacaccgcgctccgcttccatgccttcgccatccgccgcctccttccctcccgctcccctccccctctcgtcttctctgccgccgcagcccacgtcgcggcggcctcccgccttcggggccctgccctctccatccttgcctctgcctcccgccactgctcaccggcccagatcttcaatgccctcgctgccacctaccgctgctttgcctccgccccattcatcttcgacctcctcctcctcgcctaccttcgctcccgccgcgacgtcctcgctgcggcctccgtcgcccgccgcatcctcgctgccggcgcacggccgctcccctccactgcggcagctcttcttcgttcactcccttccgccaccgcggccctcgacatgtatcatcaaatctacacgcatccaagtccacggagcaatcacctcctcctgccgactgttcacaccttcaattccctcctccttgctttccaccgcgaaggcaagtgtgatgaattcaagattgtgctccaggaaatggacaaatattcctgcaagcacaacgtgtgcacctacagcatcaggatgtctgggtactgcaatggcgggcatgtggataaggcgcgaacactatgggatgagatgattcaggaagggatccagcctgatataactgcgtacaacacaatgattagtgggtattgccattctggggaggtaggggtggcagaggagatgtttaaaaatatgttgatgggtgggattgattcaagtgccacgacgttcgaatggttggtcagagggcattgtatggcacgggatgtcgaggcagcaatgcttgtgcgtgcagacatgaaaaggaaggggtttgggttggcgccagaggttgttgaggaattgctggatggattatgtcaaaatgggagggttgaggatggcttgagtgttttgcgagaggagatgaagagggaagaatttgtgccaacccggaggagttacgaggtgttgattatggggttttgtgatggagggaaggtggaggtggcaatcagactccaagcagagatggctggaaaaggattcactgctggcagcgaggtgtactatgcatttattagtgcttatgagaagtctgaaaattatgagatggtcgagaagttgaggaaggaaatgtcggcgatgggcacttagagcatgtctagcagctcaccaataattcatccctaataaaatggtattggtggtcaccaatagtgctttttttggaatattggggagactctatagtagattaccaataatctttcccaatacatgggacccacatgtcagaatagaggatgtgggaggaagaagatgacgacagttgttgtggtcccaacacctatagagggagatgcaactccccttttatttgaggggagatgggagatttgttttggtgaccaccaaaaaaagggagagctattggggagctgttggagcaatggaattgcctcatctcccccaatatgacagttttatggggatgagggatggtattggagagctactggatgctctatcggatctgatatttggcttggatattgcacagtgatgcatggatatcaacctcacctaattgcagttgagaactatggtgagaggtgtgtaaagcttgtttgcttcaaaccgatggtaacaactggtatggaaacatcatgttagagcaggcattagttccatattccactcagtcacattcatctaaatgtaagcgtctattgtagttatgtagttggcatgaatatttatacctgtaaattatgattcatagatgatgaacaatcacttaaacaatataagtctggtgccaaatgctatttcagatgatacctaaatgttacagcacatagttttgatacatgcagggtatccttagaaaagcaagtaaattatgtaatagttgaaagataattctcaatatcatatgtcagatgttctttctggttcacttctctatctggttcacaattcattccagagtggtgcaacaaattctgaattggttgaaggagttctctcctagcactatcctggagacggatgttggagaaatatgactgctggatctgcaataggataatgtcttttagtcgatcccttttgtgcttgtttggtgaacttgtgtccccaatctgttgaactctgtaaacatttgctttccataaaagcagagatattctccttaaaaactcagtccagaatggtgatatatgaatgatccctgagagtttataaggtacaaccgtacaagtccaggtgctagagacttctcaatttgctggaaaatgctgtagtattttgtgttgacttgctgtttgatatatgctcagtacctcactgtaaaatgtggttctcttgtttgcctcttaacaaaatcctgagaaatgacatgagaacaaattgagaattagtagatcagtacttaactgcaaaacttttgtagttggaattaatttccagtctctagcaaagtagcaatagctgagagagctaaacttgagctattgtgtaatcgaaaatggaggcaccattgcagccaaacttatgaactaac

SEQ ID NO: 69826 - DNA, 2823 bp, Zea Mays
gcgttccagcggtatgacatgatcccacagaacgctttgagagtagcagaggaaggaggaacgaggaagggtttatagtttggattatatgattggatgatcggatggtggatcctctttcccaccaagtcaaggtttgtgaattcgggagtgctagaatcttgatcttccacaagagaatgtctccagaagcaatggataggcttctagaaaaagataaagtgccaaacccatgctatagagtatagactgagtttcaacattggaaggctcaactaaatataccagttccggatacacactacaggacaaaggtgcacagcacccgatagcgcgctgccttttttagtgtagaactagaaaaccaacgcacaacacaaaccagagagttctccatggacgtcggtggcggcgccaccggcacacgctgccgagaccccaccgctgacccctcgtcccagttcttcgttgacgctggccatccatacgcagtcgctgcagccactgcgctcacctcccaccgcaccaagtccaagtggtcccacctctcttcggtccccgtcccctcccccttcctggcctccgccgccgccggcgtgctcctcctcctccgccaccgaccgcacaccgcgctccgcttccatgccttcgccatccgccgcctccttccctcccgctcccctccccctctcgtcttctctgccgccgcagcccacgtcgcggcggcctcccgccttcggggccctgccctctccatccttgcctctgcctcccgccactgctcaccggcccagatcttcaatgccctcgctgccacctaccgctgctttgcctccgccccattcatcttcgacctcctcctcctcgcctaccttcgctcccgccgcgacgtcctcgctgcggcctccgtcgcccgccgcatcctcgctgccggcgcacggccgctcccctccactgcggcagctcttcttcgttcactcccttccgccaccgcggccctcgacatgtatcatcaaatctacacgcatccaagtccacggagcaatcacctcctcctgccgactgttcacaccttcaattccctcctccttgctttccaccgcgaaggcaagtgtgatgaattcaagattgtgctccaggaaatggacaaatattcctgcaagcacaacgtgtgcacctacagcatcaggatgtctgggtactgcaatggcgggcatgtggataaggcgcgaacactatgggatgagatgattcaggaagggatccagcctgatataactgcgtacaacacaatgattagtgggtattgccattctggggaggtaggggtggcagaggagatgtttaaaaatatgttgatgggtgggattgattcaagtgccacgacgttcgaatggttggtcagagggcattgtatggcacgggatgtcgaggcagcaatgcttgtgcgtgcagacatgaaaaggaaggggtttgggttggcgccagaggttgttgaggaattgctggatggattatgtcaaaatgggagggttgaggatggcttgagtgttttgcgagaggagatgaagagggaagaatttgtgccaacccggaggagttacgaggtgttgattatggggttttgtgatggagggaaggtggaggtggcaatcagactccaagcagagatggctggaaaaggattcactgctggcagcgaggtgtactatgcatttattagtgcttatgagaagtctgaaaattatgagatggtcgagaagttgaggaaggaaatgtcggcgatgggcacttagagcatgtctagcagctcaccaataattcatccctaataaaatggtattggtggtcaccaatagtgctttttttggaatattggggagactctatagtagattaccaataatctttcccaatacatgggacccacatgtcagaatagaggatgtgggaggaagaagatgacgacagttgttgtggtcccaacacctatagagggagatgcaactccccttttatttgaggggagatgggagatttgttttggtgaccaccaaaaaaagggagagctattggggagctgttggagcaatggaattgcctcatctcccccaatatgacagttttatggggatgagggatggtattggagagctactggatgctctatcggatctgatatttggcttggatattgcacagtgatgcatggatatcaacctcacctaattgcagttgagaactatgagtggtgcaacaaattctgaattggttgaaggagttctctcctagcactatcctggagacggatgttggagaaatatgactgctggatctgcaataggataatgtcttttagtcgatcccttttgtgcttgtttggtgaacttgtgtccccaatctgttgaactctgtaaacatttgctttccataaaagcagagatattctccttaaaaactcagtccagaatggtgatatatgaatgatccctgagagtttataaggtacaaccgtacaagtccaggtgctagagacttctcaatttgctggaaaatgctgtagtattttgtgttgacttgctgtttgatatatgctcagtacctcactgtaaaatgtggttctcttgtttgcctcttaacaaaatcctgagaaatgacatgagaacaaattgagaattagtagatcagtacttaactgcaaaacttttgtagttggaattaatttccagtctctagcaaagtagcaatagctgagagagctaaacttgagctattgtgtaatcgaaaatggaggcaccattgcagccaaacttatgaactaac

SEQ ID NO: 69827 - DNA, 1289 bp, Zea Mays
gcgttccagcggtatgacatgatcccacagaacgctttgagagtagcagaggaaggaggaacgaggaagggtttatagtttggattatatgattggatgatcggatggttagtagtttggattggaagattggatcacatcgcgtagtccacctctcctctccagtttccacgagaaaaaaagtggatcctctttcccaccaagtcaaggtttgtgaattcgggagtgctagaatcttgatcttccacaagagaatgtctccagaagcaatggataggcttctagaaaaagataaagtgccaaacccatgctatagagtatagactgaggtgagaggtgtgtaaagcttgtttgcttcaaaccgatggtaacaactggtatggaaacatcatgttagagcaggcattagttccatattccactcagtcacattcatctaaatgtaagcgtctattgtagttatgtagttggcatgaatatttatacctgtaaattatgattcatagatgatgaacaatcacttaaacaatataagtctggtgccaaatgctatttcagatgatacctaaatgttacagcacatagttttgatacatgcagggtatccttagaaaagcaagtaaattatgtaatagttgaaagataattctcaatatcatatgtcagatgttctttctggttcacttctctatctggttcacaattcattccagagtggtgcaacaaattctgaattggttgaaggagttctctcctagcactatcctggagacggatgttggagaaatatgactgctggatctgcaataggataatgtcttttagtcgatcccttttgtgcttgtttggtgaacttgtgtccccaatctgttgaactctgtaaacatttgctttccataaaagcagagatattctccttaaaaactcagtccagaatggtgatatatgaatgatccctgagagtttataaggtacaaccgtacaagtccaggtgctagagacttctcaatttgctggaaaatgctgtagtattttgtgttgacttgctgtttgatatatgctcagtacctcactgtaaaatgtggttctcttgtttgcctcttaacaaaatcctgagaaatgacatgagaacaaattgagaattagtagatcagtacttaactgcaaaacttttgtagttggaattaatttccagtctctagcaaagtagcaatagctgagagagctaaacttgagctattgtgtaatcgaaaatggaggcaccattgcagccaaacttatgaactaac

SEQ ID NO: 69828 - DNA, 3270 bp, Zea Mays
gcgttccagcggtatgacatgatcccacagaacgctttgagagtagcagaggaaggaggaacgaggaagggtttatagtttggattatatgattggatgatcggatggtggatcctctttcccaccaagtcaaggtttgtgaattcgggagtgctagaatcttgatcttccacaagagaatgtctccagaagcaatggataggcttctagaaaaagataaagtgccaaacccatgctatagagtatagactgaggtactgattttccttatctgatgaaccatctgcttggtgctgtgacgatctctaggatatgcgacttgttaaaatgattttgattgcttcgttggttacattagttctactattaccatgcattaatggccttcctgactatcatttggttatctcatgtttctgagaataaaagataaccattgctgtaaagtactaacgttgttgtgcgcttaatctgcatttgtatttgtttgccttattacacttgcttgcctttatcttgtgttttctatgtataagtgtgcaattttggcatttttgtttatctgttactgttgttctctacctacccacgttagataaatgattcacacggcactgtacaggattcaacactggcatgattctaattgaactttacctattactagcatcctaagtgatcccttcatttgtttgtttcagtttcaacattggaaggctcaactaaatataccagttccggatacacactacaggacaaaggtgcacagcacccgatagcgcgctgccttttttagtgtagaactagaaaaccaacgcacaacacaaaccagagagttctccatggacgtcggtggcggcgccaccggcacacgctgccgagaccccaccgctgacccctcgtcccagttcttcgttgacgctggccatccatacgcagtcgctgcagccactgcgctcacctcccaccgcaccaagtccaagtggtcccacctctcttcggtccccgtcccctcccccttcctggcctccgccgccgccggcgtgctcctcctcctccgccaccgaccgcacaccgcgctccgcttccatgccttcgccatccgccgcctccttccctcccgctcccctccccctctcgtcttctctgccgccgcagcccacgtcgcggcggcctcccgccttcggggccctgccctctccatccttgcctctgcctcccgccactgctcaccggcccagatcttcaatgccctcgctgccacctaccgctgctttgcctccgccccattcatcttcgacctcctcctcctcgcctaccttcgctcccgccgcgacgtcctcgctgcggcctccgtcgcccgccgcatcctcgctgccggcgcacggccgctcccctccactgcggcagctcttcttcgttcactcccttccgccaccgcggccctcgacatgtatcatcaaatctacacgcatccaagtccacggagcaatcacctcctcctgccgactgttcacaccttcaattccctcctccttgctttccaccgcgaaggcaagtgtgatgaattcaagattgtgctccaggaaatggacaaatattcctgcaagcacaacgtgtgcacctacagcatcaggatgtctgggtactgcaatggcgggcatgtggataaggcgcgaacactatgggatgagatgattcaggaagggatccagcctgatataactgcgtacaacacaatgattagtgggtattgccattctggggaggtaggggtggcagaggagatgtttaaaaatatgttgatgggtgggattgattcaagtgccacgacgttcgaatggttggtcagagggcattgtatggcacgggatgtcgaggcagcaatgcttgtgcgtgcagacatgaaaaggaaggggtttgggttggcgccagaggttgttgaggaattgctggatggattatgtcaaaatgggagggttgaggatggcttgagtgttttgcgagaggagatgaagagggaagaatttgtgccaacccggaggagttacgaggtgttgattatggggttttgtgatggagggaaggtggaggtggcaatcagactccaagcagagatggctggaaaaggattcactgctggcagcgaggtgtactatgcatttattagtgcttatgagaagtctgaaaattatgagatggtcgagaagttgaggaaggaaatgtcggcgatgggcacttagagcatgtctagcagctcaccaataattcatccctaataaaatggtattggtggtcaccaatagtgctttttttggaatattggggagactctatagtagattaccaataatctttcccaatacatgggacccacatgtcagaatagaggatgtgggaggaagaagatgacgacagttgttgtggtcccaacacctatagagggagatgcaactccccttttatttgaggggagatgggagatttgttttggtgaccaccaaaaaaagggagagctattggggagctgttggagcaatggaattgcctcatctcccccaatatgacagttttatggggatgagggatggtattggagagctactggatgctctatcggatctgatatttggcttggatattgcacagtgatgcatggatatcaacctcacctaattgcagttgagaactatgagtggtgcaacaaattctgaattggttgaaggagttctctcctagcactatcctggagacggatgttggagaaatatgactgctggatctgcaataggataatgtcttttagtcgatcccttttgtgcttgtttggtgaacttgtgtccccaatctgttgaactctgtaaacatttgctttccataaaagcagagatattctccttaaaaactcagtccagaatggtgatatatgaatgatccctgagagtttataaggtacaaccgtacaagtccaggtgctagagacttctcaatttgctggaaaatgctgtagtattttgtgttgacttgctgtttgatatatgctcagtacctcactgtaaaatgtggttctcttgtttgcctcttaacaaaatcctgagaaatgacatgagaacaaattgagaattagtagatcagtacttaactgcaaaacttttgtagttggaattaatttccagtctctagcaaagtagcaatagctgagagagctaaacttgagctattgtgtaatcgaaaatggaggcaccattgcagccaaacttatgaactaac

SEQ ID NO: 69829 - DNA, 2946 bp, Zea Mays
gcgttccagcggtatgacatgatcccacagaacgctttgagagtagcagaggaaggaggaacgaggaagggtttatagtttggattatatgattggatgatcggatggttagtagtttggattggaagattggatcacatcgcgtagtccacctctcctctccagtttccacgagaaaaaaagtggatcctctttcccaccaagtcaaggtttgtgaattcgggagtgctagaatcttgatcttccacaagagaatgtctccagaagcaatggataggcttctagaaaaagataaagtgccaaacccatgctatagagtatagactgagtttcaacattggaaggctcaactaaatataccagttccggatacacactacaggacaaaggtgcacagcacccgatagcgcgctgccttttttagtgtagaactagaaaaccaacgcacaacacaaaccagagagttctccatggacgtcggtggcggcgccaccggcacacgctgccgagaccccaccgctgacccctcgtcccagttcttcgttgacgctggccatccatacgcagtcgctgcagccactgcgctcacctcccaccgcaccaagtccaagtggtcccacctctcttcggtccccgtcccctcccccttcctggcctccgccgccgccggcgtgctcctcctcctccgccaccgaccgcacaccgcgctccgcttccatgccttcgccatccgccgcctccttccctcccgctcccctccccctctcgtcttctctgccgccgcagcccacgtcgcggcggcctcccgccttcggggccctgccctctccatccttgcctctgcctcccgccactgctcaccggcccagatcttcaatgccctcgctgccacctaccgctgctttgcctccgccccattcatcttcgacctcctcctcctcgcctaccttcgctcccgccgcgacgtcctcgctgcggcctccgtcgcccgccgcatcctcgctgccggcgcacggccgctcccctccactgcggcagctcttcttcgttcactcccttccgccaccgcggccctcgacatgtatcatcaaatctacacgcatccaagtccacggagcaatcacctcctcctgccgactgttcacaccttcaattccctcctccttgctttccaccgcgaaggcaagtgtgatgaattcaagattgtgctccaggaaatggacaaatattcctgcaagcacaacgtgtgcacctacagcatcaggatgtctgggtactgcaatggcgggcatgtggataaggcgcgaacactatgggatgagatgattcaggaagggatccagcctgatataactgcgtacaacacaatgattagtgggtattgccattctggggaggtaggggtggcagaggagatgtttaaaaatatgttgatgggtgggattgattcaagtgccacgacgttcgaatggttggtcagagggcattgtatggcacgggatgtcgaggcagcaatgcttgtgcgtgcagacatgaaaaggaaggggtttgggttggcgccagaggttgttgaggaattgctggatggattatgtcaaaatgggagggttgaggatggcttgagtgttttgcgagaggagatgaagagggaagaatttgtgccaacccggaggagttacgaggtgttgattatggggttttgtgatggagggaaggtggaggtggcaatcagactccaagcagagatggctggaaaaggattcactgctggcagcgaggtgtactatgcatttattagtgcttatgagaagtctgaaaattatgagatggtcgagaagttgaggaaggaaatgtcggcgatgggcacttagagcatgtctagcagctcaccaataattcatccctaataaaatggtattggtggtcaccaatagtgctttttttggaatattggggagactctatagtagattaccaataatctttcccaatacatgggacccacatgtcagaatagaggatgtgggaggaagaagatgacgacagttgttgtggtcccaacacctatagagggagatgcaactccccttttatttgaggggagatgggagatttgttttggtgaccaccaaaaaaagggagagctattggggagctgttggagcaatggaattgcctcatctcccccaatatgacagttttatggggatgagggatggtattggagagctactggatgctctatcggatctgatatttggcttggatattgcacagtgatgcatggatatcaacctcacctaattgcagttgagaactatggtgagaggtgtgtaaagcttgtttgcttcaaaccgatggtaacaactgagtggtgcaacaaattctgaattggttgaaggagttctctcctagcactatcctggagacggatgttggagaaatatgactgctggatctgcaataggataatgtcttttagtcgatcccttttgtgcttgtttggtgaacttgtgtccccaatctgttgaactctgtaaacatttgctttccataaaagcagagatattctccttaaaaactcagtccagaatggtgatatatgaatgatccctgagagtttataaggtacaaccgtacaagtccaggtgctagagacttctcaatttgctggaaaatgctgtagtattttgtgttgacttgctgtttgatatatgctcagtacctcactgtaaaatgtggttctcttgtttgcctcttaacaaaatcctgagaaatgacatgagaacaaattgagaattagtagatcagtacttaactgcaaaacttttgtagttggaattaatttccagtctctagcaaagtagcaatagctgagagagctaaacttgagctattgtgtaatcgaaaatggaggcaccattgcagccaaacttatgaactaac

SEQ ID NO: 69830 - DNA, 3118 bp, Zea Mays
gcgttccagcggtatgacatgatcccacagaacgctttgagagtagcagaggaaggaggaacgaggaagggtttatagtttggattatatgattggatgatcggatggttagtagtttggattggaagattggatcacatcgcgtagtccacctctcctctccagtttccacgagaaaaaaagtggatcctctttcccaccaagtcaaggtttgtgaattcgggagtgctagaatcttgatcttccacaagagaatgtctccagaagcaatggataggcttctagaaaaagataaagtgccaaacccatgctatagagtatagactgaggtactgattttccttatctgatgaaccatctgcttggtgctgtgacgatctctaggatatgcgacttgttaaaatgattttgattgcttcgttggttacattagttctactattaccatgcattaatggccttcctgactatcatttggttatctcatgtttctgagaataaaagataaccattgctgtaaagtactaacgttgttgtgcgcttaatctgcatttgtatttgtttgccttattacacttgcttgcctttatcttgtgttttctatgtataagtgtgcaattttggcatttttgtttatctgttactgttgttctctacctacccacgttagataaatgattcacacggcactgtacaggattcaacactggcatgattctaattgaactttacctattactagcatcctaagtgatcccttcatttgtttgtttcagtttcaacattggaaggctcaactaaatataccagttccggatacacactacaggacaaaggaaatggacaaatattcctgcaagcacaacgtgtgcacctacagcatcaggatgtctgggtactgcaatggcgggcatgtggataaggcgcgaacactatgggatgagatgattcaggaagggatccagcctgatataactgcgtacaacacaatgattagtgggtattgccattctggggaggtaggggtggcagaggagatgtttaaaaatatgttgatgggtgggattgattcaagtgccacgacgttcgaatggttggtcagagggcattgtatggcacgggatgtcgaggcagcaatgcttgtgcgtgcagacatgaaaaggaaggggtttgggttggcgccagaggttgttgaggaattgctggatggattatgtcaaaatgggagggttgaggatggcttgagtgttttgcgagaggagatgaagagggaagaatttgtgccaacccggaggagttacgaggtgttgattatggggttttgtgatggagggaaggtggaggtggcaatcagactccaagcagagatggctggaaaaggattcactgctggcagcgaggtgtactatgcatttattagtgcttatgagaagtctgaaaattatgagatggtcgagaagttgaggaaggaaatgtcggcgatgggcacttagagcatgtctagcagctcaccaataattcatccctaataaaatggtattggtggtcaccaatagtgctttttttggaatattggggagactctatagtagattaccaataatctttcccaatacatgggacccacatgtcagaatagaggatgtgggaggaagaagatgacgacagttgttgtggtcccaacacctatagagggagatgcaactccccttttatttgaggggagatgggagatttgttttggtgaccaccaaaaaaagggagagctattggggagctgttggagcaatggaattgcctcatctcccccaatatgacagttttatggggatgagggatggtattggagagctactggatgctctatcggatctgatatttggcttggatattgcacagtgatgcatggatatcaacctcacctaattgcagttgagaactatggtaaatcacttatctttacatcactcctcttcctttgattaagttgcttagttttaaaaccagccatttgttctctcttgaatctgtttcttcttgtagtttgttatttgttctgcatggcatgttataaccatttatttcagaaaattttgatgtctagtattgaaacttgaaacttcaaataatccaaaattggtgctaacttgttctctaggtgagaggtgtgtaaagcttgtttgcttcaaaccgatggtaacaactggtatggaaacatcatgttagagcaggcattagttccatattccactcagtcacattcatctaaatgtaagcgtctattgtagttatgtagttggcatgaatatttatacctgtaaattatgattcatagatgatgaacaatcacttaaacaatataagtctggtgccaaatgctatttcagatgatacctaaatgttacagcacatagttttgatacatgcagggtatccttagaaaagcaagtaaattatgtaatagttgaaagataattctcaatatcatatgtcagatgttctttctggttcacttctctatctggttcacaattcattccagagtggtgcaacaaattctgaattggttgaaggagttctctcctagcactatcctggagacggatgttggagaaatatgactgctggatctgcaataggataatgtcttttagtcgatcccttttgtgcttgtttggtgaacttgtgtccccaatctgttgaactctgtaaacatttgctttccataaaagcagagatattctccttaaaaactcagtccagaatggtgatatatgaatgatccctgagagtttataaggtacaaccgtacaagtccaggtgctagagacttctcaatttgctggaaaatgctgtagtattttgtgttgacttgctgtttgatatatgctcagtacctcactgtaaaatgtggttctcttgtttgcctcttaacaaaatcctgagaaatgacatgagaacaaattgagaattagtagatcagtacttaactgcaaaacttttgtagttggaattaatttccagtctctagcaaagtagcaatagctgagagagctaaacttgagctattgtgtaatcgaaaatggaggcaccattgcagccaaacttatgaactaac

SEQ ID NO: 69831 - DNA, 3011 bp, Zea Mays
gcgttccagcggtatgacatgatcccacagaacgctttgagagtagcagaggaaggaggaacgaggaagggtttatagtttggattatatgattggatgatcggatggttagtagtttggattggaagattggatcacatcgcgtagtccacctctcctctccagtttccacgagaaaaaaagtggatcctctttcccaccaagtcaaggtttgtgaattcgggagtgctagaatcttgatcttccacaagagaatgtctccagaagcaatggataggcttctagaaaaagataaagtgccaaacccatgctatagagtatagactgagtttcaacattggaaggctcaactaaatataccagttccggatacacactacaggacaaaggtgcacagcacccgatagcgcgctgccttttttagtgtagaactagaaaaccaacgcacaacacaaaccagagagttctccatggacgtcggtggcggcgccaccggcacacgctgccgagaccccaccgctgacccctcgtcccagttcttcgttgacgctggccatccatacgcagtcgctgcagccactgcgctcacctcccaccgcaccaagtccaagtggtcccacctctcttcggtccccgtcccctcccccttcctggcctccgccgccgccggcgtgctcctcctcctccgccaccgaccgcacaccgcgctccgcttccatgccttcgccatccgccgcctccttccctcccgctcccctccccctctcgtcttctctgccgccgcagcccacgtcgcggcggcctcccgccttcggggccctgccctctccatccttgcctctgcctcccgccactgctcaccggcccagatcttcaatgccctcgctgccacctaccgctgctttgcctccgccccattcatcttcgacctcctcctcctcgcctaccttcgctcccgccgcgacgtcctcgctgcggcctccgtcgcccgccgcatcctcgctgccggcgcacggccgctcccctccactgcggcagctcttcttcgttcactcccttccgccaccgcggccctcgacatgtatcatcaaatctacacgcatccaagtccacggagcaatcacctcctcctgccgactgttcacaccttcaattccctcctccttgctttccaccgcgaaggcaagtgtgatgaattcaagattgtgctccaggaaatggacaaatattcctgcaagcacaacgtgtgcacctacagcatcaggatgtctgggtactgcaatggcgggcatgtggataaggcgcgaacactatgggatgagatgattcaggaagggatccagcctgatataactgcgtacaacacaatgattagtgggtattgccattctggggaggtaggggtggcagaggagatgtttaaaaatatgttgatgggtgggattgattcaagtgccacgacgttcgaatggttggtcagagggcattgtatggcacgggatgtcgaggcagcaatgcttgtgcgtgcagacatgaaaaggaaggggtttgggttggcgccagaggttgttgaggaattgctggatggattatgtcaaaatgggagggttgaggatggcttgagtgttttgcgagaggagatgaagagggaagaatttgtgccaacccggaggagttacgaggtgttgattatggggttttgtgatggagggaaggtggaggtggcaatcagactccaagcagagatggctggaaaaggattcactgctggcagcgaggtgtactatgcatttattagtgcttatgagaagtctgaaaattatgagatggtcgagaagttgaggaaggaaatgtcggcgatgggcacttagagcatgtctagcagctcaccaataattcatccctaataaaatggtattggtggtcaccaatagtgctttttttggaatattggggagactctatagtagattaccaataatctttcccaatacatgggacccacatgtcagaatagaggatgtgggaggaagaagatgacgacagttgttgtggtcccaacacctatagagggagatgcaactccccttttatttgaggggagatgggagatttgttttggtgaccaccaaaaaaagggagagctattggggagctgttggagcaatggaattgcctcatctcccccaatatgacagttttatggggatgagggatggtattggagagctactggatgctctatcggatctgatatttggcttggatattgcacagtgatgcatggatatcaacctcacctaattgcagttgagaactatggtgagaggtgtgtaaagcttgtttgcttcaaaccgatggtaacaactggtatggaaacatcatgttagagcaggcattagttccatattccactcagtcacattcatctaaatagtggtgcaacaaattctgaattggttgaaggagttctctcctagcactatcctggagacggatgttggagaaatatgactgctggatctgcaataggataatgtcttttagtcgatcccttttgtgcttgtttggtgaacttgtgtccccaatctgttgaactctgtaaacatttgctttccataaaagcagagatattctccttaaaaactcagtccagaatggtgatatatgaatgatccctgagagtttataaggtacaaccgtacaagtccaggtgctagagacttctcaatttgctggaaaatgctgtagtattttgtgttgacttgctgtttgatatatgctcagtacctcactgtaaaatgtggttctcttgtttgcctcttaacaaaatcctgagaaatgacatgagaacaaattgagaattagtagatcagtacttaactgcaaaacttttgtagttggaattaatttccagtctctagcaaagtagcaatagctgagagagctaaacttgagctattgtgtaatcgaaaatggaggcaccattgcagccaaacttatgaactaac

SEQ ID NO: 69832 - DNA, 3943 bp, Zea Mays
gcgttccagcggtatgacatgatcccacagaacgctttgagagtagcagaggaaggaggaacgaggaagggtttatagtttggattatatgattggatgatcggatggttagtagtttggattggaagattggatcacatcgcgtagtccacctctcctctccagtttccacgagaaaaaaagtggatcctctttcccaccaagtcaaggtttgtgaattcgggagtgctagaatcttgatcttccacaagagaatgtctccagaagcaatggataggcttctagaaaaagataaagtgccaaacccatgctatagagtatagactgaggtactgattttccttatctgatgaaccatctgcttggtgctgtgacgatctctaggatatgcgacttgttaaaatgattttgattgcttcgttggttacattagttctactattaccatgcattaatggccttcctgactatcatttggttatctcatgtttctgagaataaaagataaccattgctgtaaagtactaacgttgttgtgcgcttaatctgcatttgtatttgtttgccttattacacttgcttgcctttatcttgtgttttctatgtataagtgtgcaattttggcatttttgtttatctgttactgttgttctctacctacccacgttagataaatgattcacacggcactgtacaggattcaacactggcatgattctaattgaactttacctattactagcatcctaagtgatcccttcatttgtttgtttcagtttcaacattggaaggctcaactaaatataccagttccggatacacactacaggacaaaggtgcacagcacccgatagcgcgctgccttttttagtgtagaactagaaaaccaacgcacaacacaaaccagagagttctccatggacgtcggtggcggcgccaccggcacacgctgccgagaccccaccgctgacccctcgtcccagttcttcgttgacgctggccatccatacgcagtcgctgcagccactgcgctcacctcccaccgcaccaagtccaagtggtcccacctctcttcggtccccgtcccctcccccttcctggcctccgccgccgccggcgtgctcctcctcctccgccaccgaccgcacaccgcgctccgcttccatgccttcgccatccgccgcctccttccctcccgctcccctccccctctcgtcttctctgccgccgcagcccacgtcgcggcggcctcccgccttcggggccctgccctctccatccttgcctctgcctcccgccactgctcaccggcccagatcttcaatgccctcgctgccacctaccgctgctttgcctccgccccattcatcttcgacctcctcctcctcgcctaccttcgctcccgccgcgacgtcctcgctgcggcctccgtcgcccgccgcatcctcgctgccggcgcacggccgctcccctccactgcggcagctcttcttcgttcactcccttccgccaccgcggccctcgacatgtatcatcaaatctacacgcatccaagtccacggagcaatcacctcctcctgccgactgttcacaccttcaattccctcctccttgctttccaccgcgaaggcaagtgtgatgaattcaagattgtgctccaggaaatggacaaatattcctgcaagcacaacgtgtgcacctacagcatcaggatgtctgggtactgcaatggcgggcatgtggataaggcgcgaacactatgggatgagatgattcaggaagggatccagcctgatataactgcgtacaacacaatgattagtgggtattgccattctggggaggtaggggtggcagaggagatgtttaaaaatatgttgatgggtgggattgattcaagtgccacgacgttcgaatggttggtcagagggcattgtatggcacgggatgtcgaggcagcaatgcttgtgcgtgcagacatgaaaaggaaggggtttgggttggcgccagaggttgttgaggaattgctggatggattatgtcaaaatgggagggttgaggatggcttgagtgttttgcgagaggagatgaagagggaagaatttgtgccaacccggaggagttacgaggtgttgattatggggttttgtgatggagggaaggtggaggtggcaatcagactccaagcagagatggctggaaaaggattcactgctggcagcgaggtgtactatgcatttattagtgcttatgagaagtctgaaaattatgagatggtcgagaagttgaggaaggaaatgtcggcgatgggcacttagagcatgtctagcagctcaccaataattcatccctaataaaatggtattggtggtcaccaatagtgctttttttggaatattggggagactctatagtagattaccaataatctttcccaatacatgggacccacatgtcagaatagaggatgtgggaggaagaagatgacgacagttgttgtggtcccaacacctatagagggagatgcaactccccttttatttgaggggagatgggagatttgttttggtgaccaccaaaaaaagggagagctattggggagctgttggagcaatggaattgcctcatctcccccaatatgacagttttatggggatgagggatggtattggagagctactggatgctctatcggatctgatatttggcttggatattgcacagtgatgcatggatatcaacctcacctaattgcagttgagaactatggtaaatcacttatctttacatcactcctcttcctttgattaagttgcttagttttaaaaccagccatttgttctctcttgaatctgtttcttcttgtagtttgttatttgttctgcatggcatgttataaccatttatttcagaaaattttgatgtctagtattgaaacttgaaacttcaaataatccaaaattggtgctaacttgttctctaggtgagaggtgtgtaaagcttgtttgcttcaaaccgatggtaacaactggtatggaaacatcatgttagagcaggcattagttccatattccactcagtcacattcatctaaatgtaagcgtctattgtagttatgtagttggcatgaatatttatacctgtaaattatgattcatagatgatgaacaatcacttaaacaatataagtctggtgccaaatgctatttcagatgatacctaaatgttacagcacatagttttgatacatgcagggtatccttagaaaagcaagtaaattatgtaatagttgaaagataattctcaatatcatatgtcagatgttctttctggttcacttctctatctggttcacaattcattccagagtggtgcaacaaattctgaattggttgaaggagttctctcctagcactatcctggagacggatgttggagaaatatgactgctggatctgcaataggataatgtcttttagtcgatcccttttgtgcttgtttggtgaacttgtgtccccaatctgttgaactctgtaaacatttgctttccataaaagcagagatattctccttaaaaactcagtccagaatggtgatatatgaatgatccctgagagtttataaggtacaaccgtacaagtccaggtgctagagacttctcaatttgctggaaaatgctgtagtattttgtgttgacttgctgtttgatatatgctcagtacctcactgtaaaatgtggttctcttgtttgcctcttaacaaaatcctgagaaatgacatgagaacaaattgagaattagtagatcagtacttaactgcaaaacttttgtagttggaattaatttccagtctctagcaaagtagcaatagctgagagagctaaacttgagctattgtgtaatcgaaaatggaggcaccattgcagccaaacttatgaactaac

SEQ ID NO: 69833 - DNA, 3346 bp, Zea Mays
agcgttccagcggtatgacatgatcccacagaacgctttgagagtagcagaggaaggaggaacgaggaagggtttatagtttggattatatgattggatgatcggatggttagtagtttggattggaagattggatcacatcgcgtagtccacctctcctctccagtttccacgagaaaaaaagtggatcctctttcccaccaagtcaaggtttgtgaattcgggagtgctagaatcttgatcttccacaagagaatgtctccagaagcaatggataggcttctagaaaaagataaagtgccaaacccatgctatagagtatagactgaggtactgattttccttatctgatgaaccatctgcttggtgctgtgacgatctctaggatatgcgacttgttaaaatgattttgattgcttcgttggttacattagttctactattaccatgcattaatggccttcctgactatcatttggttatctcatgtttctgagaataaaagataaccattgctgtaaagtactaacgttgttgtgcgcttaatctgcatttgtatttgtttgccttattacacttgcttgcctttatcttgtgttttctatgtataagtgtgcaattttggcatttttgtttatctgttactgttgttctctacctacccacgttagataaatgattcacacggcactgtacaggattcaacactggcatgattctaattgaactttacctattactagcatcctaagtgatcccttcatttgtttgtttcagtttcaacattggaaggctcaactaaatataccagttccggatacacactacaggacaaaggtgcacagcacccgatagcgcgctgccttttttagtgtagaactagaaaaccaacgcacaacacaaaccagagagttctccatggacgtcggtggcggcgccaccggcacacgctgccgagaccccaccgctgacccctcgtcccagttcttcgttgacgctggccatccatacgcagtcgctgcagccactgcgctcacctcccaccgcaccaagtccaagtggtcccacctctcttcggtccccgtcccctcccccttcctggcctccgccgccgccggcgtgctcctcctcctccgccaccgaccgcacaccgcgctccgcttccatgccttcgccatccgccgcctccttccctcccgctcccctccccctctcgtcttctctgccgccgcagcccacgtcgcggcggcctcccgccttcggggccctgccctctccatccttgcctctgcctcccgccactgctcaccggcccagatcttcaatgccctcgctgccacctaccgctgctttgcctccgccccattcatcttcgacctcctcctcctcgcctaccttcgctcccgccgcgacgtcctcgctgcggcctccgtcgcccgccgcatcctcgctgccggcgcacggccgctcccctccactgcggcagctcttcttcgttcactcccttccgccaccgcggccctcgacatgtatcatcaaatctacacgcatccaagtccacggagcaatcacctcctcctgccgactgttcacaccttcaattccctcctccttgctttccaccgcgaaggcaagtgtgatgaattcaagattgtgctccaggaaatggacaaatattcctgcaagcacaacgtgtgcacctacagcatcaggatgtctgggtactgcaatggcgggcatgtggataaggcgcgaacactatgggatgagatgattcaggaagggatccagcctgatataactgcgtacaacacaatgattagtgggtattgccattctggggaggtaggggtggcagaggagatgtttaaaaatatgttgatgggtgggattgattcaagtgccacgacgttcgaatggttggtcagagggcattgtatggcacgggatgtcgaggcagcaatgcttgtgcgtgcagacatgaaaaggaaggggtttgggttggcgccagaggttgttgaggaattgctggatggattatgtcaaaatgggagggttgaggatggcttgagtgttttgcgagaggagatgaagagggaagaatttgtgccaacccggaggagttacgaggtgttgattatggggttttgtgatggagggaaggtggaggtggcaatcagactccaagcagagatggctggaaaaggattcactgctggcagcgaggtgtactatgcatttattagtgcttatgagaagtctgaaaattatgagatggtcgagaagttgaggaaggaaatgtcggcgatgggcacttagagcatgtctagcagctcaccaataattcatccctaataaaatggtattggtggtcaccaatagtgctttttttggaatattggggagactctatagtagattaccaataatctttcccaatacatgggacccacatgtcagaatagaggatgtgggaggaagaagatgacgacagttgttgtggtcccaacacctatagagggagatgcaactccccttttatttgaggggagatgggagatttgttttggtgaccaccaaaaaaagggagagctattggggagctgttggagcaatggaattgcctcatctcccccaatatgacagttttatggggatgagggatggtattggagagctactggatgctctatcggatctgatatttggcttggatattgcacagtgatgcatggatatcaacctcacctaattgcagttgagaactatgagtggtgcaacaaattctgaattggttgaaggagttctctcctagcactatcctggagacggatgttggagaaatatgactgctggatctgcaataggataatgtcttttagtcgatcccttttgtgcttgtttggtgaacttgtgtccccaatctgttgaactctgtaaacatttgctttccataaaagcagagatattctccttaaaaactcagtccagaatggtgatatatgaatgatccctgagagtttataaggtacaaccgtacaagtccaggtgctagagacttctcaatttgctggaaaatgctgtagtattttgtgttgacttgctgtttgatatatgctcagtacctcactgtaaaatgtggttctcttgtttgcctcttaacaaaatcctgagaaatgacatgagaacaaattgagaattagtagatcagtacttaactgcaaaacttttgtagttggaattaatttccagtctctagcaaagtagcaatagctgagagagctaaacttgagctattgtgtaatcgaaaatggaggcaccattgcagccaaacttatgaactaac

SEQ ID NO: 69834 - DNA, 3131 bp, Zea Mays
  misc_feature (1)..(1): n is a, c, g, or t
nagcgttccagcggtatgacatgatcccacagaacgctttgagagtagcagaggaaggaggaacgaggaagggtttatagtttggattatatgattggatgatcggatggttagtagtttggattggaagattggatcacatcgcgtagtccacctctcctctccagtttccacgagaaaaaaaaacatattaaatctttgcttaattttgaattgttcgctgtaaattagaacttatatgtgcatatacatgtagtcatgtatcaaatccgccgttcagtcattcagtgctctgttcaagtgtggatcctctttcccaccaagtcaaggtttgtgaattcgggagtgctagaatcttgatcttccacaagagaatgtctccagaagcaatggataggcttctagaaaaagataaagtgccaaacccatgctatagagtatagactgagtttcaacattggaaggctcaactaaatataccagttccggatacacactacaggacaaaggtgcacagcacccgatagcgcgctgccttttttagtgtagaactagaaaaccaacgcacaacacaaaccagagagttctccatggacgtcggtggcggcgccaccggcacacgctgccgagaccccaccgctgacccctcgtcccagttcttcgttgacgctggccatccatacgcagtcgctgcagccactgcgctcacctcccaccgcaccaagtccaagtggtcccacctctcttcggtccccgtcccctcccccttcctggcctccgccgccgccggcgtgctcctcctcctccgccaccgaccgcacaccgcgctccgcttccatgccttcgccatccgccgcctccttccctcccgctcccctccccctctcgtcttctctgccgccgcagcccacgtcgcggcggcctcccgccttcggggccctgccctctccatccttgcctctgcctcccgccactgctcaccggcccagatcttcaatgccctcgctgccacctaccgctgctttgcctccgccccattcatcttcgacctcctcctcctcgcctaccttcgctcccgccgcgacgtcctcgctgcggcctccgtcgcccgccgcatcctcgctgccggcgcacggccgctcccctccactgcggcagctcttcttcgttcactcccttccgccaccgcggccctcgacatgtatcatcaaatctacacgcatccaagtccacggagcaatcacctcctcctgccgactgttcacaccttcaattccctcctccttgctttccaccgcgaaggcaagtgtgatgaattcaagattgtgctccaggaaatggacaaatattcctgcaagcacaacgtgtgcacctacagcatcaggatgtctgggtactgcaatggcgggcatgtggataaggcgcgaacactatgggatgagatgattcaggaagggatccagcctgatataactgcgtacaacacaatgattagtgggtattgccattctggggaggtaggggtggcagaggagatgtttaaaaatatgttgatgggtgggattgattcaagtgccacgacgttcgaatggttggtcagagggcattgtatggcacgggatgtcgaggcagcaatgcttgtgcgtgcagacatgaaaaggaaggggtttgggttggcgccagaggttgttgaggaattgctggatggattatgtcaaaatgggagggttgaggatggcttgagtgttttgcgagaggagatgaagagggaagaatttgtgccaacccggaggagttacgaggtgttgattatggggttttgtgatggagggaaggtggaggtggcaatcagactccaagcagagatggctggaaaaggattcactgctggcagcgaggtgtactatgcatttattagtgcttatgagaagtctgaaaattatgagatggtcgagaagttgaggaaggaaatgtcggcgatgggcacttagagcatgtctagcagctcaccaataattcatccctaataaaatggtattggtggtcaccaatagtgctttttttggaatattggggagactctatagtagattaccaataatctttcccaatacatgggacccacatgtcagaatagaggatgtgggaggaagaagatgacgacagttgttgtggtcccaacacctatagagggagatgcaactccccttttatttgaggggagatgggagatttgttttggtgaccaccaaaaaaagggagagctattggggagctgttggagcaatggaattgcctcatctcccccaatatgacagttttatggggatgagggatggtattggagagctactggatgctctatcggatctgatatttggcttggatattgcacagtgatgcatggatatcaacctcacctaattgcagttgagaactatggtgagaggtgtgtaaagcttgtttgcttcaaaccgatggtaacaactggtatggaaacatcatgttagagcaggcattagttccatattccactcagtcacattcatctaaatagtggtgcaacaaattctgaattggttgaaggagttctctcctagcactatcctggagacggatgttggagaaatatgactgctggatctgcaataggataatgtcttttagtcgatcccttttgtgcttgtttggtgaacttgtgtccccaatctgttgaactctgtaaacatttgctttccataaaagcagagatattctccttaaaaactcagtccagaatggtgatatatgaatgatccctgagagtttataaggtacaaccgtacaagtccaggtgctagagacttctcaatttgctggaaaatgctgtagtattttgtgttgacttgctgtttgatatatgctcagtacctcactgtaaaatgtggttctcttgtttgcctcttaacaaaatcctgagaaatgacatgagaacaaattgagaattagtagatcagtacttaactgcaaaacttttgtagttggaattaatttccagtctctagcaaagtagcaatagctgagagagctaaacttgagctattgtgtaatcgaaaatggaggcaccattgcagccaaacttatgaactaac

SEQ ID NO: 69835 - DNA, 3616 bp, Zea Mays
  misc_feature (1)..(1): n is a, c, g, or t
nagcgttccagcggtatgacatgatcccacagaacgctttgagagtagcagaggaaggaggaacgaggaagggtttatagtttggattatatgattggatgatcggatggttagtagtttggattggaagattggatcacatcgcgtagtccacctctcctctccagtttccacgagaaaaaaaaacatattaaatctttgcttaattttgaattgttcgctgtaaattagaacttatatgtgcatatacatgtagtcatgtatcaaatccgccgttcagtcattcagtgctctgttcaagtgtggatcctctttcccaccaagtcaaggtttgtgaattcgggagtgctagaatcttgatcttccacaagagaatgtctccagaagcaatggataggcttctagaaaaagataaagtgccaaacccatgctatagagtatagactgagtttcaacattggaaggctcaactaaatataccagttccggatacacactacaggacaaaggtgcacagcacccgatagcgcgctgccttttttagtgtagaactagaaaaccaacgcacaacacaaaccagagagttctccatggacgtcggtggcggcgccaccggcacacgctgccgagaccccaccgctgacccctcgtcccagttcttcgttgacgctggccatccatacgcagtcgctgcagccactgcgctcacctcccaccgcaccaagtccaagtggtcccacctctcttcggtccccgtcccctcccccttcctggcctccgccgccgccggcgtgctcctcctcctccgccaccgaccgcacaccgcgctccgcttccatgccttcgccatccgccgcctccttccctcccgctcccctccccctctcgtcttctctgccgccgcagcccacgtcgcggcggcctcccgccttcggggccctgccctctccatccttgcctctgcctcccgccactgctcaccggcccagatcttcaatgccctcgctgccacctaccgctgctttgcctccgccccattcatcttcgacctcctcctcctcgcctaccttcgctcccgccgcgacgtcctcgctgcggcctccgtcgcccgccgcatcctcgctgccggcgcacggccgctcccctccactgcggcagctcttcttcgttcactcccttccgccaccgcggccctcgacatgtatcatcaaatctacacgcatccaagtccacggagcaatcacctcctcctgccgactgttcacaccttcaattccctcctccttgctttccaccgcgaaggcaagtgtgatgaattcaagattgtgctccaggaaatggacaaatattcctgcaagcacaacgtgtgcacctacagcatcaggatgtctgggtactgcaatggcgggcatgtggataaggcgcgaacactatgggatgagatgattcaggaagggatccagcctgatataactgcgtacaacacaatgattagtgggtattgccattctggggaggtaggggtggcagaggagatgtttaaaaatatgttgatgggtgggattgattcaagtgccacgacgttcgaatggttggtcagagggcattgtatggcacgggatgtcgaggcagcaatgcttgtgcgtgcagacatgaaaaggaaggggtttgggttggcgccagaggttgttgaggaattgctggatggattatgtcaaaatgggagggttgaggatggcttgagtgttttgcgagaggagatgaagagggaagaatttgtgccaacccggaggagttacgaggtgttgattatggggttttgtgatggagggaaggtggaggtggcaatcagactccaagcagagatggctggaaaaggattcactgctggcagcgaggtgtactatgcatttattagtgcttatgagaagtctgaaaattatgagatggtcgagaagttgaggaaggaaatgtcggcgatgggcacttagagcatgtctagcagctcaccaataattcatccctaataaaatggtattggtggtcaccaatagtgctttttttggaatattggggagactctatagtagattaccaataatctttcccaatacatgggacccacatgtcagaatagaggatgtgggaggaagaagatgacgacagttgttgtggtcccaacacctatagagggagatgcaactccccttttatttgaggggagatgggagatttgttttggtgaccaccaaaaaaagggagagctattggggagctgttggagcaatggaattgcctcatctcccccaatatgacagttttatggggatgagggatggtattggagagctactggatgctctatcggatctgatatttggcttggatattgcacagtgatgcatggatatcaacctcacctaattgcagttgagaactatggtaaatcacttatctttacatcactcctcttcctttgattaagttgcttagttttaaaaccagccatttgttctctcttgaatctgtttcttcttgtagtttgttatttgttctgcatggcatgttataaccatttatttcagaaaattttgatgtctagtattgaaacttgaaacttcaaataatccaaaattggtgctaacttgttctctaggtgagaggtgtgtaaagcttgtttgcttcaaaccgatggtaacaactggtatggaaacatcatgttagagcaggcattagttccatattccactcagtcacattcatctaaatgtaagcgtctattgtagttatgtagttggcatgaatatttatacctgtaaattatgattcatagatgatgaacaatcacttaaacaatataagtctggtgccaaatgctatttcagatgatacctaaatgttacagcacatagttttgatacatgcagggtatccttagaaaagcaagtaaattatgtaatagttgaaagataattctcaatatcatatgtcagatgttctttctggttcacttctctatctggttcacaattcattccagagtggtgcaacaaattctgaattggttgaaggagttctctcctagcactatcctggagacggatgttggagaaatatgactgctggatctgcaataggataatgtcttttagtcgatcccttttgtgcttgtttggtgaacttgtgtccccaatctgttgaactctgtaaacatttgctttccataaaagcagagatattctccttaaaaactcagtccagaatggtgatatatgaatgatccctgagagtttataaggtacaaccgtacaagtccaggtgctagagacttctcaatttgctggaaaatgctgtagtattttgtgttgacttgctgtttgatatatgctcagtacctcactgtaaaatgtggttctcttgtttgcctcttaacaaaatcctgagaaatgacatgagaacaaattgagaattagtagatcagtacttaactgcaaaacttttgtagttggaattaatttccagtctctagcaaagtagcaatagctgagagagctaaacttgagctattgtgtaatcgaaaatggaggcaccattgcagccaaacttatgaactaac

SEQ ID NO: 69836 - DNA, 1632 bp, Zea Mays
  misc_feature (1)..(1): n is a, c, g, or t
nagcgttccagcggtatgacatgatcccacagaacgctttgagagtagcagaggaaggaggaacgaggaagggtttatagtttggattatatgattggatgatcggatggttagtagtttggattggaagattggatcacatcgcgtagtccacctctcctctccagtttccacgagaaaaaaagtactggcatattaatttcagatttttagtaccacttatgtcattaacattagcaatggtaaattcctcttattttgttaacgtatctctcaacatgcttatttatatttatttgctgcagaacatattaaatctttgcttaattttgaattgttcgctgtaaattagaacttatatgtgcatatacatgtagtcatgtatcaaatccgccgttcagtcattcagtgctctgttcaagtgtaagtgttcagtaccaatttttaatcatgttcagtattactacatcgtggttcatgatgttcacttggaaaatgttgacctttttttttgttctttgataggtggatcctctttcccaccaagtcaaggtttgtgaattcgggagtgctagaatcttgatcttccacaagagaatgtctccagaagcaatggataggcttctagaaaaagataaagtgccaaacccatgctatagagtatagactgaggtgagaggtgtgtaaagcttgtttgcttcaaaccgatggtaacaactggtatggaaacatcatgttagagcaggcattagttccatattccactcagtcacattcatctaaatgtaagcgtctattgtagttatgtagttggcatgaatatttatacctgtaaattatgattcatagatgatgaacaatcacttaaacaatataagtctggtgccaaatgctatttcagatgatacctaaatgttacagcacatagttttgatacatgcagggtatccttagaaaagcaagtaaattatgtaatagttgaaagataattctcaatatcatatgtcagatgttctttctggttcacttctctatctggttcacaattcattccagagtggtgcaacaaattctgaattggttgaaggagttctctcctagcactatcctggagacggatgttggagaaatatgactgctggatctgcaataggataatgtcttttagtcgatcccttttgtgcttgtttggtgaacttgtgtccccaatctgttgaactctgtaaacatttgctttccataaaagcagagatattctccttaaaaactcagtccagaatggtgatatatgaatgatccctgagagtttataaggtacaaccgtacaagtccaggtgctagagacttctcaatttgctggaaaatgctgtagtattttgtgttgacttgctgtttgatatatgctcagtacctcactgtaaaatgtggttctcttgtttgcctcttaacaaaatcctgagaaatgacatgagaacaaattgagaattagtagatcagtacttaactgcaaaacttttgtagttggaattaatttccagtctctagcaaagtagcaatagctgagagagctaaacttgagctattgtgtaatcgaaaatggaggcaccattgcagccaaacttatgaactaac

SEQ ID NO: 69837 - DNA, 3289 bp, Zea Mays
  misc_feature (1)..(1): n is a, c, g, or t
nagcgttccagcggtatgacatgatcccacagaacgctttgagagtagcagaggaaggaggaacgaggaagggtttatagtttggattatatgattggatgatcggatggttagtagtttggattggaagattggatcacatcgcgtagtccacctctcctctccagtttccacgagaaaaaaagtactggcatattaatttcagatttttagtaccacttatgtcattaacattagcaatggtaaattcctcttattttgttaacgtatctctcaacatgcttatttatatttatttgctgcagaacatattaaatctttgcttaattttgaattgttcgctgtaaattagaacttatatgtgcatatacatgtagtcatgtatcaaatccgccgttcagtcattcagtgctctgttcaagtgtaagtgttcagtaccaatttttaatcatgttcagtattactacatcgtggttcatgatgttcacttggaaaatgttgacctttttttttgttctttgataggtggatcctctttcccaccaagtcaaggtttgtgaattcgggagtgctagaatcttgatcttccacaagagaatgtctccagaagcaatggataggcttctagaaaaagataaagtgccaaacccatgctatagagtatagactgagtttcaacattggaaggctcaactaaatataccagttccggatacacactacaggacaaaggtgcacagcacccgatagcgcgctgccttttttagtgtagaactagaaaaccaacgcacaacacaaaccagagagttctccatggacgtcggtggcggcgccaccggcacacgctgccgagaccccaccgctgacccctcgtcccagttcttcgttgacgctggccatccatacgcagtcgctgcagccactgcgctcacctcccaccgcaccaagtccaagtggtcccacctctcttcggtccccgtcccctcccccttcctggcctccgccgccgccggcgtgctcctcctcctccgccaccgaccgcacaccgcgctccgcttccatgccttcgccatccgccgcctccttccctcccgctcccctccccctctcgtcttctctgccgccgcagcccacgtcgcggcggcctcccgccttcggggccctgccctctccatccttgcctctgcctcccgccactgctcaccggcccagatcttcaatgccctcgctgccacctaccgctgctttgcctccgccccattcatcttcgacctcctcctcctcgcctaccttcgctcccgccgcgacgtcctcgctgcggcctccgtcgcccgccgcatcctcgctgccggcgcacggccgctcccctccactgcggcagctcttcttcgttcactcccttccgccaccgcggccctcgacatgtatcatcaaatctacacgcatccaagtccacggagcaatcacctcctcctgccgactgttcacaccttcaattccctcctccttgctttccaccgcgaaggcaagtgtgatgaattcaagattgtgctccaggaaatggacaaatattcctgcaagcacaacgtgtgcacctacagcatcaggatgtctgggtactgcaatggcgggcatgtggataaggcgcgaacactatgggatgagatgattcaggaagggatccagcctgatataactgcgtacaacacaatgattagtgggtattgccattctggggaggtaggggtggcagaggagatgtttaaaaatatgttgatgggtgggattgattcaagtgccacgacgttcgaatggttggtcagagggcattgtatggcacgggatgtcgaggcagcaatgcttgtgcgtgcagacatgaaaaggaaggggtttgggttggcgccagaggttgttgaggaattgctggatggattatgtcaaaatgggagggttgaggatggcttgagtgttttgcgagaggagatgaagagggaagaatttgtgccaacccggaggagttacgaggtgttgattatggggttttgtgatggagggaaggtggaggtggcaatcagactccaagcagagatggctggaaaaggattcactgctggcagcgaggtgtactatgcatttattagtgcttatgagaagtctgaaaattatgagatggtcgagaagttgaggaaggaaatgtcggcgatgggcacttagagcatgtctagcagctcaccaataattcatccctaataaaatggtattggtggtcaccaatagtgctttttttggaatattggggagactctatagtagattaccaataatctttcccaatacatgggacccacatgtcagaatagaggatgtgggaggaagaagatgacgacagttgttgtggtcccaacacctatagagggagatgcaactccccttttatttgaggggagatgggagatttgttttggtgaccaccaaaaaaagggagagctattggggagctgttggagcaatggaattgcctcatctcccccaatatgacagttttatggggatgagggatggtattggagagctactggatgctctatcggatctgatatttggcttggatattgcacagtgatgcatggatatcaacctcacctaattgcagttgagaactatggtgagaggtgtgtaaagcttgtttgcttcaaaccgatggtaacaactgagtggtgcaacaaattctgaattggttgaaggagttctctcctagcactatcctggagacggatgttggagaaatatgactgctggatctgcaataggataatgtcttttagtcgatcccttttgtgcttgtttggtgaacttgtgtccccaatctgttgaactctgtaaacatttgctttccataaaagcagagatattctccttaaaaactcagtccagaatggtgatatatgaatgatccctgagagtttataaggtacaaccgtacaagtccaggtgctagagacttctcaatttgctggaaaatgctgtagtattttgtgttgacttgctgtttgatatatgctcagtacctcactgtaaaatgtggttctcttgtttgcctcttaacaaaatcctgagaaatgacatgagaacaaattgagaattagtagatcagtacttaactgcaaaacttttgtagttggaattaatttccagtctctagcaaagtagcaatagctgagagagctaaacttgagctattgtgtaatcgaaaatggaggcaccattgcagccaaacttatgaactaac

SEQ ID NO: 69838 - DNA, 3544 bp, Zea Mays
  misc_feature (1)..(1): n is a, c, g, or t
nagcgttccagcggtatgacatgatcccacagaacgctttgagagtagcagaggaaggaggaacgaggaagggtttatagtttggattatatgattggatgatcggatggttagtagtttggattggaagattggatcacatcgcgtagtccacctctcctctccagtttccacgagaaaaaaatcatgtatcaaatccgccgttcagtcattcagtgctctgttcaagtgtggatcctctttcccaccaagtcaaggtttgtgaattcgggagtgctagaatcttgatcttccacaagagaatgtctccagaagcaatggataggcttctagaaaaagataaagtgccaaacccatgctatagagtatagactgagtttcaacattggaaggctcaactaaatataccagttccggatacacactacaggacaaaggtgcacagcacccgatagcgcgctgccttttttagtgtagaactagaaaaccaacgcacaacacaaaccagagagttctccatggacgtcggtggcggcgccaccggcacacgctgccgagaccccaccgctgacccctcgtcccagttcttcgttgacgctggccatccatacgcagtcgctgcagccactgcgctcacctcccaccgcaccaagtccaagtggtcccacctctcttcggtccccgtcccctcccccttcctggcctccgccgccgccggcgtgctcctcctcctccgccaccgaccgcacaccgcgctccgcttccatgccttcgccatccgccgcctccttccctcccgctcccctccccctctcgtcttctctgccgccgcagcccacgtcgcggcggcctcccgccttcggggccctgccctctccatccttgcctctgcctcccgccactgctcaccggcccagatcttcaatgccctcgctgccacctaccgctgctttgcctccgccccattcatcttcgacctcctcctcctcgcctaccttcgctcccgccgcgacgtcctcgctgcggcctccgtcgcccgccgcatcctcgctgccggcgcacggccgctcccctccactgcggcagctcttcttcgttcactcccttccgccaccgcggccctcgacatgtatcatcaaatctacacgcatccaagtccacggagcaatcacctcctcctgccgactgttcacaccttcaattccctcctccttgctttccaccgcgaaggcaagtgtgatgaattcaagattgtgctccaggaaatggacaaatattcctgcaagcacaacgtgtgcacctacagcatcaggatgtctgggtactgcaatggcgggcatgtggataaggcgcgaacactatgggatgagatgattcaggaagggatccagcctgatataactgcgtacaacacaatgattagtgggtattgccattctggggaggtaggggtggcagaggagatgtttaaaaatatgttgatgggtgggattgattcaagtgccacgacgttcgaatggttggtcagagggcattgtatggcacgggatgtcgaggcagcaatgcttgtgcgtgcagacatgaaaaggaaggggtttgggttggcgccagaggttgttgaggaattgctggatggattatgtcaaaatgggagggttgaggatggcttgagtgttttgcgagaggagatgaagagggaagaatttgtgccaacccggaggagttacgaggtgttgattatggggttttgtgatggagggaaggtggaggtggcaatcagactccaagcagagatggctggaaaaggattcactgctggcagcgaggtgtactatgcatttattagtgcttatgagaagtctgaaaattatgagatggtcgagaagttgaggaaggaaatgtcggcgatgggcacttagagcatgtctagcagctcaccaataattcatccctaataaaatggtattggtggtcaccaatagtgctttttttggaatattggggagactctatagtagattaccaataatctttcccaatacatgggacccacatgtcagaatagaggatgtgggaggaagaagatgacgacagttgttgtggtcccaacacctatagagggagatgcaactccccttttatttgaggggagatgggagatttgttttggtgaccaccaaaaaaagggagagctattggggagctgttggagcaatggaattgcctcatctcccccaatatgacagttttatggggatgagggatggtattggagagctactggatgctctatcggatctgatatttggcttggatattgcacagtgatgcatggatatcaacctcacctaattgcagttgagaactatggtaaatcacttatctttacatcactcctcttcctttgattaagttgcttagttttaaaaccagccatttgttctctcttgaatctgtttcttcttgtagtttgttatttgttctgcatggcatgttataaccatttatttcagaaaattttgatgtctagtattgaaacttgaaacttcaaataatccaaaattggtgctaacttgttctctaggtgagaggtgtgtaaagcttgtttgcttcaaaccgatggtaacaactggtatggaaacatcatgttagagcaggcattagttccatattccactcagtcacattcatctaaatgtaagcgtctattgtagttatgtagttggcatgaatatttatacctgtaaattatgattcatagatgatgaacaatcacttaaacaatataagtctggtgccaaatgctatttcagatgatacctaaatgttacagcacatagttttgatacatgcagggtatccttagaaaagcaagtaaattatgtaatagttgaaagataattctcaatatcatatgtcagatgttctttctggttcacttctctatctggttcacaattcattccagagtggtgcaacaaattctgaattggttgaaggagttctctcctagcactatcctggagacggatgttggagaaatatgactgctggatctgcaataggataatgtcttttagtcgatcccttttgtgcttgtttggtgaacttgtgtccccaatctgttgaactctgtaaacatttgctttccataaaagcagagatattctccttaaaaactcagtccagaatggtgatatatgaatgatccctgagagtttataaggtacaaccgtacaagtccaggtgctagagacttctcaatttgctggaaaatgctgtagtattttgtgttgacttgctgtttgatatatgctcagtacctcactgtaaaatgtggttctcttgtttgcctcttaacaaaatcctgagaaatgacatgagaacaaattgagaattagtagatcagtacttaactgcaaaacttttgtagttggaattaatttccagtctctagcaaagtagcaatagctgagagagctaaacttgagctattgtgtaatcgaaaatggaggcaccattgcagccaaacttatgaactaac

SEQ ID NO: 69839 - DNA, 2464 bp, Zea Mays
  misc_feature (1)..(1): n is a, c, g, or t
nagcgttccagcggtatgacatgatcccacagaacgctttgagagtagcagaggaaggaggaacgaggaagggtttatagtttggattatatgattggatgatcggatggttagtagtttggattggaagattggatcacatcgcgtagtccacctctcctctccagtttccacgagaaaaaaagtactggcatattaatttcagatttttagtaccacttatgtcattaacattagcaatggtaaattcctcttattttgttaacgtatctctcaacatgcttatttatatttatttgctgcagaacatattaaatctttgcttaattttgaattgttcgctgtaaattagaacttatatgtgcatatacatgtagtcatgtatcaaatccgccgttcagtcattcagtgctctgttcaagtgtaagtgttcagtaccaatttttaatcatgttcagtattactacatcgtggttcatgatgttcacttggaaaatgttgacctttttttttgttctttgataggtggatcctctttcccaccaagtcaaggtttgtgaattcgggagtgctagaatcttgatcttccacaagagaatgtctccagaagcaatggataggcttctagaaaaagataaagtgccaaacccatgctatagagtatagactgagtttcaacattggaaggctcaactaaatataccagttccggatacacactacaggacaaaggaaatggacaaatattcctgcaagcacaacgtgtgcacctacagcatcaggatgtctgggtactgcaatggcgggcatgtggataaggcgcgaacactatgggatgagatgattcaggaagggatccagcctgatataactgcgtacaacacaatgattagtgggtattgccattctggggaggtaggggtggcagaggagatgtttaaaaatatgttgatgggtgggattgattcaagtgccacgacgttcgaatggttggtcagagggcattgtatggcacgggatgtcgaggcagcaatgcttgtgcgtgcagacatgaaaaggaaggggtttgggttggcgccagaggttgttgaggaattgctggatggattatgtcaaaatgggagggttgaggatggcttgagtgttttgcgagaggagatgaagagggaagaatttgtgccaacccggaggagttacgaggtgttgattatggggttttgtgatggagggaaggtggaggtggcaatcagactccaagcagagatggctggaaaaggattcactgctggcagcgaggtgtactatgcatttattagtgcttatgagaagtctgaaaattatgagatggtcgagaagttgaggaaggaaatgtcggcgatgggcacttagagcatgtctagcagctcaccaataattcatccctaataaaatggtattggtggtcaccaatagtgctttttttggaatattggggagactctatagtagattaccaataatctttcccaatacatgggacccacatgtcagaatagaggatgtgggaggaagaagatgacgacagttgttgtggtcccaacacctatagagggagatgcaactccccttttatttgaggggagatgggagatttgttttggtgaccaccaaaaaaagggagagctattggggagctgttggagcaatggaattgcctcatctcccccaatatgacagttttatggggatgagggatggtattggagagctactggatgctctatcggatctgatatttggcttggatattgcacagtgatgcatggatatcaacctcacctaattgcagttgagaactatggtgagaggtgtgtaaagcttgtttgcttcaaaccgatggtaacaactgagtggtgcaacaaattctgaattggttgaaggagttctctcctagcactatcctggagacggatgttggagaaatatgactgctggatctgcaataggataatgtcttttagtcgatcccttttgtgcttgtttggtgaacttgtgtccccaatctgttgaactctgtaaacatttgctttccataaaagcagagatattctccttaaaaactcagtccagaatggtgatatatgaatgatccctgagagtttataaggtacaaccgtacaagtccaggtgctagagacttctcaatttgctggaaaatgctgtagtattttgtgttgacttgctgtttgatatatgctcagtacctcactgtaaaatgtggttctcttgtttgcctcttaacaaaatcctgagaaatgacatgagaacaaattgagaattagtagatcagtacttaactgcaaaacttttgtagttggaattaatttccagtctctagcaaagtagcaatagctgagagagctaaacttgagctattgtgtaatcgaaaatggaggcaccattgcagccaaacttatgaactaac

SEQ ID NO: 69840 - DNA, 3402 bp, Zea Mays
  misc_feature (1)..(1): n is a, c, g, or t
nagcgttccagcggtatgacatgatcccacagaacgctttgagagtagcagaggaaggaggaacgaggaagggtttatagtttggattatatgattggatgatcggatggttagtagtttggattggaagattggatcacatcgcgtagtccacctctcctctccagtttccacgagaaaaaaaaacatattaaatctttgcttaattttgaattgttcgctgtaaattagaacttatatgtgcatatacatgtagtcatgtatcaaatccgccgttcagtcattcagtgctctgttcaagtgtggatcctctttcccaccaagtcaaggtttgtgaattcgggagtgctagaatcttgatcttccacaagagaatgtctccagaagcaatggataggcttctagaaaaagataaagtgccaaacccatgctatagagtatagactgagtttcaacattggaaggctcaactaaatataccagttccggatacacactacaggacaaaggtgcacagcacccgatagcgcgctgccttttttagtgtagaactagaaaaccaacgcacaacacaaaccagagagttctccatggacgtcggtggcggcgccaccggcacacgctgccgagaccccaccgctgacccctcgtcccagttcttcgttgacgctggccatccatacgcagtcgctgcagccactgcgctcacctcccaccgcaccaagtccaagtggtcccacctctcttcggtccccgtcccctcccccttcctggcctccgccgccgccggcgtgctcctcctcctccgccaccgaccgcacaccgcgctccgcttccatgccttcgccatccgccgcctccttccctcccgctcccctccccctctcgtcttctctgccgccgcagcccacgtcgcggcggcctcccgccttcggggccctgccctctccatccttgcctctgcctcccgccactgctcaccggcccagatcttcaatgccctcgctgccacctaccgctgctttgcctccgccccattcatcttcgacctcctcctcctcgcctaccttcgctcccgccgcgacgtcctcgctgcggcctccgtcgcccgccgcatcctcgctgccggcgcacggccgctcccctccactgcggcagctcttcttcgttcactcccttccgccaccgcggccctcgacatgtatcatcaaatctacacgcatccaagtccacggagcaatcacctcctcctgccgactgttcacaccttcaattccctcctccttgctttccaccgcgaaggcaagtgtgatgaattcaagattgtgctccaggaaatggacaaatattcctgcaagcacaacgtgtgcacctacagcatcaggatgtctgggtactgcaatggcgggcatgtggataaggcgcgaacactatgggatgagatgattcaggaagggatccagcctgatataactgcgtacaacacaatgattagtgggtattgccattctggggaggtaggggtggcagaggagatgtttaaaaatatgttgatgggtgggattgattcaagtgccacgacgttcgaatggttggtcagagggcattgtatggcacgggatgtcgaggcagcaatgcttgtgcgtgcagacatgaaaaggaaggggtttgggttggcgccagaggttgttgaggaattgctggatggattatgtcaaaatgggagggttgaggatggcttgagtgttttgcgagaggagatgaagagggaagaatttgtgccaacccggaggagttacgaggtgttgattatggggttttgtgatggagggaaggtggaggtggcaatcagactccaagcagagatggctggaaaaggattcactgctggcagcgaggtgtactatgcatttattagtgcttatgagaagtctgaaaattatgagatggtcgagaagttgaggaaggaaatgtcggcgatgggcacttagagcatgtctagcagctcaccaataattcatccctaataaaatggtattggtggtcaccaatagtgctttttttggaatattggggagactctatagtagattaccaataatctttcccaatacatgggacccacatgtcagaatagaggatgtgggaggaagaagatgacgacagttgttgtggtcccaacacctatagagggagatgcaactccccttttatttgaggggagatgggagatttgttttggtgaccaccaaaaaaagggagagctattggggagctgttggagcaatggaattgcctcatctcccccaatatgacagttttatggggatgagggatggtattggagagctactggatgctctatcggatctgatatttggcttggatattgcacagtgatgcatggatatcaacctcacctaattgcagttgagaactatggtgagaggtgtgtaaagcttgtttgcttcaaaccgatggtaacaactggtatggaaacatcatgttagagcaggcattagttccatattccactcagtcacattcatctaaatgtaagcgtctattgtagttatgtagttggcatgaatatttatacctgtaaattatgattcatagatgatgaacaatcacttaaacaatataagtctggtgccaaatgctatttcagatgatacctaaatgttacagcacatagttttgatacatgcagggtatccttagaaaagcaagtaaattatgtaatagttgaaagataattctcaatatcatatgtcagatgttctttctggttcacttctctatctggttcacaattcattccagagtggtgcaacaaattctgaattggttgaaggagttctctcctagcactatcctggagacggatgttggagaaatatgactgctggatctgcaataggataatgtcttttagtcgatcccttttgtgcttgtttggtgaacttgtgtccccaatctgttgaactctgtaaacatttgctttccataaaagcagagatattctccttaaaaactcagtccagaatggtgatatatgaatgatccctgagagtttataaggtacaaccgtacaagtccaggtgctagagacttctcaatttgctggaaaatgctgtagtattttgtgttgacttgctgtttgatatatgctcagtacctcactgtaaaatgtggttctcttgtttgcctcttaacaaaatcctgagaaatgacatgagaacaaattgagaattagtagatcagtacttaactgcaaaacttttgtagttggaattaatttccagtctctagcaaagtagcaatagctgagagagctaaacttgagctattgtgtaatcgaaaatggaggcaccattgcagccaaacttatgaactaac

SEQ ID NO: 69841 - DNA, 2404 bp, Zea Mays
  misc_feature (1)..(1): n is a, c, g, or t
nagcgttccagcggtatgacatgatcccacagaacgctttgagagtagcagaggaaggaggaacgaggaagggtttatagtttggattatatgattggatgatcggatggttagtagtttggattggaagattggatcacatcgcgtagtccacctctcctctccagtttccacgagaaaaaaagtactggcatattaatttcagatttttagtaccacttatgtcattaacattagcaatggtaaattcctcttattttgttaacgtatctctcaacatgcttatttatatttatttgctgcagaacatattaaatctttgcttaattttgaattgttcgctgtaaattagaacttatatgtgcatatacatgtagtcatgtatcaaatccgccgttcagtcattcagtgctctgttcaagtgtaagtgttcagtaccaatttttaatcatgttcagtattactacatcgtggttcatgatgttcacttggaaaatgttgacctttttttttgttctttgataggtggatcctctttcccaccaagtcaaggtttgtgaattcgggagtgctagaatcttgatcttccacaagagaatgtctccagaagcaatggataggcttctagaaaaagataaagtgccaaacccatgctatagagtatagactgaggaaatggacaaatattcctgcaagcacaacgtgtgcacctacagcatcaggatgtctgggtactgcaatggcgggcatgtggataaggcgcgaacactatgggatgagatgattcaggaagggatccagcctgatataactgcgtacaacacaatgattagtgggtattgccattctggggaggtaggggtggcagaggagatgtttaaaaatatgttgatgggtgggattgattcaagtgccacgacgttcgaatggttggtcagagggcattgtatggcacgggatgtcgaggcagcaatgcttgtgcgtgcagacatgaaaaggaaggggtttgggttggcgccagaggttgttgaggaattgctggatggattatgtcaaaatgggagggttgaggatggcttgagtgttttgcgagaggagatgaagagggaagaatttgtgccaacccggaggagttacgaggtgttgattatggggttttgtgatggagggaaggtggaggtggcaatcagactccaagcagagatggctggaaaaggattcactgctggcagcgaggtgtactatgcatttattagtgcttatgagaagtctgaaaattatgagatggtcgagaagttgaggaaggaaatgtcggcgatgggcacttagagcatgtctagcagctcaccaataattcatccctaataaaatggtattggtggtcaccaatagtgctttttttggaatattggggagactctatagtagattaccaataatctttcccaatacatgggacccacatgtcagaatagaggatgtgggaggaagaagatgacgacagttgttgtggtcccaacacctatagagggagatgcaactccccttttatttgaggggagatgggagatttgttttggtgaccaccaaaaaaagggagagctattggggagctgttggagcaatggaattgcctcatctcccccaatatgacagttttatggggatgagggatggtattggagagctactggatgctctatcggatctgatatttggcttggatattgcacagtgatgcatggatatcaacctcacctaattgcagttgagaactatggtgagaggtgtgtaaagcttgtttgcttcaaaccgatggtaacaactgagtggtgcaacaaattctgaattggttgaaggagttctctcctagcactatcctggagacggatgttggagaaatatgactgctggatctgcaataggataatgtcttttagtcgatcccttttgtgcttgtttggtgaacttgtgtccccaatctgttgaactctgtaaacatttgctttccataaaagcagagatattctccttaaaaactcagtccagaatggtgatatatgaatgatccctgagagtttataaggtacaaccgtacaagtccaggtgctagagacttctcaatttgctggaaaatgctgtagtattttgtgttgacttgctgtttgatatatgctcagtacctcactgtaaaatgtggttctcttgtttgcctcttaacaaaatcctgagaaatgacatgagaacaaattgagaattagtagatcagtacttaactgcaaaacttttgtagttggaattaatttccagtctctagcaaagtagcaatagctgagagagctaaacttgagctattgtgtaatcgaaaatggaggcaccattgcagccaaacttatgaactaac

SEQ ID NO: 69842 - DNA, 3609 bp, Zea Mays
  misc_feature (1)..(1): n is a, c, g, or t
nagcgttccagcggtatgacatgatcccacagaacgctttgagagtagcagaggaaggaggaacgaggaagggtttatagtttggattatatgattggatgatcggatggttagtagtttggattggaagattggatcacatcgcgtagtccacctctcctctccagtttccacgagaaaaaaagtggatcctctttcccaccaagtcaaggtttgtgaattcgggagtgctagaatcttgatcttccacaagagaatgtctccagaagcaatggataggcttctagaaaaagataaagtgccaaacccatgctatagagtatagactgaggtactgattttccttatctgatgaaccatctgcttggtgctgtgacgatctctaggatatgcgacttgttaaaatgattttgattgcttcgttggttacattagttctactattaccatgcattaatggccttcctgactatcatttggttatctcatgtttctgagaataaaagataaccattgctgtaaagtactaacgttgttgtgcgcttaatctgcatttgtatttgtttgccttattacacttgcttgcctttatcttgtgttttctatgtataagtgtgcaattttggcatttttgtttatctgttactgttgttctctacctacccacgttagataaatgattcacacggcactgtacaggattcaacactggcatgattctaattgaactttacctattactagcatcctaagtgatcccttcatttgtttgtttcagtttcaacattggaaggctcaactaaatataccagttccggatacacactacaggacaaaggtgcacagcacccgatagcgcgctgccttttttagtgtagaactagaaaaccaacgcacaacacaaaccagagagttctccatggacgtcggtggcggcgccaccggcacacgctgccgagaccccaccgctgacccctcgtcccagttcttcgttgacgctggccatccatacgcagtcgctgcagccactgcgctcacctcccaccgcaccaagtccaagtggtcccacctctcttcggtccccgtcccctcccccttcctggcctccgccgccgccggcgtgctcctcctcctccgccaccgaccgcacaccgcgctccgcttccatgccttcgccatccgccgcctccttccctcccgctcccctccccctctcgtcttctctgccgccgcagcccacgtcgcggcggcctcccgccttcggggccctgccctctccatccttgcctctgcctcccgccactgctcaccggcccagatcttcaatgccctcgctgccacctaccgctgctttgcctccgccccattcatcttcgacctcctcctcctcgcctaccttcgctcccgccgcgacgtcctcgctgcggcctccgtcgcccgccgcatcctcgctgccggcgcacggccgctcccctccactgcggcagctcttcttcgttcactcccttccgccaccgcggccctcgacatgtatcatcaaatctacacgcatccaagtccacggagcaatcacctcctcctgccgactgttcacaccttcaattccctcctccttgctttccaccgcgaaggcaagtgtgatgaattcaagattgtgctccaggaaatggacaaatattcctgcaagcacaacgtgtgcacctacagcatcaggatgtctgggtactgcaatggcgggcatgtggataaggcgcgaacactatgggatgagatgattcaggaagggatccagcctgatataactgcgtacaacacaatgattagtgggtattgccattctggggaggtaggggtggcagaggagatgtttaaaaatatgttgatgggtgggattgattcaagtgccacgacgttcgaatggttggtcagagggcattgtatggcacgggatgtcgaggcagcaatgcttgtgcgtgcagacatgaaaaggaaggggtttgggttggcgccagaggttgttgaggaattgctggatggattatgtcaaaatgggagggttgaggatggcttgagtgttttgcgagaggagatgaagagggaagaatttgtgccaacccggaggagttacgaggtgttgattatggggttttgtgatggagggaaggtggaggtggcaatcagactccaagcagagatggctggaaaaggattcactgctggcagcgaggtgtactatgcatttattagtgcttatgagaagtctgaaaattatgagatggtcgagaagttgaggaaggaaatgtcggcgatgggcacttagagcatgtctagcagctcaccaataattcatccctaataaaatggtattggtggtcaccaatagtgctttttttggaatattggggagactctatagtagattaccaataatctttcccaatacatgggacccacatgtcagaatagaggatgtgggaggaagaagatgacgacagttgttgtggtcccaacacctatagagggagatgcaactccccttttatttgaggggagatgggagatttgttttggtgaccaccaaaaaaagggagagctattggggagctgttggagcaatggaattgcctcatctcccccaatatgacagttttatggggatgagggatggtattggagagctactggatgctctatcggatctgatatttggcttggatattgcacagtgatgcatggatatcaacctcacctaattgcagttgagaactatggtaaatcacttatctttacatcactcctcttcctttgattaagttgcttagttttaaaaccagccatttgttctctcttgaatctgtttcttcttgtagtttgttatttgttctgcatggcatgttataaccatttatttcagaaaattttgatgtctagtattgaaacttgaaacttcaaataatccaaaattggtgctaacttgttctctaggtgagaggtgtgtaaagcttgtttgcttcaaaccgatggtaacaactgagtggtgcaacaaattctgaattggttgaaggagttctctcctagcactatcctggagacggatgttggagaaatatgactgctggatctgcaataggataatgtcttttagtcgatcccttttgtgcttgtttggtgaacttgtgtccccaatctgttgaactctgtaaacatttgctttccataaaagcagagatattctccttaaaaactcagtccagaatggtgatatatgaatgatccctgagagtttataaggtacaaccgtacaagtccaggtgctagagacttctcaatttgctggaaaatgctgtagtattttgtgttgacttgctgtttgatatatgctcagtacctcactgtaaaatgtggttctcttgtttgcctcttaacaaaatcctgagaaatgacatgagaacaaattgagaattagtagatcagtacttaactgcaaaacttttgtagttggaattaatttccagtctctagcaaagtagcaatagctgagagagctaaacttgagctattgtgtaatcgaaaatggaggcaccattgcagccaaacttatgaactaac

SEQ ID NO: 69843 - DNA, 3014 bp, Zea Mays
  misc_feature (1)..(1): n is a, c, g, or t
nagcgttccagcggtatgacatgatcccacagaacgctttgagagtagcagaggaaggaggaacgaggaagggtttatagtttggattatatgattggatgatcggatggttagtagtttggattggaagattggatcacatcgcgtagtccacctctcctctccagtttccacgagaaaaaaagtactggcatattaatttcagatttttagtaccacttatgtcattaacattagcaatggtaaattcctcttattttgttaacgtatctctcaacatgcttatttatatttatttgctgcagaacatattaaatctttgcttaattttgaattgttcgctgtaaattagaacttatatgtgcatatacatgtagtcatgtatcaaatccgccgttcagtcattcagtgctctgttcaagtgtaagtgttcagtaccaatttttaatcatgttcagtattactacatcgtggttcatgatgttcacttggaaaatgttgacctttttttttgttctttgataggtggatcctctttcccaccaagtcaaggtttgtgaattcgggagtgctagaatcttgatcttccacaagagaatgtctccagaagcaatggataggcttctagaaaaagataaagtgccaaacccatgctatagagtatagactgagtttcaacattggaaggctcaactaaatataccagttccggatacacactacaggacaaaggaaatggacaaatattcctgcaagcacaacgtgtgcacctacagcatcaggatgtctgggtactgcaatggcgggcatgtggataaggcgcgaacactatgggatgagatgattcaggaagggatccagcctgatataactgcgtacaacacaatgattagtgggtattgccattctggggaggtaggggtggcagaggagatgtttaaaaatatgttgatgggtgggattgattcaagtgccacgacgttcgaatggttggtcagagggcattgtatggcacgggatgtcgaggcagcaatgcttgtgcgtgcagacatgaaaaggaaggggtttgggttggcgccagaggttgttgaggaattgctggatggattatgtcaaaatgggagggttgaggatggcttgagtgttttgcgagaggagatgaagagggaagaatttgtgccaacccggaggagttacgaggtgttgattatggggttttgtgatggagggaaggtggaggtggcaatcagactccaagcagagatggctggaaaaggattcactgctggcagcgaggtgtactatgcatttattagtgcttatgagaagtctgaaaattatgagatggtcgagaagttgaggaaggaaatgtcggcgatgggcacttagagcatgtctagcagctcaccaataattcatccctaataaaatggtattggtggtcaccaatagtgctttttttggaatattggggagactctatagtagattaccaataatctttcccaatacatgggacccacatgtcagaatagaggatgtgggaggaagaagatgacgacagttgttgtggtcccaacacctatagagggagatgcaactccccttttatttgaggggagatgggagatttgttttggtgaccaccaaaaaaagggagagctattggggagctgttggagcaatggaattgcctcatctcccccaatatgacagttttatggggatgagggatggtattggagagctactggatgctctatcggatctgatatttggcttggatattgcacagtgatgcatggatatcaacctcacctaattgcagttgagaactatggtaaatcacttatctttacatcactcctcttcctttgattaagttgcttagttttaaaaccagccatttgttctctcttgaatctgtttcttcttgtagtttgttatttgttctgcatggcatgttataaccatttatttcagaaaattttgatgtctagtattgaaacttgaaacttcaaataatccaaaattggtgctaacttgttctctaggtgagaggtgtgtaaagcttgtttgcttcaaaccgatggtaacaactggtatggaaacatcatgttagagcaggcattagttccatattccactcagtcacattcatctaaatgtaagcgtctattgtagttatgtagttggcatgaatatttatacctgtaaattatgattcatagatgatgaacaatcacttaaacaatataagtctggtgccaaatgctatttcagatgatacctaaatgttacagcacatagttttgatacatgcagggtatccttagaaaagcaagtaaattatgtaatagttgaaagataattctcaatatcatatgtcagatgttctttctggttcacttctctatctggttcacaattcattccagagtggtgcaacaaattctgaattggttgaaggagttctctcctagcactatcctggagacggatgttggagaaatatgactgctggatctgcaataggataatgtcttttagtcgatcccttttgtgcttgtttggtgaacttgtgtccccaatctgttgaactctgtaaacatttgctttccataaaagcagagatattctccttaaaaactcagtccagaatggtgatatatgaatgatccctgagagtttataaggtacaaccgtacaagtccaggtgctagagacttctcaatttgctggaaaatgctgtagtattttgtgttgacttgctgtttgatatatgctcagtacctcactgtaaaatgtggttctcttgtttgcctcttaacaaaatcctgagaaatgacatgagaacaaattgagaattagtagatcagtacttaactgcaaaacttttgtagttggaattaatttccagtctctagcaaagtagcaatagctgagagagctaaacttgagctattgtgtaatcgaaaatggaggcaccattgcagccaaacttatgaactaac

SEQ ID NO: 69844 - DNA, 3498 bp, Zea Mays
  misc_feature (1)..(1): n is a, c, g, or t
nagcgttccagcggtatgacatgatcccacagaacgctttgagagtagcagaggaaggaggaacgaggaagggtttatagtttggattatatgattggatgatcggatggttagtagtttggattggaagattggatcacatcgcgtagtccacctctcctctccagtttccacgagaaaaaaagtggatcctctttcccaccaagtcaaggtttgtgaattcgggagtgctagaatcttgatcttccacaagagaatgtctccagaagcaatggataggcttctagaaaaagataaagtgccaaacccatgctatagagtatagactgagtttcaacattggaaggctcaactaaatataccagttccggatacacactacaggacaaaggtgcacagcacccgatagcgcgctgccttttttagtgtagaactagaaaaccaacgcacaacacaaaccagagagttctccatggacgtcggtggcggcgccaccggcacacgctgccgagaccccaccgctgacccctcgtcccagttcttcgttgacgctggccatccatacgcagtcgctgcagccactgcgctcacctcccaccgcaccaagtccaagtggtcccacctctcttcggtccccgtcccctcccccttcctggcctccgccgccgccggcgtgctcctcctcctccgccaccgaccgcacaccgcgctccgcttccatgccttcgccatccgccgcctccttccctcccgctcccctccccctctcgtcttctctgccgccgcagcccacgtcgcggcggcctcccgccttcggggccctgccctctccatccttgcctctgcctcccgccactgctcaccggcccagatcttcaatgccctcgctgccacctaccgctgctttgcctccgccccattcatcttcgacctcctcctcctcgcctaccttcgctcccgccgcgacgtcctcgctgcggcctccgtcgcccgccgcatcctcgctgccggcgcacggccgctcccctccactgcggcagctcttcttcgttcactcccttccgccaccgcggccctcgacatgtatcatcaaatctacacgcatccaagtccacggagcaatcacctcctcctgccgactgttcacaccttcaattccctcctccttgctttccaccgcgaaggcaagtgtgatgaattcaagattgtgctccaggaaatggacaaatattcctgcaagcacaacgtgtgcacctacagcatcaggatgtctgggtactgcaatggcgggcatgtggataaggcgcgaacactatgggatgagatgattcaggaagggatccagcctgatataactgcgtacaacacaatgattagtgggtattgccattctggggaggtaggggtggcagaggagatgtttaaaaatatgttgatgggtgggattgattcaagtgccacgacgttcgaatggttggtcagagggcattgtatggcacgggatgtcgaggcagcaatgcttgtgcgtgcagacatgaaaaggaaggggtttgggttggcgccagaggttgttgaggaattgctggatggattatgtcaaaatgggagggttgaggatggcttgagtgttttgcgagaggagatgaagagggaagaatttgtgccaacccggaggagttacgaggtgttgattatggggttttgtgatggagggaaggtggaggtggcaatcagactccaagcagagatggctggaaaaggattcactgctggcagcgaggtgtactatgcatttattagtgcttatgagaagtctgaaaattatgagatggtcgagaagttgaggaaggaaatgtcggcgatgggcacttagagcatgtctagcagctcaccaataattcatccctaataaaatggtattggtggtcaccaatagtgctttttttggaatattggggagactctatagtagattaccaataatctttcccaatacatgggacccacatgtcagaatagaggatgtgggaggaagaagatgacgacagttgttgtggtcccaacacctatagagggagatgcaactccccttttatttgaggggagatgggagatttgttttggtgaccaccaaaaaaagggagagctattggggagctgttggagcaatggaattgcctcatctcccccaatatgacagttttatggggatgagggatggtattggagagctactggatgctctatcggatctgatatttggcttggatattgcacagtgatgcatggatatcaacctcacctaattgcagttgagaactatggtaaatcacttatctttacatcactcctcttcctttgattaagttgcttagttttaaaaccagccatttgttctctcttgaatctgtttcttcttgtagtttgttatttgttctgcatggcatgttataaccatttatttcagaaaattttgatgtctagtattgaaacttgaaacttcaaataatccaaaattggtgctaacttgttctctaggtgagaggtgtgtaaagcttgtttgcttcaaaccgatggtaacaactggtatggaaacatcatgttagagcaggcattagttccatattccactcagtcacattcatctaaatgtaagcgtctattgtagttatgtagttggcatgaatatttatacctgtaaattatgattcatagatgatgaacaatcacttaaacaatataagtctggtgccaaatgctatttcagatgatacctaaatgttacagcacatagttttgatacatgcagggtatccttagaaaagcaagtaaattatgtaatagttgaaagataattctcaatatcatatgtcagatgttctttctggttcacttctctatctggttcacaattcattccagagtggtgcaacaaattctgaattggttgaaggagttctctcctagcactatcctggagacggatgttggagaaatatgactgctggatctgcaataggataatgtcttttagtcgatcccttttgtgcttgtttggtgaacttgtgtccccaatctgttgaactctgtaaacatttgctttccataaaagcagagatattctccttaaaaactcagtccagaatggtgatatatgaatgatccctgagagtttataaggtacaaccgtacaagtccaggtgctagagacttctcaatttgctggaaaatgctgtagtattttgtgttgacttgctgtttgatatatgctcagtacctcactgtaaaatgtggttctcttgtttgcctcttaacaaaatcctgagaaatgacatgagaacaaattgagaattagtagatcagtacttaactgcaaaacttttgtagttggaattaatttccagtctctagcaaagtagcaatagctgagagagctaaacttgagctattgtgtaatcgaaaatggaggcaccattgcagccaaacttatgaactaac

SEQ ID NO: 69845 - DNA, 3466 bp, Zea Mays
  misc_feature (1)..(1): n is a, c, g, or t
nagcgttccagcggtatgacatgatcccacagaacgctttgagagtagcagaggaaggaggaacgaggaagggtttatagtttggattatatgattggatgatcggatggttagtagtttggattggaagattggatcacatcgcgtagtccacctctcctctccagtttccacgagaaaaaaagtactggcatattaatttcagatttttagtaccacttatgtcattaacattagcaatggtaaattcctcttattttgttaacgtatctctcaacatgcttatttatatttatttgctgcagaacatattaaatctttgcttaattttgaattgttcgctgtaaattagaacttatatgtgcatatacatgtagtcatgtatcaaatccgccgttcagtcattcagtgctctgttcaagtgtggatcctctttcccaccaagtcaaggtttgtgaattcgggagtgctagaatcttgatcttccacaagagaatgtctccagaagcaatggataggcttctagaaaaagataaagtgccaaacccatgctatagagtatagactgagtttcaacattggaaggctcaactaaatataccagttccggatacacactacaggacaaaggtgcacagcacccgatagcgcgctgccttttttagtgtagaactagaaaaccaacgcacaacacaaaccagagagttctccatggacgtcggtggcggcgccaccggcacacgctgccgagaccccaccgctgacccctcgtcccagttcttcgttgacgctggccatccatacgcagtcgctgcagccactgcgctcacctcccaccgcaccaagtccaagtggtcccacctctcttcggtccccgtcccctcccccttcctggcctccgccgccgccggcgtgctcctcctcctccgccaccgaccgcacaccgcgctccgcttccatgccttcgccatccgccgcctccttccctcccgctcccctccccctctcgtcttctctgccgccgcagcccacgtcgcggcggcctcccgccttcggggccctgccctctccatccttgcctctgcctcccgccactgctcaccggcccagatcttcaatgccctcgctgccacctaccgctgctttgcctccgccccattcatcttcgacctcctcctcctcgcctaccttcgctcccgccgcgacgtcctcgctgcggcctccgtcgcccgccgcatcctcgctgccggcgcacggccgctcccctccactgcggcagctcttcttcgttcactcccttccgccaccgcggccctcgacatgtatcatcaaatctacacgcatccaagtccacggagcaatcacctcctcctgccgactgttcacaccttcaattccctcctccttgctttccaccgcgaaggcaagtgtgatgaattcaagattgtgctccaggaaatggacaaatattcctgcaagcacaacgtgtgcacctacagcatcaggatgtctgggtactgcaatggcgggcatgtggataaggcgcgaacactatgggatgagatgattcaggaagggatccagcctgatataactgcgtacaacacaatgattagtgggtattgccattctggggaggtaggggtggcagaggagatgtttaaaaatatgttgatgggtgggattgattcaagtgccacgacgttcgaatggttggtcagagggcattgtatggcacgggatgtcgaggcagcaatgcttgtgcgtgcagacatgaaaaggaaggggtttgggttggcgccagaggttgttgaggaattgctggatggattatgtcaaaatgggagggttgaggatggcttgagtgttttgcgagaggagatgaagagggaagaatttgtgccaacccggaggagttacgaggtgttgattatggggttttgtgatggagggaaggtggaggtggcaatcagactccaagcagagatggctggaaaaggattcactgctggcagcgaggtgtactatgcatttattagtgcttatgagaagtctgaaaattatgagatggtcgagaagttgaggaaggaaatgtcggcgatgggcacttagagcatgtctagcagctcaccaataattcatccctaataaaatggtattggtggtcaccaatagtgctttttttggaatattggggagactctatagtagattaccaataatctttcccaatacatgggacccacatgtcagaatagaggatgtgggaggaagaagatgacgacagttgttgtggtcccaacacctatagagggagatgcaactccccttttatttgaggggagatgggagatttgttttggtgaccaccaaaaaaagggagagctattggggagctgttggagcaatggaattgcctcatctcccccaatatgacagttttatggggatgagggatggtattggagagctactggatgctctatcggatctgatatttggcttggatattgcacagtgatgcatggatatcaacctcacctaattgcagttgagaactatggtaaatcacttatctttacatcactcctcttcctttgattaagttgcttagttttaaaaccagccatttgttctctcttgaatctgtttcttcttgtagtttgttatttgttctgcatggcatgttataaccatttatttcagaaaattttgatgtctagtattgaaacttgaaacttcaaataatccaaaattggtgctaacttgttctctaggtgagaggtgtgtaaagcttgtttgcttcaaaccgatggtaacaactggtatggaaacatcatgttagagcaggcattagttccatattccactcagtcacattcatctaaatagtggtgcaacaaattctgaattggttgaaggagttctctcctagcactatcctggagacggatgttggagaaatatgactgctggatctgcaataggataatgtcttttagtcgatcccttttgtgcttgtttggtgaacttgtgtccccaatctgttgaactctgtaaacatttgctttccataaaagcagagatattctccttaaaaactcagtccagaatggtgatatatgaatgatccctgagagtttataaggtacaaccgtacaagtccaggtgctagagacttctcaatttgctggaaaatgctgtagtattttgtgttgacttgctgtttgatatatgctcagtacctcactgtaaaatgtggttctcttgtttgcctcttaacaaaatcctgagaaatgacatgagaacaaattgagaattagtagatcagtacttaactgcaaaacttttgtagttggaattaatttccagtctctagcaaagtagcaatagctgagagagctaaacttgagctattgtgtaatcgaaaatggaggcaccattgcagccaaacttatgaactaac

SEQ ID NO: 69846 - DNA, 3970 bp, Zea Mays
  misc_feature (1)..(1): n is a, c, g, or t
nagcgttccagcggtatgacatgatcccacagaacgctttgagagtagcagaggaaggaggaacgaggaagggtttatagtttggattatatgattggatgatcggatggttagtagtttggattggaagattggatcacatcgcgtagtccacctctcctctccagtttccacgagaaaaaaagtactggcatattaatttcagatttttagtaccacttatgtcattaacattagcaatggtaaattcctcttattttgttaacgtatctctcaacatgcttatttatatttatttgctgcagaacatattaaatctttgcttaattttgaattgttcgctgtaaattagaacttatatgtgcatatacatgtagtcatgtatcaaatccgccgttcagtcattcagtgctctgttcaagtgtggatcctctttcccaccaagtcaaggtttgtgaattcgggagtgctagaatcttgatcttccacaagagaatgtctccagaagcaatggataggcttctagaaaaagataaagtgccaaacccatgctatagagtatagactgaggtactgattttccttatctgatgaaccatctgcttggtgctgtgacgatctctaggatatgcgacttgttaaaatgattttgattgcttcgttggttacattagttctactattaccatgcattaatggccttcctgactatcatttggttatctcatgtttctgagaataaaagataaccattgctgtaaagtactaacgttgttgtgcgcttaatctgcatttgtatttgtttgccttattacacttgcttgcctttatcttgtgttttctatgtataagtgtgcaattttggcatttttgtttatctgttactgttgttctctacctacccacgttagataaatgattcacacggcactgtacaggattcaacactggcatgattctaattgaactttacctattactagcatcctaagtgatcccttcatttgtttgtttcagtttcaacattggaaggctcaactaaatataccagttccggatacacactacaggacaaaggtgcacagcacccgatagcgcgctgccttttttagtgtagaactagaaaaccaacgcacaacacaaaccagagagttctccatggacgtcggtggcggcgccaccggcacacgctgccgagaccccaccgctgacccctcgtcccagttcttcgttgacgctggccatccatacgcagtcgctgcagccactgcgctcacctcccaccgcaccaagtccaagtggtcccacctctcttcggtccccgtcccctcccccttcctggcctccgccgccgccggcgtgctcctcctcctccgccaccgaccgcacaccgcgctccgcttccatgccttcgccatccgccgcctccttccctcccgctcccctccccctctcgtcttctctgccgccgcagcccacgtcgcggcggcctcccgccttcggggccctgccctctccatccttgcctctgcctcccgccactgctcaccggcccagatcttcaatgccctcgctgccacctaccgctgctttgcctccgccccattcatcttcgacctcctcctcctcgcctaccttcgctcccgccgcgacgtcctcgctgcggcctccgtcgcccgccgcatcctcgctgccggcgcacggccgctcccctccactgcggcagctcttcttcgttcactcccttccgccaccgcggccctcgacatgtatcatcaaatctacacgcatccaagtccacggagcaatcacctcctcctgccgactgttcacaccttcaattccctcctccttgctttccaccgcgaaggcaagtgtgatgaattcaagattgtgctccaggaaatggacaaatattcctgcaagcacaacgtgtgcacctacagcatcaggatgtctgggtactgcaatggcgggcatgtggataaggcgcgaacactatgggatgagatgattcaggaagggatccagcctgatataactgcgtacaacacaatgattagtgggtattgccattctggggaggtaggggtggcagaggagatgtttaaaaatatgttgatgggtgggattgattcaagtgccacgacgttcgaatggttggtcagagggcattgtatggcacgggatgtcgaggcagcaatgcttgtgcgtgcagacatgaaaaggaaggggtttgggttggcgccagaggttgttgaggaattgctggatggattatgtcaaaatgggagggttgaggatggcttgagtgttttgcgagaggagatgaagagggaagaatttgtgccaacccggaggagttacgaggtgttgattatggggttttgtgatggagggaaggtggaggtggcaatcagactccaagcagagatggctggaaaaggattcactgctggcagcgaggtgtactatgcatttattagtgcttatgagaagtctgaaaattatgagatggtcgagaagttgaggaaggaaatgtcggcgatgggcacttagagcatgtctagcagctcaccaataattcatccctaataaaatggtattggtggtcaccaatagtgctttttttggaatattggggagactctatagtagattaccaataatctttcccaatacatgggacccacatgtcagaatagaggatgtgggaggaagaagatgacgacagttgttgtggtcccaacacctatagagggagatgcaactccccttttatttgaggggagatgggagatttgttttggtgaccaccaaaaaaagggagagctattggggagctgttggagcaatggaattgcctcatctcccccaatatgacagttttatggggatgagggatggtattggagagctactggatgctctatcggatctgatatttggcttggatattgcacagtgatgcatggatatcaacctcacctaattgcagttgagaactatggtgagaggtgtgtaaagcttgtttgcttcaaaccgatggtaacaactggtatggaaacatcatgttagagcaggcattagttccatattccactcagtcacattcatctaaatgtaagcgtctattgtagttatgtagttggcatgaatatttatacctgtaaattatgattcatagatgatgaacaatcacttaaacaatataagtctggtgccaaatgctatttcagatgatacctaaatgttacagcacatagttttgatacatgcagggtatccttagaaaagcaagtaaattatgtaatagttgaaagataattctcaatatcatatgtcagatgttctttctggttcacttctctatctggttcacaattcattccagagtggtgcaacaaattctgaattggttgaaggagttctctcctagcactatcctggagacggatgttggagaaatatgactgctggatctgcaataggataatgtcttttagtcgatcccttttgtgcttgtttggtgaacttgtgtccccaatctgttgaactctgtaaacatttgctttccataaaagcagagatattctccttaaaaactcagtccagaatggtgatatatgaatgatccctgagagtttataaggtacaaccgtacaagtccaggtgctagagacttctcaatttgctggaaaatgctgtagtattttgtgttgacttgctgtttgatatatgctcagtacctcactgtaaaatgtggttctcttgtttgcctcttaacaaaatcctgagaaatgacatgagaacaaattgagaattagtagatcagtacttaactgcaaaacttttgtagttggaattaatttccagtctctagcaaagtagcaatagctgagagagctaaacttgagctattgtgtaatcgaaaatggaggcaccattgcagccaaacttatgaactaac

SEQ ID NO: 69847 - DNA, 3688 bp, Zea Mays
  misc_feature (1)..(1): n is a, c, g, or t
nagcgttccagcggtatgacatgatcccacagaacgctttgagagtagcagaggaaggaggaacgaggaagggtttatagtttggattatatgattggatgatcggatggttagtagtttggattggaagattggatcacatcgcgtagtccacctctcctctccagtttccacgagaaaaaaagtactggcatattaatttcagatttttagtaccacttatgtcattaacattagcaatggtaaattcctcttattttgttaacgtatctctcaacatgcttatttatatttatttgctgcagaacatattaaatctttgcttaattttgaattgttcgctgtaaattagaacttatatgtgcatatacatgtagtcatgtatcaaatccgccgttcagtcattcagtgctctgttcaagtgtaagtgttcagtaccaatttttaatcatgttcagtattactacatcgtggttcatgatgttcacttggaaaatgttgacctttttttttgttctttgataggtggatcctctttcccaccaagtcaaggtttgtgaattcgggagtgctagaatcttgatcttccacaagagaatgtctccagaagcaatggataggcttctagaaaaagataaagtgccaaacccatgctatagagtatagactgaggtactgattttccttatctgatgaaccatctgcttggtgctgtgacgatctctaggatatgcgacttgttaaaatgattttgattgcttcgttggttacattagttctactattaccatgcattaatggccttcctgactatcatttggttatctcatgtttctgagaataaaagataaccattgctgtaaagtactaacgttgttgtgcgcttaatctgcatttgtatttgtttgccttattacacttgcttgcctttatcttgtgttttctatgtataagtgtgcaattttggcatttttgtttatctgttactgttgttctctacctacccacgttagataaatgattcacacggcactgtacaggattcaacactggcatgattctaattgaactttacctattactagcatcctaagtgatcccttcatttgtttgtttcagtttcaacattggaaggctcaactaaatataccagttccggatacacactacaggacaaaggtgcacagcacccgatagcgcgctgccttttttagtgtagaactagaaaaccaacgcacaacacaaaccagagagttctccatggacgtcggtggcggcgccaccggcacacgctgccgagaccccaccgctgacccctcgtcccagttcttcgttgacgctggccatccatacgcagtcgctgcagccactgcgctcacctcccaccgcaccaagtccaagtggtcccacctctcttcggtccccgtcccctcccccttcctggcctccgccgccgccggcgtgctcctcctcctccgccaccgaccgcacaccgcgctccgcttccatgccttcgccatccgccgcctccttccctcccgctcccctccccctctcgtcttctctgccgccgcagcccacgtcgcggcggcctcccgccttcggggccctgccctctccatccttgcctctgcctcccgccactgctcaccggcccagatcttcaatgccctcgctgccacctaccgctgctttgcctccgccccattcatcttcgacctcctcctcctcgcctaccttcgctcccgccgcgacgtcctcgctgcggcctccgtcgcccgccgcatcctcgctgccggcgcacggccgctcccctccactgcggcagctcttcttcgttcactcccttccgccaccgcggccctcgacatgtatcatcaaatctacacgcatccaagtccacggagcaatcacctcctcctgccgactgttcacaccttcaattccctcctccttgctttccaccgcgaaggcaagtgtgatgaattcaagattgtgctccaggaaatggacaaatattcctgcaagcacaacgtgtgcacctacagcatcaggatgtctgggtactgcaatggcgggcatgtggataaggcgcgaacactatgggatgagatgattcaggaagggatccagcctgatataactgcgtacaacacaatgattagtgggtattgccattctggggaggtaggggtggcagaggagatgtttaaaaatatgttgatgggtgggattgattcaagtgccacgacgttcgaatggttggtcagagggcattgtatggcacgggatgtcgaggcagcaatgcttgtgcgtgcagacatgaaaaggaaggggtttgggttggcgccagaggttgttgaggaattgctggatggattatgtcaaaatgggagggttgaggatggcttgagtgttttgcgagaggagatgaagagggaagaatttgtgccaacccggaggagttacgaggtgttgattatggggttttgtgatggagggaaggtggaggtggcaatcagactccaagcagagatggctggaaaaggattcactgctggcagcgaggtgtactatgcatttattagtgcttatgagaagtctgaaaattatgagatggtcgagaagttgaggaaggaaatgtcggcgatgggcacttagagcatgtctagcagctcaccaataattcatccctaataaaatggtattggtggtcaccaatagtgctttttttggaatattggggagactctatagtagattaccaataatctttcccaatacatgggacccacatgtcagaatagaggatgtgggaggaagaagatgacgacagttgttgtggtcccaacacctatagagggagatgcaactccccttttatttgaggggagatgggagatttgttttggtgaccaccaaaaaaagggagagctattggggagctgttggagcaatggaattgcctcatctcccccaatatgacagttttatggggatgagggatggtattggagagctactggatgctctatcggatctgatatttggcttggatattgcacagtgatgcatggatatcaacctcacctaattgcagttgagaactatgagtggtgcaacaaattctgaattggttgaaggagttctctcctagcactatcctggagacggatgttggagaaatatgactgctggatctgcaataggataatgtcttttagtcgatcccttttgtgcttgtttggtgaacttgtgtccccaatctgttgaactctgtaaacatttgctttccataaaagcagagatattctccttaaaaactcagtccagaatggtgatatatgaatgatccctgagagtttataaggtacaaccgtacaagtccaggtgctagagacttctcaatttgctggaaaatgctgtagtattttgtgttgacttgctgtttgatatatgctcagtacctcactgtaaaatgtggttctcttgtttgcctcttaacaaaatcctgagaaatgacatgagaacaaattgagaattagtagatcagtacttaactgcaaaacttttgtagttggaattaatttccagtctctagcaaagtagcaatagctgagagagctaaacttgagctattgtgtaatcgaaaatggaggcaccattgcagccaaacttatgaactaac

SEQ ID NO: 69848 - DNA, 1296 bp, Zea Mays
  misc_feature (1)..(1): n is a, c, g, or t
nagcgttccagcggtatgacatgatcccacagaacgctttgagagtagcagaggaaggaggaacgaggaagggtttatagtttggattatatgattggatgatcggatggttagtagtttggattggaagattggatcacatcgcgtagtccacctctcctctccagtttccacgagaaaaaaagtactggcatattaatttcagatttttagtaccacttatgtcattaacattagcaatggtaaattcctcttattttgttaacgtatctctcaacatgcttatttatatttatttgctgcagaacatattaaatctttgcttaattttgaattgttcgctgtaaattagaacttatatgtgcatatacatgtagtcatgtatcaaatccgccgttcagtcattcagtgctctgttcaagtgtaagtgttcagtaccaatttttaatcatgttcagtattactacatcgtggttcatgatgttcacttggaaaatgttgacctttttttttgttctttgataggtggatcctctttcccaccaagtcaaggtttgtgaattcgggagtgctagaatcttgatcttccacaagagaatgtctccagaagcaatggataggcttctagaaaaagataaagtgccaaacccatgctatagagtatagactgaggtgagaggtgtgtaaagcttgtttgcttcaaaccgatggtaacaactgagtggtgcaacaaattctgaattggttgaaggagttctctcctagcactatcctggagacggatgttggagaaatatgactgctggatctgcaataggataatgtcttttagtcgatcccttttgtgcttgtttggtgaacttgtgtccccaatctgttgaactctgtaaacatttgctttccataaaagcagagatattctccttaaaaactcagtccagaatggtgatatatgaatgatccctgagagtttataaggtacaaccgtacaagtccaggtgctagagacttctcaatttgctggaaaatgctgtagtattttgtgttgacttgctgtttgatatatgctcagtacctcactgtaaaatgtggttctcttgtttgcctcttaacaaaatcctgagaaatgacatgagaacaaattgagaattagtagatcagtacttaactgcaaaacttttgtagttggaattaatttccagtctctagcaaagtagcaatagctgagagagctaaacttgagctattgtgtaatcgaaaatggaggcaccattgcagccaaacttatgaactaac

SEQ ID NO: 69849 - DNA, 2901 bp, Zea Mays
  misc_feature (1)..(2): n is a, c, g, or t
nnagcgttccagcggtatgacatgatcccacagaacgctttgagagtagcagaggaaggaggaacgaggaagggtttatagtttggattatatgattggatgatcggatggttagtagtttggattggaagattggatcacatcgcgtagtccacctctcctctccagtttccacgagaaaaaaagtggatcctctttcccaccaagtcaaggtttgtgaattcgggagtgctagaatcttgatcttccacaagagaatgtctccagaagcaatggataggcttctagaaaaagataaagtgccaaacccatgctatagagtatagactgagtttcaacattggaaggctcaactaaatataccagttccggatacacactacaggacaaaggtgcacagcacccgatagcgcgctgccttttttagtgtagaactagaaaaccaacgcacaacacaaaccagagagttctccatggacgtcggtggcggcgccaccggcacacgctgccgagaccccaccgctgacccctcgtcccagttcttcgttgacgctggccatccatacgcagtcgctgcagccactgcgctcacctcccaccgcaccaagtccaagtggtcccacctctcttcggtccccgtcccctcccccttcctggcctccgccgccgccggcgtgctcctcctcctccgccaccgaccgcacaccgcgctccgcttccatgccttcgccatccgccgcctccttccctcccgctcccctccccctctcgtcttctctgccgccgcagcccacgtcgcggcggcctcccgccttcggggccctgccctctccatccttgcctctgcctcccgccactgctcaccggcccagatcttcaatgccctcgctgccacctaccgctgctttgcctccgccccattcatcttcgacctcctcctcctcgcctaccttcgctcccgccgcgacgtcctcgctgcggcctccgtcgcccgccgcatcctcgctgccggcgcacggccgctcccctccactgcggcagctcttcttcgttcactcccttccgccaccgcggccctcgacatgtatcatcaaatctacacgcatccaagtccacggagcaatcacctcctcctgccgactgttcacaccttcaattccctcctccttgctttccaccgcgaaggcaagtgtgatgaattcaagattgtgctccaggaaatggacaaatattcctgcaagcacaacgtgtgcacctacagcatcaggatgtctgggtactgcaatggcgggcatgtggataaggcgcgaacactatgggatgagatgattcaggaagggatccagcctgatataactgcgtacaacacaatgattagtgggtattgccattctggggaggtaggggtggcagaggagatgtttaaaaatatgttgatgggtgggattgattcaagtgccacgacgttcgaatggttggtcagagggcattgtatggcacgggatgtcgaggcagcaatgcttgtgcgtgcagacatgaaaaggaaggggtttgggttggcgccagaggttgttgaggaattgctggatggattatgtcaaaatgggagggttgaggatggcttgagtgttttgcgagaggagatgaagagggaagaatttgtgccaacccggaggagttacgaggtgttgattatggggttttgtgatggagggaaggtggaggtggcaatcagactccaagcagagatggctggaaaaggattcactgctggcagcgaggtgtactatgcatttattagtgcttatgagaagtctgaaaattatgagatggtcgagaagttgaggaaggaaatgtcggcgatgggcacttagagcatgtctagcagctcaccaataattcatccctaataaaatggtattggtggtcaccaatagtgctttttttggaatattggggagactctatagtagattaccaataatctttcccaatacatgggacccacatgtcagaatagaggatgtgggaggaagaagatgacgacagttgttgtggtcccaacacctatagagggagatgcaactccccttttatttgaggggagatgggagatttgttttggtgaccaccaaaaaaagggagagctattggggagctgttggagcaatggaattgcctcatctcccccaatatgacagttttatggggatgagggatggtattggagagctactggatgctctatcggatctgatatttggcttggatattgcacagtgatgcatggatatcaacctcacctaattgcagttgagaactatgagtggtgcaacaaattctgaattggttgaaggagttctctcctagcactatcctggagacggatgttggagaaatatgactgctggatctgcaataggataatgtcttttagtcgatcccttttgtgcttgtttggtgaacttgtgtccccaatctgttgaactctgtaaacatttgctttccataaaagcagagatattctccttaaaaactcagtccagaatggtgatatatgaatgatccctgagagtttataaggtacaaccgtacaagtccaggtgctagagacttctcaatttgctggaaaatgctgtagtattttgtgttgacttgctgtttgatatatgctcagtacctcactgtaaaatgtggttctcttgtttgcctcttaacaaaatcctgagaaatgacatgagaacaaattgagaattagtagatcagtacttaactgcaaaacttttgtagttggaattaatttccagtctctagcaaagtagcaatagctgagagagctaaacttgagctattgtgtaatcgaaaatggaggcaccattgcagccaaacttatgaactaac

SEQ ID NO: 69850 - DNA, 4064 bp, Zea Mays
  misc_feature (1)..(2): n is a, c, g, or t
nnagcgttccagcggtatgacatgatcccacagaacgctttgagagtagcagaggaaggaggaacgaggaagggtttatagtttggattatatgattggatgatcggatggttagtagtttggattggaagattggatcacatcgcgtagtccacctctcctctccagtttccacgagaaaaaaaaacatattaaatctttgcttaattttgaattgttcgctgtaaattagaacttatatgtgcatatacatgtagtcatgtatcaaatccgccgttcagtcattcagtgctctgttcaagtgtggatcctctttcccaccaagtcaaggtttgtgaattcgggagtgctagaatcttgatcttccacaagagaatgtctccagaagcaatggataggcttctagaaaaagataaagtgccaaacccatgctatagagtatagactgaggtactgattttccttatctgatgaaccatctgcttggtgctgtgacgatctctaggatatgcgacttgttaaaatgattttgattgcttcgttggttacattagttctactattaccatgcattaatggccttcctgactatcatttggttatctcatgtttctgagaataaaagataaccattgctgtaaagtactaacgttgttgtgcgcttaatctgcatttgtatttgtttgccttattacacttgcttgcctttatcttgtgttttctatgtataagtgtgcaattttggcatttttgtttatctgttactgttgttctctacctacccacgttagataaatgattcacacggcactgtacaggattcaacactggcatgattctaattgaactttacctattactagcatcctaagtgatcccttcatttgtttgtttcagtttcaacattggaaggctcaactaaatataccagttccggatacacactacaggacaaaggtgcacagcacccgatagcgcgctgccttttttagtgtagaactagaaaaccaacgcacaacacaaaccagagagttctccatggacgtcggtggcggcgccaccggcacacgctgccgagaccccaccgctgacccctcgtcccagttcttcgttgacgctggccatccatacgcagtcgctgcagccactgcgctcacctcccaccgcaccaagtccaagtggtcccacctctcttcggtccccgtcccctcccccttcctggcctccgccgccgccggcgtgctcctcctcctccgccaccgaccgcacaccgcgctccgcttccatgccttcgccatccgccgcctccttccctcccgctcccctccccctctcgtcttctctgccgccgcagcccacgtcgcggcggcctcccgccttcggggccctgccctctccatccttgcctctgcctcccgccactgctcaccggcccagatcttcaatgccctcgctgccacctaccgctgctttgcctccgccccattcatcttcgacctcctcctcctcgcctaccttcgctcccgccgcgacgtcctcgctgcggcctccgtcgcccgccgcatcctcgctgccggcgcacggccgctcccctccactgcggcagctcttcttcgttcactcccttccgccaccgcggccctcgacatgtatcatcaaatctacacgcatccaagtccacggagcaatcacctcctcctgccgactgttcacaccttcaattccctcctccttgctttccaccgcgaaggcaagtgtgatgaattcaagattgtgctccaggaaatggacaaatattcctgcaagcacaacgtgtgcacctacagcatcaggatgtctgggtactgcaatggcgggcatgtggataaggcgcgaacactatgggatgagatgattcaggaagggatccagcctgatataactgcgtacaacacaatgattagtgggtattgccattctggggaggtaggggtggcagaggagatgtttaaaaatatgttgatgggtgggattgattcaagtgccacgacgttcgaatggttggtcagagggcattgtatggcacgggatgtcgaggcagcaatgcttgtgcgtgcagacatgaaaaggaaggggtttgggttggcgccagaggttgttgaggaattgctggatggattatgtcaaaatgggagggttgaggatggcttgagtgttttgcgagaggagatgaagagggaagaatttgtgccaacccggaggagttacgaggtgttgattatggggttttgtgatggagggaaggtggaggtggcaatcagactccaagcagagatggctggaaaaggattcactgctggcagcgaggtgtactatgcatttattagtgcttatgagaagtctgaaaattatgagatggtcgagaagttgaggaaggaaatgtcggcgatgggcacttagagcatgtctagcagctcaccaataattcatccctaataaaatggtattggtggtcaccaatagtgctttttttggaatattggggagactctatagtagattaccaataatctttcccaatacatgggacccacatgtcagaatagaggatgtgggaggaagaagatgacgacagttgttgtggtcccaacacctatagagggagatgcaactccccttttatttgaggggagatgggagatttgttttggtgaccaccaaaaaaagggagagctattggggagctgttggagcaatggaattgcctcatctcccccaatatgacagttttatggggatgagggatggtattggagagctactggatgctctatcggatctgatatttggcttggatattgcacagtgatgcatggatatcaacctcacctaattgcagttgagaactatggtaaatcacttatctttacatcactcctcttcctttgattaagttgcttagttttaaaaccagccatttgttctctcttgaatctgtttcttcttgtagtttgttatttgttctgcatggcatgttataaccatttatttcagaaaattttgatgtctagtattgaaacttgaaacttcaaataatccaaaattggtgctaacttgttctctaggtgagaggtgtgtaaagcttgtttgcttcaaaccgatggtaacaactggtatggaaacatcatgttagagcaggcattagttccatattccactcagtcacattcatctaaatgtaagcgtctattgtagttatgtagttggcatgaatatttatacctgtaaattatgattcatagatgatgaacaatcacttaaacaatataagtctggtgccaaatgctatttcagatgatacctaaatgttacagcacatagttttgatacatgcagggtatccttagaaaagcaagtaaattatgtaatagttgaaagataattctcaatatcatatgtcagatgttctttctggttcacttctctatctggttcacaattcattccagagtggtgcaacaaattctgaattggttgaaggagttctctcctagcactatcctggagacggatgttggagaaatatgactgctggatctgcaataggataatgtcttttagtcgatcccttttgtgcttgtttggtgaacttgtgtccccaatctgttgaactctgtaaacatttgctttccataaaagcagagatattctccttaaaaactcagtccagaatggtgatatatgaatgatccctgagagtttataaggtacaaccgtacaagtccaggtgctagagacttctcaatttgctggaaaatgctgtagtattttgtgttgacttgctgtttgatatatgctcagtacctcactgtaaaatgtggttctcttgtttgcctcttaacaaaatcctgagaaatgacatgagaacaaattgagaattagtagatcagtacttaactgcaaaacttttgtagttggaattaatttccagtctctagcaaagtagcaatagctgagagagctaaacttgagctattgtgtaatcgaaaatggaggcaccattgcagccaaacttatgaactaac

SEQ ID NO: 69851 - DNA, 2947 bp, Zea Mays
  misc_feature (1)..(2): n is a, c, g, or t
nnagcgttccagcggtatgacatgatcccacagaacgctttgagagtagcagaggaaggaggaacgaggaagggtttatagtttggattatatgattggatgatcggatggttagtagtttggattggaagattggatcacatcgcgtagtccacctctcctctccagtttccacgagaaaaaaatcatgtatcaaatccgccgttcagtcattcagtgctctgttcaagtgtggatcctctttcccaccaagtcaaggtttgtgaattcgggagtgctagaatcttgatcttccacaagagaatgtctccagaagcaatggataggcttctagaaaaagataaagtgccaaacccatgctatagagtatagactgagtttcaacattggaaggctcaactaaatataccagttccggatacacactacaggacaaaggtgcacagcacccgatagcgcgctgccttttttagtgtagaactagaaaaccaacgcacaacacaaaccagagagttctccatggacgtcggtggcggcgccaccggcacacgctgccgagaccccaccgctgacccctcgtcccagttcttcgttgacgctggccatccatacgcagtcgctgcagccactgcgctcacctcccaccgcaccaagtccaagtggtcccacctctcttcggtccccgtcccctcccccttcctggcctccgccgccgccggcgtgctcctcctcctccgccaccgaccgcacaccgcgctccgcttccatgccttcgccatccgccgcctccttccctcccgctcccctccccctctcgtcttctctgccgccgcagcccacgtcgcggcggcctcccgccttcggggccctgccctctccatccttgcctctgcctcccgccactgctcaccggcccagatcttcaatgccctcgctgccacctaccgctgctttgcctccgccccattcatcttcgacctcctcctcctcgcctaccttcgctcccgccgcgacgtcctcgctgcggcctccgtcgcccgccgcatcctcgctgccggcgcacggccgctcccctccactgcggcagctcttcttcgttcactcccttccgccaccgcggccctcgacatgtatcatcaaatctacacgcatccaagtccacggagcaatcacctcctcctgccgactgttcacaccttcaattccctcctccttgctttccaccgcgaaggcaagtgtgatgaattcaagattgtgctccaggaaatggacaaatattcctgcaagcacaacgtgtgcacctacagcatcaggatgtctgggtactgcaatggcgggcatgtggataaggcgcgaacactatgggatgagatgattcaggaagggatccagcctgatataactgcgtacaacacaatgattagtgggtattgccattctggggaggtaggggtggcagaggagatgtttaaaaatatgttgatgggtgggattgattcaagtgccacgacgttcgaatggttggtcagagggcattgtatggcacgggatgtcgaggcagcaatgcttgtgcgtgcagacatgaaaaggaaggggtttgggttggcgccagaggttgttgaggaattgctggatggattatgtcaaaatgggagggttgaggatggcttgagtgttttgcgagaggagatgaagagggaagaatttgtgccaacccggaggagttacgaggtgttgattatggggttttgtgatggagggaaggtggaggtggcaatcagactccaagcagagatggctggaaaaggattcactgctggcagcgaggtgtactatgcatttattagtgcttatgagaagtctgaaaattatgagatggtcgagaagttgaggaaggaaatgtcggcgatgggcacttagagcatgtctagcagctcaccaataattcatccctaataaaatggtattggtggtcaccaatagtgctttttttggaatattggggagactctatagtagattaccaataatctttcccaatacatgggacccacatgtcagaatagaggatgtgggaggaagaagatgacgacagttgttgtggtcccaacacctatagagggagatgcaactccccttttatttgaggggagatgggagatttgttttggtgaccaccaaaaaaagggagagctattggggagctgttggagcaatggaattgcctcatctcccccaatatgacagttttatggggatgagggatggtattggagagctactggatgctctatcggatctgatatttggcttggatattgcacagtgatgcatggatatcaacctcacctaattgcagttgagaactatgagtggtgcaacaaattctgaattggttgaaggagttctctcctagcactatcctggagacggatgttggagaaatatgactgctggatctgcaataggataatgtcttttagtcgatcccttttgtgcttgtttggtgaacttgtgtccccaatctgttgaactctgtaaacatttgctttccataaaagcagagatattctccttaaaaactcagtccagaatggtgatatatgaatgatccctgagagtttataaggtacaaccgtacaagtccaggtgctagagacttctcaatttgctggaaaatgctgtagtattttgtgttgacttgctgtttgatatatgctcagtacctcactgtaaaatgtggttctcttgtttgcctcttaacaaaatcctgagaaatgacatgagaacaaattgagaattagtagatcagtacttaactgcaaaacttttgtagttggaattaatttccagtctctagcaaagtagcaatagctgagagagctaaacttgagctattgtgtaatcgaaaatggaggcaccattgcagccaaacttatgaactaac

SEQ ID NO: 69852 - DNA, 3461 bp, Zea Mays
  misc_feature (1)..(2): n is a, c, g, or t
nnagcgttccagcggtatgacatgatcccacagaacgctttgagagtagcagaggaaggaggaacgaggaagggtttatagtttggattatatgattggatgatcggatggttagtagtttggattggaagattggatcacatcgcgtagtccacctctcctctccagtttccacgagaaaaaaagtggatcctctttcccaccaagtcaaggtttgtgaattcgggagtgctagaatcttgatcttccacaagagaatgtctccagaagcaatggataggcttctagaaaaagataaagtgccaaacccatgctatagagtatagactgaggtactgattttccttatctgatgaaccatctgcttggtgctgtgacgatctctaggatatgcgacttgttaaaatgattttgattgcttcgttggttacattagttctactattaccatgcattaatggccttcctgactatcatttggttatctcatgtttctgagaataaaagataaccattgctgtaaagtactaacgttgttgtgcgcttaatctgcatttgtatttgtttgccttattacacttgcttgcctttatcttgtgttttctatgtataagtgtgcaattttggcatttttgtttatctgttactgttgttctctacctacccacgttagataaatgattcacacggcactgtacaggattcaacactggcatgattctaattgaactttacctattactagcatcctaagtgatcccttcatttgtttgtttcagtttcaacattggaaggctcaactaaatataccagttccggatacacactacaggacaaaggtgcacagcacccgatagcgcgctgccttttttagtgtagaactagaaaaccaacgcacaacacaaaccagagagttctccatggacgtcggtggcggcgccaccggcacacgctgccgagaccccaccgctgacccctcgtcccagttcttcgttgacgctggccatccatacgcagtcgctgcagccactgcgctcacctcccaccgcaccaagtccaagtggtcccacctctcttcggtccccgtcccctcccccttcctggcctccgccgccgccggcgtgctcctcctcctccgccaccgaccgcacaccgcgctccgcttccatgccttcgccatccgccgcctccttccctcccgctcccctccccctctcgtcttctctgccgccgcagcccacgtcgcggcggcctcccgccttcggggccctgccctctccatccttgcctctgcctcccgccactgctcaccggcccagatcttcaatgccctcgctgccacctaccgctgctttgcctccgccccattcatcttcgacctcctcctcctcgcctaccttcgctcccgccgcgacgtcctcgctgcggcctccgtcgcccgccgcatcctcgctgccggcgcacggccgctcccctccactgcggcagctcttcttcgttcactcccttccgccaccgcggccctcgacatgtatcatcaaatctacacgcatccaagtccacggagcaatcacctcctcctgccgactgttcacaccttcaattccctcctccttgctttccaccgcgaaggcaagtgtgatgaattcaagattgtgctccaggaaatggacaaatattcctgcaagcacaacgtgtgcacctacagcatcaggatgtctgggtactgcaatggcgggcatgtggataaggcgcgaacactatgggatgagatgattcaggaagggatccagcctgatataactgcgtacaacacaatgattagtgggtattgccattctggggaggtaggggtggcagaggagatgtttaaaaatatgttgatgggtgggattgattcaagtgccacgacgttcgaatggttggtcagagggcattgtatggcacgggatgtcgaggcagcaatgcttgtgcgtgcagacatgaaaaggaaggggtttgggttggcgccagaggttgttgaggaattgctggatggattatgtcaaaatgggagggttgaggatggcttgagtgttttgcgagaggagatgaagagggaagaatttgtgccaacccggaggagttacgaggtgttgattatggggttttgtgatggagggaaggtggaggtggcaatcagactccaagcagagatggctggaaaaggattcactgctggcagcgaggtgtactatgcatttattagtgcttatgagaagtctgaaaattatgagatggtcgagaagttgaggaaggaaatgtcggcgatgggcacttagagcatgtctagcagctcaccaataattcatccctaataaaatggtattggtggtcaccaatagtgctttttttggaatattggggagactctatagtagattaccaataatctttcccaatacatgggacccacatgtcagaatagaggatgtgggaggaagaagatgacgacagttgttgtggtcccaacacctatagagggagatgcaactccccttttatttgaggggagatgggagatttgttttggtgaccaccaaaaaaagggagagctattggggagctgttggagcaatggaattgcctcatctcccccaatatgacagttttatggggatgagggatggtattggagagctactggatgctctatcggatctgatatttggcttggatattgcacagtgatgcatggatatcaacctcacctaattgcagttgagaactatggtgagaggtgtgtaaagcttgtttgcttcaaaccgatggtaacaactggtatggaaacatcatgttagagcaggcattagttccatattccactcagtcacattcatctaaatagtggtgcaacaaattctgaattggttgaaggagttctctcctagcactatcctggagacggatgttggagaaatatgactgctggatctgcaataggataatgtcttttagtcgatcccttttgtgcttgtttggtgaacttgtgtccccaatctgttgaactctgtaaacatttgctttccataaaagcagagatattctccttaaaaactcagtccagaatggtgatatatgaatgatccctgagagtttataaggtacaaccgtacaagtccaggtgctagagacttctcaatttgctggaaaatgctgtagtattttgtgttgacttgctgtttgatatatgctcagtacctcactgtaaaatgtggttctcttgtttgcctcttaacaaaatcctgagaaatgacatgagaacaaattgagaattagtagatcagtacttaactgcaaaacttttgtagttggaattaatttccagtctctagcaaagtagcaatagctgagagagctaaacttgagctattgtgtaatcgaaaatggaggcaccattgcagccaaacttatgaactaac

SEQ ID NO: 69853 - DNA, 3121 bp, Zea Mays
  misc_feature (1)..(2): n is a, c, g, or t
nnagcgttccagcggtatgacatgatcccacagaacgctttgagagtagcagaggaaggaggaacgaggaagggtttatagtttggattatatgattggatgatcggatggttagtagtttggattggaagattggatcacatcgcgtagtccacctctcctctccagtttccacgagaaaaaaaaacatattaaatctttgcttaattttgaattgttcgctgtaaattagaacttatatgtgcatatacatgtagtcatgtatcaaatccgccgttcagtcattcagtgctctgttcaagtgtaagtgttcagtaccaatttttaatcatgttcagtattactacatcgtggttcatgatgttcacttggaaaatgttgacctttttttttgttctttgataggtggatcctctttcccaccaagtcaaggtttgtgaattcgggagtgctagaatcttgatcttccacaagagaatgtctccagaagcaatggataggcttctagaaaaagataaagtgccaaacccatgctatagagtatagactgagtttcaacattggaaggctcaactaaatataccagttccggatacacactacaggacaaaggtgcacagcacccgatagcgcgctgccttttttagtgtagaactagaaaaccaacgcacaacacaaaccagagagttctccatggacgtcggtggcggcgccaccggcacacgctgccgagaccccaccgctgacccctcgtcccagttcttcgttgacgctggccatccatacgcagtcgctgcagccactgcgctcacctcccaccgcaccaagtccaagtggtcccacctctcttcggtccccgtcccctcccccttcctggcctccgccgccgccggcgtgctcctcctcctccgccaccgaccgcacaccgcgctccgcttccatgccttcgccatccgccgcctccttccctcccgctcccctccccctctcgtcttctctgccgccgcagcccacgtcgcggcggcctcccgccttcggggccctgccctctccatccttgcctctgcctcccgccactgctcaccggcccagatcttcaatgccctcgctgccacctaccgctgctttgcctccgccccattcatcttcgacctcctcctcctcgcctaccttcgctcccgccgcgacgtcctcgctgcggcctccgtcgcccgccgcatcctcgctgccggcgcacggccgctcccctccactgcggcagctcttcttcgttcactcccttccgccaccgcggccctcgacatgtatcatcaaatctacacgcatccaagtccacggagcaatcacctcctcctgccgactgttcacaccttcaattccctcctccttgctttccaccgcgaaggcaagtgtgatgaattcaagattgtgctccaggaaatggacaaatattcctgcaagcacaacgtgtgcacctacagcatcaggatgtctgggtactgcaatggcgggcatgtggataaggcgcgaacactatgggatgagatgattcaggaagggatccagcctgatataactgcgtacaacacaatgattagtgggtattgccattctggggaggtaggggtggcagaggagatgtttaaaaatatgttgatgggtgggattgattcaagtgccacgacgttcgaatggttggtcagagggcattgtatggcacgggatgtcgaggcagcaatgcttgtgcgtgcagacatgaaaaggaaggggtttgggttggcgccagaggttgttgaggaattgctggatggattatgtcaaaatgggagggttgaggatggcttgagtgttttgcgagaggagatgaagagggaagaatttgtgccaacccggaggagttacgaggtgttgattatggggttttgtgatggagggaaggtggaggtggcaatcagactccaagcagagatggctggaaaaggattcactgctggcagcgaggtgtactatgcatttattagtgcttatgagaagtctgaaaattatgagatggtcgagaagttgaggaaggaaatgtcggcgatgggcacttagagcatgtctagcagctcaccaataattcatccctaataaaatggtattggtggtcaccaatagtgctttttttggaatattggggagactctatagtagattaccaataatctttcccaatacatgggacccacatgtcagaatagaggatgtgggaggaagaagatgacgacagttgttgtggtcccaacacctatagagggagatgcaactccccttttatttgaggggagatgggagatttgttttggtgaccaccaaaaaaagggagagctattggggagctgttggagcaatggaattgcctcatctcccccaatatgacagttttatggggatgagggatggtattggagagctactggatgctctatcggatctgatatttggcttggatattgcacagtgatgcatggatatcaacctcacctaattgcagttgagaactatgagtggtgcaacaaattctgaattggttgaaggagttctctcctagcactatcctggagacggatgttggagaaatatgactgctggatctgcaataggataatgtcttttagtcgatcccttttgtgcttgtttggtgaacttgtgtccccaatctgttgaactctgtaaacatttgctttccataaaagcagagatattctccttaaaaactcagtccagaatggtgatatatgaatgatccctgagagtttataaggtacaaccgtacaagtccaggtgctagagacttctcaatttgctggaaaatgctgtagtattttgtgttgacttgctgtttgatatatgctcagtacctcactgtaaaatgtggttctcttgtttgcctcttaacaaaatcctgagaaatgacatgagaacaaattgagaattagtagatcagtacttaactgcaaaacttttgtagttggaattaatttccagtctctagcaaagtagcaatagctgagagagctaaacttgagctattgtgtaatcgaaaatggaggcaccattgcagccaaacttatgaactaac

SEQ ID NO: 69854 - DNA, 2815 bp, Zea Mays
aaaatcagggtaggagtgggacattcattctcacagccgtgcagtcctttctttttcaaatcttcaggggtggctcgtcagtcgtcatcactcatcaagatccaagaacaacgtgagctgctccactgtactagtctagccctccaccccctttgaggccgcgaccagaataaataaatagaaaccatgcgaccacatcgactcctgccttcattactaccgtcataaaagcagccaccttagcaccgtctaatcgccattgctctactccaattatgctctcaaatccagacagttcttcgatttttttcagccttttctccttcttctaacggaacaggaaggagcgagcaagacgccgttgagaaaacacggggtggtattctgcagtaaaaaaaaaaaaaaacactcgaggcgaaagtgtccaaagccagaggagagaaagagaagacttgtacttggagggcagctgggcaggtgaaaggaagaggaaagagggcgagtgcgacgggaggcgcaatgcggtggagatctcccgccgtgctgcggctgcagctgtggctgctcgccgtctccgcgtcgttggctgccctcggtgttctcgcggctgatcttagcaaagaaccatttactatccgtataagctgtggaagctttgacgatgtccggacggagcctacgaacacattgtggtacagagactttggttatactggaggcaggttcgctaatgccacccggccaagctttatcgttcctcctcttaaaacgcttcgatatttcccgctatctgatggccctgaaaattgctacaacatcaacaatgttcccaatggccactatcaagttagacttttctttgcgttactggacaaccctaatcttgacagtgagccgattttcgatgtttctgttgagggtactctgttcagctctttgcttctgggctggagcagcgacgatgagaagacatttgcagaagctttggtttttgtccaggactcaagcttatcagtttgcttccatagtacagggcatggtgatccatcgattctttctattgaagttctacaaatagatgacgatgcctataactttggtccaccacgggaaaaggggacagtgcttagagcagtcaaaaggctgaaatgtggctcaggaaagcctgcttttgatgaagatctaaatgggattcactggggtggggacagattctggttaggattgcaaactttatcatccagttctgatgatcaatcaatatcatccgagaatgttatagcagagacattgcttgcaccaaatttttaccctcaaggcatataccaatcagctatcgtgggcactgataggcaaccgagtttgtctttcgaaatggatgttaccccaaacaagaactattcagtatggcttcactttgcagagattgataatggggtaactgcagaagaacaaagagtatttgatgtactcatcaatggagacactgcttttaaagatattgatataattcgcatgacaggagagcgttttactgcacttgtcctgaataaaactgttgctgtcagtggaataacactaaaaatcatcttgcaacctgtgaaaggaacccgtgccattattaatgccattgaggtgtttgagataatcccagctgaaaagaagactttgcctcaggaatgagtgcattgcgaacgttgaagggttcacttggtcttcctcttcgatttggctggaatggtgacccctgtgttcctcagcagcatccatggagtggagttgattgccagtttgacagcaccaaagggaactggatcattgatggattaggtcttgacaaccaaggtttaaaaggggtcatacctagtgacatatctaagttgcaacatctacaaaacataaacttgagtggcaatagcataaaggggaacattccaatctccctgggtaccatctctgtggtgcaagtactggatctgtcatacaatgagcttaatggatctattccagagagcctcggcgagctgacatcattacagatactgaacctgaatggcaatcgtctttctggtcgtgttccagccagtttgggaggaaggcctctgcacagagctagatttaacttcacggacaatgccggactatgtggaatacctgggttacgtgagtgtggccctcatctatccgtggctgcaaagatcggcatggctttcggcgtgcttttagctattctattcctagttgtattcgctgcgtgctggtggaagagacgccagaacattctccgtgctaaaagattagctgcagcaagggaagctccttatgcaaaatcaaggacccagttcacccgcgatgtgcaaatggccaagcatcaacggacacatgaaaatgctcggagcagcaacagtgaaggctcgccacatttgctttcctagctcggtgagaatactgcgacagtgacttggcttccatctattcttcagttcctcctttgtatgctcctctgcagtcttgaaagacgaagctgctgtacatactagctaggtcacgaatggtgtatatacttgtattttttttggtgatctagaactcagtccaggagagggatcagtctatcagatgagagaaattacccatttcatcctacttactgttctgattactgctgttgatttccccttcactgttcaagtatgcttattgtcagttttgtactgtggtctgaagctctgcaaaactgcattttgccaggagctggagccccaggctgggctgtgttgagatatagagtgaattctacaccttttcctattag

SEQ ID NO: 69855 - DNA, 2516 bp, Zea Mays
aaaatcagggtaggagtgggacattcattctcacagccgtgcagtcctttctttttcaaatcttcaggggtggctcgtcagtcgtcatcactcatcaagatccaagaacaacgaaggagcgagcaagacgccgttgagaaaacacggggtggtattctgcagtaaaaaaaaaaaaaaacactcgaggcgaaagtgtccaaagccagaggagagaaagagaagacttgtacttggagggcagctgggcaggtgaaaggaagaggaaagagggcgagtgcgacgggaggcgcaatgcggtggagatctcccgccgtgctgcggctgcagctgtggctgctcgccgtctccgcgtcgttggctgccctcggtgttctcgcggctgatcttagcaaagaaccatttactatccgtataagctgtggaagctttgacgatgtccggacggagcctacgaacacattgtggtacagagactttggttatactggaggcaggttcgctaatgccacccggccaagctttatcgttcctcctcttaaaacgcttcgatatttcccgctatctgatggccctgaaaattgctacaacatcaacaatgttcccaatggccactatcaagttagacttttctttgcgttactggacaaccctaatcttgacagtgagccgattttcgatgtttctgttgagggtactctgttcagctctttgcttctgggctggagcagcgacgatgagaagacatttgcagaagctttggtttttgtccaggactcaagcttatcagtttgcttccatagtacagggcatggtgatccatcgattctttctattgaagttctacaaatagatgacgatgcctataactttggtccaccacgggaaaaggggacagtgcttagagcagtcaaaaggctgaaatgtggctcaggaaagcctgcttttgatgaagatctaaatgggattcactggggtggggacagattctggttaggattgcaaactttatcatccagttctgatgatcaatcaatatcatccgagaatgttatagcagagacattgcttgcaccaaatttttaccctcaaggcatataccaatcagctatcgtgggcactgataggcaaccgagtttgtctttcgaaatggatgttaccccaaacaagaactattcagtatggcttcactttgcagagattgataatggggtaactgcagaagaacaaagagtatttgatgtactcatcaatggagacactgcttttaaagatattgatataattcgcatgacaggagagcgttttactgcacttgtcctgaataaaactgttgctgtcagtggaataacactaaaaatcatcttgcaacctgtgaaaggaacccgtgccattattaatgccattgaggtgtttgagataatcccagctgaaaagaagactttgcctcaggaagtgagtgcattgcgaacgttgaagggttcacttggtcttcctcttcgatttggctggaatggtgacccctgtgttcctcagcagcatccatggagtggagttgattgccagtttgacagcaccaaagggaactggatcattgatggattaaacttgagtggcaatagcataaaggggaacattccaatctccctgggtaccatctctgtggtgcaagtactggatctgtcatacaatgagcttaatggatctattccagagagcctcggcgagctgacatcattacagatactgaacctgaatggcaatcgtctttctggtcgtgttccagccagtttgggaggaaggcctctgcacagagctagatttaacttcacggacaatgccggactatgtggaatacctgggttacgtgagtgtggccctcatctatccgtggctgcaaagatcggcatggctttcggcgtgcttttagctattctattcctagttgtattcgctgcgtgctggtggaagagacgccagaacattctccgtgctaaaagattagctgcagcaagggaagctccttatgcaaaatcaaggacccagttcacccgcgatgtgcaaatggccaagcatcaacggacacatgaaaatgctcggagcagcaacagtgaaggctcgccacatttgctttcctagctcggtgagaatactgcgacagtgacttggcttccatctattcttcagttcctcctttgtatgctcctctgcagtcttgaaagacgaagctgctgtacatactagctaggtcacgaatggtgtatatacttgtattttttttggtgatctagaactcagtccaggagagggatcagtctatcagatgagagaaattacccatttcatcctacttactgttctgattactgctgttgatttccccttcactgttcaagtatgcttattgtcagttttgtactgtggtctgaagctctgcaaaactgcattttgccaggagctggagccccaggctgggctgtgttgagatatagagtgaattctacaccttttcctattag

SEQ ID NO: 69856 - DNA, 2438 bp, Zea Mays
tttgtttggttttaaaaaaaaaaaaaaacactcgaggcgaaagtgtccaaagccagaggagagaaagagaagacttgtacttggagggcagctgggcaggtgaaaggaagaggaaagagggcgagtgcgacgggaggcgcaatgcggtggagatctcccgccgtgctgcggctgcagctgtggctgctcgccgtctccgcgtcgttggctgccctcggtgttctcgcggctgatcttagcaaagaaccatttactatccgtataagctgtggaagctttgacgatgtccggacggagcctacgaacacattgtggtacagagactttggttatactggaggcaggttcgctaatgccacccggccaagctttatcgttcctcctcttaaaacgcttcgatatttcccgctatctgatggccctgaaaattgctacaacatcaacaatgttcccaatggccactatcaagttagacttttctttgcgttactggacaaccctaatcttgacagtgagccgattttcgatgtttctgttgagggtactctgttcagctctttgcttctgggctggagcagcgacgatgagaagacatttgcagaagctttggtttttgtccaggactcaagcttatcagtttgcttccatagtacagggcatggtgatccatcgattctttctattgaagttctacaaatagatgacgatgcctataactttggtccaccacgggaaaaggggacagtgcttagagcagtcaaaaggctgaaatgtggctcaggaaagcctgcttttgatgaagatctaaatgggattcactggggtggggacagattctggttaggattgcaaactttatcatccagttctgatgatcaatcaatatcatccgagaatgttatagcagagacattgcttgcaccaaatttttaccctcaaggcatataccaatcagctatcgtgggcactgataggcaaccgagtttgtctttcgaaatggatgttaccccaaacaagaactattcagtatggcttcactttgcagagattgataatggggtaactgcagaagaacaaagagtatttgatgtactcatcaatggagacactgcttttaaagatattgatataattcgcatgacaggagagcgttttactgcacttgtcctgaataaaactgttgctgtcagtggaataacactaaaaatcatcttgcaacctgtgaaaggaacccgtgccattattaatgccattgaggtgtttgagataatcccagctgaaaagaagactttgcctcaggaagtgagtgcattgcgaacgttgaagggttcacttggtcttcctcttcgatttggctggaatggtgacccctgtgttcctcagcagcatccatggagtggagttgattgccagtttgacagcaccaaagggaactggatcattgatggattaggtcttgacaaccaaggtttaaaaggggtcatacctagtgacatatctaagttgcaacatctacaaaacataaacttgagtggcaatagcataaaggggaacattccaatctccctgggtaccatctctgtggtgcaagtactggatctgtcatacaatgagcttaatggatctattccagagagcctcggcgagctgacatcattacagatactgaacctgaatggcaatcgtctttctggtcgtgttccagccagtttgggaggaaggcctctgcacagagctagatttaacttcacggacaatgccggactatgtggaatacctgggttacgtgagtgtggccctcatctatccgtggctgcaaagatcggcatggctttcggcgtgcttttagctattctattcctagttgtattcgctgcgtgctggtggaagagacgccagaacattctccgtgctaaaagattagctgcagcaagggaagctccttatgcaaaatcaaggacccagttcacccgcgatgtgcaaatggccaagcatcaacggacacatgaaaatgctcggagcagcaacagtgaaggctcgccacatttgctttcctagctcggtgagaatactgcgacagtgacttggcttccatctattcttcagttcctcctttgtatgctcctctgcagtcttgaaagacgaagctgctgtacatactagctaggtcacgaatggtgtatatacttgtattttttttggtgatctagaactcagtccaggagagggatcagtctatcagatgagagaaattacccatttcatcctacttactgttctgattactgctgttgatttccccttcactgttcaagtatgcttattgtcagttttgtactgtggtctgaagctctgcaaaactgcattttgccaggagctggagccccaggctgggctgtgttgagatatagagtgaattctacaccttttcctattag

SEQ ID NO: 69857 - DNA, 1569 bp, Zea Mays
cccactccagcccgtctccagccacgccgccccccgcaccaacccacccccaccacacggaaggcggaaatcccccacgcgcaagcgtttgccttgttgcttggcgtccgtctgccgaaacaaaagtcgccgtcctcccccctcgtcgcttcatcacctcacctccgccgtcgcctcccctcatccctccaccggcccgtttgaccctctccctggctcgctcgttctcctcctcctccgtacccgtcctagtaggtttagcgctcaacagaaccccaatcaccaccccggcgccccccgagagcagttgccttgccgcttgctgcggttccatatggtgccccccgcgtcggcgtgagggctgcgcgcgctcgtgctgtttatcgggaggagatagatggggcccgccgtccgcagtagcgtcgtgatcagggccactgtggtagggctcgtgctggttggcatcgccctggccctgccgctggccgcggcgctgcggccgctccgggagcacgtcgcgtccatcggagccgcagcctccgctggttcgtggggcgatgagcatgccttctacaaaagggatgagaacgatataggcccatattcatggaatattactggaacatataaagggagctggacttttgctggtgccacaaatggttcgtctagatttcttgagtttgtggaatctaaaggtgattcagttttggaattgttgagcactccaacaaagataagcggggtgcattatgttcagggttcagttacattccatgatgtcattgacaatgcccacaatggtggagtggctcaaataaggttagaaggagtttacatatggccttttagacaacttcgcatggtagcaaacagtggtgcagatggtgaaccactccaggaagaggattatttcttgtcaaatccataccatttattgcggattttctcctctcaagtgtttcaagaatcttctgaagagaagaaccgaaggaagaattctctcacatatgacatggagaaacattgcaacacagaaatagctgctaaggtggttcgtgtgtcatctaacccaaatgatggagaacacgagaagtaccgtttggagggtttgatggagagtccagccgtcgatgatgatggggaatgcttctctcctatcttattgaatgcaacttctttgaatgttgaagtttattacaacaaagcagtcaactacacactgatggtcacttttatctctttccttcaagttttgctgctgattagacaaatggagcatagcaacacacaatctggagctgctaaggtttctattttaatgattggccaacaagctatcatggatgcatatctctgtctacttcacctgactgctgggatattggttgagtcactcttcaatgccttcgcaacggctgcattcttcaaatttgttgtattttctatttttgaaatgaggtaccttctcgccatatggaaagcaagtaggcctttaaacagtggagaaggttgggagataatgaggcgagagctgtctgttctttacagccgcttttatggcatcca

SEQ ID NO: 69858 - DNA, 1831 bp, Zea Mays
  misc_feature (1830)..(1831): n is a, c, g, or t
cccactccagcccgtctccagccacgccgccccccgcaccaacccacccccaccacacggaaggcggaaatcccccacgcgcaagcgtttgccttgttgcttggcgtccgtctgccgaaacaaaagtcgccgtcctcccccctcgtcgcttcatcacctcacctccgccgtcgcctcccctcatccctccaccggcccgtttgaccctctccctggctcgctcgttctcctcctcctccgtacccgtcctagtaggtttagcgctcaacagaaccccaatcaccaccccggcgccccccgagagcagttgccttgccgcttgctgcggttccatatggtgccccccgcgtcggcgtgagggctgcgcgcgctcgtgctgtttatcgggaggagatagatggggcccgccgtccgcagtagcgtcgtgatcagggccactgtggtagggctcgtgctggttggcatcgccctggccctgccgctggccgcggcgctgcggccgctccgggagcacgtcgcgtccatcggagccgcagcctccgctggttcgtggggcgatgagcatgccttctacaaaagggatgagaacgatataggcccatattcatggaatattactggaacatataaagggagctggacttttgctggtgccacaaatggttcgtctagatttcttgagtttgtggaatctaaaggtgattcagttttggaattgttgagcactccaacaaagataagcggggtgcattatgttcagggttcagttacattccatgatgtcattgacaatgcccacaatggtggagtggctcaaataaggttagaaggagtttacatatggccttttagacaacttcgcatggtagcaaacagtggtgcagatggtgaaccactccaggaagaggattatttcttgtcaaatccataccatttattgcggattttctcctctcaagtgtttcaagaatcttctgaagagaagaaccgaaggaagaattctctcacatatgacatggagaaacattgcaacacagaaatagctgctaaggtggttcgtgtgtcatctaacccaaatgatggagaacacgagaagtaccgtttggagggtttgatggagagtccagccgtcgatgatgatggggaatgcttctctcctatcttattgaatgcaacttctttgaatgttgaagtttattacaacaaagcagtcaactacacactgatggtcacttttatctctttccttcaagttttgctgctgattagacaaatggagcatagcaacacacaatctggagctgctaaggtttctattttaatgattggccaacaagctatcatggatgcatatctctgtctacttcacctgactgctgggatattggttgagtcactcttcaatgccttcgcaacggctgcattcttcaaatttgttgtattttctatttttgaaatgaggtaccttctcgccatatggaaagcaagtaggcctttaaacagtggagaaggttgggagataatgaggcgagagctgtctgttctttacagccgcttttgtaagtagttactatgctcatttggtttcttttcacgaagaatcacgccaatagatcaatgaatcccaaacaacatggttttcatacagagtggtggcatgcttcttgtcatatatttgtttcaattagaacttacatatgcaatcaatctgacatttcccctgttagctggtgacctttattgtcccatttacctgctgcatgtaaatcactattacccatgtttttagttggtaggtgaagtacttgatgcttgctataaatggaaacnn

SEQ ID NO: 69859 - DNA, 2036 bp, Zea Mays
agccaggcaaagaggccgaggccgaggccgcgcgcacgatataagcagcaccgccatcgctccacgcttcttggtaggtcgccggtcagcaggagcagcagcggcggcggcggggagaaggctgctaactggtggccggccgttcgccgcgagctccggcacgcctccggtccggcggacggcagcagcagcatgtcttcggccgccccgctgctaggcgacgaggccggcggtggcgagcccgcgccgcggacgccgccgccgccgtcctcgtgggtggggcgcgtggtggacgcggccgaggcgcgcgcgcagctggggttcgcggtgccgatggtgctgaccagcatggcctactacggcatcccgctggtgtcggtgatgttctcgggccagctcggcgacgtccacctcgccggcgccacgctcggcaactcctgggccaccgtcaccggctacgcgttcgtgatcgggatcgcatcggacgcaccccgcgacctgcacctgctgctcttcgcctcttgcagaccctggcacgcttcataacgtcgcaacatagcccatcacccacggcgacggcaggagacaggatgagcagctgcacgatctggctgggtcttgcggagcattggggattaacttgaccggtctgagcggcgccctggagacgctgtgcgggcaggcgtacggcgcggggctgcaccgcatgctgggcctctacctgcagtcgtcgctcatcatgtcggccgccgcgtcggcgctcgtctccgcgctgtggtggttcacggagccggtgctcctgctcctgcggcaggagcccgaggcgtcccgcgccgcggcggcgttcgtccgcgcgcaggcgcctggcctcttcgccttctccttcgtgcagtgcctgctccgctacctgcagacgcagtccgtcgtgctcccgctcgtcgcctgctccgtggccccgttcgcgctccacgtcgcgctggcgcacctcatggtcaacgtgctcggcctgggcctcacgggggcggccgccgccgtctcggccacgttctgggtctcctgcctcatgctgctcgcctacgtgctgcgctccgacgccttcagcgacacgtggaggggcttctctgccgacgccttcaagtacgtgctgcccaccgtgaagctcgccacgccgtccgccgtcatggtctgcttggagtactgggcattcgagctcctggtcctgatcgccggattgcttcccaactccacagtgagcacgtctctcatcgccatgtgcacgcgggtgtcgaacgagatcggcgcggggaacgtggagagggccaagaacgcggtgtcggtgacgatgaagctgtcggtgttgctggccgtcaccttcgtgctgctgctggcgttcggccacggcctgtgggcgcgcctcttcagcgggagcgccaccatcgcgtcggagttcgcggccatcacgccgctcatggtgatctccatcgtgctggactccgtgcagggcgtgctgtcgggagtggcgaggggctgcgggtggcagcacctggcggcggtcaccaacctggtggcgttctacatcgtcggcatgccgctggccatcctgttcgccttcaagctcgacctgcgcaccaggggcctgtgggcggggctcatctgcggcctcacgtgccaggcctgctcgctgctggtcatcaccgtccgcaccaagtggtccaagctcgccgatgccatgaaggaggagaaggccaactacgtcgcgtagcaaacgcactctacgtctgtactgcctttttttttggggagataaagagcacactacagtacgatcattttagacggcttgccgacgaaaatagatcatatgatgctaaaaatagtctatttttttggtatatagcttatttttggtggcctgatcttttgatccagaccgtcgaaaatagacagccaaaaattatatacgcttatttttggcagctcaaaccggccacccaaaattagcaattttagagaaaaaataaaaaattaatagtaat

SEQ ID NO: 69860 - DNA, 1984 bp, Zea Mays
gtcctcactcctcagccaggcaaagaggccgaggccgaggccgcgcgcacgatataagcagcaccgccatcgctccacgcttcttggtaggtcgccggtcagcaggagcagcagcggcggcggcggggagaaggctgctaactggtggccggccgttcgccgcgagctccggcacgcctccggtccggcggacggcagcagcagcatgtcttcggccgccccgctgctaggcgacgaggccggcggtggcgagcccgcgccgcggacgccgccgccgccgtcctcgtgggtggggcgcgtggtggacgcggccgaggcgcgcgcgcagctggggttcgcggtgccgatggtgctgaccagcatggcctactacggcatcccgctggtgtcggtgatgttctcgggccagctcggcgacgtccacctcgccggcgccacgctcggcaactcctgggccaccgtcaccggctacgcgttcgtggcagcagacgcagttgagaaattcaaggcagccaatcagtcggaggctcggagaccggtctgagcggcgccctggagacgctgtgcgggcaggcgtacggcgcggggctgcaccgcatgctgggcctctacctgcagtcgtcgctcatcatgtcggccgccgcgtcggcgctcgtctccgcgctgtggtggttcacggagccggtgctcctgctcctgcggcaggagcccgaggcgtcccgcgccgcggcggcgttcgtccgcgcgcaggcgcctggcctcttcgccttctccttcgtgcagtgcctgctccgctacctgcagacgcagtccgtcgtgctcccgctcgtcgcctgctccgtggccccgttcgcgctccacgtcgcgctggcgcacctcatggtcaacgtgctcggcctgggcctcacgggggcggccgccgccgtctcggccacgttctgggtctcctgcctcatgctgctcgcctacgtgctgcgctccgacgccttcagcgacacgtggaggggcttctctgccgacgccttcaagtacgtgctgcccaccgtgaagctcgccacgccgtccgccgtcatggtctgcttggagtactgggcattcgagctcctggtcctgatcgccggattgcttcccaactccacagtgagcacgtctctcatcgccatgtgctccagcacggaggcgatcgcgtacatgatcacgttcggcttcagcgccgccgtgagcacgcgggtgtcgaacgagatcggcgcggggaacgtggagagggccaagaacgcggtgtcggtgacgatgaagctgtcggtgttgctggccgtcaccttcgtgctgctgctggcgttcggccacggcctgtgggcgcgcctcttcagcgggagcgccaccatcgcgtcggagttcgcggccatcacgccgctcatggtgatctccatcgtgctggactccgtgcagggcgtgctgtcgggagtggcgaggggctgcgggtggcagcacctggcggcggtcaccaacctggtggcgttctacatcgtcggcatgccgctggccatcctgttcgccttcaagctcgacctgcgcaccaggggcctgtgggcggggctcatctgcggcctcacgtgccaggcctgctcgctgctggtcatcaccgtccgcaccaagtggtccaagctcgccgatgccatgaaggaggagaaggccaactacgtcgcgtagcaaacgcactctacgtctgtactgcctttttttttggggagataaagagcacactacagtacgatcattttagacggcttgccgacgaaaatagatcatatgatgctaaaaatagtctatttttttggtatatagcttatttttggtggcctgatcttttgatccagaccgtcgaaaatagacagccaaaaattatatacgcttatttttggcagctcaaaccggccacccaaaattagcaattttagagaaaaaataaaaaattaatagtaat

SEQ ID NO: 69861 - DNA, 1906 bp, Zea Mays
gccgagtcattattccacgcgggtgcgtcctcactcctcagccaggcaaagaggccgaggccgaggccgcgcgcacgatataagcagcaccgccatcgctccacgcttcttggtaggtcgccggtcagcaggagcagcagcggcggcggcggggagaaggctgctaactggtggccggccgttcgccgcgagctccggcacgcctccggtccggcggacggcagcagcagcatgtcttcggccgccccgctgctaggcgacgaggccggcggtggcgagcccgcgccgcggacgccgccgccgccgtcctcgtgggtggggcgcgtggtggacgcggccgaggcgcgcgcgcagctggggttcgcggtgccgatggtgctgaccagcatggcctactacggcatcccgctggtgtcggtgatgttctcgggccagctcggcgacgtccacctcgccggcgccacgctcggcaactcctgggccaccgtcaccggctacgcgttcgtgaccggtctgagcggcgccctggagacgctgtgcgggcaggcgtacggcgcggggctgcaccgcatgctgggcctctacctgcagtcgtcgctcatcatgtcggccgccgcgtcggcgctcgtctccgcgctgtggtggttcacggagccggtgctcctgctcctgcggcaggagcccgaggcgtcccgcgccgcggcggcgttcgtccgcgcgcaggcgcctggcctcttcgccttctccttcgtgcagtgcctgctccgctacctgcagacgcagtccgtcgtgctcccgctcgtcgcctgctccgtggccccgttcgcgctccacgtcgcgctggcgcacctcatggtcaacgtgctcggcctgggcctcacgggggcggccgccgccgtctcggccacgttctgggtctcctgcctcatgctgctcgcctacgtgctgcgctccgacgccttcagcgacacgtggaggggcttctctgccgacgccttcaacttggagtactgggcattcgagctcctggtcctgatcgccggattgcttcccaactccacagtgagcacgtctctcatcgccatgtgctccagcacggaggcgatcgcgtacatgatcacgttcggcttcagcgccgccgtgagcacgcgggtgtcgaacgagatcggcgcggggaacgtggagagggccaagaacgcggtgtcggtgacgatgaagctgtcggtgttgctggccgtcaccttcgtgctgctgctggcgttcggccacggcctgtgggcgcgcctcttcagcgggagcgccaccatcgcgtcggagttcgcggccatcacgccgctcatggtgatctccatcgtgctggactccgtgcagggcgtgctgtcgggagtggcgaggggctgcgggtggcagcacctggcggcggtcaccaacctggtggcgttctacatcgtcggcatgccgctggccatcctgttcgccttcaagctcgacctgcgcaccaggggcctgtgggcggggctcatctgcggcctcacgtgccaggcctgctcgctgctggtcatcaccgtccgcaccaagtggtccaagctcgccgatgccatgaaggaggagaaggccaactacgtcgcgtagcaaacgcactctacgtctgtactgcctttttttttggggagataaagagcacactacagtacgatcattttagacggcttgccgacgaaaatagatcatatgatgctaaaaatagtctatttttttggtatatagcttatttttggtggcctgatcttttgatccagaccgtcgaaaatagacagccaaaaattatatacgcttatttttggcagctcaaaccggccacccaaaattagcaattttagagaaaaaataaaaaattaatagtaat

SEQ ID NO: 69862 - DNA, 2342 bp, Zea Mays
gtttcacttcttcgggatcacggcgccgtcgtggagcgcctctgcgagtctctgcagcgccgcgtgcgacgacccgccctcctccacggccttccggcacacggccttcatacgcgcggccttctccctcgccctcctcccctgctcgccgtcggcgtccatcagggaccgcacagcgcgctcgagctccgcggccaccacgaagttgccccgtttcctgtccaccttgagcggcacggccacgcccatgtcggccaccagctgaaacgcgttcaggtgctgctccgcgtacagcggccacggcgccatgggcacgccgtgccacaggctctccagcaccgagttccagccgccgtgcgtcacgaagccgcccacggcggggtgcgccaggatctccttctgcggcgcccacgtcggccacaccaggcccttgccccccgtcctctccaagaacccctccgggagcagctcgtcgaggttcgcgtccgtcgggtgctccgacccggacgcgtccgagggtggtccccgcaggacccacaggaagcggtggccgcaccgctcgagcgcggcagtgatctccgcaacctgcggcgggtcgaaccaccccatgctcccgaaacagaggaacgcaacggaccccggcggctgcgcgtccagccacgcgacgcactcgtgagacggcgagcggccgccgagcgacagcacggggccgatcgggtacaccggcggcgcgggccggccgggcacgcaccggccccgggcgacggccgccaggggccccggctcgagctcgtccgctgtgttggcgatgacccccgtggcgtccatgaagcggtcgccgaggcgcacgaagcacgcgtagttggggctcctcttgtccgccacggggcacggcatggagtccggcggcaccggcggcagccccggcagcggcacgtccccctccatctcgtcgaagtccacggcggggacggactcgtggagcacgggcaggtgcagcatgagcgcgagcatggcccccgtggacgacatgaagacgtaggacggcaccccgaggccccgcgccacgtccaccagcggcgcggcgaagaggtcgagcacgagcgcggccacggggcacgccatggcggccacggcgtcacggacgtgcggcgcgtggaggccgatgtagcgcgcgatgaactcctcgaccccgacggcgtcggtgggggcctccacggcggggaggcggtggaagcggatgtccagcccgcacgcggcctcgcgccgcacgtgcgcctccacctcggaggtggcctcggccgtcggcgggcgcatcacgagcagggtgatggagaaggccttgccgccgctgctgctgaggaggacgcgcttacaggactcgagcatggacatgaggtggccggacccccactccggtaggagcaccagcgcgggcgtcgccattggaacagtcggtgtttggccgtaaccgttacttcagtgcttttttccttgggtaaccaaagcaagcagccaagtgaaacgaatacagatgaatagccggttgtatcaaaaatttaaaaatatatcgacggtgaaggtgactggcactgattaggctgtggaaggtgatcacccaccaccaccacccacggggcccgatcagtcgcccaggatgacaggatgggcgagcacgggacttggaaccgtacttttcttcagcagatgcgacgcatgtttctccgaaacaatctgctatgtccgatgaaatcctgaaccataggcaacacttttcttcgtggacttggccacgcctgtggccaagtgattctaccgcgaggcatcgcaattcgcacgcaggtgtcgcagcgccgtgtaagccacgctgcaccacgcctcaatcttggaccgtggctgtccaagcttgtccgtatccgtatgtctgtgtctgtgactctccggccggcgtggaaaatctctagtatgacagtgatgcgggtcccgcgacgcttgatcaatgacctgtggtagatggagaggtgacagtcatctcaagggagtgttctaggcggatagccaatcctggcttgactatgaagctttccaaactaatcagtacagtttggcctccgtgacttttgttgtggacaacatatttaagtgcacatggaacattggtgtacatggtgcacatattaaatcagcaccactcattttaatctaacgtctctagttgtttggtacattttactaaggacatccgtcaacgtggtgatgtgtagcggtggaaggtgttatttgtaaattgaataatcaactagagatgttagatctaaaatgagtgataataacttaatatg

SEQ ID NO: 69863 - DNA, 1796 bp, Zea Mays
ggatcttgcatgtatactgagatgctatcggactggacaacatgggcatgcatagtagatcattaactatctggagtacgatatgtcacaaatggtttaaaggtctattatgtaccatggaggccattcctgatgcagaatacacttcctacactatccttgacgtttccaattgtaaggacaattattattcgagagaagatttctgtcgtgcatggacatcaagctttttcaacactgtgtcatgaagcattaatgcatgctaggacaatgggtttactcttgcagatattgatcaggcaatatgtgtctcacatacaagcaaagagaacactgtcttgaggtctgggatatctccagagaaggttttcatggttcctaatgcagttgacactgcaatgtttactccctctcccaagcgcttaaactgtgatgaaatagttattgttgtggtcagtaggttagtataccgaaaaggcgccgaccttcttgttgaagtcattccagaagtgtgtcggctatttccaaaggttcactttattgttggtggtgatggtccaaaacgtgtgcgccttgaagaaatgagggagaagttctcccttcaggatagagttgagatgttaggagctgtacctcatgctcaggtgcgatcggttctgatatctggacatatatttttgaacagttcactcacagaggcattttgcatagccattctagaagcagctagctgtggactgttgacagtgagcactagagtcggtggtgtccctgaggttcttccagatgacatgatagtacttgcagaaccagctcctggagatatggtaagagctgtcaagaaagccatcgacatgctacctggaatagacccccagattatgcatcttcggatgaaagaactttatagttgggacgatgttgccaaaagaactgagattgtttatgatcgtgcaatggaatctccaacaacaaatttactagatcgccttccccggtatcttacttgtggatcttgggctggaaaactgttttgcctagttatgatcatcaattacctactatggcgccttttagaatttctacagcctgctgtaggtattgaagaagtcccagatataggcccactacatgctcatttaggttcaaggaatgatgaggctcaagagaagtgaaacttaaacctttgtcagttttgaaactgttggggacttgaggtggcagtcatggtatcttctgcttgtcagcattcgttctgatccacatgccagtgtatgcctttatgatatggcccccgcacagcattttctcttgaagcttcctgtctccgtagtcgcagctgaaagagagtggaacgccttgatttgtaggatttcttgtcatgctggttaaagatatggtccgagtctctgtcattgccagcttctttttcttcttctgcgtaatgcgtagtgagtggatggcctgcgttttaggcacgtcatcaaaaccaattatctgctggaaagttggtactctcttgccaccatattgcagtgatttagcaactagaagtcttgattggcatgttgacacacaaattcctactatgtttgatgtcttgtatcatgtcggagcaccaattcctgctgtgtttgtgatgtaataaggccaattccaaccagcgacgtgagaccaatcgtccaatctgcatggatccagtcgatgatacttttttgaattgtttgataagttcgtcaaatcctcaaaaacaagtacacaagctttgtctatgaaatacccttatattcttttgg

SEQ ID NO: 69864 - DNA, 2082 bp, Zea Mays
gcgccaacgccaagtcgaggcacgcggccagtggtgccctcgtcctcgaatcgtcaatgagcaccggcgccgcgcccctcctccactctacccgcacagcgcccctcgcccccacaccccaacccaaccatccgctccttgtcgccttccgacgctgagtttgctggtgtcgatttacgccggcggatgctcgatctggtagctgcatgtgccgacctactcgtcgaatccgttatctaacgtaatggatgggcaaggcacaaagcacaggattttgatggtgtccgactttttctttccaaactttggtggggtggaaagccatatctactacctgtcacaatgtctacttaagcttggccataagatctggagtacgatatgtcacaaatggtttaaaggtctattatgtaccatggaggccattcctgatgcagaatacacttcctacactatccttgacgtttccaattgtaaggacaattattattcgagagaagatttctgtcgtgcatggacatcaagctttttcaacactgtgtcatgaagcattaatgcatgctaggacaatgggatattgatcaggcaatatgtgtctcacatacaagcaaagagaacactgtcttgaggtctgggatatctccagagaaggttttcatggttcctaatgcagttgacactgcaatgtttactccctctcccaagcgcttaaactgtgatgaaatagttattgttgtggtcagtaggttagtataccgaaaaggcgccgaccttcttgttgaagtcattccagaagtgtgtcggctatttccaaaggttcactttattgttggtggtgatggtccaaaacgtgtgcgccttgaagaaatgagggagaagttctcccttcaggatagagttgagatgttaggagctgtacctcatgctcaggtgcgatcggttctgatatctggacatatatttttgaacagttcactcacagaggcattttgcatagccattctagaagcagctagctgtggactgttgacagtgagcactagagtcggtggtgtccctgaggttcttccagatgacatgatagtacttgcagaaccagctcctggagatatggtaagagctgtcaagaaagccatcgacatgctacctggaatagacccccagattatgcatcttcggatgaaagaactttatagttgggacgatgttgccaaaagaactgagattgtttatgatcgtgcaatggaatctccaacaacaaatttactagatcgccttccccggtatcttacttgtggatcttgggctggaaaactgttttgcctagttatgatcatcaattacctactatggcgccttttagaatttctacagcctgctgtaggtattgaagaagtcccagatataggcccactacatgctcatttaggttcaaggaatgatgaggctcaagagaagtgaaacttaaacctttgtcagttttgaaactgttggggacttgaggtggcagtcatggtatcttctgcttgtcagcattcgttctgatccacatgccagtgtatgcctttatgatatggcccccgcacagcattttctcttgaagcttcctgtctccgtagtcgcagctgaaagagagtggaacgccttgatttgtaggatttcttgtcatgctggttaaagatatggtccgagtctctgtcattgccagcttctttttcttcttctgcgtaatgcgtagtgagtggatggcctgcgttttaggcacgtcatcaaaaccaattatctgctggaaagttggtactctcttgccaccatattgcagtgatttagcaactagaagtcttgattggcatgttgacacacaaattcctactatgtttgatgtcttgtatcatgtcggagcaccaattcctgctgtgtttgtgatgtaataaggccaattccaaccagcgacgtgagaccaatcgtccaatctgcatggatccagtcgatgatacttttttgaattgtttgataagttcgtcaaatcctcaaaaacaagtacacaagctttgtctatgaaatacccttatattcttttgg

SEQ ID NO: 69865 - DNA, 2115 bp, Zea Mays
gcgccaacgccaagtcgaggcacgcggccagtggtgccctcgtcctcgaatcgtcaatgagcaccggcgccgcgcccctcctccactctacccgcacagcgcccctcgcccccacaccccaacccaaccatccgctccttgtcgccttccgacgctgagtttgctggtgtcgatttacgccggcggatgctcgatctggtagctgcatgtgccgacctactcgtcgaatccgttatctaacgtaatggatgggcaaggcacaaagcacaggattttgatggtgtccgactttttctttccaaactttggtggggtggaaagccatatctactacctgtcacaatgtctacttaagcttggccataaggttgttgtcatgacacatgcatatggaaacagatctggagtacgatatgtcacaaatggtttaaaggtctattatgtaccatggaggccattcctgatgcagaatacacttcctacactatccttgacgtttccaattgtaaggacaattattattcgagagaagatttctgtcgtgcatggacatcaagctttttcaacactgtgtcatgaagcattaatgcatgctaggacaatggggtacaaagttgtcttcacagatcactcactttatggttttgctgatgctggaagcattcacatgaataaggttctgcagtttactcttgcagatattgatcaggcaatatgtgtctcacatacaagcaaagagaacactgtcttgaggtctgggatatctccagagaaggttttcatggttcctaatgcagttgacactgcaatgtttactccctctcccaagcgcttaaactgtgatgaaatagttattgttgtggtcagtaggttagtataccgaaaaggcgccgaccttcttgttgaagtcattccagaagtgtgtcggctatttccaaaggttcactttattgttggtggtgatggtccaaaacgtgtgcgccttgaagaaatgagggagaagttctcccttcaggatagagttgagatgttaggagctgtacctcatgctcaggtgcgatcggttctgatatctggacatatatttttgaacaggttcttccagatgacatgatagtacttgcagaaccagctcctggagatatggtaagagctgtcaagaaagccatcgacatgctacctggaatagacccccagattatgcatcttcggatgaaagaactttatagttgggacgatgttgccaaaagaactgagattgtttatgatcgtgcaatggaatctccaacaacaaatttactagatcgccttccccggtatcttacttgtggatcttgggctggaaaactgttttgcctagttatgatcatcaattacctactatggcgccttttagaatttctacagcctgctgtaggtattgaagaagtcccagatataggcccactacatgctcatttaggttcaaggaatgatgaggctcaagagaagtgaaacttaaacctttgtcagttttgaaactgttggggacttgaggtggcagtcatggtatcttctgcttgtcagcattcgttctgatccacatgccagtgtatgcctttatgatatggcccccgcacagcattttctcttgaagcttcctgtctccgtagtcgcagctgaaagagagtggaacgccttgatttgtaggatttcttgtcatgctggttaaagatatggtccgagtctctgtcattgccagcttctttttcttcttctgcgtaatgcgtagtgagtggatggcctgcgttttaggcacgtcatcaaaaccaattatctgctggaaagttggtactctcttgccaccatattgcagtgatttagcaactagaagtcttgattggcatgttgacacacaaattcctactatgtttgatgtcttgtatcatgtcggagcaccaattcctgctgtgtttgtgatgtaataaggccaattccaaccagcgacgtgagaccaatcgtccaatctgcatggatccagtcgatgatacttttttgaattgtttgataagttcgtcaaatcctcaaaaacaagtacacaagctttgtctatgaaatacccttatattcttttgg

SEQ ID NO: 69866 - DNA, 1846 bp, Zea Mays
gcgccaacgccaagtcgaggcacgcggccagtggtgccctcgtcctcgaatcgtcaatgagcaccggcgccgcgcccctcctccactctacccgcacagcgcccctcgcccccacaccccaacccaaccatccgctccttgtcgccttccgacgctgagtttgctggtgtcgatttacgccggcggatgctcgatctggtagctgcatgtgccgacctactcgtcgaatccgatctggagtacgatatgtcacaaatggtttaaaggtctattatgtaccatggaggccattcctgatgcagaatacacttcctacactatccttgacgtttccaattatattgatcaggcaatatgtgtctcacatacaagcaaagagaacactgtcttgaggtctgggatatctccagagaaggttttcatggttcctaatgcagttgacactgcaatgtttactccctctcccaagcgcttaaactgtgatgaaatagttattgttgtggtcagtaggttagtataccgaaaaggcgccgaccttcttgttgaagtcattccagaagtgtgtcggctatttccaaaggttcactttattgttggtggtgatggtccaaaacgtgtgcgccttgaagaaatgagggagaagttctcccttcaggatagagttgagatgttaggagctgtacctcatgctcaggtgcgatcggttctgatatctggacatatatttttgaacagttcactcacagaggcattttgcatagccattctagaagcagctagctgtggactgttgacagtgagcactagagtcggtggtgtccctgaggttcttccagatgacatgatagtacttgcagaaccagctcctggagatatggtaagagctgtcaagaaagccatcgacatgctacctggaatagacccccagattatgcatcttcggatgaaagaactttatagttgggacgatgttgccaaaagaactgagattgtttatgatcgtgcaatggaatctccaacaacaaatttactagatcgccttccccggtatcttacttgtggatcttgggctggaaaactgttttgcctagttatgatcatcaattacctactatggcgccttttagaatttctacagcctgctgtaggtattgaagaagtcccagatataggcccactacatgctcatttaggttcaaggaatgatgaggctcaagagaagtgaaacttaaacctttgtcagttttgaaactgttggggacttgaggtggcagtcatggtatcttctgcttgtcagcattcgttctgatccacatgccagtgtatgcctttatgatatggcccccgcacagcattttctcttgaagcttcctgtctccgtagtcgcagctgaaagagagtggaacgccttgatttgtaggatttcttgtcatgctggttaaagatatggtccgagtctctgtcattgccagcttctttttcttcttctgcgtaatgcgtagtgagtggatggcctgcgttttaggcacgtcatcaaaaccaattatctgctggaaagttggtactctcttgccaccatattgcagtgatttagcaactagaagtcttgattggcatgttgacacacaaattcctactatgtttgatgtcttgtatcatgtcggagcaccaattcctgctgtgtttgtgatgtaataaggccaattccaaccagcgacgtgagaccaatcgtccaatctgcatggatccagtcgatgatacttttttgaattgtttgataagttcgtcaaatcctcaaaaacaagtacacaagctttgtctatgaaatacccttatattcttttgg

SEQ ID NO: 69867 - DNA, 1979 bp, Zea Mays
gcgccaacgccaagtcgaggcacgcggccagtggtgccctcgtcctcgaatcgtcaatgagcaccggcgccgcgcccctcctccactctacccgcacagcgcccctcgcccccacaccccaacccaaccatccgctccttgtcgccttccgacgctgagtttgctggtgtcgatttacgccggcggatgctcgatctggtagctgcatgtgccgacctactcgtcgaatccgttatctaacgtaatggatgggcaaggcacaaagcacaggattttgatggtgtccgactttttctttccaaactttggtggggtggaaagccatatctactacctgtcacaatgtctacttaagcttggccataaggttgttgtcatgacacatgcatatggaaacagatctggagtacgatatgtcacaaatggtttaaaggtctattatgtaccatggaggccattcctgatgcagaatacacttcctacactatccttgacgtttccaattgtaaggacaattattattcgagagaagatttctgtcgtgcatggacatcaagctttttcaacactgtgtcatgaagcattaatgcatgctaggacaatgggtttactcttgcagatattgatcaggcaatatgtgtctcacatacaagcaaagagaacactgtcttgaggttagtataccgaaaaggcgccgaccttcttgttgaagtcattccagaagtgtgtcggctatttccaaaggttcactttattgttggtggtgatggtccaaaacgtgtgcgccttgaagaaatgagggagaagttctcccttcaggatagagttgagatgttaggagctgtacctcatgctcaggtgcgatcggttctgatatctggacatatatttttgaacagttcactcacagaggcattttgcatagccattctagaagcagctagctgtggactgttgacagtgagcactagagtcggtggtgtccctgagaaccagctcctggagatatggtaagagctgtcaagaaagccatcgacatgctacctggaatagacccccagattatgcatcttcggatgaaagaactttatagttgggacgatgttgccaaaagaactgagattgtttatgatcgtgcaatggaatctccaacaacaaatttactagatcgccttccccggtatcttacttgtggatcttgggctggaaaactgttttgcctagttatgatcatcaattacctactatggcgccttttagaatttctacagcctgctgtaggtattgaagaagtcccagatataggcccactacatgctcatttaggttcaaggaatgatgaggctcaagagaagtgaaacttaaacctttgtcagttttgaaactgttggggacttgaggtggcagtcatggtatcttctgcttgtcagcattcgttctgatccacatgccagtgtatgcctttatgatatggcccccgcacagcattttctcttgaagcttcctgtctccgtagtcgcagctgaaagagagtggaacgccttgatttgtaggatttcttgtcatgctggttaaagatatggtccgagtctctgtcattgccagcttctttttcttcttctgcgtaatgcgtagtgagtggatggcctgcgttttaggcacgtcatcaaaaccaattatctgctggaaagttggtactctcttgccaccatattgcagtgatttagcaactagaagtcttgattggcatgttgacacacaaattcctactatgtttgatgtcttgtatcatgtcggagcaccaattcctgctgtgtttgtgatgtaataaggccaattccaaccagcgacgtgagaccaatcgtccaatctgcatggatccagtcgatgatacttttttgaattgtttgataagttcgtcaaatcctcaaaaacaagtacacaagctttgtctatgaaatacccttatattcttttgg

SEQ ID NO: 69868 - DNA, 2013 bp, Zea Mays
gtcgtggccccgccgtcccgtgcgccaacgccaagtcgaggcacgcggccagtggtgccctcgtcctcgaatcgtcaatgagcaccggcgccgcgcccctcctccactctacccgcacagcgcccctcgcccccacaccccaacccaaccatccgctccttgtcgccttccgacgctgagtttgctggtgtcgatttacgccggcggatgctcgatctggtagctgcatgtgccgacctactcgtcgaatccggttgttgtcatgacacatgcatatggaaacagatctggagtacgatatgtcacaaatggtttaaaggtctattatgtaccatggaggccattcctgatgcagaatacacttcctacactatccttgacgtttccaattgtaaggacaattattattcgagagaagatttctgtcgtgcatggacatcaagctttttcaacactgtgtcatgaagcattaatgcatgctaggacaatgggtttactcttgcagatattgatcaggcaatatgtgtctcacatacaagcaaagagaacactgtcttgaggtctgggatatctccagagaaggttttcatggttcctaatgcagttgacactgcaatgtttactccctctcccaagcgcttaaactgtgatgaaatagttattgttgtggtcagtaggttagtataccgaaaaggcgccgaccttcttgttgaagtcattccagaagtgtgtcggctatttccaaaggttcactttattgttggtggtgatggtccaaaacgtgtgcgccttgaagaaatgagggagaagttctcccttcaggatagagttgagatgttaggagctgtacctcatgctcaggtgcgatcggttctgatatctggacatatatttttgaacagttcactcacagaggcattttgcatagccattctagaagcagctagctgtggactgttgacagtgagcactagagtcggtggtgtccctgaggttcttccagatgacatgatagtacttgcagaaccagctcctggagatatggtaagagctgtcaagaaagccatcgacatgctacctggaatagacccccagattatgcatcttcggatgaaagaactttatagttgggacgatgttgccaaaagaactgagattgtttatgatcgtgcaatggaatctccaacaacaaatttactagatcgccttccccggtatcttacttgtggatcttgggctggaaaactgttttgcctagttatgatcatcaattacctactatggcgccttttagaatttctacagcctgctgtaggtattgaagaagtcccagatataggcccactacatgctcatttaggttcaaggaatgatgaggctcaagagaagtgaaacttaaacctttgtcagttttgaaactgttggggacttgaggtggcagtcatggtatcttctgcttgtcagcattcgttctgatccacatgccagtgtatgcctttatgatatggcccccgcacagcattttctcttgaagcttcctgtctccgtagtcgcagctgaaagagagtggaacgccttgatttgtaggatttcttgtcatgctggttaaagatatggtccgagtctctgtcattgccagcttctttttcttcttctgcgtaatgcgtagtgagtggatggcctgcgttttaggcacgtcatcaaaaccaattatctgctggaaagttggtactctcttgccaccatattgcagtgatttagcaactagaagtcttgattggcatgttgacacacaaattcctactatgtttgatgtcttgtatcatgtcggagcaccaattcctgctgtgtttgtgatgtaataaggccaattccaaccagcgacgtgagaccaatcgtccaatctgcatggatccagtcgatgatacttttttgaattgtttgataagttcgtcaaatcctcaaaaacaagtacacaagctttgtctatgaaatacccttatattcttttgg

SEQ ID NO: 69869 - DNA, 2146 bp, Zea Mays
gtcagctttctcctcgtggtcgtggtcgtggccccgccgtcccgtgcgccaacgccaagtcgaggcacgcggccagtggtgccctcgtcctcgaatcgtcaatgagcaccggcgccgcgcccctcctccactctacccgcacagcgcccctcgcccccacaccccaacccaaccatccgctccttgtcgccttccgacgctgagtttgctggtgtcgatttacgccggcggatgctcgatctggtagctgcatgtgccgacctactcgtcgaatccgttatctaacgtaatggatgggcaaggcacaaagcacaggattttgatggtgtccgactttttctttccaaactttggtggggtggaaagccatatctactacctgtcacaatgtctacttaagcttggccataaggttgttgtcatgacacatgcatatggaaacagatctggagtacgatatgtcacaaatggtttaaaggtctattatgtaccatggaggccattcctgatgcagaatacacttcctacactatccttgacgtttccaattgtaaggacaattattattcgagagaagatttctgtcgtgcatggacatcaagctttttcaacactgtgtcatgaagcattaatgcatgctaggacaatgggtttactcttgcagatattgatcaggcaatatgtgtctcacatacaagcaaagagaacactgtcttgaggtctgggatatctccagagaaggttttcatggttcctaatgcagttgacactgcaatgtttactccctctcccaagcgcttaaactgtgatgaaatagttattgttgtggtcagtaggttagtataccgaaaaggcgccgaccttcttgttgaagtcattccagaagtgtgtcggctatttccaaaggttcactttattgttggtggtgatggtccaaaacgtgtgcgccttgaagaaatgagggagaagttctcccttcaggatagagttgagatgttaggagctgtacctcatgctcaggtgcgatcggttctgatatctggacatatatttttgaacagccattctagaagcagctagctgtggactgttgacagtgagcactagagtcggtggtgtccctgaggttcttccagatgacatgatagtacttgcagaaccagctcctggagatatggtaagagctgtcaagaaagccatcgacatgctacctggaatagacccccagattatgcatcttcggatgaaagaactttatagttgggacgatgttgccaaaagaactgagattgtttatgatcgtgcaatggaatctccaacaacaaatttactagatcgccttccccggtatcttacttgtggatcttgggctggaaaactgttttgcctagttatgatcatcaattacctactatggcgccttttagaatttctacagcctgctgtaggtattgaagaagtcccagatataggcccactacatgctcatttaggttcaaggaatgatgaggctcaagagaagtgaaacttaaacctttgtcagttttgaaactgttggggacttgaggtggcagtcatggtatcttctgcttgtcagcattcgttctgatccacatgccagtgtatgcctttatgatatggcccccgcacagcattttctcttgaagcttcctgtctccgtagtcgcagctgaaagagagtggaacgccttgatttgtaggatttcttgtcatgctggttaaagatatggtccgagtctctgtcattgccagcttctttttcttcttctgcgtaatgcgtagtgagtggatggcctgcgttttaggcacgtcatcaaaaccaattatctgctggaaagttggtactctcttgccaccatattgcagtgatttagcaactagaagtcttgattggcatgttgacacacaaattcctactatgtttgatgtcttgtatcatgtcggagcaccaattcctgctgtgtttgtgatgtaataaggccaattccaaccagcgacgtgagaccaatcgtccaatctgcatggatccagtcgatgatacttttttgaattgtttgataagttcgtcaaatcctcaaaaacaagtacacaagctttgtctatgaaatacccttatattcttttgg

SEQ ID NO: 69870 - DNA, 1200 bp, Zea Mays
actacttcctccaatctcccactcattactcagcttaggaaggtccagggcctccagctccgatccaccacgctacgctagctctatgccggactcctcctcctccgccggcacaggcggcatggccccctcgagctcggcggcggcgtccattgccgcgctcgcggccgccgcggcgtccggcgacggctcggacgactccggggcggccaacaacaacggcgcgctgccgctgccgctgccgccgccgcacggggtggaggacaacaacagtcccgcggagctggcgggcgcgggtggagcggtgcagcgccgacatgggcgtggagaagcggtacaaccggaggcacaaggtgtgcgacgcgcaccgcaaggcgtccgtcgtcctcctcgccggcctccgccagcgcttctgccagcaatgcagccggttccacgagctgtcgcacttcgacgacaccaagcgcagctgccgcctgcgcctggcggggcacaacgagcggcgccggaggaaccccgcggaggcgcaggaccagcacggcgggcggggcgacccggggagccaccacctccagatcagataaaaacctactacgtcagcatgctctctctcttctgtcatgcaggacgcacgcacctagcgtcgtcaccgatccatagtccgatatgtgtctcaagtgttgtgtgtgcgcgctctcgccgcctacccctgtcctgcagtgttgcgtagtatatggttctacgacctacacgtactgctgctactactgcgtgctaactttaatctgatggcagtccacagctagctagcacatcacctcctgtaagtaatgtgcttatctatatgtgcaccgaccggaaccggaggcgtgcgtacgctgatctgccacgaagcctactagtagttaaatgtaacgtaacctgcaggcaattaagcagggcgctgctatatatagcgtaattaattgtgcgtatgggtatggtggttcgattatcggatgtgtaatccctgtacgtggccgggcccgtgccaaacgtacggtgacctgtgcaggctctgtgtgtcgatgatgttgtactctgataatgatataatccattgtggtaatgtatgctatttaatatgtgtgcacactgtgtgtactgtgtgctcacacgtcattcacatgtgcatgttttatttttcgaagctgctcctgt

SEQ ID NO: 69871 - DNA, 1383 bp, Zea Mays
actacttcctccaatctcccactcattactcagcttaggaaggtccagggcctccagctccgatccaccacgctacgctagctctatgccggactcctcctcctccgccggcacaggcggcatggccccctcgagctcggcggcggcgtccattgccgcgctcgcggccgccgcggcgtccggcgacggctcggacgactccggggcggccaacaacaacggcgcgctgccgctgccgctgccgccgccgcacggggtggaggacaacaacagtcccgcggagctggcgggcgcgggtggcacctcccgggcggtggcgaggagggtcgcggcggccggcgcctccccggcggcggcggcgaggaggggcgccgccgtgaacgcccaggcggccggcggcgccgggccgagctgccaggtggagcggtgcagcgccgacatgggcgtggagaagcggtacaaccggaggcacaaggtgtgcgacgcgcaccgcaaggcgtccgtcgtcctcctcgccggcctccgccagcgcttctgccagcaatgcagccgctttttttcttgggtcatggatagcacggtgagctgctggattggatcctaagctagctaggttccacgagctgtcgcacttcgacgacaccaagcgcagctgccgcctgcgcctggcggggcacaacgagcggcgccggaggaaccccgcggaggcgcaggaccagcacggcgggcggggcgacccggggagccaccacctccagatcagataaaaacctactacgtcagcatgctctctctcttctgtcatgcaggacgcacgcacctagcgtcgtcaccgatccatagtccgatatgtgtctcaagtgttgtgtgtgcgcgctctcgccgcctacccctgtcctgcagtgttgcgtagtatatggttctacgacctacacgtactgctgctactactgcgtgctaactttaatctgatggcagtccacagctagctagcacatcacctcctgtaagtaatgtgcttatctatatgtgcaccgaccggaaccggaggcgtgcgtacgctgatctgccacgaagcctactagtagttaaatgtaacgtaacctgcaggcaattaagcagggcgctgctatatatagcgtaattaattgtgcgtatgggtatggtggttcgattatcggatgtgtaatccctgtacgtggccgggcccgtgccaaacgtacggtgacctgtgcaggctctgtgtgtcgatgatgttgtactctgataatgatataatccattgtggtaatgtatgctatttaatatgtgtgcacactgtgtgtactgtgtgctcacacgtcattcacatgtgcatgttttatttttcgaagctgctcctgt

SEQ ID NO: 69872 - DNA, 1029 bp, Zea Mays
gctgagggagggagggagaaacacagatgccccgcaatgtccgattggagcacaaaacattgaagcttctgaagtattggacctggcaatttgttattgttaggccagtatgttccattctgattattgcactccagcttcttgggctgtaccccagctgggtcagctggacgtttagtattatactgaacttttcagtctccatggccttatatgcattggttctcttctaccacttgtttgctaaagagctggcacctcacaagcctcttgcaaagttcttgtgcatcaaagggattgtcttcttctctttctggcagggttttgcgctcgatgttttaacccaagcaggcgtgatcaaatcccaccatttctggctggacgtggagcacatccaggaggcgatccagaacgtcctggtgatccttgagatggtggtgttctccgtcatccagcagtacgcataccacgtcgccccctacagcggcgctgacagggccaagtttgagaagaagaacgaatgaaccaggtttccaaaaagaatgaaagaaggaaaaaaactctctgctttctggtcgctcggagatggagcaccagtatttcctcacggatggacgacatacacaagttcatcgagtctcgcgagtagcgtatttggtagcgagttgtcgcgctgtaaaattacactgtccttgcgcgctgaataattttgctggctttgtcgttttggttttttgaacgttgtcgccgaggctatatagccaggactgttcgtcttgtacgagcgcgcgctctctctctctctctctctctgcggacttggcgaatccttttatgaataaaagctactgtcctgttctacagaggccgcactgggctgatgccgatgaaggttgcgggttgcctgcaaccacctgctgttggggggatgatattgcaatctgcacgttcgtcctttctccgtggagtaatttttttttcaggaacgtgatctgatactacactagtactagtatgtgtttttgaggt

SEQ ID NO: 69873 - DNA, 1393 bp, Zea Mays
gcagtagattttggtgtgctgaatccaacaccagctcctcctctctttgttagatttgtcctgaggcaccatgtcattcatgtctccattcccggggatggatctaagtaaaatggatcccgggactctgaccctccttggggcagctggttgtgtaatgctgactatgcatttcactgtgcaattggtgtcacaacatctcttctattggaaaaaccccaaggagcagaaagccatacttattattgtgctgatggctccactatacgctatctcttccttcgtgggtcttcttgatatccagggtagcaagacatttttcacattcttagatgctgttaaagaatgctatgaggcactggtgattgctaagtttatggcattgatgtacagctacttgaatatatctatcagcaagaacatagtccctgatgaaatcaaagggagggtgcttcatcattccttccctgtttctcttttcctgccccgcaatgtccgattggagcacaaaacattgaagcttctgaagtattggacctggcaatttgttattgttaggccatctccatggccttatatgcattggttctcttctaccacttgtttgctaaagagctggcacctcacaagcctcttgcaaagttcttgtgcatcaaagggattgtcttcttctctttctggcagggttttgcgctcgatgttttaacccaagcaggcgtgatcaaatcccaccatttctggctggacgtggagcacatccaggaggcgatccagaacgtcctggtgatccttgagatggtggtgttctccgtcatccagcagtacgcataccacgtcgccccctacagcggcgctgacagggccaagtttgagaagaagaacgaatgaaccaggtttccaaaaagaatgaaagaaggaaaaaaactctctgctttctggtcgctcggagatggagcaccagtatttcctcacggatggacgacatacacaagttcatcgagtctcgcgagtagcgtatttggtagcgagttgtcgcgctgtaaaattacactgtccttgcgcgctgaataattttgctggctttgtcgttttggttttttgaacgttgtcgccgaggctatatagccaggactgttcgtcttgtacgagcgcgcgctctctctctctctctctctctgcggacttggcgaatccttttatgaataaaagctactgtcctgttctacagaggccgcactgggctgatgccgatgaaggttgcgggttgcctgcaaccacctgctgttggggggatgatattgcaatctgcacgttcgtcctttctccgtggagtaatttttttttcaggaacgtgatctgatactacactagtactagtatgtgtttttgaggt

SEQ ID NO: 69874 - DNA, 1342 bp, Zea Mays
gcagtagattttggtgtgctgaatccaacaccagctcctcctctctttgttagatttgtcctgaggcaccatgtcattcatgtctccattcccggggatggatctaagtaaaatggatcccgggactctgaccctccttggggcagctggttgtgtaatgctgactatgcatttcactgtgcaattggtgtcacaacatctcttctattggaaaaaccccaaggagcagaaagccatacttattattgtgctgatggctccactatacgctatctcttccttcgtgggtcttcttgatatccagggtagcaagacatttttcacattcttagatgctgttaaagaatgctatgaggcactggtgattgctaagtttatggcattgatgtacagctacttgaatatatctatcagcaagaacatagtccctgatgaaatcaaagggagggtgcttcatcattccttccctgtttctcttttcctgccccgcaatgtccgattggagcacaaaacattgaagcttctgaagtattggacctggcaatttgttattgttaggccaagctggcacctcacaagcctcttgcaaagttcttgtgcatcaaagggattgtcttcttctctttctggcagggttttgcgctcgatgttttaacccaagcaggcgtgatcaaatcccaccatttctggctggacgtggagcacatccaggaggcgatccagaacgtcctggtgatccttgagatggtggtgttctccgtcatccagcagtacgcataccacgtcgccccctacagcggcgctgacagggccaagtttgagaagaagaacgaatgaaccaggtttccaaaaagaatgaaagaaggaaaaaaactctctgctttctggtcgctcggagatggagcaccagtatttcctcacggatggacgacatacacaagttcatcgagtctcgcgagtagcgtatttggtagcgagttgtcgcgctgtaaaattacactgtccttgcgcgctgaataattttgctggctttgtcgttttggttttttgaacgttgtcgccgaggctatatagccaggactgttcgtcttgtacgagcgcgcgctctctctctctctctctctctgcggacttggcgaatccttttatgaataaaagctactgtcctgttctacagaggccgcactgggctgatgccgatgaaggttgcgggttgcctgcaaccacctgctgttggggggatgatattgcaatctgcacgttcgtcctttctccgtggagtaatttttttttcaggaacgtgatctgatactacactagtactagtatgtgtttttgaggt

SEQ ID NO: 69875 - DNA, 1481 bp, Zea Mays
ctccgtggcctggatgccttgctcgctctggggtttctcgacggggttttgatccagcgcgggcaccatgtcattcatgtctccattcccggggatggatctaagtaaaatggatcccgggactctgaccctccttggggcagctggttgtgtaatgctgactatgcatttcactgtgcaattggtgtcacaacatctcttctattggaaaaaccccaaggagcagaaagccatacttattattgtgctgatggctccactatacgctatctcttccttcgtgggtcttcttgatatccagggtagcaagacatttttcacattcttagatgctgttaaagaatgctatgaggcactggtgattgctaagtttatggcattgatgtacagctacttgaatatatctatcagcaagaacatagtccctgatgaaatcaaagggagggtgcttcatcattccttccctgtttctcttttcctgccccgcaatgtccgattggagcacaaaacattgaagcttctgaagtattggacctggcaatttgttattgttaggccagtatgttccattctgattattgcactccagcttcttgggctgtaccccagctgggtcagctggacgtttagtattatactgaacttttcagtctccatggccttatatgcattggttctcttctaccacttgtttgctaaagagctggcacctcacaagcctcttgcaaagttcttgtgcatcaaagggattgtcttcttctctttctggcagggttttgcgctcgatgttttaacccaagcaggcgtgatcaaatcccaccatttctggctggacgtggagcacatccaggaggcgatccagaacgtcctggtgatccttgagatggtggtgttctccgtcatccagcagtacgcataccacgtcgccccctacagcggcgctgacagggccaagtttgagaagaagaacgaatgaaccaggtttccaaaaagaatgaaagaaggaaaaaaactctctgctttctggtcgctcggagatggagcaccagtatttcctcacggatggacgacatacacaagttcatcgagtctcgcgagtagcgtatttggtagcgagttgtcgcgctgtaaaattacactgtccttgcgcgctgaataattttgctggctttgtcgttttggttttttgaacgttgtcgccgaggctatatagccaggactgttcgtcttgtacgagcgcgcgctctctctctctctctctctctgcggacttggcgaatccttttatgaataaaagctactgtcctgttctacagaggccgcactgggctgatgccgatgaaggttgcgggttgcctgcaaccacctgctgttggggggatgatattgcaatctgcacgttcgtcctttctccgtggagtaatttttttttcaggaacgtgatctgatactacactagtactagtatgtgtttttgaggt

SEQ ID NO: 69876 - DNA, 1699 bp, Zea Mays
actgcaattagtactgactctgccaagtcgccacgtgactaacccgcgaggtcgacgcggattttcttctttataccgcgggtaggcggactgggcggctgacggagccgcggagggaaccgagtggccccggcgacgcgaggccgaggcgagctaatctgacggtggcagtgacgactccaacgaccaggcgcggaggctgcactgctccagcgaagtgctcaggtcgctgtatcggtgcagaaatcttgctttattatcatcccatcggagcatggctgcaccatgtcattcatgtctccattcccggggatggatctaagtaaaatggatcccgggactctgaccctccttggggcagctggttgtgtaatgctgactatgcatttcactgtgcaattggtgtcacaacatctcttctattggaaaaaccccaaggagcagaaagccatacttattattgtgctgatggctccactatacgctatctcttccttcgtgggtcttcttgatatccagggtagcaagacatttttcacattcttagatgctgttaaagaatgctatgaggcactggtgattgctaagtttatggcattgatgtacagctacttgaatatatctatcagcaagaacatagtccctgatgaaatcaaagggagggtgcttcatcattccttccctgtttctcttttcctgccccgcaatgtccgattggagcacaaaacattgaagcttctgaagtattggacctggcaatttgttattgttaggccagtatgttccattctgattattgcactccagcttcttgggctgtaccccagctgggtcagctggacgtttagtattatactgaacttttcagtctccatggccttatatgcattggttctcttctaccacttgtttgctaaagagctggcacctcacaagcctcttgcaaagttcttgtgcatcaaagggattgtcttcttctctttctggcagggttttgcgctcgatgttttaacccaagcaggcgtgatcaaatcccaccatttctggctggacgtggagcacatccaggaggcgatccagaacgtcctggtgatccttgagatggtggtgttctccgtcatccagcagtacgcataccacgtcgccccctacagcggcgctgacagggccaagtttgagaagaagaacgaatgaaccaggtttccaaaaagaatgaaagaaggaaaaaaactctctgctttctggtcgctcggagatggagcaccagtatttcctcacggatggacgacatacacaagttcatcgagtctcgcgagtagcgtatttggtagcgagttgtcgcgctgtaaaattacactgtccttgcgcgctgaataattttgctggctttgtcgttttggttttttgaacgttgtcgccgaggctatatagccaggactgttcgtcttgtacgagcgcgcgctctctctctctctctctctctgcggacttggcgaatccttttatgaataaaagctactgtcctgttctacagaggccgcactgggctgatgccgatgaaggttgcgggttgcctgcaaccacctgctgttggggggatgatattgcaatctgcacgttcgtcctttctccgtggagtaatttttttttcaggaacgtgatctgatactacactagtactagtatgtgtttttgaggt

SEQ ID NO: 69877 - DNA, 1761 bp, Zea Mays
gctaccagaaaccagatcgcacgcctcagacttaagttaatcagagggtccacctgcagccagatcgtcactgcaattagtactgactctgccaagtcgccacgtgactaacccgcgaggtcgacgcggattttcttctttataccgcgggtaggcggactgggcggctgacggagccgcggagggaaccgagtggccccggcgacgcgaggccgaggcgagctaatctgacggtggcagtgacgactccaacgaccaggcgcggaggctgcactgctccagcgaaggtcgctgtatcggtgcagaaatcttgctttattatcatcccatcggagcatggctgcaccatgtcattcatgtctccattcccggggatggatctaagtaaaatggatcccgggactctgaccctccttggggcagctggttgtgtaatgctgactatgcatttcactgtgcaattggtgtcacaacatctcttctattggaaaaaccccaaggagcagaaagccatacttattattgtgctgatggctccactatacgctatctcttccttcgtgggtcttcttgatatccagggtagcaagacatttttcacattcttagatgctgttaaagaatgctatgaggcactggtgattgctaagtttatggcattgatgtacagctacttgaatatatctatcagcaagaacatagtccctgatgaaatcaaagggagggtgcttcatcattccttccctgtttctcttttcctgccccgcaatgtccgattggagcacaaaacattgaagcttctgaagtattggacctggcaatttgttattgttaggccagtatgttccattctgattattgcactccagcttcttgggctgtaccccagctgggtcagctggacgtttagtattatactgaacttttcagtctccatggccttatatgcattggttctcttctaccacttgtttgctaaagagctggcacctcacaagcctcttgcaaagttcttgtgcatcaaagggattgtcttcttctctttctggcagggttttgcgctcgatgttttaacccaagcaggcgtgatcaaatcccaccatttctggctggacgtggagcacatccaggaggcgatccagaacgtcctggtgatccttgagatggtggtgttctccgtcatccagcagtacgcataccacgtcgccccctacagcggcgctgacagggccaagtttgagaagaagaacgaatgaaccaggtttccaaaaagaatgaaagaaggaaaaaaactctctgctttctggtcgctcggagatggagcaccagtatttcctcacggatggacgacatacacaagttcatcgagtctcgcgagtagcgtatttggtagcgagttgtcgcgctgtaaaattacactgtccttgcgcgctgaataattttgctggctttgtcgttttggttttttgaacgttgtcgccgaggctatatagccaggactgttcgtcttgtacgagcgcgcgctctctctctctctctctctctgcggacttggcgaatccttttatgaataaaagctactgtcctgttctacagaggccgcactgggctgatgccgatgaaggttgcgggttgcctgcaaccacctgctgttggggggatgatattgcaatctgcacgttcgtcctttctccgtggagtaatttttttttcaggaacgtgatctgatactacactagtactagtatgtgtttttgaggt

SEQ ID NO: 69878 - DNA, 2186 bp, Zea Mays
gacaaaacaagtcggatccgcaattttttaaacgattttattaaaacataaaatgaaaactatacttgtaggttcttctatagctgttttcctacaaccagacaaaaccttgggaaaattgggtgtttgcaatccatagttccttgtcacctttggattgtatatgatctcttagctgactttaagctctagtaggcaacttctaagttctgatgaatgatcatgcttccgtgtgacggagacagcatgcaaaataacctggagataataatgttgtgcatgaatcgtaccagtctaccacagacaacgtcgatgccgcacacgccctccatccgccagcatccccgtggcccttgcgccttggaacaaagatggatcggctggcccggggcgtggtccgcctggatcgagtccacggaattggaacggacccgcctgcttgcgagtcccggggcagcaacagcatctaaccggctgcttgcgttgcgagtcgacgcctggtcagcagcccgtgtcgtgtcaggcgtgccactgatgagcagcaatccttgactcatccggcggtacctgcagatctgcagggaatagataacgatgcagtagaacgtacgacagaaagaaaaaacaaaaacacacagctagcgagcgagcatgcaactcaaatgcttttcttctgaagtgagtattctttctttcatatggaaaactgcaactaccctaaccaacacatgatctgtttaaaaaagcacaggtacttagtagttattgatgatttatgggatactataaaatgtgcctttccagaaaataacctcagaagcatatttattgtaaccacacggattgagagtgttgccaggatctgctgcactcaccaggaatgcttgtacagaatgaaacccctcaatgaccatgactcaagaaggttactgtttagcagaacatttagccccaatcgcgattgtccttcaaaactcaaggaggtttcagctgaaattttgaagaaatgcggcggtctgccgcttgcaataattacagtagcaagtctattaaccaatctaccaactagtgaaaaggaggactgggagaagataaaagattcattagactctagtatgggatgagacaaattttaagcctcagttacaagaattttcctcatcaactcaagacatgtttcctgtatctaggtatatatccagaggactacataattgaaagggacgatttggttcgacgatgggtcgcagaaggtcttgtgagcaattctggtaagcaatatgcagaggatttgacaaagaattacttcaatgagcttttaaacagaagcatgattcaacctgaagagactgactataatggagaggtattgtcttgccgattgcatgatatgatgctcgatttgatcctcagcaagtgcacagaggacaattttatcagtggtatacaactatcagggcatgagaaagctgcctaacagcaaggtccgtcgactatcactcaacctgaatggtgcagaagctgtctcgatttcagctgttaacgtaattggaagcctatcacaaattcgatctcttgccttgtttggtcacactaattgtatgcctgcgtgtgcacatcttttgctagagttgaaatttcttcgagttcttgtcctcgaactccagaagttcaatggcaagcatgagcatgagaaagaaggcatcgacctgacaggcataagtcggctagttctgttgaggtatttgaaggtaggcaaggaccagtcgtgttaaattacccgcggagatccaagggttatgcatgccatctggagacgctggaaatgtggtgcggtttttttggtagtcttccatcagattttttttcatctaccagctctattgcatctcactgtcccatcatatcagtgcacttgatccagcatggtatttcaccaggattccgaggtggctcgctgagctccataacctctcctacttggaactttctgtaaccgaggtgatggaggaggatattggtatcctcgggaagctgccctcactcatgcacctccgttttcagatccaacaagcccctaaagaaaagatcatcatacatggcggcatgcgacttctgttcccaatctttgctaattttcagttcaagtgcaacggagaatgtccctgcagctcttgatttttgag

SEQ ID NO: 69879 - DNA, 1638 bp, Zea Mays
gagagaggctaagcaccacctgactcggctgaaaatctagcgcgaccggcttttaacacggcccggcccatcaaaatgaatgcactgtactagccggcgaggaccacgtgtacccgccaccgcgccgcgcggctccaccgttcggcggcgctcgggcacggcacgccgtaaaaccctagctcttgcgccccctcctctccaccgcgccggcgagccgtggagacgcggagctaaggatgccgcggaccactgagctggagagccccggctgcccgccgctccgcgccctcaccaccgacatcctcggccttgtcaaagtcgtcgaggcccacgcgaggccggcgggtgccgccaaggtcgtggagacgtggggcgcacccgacgcctcctgcgccatcgtcgctgcctccctcgccgatcgtgccaccgaccccgttttggctgtggcgaggatgaacggcgtggttgagttgctgaatcccctgaacggagatactttggctgctgtcaaggcagtgggaccagcaccaaatgatggtggcgctgaagcttaggaacgtttcttgcttgcactgagcaggggaaagcttctataaggtccatcacgaaagaaaatgcagcttcaggctcacatattgagccatctgctacatgggatgtgtgcggtggggccaatgtgcaattttgctcagttgatcatggtgaaaactatgtgatgtttggagggaaaggtatagaagtgagtttgtgggatattacatcttgtagtaagacatggtctgctaaatctccccgaacaaatagtcttggtatattcactcggccttggttcactgctgggaccttcttgtgcaaggatgatcatcgtaaaattgtagcctgcacaaatagtcatcaggtccgcttatatgatactgcattgcaaagaaggcctgccatctctgttgagtttaaggagtcaccaatcaaggcagttgctgctgatccgaatgggcatgatgtctatattggcacagggacaggggaccttgcttcctttgacatgagaactgggaaattgcttggatgctattttggcaaatgcagtggaagtattagatccattgttaggcatccagatctacctttgatagcatcttgcggactggatagctacttgcgtatttgggacacaaacacaagacagttgctatctgctgtctttctgaagcaacatcttacaactgtggtccttgattcacatttttctgttgaagagcctggagagatgaaatccaagcaactggagtcttcagtggagactgagactgaagtccgaaaagaaaagaagaaaaagagtaaggcaattacagaggatgagactgaggcacaaatccgaaaagaaaagaagagtagaacaattgaagaggaagaacaagctggattggtcgaccatagcgatattaatgatgaagtatatgccagaaaagaaaagaagaaaaagaagagtagaggtattgaagggggcaaggagcgagacagcgacggggaaatttgcagtcccaagagaagaaaatctggagaaagaagcaaatgcctgaagaagaggagcaagaaacagctggttgcctagtacaaatacaagatgctagaactgaa

SEQ ID NO: 69880 - DNA, 1870 bp, Zea Mays
gagagaggctaagcaccacctgactcggctgaaaatctagcgcgaccggcttttaacacggcccggcccatcaaaatgaatgcactgtactagccggcgaggaccacgtgtacccgccaccgcgccgcgcggctccaccgttcggcggcgctcgggcacggcacgccgtaaaaccctagctcttgcgccccctcctctccaccgcgccggcgagccgtggagacgcggagctaaggatgccgcggaccactgagctggagagccccggctgcccgccgctccgcgccctcaccaccgacatcctcggccttgtcaaagtcgtcgaggcccacgcgaggccggcgggtgccgccaaggtcgtggagacgtggggcgcacccgacgcctcctgcgccatcgtcgctgcctccctcgccgatcgtgccaccgaccccgttttggctgtggcgaggatgaacggcgtggttgagttgctgaatcccctgaacggagatactttggctgctgtcaaggcagtgggaccagcaccaaatgatggtggcgctgaaggaacgtttcttgcttgcactgagcaggggaaagcttctataaggtccatcacgaaagaaaatgcagcttcaggctcacatattgagccatctgctacatgggatgtgtgcggtggggccaatgtgcaattttgctcagttgatcatggtgaaaactatgtgatgtttggagggaaaggtatagaagtgagtttgtgggatattacatcttgtagtaagacatggtctgctaaatctccccgaacaaatagtcttggtatattcactcggccttggttcactgctgggaccttcttgtgcaaggatgatcatcgtaaaattgtagcctgcacaaatagtcatcaggtccgcttatatgatactgcattgcaaagaaggcctgccatctctgttgagtttaaggagtcaccaatcaaggcagttgctgctgatccgaatgggcatgatgtctatattggcacagggacaggggaccttgcttcctttgacatgagaactgggaaattgcttggatgctattttggcaaatgcagtggaagtattagatccattgttaggcatccagatctacctttgatagcatcttgcggactggatagctacttgcgtatttgggacacaaacacaagacagttgctatctgctgtctttctgaagcaacatcttacaactgtggtccttgattcacatttttctgttgaagagcctggagagatgaaatccaagcaactggagtcttcagtggagactgagactgaagtccgaaaagaaaagaagaaaaagagtaaggcaattacagaggatgagactgaggcacaaatccgaaaagaaaagaagagtagaacaattgaagaggaagaacaagctggattggtcgaccatagcgatattaatgatgaagtatatgccagaaaagaaaagaagaaaaagaagagtagaggtattgaagggggcaaggagcgagacagcgacggggaaatttgcagtcccaagagaagaaaatctggagaaagaagcaaatgcctgaagaagaggagcaagaaacagctggttgcctagtacaagtatcatttctcattacccgccttcttgattttgcagaattacacaattttgtgtggtagtttgttcggaattgtatcccttttgaaaccctgcaagggaagtgcatcattttcgtgtgcgcatttttctactctggtgtagctaaattttgagacatacacgctggagtagttacagccaaaacttgaaactaatttttgagatagacatgtgggactaaatttcgagatatacgcgtaggagtttctactataaaa

SEQ ID NO: 69881 - DNA, 1922 bp, Zea Mays
gagagaggctaagcaccacctgactcggctgaaaatctagcgcgaccggcttttaacacggcccggcccatcaaaatgaatgcactgtactagccggcgaggaccacgtgtacccgccaccgcgccgcgcggctccaccgttcggcggcgctcgggcacggcacgccgtaaaaccctagctcttgcgccccctcctctccaccgcgccggcgagccgtggagacgcggagctaaggatgccgcggaccactgagctggagagccccggctgcccgccgctccgcgccctcaccaccgacatcctcggccttgtcaaagtcgtcgaggcccacgcgaggccggcgggtgccgccaaggtcgtggagacgtggggcgcacccgacgcctcctgcgccatcgtcgctgcctccctcgccgatcgtgccaccgaccccgttttggctgtggcgaggatgaacggcgtggttgagttgctgaatcccctgaacggagatactttggctgctgtcaaggcagtgggaccagcaccaaatgatggtggcgctgaaggtgatcccctcactgcattgcaccttttcacaagacaggcttcggactcgatcttaggaacgtttcttgcttgcactgagcaggggaaagcttctataaggtccatcacgaaagaaaatgcagcttcaggctcacatattgagccatctgctacatgggatgtgtgcggtggggccaatgtgcaattttgctcagttgatcatggtgaaaactatgtgatgtttggagggtatagaagtgagtttgtgggatattacatcttgtagtaagacatggtctgctaaatctccccgaacaaatagtcttggtatattcactcggccttggttcactgctgggaccttcttgtgcaaggatgatcatcgtaaaattgtagcctgcacaaatagtcatcaggtccgcttatatgatactgcattgcaaagaaggcctgccatctctgttgagtttaaggagtcaccaatcaaggcagttgctgctgatccgaatgggcatgatgtctatattggcacagggacaggggaccttgcttcctttgacatgagaactgggaaattgcttggatgctattttggcaaatgcagtggaagtattagatccattgttaggcatccagatctacctttgatagcatcttgcggactggatagctacttgcgtatttgggacacaaacacaagacagttgctatctgctgtctttctgaagcaacatcttacaactgtggtccttgattcacatttttctgttgaagagcctggagagatgaaatccaagcaactggagtcttcagtggagactgagactgaagtccgaaaagaaaagaagaaaaagagtaaggcaattacagaggatgagactgaggcacaaatccgaaaagaaaagaagagtagaacaattgaagaggaagaacaagctggattggtcgaccatagcgatattaatgatgaagtatatgccagaaaagaaaagaagaaaaagaagagtagaggtattgaagggggcaaggagcgagacagcgacggggaaatttgcagtcccaagagaagaaaatctggagaaagaagcaaatgcctgaagaagaggagcaagaaacagctggttgcctagtacaagtatcatttctcattacccgccttcttgattttgcagaattacacaattttgtgtggtagtttgttcggaattgtatcccttttgaaaccctgcaagggaagtgcatcattttcgtgtgcgcatttttctactctggtgtagctaaattttgagacatacacgctggagtagttacagccaaaacttgaaactaatttttgagatagacatgtgggactaaatttcgagatatacgcgtaggagtttctactataaaa

SEQ ID NO: 69882 - DNA, 1922 bp, Zea Mays
gagagaggctaagcaccacctgactcggctgaaaatctagcgcgaccggcttttaacacggcccggcccatcaaaatgaatgcactgtactagccggcgaggaccacgtgtacccgccaccgcgccgcgcggctccaccgttcggcggcgctcgggcacggcacgccgtaaaaccctagctcttgcgccccctcctctccaccgcgccggcgagccgtggagacgcggagctaaggatgccgcggaccactgagctggagagccccggctgcccgccgctccgcgccctcaccaccgacatcctcggccttgtcaaagtcgtcgaggcccacgcgaggccggcgggtgccgccaaggtcgtggagacgtggggcgcacccgacgcctcctgcgccatcgtcgctgcctccctcgccgatcgtgccaccgaccccgttttggctgtggcgaggatgaacggcgtggttgagttgctgaatcccctgaacggagatactttggctgctgtcaaggcagtgggaccagcaccaaatgatggtggcgctgaaggtgatcccctcactgcattgcaccttttcacaagacaggcttcggactcgatgaacgtttcttgcttgcactgagcaggggaaagcttctataaggtccatcacgaaagaaaatgcagcttcaggctcacatattgagccatctgctacatgggatgtgtgcggtggggccaatgtgcaattttgctcagttgatcatggtgaaaactatgtgatgtttggagggaaaggtatagaagtgagtttgtgggatattacatcttgtagtaagacatggtctgctaaatctccccgaacaaatagtcttggtatattcactcggccttggttcactgctgggaccttcttgtgcaaggatgatcatcgtaaaattgtagcctgcacaaatagtcatcaggtccgcttatatgatactgcattgcaaagaaggcctgccatctctgttgagtttaaggagtcaccaatcaaggcagttgctgctgatccgaatgggcatgatgtctatattggcacagggacaggggaccttgcttcctttgacatgagaactgggaaattgcttggatgctattttggcaaatgcagtggaagtattagatccattgttaggcatccagatctacctttgatagcatcttgcggactggatagctacttgcgtatttgggacacaaacacaagacagttgctatctgctgtctttctgaagcaacatcttacaactgtggtccttgattcacatttttctgttgaagagcctggagagatgaaatccaagcaactggagtcttcagtggagactgagactgaagtccgaaaagaaaagaagaaaaagagtaaggcaattacagaggatgagactgaggcacaaatccgaaaagaaaagaagagtagaacaattgaagaggaagaacaagctggattggtcgaccatagcgatattaatgatgaagtatatgccagaaaagaaaagaagaaaaagaagagtagaggtattgaagggggcaaggagcgagacagcgacggggaaatttgcagtcccaagagaagaaaatctggagaaagaagcaaatgcctgaagaagaggagcaagaaacagctggttgcctagtacaagtatcatttctcattacccgccttcttgattttgcagaattacacaattttgtgtggtagtttgttcggaattgtatcccttttgaaaccctgcaagggaagtgcatcattttcgtgtgcgcatttttctactctggtgtagctaaattttgagacatacacgctggagtagttacagccaaaacttgaaactaatttttgagatagacatgtgggactaaatttcgagatatacgcgtaggagtttctactataaaa

SEQ ID NO: 69883 - DNA, 1785 bp, Zea Mays
gagagaggctaagcaccacctgactcggctgaaaatctagcgcgaccggcttttaacacggcccggcccatcaaaatgaatgcactgtactagccggcgaggaccacgtgtacccgccaccgcgccgcgcggctccaccgttcggcggcgctcgggcacggcacgccgtaaaaccctagctcttgcgccccctcctctccaccgcgccggcgagccgtggagacgcggagctaaggatgccgcggaccactgagctggagagccccggctgcccgccgctccgcgccctcaccaccgacatcctcggccttgtcaaagtcgtcgaggcccacgcgaggccggcgggtgccgccaaggtcgtggagacgtggggcgcacccgacgcctcctgcgccatcgtcgctgcctccctcgccgatcgtgccaccgaccccgttttggctgtggcgaggatgaacggcgtggttgagttgctgaatcccctgaacggagatactttggctgctgtcaaggcagtgggaccagcaccaaatgatggtggcgctgaagcttaggaacgtttcttgcttgcactgagcaggggaaagcttctataaggtccatcacgaaagaaaatgcagcttcaggctcacatattgagccatctgctacatgggatgtgtgcggtggggccaatgtgcaattttgctcagttgatcatggtgaaaactatgtgatgtttggagggaaaggtatagaagtgagtttgtgggatattacatcttgtagtaagacatggtctgctaaatctccccgaacaaatagtcttggtatattcactcggccttggttcactgctgggaccttcttgtgcaaggatgatcatcgtaaaattgtagcctgcacaaatagtcatcaggtccgcttatatgatactgcattgcaaagaaggcctgccatctctgttgagtttaaggagtcaccaatcaaggcagttgctgctgatccgaatgggcatgatgtctatattggcacagggacaggggaccttgcttcctttgacatgagaactggactggatagctacttgcgtatttgggacacaaacacaagacagttgctatctgctgtctttctgaagcaacatcttacaactgtggtccttgattcacatttttctgttgaagagcctggagagatgaaatccaagcaactggagtcttcagtggagactgagactgaagtccgaaaagaaaagaagaaaaagagtaaggcaattacagaggatgagactgaggcacaaatccgaaaagaaaagaagagtagaacaattgaagaggaagaacaagctggattggtcgaccatagcgatattaatgatgaagtatatgccagaaaagaaaagaagaaaaagaagagtagaggtattgaagggggcaaggagcgagacagcgacggggaaatttgcagtcccaagagaagaaaatctggagaaagaagcaaatgcctgaagaagaggagcaagaaacagctggttgcctagtacaagtatcatttctcattacccgccttcttgattttgcagaattacacaattttgtgtggtagtttgttcggaattgtatcccttttgaaaccctgcaagggaagtgcatcattttcgtgtgcgcatttttctactctggtgtagctaaattttgagacatacacgctggagtagttacagccaaaacttgaaactaatttttgagatagacatgtgggactaaatttcgagatatacgcgtaggagtttctactataaaa

SEQ ID NO: 69884 - DNA, 1100 bp, Zea Mays
cacactgttgtggactctttcctagggcgccagtatactaggcgcaacaagaagtgaaagatgcatttagttcatcaggaccagaaacagggaaaggcaagacaaagttatcaggcaagcgtgtcaagcatggttaccatctggtgaagggcaaatctaatcatccaatggaggattatctagtggcagagtaccggcaagttggtgaacatgatttgggattgtttgctatattcgatggtcacctgggccacactgttccagactttttgagctcccatcttttcaataacatcttgagtgagccagaattcttgagtgatccagaaactgctatccgaaacgcataccaacttacggatcagaagatattggaaaacgcagcagagttgggaagaggtggctccacagctgttactgccatcttaataggaagtgacaagttcgtgaaactagttgttgcaaatgttggggattcacgggcagttattagcaagaacggtgtagcgaagcagctttcagttgaccatgaaccaaacatggagcgacaaacgatcgagcagaagggtggctttgtatcaaacctaccgggtgatgtgccacgtgttgatgggcagctggcagttgcaagggcatttggagaccggagcttgaagaagcacctcagctctgatccatatgtggtcgagcaaactatcgatgaaaatactgagtttttaattctagcaagtgatggcttgtggaaggtgatgtccaaccaggaggctgtcgacgagatcaaggattgcaaggacgcgcaggcagctgccaagcacctgacggagcaggccgtgaatcggaagagcaaagacgacatttcagttatcgtagtcaagttcatgtgctagcacatcgtcaggttaaatggtctcccgattgtataccgtgttaaattatcttttaagtcttgtgctcgctggtgtcggacattttgtttaccttctttggttttgggaccccacaaagagggtcaaggcttgtaacatattgttgtttgtttaaggctccaaataaagcatggtaccaccatagtaatttcagttcgtgttcttacattccag

SEQ ID NO: 69885 - DNA, 1216 bp, Zea Mays
gaaacacggaaagggaaggctgaaaaaacacgacgctttttctccatggtttggtgtgcatttcctctctcctgtccccacttgacacatccatgtcccaatctcccccaacctcaggtcaaccgccgctacccaagatccagtctccgttctccctctcctctcgcttcatacacaccagggcggcagcggcagcggcaggggcccgccatcaccaacccacctcccttcaattataaacctataaaatatcatcattgacccaagctgaggcgactagtgggtattgatttttggtggggcagatcaaggagggggggagggggttaacttccaaggaaccagttcattgctggttctgctagcaggaggttggatttcagaggcagaagctttcagccaggcgggctcagggcgcgggcacatcaatggctggcaaggaaatcctccacaaggtgaaagatgcatttagttcatcaggaccagaaacagggaaaggcaagacaaagttatcaggcaagcgtgtcaagcatggttaccatctggtgaagggcaaatctaatcatccaatggaggattatctagtggcagagtaccggcaagttggtgaacatgatttgggattgtttgctatattcgatggtcacctgggccacactgttccagactttttgagctcccatcttttcaataacatcttgagtgaggtgatgtgccacgtgttgatgggcagctggcagttgcaagggcatttggagaccggagcttgaagaagcacctcagctctgatccatatgtggtcgagcaaactatcgatgaaaatactgagtttttaattctagcaagtgatggcttgtggaaggtgatgtccaaccaggaggctgtcgacgagatcaaggattgcaaggacgcgcaggcagctgccaagcacctgacggagcaggccgtgaatcggaagagcaaagacgacatttcagttatcgtagtcaagttcatgtgctagcacatcgtcaggttaaatggtctcccgattgtataccgtgttaaattatcttttaagtcttgtgctcgctggtgtcggacattttgtttaccttctttggttttgggaccccacaaagagggtcaaggcttgtaacatattgttgtttgtttaaggctccaaataaagcatggtaccaccatagtaatttcagttcgtgttcttacattccag

SEQ ID NO: 69886 - DNA, 1524 bp, Zea Mays
ctagcttgtcgatctctcctgtgaaacacggaaagggaaggctgaaaaaacacgacgctttttctccatggtttggtgtgcatttcctctctcctgtccccacttgacacatccatgtcccaatctcccccaacctcaggtcaaccgccgctacccaagatccagtctccgttctccctctcctctcgcttcatacacaccagggcggcagcggcagcggcaggggcccgccatcaccaacccacctcccttcaattataaacctataaaatatcatcattgacccaagctgaggcgactagtgggtattgatttttggtggggcagatcaaggagggggggagggggttaacttccaaggaaccagttcattgctggttctgctagcaggaggttggatttcagaggcagaagctttcagccaggcgggctcagggcgcgggcacatcaatggctggcaaggaaatcctccacaaggtgaaagatgcatttagttcatcaggaccagaaacagggaaaggcaagacaaagttatcaggcaagcgtgtcaagcatggttaccatctggtgaagggcaaatctaatcatccaatggaggattatctagtggcagagtaccggcaagttggtgaacatgatttgggattgtttgctatattcgatggtcacctgggccacactgttccagactttttgagctcccatcttttcaataacatcttgagtgagccagaattcttgagtgatccagaaactgctatccgaaacgcataccaacttacggatcagaagatattggaaaacgcagcagagttgggaagaggtggctccacagctgttactgccatcttaataggaagtgacaagttcgtgaaactagttgttgcaaatgttggggattcacgggcagttattagcaagaacggtgtagcgaagcagctttcagttgaccatgaaccaaacatggagcgacaaacgatcgagcagaagggtggctttgtatcaaacctaccgggtgatgtgccacgtgttgatgggcagctggcagttgcaagggcatttggagaccggagcttgaagaagcacctcagctctgatccatatgtggtcgagcaaactatcgatgaaaatactgagtttttaattctagcaagtgatggcttgtggaaggtgatgtccaaccaggaggctgtcgacgagatcaaggattgcaaggacgcgcaggcagctgccaagcacctgacggagcaggccgtgaatcggaagagcaaagacgacatttcagttatcgtagtcaagttcatgtgctagcacatcgtcaggttaaatggtctcccgattgtataccgtgttaaattatcttttaagtcttgtgctcgctggtgtcggacattttgtttaccttctttggttttgggaccccacaaagagggtcaaggcttgtaacatattgttgtttgtttaaggctccaaataaagcatggtaccaccatagtaatttcagttcgtgttcttacattccag

SEQ ID NO: 69887 - DNA, 2709 bp, Zea Mays
cacagactcgcccgggaaatagccgttgcgcgcagggagcgtgcgtcgtgcgcccaacggtccaccagggcaactcgccaactcctctacgaagcctggcacagggttcaaacctcccgaccgttggagacccctgcccctatgcggttcctcgccgcttcagggggcagacgcataatttgattgagctagcgagcgagagccgatggcgctggacacaggaacggtggcggcgggggcgatcgacgaggcgtacgagttctctgcgcccaggttcttcgatttcatcaccgaggaaacggaggaggccgtacgcgccgccgagagctggttcgaggccgcccgcagccacgccccgtcgccgttcaaccccaggataaaggaatcgagggcggaagccaaggtcgctgtcctctgcgatttcgcggaagccgaggagccggctccagaggcggtgcccgtggaggtggcagcaggaagcgtctcggtacacggagcagatgctattgatggtgctcaatgtcctgaggcaatatcggaatcgccgccggcttcacatccggctcaagaagagaaggataaatcgccccaatcgttcgagttcctctcggcgacagacctatccgtaaaatcagatggtggtgctgccagcacgcctaagatgcagacgcgtcctccttctccttctaccaaaattgcacctccaatttcgacatgtgacagctcttcagtgaatactggtgcgcgcacgccaaagacgcaggcgaacatgtgcagagcagctactatggctgcttcgacgaatgccaaggggagcgtgatcaagggtggttgtgatttggttgggactggaaaggcagccactgctggcgctgaaattgcacaagcgaaccaagcggtgaagaggcagaagcttgatgatggaagagccagacagatactcaatgttaagactaaggtcctgcctcataaacggagaactgatttagctgtaagcaatgaagtgaggaggtcccgtgaggatatgtgttctctgaaggaagcaacaacatatgtatcaactgcagaattggttaagaagtttgaatcagggaccagaaagctgagcatcactcacagcagatctcgttctcgtgacgatgctgcattacagggaaggcctaagcttgtgttaactagacctaaggaacctgagttccagacttcccaaagaatccgagcagtaaaagtaaagagctctgcagagatagaggaggaaatgttggcaaagatacccaagttcagggcacggccattcaacaaaaaaattgctgaagccccttcgttccctccacttccaaggaaacccccacagatttctgaattcagtgaatttcatcttaaaacaatggagagagcaagtcgatatgcggacacctgttcggaagtatcttgtgcagatactatccggagtcgaaataagccactgaaatcgacacaacgaaagccaccgcaacttcatacagcaaatagagctaggccaccaagtgtgaaaagttctcaggaacttgaactggaggagctggagaaggcccccaagttcagggccaagccactaaacaaaaagattcttgagagtaagggagacattggagtgtttgtccatcctaagtctcaggtcacagctcccaaagaattccgtttttgtaccgatgttcgcttgggtcctccatcagttgctgacttatttgacaagctctctcttcactctgaatgttcttcaaacagtaacaggcaaggtgtgcctagatgcaccataccaaaccctttcagtctacaaacagaggaaagaggtcaattaaaagagaggcagctagaagcacaactcttacaaaagaaggtggaggaggaaaaggccagggttcacaaagctaacccttacccatacaccacagactatccgatggtgccgccgaagcctgaacctaagccctgtacgagaccagaaggctttcaactagagagtttggtgagacacgaattagagcagcaaaggctgatggaagaaaggcagagaatggagagagaagaagctcagaggagaatcgtcaaagctcaacctgtactgaaagaggaccctatcccacttccggagaaagagcggaaacctctcactgaagttcaacaatttgtgttgcatgttgatgagagggctgtgcatagatcagaatttgatagcatgataaaagagaaagaaaagacttacaaaaggttgagagaggagaacgaattcgcgcaaaagattgaggaggagaaggcgctgaagcagctgaggagaaccatggtgccacatgcccggcaggtccccaagtttgacaaaccattccgaccacagaaatcgacgaagcaggtgacaagaccgaagtcgccacagcttcaggtggatgagcgaggggcgaggaggcatgctttaatcagatgaccaccatcctcgcctcaagatctctgcgacgttgtttatgtatctgttcgtcgggctactaagattcttttttcgctgaccaatttgtagagcaggccagcaacccattgccgctgctgtgtgtgtaggttggtgatgttttatgattatctcaatgatgacactttttaatcggatataccttgtgtattctcggacacgtatggaacttagcgctccacactcgcatgtttccccgcacacctcgt

SEQ ID NO: 69888 - DNA, 1966 bp, Zea Mays
catctttgctgcaagcctgcaacaggtcttgatgaccacggcgttgtggcagacatttgttggaactcccttttggatggcacctgaggttattcaaaattctgaagggtacaatgagaaggcagatatctggtctttaggtatcactgccattgaaatggctaaaggtgaaccccctctggcagatattcatcccatgagagttcttttcatcatacctcgtgaaaatcctccgcagcttgatgagcatttctcgaaaccaatgaaagagtttgtctcactatgtttaaagaagaatccagcagagaggcctagtgccaaggagcttcttaagcatcgtttcataaaaaatgcccgaaagactccaaagcttttggagcgaataagagagcggccaaaatttgcagcaaaaagcatggatgccacacaaaatgggcaaacacatgatgaagaggaggattttggtacaggcactatcaaggtcaataggacaaaagatacagctccatctttgagtcaaggaacagttaggaaatctgcagtcagagatttttctgatagatcagagggcacaggaactgtccgagttgtttcaaggcctcctcaaatcgcctccacgaaggatggtagatctgatatgcctcaaagtccaaaagcaccaatacgcacagctgatcgagaaaatcagtggaggtcatcagggactggatctgaagaatctctctctctcagagatactcagagcggacgagggagagtagaaagttctactgatgacaatgatcactctgtaagtgggtcaggaactgttgtgttacgctctccaagagcatctcagttgtactcaacagctagcaaccacagtgccaagcctcccagcagattctcctcttatgaagatatgtctaatagtgggacagttgttcggacccaaaatgaagacccagaaactccacgatcttcaaggtcaaggctggggatccaagaaaaaacatcaaatgctcctcttgaggatagtgccattaaccttgcagaggcaaaggctgctttgcaggctgggttaagaaagggaaatgctcgagaaagaccttttatcaacaggcatgaaaagggatcacatgagcatagatcttctggagtaaatagtcaagaggttcaaagcgaggatgtggacacgcagaaaggtcacaaattacggcaattacctgatgggcagtcagcctctcgtgctagttctgtagcttcacctgcagtctcatcattgctactcccttccctgaaagaggctactggtgacaagtttgatcggcctgctgttcatgccttccttgattccttgatggatttagaacgtgatatacctggatcatgcgaagtactggttggcagattgctacaccggctagggagctcaaaggattcctcattgcaaggtcttcaggagacggcgatgtcaattttcactaaggaacctgaacctccctctgaaaaagcaggcgacaagaagttagctaatatgccaccattggctgctcctaccgtgagcccactggcaaggttccttctcacaaggtggcaaaaccaagtttctcaagatcttaactctgtttgatccctgcgatgcagaaaagtgatttcatgttcgattcggtgtataattaatatttttcagtgtacataatgcaaactttagaactttatttcatccagtcggtctcaaccacctgttatttcatttgttttgttcatggcgaatactccctctgtccccaattaaaatttgttttacaattaatgtatgtgttgtatatatatgtttagtttcataatcatccatatgaatatggatgtaaaaatctagagctagtacgagtactatttttgggctagtttgagaacgtcattttccaaggattttcattttctcaagtaaaattagtttattttttcttaggtcatgtttttc

SEQ ID NO: 69889 - DNA, 2011 bp, Zea Mays
cacggagcaaaatggccatgtggtttgacctgtttatgattgctgcttacactggcgtttacaagttcatcatggtcacatgtggcttgagggtgtatgtggttcatgacatttgttggaactcccttttggatggcacctgaggttattcaaaattctgaagggtacaatgagaaggcagatatctggtctttaggtatcactgccattgaaatggctaaaggtgaaccccctctggcagatattcatcccatgagagttcttttcatcatacctcgtgaaaatcctccgcagcttgatgagcatttctcgaaaccaatgaaagagtttgtctcactatgtttaaagaagaatccagcagagaggcctagtgccaaggagcttcttaagcatcgtttcataaaaaatgcccgaaagactccaaagcttttggagcgaataagagagcggccaaaatttgcagcaaaaagcatggatgccacacaaaatgggcaaacacatgatgaagaggaggattttggtacaggcactatcaaggtcaataggacaaaagatacagctccatctttgagtcaaggaacagttaggaaatctgcagtcagagatttttctgatagatcagagggcacaggaactgtccgagttgtttcaaggcctcctcaaatcgcctccacgaaggatggtagatctgatatgcctcaaagtccaaaagcaccaatacgcacagctgatcgagaaaatcagtggaggtcatcagggactggatctgaagaatctctctctctcagagatactcagagcggacgagggagagtagaaagttctactgatgacaatgatcactctgtaagtgggtcaggaactgttgtgttacgctctccaagagcatctcagttgtactcaacagctagcaaccacagtgccaagattctcctcttatgaagatatgtctaatagtgggacagttgttcggacccaaaatgaagacccagaaactccacgatcttcaaggtcaaggctggggatccaagaaaaaacatcaaatgctcctcttgaggatagtgccattaaccttgcagaggcaaaggctgctttgcaggctgggttaagaaagggaaatgctcgagaaagaccttttatcaacaggcatgaaaagggatcacatgagcatagatcttctggagtaaatagtcaagaggttcaaagcgaggatgtggacacgcagaaaggtcacaaattacggcaattacctgatgggcagtcagcctctcgtgctagttctgtagcttcacctgcagtctcatcattgctactcccttccctgaaagaggctactggtgacaagtttgatcggcctgctgttcatgccttccttgattccttgatggatttagaacgtgatatacctggatcatgcgaagtactggttggcagattgctacaccggctagggagctcaaaggattcctcattgcaaggtcttcaggagacggcgatgtcaattttcactaaggaacctgaacctccctctgaaaaagcaggcgacaagaagttagctaatatgccaccattggctgctcctaccgtgagcccactggcaaggttccttctcacaaggtggcaaaaccaagtttctcaagatcttaactctgtttgatccctgcgatgcagaaaagtgatttcatgttcgattcggtgtataattaatatttttcagtgtacataatgcaaactttagaactttatttcatccagtcggtctcaaccacctgttatttcatttgttttgttcatggcgaatactccctctgtccccaattaaaatttgttttacaattaatgtatgtgttgtatatatatgtttagtttcataatcatccatatgaatatggatgtaaaaatctagagctagtacgagtactatttttgggctagtttgagaacgtcattttccaaggattttcattttctcaagtaaaattagtttattttttcttaggtcatgtttttc

SEQ ID NO: 69890 - DNA, 2492 bp, Zea Mays
atacagtctttctcatggaacatgtttctatgaaaaaatagtttgttagtggttgattgatattactcttgcattacaaatactgtttgggaaacatatccaatgcatttgaactaccttaatcaaatagctgctgccatcccaccctgggatgtgtagatcatatcttatactttctgatggatggttggtaatgctcttccactgatacagttatgtggaggatttcacaaatacagataatcctattgatttgtaaagccaaggatgttaaatattgaagcgaaaacattgtttgatattttgcagcggcaaatatcctcctcactgaaagtggagacgtgaaggttgcggactttggtgtttctgcacagctgactaaaacaatgtctaggaggaagtactgttcaaatgctacgcccatctacaaggtggttgaatcattgctgatttttcttcaagtgccttatcacggagcaaaatggccatgtggtttgacctgtttatgattgctgcttacactggcgtttacaagttcatcatggtcacatgtggcttgagggtgtatgtggttcatgacatttgttggaactcccttttggatggcacctgaggttattcaaaattctgaagggtacaatgagaaggcagatatctggtctttaggtatcactgccattgaaatggctaaaggtgaaccccctctggcagatattcatcccatgagagttcttttcatcatacctcgtgaaaatcctccgcagcttgatgagcatttctcgaaaccaatgaaagagtttgtctcactatgtttaaagaagaatccagcagagaggcctagtgccaaggagcttcttaagcatcgtttcataaaaaatgcccgaaagactccaaagcttttggagcgaataagagagcggccaaaatttgcagcaaaaagcatggatgccacacaaaatgggcaaacacatgatgaagaggaggattttggtacaggcactatcaaggtcaataggacaaaagatacagctccatctttgagtcaaggaacagttaggaaatctgcagtcagagatttttctgatagatcagagggcacaggaactgtccgagttgtttcaaggcctcctcaaatcgcctccacgaaggatggtagatctgatatgcctcaaagtccaaaagcaccaatacgcacagctgatcgagaaaatcagtggaggtcatcagggactggatctgaagaatctctctctctcagagatactcagagcggacgagggagagtagaaagttctactgatgacaatgatcactctgtaagtgggtcaggaactgttgtgttacgctctccaagagcatctcagttgtactcaacagctagcaaccacagtgccaagcctcccagcagattctcctcttatgaagatatgtctaatagtgggacagttgttcggacccaaaatgaagacccagaaactccacgatcttcaaggtcaaggctggggatccaagaaaaaacatcaaatgctcctcttgaggatagtgccattaaccttgcagaggcaaaggctgctttgcaggctgggttaagaaagggaaatgctcgagaaagaccttttatcaacaggcatgaaaagggatcacatgagcatagatcttctggagtaaatagtcaagaggttcaaagcgaggatgtggacacgcagaaaggtcacaaattacggcaattacctgatgggcagtcagcctctcgtgctagttctgtagcttcacctgcagtctcatcattgctactcccttccctgaaagaggctactggtgacaagtttgatcggcctgctgttcatgccttccttgattccttgatggatttagaacgtgatatacctggatcatgcgaagtactggttggcagattgctacaccggctagggagctcaaaggattcctcattgcaaggtcttcaggagacggcgatgtcaattttcactaaggaacctgaacctccctctgaaaaagcaggcgacaagaagttagctaatatgccaccattggctgctcctaccgtgagcccactggcaaggttccttctcacaaggtggcaaaaccaagtttctcaagatcttaactctgtttgatccctgcgatgcagaaaagtgatttcatgttcgattcggtgtataattaatatttttcagtgtacataatgcaaactttagaactttatttcatccagtcggtctcaaccacctgttatttcatttgttttgttcatggcgaatactccctctgtccccaattaaaatttgttttacaattaatgtatgtgttgtatatatatgtttagtttcataatcatccatatgaatatggatgtaaaaatctagagctagtacgagtactatttttgggctagtttgagaacgtcattttccaaggattttcattttctcaagtaaaattagtttattttttcttaggtcatgtttttc

SEQ ID NO: 69891 - DNA, 2123 bp, Zea Mays
gatctcttcaagctggtcctcctctggatgaaatgtctattgcatgcattctgagggacttgttacacgcaattgagtatctacattccgaaggaaaaattcaccgtgatattaaagcggcaaatatcctcctcactgaaagtggagacgtgaaggttgcggactttggtgtttctgcacagctgactaaaacaatgtctaggaggaagacatttgttggaactcccttttggatggcacctgaggttattcaaaattctgaagggtacaatgagaaggcagatatctggtctttaggtatcactgccattgaaatggctaaaggtgaaccccctctggcagatattcatcccatgagagttcttttcatcatacctcgtgaaaatcctccgcagcttgatgagcatttctcgaaaccaatgaaagagtttgtctcactatgtttaaagaagaatccagcagagaggcctagtgccaaggagcttcttaagcatcgtttcataaaaaatgcccgaaagactccaaagcttttggagcgaataagagagcggccaaaatttgcagcaaaaagcatggatgccacacaaaatgggcaaacacatgatgaagaggaggattttggtacaggcactatcaaggtcaataggacaaaagatacagctccatctttgagtcaaggaacagttaggaaatctgcagtcagagatttttctgatagatcagagggcacaggaactgtccgagttgtttcaaggcctcctcaaatcgcctccacgaaggatggtagatctgatatgcctcaaagtccaaaagcaccaatacgcacagctgatcgagaaaatcagtggaggtcatcagggactggatctgaagaatctctctctctcagagatactcagagcggacgagggagagtagaaagttctactgatgacaatgatcactctgtaagtgggtcaggaactgttgtgttacgctctccaagagcatctcagttgtactcaacagctagcaaccacagtgccaagcctcccagcagattctcctcttatgaagatatgtctaatagtgggacagttgttcggacccaaaatgaagacccagaaactccacgatcttcaaggtcaaggctggggatccaagaaaaaacatcaaatgctcctcttgaggatagtgccattaaccttgcagaggcaaaggctgctttgcaggctgggttaagaaagggaaatgctcgagaaagaccttttatcaacaggcatgaaaagggatcacatgagcatagatcttctggagtaaatagtcaagaggttcaaagcgaggatgtggacacgcagaaaggtcacaaattacggcaattacctgatgggcagtcagcctctcgtgctagttctgtagcttcacctgcagtctcatcattgctactcccttccctgaaagaggctactggtgacaagtttgatcggcctgctgttcatgccttccttgattccttgatggatttagaacgtgatatacctggatcatgcgaagtactggttggcagattgctacaccggctagggagctcaaaggattcctcattgcaaggtcttcaggagacggcgatgtcaattttcactaaggaacctgaacctccctctgaaaaagcaggcgacaagaagttagctaatatgccaccattggctgctcctaccgtgagcccactggcaaggttccttctcacaaggtggcaaaaccaagtttctcaagatcttaactctgtttgatccctgcgatgcagaaaagtgatttcatgttcgattcggtgtataattaatatttttcagtgtacataatgcaaactttagaactttatttcatccagtcggtctcaaccacctgttatttcatttgttttgttcatggcgaatactccctctgtccccaattaaaatttgttttacaattaatgtatgtgttgtatatatatgtttagtttcataatcatccatatgaatatggatgtaaaaatctagagctagtacgagtactatttttgggctagtttgagaacgtcattttccaaggattttcattttctcaagtaaaattagtttattttttcttaggtcatgtttttc

SEQ ID NO: 69892 - DNA, 2641 bp, Zea Mays
cacgagtcctgacctccctacccccatctccagcccctccgacgcggccccaccatctccacctcccggccgaacagacacgaaccagggaccaacgacaaatctcgcgacctctcgaaatgagcggtaccggaagcagcgtgtagcgcgagacgaacgccgccctaatccaaaccctagaggcgggaggaagacggcgagcgaacgcagcaacgattcctgatctctaatatcctagcacggcggcggccgcggccggatctaggggtaacgaaggatgtcggactcggcatcgatggcggccgccatcgaggcgcggttcagcagccgcgacctcatcggctgcggttccttcggcgacgtctataaaggtgaggatgacattgaagacatccaaaaggagatatctgttttgtcacaatgccggtgcccatatattaccgattattacggctcttatcttcaccagactaaattgtggatagtaatggaatacatggctggtggttctgttgctgatcttcttcaagctggtcctcctctggatgaaatgtctattgcatgcattctgagggacttgttacacgcaattgagtatctacattccgaaggaaaaattcaccgtgatattaaagcggcaaatatcctcctcactgaaagtggagacgtgaaggttgcggactttggtgtttctgcacagctgactaaaacaatgtctaggaggaagacatttgttggaactcccttttggatggcacctgaggttattcaaaattctgaagggtacaatgagaaggcagatatctggtctttaggtatcactgccattgaaatggctaaaggtgaaccccctctggcagatattcatcccatgagagttcttttcatcatacctcgtgaaaatcctccgcagcttgatgagcatttctcgaaaccaatgaaagagtttgtctcactatgtttaaagaagaatccagcagagaggcctagtgccaaggagcttcttaagcatcgtttcataaaaaatgcccgaaagactccaaagcttttggagcgaataagagagcggccaaaatttgcagcaaaaagcatggatgccacacaaaatgggcaaacacatgatgaagaggaggattttggtacaggcactatcaaggtcaataggacaaaagatacagctccatctttgagtcaaggaacagttaggaaatctgcagtcagagatttttctgatagatcagagggcacaggaactgtccgagttgtttcaaggcctcctcaaatcgcctccacgaaggatggtagatctgatatgcctcaaagtccaaaagcaccaatacgcacagctgatcgagaaaatcagtggaggtcatcagggactggatctgaagaatctctctctctcagagatactcagagcggacgagggagagtagaaagttctactgatgacaatgatcactctgtaagtgggtcaggaactgttgtgttacgctctccaagagcatctcagttgtactcaacagctagcaaccacagtgccaagcctcccagcagattctcctcttatgaagatatgtctaatagtgggacagttgttcggacccaaaatgaagacccagaaactccacgatcttcaaggtcaaggctggggatccaagaaaaaacatcaaatgctcctcttgaggatagtgccattaaccttgcagaggcaaaggctgctttgcaggctgggttaagaaagggaaatgctcgagaaagaccttttatcaacaggcatgaaaagggatcacatgagcatagatcttctggagtaaatagtcaagaggttcaaagcgaggatgtggacacgcagaaaggtcacaaattacggcaattacctgatgggcagtcagcctctcgtgctagttctgtagcttcacctgcagtctcatcattgctactcccttccctgaaagaggctactggtgacaagtttgatcggcctgctgttcatgccttccttgattccttgatggatttagaacgtgatatacctggatcatgcgaagtactggttggcagattgctacaccggctagggagctcaaaggattcctcattgcaaggtcttcaggagacggcgatgtcaattttcactaaggaacctgaacctccctctgaaaaagcaggcgacaagaagttagctaatatgccaccattggctgctcctaccgtgagcccactggcaaggttccttctcacaaggtggcaaaaccaagtttctcaagatcttaactctgtttgatccctgcgatgcagaaaagtgatttcatgttcgattcggtgtataattaatatttttcagtgtacataatgcaaactttagaactttatttcatccagtcggtctcaaccacctgttatttcatttgttttgttcatggcgaatactccctctgtccccaattaaaatttgttttacaattaatgtatgtgttgtatatatatgtttagtttcataatcatccatatgaatatggatgtaaaaatctagagctagtacgagtactatttttgggctagtttgagaacgtcattttccaaggattttcattttctcaagtaaaattagtttattttttcttaggtcatgtttttc

SEQ ID NO: 69893 - DNA, 2818 bp, Zea Mays
caaacacgagtcctgacctccctacccccatctccagcccctccgacgcggccccaccatctccacctcccggccgaacagacacgaaccagggaccaacgacaaatctcgcgacctctcgaaatgagcggtaccggaagcagcgtgtagcgcgagacgaacgccgccctaatccaaaccctagaggcgggaggaagacggcgagcgaacgcagcaacgattcctgatctctaatatcctagcacggcggcggccgcggccggatctaggggtaacgaaggatgtcggactcggcatcgatggcggccgccatcgaggcgcggttcagcagccgcgacctcatcggctgcggttccttcggcgacgtctataaagggtttgacaaggaactgaataaagaggttgctataaaagtcattgatttggaagaagctgaggatgacattgaagacatccaaaaggagatatctgttttgtcacaatgccggtgcccatatattaccgattattacggctcttatcttcaccagactaaattgtggatagtaatggaatacatggctggtggttctgttgctgatcttcttcaagctggtcctcctctggatgaaatgtctattgcatgcattctgagggacttgttacacgcaattgagtatctacattccgaaggaaaaattcaccgtgatattaaagcggcaaatatcctcctcactgaaagtggagacgtgaaggttgcggactttggtgtttctgcacagctgactaaaacaatgtctaggaggaagtgccttatcacggagcaaaatggccatgtggtttgacctgtttatgattgctgcttacactggcgtttacaagttcatcatggtcacatgtggcttgagggtgtatgtggttcatgacatttgttggaactcccttttggatggcacctgaggttattcaaaattctgaagggtacaatgagaaggcagatatctggtctttaggtatcactgccattgaaatggctaaaggtgaaccccctctggcagatattcatcccatgagagttcttttcatcatacctcgtgaaaatcctccgcagcttgatgagcatttctcgaaaccaatgaaagagtttgtctcactatgtttaaagaagaatccagcagagaggcctagtgccaaggagcttcttaagcatcgtttcataaaaaatgcccgaaagactccaaagcttttggagcgaataagagagcggccaaaatttgcagcaaaaagcatggatgccacacaaaatgggcaaacacatgatgaagaggaggattttggtacaggcactatcaaggtcaataggacaaaagatacagctccatctttgagtcaaggaacagttaggaaatctgcagtcagagatttttctgatagatcagagggcacaggaactgtccgagttgtttcaaggcctcctcaaatcgcctccacgaaggatggtagatctgatatgcctcaaagtccaaaagcaccaatacgcacagctgatcgagaaaatcagtggaggtcatcagggactggatctgaagaatctctctctctcagagatactcagagcggacgagggagagtagaaagttctactgatgacaatgatcactctgtaagtgggtcaggaactgttgtgttacgctctccaagagcatctcagttgtactcaacagctagcaaccacagtgccaagcctcccagcagattctcctcttatgaagatatgtctaatagtgggacagttgttcggacccaaaatgaagacccagaaactccacgatcttcaaggtcaaggctggggatccaagaaaaaacatcaaatgctcctcttgaggatagtgccattaaccttgcagaggcaaaggctgctttgcaggctgggttaagaaagggaaatgctcgagaaagaccttttatcaacaggcatgaaaagggatcacatgagcatagatcttctggagtaaatagtcaagaggttcaaagcgaggatgtggacacgcagaaaggtcacaaattacggcaattacctgatgggcagtcagcctctcgtgctagttctgtagcttcacctgcagtctcatcattgctactcccttccctgaaagaggctactggtgacaagtttgatcggcctgctgttcatgccttccttgattccttgatggatttagaacgtgatatacctggatcatgcgaagtactggttggcagattgctacaccggctagggagctcaaaggattcctcattgcaaggtcttcaggagacggcgatgtcaattttcactaaggaacctgaacctccctctgaaaaagcaggcgacaagaagttagctaatatgccaccattggctgctcctaccgtgagcccactggcaaggttccttctcacaaggtggcaaaaccaagtttctcaagatcttaactctgtttgatccctgcgatgcagaaaagtgatttcatgttcgattcggtgtataattaatatttttcagtgtacataatgcaaactttagaactttatttcatccagtcggtctcaaccacctgttatttcatttgttttgttcatggcgaatactccctctgtccccaattaaaatttgttttacaattaatgtatgtgttgtatatatatgtttagtttcataatcatccatatgaatatggatgtaaaaatctagagctagtacgagtactatttttgggctagtttgagaacgtcattttccaaggattttcattttctcaagtaaaattagtttattttttcttaggtcatgtttttc

SEQ ID NO: 69894 - DNA, 2811 bp, Zea Mays
ctagaacatcggcaggcgcgcgcctcctcccctccacgcctcgattcggatgaaggcggagagcggtggcgttgtccgccggagtctgcagaagacggagtcggcggagatgcggtgggtggtcccggggggcgccaatgaggacgtggagatcgagagctccgacgacggcagcgtggacacctccgccaccgcctcgggctcacggggcggcgggtgctccgacgaagacgaaggttacgagaacgatgagatgctgcgccagcttctcgtgcgcacgggcccgcgcgccgactccttcgacgtcgaggcgctcgatgtccccggcgtgtaccgtcaccaggaatttaccttaggcagcagtattgtgctgactcttcagacactaggcgttgtctttggggacgttggtactagtccactgtatacctttgatgtaatgttcaacaaatactcaattactgcaaaggaggatgttctcggagctctctcacttgtaatatacactctcattctgataccatttctgaagtatacactgattgttttgtggggaaacgatggcggagaaggagggacatttgctttatactcattaatatgcagaaatgcaaaggcaagcctgcttcctaaccaattaccttctgatactcgtatagcaaatttcaatctgaaggtgccttcagtagagctcgagagatctttgaagatcaaggagcgacttgagacttcatctatgctaaaaaagctgcttttgatgcttgttctttttggtacttcgatggtaatagcagatggtgttgtcacatcagcaatgtcagttatgtctgctgttaatggcttgaaggttggaattgctagtgttaacgaaggtgaagtggtcatgataactgttgcatttcttattgttctgttcagtctgcaacggtttggaacaagcaaagtagggcttgctgttgggccagctttattcgtatggttttgctgccttgctgggataggaatgtataacctcagagtatatggtccagaagtactccaggcattcaatcctgtttatatctactattattttgaaagaaatcccactgaagcttggatgtccctggggggctgtcttttatgtgcaacaggatctgaggcaatgtttgctgatttatgctacttctctgttaaatctgttcagcttacctttgtgttccttgttctgccatgtcttctactgggatacctagggcaagctgcatttcttatggagaacttagataaaagtcagcaggtcttctttttgtccattccaagtcaggcattttggccagtggtattcatagctactctggcagcactaattgctagtcgtgcaatgacaactgctatattctcaactataaagcaggcaacagctctgggctgtttcccacgcctcaagattatccacacctctagaaagttcatgggccaaatatacatcccggtgatgaactggttcttgctggtttcttgtctggcatttgtcgcagtatttgggagcataaatgagattggaaatgcatatggcatagcagaacttggggtcatgatgatgaccactgtcctggtcaccattataatgcttctgatatggcagttttgggaagtgcagcagatggaagttgggtgcttttggtatttgcagctgtattgtatttggtaatgtacatatggaactatggaaccaaattgaagtacgaaactgaagtcaagcaaaaactttcaatggatttattgatacagctaggctgcaatcttggtacagtgagggcgcctggtattggattgctctataatgaactggtcaggggtgttcctgcaatctttggtcacttcctcactacactgccagccatgcattcgatgatcatttttgtctgcatcaaatgggtcccagttccagttgtgcctcagaatgaaaggttcctcttccgtcgtgtgtgcccaaagaactaccatatgttccgctgtattgctaggtatgggtataaggatgtacgcaaggagaaccaccaagcattcgaacagcttctgatagaaagccttgaaaagttcatacgccgagaggcccaggaacgctccctggaacgctccctggagagcgaccataatgacgacaaagactctgaagaggagattgcttcttcatcatcaagagttattgacgagtcaggcggtgctgacaactcagccctgggatcaagcatgtcgttggaggagggatcaagcatggacaacgagctatctttcatccacaaggccaaggagtcgggcgtggtgtaccttcttgggcacggagacatcagggcccggaaagagtcgttcttcgtcaagaagctggtgatcaactatttctatgctttcctgaggaggaactgcaggaggggcatcgcgacactgagcataccccacacgaggctgatgcaggtggggatgcaatacatggtttagggttgcctagctaccttttctttttctatttcaagatgattactaactcgcggcagtagatggtgagatgcaagcgagagagagagatgtctgaagatgattttcctttgatagaggcaacactaaccgatctggtgttttaccgaaaggttgtgaaaactgaacccaagtatgatcatatcatatacataacaaggaaaccccgttgtgtgtgaagcaaggtaacaagcctgctgctgctcacacatattcatcctaccctgatgtgcctggtggtttctgcttggctgcttgtgctgagaggcgggaacagacactgatattgattgc

SEQ ID NO: 69895 - DNA, 2815 bp, Zea Mays
ctagaacatcggcaggcgcgcgcctcctcccctccacgcctcgattcggatgaaggcggagagcggtggcgttgtccgccggagtctgcagaagacggagtcggcggagatgcggtgggtggtcccggggggcgccaatgaggacgtggagatcgagagctccgacgacggcagcgtggacacctccgccaccgcctcgggctcacggggcggcgggtgctccgacgaagacgaaggttacgagaacgatgagatgctgcgccagcttctcgtgcgcacgggcccgcgcgccgactccttcgacgtcgaggcgctcgatgtccccggcgtgtaccgtcaccaggaatttaccttaggcagcagtattgtgctgactcttcagacactaggcgttgtctttggggacgttggtactagtccactgtatacctttgatgtaatgttcaacaaatactcaattactgcaaaggaggatgttctcggagctctctcacttgtaatatacactctcattctgataccatttctgaagtatacactgattgttttgtggggaaacgatggcggagaaggagggacatttgctttatactcattaatatgcagaaatgcaaaggcaagcctgcttcctaaccaattaccttctgatactcgtatagcaaatttcaatctgaaggtgccttcagtagagctcgagagatctttgaagatcaaggagcgacttgagacttcatctatgctaaaaaagctgcttttgatgcttgttctttttggtacttcgatggtaatagcagatggtgttgtcacatcagcaatgtcaggttcatgtctttctgatgcattgttcattgtatatttgctcttcacctacttgggtgatctgcacattttctttcctagtaacaagattctacaaaagcttcgcttatctataaataacccaatcttgtttctcatattgaaatctgcagttatgtctgctgttaatggcttgaaggttggaattgctagtgttaacgaaggtgaagtggtcatgataactgttgcatttcttattgttctgttcagtctgcaacggtttggaacaagcaaagtagggcttgctgttgggccagctttattcgtatggttttgctgccttgctgggataggaatgtataacctcagagtatatggtccagaagtactccaggcattcaatcctgtttatatctactattattttgaaagaaatcccactgaagcttggatgtccctggggggctgtcttttatgtgcaacaggatctgaggcaatgtttgctgatttatgctacttctctgttaaatctgttcagcttacctttgtgttccttgttctgccatgtcttctactgggatacctagggcaagctgcatttcttatggagaacttagataaaagtcagcaggtcttctttttgtccattccaagtcaggcattttggccagtggtattcatagctactctggcagcactaattgctagtcgtgcaatgacaactgctatattctcaactataaagcaggcaacagctctgggctgtttcccacgcctcaagattatccacacctctagaaagttcatgggccaaatatacatcccggtgatgaactggttcttgctggtttcttgtctggcatttgtcgcagtatttgggagcataaatgagattggaaatgcatatggcatagcagaacttggggtcatgatgatgaccactgtcctggtcaccattataatgcttctgatatggcagctaggctgcaatcttggtacagtgagggcgcctggtattggattgctctataatgaactggtcaggggtgttcctgcaatctttggtcacttcctcactacactgccagccatgcattcgatgatcatttttgtctgcatcaaatgggtcccagttccagttgtgcctcagaatgaaaggttcctcttccgtcgtgtgtgcccaaagaactaccatatgttccgctgtattgctaggtatgggtataaggatgtacgcaaggagaaccaccaagcattcgaacagcttctgatagaaagccttgaaaagttcatacgccgagaggcccaggaacgctccctggaacgctccctggagagcgaccataatgacgacaaagactctgaagaggagattgcttcttcatcatcaagagttattgacgagtcaggcggtgctgacaactcagccctgggatcaagcatgtcgttggaggagggatcaagcatggacaacgagctatctttcatccacaaggccaaggagtcgggcgtggtgtaccttcttgggcacggagacatcagggcccggaaagagtcgttcttcgtcaagaagctggtgatcaactatttctatgctttcctgaggaggaactgcaggaggggcatcgcgacactgagcataccccacacgaggctgatgcaggtggggatgcaatacatggtttagggttgcctagctaccttttctttttctatttcaagatgattactaactcgcggcagtagatggtgagatgcaagcgagagagagagatgtctgaagatgattttcctttgatagaggcaacactaaccgatctggtgttttaccgaaaggttgtgaaaactgaacccaagtatgatcatatcatatacataacaaggaaaccccgttgtgtgtgaagcaaggtaacaagcctgctgctgctcacacatattcatcctaccctgatgtgcctggtggtttctgcttggctgcttgtgctgagaggcgggaacagacactgatattgattgc

SEQ ID NO: 69896 - DNA, 2925 bp, Zea Mays
ttctcctctgcagtcccaactctcctttcttcccattccctttttgcctattccaccccgccacacctctccgcggcaccggccgtagcactagaacatcggcaggcgcgcgcctcctcccctccacgcctcgattcggatgaaggcggagagcggtggcgttgtccgccggagtctgcagaagacggagtcggcggagatgcggtgggtggtcccggggggcgccaatgaggacgtggagatcgagagctccgacgacggcagcgtggacacctccgccaccgcctcgggctcacggggcggcgggtgctccgacgaagacgaaggttacgagaacgatgagatgctgcgccagcttctcgtgcgcacgggcccgcgcgccgactccttcgacgtcgaggcgctcgatgtccccggcgtgtaccgtcaccaggaatttaccttaggcagcagtattgtgctgactcttcagacactaggcgttgtctttggggacgttggtactagtccactgtatacctttgatgtaatgttcaacaaatactcaattactgcaaaggaggatgttctcggagctctctcacttgtaatatacactctcattctgataccatttctgaagtatacactgattgttttgtggggaaacgatggcggagaaggagggacatttgctttatactcattaatatgcagaaatgcaaaggcaagcctgcttcctaaccaattaccttctgatactcgtatagcaaatttcaatctgaaggtgccttcagtagagctcgagagatctttgaagatcaaggagcgacttgagacttcatctatgctaaaaaagctgcttttgatgcttgttctttttggtacttcgatggtaatagcagatggtgttgtcacatcagcaatgtcagttatgtctgctgttaatggcttgaaggttggaattgctagtgttaacgaagtctgcaacggtttggaacaagcaaagtagggcttgctgttgggccagctttattcgtatggttttgctgccttgctgggataggaatgtataacctcagagtatatggtccagaagtactccaggcattcaatcctgtttatatctactattattttgaaagaaatcccactgaagcttggatgtccctggggggctgtcttttatgtgcaacaggatctgaggcaatgtttgctgatttatgctacttctctgttaaatctgttcagcttacctttgtgttccttgttctgccatgtcttctactgggatacctagggcaagctgcatttcttatggagaacttagataaaagtcagcaggtcttctttttgtccattccaagtcaggcattttggccagtggtattcatagctactctggcagcactaattgctagtcgtgcaatgacaactgctatattctcaactataaagcaggcaacagctctgggctgtttcccacgcctcaagattatccacacctctagaaagttcatgggccaaatatacatcccggtgatgaactggttcttgctggtttcttgtctggcatttgtcgcagtatttgggagcataaatgagattggaaatgcatatggcatagcagaacttggggtcatgatgatgaccactgtcctggtcaccattataatgcttctgatatggcaggtcaacatcgtcatagttctatgctttctcaacctctttctggggctggagttatttttcttttcctcagttttgggaagtgcagcagatggaagttgggtgcttttggtatttgcagctgtattgtatttggtaatgtacatatggaactatggaaccaaattgaagtacgaaactgaagtcaagcaaaaactttcaatggatttattgatacagctaggctgcaatcttggtacagtgagggcgcctggtattggattgctctataatgaactggtcaggggtgttcctgcaatctttggtcacttcctcactacactgccagccatgcattcgatgatcatttttgtctgcatcaaatgggtcccagttccagttgtgcctcagaatgaaaggttcctcttccgtcgtgtgtgcccaaagaactaccatatgttccgctgtattgctaggtatgggtataaggatgtacgcaaggagaaccaccaagcattcgaacagcttctgatagaaagccttgaaaagttcatacgccgagaggcccaggaacgctccctggaacgctccctggagagcgaccataatgacgacaaagactctgaagaggagattgcttcttcatcatcaagagttattgacgagtcaggcggtgctgacaactcagccctgggatcaagcatgtcgttggaggagggatcaagcatggacaacgagctatctttcatccacaaggccaaggagtcgggcgtggtgtaccttcttgggcacggagacatcagggcccggaaagagtcgttcttcgtcaagaagctggtgatcaactatttctatgctttcctgaggaggaactgcaggaggggcatcgcgacactgagcataccccacacgaggctgatgcaggtggggatgcaatacatggtttagggttgcctagctaccttttctttttctatttcaagatgattactaactcgcggcagtagatggtgagatgcaagcgagagagagagatgtctgaagatgattttcctttgatagaggcaacactaaccgatctggtgttttaccgaaaggttgtgaaaactgaacccaagtatgatcatatcatatacataacaaggaaaccccgttgtgtgtgaagcaaggtaacaagcctgctgctgctcacacatattcatcctaccctgatgtgcctggtggtttctgcttggctgcttgtgctgagaggcgggaacagacactgatattgattgc

SEQ ID NO: 69897 - DNA, 2922 bp, Zea Mays
ttctcctctgcagtcccaactctcctttcttcccattccctttttgcctattccaccccgccacacctctccgcggcaccggccgtagcactagaacatcggcaggcgcgcgcctcctcccctccacgcctcgattcggatgaaggcggagagcggtggcgttgtccgccggagtctgcagaagacggagtcggcggagatgcggtgggtggtcccggggggcgccaatgaggacgtggagatcgagagctccgacgacggcagcgtggacacctccgccaccgcctcgggctcacggggcggcgggtgctccgacgaagacgaaggttacgagaacgatgagatgctgcgccagcttctcgtgcgcacgggcccgcgcgccgactccttcgacgtcgaggcgctcgatgtccccggcgtgtaccgtcaccaggaatttaccttaggcagcagtattgtgctgactcttcagacactaggcgttgtctttggggacgttggtactagtccactgtatacctttgatgtaatgttcaacaaatactcaattactgcaaaggaggatgttctcggagctctctcacttgtaatatacactctcattctgataccatttctgaagtatacactgattgttttgtggggaaacgatggcggagaaggagggacatttgctttatactcattaatatgcagaaatgcaaaggcaagcctgcttcctaaccaattaccttctgatactcgtatagcaaatttcaatctgaaggtgccttcagtagagctcgagagatctttgaagatcaaggagcgacttgagacttcatctatgctaaaaaagctgcttttgatgcttgttctttttggtacttcgatggtaatagcagatggtgttgtcacatcagcaatgtcagttatgtctgctgttaatggcttgaaggttggaattgctagtgttaacgaaggtgaagtggtcatgataactgttgcatttcttattgttctgttcagtctgcaacggtttggaacaagcaaagtagggcttgctgttgggccagctttattcgtatggttttgctgccttgctgggataggaatgtataacctcagagtatatggtccagaagtactccaggcattcaatcctgtttatatctactattattttgaaagaaatcccactgaagcttggatgtccctggggggctgtcttttatgtgcaacaggatctgaggcaatgtttgctgatttatgctacttctctgttaaatctgttcagggcaagctgcatttcttatggagaacttagataaaagtcagcaggtcttctttttgtccattccaagtcaggcattttggccagtggtattcatagctactctggcagcactaattgctagtcgtgcaatgacaactgctatattctcaactataaagcaggcaacagctctgggctgtttcccacgcctcaagattatccacacctctagaaagttcatgggccaaatatacatcccggtgatgaactggttcttgctggtttcttgtctggcatttgtcgcagtatttgggagcataaatgagattggaaatgcatatggcatagcagaacttggggtcatgatgatgaccactgtcctggtcaccattataatgcttctgatatggcaggtcaacatcgtcatagttctatgctttctcaacctctttctggggctggagttatttttcttttcctcagttttgggaagtgcagcagatggaagttgggtgcttttggtatttgcagctgtattgtatttggtaatgtacatatggaactatggaaccaaattgaagtacgaaactgaagtcaagcaaaaactttcaatggatttattgatacagctaggctgcaatcttggtacagtgagggcgcctggtattggattgctctataatgaactggtcaggggtgttcctgcaatctttggtcacttcctcactacactgccagccatgcattcgatgatcatttttgtctgcatcaaatgggtcccagttccagttgtgcctcagaatgaaaggttcctcttccgtcgtgtgtgcccaaagaactaccatatgttccgctgtattgctaggtatgggtataaggatgtacgcaaggagaaccaccaagcattcgaacagcttctgatagaaagccttgaaaagttcatacgccgagaggcccaggaacgctccctggaacgctccctggagagcgaccataatgacgacaaagactctgaagaggagattgcttcttcatcatcaagagttattgacgagtcaggcggtgctgacaactcagccctgggatcaagcatgtcgttggaggagggatcaagcatggacaacgagctatctttcatccacaaggccaaggagtcgggcgtggtgtaccttcttgggcacggagacatcagggcccggaaagagtcgttcttcgtcaagaagctggtgatcaactatttctatgctttcctgaggaggaactgcaggaggggcatcgcgacactgagcataccccacacgaggctgatgcaggtggggatgcaatacatggtttagggttgcctagctaccttttctttttctatttcaagatgattactaactcgcggcagtagatggtgagatgcaagcgagagagagagatgtctgaagatgattttcctttgatagaggcaacactaaccgatctggtgttttaccgaaaggttgtgaaaactgaacccaagtatgatcatatcatatacataacaaggaaaccccgttgtgtgtgaagcaaggtaacaagcctgctgctgctcacacatattcatcctaccctgatgtgcctggtggtttctgcttggctgcttgtgctgagaggcgggaacagacactgatattgattgc

SEQ ID NO: 69898 - DNA, 2941 bp, Zea Mays
gttccgtttctcctctgcagtcccaactctcctttcttcccattccctttttgcctattccaccccgccacacctctccgcggcaccggccgtagcactagaacatcggcaggcgcgcgcctcctcccctccacgcctcgattcggatgaaggcggagagcggtggcgttgtccgccggagtctgcagaagacggagtcggcggagatgcggtgggtggtcccggggggcgccaatgaggacgtggagatcgagagctccgacgacggcagcgtggacacctccgccaccgcctcgggctcacggggcggcgggtgctccgacgaagacgaaggttacgagaacgatgagatgctgcgccagcttctcgtgcgcacgggcccgcgcgccgactccttcgacgtcgaggcgctcgatgtccccggcgtgtaccgtcaccaggaatttaccttaggcagcagtattgtgctgactcttcagacactaggcgttgtctttggggacgttggtactagtccactgtatacctttgatgtaatgttcaacaaatactcaattactgcaaaggaggatgttctcggagctctctcacttgtaatatacactctcattctgataccatttctgaagtatacactgattgttttgtggggaaacgatggcggagaaggagggacatttgctttatactcattaatatgcagaaatgcaaaggcaagcctgcttcctaaccaattaccttctgatactcgtatagcaaatttcaatctgaaggtgccttcagtagagctcgagagatctttgaagatcaaggagcgacttgagacttcatctatgctaaaaaagctgcttttgatgcttgttctttttggtacttcgatgttatgtctgctgttaatggcttgaaggttggaattgctagtgttaacgaaggtgaagtggtcatgataactgttgcatttcttattgttctgttcagtctgcaacggtttggaacaagcaaagtagggcttgctgttgggccagctttattcgtatggttttgctgccttgctgggataggaatgtataacctcagagtatatggtccagaagtactccaggcattcaatcctgtttatatctactattattttgaaagaaatcccactgaagcttggatgtccctggggggctgtcttttatgtgcaacaggatctgaggcaatgtttgctgatttatgctacttctctgttaaatctgttcagcttacctttgtgttccttgttctgccatgtcttctactgggatacctagggcaagctgcatttcttatggagaacttagataaaagtcagcaggtcttctttttgtccattccaagtcaggcattttggccagtggtattcatagctactctggcagcactaattgctagtcgtgcaatgacaactgctatattctcaactataaagcaggcaacagctctgggctgtttcccacgcctcaagattatccacacctctagaaagttcatgggccaaatatacatcccggtgatgaactggttcttgctggtttcttgtctggcatttgtcgcagtatttgggagcataaatgagattggaaatgcatatggcatagcagaacttggggtcatgatgatgaccactgtcctggtcaccattataatgcttctgatatggcaggtcaacatcgtcatagttctatgctttctcaacctctttctggggctggagttatttttcttttcctcagttttgggaagtgcagcagatggaagttgggtgcttttggtatttgcagctgtattgtatttggtaatgtacatatggaactatggaaccaaattgaagtacgaaactgaagtcaagcaaaaactttcaatggatttattgatacagctaggctgcaatcttggtacagtgagggcgcctggtattggattgctctataatgaactggtcaggggtgttcctgcaatctttggtcacttcctcactacactgccagccatgcattcgatgatcatttttgtctgcatcaaatgggtcccagttccagttgtgcctcagaatgaaaggttcctcttccgtcgtgtgtgcccaaagaactaccatatgttccgctgtattgctaggtatgggtataaggatgtacgcaaggagaaccaccaagcattcgaacagcttctgatagaaagccttgaaaagttcatacgccgagaggcccaggaacgctccctggaacgctccctggagagcgaccataatgacgacaaagactctgaagaggagattgcttcttcatcatcaagagttattgacgagtcaggcggtgctgacaactcagccctgggatcaagcatgtcgttggaggagggatcaagcatggacaacgagctatctttcatccacaaggccaaggagtcgggcgtggtgtaccttcttgggcacggagacatcagggcccggaaagagtcgttcttcgtcaagaagctggtgatcaactatttctatgctttcctgaggaggaactgcaggaggggcatcgcgacactgagcataccccacacgaggctgatgcaggtggggatgcaatacatggtttagggttgcctagctaccttttctttttctatttcaagatgattactaactcgcggcagtagatggtgagatgcaagcgagagagagagatgtctgaagatgattttcctttgatagaggcaacactaaccgatctggtgttttaccgaaaggttgtgaaaactgaacccaagtatgatcatatcatatacataacaaggaaaccccgttgtgtgtgaagcaaggtaacaagcctgctgctgctcacacatattcatcctaccctgatgtgcctggtggtttctgcttggctgcttgtgctgagaggcgggaacagacactgatattgattgc

SEQ ID NO: 69899 - DNA, 2973 bp, Zea Mays
gttccgtttctcctctgcagtcccaactctcctttcttcccattccctttttgcctattccaccccgccacacctctccgcggcaccggccgtagcactagaacatcggcaggcgcgcgcctcctcccctccacgcctcgattcggatgaaggcggagagcggtggcgttgtccgccggagtctgcagaagacggagtcggcggagatgcggtgggtggtcccggggggcgccaatgaggacgtggagatcgagagctccgacgacggcagcgtggacacctccgccaccgcctcgggctcacggggcggcgggtgctccgacgaagacgaaggttacgagaacgatgagatgctgcgccagcttctcgtgcgcacgggcccgcgcgccgactccttcgacgtcgaggcgctcgatgtccccggcgtgtaccgtcaccaggaatttaccttaggcagcagtattgtgctgactcttcagacactaggcgttgtctttggggacgttggtactagtccactgtatacctttgatgtaatgttcaacaaatactcaattactgcaaaggaggatgttctcggagctctctcacttgtaatatacactctcattctgataccatttctgaagtatacactgattgttttgtggggaaacgatggcggagaaggagggacatttgctttatactcattaatatgcagaaatgcaaaggcaagcctgcttcctaaccaattaccttctgatactcgtatagcaaatttcaatctgaaggtgccttcagtagagctcgagagatctttgaagatcaaggagcgacttgagacttcatctatgctaaaaaagctgcttttgatgcttgttctttttggtacttcgatggtaatagcagatggtgttgtcacatcagcaatttatgtctgctgttaatggcttgaaggttggaattgctagtgttaacgaaggtgaagtggtcatgataactgttgcatttcttattgttctgttcagtctgcaacggtttggaacaagcaaagtagggcttgctgttgggccagctttattcgtatggttttgctgccttgctgggataggaatgtataacctcagagtatatggtccagaagtactccaggcattcaatcctgtttatatctactattattttgaaagaaatcccactgaagcttggatgtccctggggggctgtcttttatgtgcaacaggatctgaggcaatgtttgctgatttatgctacttctctgttaaatctgttcagcttacctttgtgttccttgttctgccatgtcttctactgggatacctagggcaagctgcatttcttatggagaacttagataaaagtcagcaggtcttctttttgtccattccaagtcaggcattttggccagtggtattcatagctactctggcagcactaattgctagtcgtgcaatgacaactgctatattctcaactataaagcaggcaacagctctgggctgtttcccacgcctcaagattatccacacctctagaaagttcatgggccaaatatacatcccggtgatgaactggttcttgctggtttcttgtctggcatttgtcgcagtatttgggagcataaatgagattggaaatgcatatggcatagcagaacttggggtcatgatgatgaccactgtcctggtcaccattataatgcttctgatatggcaggtcaacatcgtcatagttctatgctttctcaacctctttctggggctggagttatttttcttttcctcagttttgggaagtgcagcagatggaagttgggtgcttttggtatttgcagctgtattgtatttggtaatgtacatatggaactatggaaccaaattgaagtacgaaactgaagtcaagcaaaaactttcaatggatttattgatacagctaggctgcaatcttggtacagtgagggcgcctggtattggattgctctataatgaactggtcaggggtgttcctgcaatctttggtcacttcctcactacactgccagccatgcattcgatgatcatttttgtctgcatcaaatgggtcccagttccagttgtgcctcagaatgaaaggttcctcttccgtcgtgtgtgcccaaagaactaccatatgttccgctgtattgctaggtatgggtataaggatgtacgcaaggagaaccaccaagcattcgaacagcttctgatagaaagccttgaaaagttcatacgccgagaggcccaggaacgctccctggaacgctccctggagagcgaccataatgacgacaaagactctgaagaggagattgcttcttcatcatcaagagttattgacgagtcaggcggtgctgacaactcagccctgggatcaagcatgtcgttggaggagggatcaagcatggacaacgagctatctttcatccacaaggccaaggagtcgggcgtggtgtaccttcttgggcacggagacatcagggcccggaaagagtcgttcttcgtcaagaagctggtgatcaactatttctatgctttcctgaggaggaactgcaggaggggcatcgcgacactgagcataccccacacgaggctgatgcaggtggggatgcaatacatggtttagggttgcctagctaccttttctttttctatttcaagatgattactaactcgcggcagtagatggtgagatgcaagcgagagagagagatgtctgaagatgattttcctttgatagaggcaacactaaccgatctggtgttttaccgaaaggttgtgaaaactgaacccaagtatgatcatatcatatacataacaaggaaaccccgttgtgtgtgaagcaaggtaacaagcctgctgctgctcacacatattcatcctaccctgatgtgcctggtggtttctgcttggctgcttgtgctgagaggcgggaacagacactgatattgattgc

SEQ ID NO: 69900 - DNA, 2843 bp, Zea Mays
gttccgtttctcctctgcagtcccaactctcctttcttcccattccctttttgcctattccaccccgccacacctctccgcggcaccggccgtagcactagaacatcggcaggcgcgcgcctcctcccctccacgcctcgattcggatgaaggcggagagcggtggcgttgtccgccggagtctgcagaagacggagtcggcggagatgcggtgggtggtcccggggggcgccaatgaggacgtggagatcgagagctccgacgacggcagcgtggacacctccgccaccgcctcgggctcacggggcggcgggtgctccgacgaagacgaaggttacgagaacgatgagatgctgcgccagcttctcgtgcgcacgggcccgcgcgccgactccttcgacgtcgaggcgctcgatgtccccggcgtgtaccgtcaccaggaatttaccttaggcagcagtattgtgctgactcttcagacactaggcgttgtctttggggacgttggtactagtccactgtatacctttgatgtaatgttcaacaaatactcaattactgcaaaggaggatgttctcggagctctctcacttgtaatatacactctccttctgatactcgtatagcaaatttcaatctgaaggtgccttcagtagagctcgagagatctttgaagatcaaggagcgacttgagacttcatctatgctaaaaaagctgcttttgatgcttgttctttttggtacttcgatggtaatagcagatggtgttgtcacatcagcaatttatgtctgctgttaatggcttgaaggttggaattgctagtgttaacgaaggtgaagtggtcatgataactgttgcatttcttattgttctgttcagtctgcaacggtttggaacaagcaaagtagggcttgctgttgggccagctttattcgtatggttttgctgccttgctgggataggaatgtataacctcagagtatatggtccagaagtactccaggcattcaatcctgtttatatctactattattttgaaagaaatcccactgaagcttggatgtccctggggggctgtcttttatgtgcaacaggatctgaggcaatgtttgctgatttatgctacttctctgttaaatctgttcagcttacctttgtgttccttgttctgccatgtcttctactgggatacctagggcaagctgcatttcttatggagaacttagataaaagtcagcaggtcttctttttgtccattccaagtcaggcattttggccagtggtattcatagctactctggcagcactaattgctagtcgtgcaatgacaactgctatattctcaactataaagcaggcaacagctctgggctgtttcccacgcctcaagattatccacacctctagaaagttcatgggccaaatatacatcccggtgatgaactggttcttgctggtttcttgtctggcatttgtcgcagtatttgggagcataaatgagattggaaatgcatatggcatagcagaacttggggtcatgatgatgaccactgtcctggtcaccattataatgcttctgatatggcaggtcaacatcgtcatagttctatgctttctcaacctctttctggggctggagttatttttcttttcctcagttttgggaagtgcagcagatggaagttgggtgcttttggtatttgcagctgtattgtatttggtaatgtacatatggaactatggaaccaaattgaagtacgaaactgaagtcaagcaaaaactttcaatggatttattgatacagctaggctgcaatcttggtacagtgagggcgcctggtattggattgctctataatgaactggtcaggggtgttcctgcaatctttggtcacttcctcactacactgccagccatgcattcgatgatcatttttgtctgcatcaaatgggtcccagttccagttgtgcctcagaatgaaaggttcctcttccgtcgtgtgtgcccaaagaactaccatatgttccgctgtattgctaggtatgggtataaggatgtacgcaaggagaaccaccaagcattcgaacagcttctgatagaaagccttgaaaagttcatacgccgagaggcccaggaacgctccctggaacgctccctggagagcgaccataatgacgacaaagactctgaagaggagattgcttcttcatcatcaagagttattgacgagtcaggcggtgctgacaactcagccctgggatcaagcatgtcgttggaggagggatcaagcatggacaacgagctatctttcatccacaaggccaaggagtcgggcgtggtgtaccttcttgggcacggagacatcagggcccggaaagagtcgttcttcgtcaagaagctggtgatcaactatttctatgctttcctgaggaggaactgcaggaggggcatcgcgacactgagcataccccacacgaggctgatgcaggtggggatgcaatacatggtttagggttgcctagctaccttttctttttctatttcaagatgattactaactcgcggcagtagatggtgagatgcaagcgagagagagagatgtctgaagatgattttcctttgatagaggcaacactaaccgatctggtgttttaccgaaaggttgtgaaaactgaacccaagtatgatcatatcatatacataacaaggaaaccccgttgtgtgtgaagcaaggtaacaagcctgctgctgctcacacatattcatcctaccctgatgtgcctggtggtttctgcttggctgcttgtgctgagaggcgggaacagacactgatattgattgc

SEQ ID NO: 69901 - DNA, 2790 bp, Zea Mays
tcagttccgtttctcctctgcagtcccaactctcctttcttcccattccctttttgcctattccaccccgccacacctctccgcggcaccggccgtagcactagaacatcggcaggcgcgcgcctcctcccctccacgcctcgattcggatgaaggcggagagcggtggcgttgtccgccggagtctgcagaagacggagtcggcggagatgcggtgggtggtcccggggggcgccaatgaggacgtggagatcgagagctccgacgacggcagcgtggacacctccgccaccgcctcgggctcacggggcggcgggtgctccgacgaagacgaaggttacgagaacgatgagatgctgcgccagcttctcgtgcgcacgggcccgcgcgccgactccttcgacgtcgaggcgctcgatgtccccggcgtgtaccgtcaccaggaatttaccttaggcagcagtattgtgctgactcttcagacactaggcgttgtctttggggacgttggtactagtccactgtatacctttgatgtaatgttcaacaaatactcaattactgcaaaggaggatgttctcggagctctctcacttgtaatatacactctcattctgataccatttctgaagtatacactgattgttttgtggggaaacgatggcggagaaggagggacatttgctttatactcattaatatgcagaaatgcaaagagctcgagagatctttgaagatcaaggagcgacttgagacttcatctatgctaaaaaagctgcttttgatgcttgttctttttggtacttcgatggtaatagcagatggtgttgtcacatcagcaatgtcagttatgtctgctgttaatggcttgaaggttggaattgctagtgttaacgaaggtgaagtggtcatgataactgttgcatttcttattgttctgttcagtctgcaacggtttggaacaagcaaagtagggcttgctgttgggccagctttattcgtatggttttgctgccttgctgggataggaatgtataacctcagagtatatggtccagaagtactccaggcattcaatcctgtttatatctactattattttgaaagaaatcccactgaagcttggatgtccctggggggctgtcttttatgtgcaacaggatctgaggcaatgtttgctgatttatgctacttctctgttaaatctgttcagcttacctttgtgttccttgttctgccatgtcttctactgggatacctagggcaagctgcatttcttatggagaacttagataaaagtcagcaggtcttctttttgtccattccaagtcaggcattttggccagtggtattcatagctactctggcagcactaattgctagtcgtgcaatgacaactgctatattctcaactataaagcaggcaacagctctgggctgtttcccacgcctcaagattatccacacctctagaaagttcatgggccaaatatacatcccggtgatgaactggttcttgctggtttcttgtctggcatttgtcgcagtatttgggagcataaatgagattggaaatgcatatggcatagcagaacttggggtcatgatgatgaccactgtcctggtcaccattataatgcttctgatatggcagctgtattgtatttggtaatgtacatatggaactatggaaccaaattgaagtacgaaactgaagtcaagcaaaaactttcaatggatttattgatacagctaggctgcaatcttggtacagtgagggcgcctggtattggattgctctataatgaactggtcaggggtgttcctgcaatctttggtcacttcctcactacactgccagccatgcattcgatgatcatttttgtctgcatcaaatgggtcccagttccagttgtgcctcagaatgaaaggttcctcttccgtcgtgtgtgcccaaagaactaccatatgttccgctgtattgctaggtatgggtataaggatgtacgcaaggagaaccaccaagcattcgaacagcttctgatagaaagccttgaaaagttcatacgccgagaggcccaggaacgctccctggaacgctccctggagagcgaccataatgacgacaaagactctgaagaggagattgcttcttcatcatcaagagttattgacgagtcaggcggtgctgacaactcagccctgggatcaagcatgtcgttggaggagggatcaagcatggacaacgagctatctttcatccacaaggccaaggagtcgggcgtggtgtaccttcttgggcacggagacatcagggcccggaaagagtcgttcttcgtcaagaagctggtgatcaactatttctatgctttcctgaggaggaactgcaggaggggcatcgcgacactgagcataccccacacgaggctgatgcaggtggggatgcaatacatggtttagggttgcctagctaccttttctttttctatttcaagatgattactaactcgcggcagtagatggtgagatgcaagcgagagagagagatgtctgaagatgattttcctttgatagaggcaacactaaccgatctggtgttttaccgaaaggttgtgaaaactgaacccaagtatgatcatatcatatacataacaaggaaaccccgttgtgtgtgaagcaaggtaacaagcctgctgctgctcacacatattcatcctaccctgatgtgcctggtggtttctgcttggctgcttgtgctgagaggcgggaacagacactgatattgattgc

SEQ ID NO: 69902 - DNA, 2975 bp, Zea Mays
gtttcagttccgtttctcctctgcagtcccaactctcctttcttcccattccctttttgcctattccaccccgccacacctctccgcggcaccggccgtagcactagaacatcggcaggcgcgcgcctcctcccctccacgcctcgattcggatgaaggcggagagcggtggcgttgtccgccggagtctgcagaagacggagtcggcggagatgcggtgggtggtcccggggggcgccaatgaggacgtggagatcgagagctccgacgacggcagcgtggacacctccgccaccgcctcgggctcacggggcggcgggtgctccgacgaagacgaaggttacgagaacgatgagatgctgcgccagcttctcgtgcgcacgggcccgcgcgccgactccttcgacgtcgaggcgctcgatgtccccggcgtgtaccgtcaccaggaatttaccttaggcagcagtattgtgctgactcttcagacactaggcgttgtctttggggacgttggtactagtccactgtatacctttgatgtaatgttcaacaaatactcaattactgcaaaggaggatgttctcggagctctctcacttgtaatatacactctcattctgataccatttctgaagtatacactgattgttttgtggggaaacgatggcggagaaggagggacatttgctttatactcattaatatgcagaaatgcaaaggcaagcctgcttcctaaccaattaccttctgatactcgtatagcaaatttcaatctgaaggtgccttcagtagagctcgagagatctttgaagatcaaggagcgacttgagacttcatctatgctaaaaaagctgcttttgatgcttgttctttttggtacttcgatggtaatagcagatggtgttgtcacatcagcaatgtcagttatgtctgctgttaatggcttgaaggttggaattgctagtgttaacgaaggtgaagtggtcatgataactgttgcatttcttattgttctgttcagtctgcaacggtttggaacaagcaaagtagggcttgctgttgggccagctttattcgtatggttttgctgccttgctgggataggaatgtataacctcagagtatatggtccagaagtactccaggcattcaatcctgtttatatctactattattttgaaagaaatcccactgaagcttggatgtccctggggggctgtcttttatgtgcaacaggatctgaggcaatgtttgctgatttatgctacttctctgttaaatctgttcagcttacctttgtgttccttgttctgccatgtcttctactgggatacctagggcaagctgcatttcttatggagaacttagataaaagtcagcaggtcttctttttgtccattccaagtcaggcattttggccagtggtattcatagctactctggcagcactaattgctagtcgtgcaatgacaactgctatattctcaactataaagcaggcaacagctctgggctgtttcccacgcctcaagattatccacacctctagaaagttcatgggccaaatatacatcccggtgatgaactggttcttgctggtttcttgtctggcatttgtcgcagtatttgggagcataaatgagattggaaatgcatatgaacttggggtcatgatgatgaccactgtcctggtcaccattataatgcttctgatatggcaggtcaacatcgtcatagttctatgctttctcaacctctttctggggctggagttatttttcttttcctcagttttgggaagtgcagcagatggaagttgggtgcttttggtatttgcagctgtattgtatttggtaatgtacatatggaactatggaaccaaattgaagtacgaaactgaagtcaagcaaaaactttcaatggatttattgatacagctaggctgcaatcttggtacagtgagggcgcctggtattggattgctctataatgaactggtcaggggtgttcctgcaatctttggtcacttcctcactacactgccagccatgcattcgatgatcatttttgtctgcatcaaatgggtcccagttccagttgtgcctcagaatgaaaggttcctcttccgtcgtgtgtgcccaaagaactaccatatgttccgctgtattgctaggtatgggtataaggatgtacgcaaggagaaccaccaagcattcgaacagcttctgatagaaagccttgaaaagttcatacgccgagaggcccaggaacgctccctggaacgctccctggagagcgaccataatgacgacaaagactctgaagaggagattgcttcttcatcatcaagagttattgacgagtcaggcggtgctgacaactcagccctgggatcaagcatgtcgttggaggagggatcaagcatggacaacgagctatctttcatccacaaggccaaggagtcgggcgtggtgtaccttcttgggcacggagacatcagggcccggaaagagtcgttcttcgtcaagaagctggtgatcaactatttctatgctttcctgaggaggaactgcaggaggggcatcgcgacactgagcataccccacacgaggctgatgcaggtggggatgcaatacatggtttagggttgcctagctaccttttctttttctatttcaagatgattactaactcgcggcagtagatggtgagatgcaagcgagagagagagatgtctgaagatgattttcctttgatagaggcaacactaaccgatctggtgttttaccgaaaggttgtgaaaactgaacccaagtatgatcatatcatatacataacaaggaaaccccgttgtgtgtgaagcaaggtaacaagcctgctgctgctcacacatattcatcctaccctgatgtgcctggtggtttctgcttggctgcttgtgctgagaggcgggaacagacactgatattgattgc

SEQ ID NO: 69903 - DNA, 1615 bp, Zea Mays
ggacagattcctcgcatagataaattccctgacggggacggagatgggaggaaaagctcctccatgagcgttcgcggcgacggggactggagaatttttatcgtcgcggggacaggatccaagaatcagaggtcaaagaagctttaaagaggatgaaatggggcaaggcggtgggcccggatggtatcccaatagaggcgtggaaatgctttgaggatattgctattgtttggctaaccaagttattcaacaatatttttcgatcaaataggatgcccgatgagtggaggagtacattagtatcaatcttcaagaacaagggagatattcaaagttgtaccaactatcgagggattaagctcatgacccacactatgaagctatgggagagagttattgagcatcgtctgagaagaatgacacatatcaccatgaaccaatttggattcgtgcctggaaggtcaaccatggaagcaattttctaaataaggcagtttcatggagcgatataaggagcacaaggacttgcacgtggtttgtatcgacttggaaaaggactatgataaaatacccaggaatctcatgtggtgggcattggataagcataaagtcccaacaaagtatgttacactcatcaagaacatgtatgacaaggctgtgactagtgtccgaacaactgatagtgatacaaatgttttcccgattaacataggactacatcaaggttcaactttgagatcttatctatttgccttagcgatagatgaggtcatgaggtatatacaaggagatatcccttggtgtatgcttttcgttgacgttgtagttctaatagatgtaagccaggaagggataaatagaaagctagagttatggcgtcataccctagagtcaaaatgatttagaattagcaggaaaaaaccgagtatatgatatgtgactttggtactacaattagtgaggatgaagatgtaagtttgggaggccaggtagtaacaaaggacactttctattatttgtgatcgatgctacagagagatggtgatattgatgaatatgttagccatataatcaaagcggggtggatgaaatgacgccaagcattgggagtcctatgcgacaagagagtgccacataagttgaaagacaagttatacaggacaacgattaggcctgctatgttatatggggctaagtgttgacctactaagagacgacatatctaacaactaagtgtcgcagagatgtgtatgttgcgttggatatgtgggcacacaagattggaccgaatgagaaacgatgacatacgcgatcggttaggagtagcaccaattgaagaaaagcttattcaacgtcggtggagatggtttgggcatgtccaccggagactcccaaaggcaccggtgcatagaggcatcataagacgggacaataatgtgaagagaggtagaggtcgaccaaacttgacatgggaggaggcaatcaaaaggaacttgaaggaatggaatatcccaatggagttgtgtttggatagaagtgcttggaaagaagctatccacattctcgaaccgtgattaggcccttttccttttagtgctctcaaaatattttccct

SEQ ID NO: 69904 - DNA, 404 bp, Zea Mays
ctcgcatagataaattccctgacggggacggagatgggaggaaaagctcctccatgagcgttcgcggcgacggggactggagaatttttatcgtcgcggggacagagtggagcttgaataaggggttaggaatgagtaaactgtcggagatagccttagttctttctgtggtgctaaattgtgccataagtggtccctcctatccattaatgctccctgcccctcctttagcaattagcactgctatctgaacaaaattaaagtgctaaactttagcactctctttagcaatgctaaagtttagcaccttgctaaaatttagcaaatgagatctaaacatgtccttatttagagcttgtgtgtcgcttcgggttcctagcacatgatttttaagtgtaatcttc

SEQ ID NO: 69905 - DNA, 1952 bp, Zea Mays
acagaaaaaacgcaggtgtcgaaacacattttcttgctccagagaatttaaaccgctgcgaattcaattcgaaagccccaagagagcatccatggcttccgctaccacctccatctcgtcgcaccccgccgccctccgcgacgtcaaagctgcgaggattggcgggctgaggcagcagcaggcgagcgtggccccgtcggcggcggcagcgcgtggccagcgcgctcgggcggtgcgatcgctgcgcgcggcggagcctgcgaggcagccggtggcggcttccgcggccgcggcggcgccggccgcgcccgtggccgacgaggcggcggcccttgcggccgtggactacgaggccctggcgcgtgagctggagggcgcgtcgccgctggagatcatggatcgggcgctggccatgttcggctccgaaatcgccatcgccttcagcggcgcggaggacgtggcgctgatcgagtacgccaagctgacggggcgtccgttccgggtgttcagcctggacacggggcgtctgaacccggagacgtaccagctattcgacaaggtggagaagcactacggcatccgcatcgagtacatgttcccggacgcgagcgaggtgcaggagctggtgcgcaccaagggcctcttctccttctacgaggacggccaccaggagtgctgccgggtgcgcaaggtgcggcccctgcgcagggcgctcaaggggctcagggcgtggatcaccggccagaggaaggaccagtcccccggcaccagggccagcatcccccttgtccaggttgatccttccttcgaaggcctggatggcggggctggtagcttggtcaagtggaaccccgtggccaacgtcgacggcaaggacatctggactttcctgcggaccatggacgtacctgtcaacaccctgcatgctcagggctacgtgtccatcgggtgcgagccgtgcaccaggcccgtcctgccggggcagcacgagcgtgaaggccggtggtggtgggaggacgccaaggccaaggagtgcggcctccacaagggcaacatcgacaaggacgcccaggcggcggcccccaggtccgccaacggcaacggctcggcgggcgccccggacatcttcgagagccccgccgtggtgtccctcacccgcaccgggatcgagaacctgctgcgcctggagaaccgcgccgagccgtggctcgtggtgctgtacgcgccctggtgcccgttctgccaggccatggaggcctcctacgtggagctggccgagaagctggcggggtccggggtgaaggtggccaagttccgcgcggacggcgagcagaagccgttcgcgcaggccgagctgcagctgcagagctttcccaccgtgctcctgttcccgggccgcaccgccaggcccatcaagtacccgtcggagaagagggacgtcgactcgctcctcgccttcgtcaacagcctccggttcgtagagaagggaggtggaggggactgggtttggtagtgacacaggaaggaacgagggttcaggggggaaaaatcaggtgtagcttttgtaactgcaaaatgattgcagcatgtatacctgaagtctgagcttctgaggccctgtgcttggtagctgagggagaggttacttgtgtgtgcttatagtcagtggcgagtgcctactataaggttcaccggtcatctaaagcactgttgtaaactgtattatttggagagtggagttttaatataggcataagaatgggtaagtcgctggagatagtctaagaaaaatcaaataagagaccaagatttgagagttttcgtttgtttataggttggttgtcaactatatagactgtagaaatcggagggtttgcatattgttagaccccgtttatttagtgctaaagtttagcataacatttttcactaaagtttaccacatatagaac

SEQ ID NO: 69906 - DNA, 2111 bp, Zea Mays
gcagaaaaaaaggcgagatgacactcactcggatccacggtggtgaccatgccggcgccctggaagtagcacgagccggcggcgcggccctgggactggtagtaggcgtcgaacgcgaacgacgcgtggctgcgcacgtcgtcgggctggtagcacgcctgcccgggctgtatcgccgtgcagtcggcgcgcccgggcccgcacgcccagtccatggccgcctgcaccgccttctggtccgcgtcgtcggcggccacgcagaaggtccggtccgtcgtgtcgttccccaggaacccgtccgcgccggacacgtgcaggaggtacaccggggtgccgttcccgtagaacaggccccagttcgcctccgacacggggcccgcccggaggtcctcgttgaagagctcgtagatgtaggcgctggactgcgcgccggcgccgggcgccatgggcgtgccggccttctcctccagcacgtgcttgatcaggttcgagttgtacgcgtccgcgttgtcccttcccgcgtacggctccgcgcgccggtccccgtacgacggccaccccgtctccgtcaccaggatcggcacgcccgcgccgcccgtcgcgttcaggttccgcacggccacgcgcaccgcgtccagcatcgcgtcgaacacgttcgtgtaccggagcagcgtgttcgggtccaccatctccatcgacggcggcagcggccggaacagcgcgttgtccagcgggatcacgcccttgctctgcatcagcgagtagtaggggtacaggttcagcatcagcggcgccgacgtgttggcgaggtgcgccagcagcggcgccacgaacgacttgtccagggactggttgaagaaggcctgcgacggcgggaacgggtccaccaccacggagaagggcagcggcgtcgacaccgggatggacgagaggttggcggcggcgagcgcggccgccagggaccggatggccgggagcagcacgggcagcgccgacgggagcgcggtcgggacctcgtccccgacggcgatggcggagacgacgttcggggtgctggagttcacgcccgcgaaggggaccacgcggcgggacacccaggaggcggccgtcgccggggaggaccccagcgccaggagctcgtcgttggggacccccacgatggcacgcacgccggaggccgctagcgccgacagcagccgcgggtccgcgtcgtacagccgcacgcgggtgatgcgctgcgcgcgcaggaacgacgccaggtccgacggcgacagcaggttcgtcacctcgaagagagatgaggtggagcaagaggaggaaggggaagagtagcaagcagctgccactgacactccctcctccgctcctgctccccattgggatttggtagtgtgccctgctgcgcctgctcctgctcgtgccggcctccgggactgcttctttcgtccaagactgcttcttttgatgcgcactcgatcgctttctccaggaatctccttccctcccacccccaagattgctgatttctgctgcgtggcgttggcgtgggagtgggagcgtgcgtgcttgccgcttggtgctggatggatggagctggtcctggagtgatgtcggcgaggttggtgaggtgtcggggcaaaagatgcgttgggattgggggattttccggggctcggttgggagtgggtgaattactgactctttgtttcttggttattggtgccttctagggttcaaggttcattagctgattagtgtcgactcctcactccgctgctattcggtggggacacagggtgggggagaaagcagtgtgccagagagtcagcaacctggacaatgggcactgaaatatgcacaagtcatgtcaatggtggacccccccctttctggccaccttgctaaacccttgtttttccccagacagttttagtgctgtaataacgatccaaaaatgttttaggcaatattcgcgcccgttgagcttaaactacatttttcacaagaatttcattgaagaagaaactagggtgaacaaatatagatataattttttttgctaaaacatcttgactcctagttgagttttggtgattaatgtcctctttgga

SEQ ID NO: 69907 - DNA, 1100 bp, Zea Mays
atgactttggcaaccaccccacccccatccatcgtcgtgcaggcaccgcctcgctcacccttcggcgacatcacccacaagaccgatccaccgccaacagcccgccaccgccaccacccgcctccgcgccgtctcgccgtccccgtccccgccctcccctgtgggctcgttcggcttcacgcactcaaggagaccttctccgtggacgtgtcggcggccggcacgcccgctccgtgtcccgcccgtcacgccttcaccatcgcgtcctcgtgcctcgccgcgctctccaatgtcaccgacgttgccggtgtgctcctgggacacgacttcgccttagtgagggatccgcaacttctctcgtcctgcttcggcaagcctgagactaaggatgctagggtaaatgctatgcgttcagctatatctgagacatttcttgagtccaatcggaggttgctgcagagaattttaaaaatgatgcacactgttgcatctcacacttctgaaaatcgaatgactgcatcggcagttggtgcctgtatggcgtctcttctgttgcgtccacttctggctggtgaatgtgagatggatgaagtatttgatatggatggtgacgattctgcgcagcttcttgctgcagcaaacgccgcaaacagtgctcaaggaattgtcgtaactctcttggaggaatatgagggcatttttcatgatgaacacctcagatgttccttgtcacctgaatctcaaattgaagatagtggtactgaagcatcaactgatgatggtaatttggaagccaagggcaatggatttcatgatgcagaaaatgatgtagatcaagaattggatgatgacaatggcgtggagcgtatacttagtgggaaattgagtgagagcagtggatatgctggcagtgacctctatgactacaagtctcgagaaccagattactgcattggagaacaagtgctcaggtgattaccaatggattggtttctatcacaatgatcttcagaatggcaatatcatgattgatgaaaagaccaacgtgctgaccatcattgtgatccatggtgaagactgggtttcctacaacaatgtac

SEQ ID NO: 69908 - DNA, 935 bp, Zea Mays
atgactttggcaaccaccccacccccatccatcgtcgtgcaggcaccgcctcgctcacccttcggcgacatcacccacaagaccgatccaccgccaacagcccgccaccgccaccacccgcctccgcgccgtctcgccgtccccgtccccgccctcccctgtgggctcgttcggcttcacgcactcaaggagaccttctccgtggacgtgtcggcggccggcacgcccgctccgtgtcccgcccgtcacgccttcaccatcgcgtcctcgtgcctcgccgcgctctccaatgtcaccgacgttgccggtgtgctcctgggacacgacttcgccttagtgagggatccgcaacttctctcgtcctgcttcggcaagcctgagactaaggatgctagggtaaatgctatgcgttcagctatatctgagacatttcttgagtccaatcggaggttgctgcagagaattttaaaaatgatgcacactgttgcatctcacacttctgaaaatcgaatgactgcatcggcagttggtgcctgtatggcgtctcttctgttgcgtccacttctggctggtgaatgtgagatggatgaagtatttgatatggatggtgacgattctgcgcagcttcttgctgcagcaaacgccgcaaacagtgctcaaggaattgtcgtaactctcttggaggaatatgagggcatttttcatgatgaacacctcagatgttccttgtcacctgaatctcaaattgaagatagtggtactgaagcatcaactgatgatggtaatttggaagccaagggcaatggatttcatgatgcagaaaatgatgtagatcaagaattggatgatgacaatggcgtggagcgtatacttagtgggaaattgagtgagagcagtggatatgctggcagtgacctctatgactacaagctgct

SEQ ID NO: 69909 - DNA, 792 bp, Zea Mays
taactgcaaagcgaggtctggctgctgtgcttccaaattgatgccggacgattgtcgagctggtggtgaacctggagatgggaacccgatgttcaagtccgggcggagtacatccttgcctggcttctgttgcatgtggggaaacagcccctgccactgtggttgcccttgtgatcttgcgaaatctggctgcaccaactggggaaatattaccagccccttgttttgaaccgagttctctctaactacctgaacaggatgtctaaagaactgaggaacaacgcttaatttggtatcatcacaaggttggacattagcaaatggcattttccagccacaattattgtcaacgaaagctgggctgacaatggttggtttgttctctgtagcagcaccaaacgagatccaagattgagccactggagctgatggaatgctctggttctccctaacattagctggaaatgctgagaatatgttccgaggagcatcaagacctctgtttggtatatttgcttgggcaggcatagcggttgcgcctgctgattttgtatggtcactgacaatactttggccattcaaattcatggcaaattttgcagcatttattgattgatttttagtgatgaacccaatacttgtcgatggtctgcttttttttgatgttccaacctttccatcaccaggtcgtccatggtacacccatgttgcttcatttttgggctgtagtacagttgcttcttgggactggaacaagggtttagactgcccgtttgaggaatgcatatcatg

SEQ ID NO: 69910 - DNA, 2829 bp, Zea Mays
atacatccatgacatatcctggcctcaccaaactcagccttggttgcaggctcttcaattacattttctacgtcgatttcgaagcatcgatgacggatgtccgcgcgcaaaatgcattgaagggtctcgagattgttagcttggttctcaagagccatgtattctcatcttctgtcggatttcagagaaaagctggtatcagctgcttgagggatgggtttcccaccggtaccgatccccagcgactccggccggccgcaggactcctcgctgcgcctatggagggactcttcctcatcgacgtctccaccgaggacgatcttctcttcaacctcgtctcaccggccccgcggcgtcccgatccgctccacgcagtgggagccgaggcaacctcctccggcgtttctccatcggcggtggttcgggctacggatccggactgtgtgatggaggagcgggaagatcccgagcggacggagtccccggagcagcgcaaggccaagaagggggtaaacctccgcaagagcttggcttgggacagcgaattttttaccagtgaaggggttctcgacactgaggaattagccattgtaaacagcacctatcgtaaggcccaaggttccaggctgcctggaatcattgaggaaacgaggagatcaggggagtcaacaacctcaactctggaaagtgaaacctgggcgatggaaagccttgagactgaactatttgataatgtccgtgcttcgatccagagatctcttggcaaacctgataaactttcaggtcggcccgttgctgcctcaaaccccccaaaggccacagcaaatgcacctcgtgttgcagctagaaaaggtgttgatcggatgccacagtcaaagatgagggcccctgtttcaacaagccaaggagctgttagcagacaaaggccccaagtcaccatcaacgagcctgtggctgcaagagataatttaacaggagctgcagaagcaaagatatcctcaaagcctcctagggctttgccaagagttgctatgatgagatcatcaactaatacaactgtcacctctagggcttcagacaaaagaaacagcactgggggtgctgtcaacaggcaggcagttggtaaaactgccagtacttcagctgtcctgcgatctggcaggggtacaaattccagttcaatcttgaaatcaggtttcttcacatcagcagcaacttcttcccattgtatgttgatggacactaagccagaagccaaaactaaatcagcaacactaagcatcaagaatagacctgctcagagggtccctgttcgtccgtcatcaaaatctgatatcagcaaaactataccctcaagatcatcagggaacaggatcccagctaagggccatgctgaccgtgcatcaccaagcatttcacctagcagctccatggacagcatgagctctgtgatatctggggcttcaactgcttccaccgtagggaagatgagtcatacatccgataatttgaatgcactgtccccctccctcaggaagagcaatgactgccatccgaatccaaagtttaggcctcctattgtcacagagggacattcttctggaacagcagcatctagagataatttaaaagctactgcagaaataaccaaccagggaaaaggccttaagccatcggggcttcggagacccacacccaagattggttattttgatgctgagaattatattgaccaaaacatcggtgcacaagtgcaaccacaactttcaaatatccagtgtctacctactcagaacatgaatctgaatgccgcaccatctacctacggccaacaggaatcaaaattgacagcagcacctcatgaggaaagctgtgtttccaaaagtaagctgatgacgccactgtctcttatggtggaagtagagccttttaaggtggccgaactagcttgcacaaacctgactgatccagttgtggtcagacctgaatctgtgcaaccgcaatccatggagatccagtgcttgctacctgccacaccaaaccctcagccaacctttcatcaacaagtattaaaacctatagcagcacctcttgaagctgtgcaaatggaagtagaagcttttaaggtggacaaacctgaagcgtgcatacacctgtccagtccagttgtcgtgaagcccgaaaacaaatccattgaccaaaacgctggagcactgctgcaactgcaacttgtcgccgaacctgaatcatgcacgcgcaagtctaagacagtggtggctgcagactattccaaggagaatattccggctttgaatcagaacatacaagctaatggcgatgcgaattcgttagttgagttacttacccagaagctatcctccatttcccttggggaggctgcccctaacgtggcccctaggtcctgctgggaataaggtttggacactatgctgttggttgtttctgattaccctctttgttatctgtaggcaaaggcaaccgccgctgaggaacctgatttctttctctgcttgtggtgtaaaatgcttgtacacagggctttatagaatttcacttttctattgtatgcataaacacatgatctttgtctattgccggtttgcaagtagcgtgttattggtataacattagtttagtctctcgattctacgatattacttcgatgtacttgtatagcacgatctgtttgtactactttgagtcccaaaaaaatatataattttgagtttggactaatgcaagcttattaagttccactagatcattgaaaactgtataacatatattttgaaatagttttattatgaa

SEQ ID NO: 69911 - DNA, 2838 bp, Zea Mays
atacatccatgacatatcctggcctcaccaaactcagccttggttgcaggctcttcaattacattttctacgtcgatttcgaagcatcgatgacggatgtccgcgcgcaaaatgcattgaagggtctcgagattgttagcttggttctcaagagccatgtattctcatcttctgtcggatttcagagaaaagctggtatcagctgcttgagggatgggtttcccaccggtaccgatccccagcgactccggccggccgcaggactcctcgctgcgcctatggagggactcttcctcatcgacgtctccaccgaggacgatcttctcttcaacctcgtctcaccggccccgcggcgtcccgatccgctccacgcagagtctctagtgggagccgaggcaacctcctccggcgtttctccatcggcggtggttcgggctacggatccggactgtgtgatggaggagcgggaagatcccgagcggacggagtccccggagcagcgcaaggccaagaagggggtaaacctccgcaagagcttggcttgggacagcgaattttttaccagtgaaggggttctcgacactgaggaattagccattgtaaacagcacctatcgtaaggcccaaggttccaggctgcctggaatcattgaggaaacgaggagatcaggggagtcaacaacctcaactctggaaagtgaaacctgggcgatggaaagccttgagactgaactatttgataatgtccgtgcttcgatccagagatctcttggcaaacctgataaactttcaggtcggcccgttgctgcctcaaaccccccaaaggccacagcaaatgcacctcgtgttgcagctagaaaaggtgttgatcggatgccacagtcaaagatgagggcccctgtttcaacaagccaaggagctgttagcagacaaaggccccaagtcaccatcaacgagcctgtggctgcaagagataatttaacaggagctgcagaagcaaagatatcctcaaagcctcctagggctttgccaagagttgctatgatgagatcatcaactaatacaactgtcacctctagggcttcagacaaaagaaacagcactgggggtgctgtcaacaggcaggcagttggtaaaactgccagtacttcagctgtcctgcgatctggcaggggtacaaattccagttcaatcttgaaatcaggtttcttcacatcagcagcaacttcttcccattgtatgttgatggacactaagccagaagccaaaactaaatcagcaacactaagcatcaagaatagacctgctcagagggtccctgttcgtccgtcatcaaaatctgatatcagcaaaactataccctcaagatcatcagggaacaggatcccagctaagggccatgctgaccgtgcatcaccaagcatttcacctagcagctccatggacagcatgagctctgtgatatctggggcttcaactgcttccaccgtagggaagatgagtcatacatccgataatttgaatgcactgtccccctccctcaggaagagcaatgactgccatccgaatccaaagtttaggcctcctattgtcacagagggacattcttctggaacagcagcatctagagataatttaaaagctactgcagaaataaccaaccagggaaaaggccttaagccatcggggcttcggagacccacacccaagattggttattttgatgctgagaattatattgaccaaaacatcggtgcacaagtgcaaccacaactttcaaatatccagtgtctacctactcagaacatgaatctgaatgccgcaccatctacctacggccaacaggaatcaaaattgacagcagcacctcatgaggaaagctgtgtttccaaaagtaagctgatgacgccactgtctcttatggtggaagtagagccttttaaggtggccgaactagcttgcacaaacctgactgatccagttgtggtcagacctgaatctgtgcaaccgcaatccatggagatccagtgcttgctacctgccacaccaaaccctcagccaacctttcatcaacaagtattaaaacctatagcagcacctcttgaagctgtgcaaatggaagtagaagcttttaaggtggacaaacctgaagcgtgcatacacctgtccagtccagttgtcgtgaagcccgaaaacaaatccattgaccaaaacgctggagcactgctgcaactgcaacttgtcgccgaacctgaatcatgcacgcgcaagtctaagacagtggtggctgcagactattccaaggagaatattccggctttgaatcagaacatacaagctaatggcgatgcgaattcgttagttgagttacttacccagaagctatcctccatttcccttggggaggctgcccctaacgtggcccctaggtcctgctgggaataaggtttggacactatgctgttggttgtttctgattaccctctttgttatctgtaggcaaaggcaaccgccgctgaggaacctgatttctttctctgcttgtggtgtaaaatgcttgtacacagggctttatagaatttcacttttctattgtatgcataaacacatgatctttgtctattgccggtttgcaagtagcgtgttattggtataacattagtttagtctctcgattctacgatattacttcgatgtacttgtatagcacgatctgtttgtactactttgagtcccaaaaaaatatataattttgagtttggactaatgcaagcttattaagttccactagatcattgaaaactgtataacatatattttgaaatagttttattatgaa

SEQ ID NO: 69912 - DNA, 1250 bp, Zea Mays
atgtgcccggtcgcccacgccaaggctggtcaaagagttggtggagttagaagacgtgttgcatccatccaatggaacatgcacgactatggcagcatcattcccacttcctggctatcaaggcccaagttctgtggcatggcaccagtgcgacactatggcggtgtggacgacatgcaccacgacctaccgcgtccctgtagcgacgtgtgcataaacctaccatgtacctactttcttgtagcttatgccacgggcttccgcaatgctacgggtagggcatacgtctacaacacctcggacatgtctacaggacatgacttccattactgtaggatgggctagacccctggctagactcatctgtcagttgtaaccccctcacccttggtatataaaagggatagggtggcccctgtgtaaggggttccaactccacacattttacacattcgggctctcttagccatccggtgctcggcacttagccatttgcaagcaatccaatccactcaaagagatcgtagggtattacgctctggtgatccgaacctttataacccttgtctgcctcgcggttctatgtatgtttgtcatgttcctcctcccagttaatcgggttgggcctaatcggtcgtctaagcaatagggtgatacaccaaaatccctgccgaatctatatggggtatactccatgtatctgtgactgtcacctgatgacagtcgggtatttagtgaatctagataatatcggtgagatataacaaaaaaacttcgtcttcaaggacatgattatccccatccggactatccaatgtgtacggtaaaaagtcttcactttgatgcttgtagtgatcctttttagagttacttagtctatcaccaacaacttactcatcaccatatgttatttcaaacttcactctaactattaggctttggcacatgaggtgcgtggatgaagaagccctaaacaaggatgaccgttactggtatggtggtgaagctagctacttttactcgtttaattaatttttgaattatattgggaacaacatatataggatatgtttggcatccctctagtttaaagaattgttggtgctctaactacgggcaatcaaacggaggagactactcctaattaatacaatacagatataccaccctagaacagtacagatagcacatttgtttatactatcttattattaagacggtcatgacgacgatcgacgagaacggatacg

SEQ ID NO: 69913 - DNA, 2728 bp, Zea Mays
gttggccaacacgtggtagcatcggacccccttaggtccgagtggccgttctcgagggtctggcccccgggggcacgtttcgagaggccatgtattcaaggtacgtggcgaactcagactccctccgctagggtttcagagcgttgattataggtgtcggtctttgctcaaatccagtggccttactaggcaggcccaaccaatgggctaggatggaccaccattagcatggtgaaaaagggtagttcggggggtccgccttgacccaacagtagtgggtaccccaatcttgaggtaccaacaagtctctctattgaatcactacatagaaatgtcattttattcaaagtttgttagtttttgccttgatcaatggcaaaaattgttattcattacatggcttctactagagtcagatatgagttatgactactaccaccagcagccataagataggtgcaaatactacaacactagcttacttcatgaagatagcatacatgagatgcaaaatagccacatagactagtgtgtaccatctatatagcctttccttcaacataccattgatgactttggttgtagtaacatcagttgtggcttctctcacacccggtattggagcaacatcaattataccttagagtgcttgttgatgaggaaacaccccaccatgctcacttgggaatatcatcatatcctcaaactagaatactgacaatctgacatcctctagcattgagataagatcacaagcaattccattaagagtgaggatgtagatgaacaaaacaaaagacttacacaaaagtataagcacttgaagaatatgtctccatagtttgctctagccatttctacgttcaagttgcagaacacattgcaattagggcaaaatacccttctcaccattctttagatgctactacatgtttgtgagttgtgacataatcacctttgagacaagagttgagacaaagacaaatctatagaagagagccaaccaatggaaggagaatatgtgtaaagtgttgtgagctcaccctattaaataataaaacttttctagaatgatgccaaaatgcctagtttggcgccaagatgccatctggacattttgcttaatagcacatagaggacataaatcttctttgcttttggttgtgaactaagggcatgatggtccttttagtctctacttaataggcattatatggccttagaacaatatatagtggcatgtacaagatgcaaaaaactaaaatgatgttcaagtgtcacgagatgttttctagtggcatgcaaagcatttagtgaagattcaatggctcatggggaattaactcaaggatcaatcaagtagtgaaagacaatgttgaggtggatggaattttccccttttgtgaataataggtttcacatatgtccaatgggtgtaggtgcgcacatagatcgacctccttgtcaatagttaggatttgctagagatctggtgctagtacaaccatgtcagtatgggtgtacacatcacataatcatgtcaggaaccataggtttcttgatgcgaataaggataccatttatatgtgacaatatatatgactattttgtgtcaacacaaatttatttgtagcctcgaccctaatatggtctataagtcattatgaagtttaagatttatcgtctattggtggtatttttagatttactaatatcaccctttgtctcatgcattttgctctttttcttaacctttttatttttcttagttctttctttctagggcatttttgtcgcattaaaatgactttttcctccaaataatgttttacatcatgtggtttatgctataaaagaaaatgatgggacaaggacaattaacatttataactagggttgtaataagaaagacaaacaacatatctattttgcaaatagatacatgtattatcgtatcaaccatataaaagcttgcaaataaaatcttgttaggaggtgcaactaatataaagtaaaaaaacttgagagggcatgtagtaatatagatggggcattgatatgataagtatgcaaaaccaaagttatggtgatgaggttacattagtggcaatgccaaaatatatattagtcatacacaacctaaagttccaaatacttcataatttgtgtcaaatgaaactgtttgatctgaaaaggcaacatgataaataataaagtgtatcataaggagtggaatatcataagtttcaatatagcatccagaaaaatatatacttccatttgctaaatagatgtgaaatatgttgagttatgagatgatgaatggacaagtatggactaatagtgcgtttggtttcagaacgaagtgggttgggtcgaaaccgacccatttttgtgggttgggacggacccgttccttgttagtgcccctaggtatgggtatcctagtcactacaatcaaactaggtctggacaaagaggacaacctacaatccttaccttcgaggtggagctggtcaacaagaccctttgaagaaacaacagaatatatggtctgacccctgtcacgtgccagcgcaagagagccccttgccagtcaagccaacaacaagctccattctagaacaaccctcgccaacatgtttgatgggggccgattgtgccatgtgatcatgttggccccatgcccttggtgggtctcgtgccgccatgtgtccttggggtcctg

SEQ ID NO: 69914 - DNA, 1374 bp, Zea Mays
caaaaaagtgaggagcgagaagacgacggactagatcattcctcaaaccaaacagcctattagaacatggcctagttccacgttccgggaactcgttcccaaatgaggaacaggagcattgtggaacatcgctccaaacccagtgtgaacatgacccagatcaaaggaatatatgctggagatggcatggttatccattttacaagggcagctggacatgagattggaacaggaacattcttggactggttcctttatagctcctctccggcagcaactgagggtcctccctgccagaaatgtgggcacctagtcaagtccgatggggtcatcacctcttgcctcgattgcttcttagatgggggcagcctgtacctctttgactacgctgtgtcgcctgctttcttcctcgccaaagcacggggaggaacgtgcaccctggctgcctctgaccccagtgacgttgtgatccaccgtgcacggtacctcctggacaatgggtttggcatgtactccctgttcaagaacaactgcgaggacttcgccatatactgcaagactgggctgcttgtggagaccgctttcagtgttggccgtagcgggcaacttgcgtctctgactgctgccttcagcgccgtggcctcgtcccccttgcgtttcctgacaaccagtgctggtggcctggcaattgtgaccagcggcatgtactgtgtcgggcggtatgtgtcggatattggtgtccggcgtgatgttgtcaaggtccctgtcgaaaggcttgtggagcagaatgttacttggattcctcagtgtgtggctacagagacagatatcgcggcaggagcaccgcagcagcagttggaggttccttgtgcggttgccgaggaagcatccgttatacagcccgcggcaccgtgatccattgctgaaatgtcatcatgtaccaggtgttggcatgagacaggacaactggaactacgtacttgtgtggaagtacatgtaatgatgtatctggtggtgttatgcaatccattgctgctgctgctaatgttgcaagcaatgatgatgatgatggatgtggttccatgaccgctattattacagaattgagaagacctgtatttgcccttgatgattaatgatttctgttatacagttgcttatggatgcatctgattgtgcattttccgagtcgccatacattagcaatcttgacacgctcttcactcagtccaaaaccacaacttatatctagattaaagtaagcatcacgagcaattctcttggaatagcgcaaaatgaactgattctagacgttgcagtgtacgccccttcagggcttgttcggttctacatccatatggattgagtgagttt

SEQ ID NO: 69915 - DNA, 1659 bp, Zea Mays
gcgctgccggccatcatcgtttacgactagggctgcaaatgggcggaggtctaccaaacactcacagcgtgaggagttcgaaagaaagggagaaaatgttatgcttgcttgccttgagggaagcgtcgccgtctgcccacacccgcaccgcacccaaccgcagcggagccgggagccgaaggccgagggtattcttccttcgccgctaagcacgcctcctctccacaggcagccgacccaggggaagcgtcgccgtctgcccccaccccgaatctgatgcttcatcgattgatttggagcggagcaggagggggagccattgccggtgttctgattgctgctggaggtcgagggatggtaggggtgctgtcgaatcgcgtggatcgggacgacctcaaggccggggatcacatctacacttggcgggccgcctacatctacgcccaccacggaatatatgctggagatggcatggttatccattttacaagggcagctggacatgagattggaacaggaacattcttggactggttcctttatagctcctctccggcagcaactgagggtcctccctgccagaaatgtgggcacctagtcaagtccgatggggtcatcacctcttgcctcgattgcttcttagatgggggcagcctgtacctctttgactacgctgtgtcgcctgctttcttcctcgccaaagcacggggaggaacgtgcaccctggctgcctctgaccccagtgacgttgtgatccaccgtgcacggtacctcctggacaatgggtttggcatgtactccctgttcaagaacaactgcgaggacttcgccatatactgcaagactgggctgcttgtggagaccgctttcagtgttggccgtagcgggcaacttgcgtctctgactgctgccttcagcgccgtggcctcgtcccccttgcgtttcctgacaaccagtgctggtggcctggcaattgtgaccagcggcatgtactgtgtcgggcggtatgtgtcggatattggtgtccggcgtgatgttgtcaaggtccctgtcgaaaggcttgtggagcagaatgttacttggattcctcagtgtgtggctacagagacagatatcgcggcaggagcaccgcagcagcagttggaggttccttgtgcggttgccgaggaagcatccgttatacagcccgcggcaccgtgatccattgctgaaatgtcatcatgtaccaggtgttggcatgagacaggacaactggaactacgtacttgtgtggaagtacatgtaatgatgtatctggtggtgttatgcaatccattgctgctgctgctaatgttgcaagcaatgatgatgatgatggatgtggttccatgaccgctattattacagaattgagaagacctgtatttgcccttgatgattaatgatttctgttatacagttgcttatggatgcatctgattgtgcattttccgagtcgccatacattagcaatcttgacacgctcttcactcagtccaaaaccacaacttatatctagattaaagtaagcatcacgagcaattctcttggaatagcgcaaaatgaactgattctagacgttgcagtgtacgccccttcagggcttgttcggttctacatccatatggattgagtgagttt

SEQ ID NO: 69916 - DNA, 1584 bp, Zea Mays
gcgctgccggccatcatcgtttacgactagggctgcaaatgggcggaggtctaccaaacactcacagcgtgaggagttcgaaagaaagggagaaaatgttatgcttgcttgccttgagggaagcgtcgccgtctgcccacacccgcaccgcacccaaccgcagcggagccgggagccgaaggccgagggagcagggaccaatcatattgaactcagatttggagcggagcaggagggggagccattgccggtgttctgattgctgctggaggtcgagggatggtaggggtgctgtcgaatcgcgtggatcgggacgacctcaaggccggggatcacatctacacttggcgggccgcctacatctacgcccaccacggaatatatgctggagatggcatggttatccattttacaagggcagctggacatgagattggaacaggaacattcttggactggttcctttatagctcctctccggcagcaactgagggtcctccctgccagaaatgtgggcacctagtcaagtccgatggggtcatcacctcttgcctcgattgcttcttagatgggggcagcctgtacctctttgactacgctgtgtcgcctgctttcttcctcgccaaagcacggggaggaacgtgcaccctggctgcctctgaccccagtgacgttgtgatccaccgtgcacggtacctcctggacaatgggtttggcatgtactccctgttcaagaacaactgcgaggacttcgccatatactgcaagactgggctgcttgtggagaccgctttcagtgttggccgtagcgggcaacttgcgtctctgactgctgccttcagcgccgtggcctcgtcccccttgcgtttcctgacaaccagtgctggtggcctggcaattgtgaccagcggcatgtactgtgtcgggcggtatgtgtcggatattggtgtccggcgtgatgttgtcaaggtccctgtcgaaaggcttgtggagcagaatgttacttggattcctcagtgtgtggctacagagacagatatcgcggcaggagcaccgcagcagcagttggaggttccttgtgcggttgccgaggaagcatccgttatacagcccgcggcaccgtgatccattgctgaaatgtcatcatgtaccaggtgttggcatgagacaggacaactggaactacgtacttgtgtggaagtacatgtaatgatgtatctggtggtgttatgcaatccattgctgctgctgctaatgttgcaagcaatgatgatgatgatggatgtggttccatgaccgctattattacagaattgagaagacctgtatttgcccttgatgattaatgatttctgttatacagttgcttatggatgcatctgattgtgcattttccgagtcgccatacattagcaatcttgacacgctcttcactcagtccaaaaccacaacttatatctagattaaagtaagcatcacgagcaattctcttggaatagcgcaaaatgaactgattctagacgttgcagtgtacgccccttcagggcttgttcggttctacatccatatggattgagtgagttt

SEQ ID NO: 69917 - DNA, 1643 bp, Zea Mays
gcgctgccggccatcatcgtttacgactagggctgcaaatgggcggaggtctaccaaacactcacagcgtgaggagttcgaaagaaagggagaaaatgttatgcttgcttgccttgagggaagcgtcgccgtctgcccacacccgcaccgcacccaaccgcagcggagccgggagccgaaggccgagggtattcttccttcgccgctaagcacgcctcctctccacaggcagccgacccaggggaagcgtcgccgtctgcccccaccccgaatctgatgcttcatcgattggagggggagccattgccggtgttctgattgctgctggaggtcgagggatggtaggggtgctgtcgaatcgcgtggatcgggacgacctcaaggccggggatcacatctacacttggcgggccgcctacatctacgcccaccacggaatatatgctggagatggcatggttatccattttacaagggcagctggacatgagattggaacaggaacattcttggactggttcctttatagctcctctccggcagcaactgagggtcctccctgccagaaatgtgggcacctagtcaagtccgatggggtcatcacctcttgcctcgattgcttcttagatgggggcagcctgtacctctttgactacgctgtgtcgcctgctttcttcctcgccaaagcacggggaggaacgtgcaccctggctgcctctgaccccagtgacgttgtgatccaccgtgcacggtacctcctggacaatgggtttggcatgtactccctgttcaagaacaactgcgaggacttcgccatatactgcaagactgggctgcttgtggagaccgctttcagtgttggccgtagcgggcaacttgcgtctctgactgctgccttcagcgccgtggcctcgtcccccttgcgtttcctgacaaccagtgctggtggcctggcaattgtgaccagcggcatgtactgtgtcgggcggtatgtgtcggatattggtgtccggcgtgatgttgtcaaggtccctgtcgaaaggcttgtggagcagaatgttacttggattcctcagtgtgtggctacagagacagatatcgcggcaggagcaccgcagcagcagttggaggttccttgtgcggttgccgaggaagcatccgttatacagcccgcggcaccgtgatccattgctgaaatgtcatcatgtaccaggtgttggcatgagacaggacaactggaactacgtacttgtgtggaagtacatgtaatgatgtatctggtggtgttatgcaatccattgctgctgctgctaatgttgcaagcaatgatgatgatgatggatgtggttccatgaccgctattattacagaattgagaagacctgtatttgcccttgatgattaatgatttctgttatacagttgcttatggatgcatctgattgtgcattttccgagtcgccatacattagcaatcttgacacgctcttcactcagtccaaaaccacaacttatatctagattaaagtaagcatcacgagcaattctcttggaatagcgcaaaatgaactgattctagacgttgcagtgtacgccccttcagggcttgttcggttctacatccatatggattgagtgagttt

SEQ ID NO: 69918 - DNA, 2756 bp, Zea Mays
cccgtcagactcttgagcggcggccggagccggctactccggcggaaatcgcctcccgagttgcctgatcggctccctgaacgagagtggtcagaatcatcttttcccactcctgccgtctattttcccgactactctacgtgcgctttctctctctgcgcaactaggtgaccgcgaccgcggccaccgccctacgtcacgtacgtgcttgctagagtctagcctcgtcggttccttcgcatggtctcgttcaggcggacccttcgccggcgaccaacacccaccagcaatttactggaagtgtggaaccacttctgatgctgtctttgtaaatattgatggagctagctgagtagaaatggactgcagtcaagatccccaagaagaaagccatcaaagaagggagaatggtgaagaagcagaaaagacggctgactatggaaatgctttgagtcgtaaggaggtaacagaagagcttcttggttgtgtggttcatagtgaggaagaggcgtacaggttgtactgtgattatgggcatcgaatcggttttagcgtgcggaagggcaaacagtcttactttattggtaccaagaatattcgaacaaaggattactactgctcaaaggaagggcttaaatacgatgagcctgttacagaagcaaattttaatcgaccagacacaagaactaattgcaaagcaatgatccgctttagagttgacgagaaggggcggtggacagttatacgctttgttcctgtacataatcaccagttggcaaaacctggagaaagacacatgctgagatcagccaaatcgcttgctgttggcaaatcaggtgttatagatccattagcatctacagaggcacatccaattaatggtttctctgatatgacaggtgatatagttgagaattcagggtatactataagggaatgttacaatcaagtgggcatgcagagtataacagtaattgaggcaggggatagccaaagtcttgtcagctatttcaagcataaaactaatgaggaaggcatgttctattgggacgtccaagttgatcaagaagggcgcatgacgaacttcttctacagggatggtaaaagtagaaatgattatggctgctttggagatgccattatatttgatacaacctaccgcacaaacaaatataacttgatatgcgccccatttgttggtgttgaccaccattggcaaaatgttgtttttggctgcgcgttcttgttagacgagtctgtaacttcctatgcctgggtatttaaatcattcttggagtcaatgggagggcgatcaccaaaatcaatattcactgatcaggatgaagctattatgcaggcagtcaaacaggttttccctaatacgcaacattgtttttcctactggcatattctgaagaatgctcaatctcatttaggctcactaaatacgtctcaagcatttcaaagtatgtttaccaagtgtatgcaaggatctgactcagaagaggattttaaggaatcatggactgcaatgatccaggaatacaagctacaggataataattggttgattgacctttatacattccatcataaatggtgctcggcgtttaacaaagatacatttgatggtggaattaattcttctcagtggggggaggtttcaagtaatattctcaatggaatttctgatgaaaatacctctcttacacgttttgcccttttgctagaaaaggttgtcaaggatctacgtagaaatgaatctgaagaggattttcgatgtagccaaactgctccagtccgtgcaattaagcatagtaccgttttgaagcaagctgcagaatcatatacacataggatctataaattatttgaagcagaatttctggatgggtgtggagcaacttcatgccatgaaacttcgagtggtggaaatttattgaggtttggaattacaatgcaggggaggggttcaaaagtatgggatgttgttcttgacacttccaccatggagatcagttgtggttgtagaaagtttgaaaggatgggtcttctttgttcgcatgccctcaaagtcttcaccctgcagaatgttgacacaattccagaaaagtatgttttgaaacgctggacaaaagatgccaggagaagcatgtatacacttgctcaggatgattcaacccaacaggaatgcacagaggctgaacttgcatatcgcaatcgggcaatgcagtatgcatataacctaattataaagagccaggaactggaagaatcacgaaaaatattctgggactcccttgaaactggagagaaggcactggaagtgttctttgaaatgagaaacatgcgcactcaagcagccaaggatgctgataagaatgtaaagaagaagaaaaaaacatcaaaaggaacaaacccaaaaaaagctaaacaagccccaggagtttcctcaactggtccagagctgatagtccatactaatgagcatcaatttcaatcttcacaagatgctcagggtaatgcaaccattggaagaccatattactatcaggcttttccaaatgcccctatacaaccaaaccagatgtacatgcatacaaatatgcacacaatgcccctttgcacaccgcaggagctgtctgcatatgctgcaatacgccccaattcaatgtttggtggtgccaagaacatctgaaggatattaagcagagaaagtcaagactagaggcagcggcagctcgcaggcaatcaac

SEQ ID NO: 69919 - DNA, 3627 bp, Zea Mays
cagactcttgagcggcggccggagccggctactccggcggaaatcgcctcccgagttgcctgatcggctccctgaacgagagtgcaatttactggaagtgtggaaccacttctgatgctgtctttgtaaatattgatggagctagctgagtagaaatggactgcagtcaagatccccaagaagaaagccatcaaagaagggagaatggtgaagaagcagaaaagacggctgactatggaaatgctttgagtcgtaaggaggtaacagaagagcttcttggttgtgtggttcatagtgaggaagaggcgtacaggttgtactgtgattatgggcatcgaatcggttttagcgtgcggaagggcaaacagtcttactttattggtaccaagaatattcgaacaaaggattactactgctcaaaggaagggcttaaatacgatgagcctgttacagaagcaaattttaatcgaccagacacaagaactaattgcaaagcaatgatccgctttagagttgacgagaaggggcggtggacagttatacgctttgttcctgtacataatcaccagttggcaaaacctggagaaagacacatgctgagatcagccaaatcgcttgctgttggcaaatcaggtgttatagatccattagcatctacagaggcacatccaattaatggtttctctgatatgacaggtgatatagttgagaattcagggtatactataagggaatgttacaatcaagtgggcatgcagagtataacagtaattgaggcaggggatagccaaagtcttgtcagctatttcaagcataaaactaatgaggaaggcatgttctattgggacgtccaagttgatcaagaagggcgcatgacgaacttcttctacagggatggtaaaagtagaaatgattatggctgctttggagatgccattatatttgatacaacctaccgcacaaacaaatataacttgatatgcgccccatttgttggtgttgaccaccattggcaaaatgttgtttttggctgcgcgttcttgttagacgagtctgtaacttcctatgcctgggtatttaaatcattcttggagtcaatgggagggcgatcaccaaaatcaatattcactgatcaggatgaagctattatgcaggcagtcaaacaggttttccctaatacgcaacattgtttttcctactggcatattctgaagaatgctcaatctcatttaggctcactaaatacgtctcaagcatttcaaagtatgtttaccaagtgtatgcaaggatctgactcagaagaggattttaaggaatcatggactgcaatgatccaggaatacaagctacaggataataattggttgattgacctttatacattccatcataaatggtgctcggcgtttaacaaagatacatttgatggtggaattaattcttctcagtggggggaggtttcaagtaatattctcaatggaatttctgatgaaaatacctctcttacacgttttgcccttttgctagaaaaggttgtcaaggatctacgtagaaatgaatctgaagaggattttcgatgtagccaaactgctccagtccgtgcaattaagcatagtaccgttttgaagcaagctgcagaatcatatacacataggatctataaattatttgaagcagaatttctggatgggtgtggagcaacttcatgccatgaaacttcgagtggtggaaatttattgaggtttggaattacaatgcaggggaggggttcaaaagtatgggatgttgttcttgacacttccaccatggagatcagttgtggttgtagaaagtttgaaaggatgggtcttctttgttcgcatgccctcaaagtcttcaccctgcagaatgttgacacaattccagaaaagtatgttttgaaacgctggacaaaagatgccaggagaagcatgtatacacttgctcaggatgattcaacccaacaggaatgcacagaggctgaacttgcatatcgcaatcgggcaatgcagtatgcatataacctaattataaagagccaggaactggaagaatcacgaaaaatattctgggactcccttgaaactggagagaaggcactggaagtgttctttgaaatgagaaacatgcgcactcaagcagccaaggatgctgataagaatgtaaagaagaagaaaaaaacatcaaaaggaacaaacccaaaaaaagctaaacaagccccaggagtttcctcaactggtccagagctgatagtccatactaatgagcatcaatttcaatcttcacaagatgctcagggtaatgcaaccattggaagaccatattactatcaggcttttccaaatgcccctatacaaccaaaccagatgtacatgcatacaaatatgcacacaatgcccctttgcacaccgcaggagctgtctgcatatgctgcaatacgccccaattcaatgtttggtggtgccaagaacatctgaaggatattaaggtccagattcatgtggatgtcattggaaaaccttattgagactttcgctatcaactccgctttgatctctgtggacccatttatggaggcctggtggcacttcatgtttggttggttcaggggctcttcgttctgatctttagggaagcggttattctggctgttgcagtgcaggctgtgcagccccttatccatatagcagtggccagtggcttgctattaatatcactcacaggcaattttagggttgtaaactgtaaggcctcaatccgctgtgggcgtgagtttctccccttccaaggcagtttcctgcatgggttcagcttgagttgagctgctgagttgtgaacgaggaagcaaccaaagcaactgggagcctgggagagtgggagtggaggagctggctgccggcactggccgaggaactactcagtccaagacgtgtgtcgatctgaagtgacgctgacggctgacctatcacctatgttttgggaggggctcagggccggcaacagccatggccgggcaggtctccacacagtggccactggagctagaactggacctggaacggcgccccacctgccaaacggcaatgctgatgaccgcttgacagctgcttccgatgggctggccacctcccactgcccacatatgaaagggaacctggaactgtgtttgctcggcaaccagcactggtttggggaaacagaaagggtacataattgtagattgagagaaaaattagaggatgcagctgttgcttgggttcagtggtgaaggaagcagctagcagcttcttgggttcattcaagagagattggagaagggggaaggattggaaatgttgcttctgattcgcttgaactctgaatttctgattgtttccttgttcacagaatgtagtgtcatgcataacctgggttgccacgccttgtttctgaggcgtgacatgtgactgtcgtgatggtgtttttgaaatttcggttggtaagaaatgctgaaagaagaaatggcgtcattacgttcgttgcattgctttgcctattttgcgtgtttaatggaatatgattgttgtatggcacttcactctgaatgtgagttgttttatgctgaggtcc

SEQ ID NO: 69920 - DNA, 3638 bp, Zea Mays
cccgtcagactcttgagcggcggccggagccggctactccggcggaaatcgcctcccgagttgcctgatcggctccctgaacgagagtggtcagaatcatcttttcccactcctgccgtctattttcccgactactctacgtgcgctttctctctctgcgcaactaggtgaccgcgaccgcggccaccgccctacgtcacgtacgtgcttgctagagtctagcctcgtcggttccttcgcatggtctcgttcaggcggacccttcgccggcgaccaacacccaccagcaatttactggaagtgtggaaccacttctgatgctgtctttgtaaatattgatggagctagctgagtagaaatggactgcagtcaagatccccaagaagaaagccatcaaagaagggagaatggtgaagaagcagaaaagacggctgactatggaaatgctttgagtcgtaaggaggtaacagaagagcttcttggttgtgtggttcatagtgaggaagaggcgtacaggttgtactgtgattatgggcatcgaatcggttttagcgtgcggaagggcaaacagtcttactttattggtaccaagaatattcgaacaaaggattactactgctcaaaggaagggcttaaatacgatgagcctgttacagaagcaaattttaatcgaccagacacaagaactaattgcaaagcaatgatccgctttagagttgacgagaaggggcggtggacagttatacgctttgttcctgtacataatcaccagttggcaaaacctggagaaagacacatgctgagatcagccaaatcgcttgctgttggcaaatcaggtgttatagatccattagcatctacagaggcacatccaattaatggtttctctgatatgacaggtgatatagttgagaattcagggtatactataagggaatgttacaatcaagtgggcatgcagagtataacagtaattgaggcaggggatagccaaagtcttgtcagctatttcaagcataaaactaatgaggaaggcatgttctattgggacgtccaagttgatcaagaagggcgcatgacgaacttcttctacagggatggtaaaagtagaaatgattatggctgctttggagatgccattatatttgatacaacctaccgcacaaacaaatataacttgatatgcgccccatttgttggtgttgaccaccattggcaaaatgttgtttttggctgcgcgttcttgttagacgagtctgtaacttcctatgcctgggtatttaaatcattcttggagtcaatgggagggcgatcaccaaaatcaatattcactgatcaggatgaagctattatgcaggcagtcaaacaggttttccctaatacgcaacattgtttttcctactggcatattctgaagaatgctcaatctcatttaggctcactaaatacgtctcaagcatttcaaagtatgtttaccaagtgtatgcaaggatctgactcagaagaggattttaaggaatcatggactgcaatgatccaggaatacaagctacaggataataattggttgattgacctttatacattccatcataaatggtgctcggcgtttaacaaagatacatttgatggtggaattaattcttctcagtggggggaggtttcaagtaatattctcaatggaatttctgatgaaaatacctctcttacacgttttgcccttttgctagaaaaggttgtcaaggatctacgtagaaatgaatctgaagaggattttcgatgtagccaaactgctccagtccgtgcaattaagcatagtaccgttttgaagcaagctgcagaatcatatacacataggatctataaattatttgaagcagaatttctggatgggtgtggagcaacttcatgccatgaaacttcgagtggtggaaatttattgaggtttggaattacaatgcaggggaggggttcaaaagtatgggatgttgttcttgacacttccaccatggagatcagttgtggttgtagaaagtttgaaaggatgggtcttctttgttcgcatgccctcaaagtcttcaccctgcagaatgttgacacaattccagaaaagtatgttttgaaacgctggacaaaagatgccaggagaagcatgtatacacttgctcaggatgattcaacccaacaggaatgcacagaggctgaacttgcatatcgcaatcgggcaatgcagtatgcatataacctaattataaagagccaggaactggaagaatcacgaaaaatattctgggactcccttgaaactggagagaaggcactggaagtgttctttgaaatgagaaacatgcgcactcaagcagccaaggatgctgataagaatgtaaagaagaagaaaaaaacatcaaaaggaacaaacccaagtaagtgacaattttaaattccctcatagggtatcaatttattcaaactataccctatatattatgcagaaaaagctaaacaagccccaggagtttcctcaactggtccagagctgatagtccatactaatgagcatcaatttcaatcttcacaagatgctcagggtaatgcaaccattggaagaccatattactatcaggcttttccaaatgcccctatacaaccaaaccagatgtacatgcatacaaatatgcacacaatgcccctttgcacaccgcaggagctgtctgcatatgctgcaatacgccccaattcaatgtttggtggtgccaagaacatctgaaggatattaaggcctcaatccgctgtgggcgtgagtttctccccttccaaggcagtttcctgcatgggttcagcttgagttgagctgctgagttgtgaacgaggaagcaaccaaagcaactgggagcctgggagagtgggagtggaggagctggctgccggcactggccgaggaactactcagtccaagacgtgtgtcgatctgaagtgacgctgacggctgacctatcacctatgttttgggaggggctcagggccggcaacagccatggccgggcaggtctccacacagtggccactggagctagaactggacctggaacggcgccccacctgccaaacggcaatgctgatgaccgcttgacagctgcttccgatgggctggccacctcccactgcccacatatgaaagggaacctggaactgtgtttgctcggcaaccagcactggtttggggaaacagaaagggtacataattgtagattgagagaaaaattagaggatgcagctgttgcttgggttcagtggtgaaggaagcagctagcagcttcttgggttcattcaagagagattggagaagggggaaggattggaaatgttgcttctgattcgcttgaactctgaatttctgattgtttccttgttcacagaatgtagtgtcatgcataacctgggttgccacgccttgtttctgaggcgtgacatgtgactgtcgtgatggtgtttttgaaatttcggttggtaagaaatgctgaaagaagaaatggcgtcattacgttcgttgcattgctttgcctattttgcgtgtttaatggaatatgattgttgtatggcacttcactctgaatgtgagttgttttatgctgaggtcc

SEQ ID NO: 69921 - DNA, 3830 bp, Zea Mays
cccgtcagactcttgagcggcggccggagccggctactccggcggaaatcgcctcccgagttgcctgatcggctccctgaacgagagtggtcagaatcatcttttcccactcctgccgtctattttcccgactactctacgtgcgctttctctctctgcgcaactaggtgaccgcgaccgcggccaccgccctacgtcacgtacgtgcttgctagagtctagcctcgtcggttccttcgcatggtctcgttcaggcggacccttcgccggcgaccaacacccaccagcaatttactggaagtgtggaaccacttctgatgctgtctttgtaaatattgatggagctagctgagtagaaatggactgcagtcaagatccccaagaagaaagccatcaaagaagggagaatggtgaagaagcagaaaagacggctgactatggaaatgctttgagtcgtaaggaggtaacagaagagcttcttggttgtgtggttcatagtgaggaagaggcgtacaggttgtactgtgattatgggcatcgaatcggttttagcgtgcggaagggcaaacagtcttactttattggtaccaagaatattcgaacaaaggattactactgctcaaaggaagggcttaaatacgatgagcctgttacagaagcaaattttaatcgaccagacacaagaactaattgcaaagcaatgatccgctttagagttgacgagaaggggcggtggacagttatacgctttgttcctgtacataatcaccagttggcaaaacctggagaaagacacatgctgagatcagccaaatcgcttgctgttggcaaatcaggtgttatagatccattagcatctacagaggcacatccaattaatggtttctctgatatgacaggtgatatagttgagaattcagggtatactataagggaatgttacaatcaagtgggcatgcagagtataacagtaattgaggcaggggatagccaaagtcttgtcagctatttcaagcataaaactaatgaggaaggcatgttctattgggacgtccaagttgatcaagaagggcgcatgacgaacttcttctacagggatggtaaaagtagaaatgattatggctgctttggagatgccattatatttgatacaacctaccgcacaaacaaatataacttgatatgcgccccatttgttggtgttgaccaccattggcaaaatgttgtttttggctgcgcgttcttgttagacgagtctgtaacttcctatgcctgggtatttaaatcattcttggagtcaatgggagggcgatcaccaaaatcaatattcactgatcaggatgaagctattatgcaggcagtcaaacaggttttccctaatacgcaacattgtttttcctactggcatattctgaagaatgctcaatctcatttaggctcactaaatacgtctcaagcatttcaaagtatgtttaccaagtgtatgcaaggatctgactcagaagaggattttaaggaatcatggactgcaatgatccaggaatacaagctacaggataataattggttgattgacctttatacattccatcataaatggtgctcggcgtttaacaaagatacatttgatggtggaattaattcttctcagtggggggaggtttcaagtaatattctcaatggaatttctgatgaaaatacctctcttacacgttttgcccttttgctagaaaaggttgtcaaggatctacgtagaaatgaatctgaagaggattttcgatgtagccaaactgctccagtccgtgcaattaagcatagtaccgttttgaagcaagctgcagaatcatatacacataggatctataaattatttgaagcagaatttctggatgggtgtggagcaacttcatgccatgaaacttcgagtggtggaaatttattgaggtttggaattacaatgcaggggaggggttcaaaagtatgggatgttgttcttgacacttccaccatggagatcagttgtggttgtagaaagtttgaaaggatgggtcttctttgttcgcatgccctcaaagtcttcaccctgcagaatgttgacacaattccagaaaagtatgttttgaaacgctggacaaaagatgccaggagaagcatgtatacacttgctcaggatgattcaacccaacaggaatgcacagaggctgaacttgcatatcgcaatcgggcaatgcagtatgcatataacctaattataaagagccaggaactggaagaatcacgaaaaatattctgggactcccttgaaactggagagaaggcactggaagtgttctttgaaatgagaaacatgcgcactcaagcagccaaggatgctgataagaatgtaaagaagaagaaaaaaacatcaaaaggaacaaacccaaaaaaagctaaacaagccccaggagtttcctcaactggtccagagctgatagtccatactaatgagcatcaatttcaatcttcacaagatgctcagggtaatgcaaccattggaagaccatattactatcaggcttttccaaatgcccctatacaaccaaaccagatgtacatgcatacaaatatgcacacaatgcccctttgcacaccgcaggagctgtctgcatatgctgcaatacgccccaattcaatgtttggtggtgccaagaacatctgaaggatattaaggtccagattcatgtggatgtcattggaaaaccttattgagactttcgctatcaactccgctttgatctctgtggacccatttatggaggcctggtggcacttcatgtttggttggttcaggggctcttcgttctgatctttagggaagcggttattctggctgttgcagtgcaggctgtgcagccccttatccatatagcagtggccagtggcttgctattaatatcactcacaggcaattttagggttgtaaactgtaaggcctcaatccgctgtgggcgtgagtttctccccttccaaggcagtttcctgcatgggttcagcttgagttgagctgctgagttgtgaacgaggaagcaaccaaagcaactgggagcctgggagagtgggagtggaggagctggctgccggcactggccgaggaactactcagtccaagacgtgtgtcgatctgaagtgacgctgacggctgacctatcacctatgttttgggaggggctcagggccggcaacagccatggccgggcaggtctccacacagtggccactggagctagaactggacctggaacggcgccccacctgccaaacggcaatgctgatgaccgcttgacagctgcttccgatgggctggccacctcccactgcccacatatgaaagggaacctggaactgtgtttgctcggcaaccagcactggtttggggaaacagaaagggtacataattgtagattgagagaaaaattagaggatgcagctgttgcttgggttcagtggtgaaggaagcagctagcagcttcttgggttcattcaagagagattggagaagggggaaggattggaaatgttgcttctgattcgcttgaactctgaatttctgattgtttccttgttcacagaatgtagtgtcatgcataacctgggttgccacgccttgtttctgaggcgtgacatgtgactgtcgtgatggtgtttttgaaatttcggttggtaagaaatgctgaaagaagaaatggcgtcattacgttcgttgcattgctttgcctattttgcgtgtttaatggaatatgattgttgtatggcacttcactctgaatgtgagttgttttatgctgaggtcc

SEQ ID NO: 69922 - DNA, 4051 bp, Zea Mays
tcctcctggtcctggagcagcgtttcagagcttgctcccgtcagactcttgagcggcggccggagccggctactccggcggaaatcgcctcccgagttgcctgatcggctccctgaacgagagtgcaatttactggaagtgtggaaccacttctgatgctgtctttgtaaatattgatggagctagctgagtagaaatggactgcagtcaagatccccaagaagaaagccatcaaagaagggagaatggtgaagaagcagaaaagacggctgactatggaaatgctttgagtcgtaaggaggtaacagaagagcttcttggttgtgtggttcatagtgaggaagaggcgtacaggttgtactgtgattatgggcatcgaatcggttttagcgtgcggaagggcaaacagtcttactttattggtaccaagaatattcgaacaaaggattactactgctcaaaggaagggcttaaatacgatgagcctgttacagaagcaaattttaatcgaccagacacaagaactaattgcaaagcaatgatccgctttagagttgacgagaaggggcggtggacagttatacgctttgttcctgtacataatcaccagttggcaaaacctggagaaagacacatgctgagatcagccaaatcgcttgctgttggcaaatcaggtgttatagatccattagcatctacagaggcacatccaattaatggtttctctgatatgacaggtgatatagttgagaattcagggtatactataagggaatgttacaatcaagtgggcatgcagagtataacagtaattgaggcaggggatagccaaagtcttgtcagctatttcaagcataaaactaatgaggaaggcatgttctattgggacgtccaagttgatcaagaagggcgcatgacgaacttcttctacagggatggtaaaagtagaaatgattatggctgctttggagatgccattatatttgatacaacctaccgcacaaacaaatataacttgatatgcgccccatttgttggtgttgaccaccattggcaaaatgttgtttttggctgcgcgttcttgttagacgagtctgtaacttcctatgcctgggtatttaaatcattcttggagtcaatgggagggcgatcaccaaaatcaatattcactgatcaggatgaagctattatgcaggcagtcaaacaggttttccctaatacgcaacattgtttttcctactggcatattctgaagaatgctcaatctcatttaggctcactaaatacgtctcaagcatttcaaagtatgtttaccaagtgtatgcaaggatctgactcagaagaggattttaaggaatcatggactgcaatgatccaggaatacaagctacaggataataattggttgattgacctttatacattccatcataaatggtgctcggcgtttaacaaagatacatttgatggtggaattaattcttctcagtggggggaggtttcaagtaatattctcaatggaatttctgatgaaaatacctctcttacacgttttgcccttttgctagaaaaggttgtcaaggatctacgtagaaatgaatctgaagaggattttcgatgtagccaaactgctccagtccgtgcaattaagcatagtaccgttttgaagcaagctgcagaatcatatacacataggatctataaattatttgaagcagaatttctggatgggtgtggagcaacttcatgccatgaaacttcgagtggtggaaatttattgaggtttggaattacaatgcaggggaggggttcaaaagtatgggatgttgttcttgacacttccaccatggagatcagttgtggttgtagaaagtttgaaaggatgggtcttctttgttcgcatgccctcaaagtcttcaccctgcagaatgttgacacaattccagaaaagtatgttttgaaacgctggacaaaagatgccaggagaagcatgtatacacttgctcaggatgattcaacccaacaggaatgcacagaggctgaacttgcatatcgcaatcgggcaatgcagtatgcatataacctaattataaagagccaggaactggaagaatcacgaaaaatattctgggactcccttgaaactggagagaaggcactggaagtgttctttgaaatgagaaacatgcgcactcaagcagccaaggatgctgataagaatgtaaagaagaagaaaaaaacatcaaaaggaacaaacccaagtaagtgacaattttaaattccctcatagggtatcaatttattcaaactataccctatatattatgcagaaaaagctaaacaagccccaggagtttcctcaactggtccagagctgatagtccatactaatgagcatcaatttcaatcttcacaagatgctcagggtaatgcaaccattggaagaccatattactatcaggcttttccaaatgcccctatacaaccaaaccagatgtacatgcatacaaatatgcacacaatgcccctttgcacaccgcaggagagctgcctatcttttcattaagataggggaaaacaaaaggaaacaacaagggagaggcacgaggcacactctcagccacccccggacaaaatccaacttacacacccacactgatgcctaaaattaaataatatgaccacaaccatgagtccatgaccaaggaagactaactgcactcaaagggggagcaactgaaggaggcgcagaggttactgctaagcaccaaaggctgctcagtactcaccgcctggagaaccacttctcaaacacacatgcatttttatgcttccatacttccaagttccaaacaagagctgtctgcatatgctgcaatacgccccaattcaatgtttggtggtgccaagaacatctgaaggatattaaggtccagattcatgtggatgtcattggaaaaccttattgagactttcgctatcaactccgctttgatctctgtggacccatttatggaggcctggtggcacttcatgtttggttggttcaggggctcttcgttctgatctttagggaagcggttattctggctgttgcagtgcaggctgtgcagccccttatccatatagcagtggccagtggcttgctattaatatcactcacaggcaattttagggttgtaaactgtaaggcctcaatccgctgtgggcgtgagtttctccccttccaaggcagtttcctgcatgggttcagcttgagttgagctgctgagttgtgaacgaggaagcaaccaaagcaactgggagcctgggagagtgggagtggaggagctggctgccggcactggccgaggaactactcagtccaagacgtgtgtcgatctgaagtgacgctgacggctgacctatcacctatgttttgggaggggctcagggccggcaacagccatggccgggcaggtctccacacagtggccactggagctagaactggacctggaacggcgccccacctgccaaacggcaatgctgatgaccgcttgacagctgcttccgatgggctggccacctcccactgcccacatatgaaagggaacctggaactgtgtttgctcggcaaccagcactggtttggggaaacagaaagggtacataattgtagattgagagaaaaattagaggatgcagctgttgcttgggttcagtggtgaaggaagcagctagcagcttcttgggttcattcaagagagattggagaagggggaaggattggaaatgttgcttctgattcgcttgaactctgaatttctgattgtttccttgttcacagaatgtagtgtcatgcataacctgggttgccacgccttgtttctgaggcgtgacatgtgactgtcgtgatggtgtttttgaaatttcggttggtaagaaatgctgaaagaagaaatggcgtcattacgttcgttgcattgctttgcctattttgcgtgtttaatggaatatgattgttgtatggcacttcactctgaatgtgagttgttttatgctgaggtcc

SEQ ID NO: 69923 - DNA, 3905 bp, Zea Mays
cggatctctcacctttccttgggctttgttcagtcaaattggattgagcaatttactggaagtgtggaaccacttctgatgctgtctttgtaaatattgatggagctagctgagtagaaatggactgcagtcaagatccccaagaagaaagccatcaaagaagggagaatggtgaagaagcagaaaagacggctgactatggaaatgctttgagtcgtaaggaggtaacagaagagcttcttggttgtgtggttcatagtgaggaagaggcgtacaggttgtactgtgattatgggcatcgaatcggttttagcgtgcggaagggcaaacagtcttactttattggtaccaagaatattcgaacaaaggattactactgctcaaaggaagggcttaaatacgatgagcctgttacagaagcaaattttaatcgaccagacacaagaactaattgcaaagcaatgatccgctttagagttgacgagaaggggcggtggacagttatacgctttgttcctgtacataatcaccagttggcaaaacctggagaaagacacatgctgagatcagccaaatcgcttgctgttggcaaatcaggtgttatagatccattagcatctacagaggcacatccaattaatggtttctctgatatgacaggtgatatagttgagaattcagggtatactataagggaatgttacaatcaagtgggcatgcagagtataacagtaattgaggcaggggatagccaaagtcttgtcagctatttcaagcataaaactaatgaggaaggcatgttctattgggacgtccaagttgatcaagaagggcgcatgacgaacttcttctacagggatggtaaaagtagaaatgattatggctgctttggagatgccattatatttgatacaacctaccgcacaaacaaatataacttgatatgcgccccatttgttggtgttgaccaccattggcaaaatgttgtttttggctgcgcgttcttgttagacgagtctgtaacttcctatgcctgggtatttaaatcattcttggagtcaatgggagggcgatcaccaaaatcaatattcactgatcaggatgaagctattatgcaggcagtcaaacaggttttccctaatacgcaacattgtttttcctactggcatattctgaagaatgctcaatctcatttaggctcactaaatacgtctcaagcatttcaaagtatgtttaccaagtgtatgcaaggatctgactcagaagaggattttaaggaatcatggactgcaatgatccaggaatacaagctacaggataataattggttgattgacctttatacattccatcataaatggtgctcggcgtttaacaaagatacatttgatggtggaattaattcttctcagtggggggaggtttcaagtaatattctcaatggaatttctgatgaaaatacctctcttacacgttttgcccttttgctagaaaaggttgtcaaggatctacgtagaaatgaatctgaagaggattttcgatgtagccaaactgctccagtccgtgcaattaagcatagtaccgttttgaagcaagctgcagaatcatatacacataggatctataaattatttgaagcagaatttctggatgggtgtggagcaacttcatgccatgaaacttcgagtggtggaaatttattgaggtttggaattacaatgcaggggaggggttcaaaagtatgggatgttgttcttgacacttccaccatggagatcagttgtggttgtagaaagtttgaaaggatgggtcttctttgttcgcatgccctcaaagtcttcaccctgcagaatgttgacacaattccagaaaagtatgttttgaaacgctggacaaaagatgccaggagaagcatgtatacacttgctcaggatgattcaacccaacaggaatgcacagaggctgaacttgcatatcgcaatcgggcaatgcagtatgcatataacctaattataaagagccaggaactggaagaatcacgaaaaatattctgggactcccttgaaactggagagaaggcactggaagtgttctttgaaatgagaaacatgcgcactcaagcagccaaggatgctgataagaatgtaaagaagaagaaaaaaacatcaaaaggaacaaacccaaaaaaagctaaacaagccccaggagtttcctcaactggtccagagctgatagtccatactaatgagcatcaatttcaatcttcacaagatgctcagggtaatgcaaccattggaagaccatattactatcaggcttttccaaatgcccctatacaaccaaaccagatgtacatgcatacaaatatgcacacaatgcccctttgcacaccgcaggagagctgcctatcttttcattaagataggggaaaacaaaaggaaacaacaagggagaggcacgaggcacactctcagccacccccggacaaaatccaacttacacacccacactgatgcctaaaattaaataatatgaccacaaccatgagtccatgaccaaggaagactaactgcactcaaagggggagcaactgaaggaggcgcagaggttactgctaagcaccaaaggctgctcagtactcaccgcctggagaaccacttctcaaacacacatgcatttttatgcttccatacttccaagttccaaacaagagctgtctgcatatgctgcaatacgccccaattcaatgtttggtggtgccaagaacatctgaaggatattaaggtccagattcatgtggatgtcattggaaaaccttattgagactttcgctatcaactccgctttgatctctgtggacccatttatggaggcctggtggcacttcatgtttggttggttcaggggctcttcgttctgatctttagggaagcggttattctggctgttgcagtgcaggctgtgcagccccttatccatatagcagtggccagtggcttgctattaatatcactcacaggcaattttagggttgtaaactgtaaggcctcaatccgctgtgggcgtgagtttctccccttccaaggcagtttcctgcatgggttcagcttgagttgagctgctgagttgtgaacgaggaagcaaccaaagcaactgggagcctgggagagtgggagtggaggagctggctgccggcactggccgaggaactactcagtccaagacgtgtgtcgatctgaagtgacgctgacggctgacctatcacctatgttttgggaggggctcagggccggcaacagccatggccgggcaggtctccacacagtggccactggagctagaactggacctggaacggcgccccacctgccaaacggcaatgctgatgaccgcttgacagctgcttccgatgggctggccacctcccactgcccacatatgaaagggaacctggaactgtgtttgctcggcaaccagcactggtttggggaaacagaaagggtacataattgtagattgagagaaaaattagaggatgcagctgttgcttgggttcagtggtgaaggaagcagctagcagcttcttgggttcattcaagagagattggagaagggggaaggattggaaatgttgcttctgattcgcttgaactctgaatttctgattgtttccttgttcacagaatgtagtgtcatgcataacctgggttgccacgccttgtttctgaggcgtgacatgtgactgtcgtgatggtgtttttgaaatttcggttggtaagaaatgctgaaagaagaaatggcgtcattacgttcgttgcattgctttgcctattttgcgtgtttaatggaatatgattgttgtatggcacttcactctgaatgtgagttgttttatgctgaggtcc

SEQ ID NO: 69924 - DNA, 3850 bp, Zea Mays
cgtcgcgatcgcgacatgcccggcgccgccaccctcagatcgcgcgtggccgtcgcggccgccgcgtgccttgcggtcttcgcagcggtggcgctgctccaccgcaagcgccgctggaaccgggcgccctcctcgtctcgtcgcctcggggtcgggggacgcccacgccgcgcttgcgaggaggaggagaagccgcaggaccggttcaagcgcgtcctcgcggacaactcctactccccgttcaaacacccgcgccgcaagagtgctcagttgggaagtgcagaaggcgaggcacccctgccaccgcctcaagaattgtcacaaaaaggtcatccatttgaggaggaaatcacatctttgctaaagaacccccctggttttcatagctttatgctgtgtgaccagtgcccagaaatgagtgctacatataattgggttcatacagaaactcaactggaacatttggcgagattattgggtgaggaaagagcttttgctgttgatacagagcaacatagcattcgatctttcctaggatatactgcactaatgcagatctctacccagaatgaagactatctgatagacacaatagcactgcacgatgtgatgggcattctacgaccagtgtttgccaattcttctatctgtaagatcttccatggagctgacaatgatattctttggcttcaaagggattttcatatttatgttgtgaatatgtttgatactgctaaggcatgtgaaattctattgaaaccacaaaaatcactggcatatttgcttgaagtatattgtgaagtgaccaccgacaagacaatgcagcgtgaagattggagactgcgtcctctgactccagaaatgatcgagtatgcacgcactgatgctcactatctgttatacattgcaaattgtttggcatcagagctccatgcaaaagcctatacttccagtgataaaatcaattttttcttcgaggctagtcatcgctcaaatatggtgtgcatgcaactgtattcaaaagaaattgaatcccctcctggagcttccagtgcaacatctattctctcacgaaatttgcaaactcatgggttcgactccaaaaagtctagtgaagtgaaggatcttgtttggaaattttgtgcatggagggacttaatggctcggatgcatgatgaaagcttacgatatgttctgccagaccaagctatagctgcccttgccgttagtcttccaaagggcccaacagaggtgtttgctgtcatagcagaaactgacctaagcatttcaagtatgtacccttccttgtcatcaccgtcacctcttgttgtggctcatgtcaaagaactctgttatctgctggatgacatcactaccagcatggacagcatctttaaaagtttactagagaagtataaagatccaagtggattatgtcgactatcagtttataattataaccttataacacacctaagtttgaagcaaacaagtatgttttccgttgctccaagtggaaagaagttgacagcactgcctaataaaaaggtttcacgggatttattcattaaaaagttttcctgcaagtccccggtatatcacaattgcaggatttatgctagtgatggaagactactttgctactgtgaccgcaaaaaactggaatggtacattcagcgtaatttggcgaaattgattgaaaatagtcctccagcaatcatgcttctctttgaacctaaaggtcgtccagaggatgaagataacgagttctatattcagagcaagaaaaatatttgtgtgggctgtggagaaaagagccattatattagatacagaataataccgtcatgctacaggatgcattttccagaacatttaaagagccatcgttcacatgatattgtacttctttgtgtagactgtcatgaaatagctcattcagcagctgagaaatacaagaggcgaatagcagaagaatttggaatacccctttttgtgcaaaagataatgaactcgggtgatataagtttgattaccaacacatcagtatctgaagataaattgaatggaacaggtgtctccccattgcagctgaggactgctgccatggctcttctacgtcatggatccactatgccattgaagagatgtgaagagctaatgcagattgtgaagtcatactatggtggtagagatgtgactcctgaagatctcgagatggcattacttgttggtatgagccctcatgagcgaaggcgtcttgaaaagaaaaagggatattcgtttagagctcaggctcaaactattattagaaagagcagcagcaataccatctcagaagacagtggacatggatcagaaaattgtcatgccttatctgcgcgatttcctgaggttggaactggtagtaatggtcagcaagagtttgatgagacagggaatcaaaaccagctagagaatttaaccctgagccagggaagctcaagtttgccagtcagcatggaggacaccacttctgatcatgacactgtgacactcgagaccgataccgagcagcaagcaagagctgtctgcatatgctgcaatacgccccaattcaatgtttggtggtgccaagaacatctgaaggatattaaggtccagattcatgtggatgtcattggaaaaccttattgagactttcgctatcaactccgctttgatctctgtggacccatttatggaggcctggtggcacttcatgtttggttggttcaggggctcttcgttctgatctttagggaagcggttattctggctgttgcagtgcaggctgtgcagccccttatccatatagcagtggccagtggcttgctattaatatcactcacaggcaattttagggttgtaaactgtaaggtaggaggtagtgagagtaggtggtcattctacagatccagaatccagttgcatactatactgatatagggattgatttgcttgtgctaaaggcctcaatccgctgtgggcgtgagtttctccccttccaaggcagtttcctgcatgggttcagcttgagttgagctgctgagttgtgaacgaggaagcaaccaaagcaactgggagcctgggagagtgggagtggaggagctggctgccggcactggccgaggaactactcagtccaagacgtgtgtcgatctgaagtgacgctgacggctgacctatcacctatgttttgggaggggctcagggccggcaacagccatggccgggcaggtctccacacagtggccactggagctagaactggacctggaacggcgccccacctgccaaacggcaatgctgatgaccgcttgacagctgcttccgatgggctggccacctcccactgcccacatatgaaagggaacctggaactgtgtttgctcggcaaccagcactggtttggggaaacagaaagggtacataattgtagattgagagaaaaattagaggatgcagctgttgcttgggttcagtggtgaaggaagcagctagcagcttcttgggttcattcaagagagattggagaagggggaaggattggaaatgttgcttctgattcgcttgaactctgaatttctgattgtttccttgttcacagaatgtagtgtcatgcataacctgggttgccacgccttgtttctgaggcgtgacatgtgactgtcgtgatggtgtttttgaaatttcggttggtaagaaatgctgaaagaagaaatggcgtcattacgttcgttgcattgctttgcctattttgcgtgtttaatggaatatgattgttgtatggcacttcactctgaatgtgagttgttttatgctgaggtcc

SEQ ID NO: 69925 - DNA, 2779 bp, Zea Mays
aaatcgcctcccgagttgcctgatcggctccctgaacgagagtggtcagaatcatcttttcccactcctgccgtctattttcccgactactctacgtgcgctttctctctctgcgcaactaggtgaccgcgaccgcggccaccgccctacgtcacgtacgtgcttgctagagtctagcctcgtcggttccttcgcatggtctcgttcaggcggacccttcgccggcgaccaacacccaccagcaatttactggaagtgtggaaccacttctgatgctgtctttgtaaatattgatggagctagctgagtagaaatggactgcagtcaagatccccaagaagaaagccatcaaagaagggagaatggtgaagaagcagaaaagacggctgactatggaaatgctttgagtcgtaaggaggtaacagaagagcttcttggttgtgtggttcatagtgaggaagaggcgtacaggttgtactgtgattatgggcatcgaatcggttttagcgtgcggaagggcaaacagtcttactttattggtaccaagaatattcgaacaaaggattactactgctcaaaggaagggcttaaatacgatgagcctgttacagaagcaaattttaatcgaccagacacaagaactaattgcaaagcaatgatccgctttagagttgacgagaaggggcggtggacagttatacgctttgttcctgtacataatcaccagttggcaaaacctggagaaagacacatgctgagatcagccaaatcgcttgctgttggcaaatcaggtgttatagatccattagcatctacagaggcacatccaattaatggtttctctgatatgacaggtgatatagttgagaattcagggtatactataagggaatgttacaatcaagtgggcatgcagagtataacagtaattgaggcaggggatagccaaagtcttgtcagctatttcaagcataaaactaatgaggaaggcatgttctattgggacgtccaagttgatcaagaagggcgcatgacgaacttcttctacagggatggtaaaagtagaaatgattatggctgctttggagatgccattatatttgatacaacctaccgcacaaacaaatataacttgatatgcgccccatttgttggtgttgaccaccattggcaaaatgttgtttttggctgcgcgttcttgttagacgagtctgtaacttcctatgcctgggtatttaaatcattcttggagtcaatgggagggcgatcaccaaaatcaatattcactgatcaggatgaagctattatgcaggcagtcaaacaggttttccctaatacgcaacattgtttttcctactggcatattctgaagaatgctcaatctcatttaggctcactaaatacgtctcaagcatttcaaagtatgtttaccaagtgtatgcaaggatctgactcagaagaggattttaaggaatcatggactgcaatgatccaggaatacaagctacaggataataattggttgattgacctttatacattccatcataaatggtgctcggcgtttaacaaagatacatttgatggtggaattaattcttctcagtggggggaggtttcaagtaatattctcaatggaatttctgatgaaaatacctctcttacacgttttgcccttttgctagaaaaggttgtcaaggatctacgtagaaatgaatctgaagaggattttcgatgtagccaaactgctccagtccgtgcaattaagcatagtaccgttttgaagcaagctgcagaatcatatacacataggatctataaattatttgaagcagaatttctggatgggtgtggagcaacttcatgccatgaaacttcgagtggtggaaatttattgaggtttggaattacaatgcaggggaggggttcaaaagtatgggatgttgttcttgacacttccaccatggagatcagttgtggttgtagaaagtttgaaaggatgggtcttctttgttcgcatgccctcaaagtcttcaccctgcagaatgttgacacaattccagaaaagtatgttttgaaacgctggacaaaagatgccaggagaagcatgtatacacttgctcaggatgattcaacccaacaggaatgcacagaggctgaacttgcatatcgcaatcgggcaatgcagtatgcatataacctaattataaagagccaggaactggaagaatcacgaaaaatattctgggactcccttgaaactggagagaaggcactggaagtgttctttgaaatgagaaacatgcgcactcaagcagccaaggatgctgataagaatgtaaagaagaagaaaaaaacatcaaaaggaacaaacccaaaaaaagctaaacaagccccaggagtttcctcaactggtccagagctgatagtccatactaatgagcatcaatttcaatcttcacaagatgctcagggtaatgcaaccattggaagaccatattactatcaggcttttccaaatgcccctatacaaccaaaccagatgtacatgcatacaaatatgcacacaatgcccctttgcacaccgcaggagagctgcctatcttttcattaagataggggaaaacaaaaggaaacaacaagggagaggcacgaggcacactctcagccacccccggacaaaatccaacttacacacccacactgatgcctaaaattaaataatatgaccacaaccatgagtccatgaccaaggaagactaactgcactcaaaggggg

SEQ ID NO: 69926 - DNA, 5534 bp, Zea Mays
gggcaggatcccagtttccccagagcattattttgttttccattcctgacaagcaaaaatggactgcggagagcgtcatattgcaaagcggtgcagccagctcggcagatccacatgatcctccccatctcgccatcactgcccctccaccactcagctcggcttgaataccccaccgtgcacacctctccacccaaacccaatccatccaaacccatttccctcgctcccatcccgtcccgccccttgtctcttccgcttccccccgaccccgcgcgccgcggaccagcagccatgtcgtgctcccacctcggcgagcgcggcctctgcgggagcttcaacaacaacgtgctcaagaaggcggaaacccgcatcgatgagctcaagcagctgggcctccagtacaccgtcgtcagcgtggggaagaagggcaacgcctacttccagcgccgcccctacatcccgttggagcgcgatctagaggtgagcagcgtgcccaccgtcaaggactcgcaggccatctgcgacctcgtctactcgctcttcgtctccgaggaggtggacaaggtggagctgctctactccaagttcgtgtcgctggtgcgctccgaccccatcatccagacgctgctccccatgtcgcccaagggcgagatctgcgacgtcaacggcgtctgcgtggacgccaccgaggacgagctcttccgcctcaccaccaaggaggggaagctcaccgtggagcgcgagaaggtgaagatcgagacgcagcccttctcccccgtggtgcagttcgagcaggaccccgtgcagatcctggacgcgctgctcccgctctacctcaacagccagatcctccgtgccctgcaggagtcgctcgccagcgagctcgccgcccggatgagcgccatgagcagcgccaccgacaacgccatcgagctccgcaagaacctctccatcgcctacaaccgacagcgccaggccaagatcaccggggagatcctcgagatcgtcgccggtgccgacgccctcgctggctgagcctgagtccccttggtggtgcggtgctcctgctatatataattctttttcctcattttctccactctgcctgtaattcctgataatagcacaaacgcaacggagttctgtgttccttgcgacacacaagaatttcaatccagagatgccaaaatgtataatcttgccgcaactgagacgtcgaagctcagtgtatttttatgcccaagtcttccaaatgtttggcacgaatcagctacggctcggcatcctgcggcatgcaccaaacaccctacctagtacatgagtaaaggtgcaatagcaactaagacgaggctgttttgaacacataaatctcaaagcaatttgacaggattgctttttcatgcaaaatttatcaaacttctgtgttctttttttttataaaaaaacattgttaagagaagaaacatataatgctgcagttgaatcacgtcacttcctcagaatcatcaggccggtaggggatgaaggtaaactatatatgacaccatgataacaacgccggctcatatcttggtctcatcagttatcacaatcctgtcctgtggatggatggagcatattggaatcaagcttgctatggcgacgtaatacagtgacaagcgtggtaacactgtaactcttcactattataaagtagatgtgtttaatgtaacggttgatcaacaactaattgagttagatgatcgttttagctttgcgatagagcttttatcgctctctgtttctttgaatccaagaacagacacttttgatatatcaaagttacaccactgatttttcaatcaagaaagttccaattaaaacgccaacttccacattatcagcttggtgtatacatcacctagagctaaatacattaccatcactcgctgatgaaaggactcattaaattgggtaaaagttctacggattaatagattattaagattaatggtagtccctcttgcctaacctgcaaccactaagatagtgttttcaactacaaaaattgtcaaaacacgttgttgcaggggcgaatcctccggccgggtggtagattgcatccgccctggtactctgatgaggagtaggtttagttgattgtctggccttctagatggacacaagaacacaagggtttagagcgtttcaggccaccggagcatagtatctcacattcactatgagttatattgctttagagttagggagtcgaaggtccgagtgttagattgacctctccctgctacagagcaagtgctctcccttttatagtccaaggaaggcacatacaagggagttttggctctgaccgatgggcctaagagagtacaatatggaacgagaaacaattgggtagagctgacaacgctagatcttcatgagtctgtatcccttcttggacgttgcacgatcttctgtcgtccttatcctgtcaccttgccccgtctaatcggaactcaggtcttgatgtaggttgcggtgtagcctgatacgctctcgtgcgtagggtgtaacgatcatgtcatctcgtcttctccatccgtctcttcatgcccctgcctggataagggataggcccgagaataagcgacgacatggtattcccaagcattccctgatcatgggcccggatcgcactcgagggggtccgggcttcggccacccacgcctggatacgtggcgataccggacctcacgtggcctgaggttcgggtgttatttcccattcttggaaccattctgaagccttggtgctgtaaccggagagtgccttctcctccgtggctttatgttctatccggatccctttgtccggagattcgtcgggtcacaaggaggtcctggtcctatatgcaggatcccagacttgaagttgtcggttcctccctttatggggcttgatgtagacggtcgtccagcccaagagacgaacctggtctagccacgactccatatggtgggcctcagccccatgttaggtcggctgcccgtgagatcttcaacggtggccactagggtctcactttgacatagcaggaatgagtgcccaaagcatattcagggcaccgacacacgcttatagaatagaatagaatagaatagaatatgattttccacaaatttatatgatcatatgtattgagaaggaattgaccatgaagattagctctcttatatataatagaatcatttaatttgggcggtcttcgtggaagcaagttcaagttaacagagatgtaatcatgtaagtcttgtttctccatatatatcatatatgaaaaattattgtgatgtctattggagttaattaatatacaactatattgtacaagtttctttgttagcttattatctatgctatatgcaaattactatatgtgtgtgtatatcaaatcgcaatggctaacccgtccaacgagcaacgaagatgtaaacagcagcagcactagcttattgtatgttcatgtgtcctagtaacagagcttattgatctgaaaacctaaccatctagatgcactcagaagcaagtctagtttctgcacggaaagagggaaatgaccttgcggtgtttcgtacggagatgatagcatgcatgtatgatgcatctaggtgcctcaagtttcattttcttacgttaaatttcatgcgatttgcttgcatgggtgagagattttatgacgggcacaactcggatcgtcaagagcacaggccaaccaattgagatcttatctgaacgtatcgactttaatgtctatgtgttagtaccaaaccactctaatatagaaagttttgtgctaattcctcgtatttttaactgctagctcttttcgaccccgatcaaatatttaggcctagtttaggagtttaaaaaccggaagagattagagagactaaaatcacttctttattcaaaatccccttcgattttgtggctaccaaactaaccttggagttgccgctatcaactagaatgattccaaattcccaccttcgacctatagttgataaagtggccaaaaaactaccagcttggcaagatccttgttagaaaaaagtggtcaccttattctaattcaatccacactgctggaacttccaaattttgcgttgatggctgagcaagttcctacttgggttaagaaaggaattaataccattgctcgtatattcttttggacaggctcagataactcaacaaatgggaaggcggtagtggcttggcattatatttgtcagccaaaatcttctagtgaacttggggtcaaaaacttctctatagctggcatggcacttcaaacacgttggctatggttgcaacacactgatcagaccagagtatgggcaagcctacctatcgaagtgccaaacgtggtcaagacattctttgaagcttccattttgtgattgtgggtgatggaacctcgtgttagggaggtatggctatggcgtgggggaggggagacgaacgccggacggagtggcggcgtatattttgctcttctcaaaaagttaccagcctattacattgttcaagtacttatactctcacgaaaccacagctcgtccagcccactattacataacactagtgtctaacgcgcttcctacgcgcgctagtttgtacgattctaccaaaaatatcaggggcggactcacgttgggctgactcaattttctgattctaatggagtttttatcttattcactatagctataaaggtccattagtaaataggtatttatttagaccccactcaggttttgggccccactcaaactttttgttgggttcgcccctgaaaaatatgtatattaaaggagggatactatatataaggctattataactataatgttgatggtttttttttgatagaaacaaatagagatacgatgatatataaaacaagcatgttggaaagtaaccatataatcccaatatgcttgttttttgcttgccctcaattccttcctatgatatggctaataaaatgaaatcgtcgattcaggtgtcttcacaacctttggcgttcagattagaagaatatcatggtcaaccggtacaaaaggttgcacaaatactgaatatatgtgttgagaaaatggtggcatatatggcttaatatgacatttctttttaaaaggtttgccagttacattagcactttttttaactgcaaccgattgaaagctaatgtttacccttacctctctgtcacattatcattttattgttctactcttcatcccgattagtctaaaaaaagaagacctcgctcgaagacaggtacgtgttacaatcttacttctagatttatattttttacataatagtttttttttaaaaattacaaccatttcctttgggtttatatggtacatatttgactaaccttttatgtgtttcatttatagtagttagttaacatttgttacgttcccttctccactacggaaaatacaaattcaatcagctctttcctcttgac

SEQ ID NO: 69927 - DNA, 2253 bp, Zea Mays
atcgctcaaatatggtgtgcatgcaactgtattcaaaagaaattgaatcccctcctggagcttccagtgcaacatctattctctcacgaaatttgcaaactcatgggttcgactccaaaaagtctagtgaagtgaaggatcttgtttggaaattttgtgcatggagggacttaatggctcggatgcatgatgaaagcttacgatatgttctgccagaccaagctatagctgcccttgccgttagtcttccaaagggcccaacagaggtgtttgctgtcatagcagaaactgacctaagcatttcaagtatgtacccttccttgtcatcaccgtcacctcttgttgtggctcatgtcaaagaactctgttatctgctggatgacatcactaccagcatggacagcatctttaaaagtttactagagaagtataaagatccaagtggattatgtcgactatcagtttataattataaccttataacacacctaagtttgaagcaaacaagtatgttttccgttgctccaagtggaaagaagttgacagcactgcctaataaaaaggtttcacgggatttattcattaaaaagttttcctgcaagtccccggtatatcacaattgcaggatttatgctagtgatggaagactactttgctactgtgaccgcaaaaaactggaatggtacattcagcgtaatttggcgaaattgattgaaaatagtcctccagcaatcatgcttctctttgaacctaaaggtcgtccagaggatgaagataacgagttctatattcagagcaagaaaaatatttgtgtgggctgtggagaaaagagccattatattagatacagaataataccgtcatgctacaggatgcattttccagaacatttaaagagccatcgttcacatgatattgtacttctttgtgtagactgtcatgaaatagctcattcagcagctgagaaatacaagaggcgaatagcagaagaatttggaatacccctttttgtgcaaaagataatgaactcgggtgatataagtttgattaccaacacatcagtatctgaagataaattgaatggaacaggtgtctccccattgcagctgaggactgctgccatggctcttctacgtcatggatccactatgccattgaagagatgtgaagagctaatgcagattgtgaagtcatactatggtggtagagatgtgactcctgaagatctcgagatggcattacttgttggtatgagccctcatgagcgaaggcgtcttgaaaagaaaaagggatattcgtttagagctcaggctcaaactattattagaaagagcagcagcaataccatctcagaagacagtggacatggatcagaaaattgtcatgccttatctgcgcgatttcctgaggttggaactggtagtaatggtcagcaagagtttgatgagacagggaatcaaaaccagctagagaatttaaccctgagccagggaagctcaagtttgccagtcagcatggaggacaccacttctgatcatgacactgtgacactcgagaccgataccgagcagcaagcaagaggtgcctgtactcctggaaacagtcatgacgacaaggaacaatccatatgtgacaattctagtcaggtcatttccaagaatgctgagaagatatccctgttgggtcatgggcatcatggtaaacaagttgtggaacttttgttttctaatggtggagaggaatttgttaaccagttttgccaaaggtggaggcagatctttgttgaagctgttcacccccgttatttaccttctggctggaatattaaccacagtggacggcgggattttggtgacttcagtgtctacaagccaccaaggaaagatcctcaatctgcaactgcaagggattaggcttacgcgggtgtcatgctgtcgttggtaccctgaggttcaacttactttccagaattggttccattcccttaaacttgatcttgttgtacttgttccattcccttaaacctgatattgttgtacttgtatgtatctcaatctgtgtgtttgttcgagtaccttgaaataccaatttcatctcctatgtatttctttgagatgaactttgcatcagttttgttgagccgtttttttatacgtgaggatttagagtactaacaatttaagtccaagaaaaatcaacagtgaagttcaactcagcagattaaatcttcaaagtgccgtttttaactgggag

SEQ ID NO: 69928 - DNA, 2115 bp, Zea Mays
ctattttacaaggaacaattctgtgcaggcatgtgaaattctattgaaaccacaaaaatcactggcatatttgcttgaagtatattgtgaagtgaccaccgacaagacaatgcagcgtgaagattggagactgcgtcctctgactccagaaatgatcgagtatgcacgcactgatgctcactatctgttatacattgcaaattgtttggcatcagagctccatgcaaaagcctgtgtcatcgctcaaatatggtgtgcatgcaactgtattcaaaagaaattgaatcccctcctggagcttccagtgcaacatctattctctcacgaaatttgcaaactcatgggttcgactccaaaaagtctagtgaagtgaaggatcttgtttggaaattttgtgcatggagggacttaatggctcggatgcatgatgaaagcttacgatatgttctgccagaccaagctatagctgcccttgccgttagtcttccaaagggcccaacagaggtgtttgctgtcatagcagaaactgacctaagcatttcaagtacattcagcgtaatttggcgaaattgattgaaaatagtcctccagcaatcatgcttctctttgaacctaaaggtcgtccagaggatgaagataacgagttctatattcagagcaagaaaaatatttgtgtgggctgtggagaaaagagccattatattagatacagaataataccgtcatgctacaggatgcattttccagaacatttaaagagccatcgttcacatgatattgtacttctttgtgtagactgtcatgaaatagctcattcagcagctgagaaatacaagaggcgaatagcagaagaatttggaatacccctttttgtgcaaaagataatgaactcgggtgatataagtttgattaccaacacatcagtatctgaagataaattgaatggaacaggtgtctccccattgcagctgaggactgctgccatggctcttctacgtcatggatccactatgccattgaagagatgtgaagagctaatgcagattgtgaagtcatactatggtggtagagatgtgactcctgaagatctcgagatggcattacttgttggtatgagccctcatgagcgaaggcgtcttgaaaagaaaaagggatattcgtttagagctcaggctcaaactattattagaaagagcagcagcaataccatctcagaagacagtggacatggatcagaaaattgtcatgccttatctgcgcgatttcctgaggttggaactggtagtaatggtcagcaagagtttgatgagacagggaatcaaaaccagctagagaatttaaccctgagccagggaagctcaagtttgccagtcagcatggaggacaccacttctgatcatgacactgtgacactcgagaccgataccgagcagcaagcaagaggtgcctgtactcctggaaacagtcatgacgacaaggaacaatccatatgtgacaattctagtcaggtcatttccaagaatgctgagaagatatccctgttgggtcatgggcatcatggtaaacaagttgtggaacttttgttttctaatggtggagaggaatttgttaaccagttttgccaaaggtggaggcagatctttgttgaagctgttcacccccgttatttaccttctggctggaatattaaccacagtggacggcgggattttggtgacttcagtgtctacaagccaccaaggaaagatcctcaatctgcaactgcaagggattaggcttacgcgggtgtcatgctgtcgttggtaccctgaggttcaacttactttccagaattggttccattcccttaaacttgatcttgttgtacttgttccattcccttaaacctgatattgttgtacttgtatgtatctcaatctgtgtgtttgttcgagtaccttgaaataccaatttcatctcctatgtatttctttgagatgaactttgcatcagttttgttgagccgtttttttatacgtgaggatttagagtactaacaatttaagtccaagaaaaatcaacagtgaagttcaactcagcagattaaatcttcaaagtgccgtttttaactgggag

SEQ ID NO: 69929 - DNA, 2614 bp, Zea Mays
gttgaatttactttgggatatgcattagagatcttccatggagctgacaatgatattctttggcttcaaagggattttcatatttatgttgtgaatatgtttgatactgctaaggcatgtgaaattctattgaaaccacaaaaatcactggcatatttgcttgaagtatattgtgaagtgaccaccgacaagacaatgcagcgtgaagattggagactgcgtcctctgactccagaaatgatcgagtatgcacgcactgatgctcactatctgttatacattgcaaattgtttggcatcagagctccatgcaaaagcctatacttccagtgataaaatcaattttttcttcgaggctagtcatcgctcaaatatggtgtgcatgcaactgtattcaaaagaaattgaatcccctcctggagcttccagtgcaacatctattctctcacgaaatttgcaaactcatgggttcgactccaaaaagtctagtgaagtgaaggatcttgtttggaaattttgtgcatggagggacttaatggctcggatgcatgatgaaagcttacgatatgttctgccagaccaagctatagctgcccttgccgttagtcttccaaagggcccaacagaggtgtttgctgtcatagcagaaactgacctaagcatttcaagtatgtacccttccttgtcatcaccgtcacctcttgttgtggctcatgtcaaagaactctgttatctgctggatgacatcactaccagcatggacagcatctttaaaagtttactagagaagtataaagatccaagtggattatgtcgactatcagtttataattataaccttataacacacctaagtttgaagcaaacaagtatgttttccgttgctccaagtggaaagaagttgacagcactgcctaataaaaaggtttcacgggatttattcattaaaaagttttcctgcaagtccccggtatatcacaattgcaggatttatgctagtgatggaagactactttgctactgtgaccgcaaaaaactggaatggtacattcagcgtaatttggcgaaattgattgaaaatagtcctccagcaatcatgcttctctttgaacctaaaggtcgtccagaggatgaagataacgagttctatattcagagcaagaaaaatatttgtgtgggctgtggagaaaagagccattatattagatacagaataataccgtcatgctacaggatgcattttccagaacatttaaagagccatcgttcacatgatattgtacttctttgtgtagactgtcatgaaatagctcattcagcagctgagaaatacaagaggcgaatagcagaagaatttggaatacccctttttgtgcaaaagataatgaactcgggtgatataagtttgattaccaacacatcagtatctgaagataaattgaatggaacaggtgtctccccattgcagctgaggactgctgccatggctcttctacgtcatggatccactatgccattgaagagatgtgaagagctaatgcagattgtgaagtcatactatggtggtagagatgtgactcctgaagatctcgagatggcattacttgttggtatgagccctcatgagcgaaggcgtcttgaaaagaaaaagggatattcgtttagagctcaggctcaaactattattagaaagagcagcagcaataccatctcagaagacagtggacatggatcagaaaattgtcatgccttatctgcgcgatttcctgaggttggaactggtagtaatggtcagcaagagtttgatgagacagggaatcaaaaccagctagagaatttaaccctgagccagggaagctcaagtttgccagtcagcatggaggacaccacttctgatcatgacactgtgacactcgagaccgataccgagcagcaagcaagaggtgcctgtactcctggaaacagtcatgacgacaaggaacaatccatatgtgacaattctagtcaggtcatttccaagaatgctgagaagatatccctgttgggtcatgggcatcatggtaaacaagttgtggaacttttgttttctaatggtggagaggaatttgttaaccagttttgccaaaggtggaggcagatctttgttgaagctgttcacccccgttatttaccttctggctggaatattaaccacagtggacggcgggattttggtgacttcagtgtctacaagccaccaaggaaagatcctcaatctgcaactgcaagggattaggcttacgcgggtgtcatgctgtcgttggtaccctgaggttcaacttactttccagaattggttccattcccttaaacttgatcttgttgtacttgttccattcccttaaacctgatattgttgtacttgtatgtatctcaatctgtgtgtttgttcgagtaccttgaaataccaatttcatctcctatgtatttctttgagatgaactttgcatcagttttgttgagccgtttttttatacgtgaggatttagagtactaacaatttaagtccaagaaaaatcaacagtgaagttcaactcagcagattaaatcttcaaagtgccgtttttaactgggag

SEQ ID NO: 69930 - DNA, 2907 bp, Zea Mays
atttcacgggatccctggtacattttctgtctgaggaattttatcgaacacctgagggcaaagaattgtcacaaaaaggtcatccatttgaggaggaaatcacatctttgctaaagaacccccctggttttcatagctttatgctgtgtgaccagtgcccagaaatgagtgctacatataattgggttcatacagaaactcaactggaacatttggcgagattattgggtgaggaaagagcttttgctgttgatacagagcaacatagcattcgatctttcctaggatatactgcactaatgcagatctctacccagaatgaagactatctgatagacacaatagcactgcacgatgtgatgggcattctacgaccagtgtttgccaattcttctatctgtaaggcatgtgaaattctattgaaaccacaaaaatcactggcatatttgcttgaagtatattgtgaagtgaccaccgacaagacaatgcagcgtgaagattggagactgcgtcctctgactccagaaatgatcgagtatgcacgcactgatgctcactatctgttatacattgcaaattgtttggcatcagagctccatgcaaaagcctgtgatacttccagtgataaaatcaattttttcttcgaggctagtcatcgctcaaatatggtgtgcatgcaactgtattcaaaagaaattgaatcccctcctggagcttccagtgcaacatctattctctcacgaaatttgcaaactcatgggttcgactccaaaaagtctagtgaagtgaaggatcttgtttggaaattttgtgcatggagggacttaatggctcggatgcatgatgaaagcttacgatatgttctgccagaccaagctatagctgcccttgccgttagtcttccaaagggcccaacagaggtgtttgctgtcatagcagaaactgacctaagcatttcaagtatgtacccttccttgtcatcaccgtcacctcttgttgtggctcatgtcaaagaactctgttatctgctggatgacatcactaccagcatggacagcatctttaaaagtttactagagaagtataaagatccaagtggattatgtcgactatcagtttataattataaccttataacacacctaagtttgaagcaaacaagtatgttttccgttgctccaagtggaaagaagttgacagcactgcctaataaaaaggtttcacgggatttattcattaaaaagttttcctgcaagtccccggtatatcacaattgcaggatttatgctagtgatggaagactactttgctactgtgaccgcaaaaaactggaatggtacattcagcgtaatttggcgaaattgattgaaaatagtcctccagcaatcatgcttctctttgaacctaaaggtcgtccagaggatgaagataacgagttctatattcagagcaagaaaaatatttgtgtgggctgtggagaaaagagccattatattagatacagaataataccgtcatgctacaggatgcattttccagaacatttaaagagccatcgttcacatgatattgtacttctttgtgtagactgtcatgaaatagctcattcagcagctgagaaatacaagaggcgaatagcagaagaatttggaatacccctttttgtgcaaaagataatgaactcgggtgatataagtttgattaccaacacatcagtatctgaagataaattgaatggaacaggtgtctccccattgcagctgaggactgctgccatggctcttctacgtcatggatccactatgccattgaagagatgtgaagagctaatgcagattgtgaagtcatactatggtggtagagatgtgactcctgaagatctcgagatggcattacttgttggtatgagccctcatgagcgaaggcgtcttgaaaagaaaaagggatattcgtttagagctcaggctcaaactattattagaaagagcagcagcaataccatctcagaagacagtggacatggatcagaaaattgtcatgccttatctgcgcgatttcctgaggttggaactggtagtaatggtcagcaagagtttgatgagacagggaatcaaaaccagctagagaatttaaccctgagccagggaagctcaagtttgccagtcagcatggaggacaccacttctgatcatgacactgtgacactcgagaccgataccgagcagcaagcaagaggtgcctgtactcctggaaacagtcatgacgacaaggaacaatccatatgtgacaattctagtcaggtcatttccaagaatgctgagaagatatccctgttgggtcatgggcatcatggtaaacaagttgtggaacttttgttttctaatggtggagaggaatttgttaaccagttttgccaaaggtggaggcagatctttgttgaagctgttcacccccgttatttaccttctggctggaatattaaccacagtggacggcgggattttggtgacttcagtgtctacaagccaccaaggaaagatcctcaatctgcaactgcaagggattaggcttacgcgggtgtcatgctgtcgttggtaccctgaggttcaacttactttccagaattggttccattcccttaaacttgatcttgttgtacttgttccattcccttaaacctgatattgttgtacttgtatgtatctcaatctgtgtgtttgttcgagtaccttgaaataccaatttcatctcctatgtatttctttgagatgaactttgcatcagttttgttgagccgtttttttatacgtgaggatttagagtactaacaatttaagtccaagaaaaatcaacagtgaagttcaactcagcagattaaatcttcaaagtgccgtttttaactgggag

SEQ ID NO: 69931 - DNA, 3035 bp, Zea Mays
cctgctcctgcttaattgtcacaaaaaggtcatccatttgaggaggaaatcacatctttgctaaagaacccccctggttttcatagctttatgctgtgtgaccagtgcccagaaatgagtgctacatataattgggttcatacagaaactcaactggaacatttggcgagattattgggtgaggaaagagcttttgctgttgatacagagcaacatagcattcgatctttcctaggatatactgcactaatgcagatctctacccagaatgaagactatctgatagacacaatagcactgcacgatgtgatgggcattctacgaccagtgtttgccaattcttctatctgtaagatcttccatggagctgacaatgatattctttggcttcaaagggattttcatatttatgttgtgaatatgtttgatactgctaaggcatgtgaaattctattgaaaccacaaaaatcactggcatatttgcttgaagtatattgtgaagtgaccaccgacaagacaatgcagcgtgaagattggagactgcgtcctctgactccagaaatgatcgagtatgcacgcactgatgctcactatctgttatacattgcaaattgtttggcatcagagctccatgcaaaagcctgtgatacttccagtgataaaatcaattttttcttcgaggctagtcatcgctcaaatatggtgtgcatgcaactgtattcaaaagaaattgaatcccctcctggagcttccagtgcaacatctattctctcacgaaatttgcaaactcatgggttcgactccaaaaagtctagtgaagtgaaggatcttgtttggaaattttgtgcatggagggacttaatggctcggatgcatgatgaaagcttacgatatgttctgccagaccaagctatagctgcccttgccgttagtcttccaaagggcccaacagaggtgtttgctgtcatagcagaaactgacctaagcatttcaagtatgtacccttccttgtcatcaccgtcacctcttgttgtggctcatgtcaaagaactctgttatctgctggatgacatcactaccagcatggacagcatctttaaaagtttactagagaagtataaagatccaagtggattatgtcgactatcagtttataattataaccttataacacacctaagtttgaagcaaacaagtatgttttccgttgctccaagtggaaagaagttgacagcactgcctaataaaaaggtttcacgggatttattcattaaaaagttttcctgcaagtccccggtatatcacaattgcaggatttatgctagtgatggaagactactttgctactgtgaccgcaaaaaactggaatggtttgtctcctaaatatatgctcattagctatttacatgcatgtagcatgaatgaagaattattttggcaaactgatgagctcttctatcccaggtacattcagcgtaatttggcgaaattgattgaaaatagtcctccagcaatcatgcttctctttgaacctaaaggtcgtccagaggatgaagataacgagttctatattcagagcaagaaaaatatttgtgtgggctgtggagaaaagagccattatattagatacagaataataccgtcatgctacaggatgcattttccagaacatttaaagagccatcgttcacatgatattgtacttctttgtgtagactgtcatgaaatagctcattcagcagctgagaaatacaagaggcgaatagcagaagaatttggaatacccctttttgtgcaaaagataatgaactcgggtgatataagtttgattaccaacacatcagtatctgaagataaattgaatggaacaggtgtctccccattgcagctgaggactgctgccatggctcttctacgtcatggatccactatgccattgaagagatgtgaagagctaatgcagattgtgaagtcatactatggtggtagagatgtgactcctgaagatctcgagatggcattacttgttggtatgagccctcatgagcgaaggcgtcttgaaaagaaaaagggatattcgtttagagctcaggctcaaactattattagaaagagcagcagcaataccatctcagaagacagtggacatggatcagaaaattgtcatgccttatctgcgcgatttcctgaggttggaactggtagtaatggtcagcaagagtttgatgagacagggaatcaaaaccagctagagaatttaaccctgagccagggaagctcaagtttgccagtcagcatggaggacaccacttctgatcatgacactgtgacactcgagaccgataccgagcagcaagcaagaggtgcctgtactcctggaaacagtcatgacgacaaggaacaatccatatgtgacaattctagtcaggtcatttccaagaatgctgagaagatatccctgttgggtcatgggcatcatggtaaacaagttgtggaacttttgttttctaatggtggagaggaatttgttaaccagttttgccaaaggtggaggcagatctttgttgaagctgttcacccccgttatttaccttctggctggaatattaaccacagtggacggcgggattttggtgacttcagtgtctacaagccaccaaggaaagatcctcaatctgcaactgcaagggattaggcttacgcgggtgtcatgctgtcgttggtaccctgaggttcaacttactttccagaattggttccattcccttaaacttgatcttgttgtacttgttccattcccttaaacctgatattgttgtacttgtatgtatctcaatctgtgtgtttgttcgagtaccttgaaataccaatttcatctcctatgtatttctttgagatgaactttgcatcagttttgttgagccgtttttttatacgtgaggatttagagtactaacaatttaagtccaagaaaaatcaacagtgaagttcaactcagcagattaaatcttcaaagtgccgtttttaactgggag

SEQ ID NO: 69932 - DNA, 2933 bp, Zea Mays
cgtcgcgatcgcgacatgcccggcgccgccaccctcagatcgcgcgtggccgtcgcggccgccgcgtgccttgcggtcttcgcagcggtggcgctgctccaccgcaagcgccgctggaaccgggcgccctcctcgtctcgtcgcctcggggtcgggggacgcccacgccgcgcttgcgaggaggaggagaagccgcaggaccggttcaagcgcgtcctcgcggacaactcctactccccgttcaaacacccgcgccgcaagagtgctcagttgggaagtgcagaaggcgaggcacccctgccaccgcctcaagaattgtcacaaaaaggtcatccatttgaggaggaaatcacatctttgctaaagaacccccctggttttcatagctttatgctgtgtgaccagtgcccagaaatgagtgctacatataattgggttcatacagaaactcaactggaacatttggcgagattattgggtgaggaaagagcttttgctgttgatacagagcaacatagcattcgatctttcctaggatatactgcactaatgcaggtaatttactgatctctacccagaatgaagactatctgatagacacaatagcactgcacgatgtgatgggcattctacgaccagtgtttgccaattcttctatctgtaagatcttccatggagctgacaatgatattctttggcttcaaagggattttcatatttatgttgtgaatatgtttgatactgctaaggcatgtgaaattctattgaaaccacaaaaatcactggcatatttgcttgaagtatattgtgaagtgaccaccgacaagacaatgcagcgtgaagattggagactgcgtcctctgactccagaaatgatcgagtatgcacgcactgatgctcactatctgttatacattgcaaattgtttggcatcagagctccatgcaaaagcctgtgatacttccagtgataaaatcaattttttcttcgaggctagtcatcgctcaaatatggtgtgcatgcaactgtattcaaaagaaattgaatcccctcctggagcttccagtgcaacatctattctctcacgaaatttgcaaactcatgggttcgactccaaaaagtctagtgaagtgaaggatcttgtttggaaattttgtgcatggagggacttaatggctcggatgcatgatgaaagcttacgatatgttctgccagaccaagctatagctgcccttgccgttagtcttccaaagggcccaacagaggtgtttgctgtcatagcagaaactgacctaagcatttcaagatttatgctagtgatggaagactactttgctactgtgaccgcaaaaaactggaatggtacattcagcgtaatttggcgaaattgattgaaaatagtcctccagcaatcatgcttctctttgaacctaaaggtcgtccagaggatgaagataacgagttctatattcagagcaagaaaaatatttgtgtgggctgtggagaaaagagccattatattagatacagaataataccgtcatgctacaggatgcattttccagaacatttaaagagccatcgttcacatgatattgtacttctttgtgtagactgtcatgaaatagctcattcagcagctgagaaatacaagaggcgaatagcagaagaatttggaatacccctttttgtgcaaaagataatgaactcgggtgatataagtttgattaccaacacatcagtatctgaagataaattgaatggaacaggtgtctccccattgcagctgaggactgctgccatggctcttctacgtcatggatccactatgccattgaagagatgtgaagagctaatgcagattgtgaagtcatactatggtggtagagatgtgactcctgaagatctcgagatggcattacttgttggtatgagccctcatgagcgaaggcgtcttgaaaagaaaaagggatattcgtttagagctcaggctcaaactattattagaaagagcagcagcaataccatctcagaagacagtggacatggatcagaaaattgtcatgccttatctgcgcgatttcctgaggttggaactggtagtaatggtcagcaagagtttgatgagacagggaatcaaaaccagctagagaatttaaccctgagccagggaagctcaagtttgccagtcagcatggaggacaccacttctgatcatgacactgtgacactcgagaccgataccgagcagcaagcaagaggtgcctgtactcctggaaacagtcatgacgacaaggaacaatccatatgtgacaattctagtcaggtcatttccaagaatgctgagaagatatccctgttgggtcatgggcatcatggtaaacaagttgtggaacttttgttttctaatggtggagaggaatttgttaaccagttttgccaaaggtggaggcagatctttgttgaagctgttcacccccgttatttaccttctggctggaatattaaccacagtggacggcgggattttggtgacttcagtgtctacaagccaccaaggaaagatcctcaatctgcaactgcaagggattaggcttacgcgggtgtcatgctgtcgttggtaccctgaggttcaacttactttccagaattggttccattcccttaaacttgatcttgttgtacttgttccattcccttaaacctgatattgttgtacttgtatgtatctcaatctgtgtgtttgttcgagtaccttgaaataccaatttcatctcctatgtatttctttgagatgaactttgcatcagttttgttgagccgtttttttatacgtgaggatttagagtactaacaatttaagtccaagaaaaatcaacagtgaagttcaactcagcagattaaatcttcaaagtgccgtttttaactgggag

SEQ ID NO: 69933 - DNA, 3440 bp, Zea Mays
cgtcgcgatcgcgacatgcccggcgccgccaccctcagatcgcgcgtggccgtcgcggccgccgcgtgccttgcggtcttcgcagcggtggcgctgctccaccgcaagcgccgctggaaccgggcgccctcctcgtctcgtcgcctcggggtcgggggacgcccacgccgcgcttgcgaggaggaggagaagccgcaggaccggttcaagcgcgtcctcgcggacaactcctactccccgttcaaacacccgcgccgcaagagtgctcagttgggaagtgcagaaggcgaggcacccctgccaccgcctcaaggaatttcacgggatccctggtacattttctgtctgaggaattttatcgaacacctgagggcaaagaattgtcacaaaaaggtcatccatttgaggaggaaatcacatctttgctaaagaacccccctggttttcatagctttatgctgtgtgaccagtgcccagaaatgagtgctacatataattgggttcatacagaaactcaactggaacatttggcgagattattgggtgaggaaagagcttttgctgttgatacagagcaacatagcattcgatctttcctaggatatactgcactaatgcagatctctacccagaatgaagactatctgatagacacaatagcactgcacgatgtgatgggcattctacgaccagtgtttgccaattcttctatctgtaagtacaagaaaagatagtgtcatgaactccagttacatgccattggaatgtagttgaatttactttgggatatgcattagagatcttccatggagctgacaatgatattctttggcttcaaagggattttcatatttatgttgtgaatatgtttgatactgctaaggcatgtgaaattctattgaaaccacaaaaatcactggcatatttgcttgaagtatattgtgaagtgaccaccgacaagacaatgcagcgtgaagattggagactgcgtcctctgactccagaaatgatcgagtatgcacgcactgatgctcactatctgttatacattgcaaattgtttggcatcagagctccatgcaaaagcctgtgtcatcgctcaaatatggtgtgcatgcaactgtattcaaaagaaattgaatcccctcctggagcttccagtgcaacatctattctctcacgaaatttgcaaactcatgggttcgactccaaaaagtctagtgaagtgaaggatcttgtttggaaattttgtgcatggagggacttaatgcaaagcttgatgttcatacaagtgaaagcagcagcaaactagttgtgtgccttatcaccttttgaatcctgggtgaccaccaaatgtcactcaggctcggatgcatgatgaaagcttacgatatgttctgccagaccaagctatagctgcccttgccgttagtcttccaaagggcccaacagaggtgtttgctgtcatagcagaaactgacctaagcatttcaagtatgtacccttccttgtcatcaccgtcacctcttgttgtggctcatgtcaaagaactctgttatctgctggatgacatcactaccagcatggacagcatctttaaaagtttactagagaagtataaagatccaagtggattatgtcgactatcagtttataattataaccttataacacacctaagtttgaagcaaacaagtatgttttccgttgctccaagtggaaagaagttgacagcactgcctaataaaaaggtttcacgggatttattcattaaaaagttttcctgcaagtccccggtatatcacaattgcaggatttatgctagtgatggaagactactttgctactgtgaccgcaaaaaactggaatggtacattcagcgtaatttggcgaaattgattgaaaatagtcctccagcaatcatgcttctctttgaacctaaaggtcgtccagaggatgaagataacgagttctatattcagagcaagaaaaatatttgtgtgggctgtggagaaaagagccattatattagatacagaataataccgtcatgctacaggatgcattttccagaacatttaaagagccatcgttcacatgatattgtacttctttgtgtagactgtcatgaaatagctcattcagcagctgagaaatacaagaggcgaatagcagaagaatttggaatacccctttttgtgcaaaagataatgaactcgggtgatataagtttgattaccaacacatcagtatctgaagataaattgaatggaacaggtgtctccccattgcagctgaggactgctgccatggctcttctacgtcatggatccactatgccattgaagagatgtgaagagctaatgcagattgtgaagtcatactatggtggtagagatgtgactcctgaagatctcgagatggcattacttgttggtatgagccctcatgagcgaaggcgtcttgaaaagaaaaagggatattcgtttagagctcaggctcaaactattattagaaagagcagcagcaataccatctcagaagacagtggacatggatcagaaaattgtcatgccttatctgcgcgatttcctgaggttggaactggtagtaatggtcagcaagagtttgatgagacagggaatcaaaaccagctagagaatttaaccctgagccagggaagctcaagtttgccagtcagcatggaggacaccacttctgatcatgacactgtgacactcgagaccgataccgagcagcaagcaagaggtgcctgtactcctggaaacagtcatgacgacaaggaacaatccatatgtgacaattctagtcaggtcatttccaagaatgctgagaagatatccctgttgggtcatgggcatcatggtaaacaagttgtggaacttttgttttctaatggtggagaggaatttgttaaccagttttgccaaaggtggaggcagatctttgttgaagctgttcacccccgttatttaccttctggctggaatattaaccacagtggacggcgggattttggtgacttcagtgtctacaagccaccaaggaaagatcctcaatctgcaactgcaagggattaggcttacgcgggtgtcatgctgtcgttggtaccctgaggttcaacttactttccagaattggttccattcccttaaacttgatcttgttgtacttgttccattcccttaaacctgatattgttgtacttgtatgtatctcaatctgtgtgtttgttcgagtaccttgaaataccaatttcatctcctatgtatttctttgagatgaactttgcatcagttttgttgagccgtttttttatacgtgaggatttagagtactaacaatttaagtccaagaaaaatcaacagtgaagttcaactcagcagattaaatcttcaaagtgccgtttttaactgggag

SEQ ID NO: 69934 - DNA, 3212 bp, Zea Mays
cgtcgcgatcgcgacatgcccggcgccgccaccctcagatcgcgcgtggccgtcgcggccgccgcgtgccttgcggtcttcgcagcggtggcgctgctccaccgcaagcgccgctggaaccgggcgccctcctcgtctcgtcgcctcggggtcgggggacgcccacgccgcgcttgcgaggaggaggagaagccgcaggaccggttcaagcgcgtcctcgcggacaactcctactccccgttcaaacacccgcgccgcaagagtgctcagttgggaagtgcagaaggcgaggcacccctgccaccgcctcaagaattgtcacaaaaaggtcatccatttgaggaggaaatcacatctttgctaaagaacccccctggttttcatagctttatgctgtgtgaccagtgcccagaaatgagtgctacatataattgggttcatacagaaactcaactggaacatttggcgagattattgggtgaggaaagagcttttgctgttgatacagagcaacatagcattcgatctttcctaggatatactgcactaatgcaggtaatttactgatctctacccagaatgaagactatctgatagacacaatagcactgcacgatgtgatgggcattctacgaccagtgtttgccaattcttctatctgtaagatcttccatggagctgacaatgatattctttggcttcaaagggattttcatatttatgttgtgaatatgtttgatactgctaaggcatgtgaaattctattgaaaccacaaaaatcactggcatatttgcttgaagtatattgtgaagtgaccaccgacaagacaatgcagcgtgaagattggagactgcgtcctctgactccagaaatgatcgagtatgcacgcactgatgctcactatctgttatacattgcaaattgtttggcatcagagctccatgcaaaagcctgtgtcatcgctcaaatatggtgtgcatgcaactgtattcaaaagaaattgaatcccctcctggagcttccagtgcaacatctattctctcacgaaatttgcaaactcatgggttcgactccaaaaagtctagtgaagtgaaggatcttgtttggaaattttgtgcatggagggacttaatggctcggatgcatgatgaaagcttacgatatgttctgccagaccaagctatagctgcccttgccgttagtcttccaaagggcccaacagaggtgtttgctgtcatagcagaaactgacctaagcatttcaagtatgtacccttccttgtcatcaccgtcacctcttgttgtggctcatgtcaaagaactctgttatctgctggatgacatcactaccagcatggacagcatctttaaaagtttactagagaagtataaagatccaagtggattatgtcgactatcagtttataattataaccttataacacacctaagtttgaagcaaacaagtatgttttccgttgctccaagtggaaagaagttgacagcactgcctaataaaaaggtttcacgggatttattcattaaaaagttttcctgcaagtccccggtatatcacaattgcaggatttatgctagtgatggaagactactttgctactgtgaccgcaaaaaactggaatggtacattcagcgtaatttggcgaaattgattgaaaatagtcctccagcaatcatgcttctctttgaacctaaaggtcgtccagaggatgaagataacgagttctatattcagagcaagaaaaatatttgtgtgggctgtggagaaaagagccattatattagatacagaataataccgtcatgctacaggatgcattttccagaacatttaaagagccatcgttcacatgatattgtacttctttgtgtagactgtcatgaaatagctcattcagcagctgagaaatacaagaggcgaatagcagaagaatttggaatacccctttttgtgcaaaagataatgaactcgggtgatataagtttgattaccaacacatcagtatctgaagataaattgaatggaacaggtgtctccccattgcagctgaggactgctgccatggctcttctacgtcatggatccactatgccattgaagagatgtgaagagctaatgcagattgtgaagtcatactatggtggtagagatgtgactcctgaagatctcgagatggcattacttgttggtatgagccctcatgagcgaaggcgtcttgaaaagaaaaagggatattcgtttagagctcaggctcaaactattattagaaagagcagcagcaataccatctcagaagacagtggacatggatcagaaaattgtcatgccttatctgcgcgatttcctgaggttggaactggtagtaatggtcagcaagagtttgatgagacagggaatcaaaaccagctagagaatttaaccctgagccagggaagctcaagtttgccagtcagcatggaggacaccacttctgatcatgacactgtgacactcgagaccgataccgagcagcaagcaagaggtgcctgtactcctggaaacagtcatgacgacaaggaacaatccatatgtgacaattctagtcaggtcatttccaagaatgctgagaagatatccctgttgggtcatgggcatcatggtaaacaagttgtggaacttttgttttctaatggtggagaggaatttgttaaccagttttgccaaaggtggaggcagatctttgttgaagctgttcacccccgttatttaccttctggctggaatattaaccacagtggacggcgggattttggtgacttcagtgtctacaagccaccaaggaaagatcctcaatctgcaactgcaagggattaggcttacgcgggtgtcatgctgtcgttggtaccctgaggttcaacttactttccagaattggttccattcccttaaacttgatcttgttgtacttgttccattcccttaaacctgatattgttgtacttgtatgtatctcaatctgtgtgtttgttcgagtaccttgaaataccaatttcatctcctatgtatttctttgagatgaactttgcatcagttttgttgagccgtttttttatacgtgaggatttagagtactaacaatttaagtccaagaaaaatcaacagtgaagttcaactcagcagattaaatcttcaaagtgccgtttttaactgggag

SEQ ID NO: 69935 - DNA, 3317 bp, Zea Mays
cgtcgcgatcgcgacatgcccggcgccgccaccctcagatcgcgcgtggccgtcgcggccgccgcgtgccttgcggtcttcgcagcggtggcgctgctccaccgcaagcgccgctggaaccgggcgccctcctcgtctcgtcgcctcggggtcgggggacgcccacgccgcgcttgcgaggaggaggagaagccgcaggaccggttcaagcgcgtcctcgcggacaactcctactccccgttcaaacacccgcgccgcaagagtgctcagttgggaagtgcagaaggcgaggcacccctgccaccgcctcaaggaatttcacgggatccctggtacattttctgtctgaggaattttatcgaacacctgagggcaaagaattgtcacaaaaaggtcatccatttgaggaggaaatcacatctttgctaaagaacccccctggttttcatagctttatgctgtgtgaccagtgcccagaaatgagtgctacatataattgggttcatacagaaactcaactggaacatttggcgagattattgggtgaggaaagagcttttgctgttgatacagagcaacatagcattcgatctttcctaggatatactgcactaatgcaggtaatttactgatctctacccagaatgaagactatctgatagacacaatagcactgcacgatgtgatgggcattctacgaccagtgtttgccaattcttctatctgtaagatcttccatggagctgacaatgatattctttggcttcaaagggattttcatatttatgttgtgaatatgtttgatactgctaaggcatgtgaaattctattgaaaccacaaaaatcactggcatatttgcttgaagtatattgtgaagtgaccaccgacaagacaatgcagcgtgaagattggagactgcgtcctctgactccagaaatgatcgagtatgcacgcactgatgctcactatctgttatacattgcaaattgtttggcatcagagctccatgcaaaagcctgtgatacttccagtgataaaatcaattttttcttcgaggctagtcatcgctcaaatatggtgtgcatgcaactgtattcaaaagaaattgaatcccctcctggagcttccagtgcaacatctattctctcacgaaatttgcaaactcatgggttcgactccaaaaagtctagtgaagtgaaggatcttgtttggaaattttgtgcatggagggacttaatggctcggatgcatgatgaaagcttacgatatgttctgccagaccaagctatagctgcccttgccgttagtcttccaaagggcccaacagaggtgtttgctgtcatagcagaaactgacctaagcatttcaagtatgtacccttccttgtcatcaccgtcacctcttgttgtggctcatgtcaaagaactctgttatctgctggatgacatcactaccagcatggacagcatctttaaaagtttactagagaagtataaagatccaagtggattatgtcgactatcagtttataattataaccttataacacacctaagtttgaagcaaacaagtatgttttccgttgctccaagtggaaagaagttgacagcactgcctaataaaaaggtttcacgggatttattcattaaaaagttttcctgcaagtccccggtatatcacaattgcaggatttatgctagtgatggaagactactttgctactgtgaccgcaaaaaactggaatggtacattcagcgtaatttggcgaaattgattgaaaatagtcctccagcaatcatgcttctctttgaacctaaaggtcgtccagaggatgaagataacgagttctatattcagagcaagaaaaatatttgtgtgggctgtggagaaaagagccattatattagatacagaataataccgtcatgctacaggatgcattttccagaacatttaaagagccatcgttcacatgatattgtacttctttgtgtagactgtcatgaaatagctcattcagcagctgagaaatacaagaggcgaatagcagaagaatttggaatacccctttttgtgcaaaagataatgaactcgggtgatataagtttgattaccaacacatcagtatctgaagataaattgaatggaacaggtgtctccccattgcagctgaggactgctgccatggctcttctacgtcatggatccactatgccattgaagagatgtgaagagctaatgcagattgtgaagtcatactatggtggtagagatgtgactcctgaagatctcgagatggcattacttgttggtatgagccctcatgagcgaaggcgtcttgaaaagaaaaagggatattcgtttagagctcaggctcaaactattattagaaagagcagcagcaataccatctcagaagacagtggacatggatcagaaaattgtcatgccttatctgcgcgatttcctgaggttggaactggtagtaatggtcagcaagagtttgatgagacagggaatcaaaaccagctagagaatttaaccctgagccagggaagctcaagtttgccagtcagcatggaggacaccacttctgatcatgacactgtgacactcgagaccgataccgagcagcaagcaagaggtgcctgtactcctggaaacagtcatgacgacaaggaacaatccatatgtgacaattctagtcaggtcatttccaagaatgctgagaagatatccctgttgggtcatgggcatcatggtaaacaagttgtggaacttttgttttctaatggtggagaggaatttgttaaccagttttgccaaaggtggaggcagatctttgttgaagctgttcacccccgttatttaccttctggctggaatattaaccacagtggacggcgggattttggtgacttcagtgtctacaagccaccaaggaaagatcctcaatctgcaactgcaagggattaggcttacgcgggtgtcatgctgtcgttggtaccctgaggttcaacttactttccagaattggttccattcccttaaacttgatcttgttgtacttgttccattcccttaaacctgatattgttgtacttgtatgtatctcaatctgtgtgtttgttcgagtaccttgaaataccaatttcatctcctatgtatttctttgagatgaactttgcatcagttttgttgagccgtttttttatacgtgaggatttagagtactaacaatttaagtccaagaaaaatcaacagtgaagttcaactcagcagattaaatcttcaaagtgccgtttttaactgggag

SEQ ID NO: 69936 - DNA, 3562 bp, Zea Mays
cgtcgcgatcgcgacatgcccggcgccgccaccctcagatcgcgcgtggccgtcgcggccgccgcgtgccttgcggtcttcgcagcggtggcgctgctccaccgcaagcgccgctggaaccgggcgccctcctcgtctcgtcgcctcggggtcgggggacgcccacgccgcgcttgcgaggaggaggagaagccgcaggaccggttcaagcgcgtcctcgcggacaactcctactccccgttcaaacacccgcgccgcaagagtgctcagttgggaagtgcagaaggcgaggcacccctgccaccgcctcaagaattgtcacaaaaaggtcatccatttgaggaggaaatcacatctttgctaaagaacccccctggttttcatagctttatgctgtgtgaccagtgcccagaaatgagtgctacatataattgggttcatacagaaactcaactggaacatttggcgagattattgggtgaggaaagagcttttgctgttgatacagagcaacatagcattcgatctttcctaggatatactgcactaatgcagatctctacccagaatgaagactatctgatagacacaatagcactgcacgatgtgatgggcattctacgaccagtgtttgccaattcttctatctgtaagatcttccatggagctgacaatgatattctttggcttcaaagggattttcatatttatgttgtgaatatgtttgatactgctaaggcatgtgaaattctattgaaaccacaaaaatcactggcatatttgcttgaagtatattgtgaagtgaccaccgacaagacaatgcagcgtgaagattggagactgcgtcctctgactccagaaatgatcgagtatgcacgcactgatgctcactatctgttatacattgcaaattgtttggcatcagagctccatgcaaaagcctgtgatacttccagtgataaaatcaattttttcttcgaggctagtcatcgctcaaatatggtgtgcatgcaactgtattcaaaagaaattgaatcccctcctggagcttccagtgcaacatctattctctcacgaaatttgcaaactcatgggttcgactccaaaaagtctagtgaagtgaaggatcttgtttggaaattttgtgcatggagggacttaatggtcagtaaaaaactgttttccttagaatagctgcatccccttctgcaaagtagatctttttaattgcttatttgttgttacctccaatcagcaaagcttgatgttcatacaagtgaaagcagcagcaaactagttgtgtgccttatcaccttttgaatcctgggtgaccaccaaatgtcactcaggcaagttgcataacgttgggcacattgaagtaaatgcatttccaggatatcatgcatatttgcagttatgtagttgtggtgggtctattcttcgtttctgatatctcataataacttggattttggatcattccaggctcggatgcatgatgaaagcttacgatatgttctgccagaccaagctatagctgcccttgccgttagtcttccaaagggcccaacagaggtgtttgctgtcatagcagaaactgacctaagcatttcaagtatgtacccttccttgtcatcaccgtcacctcttgttgtggctcatgtcaaagaactctgttatctgctggatgacatcactaccagcatggacagcatctttaaaagtttactagagaagtataaagatccaagtggattatgtcgactatcagtttataattataaccttataacacacctaagtttgaagcaaacaagtatgttttccgttgctccaagtggaaagaagttgacagcactgcctaataaaaaggtttcacgggatttattcattaaaaagttttcctgcaagtccccggtatatcacaattgcaggatttatgctagtgatggaagactactttgctactgtgaccgcaaaaaactggaatggtacattcagcgtaatttggcgaaattgattgaaaatagtcctccagcaatcatgcttctctttgaacctaaaggtcgtccagaggatgaagataacgagttctatattcagagcaagaaaaatatttgtgtgggctgtggagaaaagagccattatattagatacagaataataccgtcatgctacaggatgcattttccagaacatttaaagagccatcgttcacatgatattgtacttctttgtgtagactgtcatgaaatagctcattcagcagctgagaaatacaagaggcgaatagcagaagaatttggaatacccctttttgtgcaaaagataatgaactcgggtgatataagtttgattaccaacacatcagtatctgaagataaattgaatggaacaggtgtctccccattgcagctgaggactgctgccatggctcttctacgtcatggatccactatgccattgaagagatgtgaagagctaatgcagattgtgaagtcatactatggtggtagagatgtgactcctgaagatctcgagatggcattacttgttggtatgagccctcatgagcgaaggcgtcttgaaaagaaaaagggatattcgtttagagctcaggctcaaactattattagaaagagcagcagcaataccatctcagaagacagtggacatggatcagaaaattgtcatgccttatctgcgcgatttcctgaggttggaactggtagtaatggtcagcaagagtttgatgagacagggaatcaaaaccagctagagaatttaaccctgagccagggaagctcaagtttgccagtcagcatggaggacaccacttctgatcatgacactgtgacactcgagaccgataccgagcagcaagcaagaggtgcctgtactcctggaaacagtcatgacgacaaggaacaatccatatgtgacaattctagtcaggtcatttccaagaatgctgagaagatatccctgttgggtcatgggcatcatggtaaacaagttgtggaacttttgttttctaatggtggagaggaatttgttaaccagttttgccaaaggtggaggcagatctttgttgaagctgttcacccccgttatttaccttctggctggaatattaaccacagtggacggcgggattttggtgacttcagtgtctacaagccaccaaggaaagatcctcaatctgcaactgcaagggattaggcttacgcgggtgtcatgctgtcgttggtaccctgaggttcaacttactttccagaattggttccattcccttaaacttgatcttgttgtacttgttccattcccttaaacctgatattgttgtacttgtatgtatctcaatctgtgtgtttgttcgagtaccttgaaataccaatttcatctcctatgtatttctttgagatgaactttgcatcagttttgttgagccgtttttttatacgtgaggatttagagtactaacaatttaagtccaagaaaaatcaacagtgaagttcaactcagcagattaaatcttcaaagtgccgtttttaactgggag

SEQ ID NO: 69937 - DNA, 3522 bp, Zea Mays
cgtcgcgatcgcgacatgcccggcgccgccaccctcagatcgcgcgtggccgtcgcggccgccgcgtgccttgcggtcttcgcagcggtggcgctgctccaccgcaagcgccgctggaaccgggcgccctcctcgtctcgtcgcctcggggtcgggggacgcccacgccgcgcttgcgaggaggaggagaagccgcaggaccggttcaagcgcgtcctcgcggacaactcctactccccgttcaaacacccgcgccgcaagagtgctcagttgggaagtgcagaaggcgaggcacccctgccaccgcctcaagaattgtcacaaaaaggtcatccatttgaggaggaaatcacatctttgctaaagaacccccctggttttcatagctttatgctgtgtgaccagtgcccagaaatgagtgctacatataattgggttcatacagaaactcaactggaacatttggcgagattattgggtgaggaaagagcttttgctgttgatacagagcaacatagcattcgatctttcctaggatatactgcactaatgcagatctctacccagaatgaagactatctgatagacacaatagcactgcacgatgtgatgggcattctacgaccagtgtttgccaattcttctatctgtaagatcttccatggagctgacaatgatattctttggcttcaaagggattttcatatttatgttgtgaatatgtttgatactgctaaggcatgtgaaattctattgaaaccacaaaaatcactggcatatttgcttgaagtatattgtgaagtgaccaccgacaagacaatgcagcgtgaagattggagactgcgtcctctgactccagaaatgatcgagtatgcacgcactgatgctcactatctgttatacattgcaaattgtttggcatcagagctccatgcaaaagcctgtgtcatcgctcaaatatggtgtgcatgcaactgtattcaaaagaaattgaatcccctcctggagcttccagtgcaacatctattctctcacgaaatttgcaaactcatgggttcgactccaaaaagtctagtgaagtgaaggatcttgtttggaaattttgtgcatggagggacttaatggtcagtaaaaaactgttttccttagaatagctgcatccccttctgcaaagtagatctttttaattgcttatttgttgttacctccaatcagcaaagcttgatgttcatacaagtgaaagcagcagcaaactagttgtgtgccttatcaccttttgaatcctgggtgaccaccaaatgtcactcaggcaagttgcataacgttgggcacattgaagtaaatgcatttccaggatatcatgcatatttgcagttatgtagttgtggtgggtctattcttcgtttctgatatctcataataacttggattttggatcattccaggctcggatgcatgatgaaagcttacgatatgttctgccagaccaagctatagctgcccttgccgttagtcttccaaagggcccaacagaggtgtttgctgtcatagcagaaactgacctaagcatttcaagtatgtacccttccttgtcatcaccgtcacctcttgttgtggctcatgtcaaagaactctgttatctgctggatgacatcactaccagcatggacagcatctttaaaagtttactagagaagtataaagatccaagtggattatgtcgactatcagtttataattataaccttataacacacctaagtttgaagcaaacaagtatgttttccgttgctccaagtggaaagaagttgacagcactgcctaataaaaaggtttcacgggatttattcattaaaaagttttcctgcaagtccccggtatatcacaattgcaggatttatgctagtgatggaagactactttgctactgtgaccgcaaaaaactggaatggtacattcagcgtaatttggcgaaattgattgaaaatagtcctccagcaatcatgcttctctttgaacctaaaggtcgtccagaggatgaagataacgagttctatattcagagcaagaaaaatatttgtgtgggctgtggagaaaagagccattatattagatacagaataataccgtcatgctacaggatgcattttccagaacatttaaagagccatcgttcacatgatattgtacttctttgtgtagactgtcatgaaatagctcattcagcagctgagaaatacaagaggcgaatagcagaagaatttggaatacccctttttgtgcaaaagataatgaactcgggtgatataagtttgattaccaacacatcagtatctgaagataaattgaatggaacaggtgtctccccattgcagctgaggactgctgccatggctcttctacgtcatggatccactatgccattgaagagatgtgaagagctaatgcagattgtgaagtcatactatggtggtagagatgtgactcctgaagatctcgagatggcattacttgttggtatgagccctcatgagcgaaggcgtcttgaaaagaaaaagggatattcgtttagagctcaggctcaaactattattagaaagagcagcagcaataccatctcagaagacagtggacatggatcagaaaattgtcatgccttatctgcgcgatttcctgaggttggaactggtagtaatggtcagcaagagtttgatgagacagggaatcaaaaccagctagagaatttaaccctgagccagggaagctcaagtttgccagtcagcatggaggacaccacttctgatcatgacactgtgacactcgagaccgataccgagcagcaagcaagaggtgcctgtactcctggaaacagtcatgacgacaaggaacaatccatatgtgacaattctagtcaggtcatttccaagaatgctgagaagatatccctgttgggtcatgggcatcatggtaaacaagttgtggaacttttgttttctaatggtggagaggaatttgttaaccagttttgccaaaggtggaggcagatctttgttgaagctgttcacccccgttatttaccttctggctggaatattaaccacagtggacggcgggattttggtgacttcagtgtctacaagccaccaaggaaagatcctcaatctgcaactgcaagggattaggcttacgcgggtgtcatgctgtcgttggtaccctgaggttcaacttactttccagaattggttccattcccttaaacttgatcttgttgtacttgttccattcccttaaacctgatattgttgtacttgtatgtatctcaatctgtgtgtttgttcgagtaccttgaaataccaatttcatctcctatgtatttctttgagatgaactttgcatcagttttgttgagccgtttttttatacgtgaggatttagagtactaacaatttaagtccaagaaaaatcaacagtgaagttcaactcagcagattaaatcttcaaagtgccgtttttaactgggag

SEQ ID NO: 69938 - DNA, 3345 bp, Zea Mays
cgtcgcgatcgcgacatgcccggcgccgccaccctcagatcgcgcgtggccgtcgcggccgccgcgtgccttgcggtcttcgcagcggtggcgctgctccaccgcaagcgccgctggaaccgggcgccctcctcgtctcgtcgcctcggggtcgggggacgcccacgccgcgcttgcgaggaggaggagaagccgcaggaccggttcaagcgcgtcctcgcggacaactcctactccccgttcaaacacccgcgccgcaagagtgctcagttgggaagtgcagaaggcgaggcacccctgccaccgcctcaaggaatttcacgggatccctggtacattttctgtctgaggaattttatcgaacacctgagggcaaaggtgcgccgagtttgactaggaaatcagattcatattctgaattgtcacaaaaaggtcatccatttgaggaggaaatcacatctttgctaaagaacccccctggttttcatagctttatgctgtgtgaccagtgcccagaaatgagtgctacatataattgggttcatacagaaactcaactggaacatttggcgagattattgggtgaggaaagagcttttgctgttgatacagagcaacatagcattcgatctttcctaggatatactgcactaatgcagatctctacccagaatgaagactatctgatagacacaatagcactgcacgatgtgatgggcattctacgaccagtgtttgccaattcttctatctgtaagatcttccatggagctgacaatgatattctttggcttcaaagggattttcatatttatgttgtgaatatgtttgatactgctaaggcatgtgaaattctattgaaaccacaaaaatcactggcatatttgcttgaagtatattgtgaagtgaccaccgacaagacaatgcagcgtgaagattggagactgcgtcctctgactccagaaatgatcgagtatgcacgcactgatgctcactatctgttatacattgcaaattgtttggcatcagagctccatgcaaaagcctgtgatacttccagtgataaaatcaattttttcttcgaggctagtcatcgctcaaatatggtgtgcatgcaactgtattcaaaagaaattgaatcccctcctggagcttccagtgcaacatctattctctcacgaaatttgcaaactcatgggttcgactccaaaaagtctagtgaagtgaaggatcttgtttggaaattttgtgcatggagggacttaatggctcggatgcatgatgaaagcttacgatatgttctgccagaccaagctatagctgcccttgccgttagtcttccaaagggcccaacagaggtgtttgctgtcatagcagaaactgacctaagcatttcaagtatgtacccttccttgtcatcaccgtcacctcttgttgtggctcatgtcaaagaactctgttatctgctggatgacatcactaccagcatggacagcatctttaaaagtttactagagaagtataaagatccaagtggattatgtcgactatcagtttataattataaccttataacacacctaagtttgaagcaaacaagtatgttttccgttgctccaagtggaaagaagttgacagcactgcctaataaaaaggtttcacgggatttattcattaaaaagttttcctgcaagtccccggtatatcacaattgcaggatttatgctagtgatggaagactactttgctactgtgaccgcaaaaaactggaatggtacattcagcgtaatttggcgaaattgattgaaaatagtcctccagcaatcatgcttctctttgaacctaaaggtcgtccagaggatgaagataacgagttctatattcagagcaagaaaaatatttgtgtgggctgtggagaaaagagccattatattagatacagaataataccgtcatgctacaggatgcattttccagaacatttaaagagccatcgttcacatgatattgtacttctttgtgtagactgtcatgaaatagctcattcagcagctgagaaatacaagaggcgaatagcagaagaatttggaatacccctttttgtgcaaaagataatgaactcgggtgatataagtttgattaccaacacatcagtatctgaagataaattgaatggaacaggtgtctccccattgcagctgaggactgctgccatggctcttctacgtcatggatccactatgccattgaagagatgtgaagagctaatgcagattgtgaagtcatactatggtggtagagatgtgactcctgaagatctcgagatggcattacttgttggtatgagccctcatgagcgaaggcgtcttgaaaagaaaaagggatattcgtttagagctcaggctcaaactattattagaaagagcagcagcaataccatctcagaagacagtggacatggatcagaaaattgtcatgccttatctgcgcgatttcctgaggttggaactggtagtaatggtcagcaagagtttgatgagacagggaatcaaaaccagctagagaatttaaccctgagccagggaagctcaagtttgccagtcagcatggaggacaccacttctgatcatgacactgtgacactcgagaccgataccgagcagcaagcaagaggtgcctgtactcctggaaacagtcatgacgacaaggaacaatccatatgtgacaattctagtcaggtcatttccaagaatgctgagaagatatccctgttgggtcatgggcatcatggtaaacaagttgtggaacttttgttttctaatggtggagaggaatttgttaaccagttttgccaaaggtggaggcagatctttgttgaagctgttcacccccgttatttaccttctggctggaatattaaccacagtggacggcgggattttggtgacttcagtgtctacaagccaccaaggaaagatcctcaatctgcaactgcaagggattaggcttacgcgggtgtcatgctgtcgttggtaccctgaggttcaacttactttccagaattggttccattcccttaaacttgatcttgttgtacttgttccattcccttaaacctgatattgttgtacttgtatgtatctcaatctgtgtgtttgttcgagtaccttgaaataccaatttcatctcctatgtatttctttgagatgaactttgcatcagttttgttgagccgtttttttatacgtgaggatttagagtactaacaatttaagtccaagaaaaatcaacagtgaagttcaactcagcagattaaatcttcaaagtgccgtttttaactgggag

SEQ ID NO: 69939 - DNA, 5752 bp, Zea Mays
ttaggcgagggtttctccattatagaaaagctgggcatagccaacactctaaaatgaacatgacgactccattacacggttcgaaccacgattactgtcgttgataccggcgccgtcccaagcgccgtgagttctccatcgccatcgagttttcccttctctcctcctcgcagatatctcccttctctctcgctctctcgcaccagagccgcaccctcgcaccagagagcaggtagaccatgtccttgtacttccccgtcgcatgacgtggtcgtcgagcagcgacgcggcggaggcggagggcggggaggagaaatttgccattacgcatggcgccgtcgttgtaggtgcggagcagccccgacagggaggagaaatttgccattacggcgtgggcgggctcgcctaaccacgacatcgccttcgactcctcctgggggctcctcgacgacctagatatactcgtcaagcgcctccgctcaaagcaggtgcggaagggctccatcgacgggagcggcggcgccggcaacagcaacttcgactccttctccgaggccgggtggtccagggagatctccggcgcggcggattcggcatccaccagcgccccgtgggacgagacgagccgtgactacctcaccttcgtcaaggagtaccgagaagccgccatattgtgcccatctcatgccagggcactcaagctcctggggagcgctctctttggcgttggggagtaccgagctgctgagaaggcactggaggaggccatcttcctgaaggaagactatgctgatgcgcactgtgaccttgggtcggccctgcatgcagtaggggaggatgatcgtgctatccaggagtttcagacagcaattgatctcaaacctggccatgttgatgccttatacaatcttggtggattgaacatggatgctggccgcttcgtacgggctgcagagatgtatactcgtgtgctgagcatccgaccaaaccattggcgtgcacagctaaacaaggcggtggctttgcttgggcagggtgaatctgaggaggctaagaaggcactcaaggaggcgtttaagatgacacagagggtgaaagtgtatgatgctatctcacatttgaagacattgcaaaagaaaaagccaaagccttccaaaggaaaaaatgatggtcaaggggagcagacttatgttaatgtggaggcatccaagttcaagagggttggcaggaagactaccttgcggcaggatttggccaatgctctagatataagggccttcgagaggatgacgaagctaggccactgcgatgtggagcttcttagaaaagagatgaatgagactgatgtccccgtatcttactcagacactggcatccctgagaagtcaatacgcaaagcagctcttgaggttattctccgcaggctcctctcttttctcaagccaaacacctttcaggtgccatcaaggcaatcaacgaaagaattctctctgtccttgatgctcctggttctggtcgtgttgatctgggtatgttcttcgccatcattgctccaatctgttcaggccctgtggataggcgcaagcgtatcgtctttgatgcacttctttggcgtcatacacggaattattagagatgttcaatgacccggattggggatttgggatcctgagcactctggtgaagctcgaagagggtgaccacatacgccatggtagccacacatcccagtcccccgagctcgtagtagtcgctgccaccgtgacgggctccgctgcgggcgccgaggacgcatggcgatgacggtcgtccttggcagacgcggaagcggaagtcgcggaggaagaggagtccccgtcgccgccgccgaggagaccacagaggatggcgaagagcacgaggcagaggagaccacaacggaaatatgacggcgtgagtttgagatcgtcgttaacggaaatatgacggcgtgagtttgagatcgtcgttacttgttaatagagttgtcatgttcattttagagtgttggctatacccagcttttctataacggagaaaccctccgagcctctatttcgtcgtcgtgtttcataatgtcaagtctctctagcacgcctgtacctaaacctcgcaaaagcctaacccaaaccctagcacctctcgaaatctccccgcgaaagacagccttctggtcacatggatttcggtcgccggaaggcggcggcgctggctgcgctctcctcgccgacgccggacaggtccccgaagggcggtgtcgacgccccgatcgctccgctcctcgatgccctcaactcccacccggacctcttcactacctcctcctgctccggccgcgtctccgtcctcgcgcagcctccgccgccgcatgagggctggggcgagggcgcccccaagccgaagaagaaggcgcggggcggcgggtgggtatacgtatcgcacgaccctgccgatccggacgctgtggtggagcagctgttcggcgggagcgggtcgggagtggcgggggacgagctggtgttcaggttcgagccgatgatcgtggcggtggagtgcagagacgttgccgcagctgcggcgctcgtcgcagccgcgatcggtgcggggttccgggaatcaggtatcacaagcttgcagaaacgtgcaatggtagcaataagatgctcaattcgcatggaagtgccactggggcagattgacgaacttgttgtttctccggagtatgtccgctaccttgttagaattgccaacagtaaaatggaggcaaataaaaggcgaatgaatggatttttggatctcttgcaaactaagggtttgtcatacccatcagggttatcaaacaactctaatagtggtggtcagtctgatgattacgaggcttctgtgggtcctgaagttaagataccatcagatacaagtgccaaaacaaatgatgagtacttagttacaaaaatgagaaatggtggacgtagtcgtgatgatgatgatacaggttcaatagaagcacagtattttggaaaacaagactctgcatggagccagggtgtcaatcatggttctgattattaacgctggagaagctgcgagaaaataaaaatcatctctctaccacaacattgaagattagcggtgaaccaattgagaagctcttcttatggggccaagcctcttgtgtgtttactattggagaagagcagcaggtcctaacttttggtggttttgggggaccagggcgacatgcaaggagaaactattcccttctactcgatcacaaatctggtctgttgacagaaatgatctttaaagcatctccttcaccacggatggggcatacagttactgcagttgataataccacttatataattggaggtagaggtggcccttcagaaattcttgatgatgtctggattttgccaagtgttgggaatacatggtcaaaactggagtgttgtggagatctgttccgaccaaggcaccgacatgcagctgctgcagtagcttcaaaaatttatgtatttggcggactcagtaatgaaggcatatattcttgtatgaatgtattagacacaaaaaatatgcaatggagtgtacttgctgcttcaggcgaatggccatgtgctcgacattcacattctatggtctcatatggtacaaatctattcatgttcggaggtcatgatggccaacgggcactgaaggacttctacagttttgatacaacaaaacttaggtggaacaaggaaaacacaaatgggggaactccgtcacctagattttcacactgcatgttcatctacaaaaattatcttgggatacttggtggctgccctattacagaaaacaatcaagaagttacattgctgaacataaatcatcgagtctggttttgtgtttcggttccattgctgagccagtccctctgtgtccgtagttcatcggttgtcattaaagatgatcttgttattttaggtggtggtgcatcttgttatgcattcggaaccaaattcagtcaaccaatagttcttgatctgcattcagtggagtctatgtttaaatatgataggaacaaagatggcacagttcaaaggcgtgatgcaatatctgttgttgaattgtcaagagatgaacaaaatggcatccttgatcatgacacaaaattacaagatgcttgttcgggtagtttgacggactctagccctctggttcttcaactggggaagacatatgccaaattagcaaaggacattatgaaaaagtttggatggttggatctttctagaaaagttcgaataagtcatgataatggccatgttctttttcctattaacgaatctttctgtgccctaaatgctgaagagcatatcaataggaatcttgatgattcatgtacctttggggaatcattagtattttctgaaaagaagcttgtaggggacaacctatctcttcaggatgcattaatttttttttcatcttgcaatggttccgttatgaaagatgaactagccatcagccgaaagccttccaagtctcctcaaactatcatgaaagaacttgtatcttctctactggaaagtaaagggatgccctctcagttgttgcagcagcttccggctaggtgggagacacttggtgatatcgtcatacttccaaagacatgttttaagaatccattgtgggaatctgttagcgaggaactttggccactagttgccaagtcacttggtgcacaacgtcttgcacgccaaggtaaaatcatgccaaatggcacaagagatagtacactggaacttcttctgggtgataacggatgggttacccattatgaaaatggcatctgctattcacttgatgcaacaaaatgcatgttttcttctggtaatcgttcagagaaacttcgcatgggacagctaaactgcagagatgaggtggtcgtggatttgtttgctggaattggatattttgttcttccatttcttgtgaaggctaatgccaagctagtttatgcatgtgagtggaatccacatgctctggaggctcttcggcgcaatgttagtgacaacagagtggaggatcgatgtattatacttgaaggagataaccgggtgactgcacccaaaagtgttgctgatcgagtctgtcttggattgttaccctcaagtgaatgtagctgggccactgctgtcgaagctttaagggttggcgggggcgtgttgcatattcatgggaatgttaacgactctgatgagacacgctggttggacagtgttgttgaatccatcagtaatgtcgccaaaaatcatggactatcttggaacgtgtcagtggagcatgttgaacgtgtcaaatggtacgggccgcgtattcgccaccttgtagttgatgttacatgcaggcaaatctagcaaagcagatgcgttcacagaatctttgtgcactgtcaggccttggattcttggatagttggatgcatatatcattgcagattgtaatgctcaacagcttgcatcgtttgtgttttagtcttaagtgggttacagtactcttagtcatcatggagccctctgttgtgaccttgaaagcatgttcaggttcttgacgacagtttcgcaactgtattgctactgtaaagttgtgttcttggaccgagtgtatttatcttatgtatcttttgttttcttatataagatgctttattacgttgtttgaacatcttagtaccaccttttgc

SEQ ID NO: 69940 - DNA, 5898 bp, Zea Mays
ttaggcgagggtttctccattatagaaaagctgggcatagccaacactctaaaatgaacatgacgactccattacacggttcgaaccacgattactgtcgttgataccggcgccgtcccaagcgccgtgagttctccatcgccatcgagttttcccttctctcctcctcgcagatatctcccttctctctcgctctctcgcaccagagccgcaccctcgcaccagagagcaggtagaccatgtccttgtacttccccgtcgcatgacgtggtcgtcgagcagcgacgcggcggaggcggagggcggggaggagaaatttgccattacgcatggcgccgtcgttgtaggtgcggagcagccccgacagggaggagaaatttgccattacggcgtgggcgggctcgcctaaccacgacatcgccttcgactcctcctgggggctcctcgacgacctagatatactcgtcaagcgcctccgctcaaagcaggtgcggaagggctccatcgacgggagcggcggcgccggcaacagcaacttcgactccttctccgaggccgggtggtccagggagatctccggcgcggcggattcggcatccaccagcgccccgtgggacgagacgagccgtgactacctcaccttcgtcaaggagtaccgagaagccgccatattgtgcccatctcatgccagggcactcaagctcctggggagcgctctctttggcgttggggagtaccgagctgctgagaaggcactggaggaggccatcttcctgaaggaagactatgctgatgcgcactgtgaccttgggtcggccctgcatgcagtaggggaggatgatcgtgctatccaggagtttcagacagcaattgatctcaaacctggccatgttgatgccttatacaatcttggtggattgaacatggatgctggccgcttcgtacgggctgcagagatgtatactcgtgtgctgagcatccgaccaaaccattggcgtgcacagctaaacaaggcggtggctttgcttgggcagggtgaatctgaggaggctaagaaggcactcaaggaggcgtttaagatgacacagagggtgaaagtgtatgatgctatctcacatttgaagacattgcaaaagaaaaagccaaagccttccaaaggaaaaaatgatggtcaaggggagcagacttatgttaatgtggaggcatccaagttcaagagggttggcaggaagactaccttgcggcaggatttggccaatgctctagatataagggccttcgagaggatgacgaagctaggccactgcgatgtggagcttcttagaaaagagatgaatgagactgatgtccccgtatcttactcagacactggcatccctgagaagtcaatacgcaaagcagctcttgaggttattctccgcaggctcctctcttttctcaagccaaacacctttcaggtgccatcaaggcaatcaacgaaagaattctctctgtccttgatgctcctggttctggtcgtgttgatctgggtatgttcttcgccatcattgctccaatctgttcaggccctgtggataggcgcaagcgtatcgtctttgatgcacttctttggcgtcatacacggaattattagagatgttcaatgacccggattggggatttgggatcctgagcactctggtgaagctcgaagagggtgaccacatacgccatggtagccacacatcccagtcccccgagctcgtagtagtcgctgccaccgtgacgggctccgctgcgggcgccgaggacgcatggcgatgacggtcgtccttggcagacgcggaagcggaagtcgcggaggaagaggagtccccgtcgccgccgccgaggagaccacagaggatggcgaagagcacgaggcagaggagaccacaacggaaatatgacggcgtgagtttgagatcgtcgttaacggaaatatgacggcgtgagtttgagatcgtcgttacttgttaatagagttgtcatgttcattttagagtgttggctatacccagcttttctataacggagaaaccctccgagcctctatttcgtcgtcgtgtttcataatgtcaagtctctctagcacgcctgtacctaaacctcgcaaaagcctaacccaaaccctagcacctctcgaaatctccccgcgaaagacagccttctggtcacatggatttcggtcgccggaaggcggcggcgctggctgcgctctcctcgccgacgccggacaggtccccgaagggcggtgtcgacgccccgatcgctccgctcctcgatgccctcaactcccacccggacctcttcactacctcctcctgctccggccgcgtctccgtcctcgcgcagcctccgccgccgcatgagggctggggcgagggcgcccccaagccgaagaagaaggcgcggggcggcgggtgggtatacgtatcgcacgaccctgccgatccggacgctgtggtggagcagctgttcggcgggagcgggtcgggagtggcgggggacgagctggtgttcaggttcgagccgatgatcgtggcggtggagtgcagagacgttgccgcagctgcggcgctcgtcgcagccgcgatcggtgcggggttccgggaatcaggtatcacaagcttgcagaaacgtgcaatggtagcaataagatgctcaattcgcatggaagtgccactggggcagattgacgaacttgttgtttctccggagtatgtccgctaccttgttagaattgccaacagtaaaatggaggcaaataaaaggcgaatgaatggatttttggatctcttgcaaactaagggtttgtcatacccatcagggttatcaaacaactctaatagtggtggtcagtctgatgattacgaggcttctgtgggtcctgaagttaagataccatcagatacaagtgccaaaacaaatgatgagtacttagttacaaaaatgagaaatggtggacgtagtcgtgatgatgatgatacaggttcaatagaagcacagtattttggaaaacaagactctgcatggagccagggtgtcaatcatggttctgatgggatgaagggcaagcctagtgcagtggtgagagctgtctcactgaggcactaggtgacaggttcaaagcagcctctccgcatttgtggggggaaggcttgcctcggtttcaacattggttctcccctcttttatagcagatagattattaacgctggagaagctgcgagaaaataaaaatcatctctctaccacaacattgaagattagcggtgaaccaattgagaagctcttcttatggggccaagcctcttgtgtgtttactattggagaagagcagcaggtcctaacttttggtggttttgggggaccagggcgacatgcaaggagaaactattcccttctactcgatcacaaatctggtctgttgacagaaatgatctttaaagcatctccttcaccacggatggggcatacagttactgcagttgataataccacttatataattggaggtagaggtggcccttcagaaattcttgatgatgtctggattttgccaagtgttgggaatacatggtcaaaactggagtgttgtggagatctgttccgaccaaggcaccgacatgcagctgctgcagtagcttcaaaaatttatgtatttggcggactcagtaatgaaggcatatattcttgtatgaatgtattagacacaaaaaatatgcaatggagtgtacttgctgcttcaggcgaatggccatgtgctcgacattcacattctatggtctcatatggtacaaatctattcatgttcggaggtcatgatggccaacgggcactgaaggacttctacagttttgatacaacaaaacttaggtggaacaaggaaaacacaaatgggggaactccgtcacctagattttcacactgcatgttcatctacaaaaattatcttgggatacttggtggctgccctattacagaaaacaatcaagaagttacattgctgaacataaatcatcgagtctggttttgtgtttcggttccattgctgagccagtccctctgtgtccgtagttcatcggttgtcattaaagatgatcttgttattttaggtggtggtgcatcttgttatgcattcggaaccaaattcagtcaaccaatagttcttgatctgcattcagtggagtctatgtttaaatatgataggaacaaagatggcacagttcaaaggcgtgatgcaatatctgttgttgaattgtcaagagatgaacaaaatggcatccttgatcatgacacaaaattacaagatgcttgttcgggtagtttgacggactctagccctctggttcttcaactggggaagacatatgccaaattagcaaaggacattatgaaaaagtttggatggttggatctttctagaaaagttcgaataagtcatgataatggccatgttctttttcctattaacgaatctttctgtgccctaaatgctgaagagcatatcaataggaatcttgatgattcatgtacctttggggaatcattagtattttctgaaaagaagcttgtaggggacaacctatctcttcaggatgcattaatttttttttcatcttgcaatggttccgttatgaaagatgaactagccatcagccgaaagccttccaagtctcctcaaactatcatgaaagaacttgtatcttctctactggaaagtaaagggatgccctctcagttgttgcagcagcttccggctaggtgggagacacttggtgatatcgtcatacttccaaagacatgttttaagaatccattgtgggaatctgttagcgaggaactttggccactagttgccaagtcacttggtgcacaacgtcttgcacgccaaggtaaaatcatgccaaatggcacaagagatagtacactggaacttcttctgggtgataacggatgggttacccattatgaaaatggcatctgctattcacttgatgcaacaaaatgcatgttttcttctggtaatcgttcagagaaacttcgcatgggacagctaaactgcagagatgaggtggtcgtggatttgtttgctggaattggatattttgttcttccatttcttgtgaaggctaatgccaagctagtttatgcatgtgagtggaatccacatgctctggaggctcttcggcgcaatgttagtgacaacagagtggaggatcgatgtattatacttgaaggagataaccgggtgactgcacccaaaagtgttgctgatcgagtctgtcttggattgttaccctcaagtgaatgtagctgggccactgctgtcgaagctttaagggttggcgggggcgtgttgcatattcatgggaatgttaacgactctgatgagacacgctggttggacagtgttgttgaatccatcagtaatgtcgccaaaaatcatggactatcttggaacgtgtcagtggagcatgttgaacgtgtcaaatggtacgggccgcgtattcgccaccttgtagttgatgttacatgcaggcaaatctagcaaagcagatgcgttcacagaatctttgtgcactgtcaggccttggattcttggatagttggatgcatatatcattgcagattgtaatgctcaacagcttgcatcgtttgtgttttagtcttaagtgggttacagtactcttagtcatcatggagccctctgttgtgaccttgaaagcatgttcaggttcttgacgacagtttcgcaactgtattgctactgtaaagttgtgttcttggaccgagtgtatttatcttatgtatcttttgttttcttatataagatgctttattacgttgtttgaacatcttagtaccaccttttgc

SEQ ID NO: 69941 - DNA, 6099 bp, Zea Mays
ttaggcgagggtttctccattatagaaaagctgggcatagccaacactctaaaatgaacatgacgactccattacacggttcgaaccacgattactgtcgttgataccggcgccgtcccaagcgccgtgagttctccatcgccatcgagttttcccttctctcctcctcgcagatatctcccttctctctcgctctctcgcaccagagccgcaccctcgcaccagagagcaggtagaccatgtccttgtacttccccgtcgcatgacgtggtcgtcgagcagcgacgcggcggaggcggagggcggggaggagaaatttgccattacgcatggcgccgtcgttgtaggtgcggagcagccccgacagggaggagaaatttgccattacggcgtgggcgggctcgcctaaccacgacatcgccttcgactcctcctgggggctcctcgacgacctagatatactcgtcaagcgcctccgctcaaagcaggtgcggaagggctccatcgacgggagcggcggcgccggcaacagcaacttcgactccttctccgaggccgggtggtccagggagatctccggcgcggcggattcggcatccaccagcgccccgtgggacgagacgagccgtgactacctcaccttcgtcaaggagtaccgagaagccgccatattgtgcccatctcatgccagggcactcaagctcctggggagcgctctctttggcgttggggagtaccgagctgctgagaaggcactggaggaggccatcttcctgaaggaagactatgctgatgcgcactgtgaccttgggtcggccctgcatgcagtaggggaggatgatcgtgctatccaggagtttcagacagcaattgatctcaaacctggccatgttgatgccttatacaatcttggtggattgaacatggatgctggccgcttcgtacgggctgcagagatgtatactcgtgtgctgagcatccgaccaaaccattggcgtgcacagctaaacaaggcggtggctttgcttgggcagggtgaatctgaggaggctaagaaggcactcaaggaggcgtttaagatgacacagagggtgaaagtgtatgatgctatctcacatttgaagacattgcaaaagaaaaagccaaagccttccaaaggaaaaaatgatggtcaaggggagcagacttatgttaatgtggaggcatccaagttcaagagggttggcaggaagactaccttgcggcaggatttggccaatgctctagatataagggccttcgagaggatgacgaagctaggccactgcgatgtggagcttcttagaaaagagatgaatgagactgatgtccccgtatcttactcagacactggcatccctgagaagtcaatacgcaaagcagctcttgaggttattctccgcaggctcctctcttttctcaagccaaacacctttcaggtgccatcaaggcaatcaacgaaagaattctctctgtccttgatgctcctggttctggtcgtgttgatctgggtatgttcttcgccatcattgctccaatctgttcaggccctgtggataggcgcaagcgtatcgtctttgatgcacttctttggcgtcatacacggaattattagagatgttcaatgacccggattggggatttgggatcctgagcactctggtgaagctcgaagagggtgaccacatacgccatggtagccacacatcccagtcccccgagctcgtagtagtcgctgccaccgtgacgggctccgctgcgggcgccgaggacgcatggcgatgacggtcgtccttggcagacgcggaagcggaagtcgcggaggaagaggagtccccgtcgccgccgccgaggagaccacagaggatggcgaagagcacgaggcagaggagaccacaacggaaatatgacggcgtgagtttgagatcgtcgttaacggaaatatgacggcgtgagtttgagatcgtcgttacttgttaatagagttgtcatgttcattttagagtgttggctatacccagcttttctataacggagaaaccctccgagcctctatttcgtcgtcgtgtttcataatgtcaagtctctctagcacgcctgtacctaaacctcgcaaaagcctaacccaaaccctagcacctctcgaaatctccccgcgaaagacagccttctggtcacatggatttcggtcgccggaaggcggcggcgctggctgcgctctcctcgccgacgccggacaggtccccgaagggcggtgtcgacgccccgatcgctccgctcctcgatgccctcaactcccacccggacctcttcactacctcctcctgctccggccgcgtctccgtcctcgcgcagcctccgccgccgcatgagggctggggcgagggcgcccccaagccgaagaagaaggcgcggggcggcgggtgggtatacgtatcgcacgaccctgccgatccggacgctgtggtggagcagctgttcggcgggagcgggtcgggagtggcgggggacgagctggtgttcaggttcgagccgatgatcgtggcggtggagtgcagagacgttgccgcagctgcggcgctcgtcgcagccgcgatcggtgcggggttccgggaatcaggtatcacaagcttgcagaaacgtgcaatggtagcaataagatgctcaattcgcatggaagtgccactggggcagattgacgaacttgttgtttctccggagtatgtccgctaccttgttagaattgccaacagtaaaatggaggcaaataaaaggcgaatgaatggatttttggatctcttgcaaactaagggtttgtcatacccatcagggttatcaaacaactctaatagtggtggtcagtctgatgattacgaggcttctgtgggtcctgaagttaagataccatcagatacaagtgccaaaacaaatgatgagtacttagttacaaaaatgagaaatggtggacgtagtcgtgatgatgatgatacaggttcaatagaagcacagtattttggaaaacaagactctgcatggagccagggtgtcaatcatggttctgatgggatgaagggcaagcctagtgcagtggtgagagctgtctcactgaggcactaggtgacaggttcaaagcagcctctccgcatttgtggggggaaggcttgcctcggtttcaacattggttctcccctcttttatagcagataggtgattgttttgtgttactaaaccatgattttctcttcgctatttaatgaattgatggtcctgcagctatttaggtgtctacattgttattccatatttttgataattgtacttctagtcttcttactgacaaagtgacaatccagtagctcagagcctttgattcaacccttttcatcttttctgttctatggtatgcagattattaacgctggagaagctgcgagaaaataaaaatcatctctctaccacaacattgaagattagcggtgaaccaattgagaagctcttcttatggggccaagcctcttgtgtgtttactattggagaagagcagcaggtcctaacttttggtggttttgggggaccagggcgacatgcaaggagaaactattcccttctactcgatcacaaatctggtctgttgacagaaatgatctttaaagcatctccttcaccacggatggggcatacagttactgcagttgataataccacttatataattggaggtagaggtggcccttcagaaattcttgatgatgtctggattttgccaagtgttgggaatacatggtcaaaactggagtgttgtggagatctgttccgaccaaggcaccgacatgcagctgctgcagtagcttcaaaaatttatgtatttggcggactcagtaatgaaggcatatattcttgtatgaatgtattagacacaaaaaatatgcaatggagtgtacttgctgcttcaggcgaatggccatgtgctcgacattcacattctatggtctcatatggtacaaatctattcatgttcggaggtcatgatggccaacgggcactgaaggacttctacagttttgatacaacaaaacttaggtggaacaaggaaaacacaaatgggggaactccgtcacctagattttcacactgcatgttcatctacaaaaattatcttgggatacttggtggctgccctattacagaaaacaatcaagaagttacattgctgaacataaatcatcgagtctggttttgtgtttcggttccattgctgagccagtccctctgtgtccgtagttcatcggttgtcattaaagatgatcttgttattttaggtggtggtgcatcttgttatgcattcggaaccaaattcagtcaaccaatagttcttgatctgcattcagtggagtctatgtttaaatatgataggaacaaagatggcacagttcaaaggcgtgatgcaatatctgttgttgaattgtcaagagatgaacaaaatggcatccttgatcatgacacaaaattacaagatgcttgttcgggtagtttgacggactctagccctctggttcttcaactggggaagacatatgccaaattagcaaaggacattatgaaaaagtttggatggttggatctttctagaaaagttcgaataagtcatgataatggccatgttctttttcctattaacgaatctttctgtgccctaaatgctgaagagcatatcaataggaatcttgatgattcatgtacctttggggaatcattagtattttctgaaaagaagcttgtaggggacaacctatctcttcaggatgcattaatttttttttcatcttgcaatggttccgttatgaaagatgaactagccatcagccgaaagccttccaagtctcctcaaactatcatgaaagaacttgtatcttctctactggaaagtaaagggatgccctctcagttgttgcagcagcttccggctaggtgggagacacttggtgatatcgtcatacttccaaagacatgttttaagaatccattgtgggaatctgttagcgaggaactttggccactagttgccaagtcacttggtgcacaacgtcttgcacgccaaggtaaaatcatgccaaatggcacaagagatagtacactggaacttcttctgggtgataacggatgggttacccattatgaaaatggcatctgctattcacttgatgcaacaaaatgcatgttttcttctggtaatcgttcagagaaacttcgcatgggacagctaaactgcagagatgaggtggtcgtggatttgtttgctggaattggatattttgttcttccatttcttgtgaaggctaatgccaagctagtttatgcatgtgagtggaatccacatgctctggaggctcttcggcgcaatgttagtgacaacagagtggaggatcgatgtattatacttgaaggagataaccgggtgactgcacccaaaagtgttgctgatcgagtctgtcttggattgttaccctcaagtgaatgtagctgggccactgctgtcgaagctttaagggttggcgggggcgtgttgcatattcatgggaatgttaacgactctgatgagacacgctggttggacagtgttgttgaatccatcagtaatgtcgccaaaaatcatggactatcttggaacgtgtcagtggagcatgttgaacgtgtcaaatggtacgggccgcgtattcgccaccttgtagttgatgttacatgcaggcaaatctagcaaagcagatgcgttcacagaatctttgtgcactgtcaggccttggattcttggatagttggatgcatatatcattgcagattgtaatgctcaacagcttgcatcgtttgtgttttagtcttaagtgggttacagtactcttagtcatcatggagccctctgttgtgaccttgaaagcatgttcaggttcttgacgacagtttcgcaactgtattgctactgtaaagttgtgttcttggaccgagtgtatttatcttatgtatcttttgttttcttatataagatgctttattacgttgtttgaacatcttagtaccaccttttgc

SEQ ID NO: 69942 - DNA, 5696 bp, Zea Mays
ttaggcgagggtttctccattatagaaaagctgggcatagccaacactctaaaatgaacatgacgactccattacacggttcgaaccacgattactgtcgttgataccggcgccgtcccaagcgccgtgagttctccatcgccatcgagttttcccttctctcctcctcgcagatatctcccttctctctcgctctctcgcaccagagccgcaccctcgcaccagagagcaggtagaccatgtccttgtacttccccgtcgcatgacgtggtcgtcgagcagcgacgcggcggaggcggagggcggggaggagaaatttgccattacgcatggcgccgtcgttgtaggtgcggagcagccccgacagggaggagaaatttgccattacggcgtgggcgggctcgcctaaccacgacatcgccttcgactcctcctgggggctcctcgacgacctagatatactcgtcaagcgcctccgctcaaagcaggtgcggaagggctccatcgacgggagcggcggcgccggcaacagcaacttcgactccttctccgaggccgggtggtccagggagatctccggcgcggcggattcggcatccaccagcgccccgtgggacgagacgagccgtgactacctcaccttcgtcaaggagtaccgagaagccgccatattgtgcccatctcatgccagggcactcaagctcctggggagcgctctctttggcgttggggagtaccgagctgctgagaaggcactggaggaggccatcttcctgaaggaagactatgctgatgcgcactgtgaccttgggtcggccctgcatgcagtaggggaggatgatcgtgctatccaggagtttcagacagcaattgatctcaaacctggccatgttgatgccttatacaatcttggtggattgaacatggatgctggccgcttcgtacgggctgcagagatgtatactcgtgtgctgagcatccgaccaaaccattggcgtgcacagctaaacaaggcggtggctttgcttgggcagggtgaatctgaggaggctaagaaggcactcaaggaggcgtttaagatgacacagagggtgaaagtgtatgatgctatctcacatttgaagacattgcaaaagaaaaagccaaagccttccaaaggaaaaaatgatggtcaaggggagcagacttatgttaatgtggaggcatccaagttcaagagggttggcaggaagactaccttgcggcaggatttggccaatgctctagatataagggccttcgagaggatgacgaagctaggccactgcgatgtggagcttcttagaaaagagatgaatgagactgatgtccccgtatcttactcagacactggcatccctgagaagtcaatacgcaaagcagctcttgaggttattctccgcaggctcctctcttttctcaagccaaacacctttcaggtgccatcaaggcaatcaacgaaagaattctctctgtccttgatgctcctggttctggtcgtgttgatctgggtatgttcttcgccatcattgctccaatctgttcaggccctgtggataggcgcaagcgtatcgtctttgatgcacttctttggcgtcatacacggaattattagagatgttcaatgacccggattggggatttgggatcctgagcactctggtgaagctcgaagagggtgaccacatacgccatggtagccacacatcccagtcccccgagctcgtagtagtcgctgccaccgtgacgggctccgctgcgggcgccgaggacgcatggcgatgacggtcgtccttggcagacgcggaagcggaagtcgcggaggaagaggagtccccgtcgccgccgccgaggagaccacagaggatggcgaagagcacgaggcagaggagaccacaacggaaatatgacggcgtgagtttgagatcgtcgttaacggaaatatgacggcgtgagtttgagatcgtcgttacttgttaatagagttgtcatgttcattttagagtgttggctatacccagcttttctataacggagaaaccctccgagcctctatttcgtcgtcgtgtttcataatgtcaagtctctctagcacgcctgtacctaaacctcgcaaaagcctaacccaaaccctagcacctctcgaaatctccccgcgaaagacagccttctggtcacatggatttcggtcgccggaaggcggcggcgctggctgcgctctcctcgccgacgccggacaggtccccgaagggcggtgtcgacgccccgatcgctccgctcctcgatgccctcaactcccacccggacctcttcactacctcctcctgctccggccgcgtctccgtcctcgcgcagcctccgccgccgcatgagggctggggcgagggcgcccccaagccgaagaagaaggcgcggggcggcgggtgggtatacgtatcgcacgaccctgccgatccggacgctgtggtggagcagctgttcggcgggagcgggtcgggagtggcgggggacgagctggtgttcaggttcgagccgatgatcgtggcggtggagtgcagagacgttgccgcagctgcggcgctcgtcgcagccgcgatcggtgcggggttccgggaatcaggtatcacaagcttgcagaaacgtgcaatggtagcaataagatgctcaattcgcatggaagtgccactggggcagattgacgaacttgttgtttctccggagtatgtccgctaccttgttagaattgccaacagtaaaatggaggcaaataaaaggcgaatgaatggatttttggatctcttgcaaactaagggtttgtcatacccatcagggttatcaaacaactctaatagtggtggtcagtctgatgattacgaggcttctgtgggtcctgaagttaagataccatcagatacaagtgccaaaacaaatgatgagtacttagttacaaaaatgagaaatggtggacgtagtcgtgatgatgatgatacaggttcaatagaagcacagtattttggaaaacaagactctgcatggagccagggtgtcaatcatggttctgattattaacgctggagaagctgcgagaaaataaaaatcatctctctaccacaacattgaagattagcggtgaaccaattgagaagctcttcttatggggccaagcctcttgtgtgtttactattggagaagagcagcaggtcctaacttttggtggttttgggggaccagggcgacatgcaaggagaaactattcccttctactcgatcacaaatctggtctgttgacagaaatgatctttaaagcatctccttcaccacggatggggcatacagttactgcagttgataataccacttatataattggaggtagaggtggcccttcagaaattcttgatgatgtctggattttgccaagtgttgggaatacatggtcaaaactggagtgttgtggagatctgttccgaccaaggcaccgacatgcagctgctgcagtagcttcaaaaatttatgtatttggcggactcagtaatgaaggcatatattcttgtatgaatgtattagacacaaaaaatatgcaatggagtgtacttgctgcttcaggcgaatggccatgtgctcgacattcacattctatggtctcatatggtacaaatctattcatgttcggaggtcatgatggccaacgggcactgaaggacttctacagttttgatacaacaaaacttaggtggaacaaggaaaacacaaatgggggaactccgtcacctagattttcacactgcatgttcatctacaaaaattatcttgggatacttggtggctgccctattacagaaaacaatcaagaagttacattgctgaacataaatcatcgagtctggttttgtgtttcggttccattgctgagccagtccctctgtgtccgtagttcatcggttgtcattaaagatgatcttgttattttaggtggtggtgcatcttgttatgcattcggaaccaaattcagtcaaccaatagttcttgatctgcattcagtggagtctatgtttaaatatgataggaacaaagatggcacagttcaaaggcgtgatgcaatatctgttgttgaattgtcaagagatgaacaaaatggcatccttgatcatgacacaaaattacaagatgcttgttcgggtagtttgacggactctagccctctggttcttcaactggggaagacatatgccaaattagcaaaggacattatgaaaaagtttggatggttggatctttctagaaaagttcgaataagtcatgataatggccatgttctttttcctattaacgaatctttctgtgccctaaatgctgaagagcatatcaataggaatcttgatgattcatgtacctttggggaatcattagtattttctgaaaagaagcttgtaggggacaacctatctcttcaggatgcattaatttttttttcatcttgcaatggttccgttatgaaagatgaactagccatcagccgaaagccttccaagtctcctcaaactatcatgaaagaacttgtatcttctctactggaaagtaaagggatgccctctcagttgttgcagcagcttccggctaggtgggagacacttggtgatatcgtcatacttccaaagacatgttttaagaatccattgtgggaatctgttagcgaggaactttggccactagttgccaagtcacttggtgcacaacgtcttgcacgccaaggtaaaatcatgccaaatggcacaagagatagtacactggaacttcttctgggtgataacggatgggttacccattatgaaaatggcatctgctattcacttgatgcaacaaaatgcatgttttcttctggtaatcgttcagagaaacttcgcatgggacagctaaactgcagagatgagggctaatgccaagctagtttatgcatgtgagtggaatccacatgctctggaggctcttcggcgcaatgttagtgacaacagagtggaggatcgatgtattatacttgaaggagataaccgggtgactgcacccaaaagtgttgctgatcgagtctgtcttggattgttaccctcaagtgaatgtagctgggccactgctgtcgaagctttaagggttggcgggggcgtgttgcatattcatgggaatgttaacgactctgatgagacacgctggttggacagtgttgttgaatccatcagtaatgtcgccaaaaatcatggactatcttggaacgtgtcagtggagcatgttgaacgtgtcaaatggtacgggccgcgtattcgccaccttgtagttgatgttacatgcaggcaaatctagcaaagcagatgcgttcacagaatctttgtgcactgtcaggccttggattcttggatagttggatgcatatatcattgcagattgtaatgctcaacagcttgcatcgtttgtgttttagtcttaagtgggttacagtactcttagtcatcatggagccctctgttgtgaccttgaaagcatgttcaggttcttgacgacagtttcgcaactgtattgctactgtaaagttgtgttcttggaccgagtgtatttatcttatgtatcttttgttttcttatataagatgctttattacgttgtttgaacatcttagtaccaccttttgc

SEQ ID NO: 69943 - DNA, 4523 bp, Zea Mays
ttaggcgagggtttctccattatagaaaagctgggcatagccaacactctaaaatgaacatgacgactccattacacggttcgaaccacgattactgtcgttgataccggcgccgtcccaagcgccgtgagttctccatcgccatcgagttttcccttctctcctcctcgcagatatctcccttctctctcgctctctcgcaccagagccgcaccctcgcaccagagagcaggtagaccatgtccttgtacttccccgtcgcatgacgtggtcgtcgagcagcgacgcggcggaggcggagggcggggaggagaaatttgccattacgcatggcgccgtcgttgtaggtgcggagcagccccgacagggaggagaaatttgccattacggcgtgggcgggctcgcctaaccacgacatcgccttcgactcctcctgggggctcctcgacgacctagatatactcgtcaagcgcctccgctcaaagcaggtgcggaagggctccatcgacgggagcggcggcgccggcaacagcaacttcgactccttctccgaggccgggtggtccagggagatctccggcgcggcggattcggcatccaccagcgccccgtgggacgagacgagccgtgactacctcaccttcgtcaaggagtaccgagaagccgccatattgtgcccatctcatgccagggcactcaagctcctggggagcgctctctttggcgttggggagtaccgagctgctgagaaggcactggaggaggccatcttcctgaaggaagactatgctgatgcgcactgtgaccttgggtcggccctgcatgcagtaggggaggatgatcgtgctatccaggagtttcagacagcaattgatctcaaacctggccatgttgatgccttatacaatcttggtggattgaacatggatgctggccgcttcgtacgggctgcagagatgtatactcgtgtgctgagcatccgaccaaaccattggcgtgcacagctaaacaaggcggtggctttgcttgggcagggtgaatctgaggaggctaagaaggcactcaaggaggcgtttaagatgacacagagggtgaaagtgtatgatgctatctcacatttgaagacattgcaaaagaaaaagccaaagccttccaaaggaaaaaatgatggtcaaggggagcagacttatgttaatgtggaggcatccaagttcaagagggttggcaggaagactaccttgcggcaggatttggccaatgctctagatataagggccttcgagaggatgacgaagctaggccactgcgatgtggagcttcttagaaaagagatgaatgagactgatgtccccgtatcttactcagacactggcatccctgagaagtcaatacgcaaagcagctcttgaggtatcacaagcttgcagaaacgtgcaatggtagcaataagatgctcaattcgcatggaagtgccactggggcagattgacgaacttgttgtttctccggagtatgtccgctaccttgttagaattgccaacagtaaaatggaggcaaataaaaggcgaatgaatggatttttggatctcttgcaaactaagggtttgtcatacccatcagggttatcaaacaactctaatagtggtggtcagtctgatgattacgaggcttctgtgggtcctgaagttaagataccatcagatacaagtgccaaaacaaatgatgagtacttagttacaaaaatgagaaatggtggacgtagtcgtgatgatgatgatacaggttcaatagaagcacagtattttggaaaacaagactctgcatggagccagggtgtcaatcatggttctgattattaacgctggagaagctgcgagaaaataaaaatcatctctctaccacaacattgaagattagcggtgaaccaattgagaagctcttcttatggggccaagcctcttgtgtgtttactattggagaagagcagcaggtcctaacttttggtggttttgggggaccagggcgacatgcaaggagaaactattcccttctactcgatcacaaatctggtctgttgacagaaatgatctttaaagcatctccttcaccacggatggggcatacagttactgcagttgataataccacttatataattggaggtagaggtggcccttcagaaattcttgatgatgtctggattttgccaagtgttgggaatacatggtcaaaactggagtgttgtggagatctgttccgaccaaggcaccgacatgcagctgctgcagtagcttcaaaaatttatgtatttggcggactcagtaatgaaggcatatattcttgtatgaatgtattagacacaaaaaatatgcaatggagtgtacttgctgcttcaggcgaatggccatgtgctcgacattcacattctatggtctcatatggtacaaatctattcatgttcggaggtcatgatggccaacgggcactgaaggacttctacagttttgatacaacaaaacttaggtggaacaaggaaaacacaaatgggggaactccgtcacctagattttcacactgcatgttcatctacaaaaattatcttgggatacttggtggctgccctattacagaaaacaatcaagaagttacattgctgaacataaatcatcgagtctggttttgtgtttcggttccattgctgagccagtccctctgtgtccgtagttcatcggttgtcattaaagatgatcttgttattttaggtggtggtgcatcttgttatgcattcggaaccaaattcagtcaaccaatagttcttgatctgcattcagtggagtctatgtttaaatatgataggaacaaagatggcacagttcaaaggcgtgatgcaatatctgttgttgaattgtcaagagatgaacaaaatggcatccttgatcatgacacaaaattacaagatgcttgttcgggtagtttgacggactctagccctctggttcttcaactggggaagacatatgccaaattagcaaaggacattatgaaaaagtttggatggttggatctttctagaaaagttcgaataagtcatgataatggccatgttctttttcctattaacgaatctttctgtgccctaaatgctgaagagcatatcaataggaatcttgatgattcatgtacctttggggaatcattagtattttctgaaaagaagcttgtaggggacaacctatctcttcaggatgcattaatttttttttcatcttgcaatggttccgttatgaaagatgaactagccatcagccgaaagccttccaagtctcctcaaactatcatgaaagaacttgtatcttctctactggaaagtaaagggatgccctctcagttgttgcagcagcttccggctaggtgggagacacttggtgatatcgtcatacttccaaagacatgttttaagaatccattgtgggaatctgttagcgaggaactttggccactagttgccaagtcacttggtgcacaacgtcttgcacgccaaggtaaaatcatgccaaatggcacaagagatagtacactggaacttcttctgggtgataacggatgggttacccattatgaaaatggcatctgctattcacttgatgcaacaaaatgcatgttttcttctggtaatcgttcagagaaacttcgcatgggacagctaaactgcagagatgaggtggtcgtggatttgtttgctggaattggatattttgttcttccatttcttgtgaaggctaatgccaagctagtttatgcatgtgagtggaatccacatgctctggaggctcttcggcgcaatgttagtgacaacagagtggaggatcgatgtattatacttgaaggagataaccgggtgactgcacccaaaagtgttgctgatcgagtctgtcttggattgttaccctcaagtgaatgtagctgggccactgctgtcgaagctttaagggttggcgggggcgtgttgcatattcatgggaatgttaacgactctgatgagacacgctggttggacagtgttgttgaatccatcagtaatgtcgccaaaaatcatggactatcttggaacgtgtcagtggagcatgttgaacgtgtcaaatggtacgggccgcgtattcgccaccttgtagttgatgttacatgcaggcaaatctagcaaagcagatgcgttcacagaatctttgtgcactgtcaggccttggattcttggatagttggatgcatatatcattgcagattgtaatgctcaacagcttgcatcgtttgtgttttagtcttaagtgggttacagtactcttagtcatcatggagccctctgttgtgaccttgaaagcatgttcaggttcttgacgacagtttcgcaactgtattgctactgtaaagttgtgttcttggaccgagtgtatttatcttatgtatcttttgttttcttatataagatgctttattacgttgtttgaacatcttagtaccaccttttgc

SEQ ID NO: 69944 - DNA, 5303 bp, Zea Mays
ttaggcgagggtttctccattatagaaaagctgggcatagccaacactctaaaatgaacatgacgactccattacacggttcgaaccacgattactgtcgttgataccggcgccgtcccaagcgccgtgagttctccatcgccatcgagttttcccttctctcctcctcgcagatatctcccttctctctcgctctctcgcaccagagccgcaccctcgcaccagagagcaggtagaccatgtccttgtacttccccgtcgcatgacgtggtcgtcgagcagcgacgcggcggaggcggagggcggggaggagaaatttgccattacgcatggcgccgtcgttgtaggtgcggagcagccccgacagggaggagaaatttgccattacggcgtgggcgggctcgcctaaccacgacatcgccttcgactcctcctgggggctcctcgacgacctagatatactcgtcaagcgcctccgctcaaagcaggtgcggaagggctccatcgacgggagcggcggcgccggcaacagcaacttcgactccttctccgaggccgggtggtccagggagatctccggcgcggcggattcggcatccaccagcgccccgtgggacgagacgagccgtgactacctcaccttcgtcaaggagtaccgagaagccgccatattgtgcccatctcatgccagggcactcaagctcctggggagcgctctctttggcgttggggagtaccgagctgctgagaaggcactggaggaggccatcttcctgaaggaagactatgctgatgcgcactgtgaccttgggtcggccctgcatgcagtaggggaggatgatcgtgctatccaggagtttcagacagcaattgatctcaaacctggccatgttgatgccttatacaatcttggtggattgaacatggatgctggccgcttcgtacgggctgcagagatgtatactcgtgtgctgagcatccgaccaaaccattggcgtgcacagctaaacaaggcggtggctttgcttgggcagggtgaatctgaggaggctaagaaggcactcaaggaggcgtttaagatgacacagagggtgaaagtgtatgatgctatctcacatttgaagacattgcaaaagaaaaagccaaagccttccaaaggaaaaaatgatggtcaaggggagcagacttatgttaatgtggaggcatccaagttcaagagggttggcaggaagactaccttgcggcaggatttggccaatgctctagatataagggccttcgagaggatgacgaagctaggccactgcgatgtggagcttcttagaaaagagatgaatgagactgatgtccccgtatcttactcagacactggcatccctgagaagtcaatacgcaaagcagctcttgaggttattctccgcaggctcctctcttttctcaagccaaacacctttcaggtgccatcaaggcaatcaacgaaagaattctctctgtccttgatgctcctggttctggtcgtgttgatctgggtatgttcttcgccatcattgctccaatctgttcaggccctgtggataggcgcaagcgtatcgtctttgatgcacttctttggcgtcatacacggaattattagagatgttcaatgacccggattggggatttgggatcctgagcactctggtgaagctcgaagagggtgaccacatacgccatggtagccacacatcccagtcccccgagctcgtagtagtcgctgccaccgtgacgggctccgctgcgggcgccgaggacgcatggcgatgacggtcgtccttggcagacgcggaagcggaagtcgcggaggaagaggagtccccgtcgccgccgccgaggagaccacagaggatggcgaagagcacgaggcagaggagaccacaacggaaatatgacggcgtgagtttgagatcgtcgttaacggaaatatgacggcgtgagtttgagatcgtcgttacttgttaatagagttgtcatgttcattttagagtgttggctatacccagcttttctataacggagaaaccctccgagcctctatttcgtcgtcgtgtttcataatgtcaagtctctctagcacgcctgtacctaaacctcgcaaaagcctaacccaaaccctagcacctctcgaaatctccccgcgaaagacagccttctggtcacatggatttcggtcgccggaaggcggcggcgctggctgcgctctcctcgccgacgccggacaggtccccgaagggcggtgtcgacgccccgatcgctccgctcctcgatgccctcaactcccacccggacctcttcactacctcctcctgctccggccgcgtctccgtcctcgcgcagcctccgccgccgcatgagggctggggcgagggcgcccccaagccgaagaagaaggcgcggggcggcgggtgggtatacgtatcgcacgaccctgccgatccggacgctgtggtggagcagctgttcggcgggagcgggtcgggagtggcgggggacgagctggtgttcaggttcgagccgatgatcgtggcggtggagtgcagagacgttgccgcagctgcggcgctcgtcgcagccgcgatcggtgcggggttccgggaatcaggtatcacaagcttgcagaaacgtgcaatggtagcaataagatgctcaattcgcatggaagtgccactggggcagattgacgaacttgttgtttctccggagtatgtccgctaccttgttagaattgccaacagtaaaatggaggcaaataaaaggcgaatgaatggatttttggatctcttgcaaactaagggtttgtcatacccatcagggttatcaaacaactctaatagtggtggtcagtctgatgattacgaggcttctgtgggtcctgaagttaagataccatcagatacaagtgccaaaacaaatgatgagtacttagttacaaaaatgagaaatggtggacgtagtcgtgatgatgatgatacaggttcaatagaagcacagtattttggaaaacaagactctgcatggagccagggtgtcaatcatggttctgattattaacgctggagaagctgcgagaaaataaaaatcatctctctaccacaacattgaagattagcggtgaaccaattgagaagctcttcttatggggccaagcctcttgtgtgtttactattggagaagagcagcaggtcctaacttttggtggttttgggggaccagggcgacatgcaaggagaaactattcccttctactcgatcacaaatctggtctgttgacagaaatgatctttaaagcatctccttcaccacggatggggcatacagttactgcagttgataataccacttatataattggaggtagaggtggcccttcagaaattcttgatgatgtctggattttgccaagtgttgggaatacatggtcaaaactggagtgttgtggagatctgttccgaccaaggcaccgacatgcagctgctgcagtagcttcaaaaatttatgtatttggcggactcagtaatgaaggcatatattcttgtatgaatgtattagacacaaaaaatatgcaatggagtgtacttgctgcttcaggcgaatggccatgtgctcgacattcacattctatggtctcatatggtacaaatctattcatgttcggaggtcatgatggccaacgggcactgaaggacttctacagttttgatacaacaaaacttaggtggaacaaggaaaacacaaatgggggaactccgtcacctagattttcacactgcatgttcatctacaaaaattatcttgggatacttggtggctgccctattacagaaaacaatcaagaagttacattgctgaacataaatcatcgagtctggttttgtgtttcggttccattgctgagccagtccctctgtgtccgtagttcatcggttgtcattaaagatgatcttgttattttaggtggtggtgcatcttgttatgcattcggaaccaaattcagtcaaccaatagttcttgatctgcattcagtggagtctatgtttaaatatgataggaacaaagatggcacagttcaaaggcgtgatgcaatatctgttgttgaattgtcaagagatgaacaaaatggcatccttgatcatgacacaaaattacaagatgcttgttcgggtagtttgacggactctagccctctggttcttcaactggggaagacatatgccaaattagcaaaggacattatgaaaaagtttggatggttggatctttctagaaaagttcgaataagtcatgataatggccatgttctttttcctattaacgaatctttctgtgccctaaatgctgaagagcatatcaataggaatcttgatgattcatgtacctttggggaatcattagtattttctgaaaagaagcttgtaggggacaacctatctcttcaggatgcattaatttttttttcatcttgcaatggttccgttatgaaagatgaactagccatcagccgaaagccttccaagtctcctcaaactatcatgaaagaacttgtatcttctctactggaaagtaaagggatgccctctcagttgttgcagcagcttccggctaggtgggagacacttggtgatatcgtcatacttccaaagacatgttttaagaatccattgtgggaatctgttagcgaggaactttggccactagttgccaagtcacttggtgcacaacgtcttgcacgccaaggttggcgggggcgtgttgcatattcatgggaatgttaacgactctgatgagacacgctggttggacagtgttgttgaatccatcagtaatgtcgccaaaaatcatggactatcttggaacgtgtcagtggagcatgttgaacgtgtcaaatggtacgggccgcgtattcgccaccttgtagttgatgttacatgcaggcaaatctagcaaagcagatgcgttcacagaatctttgtgcactgtcaggccttggattcttggatagttggatgcatatatcattgcagattgtaatgctcaacagcttgcatcgtttgtgttttagtcttaagtgggttacagtactcttagtcatcatggagccctctgttgtgaccttgaaagcatgttcaggttcttgacgacagtttcgcaactgtattgctactgtaaagttgtgttcttggaccgagtgtatttatcttatgtatcttttgttttcttatataagatgctttattacgttgtttgaacatcttagtaccaccttttgc

SEQ ID NO: 69945 - DNA, 1085 bp, Zea Mays
aaaccttaaccaaatcccccctcccctcgcttccacaccttccgcctcgtctccctctctctctgtctctctctctcacacacacacacacacgcatcaggtcgggacgggaggggaggtctcgtgcgcgcccggctttcctctcctctcctcgccgcacgacgcgcgcgcggtcccggtcgccgatggccaaggcacgcaggccgccgttcgccgccgccgagcggttcctcggcttcccccgcggcgggccctcgccgggggccgtggcgccggcgcccgccgccctcgacgacctgccggacctcgccgaggccgacgtctggtactcggctgccgacccgggtagcccgtatcccgcggcgtcccgacatgcggcggcggagggcaggagcgcaggccagcgcggcccgcggcgcggcgtgcagggcggcctgagccgggcgttcggggacgggtccgggtccgggtccgggcggcaggcgcgggcgtcggtggtggagggcgccggccggacgctcaagggccgggacatgtcgcgggtgcgcgacgccgtctggagccggacgggcttcgacggatagcgaatgagcaagcgagcctggacagattttgatctgcttttgctccctgccccccctcttcttcttcattgcctgtcagatttctcttccccctctttgttttttcttctcccttctggatgaaatggaaattttgtaacaaggccggtgtgcttgttttggcctccgatccaccggcgattttagtactggaatcaatggcaaagaaaggaaatgagctcagctcagctgctgtgaaggaaatgtgaggtgtcatgtgtagcagtatcagagtagtatagctcaatacaggtgcatgtcgattggttgaatagtaatctgcttgctgattggggcagttggatactgtggccttgtggctggctccaactcaaattggttggcctgcctgctgaggctgatgatcctcttggctactcattgagtataattcgctactagtaccaggggcaaaaataaacaaaaaatgggccatgtgttgtgatccagaactggattttt

SEQ ID NO: 69946 - DNA, 3151 bp, Zea Mays
ctaataactatttttagcaaattagctaatagttagctagctatttattatttagctaatttcactagcaaattttttagccaactatctgttaggtctagtgcattcaaacactccctaagtacaaatggttctgggacatctgaaacaagcaaattaacaatctgacgaagacattaatatcaacagagcacacttcaacagtcaagatctcaacgacaaacagaagaaacatccggagtgccatcatcgattaacactggtccccaagaaagtctaaccactcctatgcgactatatgaccttcatatctatataggatgtctcattgcagcgccccgtgactccaccatcactctaatccgatagcactccagaggtgtgcaagcaatcgtcactgcaaatgaaaggcaacaaaattactcatcagcctaataaacgtcccaacatagaagactcataacatgacactcaacatcaacatagacttttagtcccaaacaagttggggtaggatagagttgaaacccaacaagatgtcaccaaaagaagaaagagagagaaaggggaggggaaaagattttgagagcactaaaagtaaaaaggcctaaatcacggttcaggcacgtggatagcttatttccaagcacttctatactgcatggctcaaattatcttcagaaaatcagcaattggctggttcaggatagtaagatttttaacagtcgatttcctaaatttgaactatggaaagatagtaagatttaagcaatggggattgtccgtgccctacgtgctgtggtggtggaggctgctgcagctgctgttcctgtgttggctgctgctgctcatagttaccacaaccagagtatccgtagtagttttgcatgcttgggtcttgtgcactggaagcaccatagccataaccttcataacccggctgttggtatccataatagctgttcccattatactggttgttggcatcatgctgagaagcctgatggaaaatcgtcttgaattaatcaattgttaggtaagtgacaattcagcatccatcacatataatacctgtctgttttgaggactacggccccatgaaagccgaactttctgcccaccaacctgactcccattcagcattcggatggcttcctctgcacatgacctgaaaatacggtgacccaatcaaataacgaagaattaactcgcatatatcagtcagaacggttaattaaagagctttaataagcatttatatgaacctgctggtaaattgaacaaatccacaatgtttgcctacaggaatcttcacataggaaatttctccatacggagtaaaaatttgccttagatactcctcatttacattggaatctaacccacctacaaagacctattgcaaaataatgaaagataaggtaacaggaattcctaagtctatctttttttagaaagaagaatccacttactgttgtattgttaggatcattctctgaagaatttcctttagagctctggtatgctcctgcaatggcaagacaaaccatcagcaacaaagttggcaaattggctgggaattcagacccccaaaataatagcaacggaacactggacacccatattctggccagcaaaagtaatagcttaacatatttctagtaaggatccaaaatagtcaacagcatttgcaatgatgtaagtaaataaaacaaataaagaaatggttagcattccaatgaggtcagaggaagaatacaagaaatccttgcttcaattagttgttcactgcatgtactgcttagctgcaacagaagaaattttactatagtcaaactgtcagtagataaactcagattatctacacaatacccagtatctttaaatgacaaaaactatgtagcagcaactgcgtgtattaatcacaacctggaaatatcctcatgcactaacacgggcatgaagtagaacatattagttcaactatttcgattttttaatcttattctgagtcatcaactgttgataaaatatttcaaataagaaatcaaactttacagtgttgctaagccataccaactaccaaacccaaactcagataagcagaatatgtgggcaacaaacaaaaatgcataactacaaagtgcattcagggaaaactaatgagaaataaaaagaaaattgaatctgcagcatggaataataaaccagaggaagtgcaggcacaacagtggaaagttgaacaaaaaaaaatattttctgcaccgcaacagaatttggaatgactaaaaaaatggtacattgaggagaccagataagctacaggtgaaactaaaagcttcctgcactatacagtacaatgcggagtaacaaacatgttacaggtgacattaggtgcagatataagaaatccaatccagagatgagaaaaagggggaatatataaaaataaataccacaacaacatataaaattgtacatattagctatcacgagtactggaacatgatgggcagtattttttaaaaaaataaactgaaagcattgaagactggagagtaagtccagataagttgatgcctgagagtgaaagagctttagaaccaaaatctcatgaaattaaaacactgacctaaccgaggcactggttacatagacatctgaagacaattccaggccttaaatgcagatggcatgacatcctgctttgagaaacacaaattttgttcagtggtttaattactttgttaagttatcccaatcttagacttggaacggaaagagcgggaaggaaactgtttacagaaagaagctatgtgagctgttgcggtggaatgactagaaagagaactggtacgaaaacactatcaaccagcaagaaaaatggaaagagaaaccagaatatgtaagtgggttttagttttcaagatgcagtgatgcacctagaagttagatgctctcataatcagtacccctgcaggatcctacacaagcaagtgtgaaataatagagaaaaataatttagaaacctatatgaagatgttcgacaagtacataccgtcagttgcatatgtctgctgagcatccctattcttcttgttagctgcagcaccaatcctcatttgccttgtagataacaacattccattca

SEQ ID NO: 69947 - DNA, 4482 bp, Zea Mays
atgagccgccgcgagccggacacctcccccttctgcgacctctccaacctccgcaccccgagacccaaccccaaaaccgtacctccctcgcctcagttcttcaccgcctccaaatccgccctccaggctcccactccgacgtcactccgccgccggaggcctggcgacggcgtccctaccccgacgcccctcggccgccgcctccacgccctcgaggtcgaccagtcgcgctccgcccgccgcgccgagtccggccgtgagcgcgccctccgtaccttttccgcctccgcctcgtcatggctatccctcctcctacgcgacccctccgcctgcgggtgcttcccagggttcaccggttccgccgcggccgcgcagccctgggctacggggaaacgcggcgcgctcgatggagaccgggcgcgtggggggcgcagcccgaagaggtgccgcggtggtggtgatcgcggcggagagaggagcaaggagatgacgccggcgatggtggccgcgttaagggaatctcttaaggatgcgtgcagcctggaggatgtcacggagaggatggagaaacacatgagtaagggcgcgtgtgaggaggtgctctttatgatgtttcaaatttgtaagaacatcgatgaaggcagattgaagatgaaagcacggtgcccccttgttactgaccttaggctcaaagagaaagcaactagggttttcatgtcctacaatccatattggctcaggattggcttgcatattgttctcggtggtgattccttgctgcagactggacaaggaaaacgggacaaggaggttcattttctaaaactaattttggagaagcatatgctttctcaaatcatgactgcaaaatcatgtggtaacaagaagctggtagaagagcaccatgtacaaggttacagtgatgtgctgggcaatattatattgaaaagaatttttcttcttgttgttgcactagacagaaccaaaatagaaagtactcttcctctcgaagctggaatcgatggccttgatggtggatcccctcttttattttgtcaccaaagtcaaataaaatctagtcgtcaaatcattcaagagtctttgagggagaccatgcatggagaaggtgacattctggtacacctcacaactatgggatataaactaaattatcaacagcctgctttgtcagaatatgatttcacaatgaggaatttatttgaagatctccaagatggcataattctttgtagagttgttcagctgctcctcgcagatgcatcaatcatttcgaaagtaattgttccctcagatacagacaagaagaggcgaagtaactgcaccactgctatacaatatatcaaacaagctcgggttccattatctgattctgatggagtcacaatttccgcggaagacatcgctgctggggataaggagcttattctttcactgctgtggaatatgttcatccatatgcagctaccgttgttagcaagcgcaacctcgctagctcgtgaactaaccaagctaaacgtacatgtaacggaacaacaaatatctgagaacaagccacacatgggtttgctttacaattgggttcaggcaatatgctcaaagattggcatgactgttgaaagttcatctcagttagacagaagagcactgaactgtttcatcaactattatttgaatattgatatttcccccttcaaggaaacaccaactggatgccgaaaggaattgttcacctgtcaccaacttgatactatatcagatatcgctggctggccatccagcgagatggggaaagatattccagctagtggcatcctagctgatggtgtattatttgatgagaggagtaccattcttttgctagcattcctatcttcgcatctgactaatgatgaaagattggatcaactaaagaatttgatcaacatgaggttgtacaagagtgcggatactaagattgcagcaagacgtatatctcgaggaaagattgatataaagtatcatccatctcagacagataaaaatgatggtgcatgcaccaaccaggagtgggctgcaactattatacagactcaggccagaagtcttattgcaaagaataaatattgtgagcgtaagaaggcaatatttatcctgcaaggtgctttaagggcatggtcagccatcatctcgaacaggaaccgtagttgtctaagtattgctgcctctattccctggcaagcacaaggaaacaacagatatttcatttttataatggaaaggcatcgatttgttcagatgagaaaatctgccattatgattcaactggctgtaaggatttggattagaggaagaaaaaaatttaagaacagtgattctttcaaaagctgtgagttccttgaaggtaaaactccacccaaaattagtagcattgctccttcccctcaggagcattgtagtggtggagataaaacaatagcttcgcccacagcatgcaagcactgtgagcatgtgctcacagtgagagcttctgctgctgctcctattctttattttgatggcatggacagtctagactcaacaactccactacagtttagcggcaatcaaagcaactttataacttctaccactcagctgtgcaaaagtgagcatgactgtcggtcgtgtgtggttgagaaatccaattcagtttccgtcagtaagcttgtgagtgcggatgacattcagtgcagcagcagtatttgtttccctgtctgcaaggaactagtggctgctcaaacgatacaaagtgcatacagaaggtttttgaacaacagaaacaggataactggtgcaattaaaatccagagccactggcgatgctattcagtacgcaagtgtttcatgaaggaaattcaggctattgtaggaatccaaacatcaataagagtattcttgtgctaccaagcttttcaacgccaccgacttgctgcagtactgattcagcgagttgtcagaggatggctggctagaaagagactgttaggttcctcttcactgcgaacctacacaagactttgtgtagtcgaccaaagtcaaaagagaaaatgttatcaaagccttgagttgaacattgtgctagactctgtcataaggctacaaagatgctggaggaagttcctgctgcgtcagtctgtcaaaacatatgtgatctcaattcagtcttttgtccgtggctggttggcacggaagcaactaaaccaaactttccgttgcatcaacatcattcaaagatggtggagaaaggttttgttccttaaattgaggaagcaagcggcgttagttatacaggctcatttccgtggttggatagcacgacaagttgcttttagaactagaaaaagtattactataatacagtcctatgtcaaagcctaccttgtgaggaaggcttcgaagcaagaagttgcacatataagatctagactgcagaagtcatcttcacaggttgatgatagtatgcgcctgatcaacagactggtgtctgcattgtcacaactccatcgctgtcggagcatacacagcattcgtcaaacttgtgcaacattgagtactgctacagagtattccaagaaatgctgcgagaagctggtcgctgctggtgctgtagatatattgctaaagcaaatatatttgctgaaccgtgggattgctgaccaggaggtcttgaagcaagtgttccttactctcaggaacattgctcgatattcaaatcttagacaggtgttagccagcactgcagaatctgttgaaatcatcttccaggaattactgaggaacaaagcagacggattcttcatcgcgtctgatattctaaaaagcctatgtgaatccaaggaaggccgtgaaaccgtccaagcgctgagtcacctcatcaaaaggctgcgcaatctggtgcatgacctggaaaagaaggtagagcttgataagaggaatgggcgcaccggagccgtgaaggcgaccaacctgcggcggcttcgggaggccgccacactctatcatatcctcaccagtggtacttaacgcgtcggcagcatagctagaaaggctaatctgacgttttgttgtacaataatttagtctaagaaggttttcatgtaactggaggtgactacggtgcaattgtcgaaaaccttcctaggtaaccaggatcttctaagttctgttgctgcagttggttttgtgtggtaggtgtgagaatcatcggcttgatgtattggattacctcttataaagagtgaagtcgctgagttaaccgtcctcacgtgtcttggattaaccgccttttatgttctaacaaatcatcagctcttgatgtgattgttagtatcacataccagtaccaaacagaaaaacgagtcatcctattcattaacttgcagaaatggattttctgaaatagtttttttttgcgtaatatataaatctcaaatcgcggaaggc

SEQ ID NO: 69948 - DNA, 4712 bp, Zea Mays
cgaatcccctccaactcgaacattccggaatccatggaggccggcccccaaaccttctagagcgtgcttctccggtcgccatgagccgccgcgagccggacacctcccccttctgcgacctctccaacctccgcaccccgagacccaaccccaaaaccgtacctccctcgcctcagttcttcaccgcctccaaatccgccctccaggctcccactccgacgtcactccgccgccggaggcctggcgacggcgtccctaccccgacgcccctcggccgccgcctccacgccctcgaggtcgaccagtcgcgctccgcccgccgcgccgagtccggccgtgagcgcgccctccgtaccttttccgcctccgcctcgtcatggctatccctcctcctacgcgacccctccgcctgcgggtgcttcccagggttcaccggttccgccgcggccgcgcagccctgggctacggggaaacgcggcgcgctcgatggagaccgggcgcgtggggggcgcagcccgaagaggtgccgcggtggtggtgatcgcggcggagagaggagcaaggagatgacgccggcgatggtggccgcgttaagggaatctcttaaggatgcgtgcagcctggaggatgtcacggagaggatggagaaacacatgagtaagggcgcgtgtgaggaggtgctctttatgatgtttcaaatttgtaagaacatcgatgaaggcagattgaagatgaaagcacggtgcccccttgttactgaccttaggctcaaagagaaagcaactagggttttcatgtcctacaatccatattggctcaggattggcttgcatattgttctcggtggtgattccttgctgcagactggacaaggaaaacgggacaaggaggttcattttctaaaactaattttggagaagcatatgctttctcaaatcatgactgcaaaatcatgtggtaacaagaagctggtagaagagcaccatgtacaaggttacagtgatgtgctgggcaatattatattgaaaagaatttttcttcttgttgttgcactagacagaaccaaaatagaaagtactcttcctctcgaagctggaatcgatggccttgatggtggatcccctcttttattttgtcaccaaagtcaaataaaatctagtcgtcaaatcattcaagagtctttgagggagaccatgcatggagaaggtgacattctggtacacctcacaactatgggatataaactaaattatcaacagcctgctttgtcagaatatgatttcacaatgaggaatttatttgaagatctccaagatggcataattctttgtagagttgttcagctgctcctcgcagatgcatcaatcatttcgaaagtaattgttccctcagatacagacaagaagaggcgaagtaactgcaccactgctatacaatatatcaaacaagctcgggttccattatctgattctgatggagtcacaatttccgcggaagacatcgctgctggggataaggagcttattctttcactgctgtggaatatgttcatccatatgcagctaccgttgttagcaagcgcaacctcgctagctcgtgaactaaccaagctaaacgtacatgtaacggaacaacaaatatctgagaacaagccacacatgggtttgctttacaattgggttcaggcaatatgctcaaagattggcatgactgttgaaagttcatctcagttagacagaagagcactgaactgtttcatcaactattatttgaatattgatatttcccccttcaaggaaacaccaactggatgccgaaaggaattgttcacctgtcaccaacttgatactatatcagatatcgctggctggccatccagcgagatggggaaagtactctccgatgttcttcaggcagttgatattccagctagtggcatcctagctgatggtgtattatttgatgagaggagtaccattcttttgctagcattcctatcttcgcatctgactaatgatgaaagattggatcaactaaagaatttgatcaacatgaggttgtacaagagtgcggatactaagattgcagcaagacgtatatctcgaggaaagattgatataaagtatcatccatctcagacagataaaaatgatggtgcatgcaccaaccaggagtgggctgcaactattatacagactcaggccagaagtcttattgcaaagaataaatattgtgagcgtaagaaggcaatatttatcctgcaaggtgctttaagggcatggtcagccatcatctcgaacaggaaccgtagttgtctaagtattgctgcctctattccctggcaagcacaaggaaacaacagatatttcatttttataatggaaaggcatcgatttgttcagatgagaaaatctgccattatgattcaactggctgtaaggatttggattagaggaagaaaaaaatttaagaacagtgattctttcaaaagctgtgagttccttgaaggtaaaactccacccaaaattagtagcattgctccttcccctcaggagcattgtagtggtggagataaaacaatagcttcgcccacagcatgcaagcactgtgagcatgtgctcacagtgagagcttctgctgctgctcctattctttattttgatggcatggacagtctagactcaacaactccactacagtttagcggcaatcaaagcaactttataacttctaccactcagctgtgcaaaagtgagcatgactgtcggtcgtgtgtggttgagaaatccaattcagtttccgtcagtaagcttgtgagtgcggatgacattcagtgcagcagcagtatttgtttccctgtctgcaaggaactagtggctgctcaaacgatacaaagtgcatacagaaggtttttgaacaacagaaacaggataactggtgcaattaaaatccagagccactggcgatgctattcagtacgcaagtgtttcatgaaggaaattcaggctattgtaggaatccaaacatcaataagagtattcttgtgctaccaagcttttcaacgccaccgacttgctgcagtactgattcagcgagttgtcagaggatggctggctagaaagagactgttaggttcctcttcactgcgaacctacacaagactttgtgtagtcgaccaaagtcaaaagagaaaatgttatcaaagccttgagttgaacattgtgctagactctgtcataaggctacaaagatgctggaggaagttcctgctgcgtcagtctgtcaaaacatatgtgatctcaattcagtcttttgtccgtggctggttggcacggaagcaactaaaccaaactttccgttgcatcaacatcattcaaagatggtggcgaaaggttcttcaaacgaggaagcgagctgtgattgtcattcagactcgtttccgtggttgggttgcacgacaagatgctattagaactagaaactctatctgtaacatacagagatggtggagaaaggttttgttccttaaattgaggaagcaagcggcgttagttatacaggctcatttccgtggttggatagcacgacaagttgcttttagaactagaaaaagtattactataatacagtcctatgtcaaagcctaccttgtgaggaaggcttcgaagcaagaagttgcacatataagatctagactgcagaagtcatcttcacaggttgatgatagtatgcgcctgatcaacagactggtgtctgcattgtcacaactccatcgctgtcggagcatacacagcattcgtcaaacttgtgcaacattgagtactgctacagagtattccaagaaatgctgcgagaagctggtcgctgctggtgctgtagatatattgctaaagcaaatatatttgctgaaccgtgggattgctgaccaggaggtcttgaagcaagtgttccttactctcaggaacattgctcgatattcaaatcttagacaggtgttagccagcactgcagaatctgttgaaatcatcttccaggaattactgaggaacaaagcagacggattcttcatcgcgtctgatattctaaaaagcctatgtgaatccaaggaaggccgtgaaaccgtccaagcgctgagtcacctcatcaaaaggctgcgcaatctggtgcatgacctggaaaagaaggtagagcttgataagaggaatgggcgcaccggagccgtgaaggcgaccaacctgcggcggcttcgggaggccgccacactctatcatatcctcaccagtggtacttaacgcgtcggcagcatagctagaaaggctaatctgacgttttgttgtacaataatttagtctaagaaggttttcatgtaactggaggtgactacggtgcaattgtcgaaaaccttcctaggtaaccaggatcttctaagttctgttgctgcagttggttttgtgtggtaggtgtgagaatcatcggcttgatgtattggattacctcttataaagagtgaagtcgctgagttaaccgtcctcacgtgtcttggattaaccgccttttatgttctaacaaatcatcagctcttgatgtgattgttagtatcacataccagtaccaaacagaaaaacgagtcatcctattcattaacttgcagaaatggattttctgaaatagtttttttttgcgtaatatataaatctcaaatcgcggaaggc

SEQ ID NO: 69949 - DNA, 4695 bp, Zea Mays
cgaatcccctccaactcgaacattccggaatccatggaggccggcccccaaaccttctagagcgtgcttctccggtcgccatgagccgccgcgagccggacacctcccccttctgcgacctctccaacctccgcaccccgagacccaaccccaaaaccgtacctccctcgcctcagttcttcaccgcctccaaatccgccctccaggctcccactccgacgtcactccgccgccggaggcctggcgacggcgtccctaccccgacgcccctcggccgccgcctccacgccctcgaggtcgaccagtcgcgctccgcccgccgcgccgagtccggccgtgagcgcgccctccgtaccttttccgcctccgcctcgtcatggctatccctcctcctacgcgacccctccgcctgcgggtgcttcccagggttcaccggttccgccgcggccgcgcagccctgggctacggggaaacgcggcgcgctcgatggagaccgggcgcgtggggggcgcagcccgaagaggtgccgcggtggtggtgatcgcggcggagagaggagcaaggagatgacgccggcgatggtggccgcgttaagggaatctcttaaggatgcgtgcagcctggaggatgtcacggagaggatggagaaacacatgagtaagggcgcgtgtgaggaggtgctctttatgatgtttcaaatttgtaagaacatcgatgaaggcagattgaagatgaaagcacggtgcccccttgttactgaccttaggctcaaagagaaagcaactagggttttcatgtcctacaatccatattggctcaggattggcttgcatattgttctcggtggtgattccttgctgcagactggacaaggaaaacgggacaaggaggttcattttctaaaactaattttggagaagcatatgctttctcaaatcatgactgcaaaatcatgtggtaacaagaagctggtagaagagcaccatgtacaaggttacagtgatgtgctgggcaatattatattgaaaagaatttttcttcttgttgttgcactagacagaaccaaaatagaaagtactcttcctctcgaagctggaatcgatggccttgatggtggatcccctcttttattttgtcaccaaagtcaaataaaatctagtcgtcaaatcattcaagagtctttgagggagaccatgcatggagaaggtgacattctggtacacctcacaactatgggatataaactaaattatcaacagcctgctttgtcagaatatgatttcacaatgaggaatttatttgaagatctccaagatggcataattctttgtagagttgttcagctgctcctcgcagatgcatcaatcatttcgaaagtaattgttccctcagatacagacaagaagaggcgaagtaactgcaccactgctatacaatatatcaaacaagctcgggttccattatctgattctgatggagtcacaatttccgcggaagacatcgctgctggggataaggagcttattctttcactgctgtggaatatgttcatccatatgcagctaccgttgttagcaagcgcaacctcgctagctcgtgaactaaccaagctaaacgtacatgtaacggaacaacaaatatctgagaacaagccacacatgggtttgctttacaattgggttcaggcaatatgctcaaagattggcatgactgttgaaagttcatctcagttagacagaagagcactgaactgtttcatcaactattatttgaatattgatatttcccccttcaaggaaacaccaactggatgccgaaaggaattgttcacctgtcaccaacttgatactatatcagatatcgctggctggccatccagcgagatggggaaagtactctccgatgttcttcaggcagttgatattccagctagtggcatcctagctgatggtgtattatttgatgagaggagtaccattcttttgctagcattcctatcttcgcatctgactaatgatgaaagattggatcaactaaagaatttgatcaacatgaggttgtacaagagtgcggatactaagattgcagcaagacgtatatctcgaggaaagattgatataaagtatcatccatctcagacagataaaaatgatggtgcatgcaccaaccaggagtgggctgcaactattatacagactcaggccagaagtcttattgcaaagaataaatattgtgagcgtaagaaggcaatatttatcctgcaaggtgctttaagggcatggtcagccatcatctcgaacaggaaccgtagttgtctaagtattgctgcctctattccctggcaagcacaaggaaacaacagatatttcatttttataatggaaaggcatcgatttgttcagatgagaaaatctgccattatgattcaactggctgtaaggatttggattagaggaagaaaaaaatttaagaacagtgattctttcaaaagctgtgagttccttgaaggtaaaactccacccaaaattagtagcattgctccttcccctcaggagcattgtagtggtggagataaaacaatagcttcgcccacagcatgcaagcactgtgagcatgtgctcacagtgagagcttctgctgctgctcctattctttattttgatggcatggacagtctagactcaacaactccactacagtttagcggcaatcaaagcaactttataacttctaccactcagctgtgcaaaagtgagcatgactgtcggtcgtgtgtggttgagaaatccaattcagtttccgtcagtaagcttgtgagtgcggatgacattcagtgcagcagcagtatttgtttccctgtctgcaaggaactagtggctgctcaaacgatacaaagtgcatacagaaggtttttgaacaacagaaacaggataactggtgcaattaaaatccagagccactggcgatgctattcagtacgcaagtgtttcatgaaggaaattcaggctattgtaggaatccaaacatcaataagagtattcttgtgctaccaagcttttcaacgccaccgacttgctgcagtactgattcagcgagttgtcagaggatggctggctagaaagagactgttaggttcctcttcactgcgaacctacacaagactttgtgtagtcgaccaaagtcaaaagagaaaatgttatcaaagccttgagttgaacattgtgctagactctgtcataaggctacaaagatgctggaggaagttcctgctgcgtcagtctgtcaaaacatatgtgatctcaattcagtcttttgtccgtggctggttggcacggaagcaactaaaccaaactttccgttgcatcaacatcattcaaagatggtggcgaaaggttcttcaaacgaggaagcgagctgtgattgtcattcagactcgtttccgtggttgggttgcacgacaagatgctattagaactagaaactctatctgtaacatacagagatggtggagaaaggttttgttccttaaattgaggaagcaagcggcgttagttatacaggctcatttccgtggttggatagcacgacaagttgcttttagaactagaaaaagtattactataatacagtcctatgtcaaagcctaccttgtgaggaaggcttcgaagcaagaagttgcacatataagatctagactgcagaagtcatcttcacaggttgatgatagtatgcgcctgatcaacagactggtgtctgcattgtcacaactccatcgctgtcggagcatacacagcattcgtcaaacttgtgcaacattgagtactgctacagagtattccaagaaatgctgcgagaagctggtcgctgctggtgctgtagatatattgctaaagcaaatatatttgctgaaccgtgggattgctgaccaggaggtcttgaagcaagtgttccttactctcaggaacattgctcgatattcaaatcttagacaggtgttagccagcactgcagaatctgttgaaatcatcttccaggaattactgaggaacaaagcagacggattcttcatcgcgtctgatattctaaaaagcctatgtgaatccaaggaaggccgtgaaaccgtccaagcgctgagtcacctcatcaaaaggctgcgcaatctggtgcatgacctggaaaagaaggaatgggcgcaccggagccgtgaaggcgaccaacctgcggcggcttcgggaggccgccacactctatcatatcctcaccagtggtacttaacgcgtcggcagcatagctagaaaggctaatctgacgttttgttgtacaataatttagtctaagaaggttttcatgtaactggaggtgactacggtgcaattgtcgaaaaccttcctaggtaaccaggatcttctaagttctgttgctgcagttggttttgtgtggtaggtgtgagaatcatcggcttgatgtattggattacctcttataaagagtgaagtcgctgagttaaccgtcctcacgtgtcttggattaaccgccttttatgttctaacaaatcatcagctcttgatgtgattgttagtatcacataccagtaccaaacagaaaaacgagtcatcctattcattaacttgcagaaatggattttctgaaatagtttttttttgcgtaatatataaatctcaaatcgcggaaggc

SEQ ID NO: 69950 - DNA, 4742 bp, Zea Mays
cctcgaatcccctccaactcgaacattccggaatccatggaggccggcccccaaaccttctagagcgtgcttctccggtcgccatgagccgccgcgagccggacacctcccccttctgcgacctctccaacctccgcaccccgagacccaaccccaaaaccgtacctccctcgcctcagttcttcaccgcctccaaatccgccctccaggctcccactccgacgtcactccgccgccggaggcctggcgacggcgtccctaccccgacgcccctcggccgccgcctccacgccctcgaggtcgaccagtcgcgctccgcccgccgcgccgagtccggccgtgagcgcgccctccgtaccttttccgcctccgcctcgtcatggctatccctcctcctacgcgacccctccgcctgcgggtgcttcccagggttcaccggttccgccgcggccgcgcagccctgggctacggggaaacgcggcgcgctcgatggagaccgggcgcgtggggggcgcagcccgaagaggtgccgcggtggtggtgatcgcggcggagagaggagcaaggagatgacgccggcgatggtggccgcgttaagggaatctcttaaggatgcgtgcagcctggaggatgtcacggagaggatggagaaacacatgagtaagggcgcgtgtgaggaggtgctctttatgatgtttcaaatttgtaagaacatcgatgaaggcagattgaagatgaaagcacggtgcccccttgttactgaccttaggctcaaagagaaagcaactagggttttcatgtcctacaatccatattggctcaggattggcttgcatattgttctcggtggtgattccttgctgcagactggacaaggaaaacgggacaaggaggttcattttctaaaactaattttggagaagcatatgctttctcaaatcatgactgcaaaatcatgtggtaacaagaagctggtagaagagcaccatgtacaaggttacagtgatgtgctgggcaatattatattgaaaagaatttttcttcttgttgttgcactagacagaaccaaaatagaaagtactcttcctctcgaagctggaatcgatggccttgatggtggatcccctcttttattttgtcaccaaagtcaaataaaatctagtcgtcaaatcattcaagagtctttgagggagaccatgcatggagaaggtgacattctggtacacctcacaactatgggatataaactaaattatcaacagcctgctttgtcagaatatgatttcacaatgaggaatttatttgaagatctccaagatggcataattctttgtagagttgttcagctgctcctcgcagatgcatcaatcatttcgaaagtaattgttccctcagatacagacaagaagaggcgaagtaactgcaccactgctatacaatatatcaaacaagctcgggttccattatctgattctgatggagtcacaatttccgcggaagacatcgctgctggggataaggagcttattctttcactgctgtggaatatgttcatccatatgcagctaccgttgttagcaagcgcaacctcgctagctcgtgaactaaccaagctaaacgtacatgtaacggaacaacaaatatctgagaacaagccacacatgggtttgctttacaattgggttcaggcaatatgctcaaagattggcatgactgttgaaagttcatctcagttagacagaagagcactgaactgtttcatcaactattatttgaatattgatatttcccccttcaaggaaacaccaactggatgccgaaaggaattgttcacctgtcaccaacttgatactatatcagatatcgctggctggccatccagcgagatggggaaagtactctccgatgttcttcaggcagttgatattccagctagtggcatcctagctgatggtgtattatttgatgagaggagtaccattcttttgctagcattcctatcttcgcatctgactaatgatgaaagattggatcaactaaagaatttgatcaacatgaggttgtacaagagtgcggatactaagattgcagcaagacgtatatctcgaggaaagattgatataaagtatcatccatctcagacagataaaaatgatggtgcatgcaccaaccagggtttgttctttatctattctttagtttagtgggctgcaactattatacagactcaggccagaagtcttattgcaaagaataaatattgtgagcgtaagaaggcaatatttatcctgcaaggtgctttaagggcatggtcagccatcatctcgaacaggaaccgtagttgtctaagtattgctgcctctattccctggcaagcacaaggaaacaacagatatttcatttttataatggaaaggcatcgatttgttcagatgagaaaatctgccattatgattcaactggctgtaaggatttggattagaggaagaaaaaaatttaagaacagtgattctttcaaaagctgtgagttccttgaaggtaaaactccacccaaaattagtagcattgctccttcccctcaggagcattgtagtggtggagataaaacaatagcttcgcccacagcatgcaagcactgtgagcatgtgctcacagtgagagcttctgctgctgctcctattctttattttgatggcatggacagtctagactcaacaactccactacagtttagcggcaatcaaagcaactttataacttctaccactcagctgtgcaaaagtgagcatgactgtcggtcgtgtgtggttgagaaatccaattcagtttccgtcagtaagcttgtgagtgcggatgacattcagtgcagcagcagtatttgtttccctgtctgcaaggaactagtggctgctcaaacgatacaaagtgcatacagaaggtttttgaacaacagaaacaggataactggtgcaattaaaatccagagccactggcgatgctattcagtacgcaagtgtttcatgaaggaaattcaggctattgtaggaatccaaacatcaataagagtattcttgtgctaccaagcttttcaacgccaccgacttgctgcagtactgattcagcgagttgtcagaggatggctggctagaaagagactgttaggttcctcttcactgcgaacctacacaagactttgtgtagtcgaccaaagtcaaaagagaaaatgttatcaaagccttgagttgaacattgtgctagactctgtcataaggctacaaagatgctggaggaagttcctgctgcgtcagtctgtcaaaacatatgtgatctcaattcagtcttttgtccgtggctggttggcacggaagcaactaaaccaaactttccgttgcatcaacatcattcaaagatggtggcgaaaggttcttcaaacgaggaagcgagctgtgattgtcattcagactcgtttccgtggttgggttgcacgacaagatgctattagaactagaaactctatctgtaacatacagagatggtggagaaaggttttgttccttaaattgaggaagcaagcggcgttagttatacaggctcatttccgtggttggatagcacgacaagttgcttttagaactagaaaaagtattactataatacagtcctatgtcaaagcctaccttgtgaggaaggcttcgaagcaagaagttgcacatataagatctagactgcagaagtcatcttcacaggttgatgatagtatgcgcctgatcaacagactggtgtctgcattgtcacaactccatcgctgtcggagcatacacagcattcgtcaaacttgtgcaacattgagtactgctacagagtattccaagaaatgctgcgagaagctggtcgctgctggtgctgtagatatattgctaaagcaaatatatttgctgaaccgtgggattgctgaccaggaggtcttgaagcaagtgttccttactctcaggaacattgctcgatattcaaatcttagacaggtgttagccagcactgcagaatctgttgaaatcatcttccaggaattactgaggaacaaagcagacggattcttcatcgcgtctgatattctaaaaagcctatgtgaatccaaggaaggccgtgaaaccgtccaagcgctgagtcacctcatcaaaaggctgcgcaatctggtgcatgacctggaaaagaaggtagagcttgataagaggaatgggcgcaccggagccgtgaaggcgaccaacctgcggcggcttcgggaggccgccacactctatcatatcctcaccagtggtacttaacgcgtcggcagcatagctagaaaggctaatctgacgttttgttgtacaataatttagtctaagaaggttttcatgtaactggaggtgactacggtgcaattgtcgaaaaccttcctaggtaaccaggatcttctaagttctgttgctgcagttggttttgtgtggtaggtgtgagaatcatcggcttgatgtattggattacctcttataaagagtgaagtcgctgagttaaccgtcctcacgtgtcttggattaaccgccttttatgttctaacaaatcatcagctcttgatgtgattgttagtatcacataccagtaccaaacagaaaaacgagtcatcctattcattaacttgcagaaatggattttctgaaatagtttttttttgcgtaatatataaatctcaaatcgcggaaggc

SEQ ID NO: 69951 - DNA, 4212 bp, Zea Mays
cggccatccccctcgaatcccctccaactcgaacattccggaatccatggaggccggcccccaaaccttctagagcgtgcttctccggtcgccatgagccgccgcgagccggacacctcccccttctgcgacctctccaacctccgcaccccgagacccaaccccaaaaccgtacctccctcgcctcagttcttcaccgcctccaaatccgccctccaggctcccactccgacgtcactccgccgccggaggcctggcgacggcgtccctaccccgacgcccctcggccgccgcctccacgccctcgaggtcgaccagtcgcgctccgcccgccgcgccgagtccggccgtgagcgcgccctccgtaccttttccgcctccgcctcgtcatggctatccctcctcctacgcgacccctccgcctgcgggtgcttcccagggttcaccggttccgccgcggccgcgcagccctgggctacggggaaacgcggcgcgctcgatggagaccgggcgcgtggggggcgcagcccgaagaggtgccgcggtggtggtgatcgcggcggagagaggagcaaggagatgacgccggcgatggtggccgcgttaagggaatctcttaaggatgcgtgcagcctggaggatgtcacggagaggatggagaaacacatgagtaagggcgcgtgtgaggaggtgctctttatgatgtttcaaatttgtaagaacatcgatgaaggcagattgaagatgaaagcacggtgcccccttgttactgaccttaggctcaaagagaaagcaactagggttttcatgtcctacaatccatattggctcaggattggcttgcatattgttctcggtggtgattccttgctgcagactggacaaggaaaacgggacaaggaggttcattttctaaaactaattttggagaagcatatgctttctcaaatcatgactgcaaaatcatgtggtaacaagaagctggtagaagagcaccatgtacaaggttacagtgatgtgctgggcaatattatattgaaaagaatttttcttcttgttgttgcactagacagaaccaaaatagaaagtactcttcctctcgaagctggaatcgatggccttgatggtggatcccctcttttattttgtcaccaaagtcaaataaaatctagtcgtcaaatcattcaagagtctttgagggagaccatgcatggagaaggtgacattctggtacacctcacaactatgggatataaactaaattatcaacagcctgctttgtcagaatatgatttcacaatgaggaatttatttgaagatctccaagatggcataattctttgtagagttgttcagctgctcctcgcagatgcatcaatcatttcgaaagtaattgttccctcagatacagacaagaagaggcgaagtaactgcaccactgctatacaatatatcaaacaagctcgggttccattatctgattctgatggagtcacaatttccgcggaagacatcgctgctggggataaggagcttattctttcactgctgtggaatatgttcatccatatgcagctaccgttgttagcaagcgcaacctcgctagctcgtgaactaaccaagctaaacgtacatgtaacggaacaacaaatatctgagaacaagccacacatgggtttgctttacaattgggttcaggcaatatgctcaaagattggcatgactgttgaaagttcatctcagttagacagaagagcactgaactgtttcatcaactattatttgaatattgatatttcccccttcaaggaaacaccaactggatgccgaaaggaattgttcacctgtcaccaacttgatactatatcagatatcgctggctggccatccagcgagatggggaaagtactctccgatgttcttcaggcagttgatattccagctagtggcatcctagctgatggtgtattatttgatgagaggagtaccattcttttgctagcattcctatcttcgcatctgactaatgatgaaagattggatcaactaaagaatttgatcaacatgaggttgtacaagagtgcggatactaagattgcagcaagacgtatatctcgaggaaagattgatataaagtatcatccatctcagacagataaaaatgatggtgcatgcaccaaccaggcaactccactacagtttagcggcaatcaaagcaactttataacttctaccactcagctgtgcaaaagtgagcatgactgtcggtcgtgtgtggttgagaaatccaattcagtttccgtcagtaagcttgtgagtgcggatgacattcagtgcagcagcagtatttgtttccctgtctgcaaggaactagtggctgctcaaacgatacaaagtgcatacagaaggtttttgaacaacagaaacaggataactggtgcaattaaaatccagagccactggcgatgctattcagtacgcaagtgtttcatgaaggaaattcaggctattgtaggaatccaaacatcaataagagtattcttgtgctaccaagcttttcaacgccaccgacttgctgcagtactgattcagcgagttgtcagaggatggctggctagaaagagactgttaggttcctcttcactgcgaacctacacaagactttgtgtagtcgaccaaagtcaaaagagaaaatgttatcaaagccttgagttgaacattgtgctagactctgtcataaggctacaaagatgctggaggaagttcctgctgcgtcagtctgtcaaaacatatgtgatctcaattcagtcttttgtccgtggctggttggcacggaagcaactaaaccaaactttccgttgcatcaacatcattcaaagatggtggcgaaaggttcttcaaacgaggaagcgagctgtgattgtcattcagactcgtttccgtggttgggttgcacgacaagatgctattagaactagaaactctatctgtaacatacagagatggtggagaaaggttttgttccttaaattgaggaagcaagcggcgttagttatacaggctcatttccgtggttggatagcacgacaagttgcttttagaactagaaaaagtattactataatacagtcctatgtcaaagcctaccttgtgaggaaggcttcgaagcaagaagttgcacatataagatctagactgcagaagtcatcttcacaggttgatgatagtatgcgcctgatcaacagactggtgtctgcattgtcacaactccatcgctgtcggagcatacacagcattcgtcaaacttgtgcaacattgagtactgctacagagtattccaagaaatgctgcgagaagctggtcgctgctggtgctgtagatatattgctaaagcaaatatatttgctgaaccgtgggattgctgaccaggaggtcttgaagcaagtgttccttactctcaggaacattgctcgatattcaaatcttagacaggtgttagccagcactgcagaatctgttgaaatcatcttccaggaattactgaggaacaaagcagacggattcttcatcgcgtctgatattctaaaaagcctatgtgaatccaaggaaggccgtgaaaccgtccaagcgctgagtcacctcatcaaaaggctgcgcaatctggtgcatgacctggaaaagaaggtagagcttgataagaggaatgggcgcaccggagccgtgaaggcgaccaacctgcggcggcttcgggaggccgccacactctatcatatcctcaccagtggtacttaacgcgtcggcagcatagctagaaaggctaatctgacgttttgttgtacaataatttagtctaagaaggttttcatgtaactggaggtgactacggtgcaattgtcgaaaaccttcctaggtaaccaggatcttctaagttctgttgctgcagttggttttgtgtggtaggtgtgagaatcatcggcttgatgtattggattacctcttataaagagtgaagtcgctgagttaaccgtcctcacgtgtcttggattaaccgccttttatgttctaacaaatcatcagctcttgatgtgattgttagtatcacataccagtaccaaacagaaaaacgagtcatcctattcattaacttgcagaaatggattttctgaaatagtttttttttgcgtaatatataaatctcaaatcgcggaaggc

SEQ ID NO: 69952 - DNA, 4681 bp, Zea Mays
cggccatccccctcgaatcccctccaactcgaacattccggaatccatggaggccggcccccaaaccttctagagcgtgcttctccggtcgccatgagccgccgcgagccggacacctcccccttctgcgacctctccaacctccgcaccccgagacccaaccccaaaaccgtacctccctcgcctcagttcttcaccgcctccaaatccgccctccaggctcccactccgacgtcactccgccgccggaggcctggcgacggcgtccctaccccgacgcccctcggccgccgcctccacgccctcgaggtcgaccagtcgcgctccgcccgccgcgccgagtccggccgtgagcgcgccctccgtaccttttccgcctccgcctcgtcatggctatccctcctcctacgcgacccctccgcctgcgggtgcttcccagggttcaccggttccgccgcggccgcgcagccctgggctacggggaaacgcggcgcgctcgatggagaccgggcgcgtggggggcgcagcccgaagaggtgccgcggtggtggtgatcgcggcggagagaggagcaaggagatgacgccggcgatggtggccgcgttaagggaatctcttaaggatgcgtgcagcctggaggatgtcacggagaggatggagaaacacatgagtaagggcgcgtgtgaggaggtgctctttatgatgtttcaaatttgtaagaacatcgatgaaggcagattgaagatgaaagcacggtgcccccttgttactgaccttaggctcaaagagaaagcaactagggttttcatgtcctacaatccatattggctcaggattggcttgcatattgttctcggtggtgattccttgctgcagactggacaaggaaaacgggacaaggaggttcattttctaaaactaattttggagaagcatatgctttctcaaatcatgactgcaaaatcatgtggtaacaagaagctggtagaagagcaccatgtacaaggttacagtgatgtgctgggcaatattatattgaaaagaatttttcttcttgttgttgcactagacagaaccaaaatagaaagtactcttcctctcgaagctggaatcgatggccttgatggtggatcccctcttttattttgtcaccaaagtcaaataaaatctagtcgtcaaatcattcaagagtctttgagggagaccatgcatggagaaggtgacattctggtacacctcacaactatgggatataaactaaattatcaacagcctgctttgtcagaatatgatttcacaatgaggaatttatttgaagatctccaagatggcataattctttgtagagttgttcagctgctcctcgcagatgcatcaatcatttcgaaagtaattgttccctcagatacagacaagaagaggcgaagtaactgcaccactgctatacaatatatcaaacaagctcgggttccattatctgattctgatggagtcacaatttccgcggaagacatcgctgctggggataaggagcttattctttcactgctgtggaatatgttcatccatatgcagctaccgttgttagcaagcgcaacctcgctagctcgtgaactaaccaagctaaacgtacatgtaacggaacaacaaatatctgagaacaagccacacatgggtttgctttacaattgggttcaggcaatatgctcaaagattggcatgactgttgaaagttcatctcagttagacagaagagcactgaactgtttcatcaactattatttgaatattgatatttcccccttcaaggaaacaccaactggatgccgaaaggaattgttcacctgtcaccaacttgatactatatcagatatcgctggctggccatccagcgagatggggaaagatattccagctagtggcatcctagctgatggtgtattatttgatgagaggagtaccattcttttgctagcattcctatcttcgcatctgactaatgatgaaagattggatcaactaaagaatttgatcaacatgaggttgtacaagagtgcggatactaagattgcagcaagacgtatatctcgaggaaagattgatataaagtatcatccatctcagacagataaaaatgatggtgcatgcaccaaccaggagtgggctgcaactattatacagactcaggccagaagtcttattgcaaagaataaatattgtgagcgtaagaaggcaatatttatcctgcaaggtgctttaagggcatggtcagccatcatctcgaacaggaaccgtagttgtctaagtattgctgcctctattccctggcaagcacaaggaaacaacagatatttcatttttataatggaaaggcatcgatttgttcagatgagaaaatctgccattatgattcaactggctgtaaggatttggattagaggaagaaaaaaatttaagaacagtgattctttcaaaagctgtgagttccttgaaggtaaaactccacccaaaattagtagcattgctccttcccctcaggagcattgtagtggtggagataaaacaatagcttcgcccacagcatgcaagcactgtgagcatgtgctcacagtgagagcttctgctgctgctcctattctttattttgatggcatggacagtctagactcaacaactccactacagtttagcggcaatcaaagcaactttataacttctaccactcagctgtgcaaaagtgagcatgactgtcggtcgtgtgtggttgagaaatccaattcagtttccgtcagtaagcttgtgagtgcggatgacattcagtgcagcagcagtatttgtttccctgtctgcaaggaactagtggctgctcaaacgatacaaagtgcatacagaaggtttttgaacaacagaaacaggataactggtgcaattaaaatccagagccactggcgatgctattcagtacgcaagtgtttcatgaaggaaattcaggctattgtaggaatccaaacatcaataagagtattcttgtgctaccaagcttttcaacgccaccgacttgctgcagtactgattcagcgagttgtcagaggatggctggctagaaagagactgttaggttcctcttcactgcgaacctacacaagactttgtgtagtcgaccaaagtcaaaagagaaaatgttatcaaagccttgagttgaacattgtgctagactctgtcataaggctacaaagatgctggaggaagttcctgctgcgtcagtctgtcaaaacatatgtgatctcaattcagtcttttgtccgtggctggttggcacggaagcaactaaaccaaactttccgttgcatcaacatcattcaaagatggtggcgaaaggttcttcaaacgaggaagcgagctgtgattgtcattcagactcgtttccgtggttgggttgcacgacaagatgctattagaactagaaactctatctgtaacatacagagatggtggagaaaggttttgttccttaaattgaggaagcaagcggcgttagttatacaggctcatttccgtggttggatagcacgacaagttgcttttagaactagaaaaagtattactataatacagtcctatgtcaaagcctaccttgtgaggaaggcttcgaagcaagaagttgcacatataagatctagactgcagaagtcatcttcacaggttgatgatagtatgcgcctgatcaacagactggtgtctgcattgtcacaactccatcgctgtcggagcatacacagcattcgtcaaacttgtgcaacattgagtactgctacagagtattccaagaaatgctgcgagaagctggtcgctgctggtgctgtagatatattgctaaagcaaatatatttgctgaaccgtgggattgctgaccaggaggtcttgaagcaagtgttccttactctcaggaacattgctcgatattcaaatcttagacaggtgttagccagcactgcagaatctgttgaaatcatcttccaggaattactgaggaacaaagcagacggattcttcatcgcgtctgatattctaaaaagcctatgtgaatccaaggaaggccgtgaaaccgtccaagcgctgagtcacctcatcaaaaggctgcgcaatctggtgcatgacctggaaaagaaggaatgggcgcaccggagccgtgaaggcgaccaacctgcggcggcttcgggaggccgccacactctatcatatcctcaccagtggtacttaacgcgtcggcagcatagctagaaaggctaatctgacgttttgttgtacaataatttagtctaagaaggttttcatgtaactggaggtgactacggtgcaattgtcgaaaaccttcctaggtaaccaggatcttctaagttctgttgctgcagttggttttgtgtggtaggtgtgagaatcatcggcttgatgtattggattacctcttataaagagtgaagtcgctgagttaaccgtcctcacgtgtcttggattaaccgccttttatgttctaacaaatcatcagctcttgatgtgattgttagtatcacataccagtaccaaacagaaaaacgagtcatcctattcattaacttgcagaaatggattttctgaaatagtttttttttgcgtaatatataaatctcaaatcgcggaaggc

SEQ ID NO: 69953 - DNA, 4744 bp, Zea Mays
ccaattactgagtactgatcccgaatccccaaccattcgaacgccacggccatccccctcgaatcccctccaactcgaacattccggaatccatggaggccggcccccaaaccttctagagcgtgcttctccggtcgccatgagccgccgcgagccggacacctcccccttctgcgacctctccaacctccgcaccccgagacccaaccccaaaaccgtacctccctcgcctcagttcttcaccgcctccaaatccgccctccaggctcccactccgacgtcactccgccgccggaggcctggcgacggcgtccctaccccgacgcccctcggccgccgcctccacgccctcgaggtcgaccagtcgcgctccgcccgccgcgccgagtccggccgtgagcgcgccctccgtaccttttccgcctccgcctcgtcatggctatccctcctcctacgcgacccctccgcctgcgggtgcttcccagggttcaccggttccgccgcggccgcgcagccctgggctacggggaaacgcggcgcgctcgatggagaccgggcgcgtggggggcgcagcccgaagaggtgccgcggtggtggtgatcgcggcggagagaggagcaaggagatgacgccggcgatggtggccgcgttaagggaatctcttaaggatgcgtgcagcctggaggatgtcacggagaggatggagaaacacatgagtaagggcgcgtgtgaggaggtgctctttatgatgtttcaaatttgtaagaacatcgatgaaggcagattgaagatgaaagcacggtgcccccttgttactgaccttaggctcaaagagaaagcaactagggttttcatgtcctacaatccatattggctcaggattggcttgcatattgttctcggtggtgattccttgctgcagactggacaaggaaaacgggacaaggaggttcattttctaaaactaattttggagaagcatatgctttctcaaatcatgactgcaaaatcatgtggtaacaagaagctggtagaagagcaccatgtacaaggttacagtgatgtgctgggcaatattatattgaaaagaatttttcttcttgttgttgcactagacagaaccaaaatagaaagtactcttcctctcgaagctggaatcgatggccttgatggtggatcccctcttttattttgtcaccaaagtcaaataaaatctagtcgtcaaatcattcaagagtctttgagggagaccatgcatggagaaggtgacattctggtacacctcacaactatgggatataaactaaattatcaacagcctgctttgtcagaatatgatttcacaatgaggaatttatttgaagatctccaagatggcataattctttgtagagttgttcagctgctcctcgcagatgcatcaatcatttcgaaagtaattgttccctcagatacagacaagaagaggcgaagtaactgcaccactgctatacaatatatcaaacaagctcgggttccattatctgattctgatggagtcacaatttccgcggaagacatcgctgctggggataaggagcttattctttcactgctgtggaatatgttcatccatatgcagctaccgttgttagcaagcgcaacctcgctagctcgtgaactaaccaagctaaacgtacatgtaacggaacaacaaatatctgagaacaagccacacatgggtttgctttacaattgggttcaggcaatatgctcaaagattggcatgactgttgaaagttcatctcagttagacagaagagcactgaactgtttcatcaactattatttgaatattgatatttcccccttcaaggaaacaccaactggatgccgaaaggaattgttcacctgtcaccaacttgatactatatcagatatcgctggctggccatccagcgagatggggaaagatattccagctagtggcatcctagctgatggtgtattatttgatgagaggagtaccattcttttgctagcattcctatcttcgcatctgactaatgatgaaagattggatcaactaaagaatttgatcaacatgaggttgtacaagagtgcggatactaagattgcagcaagacgtatatctcgaggaaagattgatataaagtatcatccatctcagacagataaaaatgatggtgcatgcaccaaccaggagtgggctgcaactattatacagactcaggccagaagtcttattgcaaagaataaatattgtgagcgtaagaaggcaatatttatcctgcaaggtgctttaagggcatggtcagccatcatctcgaacaggaaccgtagttgtctaagtattgctgcctctattccctggcaagcacaaggaaacaacagatatttcatttttataatggaaaggcatcgatttgttcagatgagaaaatctgccattatgattcaactggctgtaaggatttggattagaggaagaaaaaaatttaagaacagtgattctttcaaaagctgtgagttccttgaaggtaaaactccacccaaaattagtagcattgctccttcccctcaggagcattgtagtggtggagataaaacaatagcttcgcccacagcatgcaagcactgtgagcatgtgctcacagtgagagcttctgctgctgctcctattctttattttgatggcatggacagtctagactcaacaactccactacagtttagcggcaatcaaagcaactttataacttctaccactcagctgtgcaaaagtgagcatgactgtcggtcgtgtgtggttgagaaatccaattcagtttccgtcagtaagcttgtgagtgcggatgacattcagtgcagcagcagtatttgtttccctgtctgcaaggaactagtggctgctcaaacgatacaaagtgcatacagaaggtttttgaacaacagaaacaggataactggtgcaattaaaatccagagccactggcgatgctattcagtacgcaagtgtttcatgaaggaaattcaggctattgtaggaatccaaacatcaataagagtattcttgtgctaccaagcttttcaacgccaccgacttgctgcagtactgattcagcgagttgtcagaggatggctggctagaaagagactgttaggttcctcttcactgcgaacctacacaagactttgtgtagtcgaccaaagtcaaaagagaaaatgttatcaaagccttgagttgaacattgtgctagactctgtcataaggctacaaagatgctggaggaagttcctgctgcgtcagtctgtcaaaacatatgtgatctcaattcagtcttttgtccgtggctggttggcacggaagcaactaaaccaaactttccgttgcatcaacatcattcaaagatggtggcgaaaggttcttcaaacgaggaagcgagctgtgattgtcattcagactcgtttccgtggttgggttgcacgacaagatgctattagaactagaaactctatctgtaacatacagagatggtggagaaaggttttgttccttaaattgaggaagcaagcggcgttagttatacaggctcatttccgtggttggatagcacgacaagttgcttttagaactagaaaaagtattactataatacagtcctatgtcaaagcctaccttgtgaggaaggcttcgaagcaagaagttgcacatataagatctagactgcagaagtcatcttcacaggttgatgatagtatgcgcctgatcaacagactggtgtctgcattgtcacaactccatcgctgtcggagcatacacagcattcgtcaaacttgtgcaacattgagtactgctacagagtattccaagaaatgctgcgagaagctggtcgctgctggtgctgtagatatattgctaaagcaaatatatttgctgaaccgtgggattgctgaccaggaggtcttgaagcaagtgttccttactctcaggaacattgctcgatattcaaatcttagacaggtgttagccagcactgcagaatctgttgaaatcatcttccaggaattactgaggaacaaagcagacggattcttcatcgcgtctgatattctaaaaagcctatgtgaatccaaggaaggccgtgaaaccgtccaagcgctgagtcacctcatcaaaaggctgcgcaatctggtgcatgacctggaaaagaaggtagagcttgataagaggaatgggcgcaccggagccgtgaaggcgaccaacctgcggcggcttcgggaggccgccacactctatcatatcctcaccagtggtacttaacgcgtcggcagcatagctagaaaggctaatctgacgttttgttgtacaataatttagtctaagaaggttttcatgtaactggaggtgactacggtgcaattgtcgaaaaccttcctaggtaaccaggatcttctaagttctgttgctgcagttggttttgtgtggtaggtgtgagaatcatcggcttgatgtattggattacctcttataaagagtgaagtcgctgagttaaccgtcctcacgtgtcttggattaaccgccttttatgttctaacaaatcatcagctcttgatgtgattgttagtatcacataccagtaccaaacagaaaaacgagtcatcctattcattaacttgcagaaatggattttctgaaatagtttttttttgcgtaatatataaatctcaaatcgcggaaggc

SEQ ID NO: 69954 - DNA, 1442 bp, Zea Mays
tcttctggtatgaaaacccatcttggagaccagattctgaatcatgggaacaaatgcttattctggttcgagaagcggtatgaatgtgaggagaggattagattctgtttcatcagacaataggatggcaagaaatgaacggagtaatgatcaagcgggtcctcggagaggttgggacaaagggcagggaccctttaggttcggtgagggtccttctgcccgaagtgcatggcgagcatcaaaagatgaagcaacactggaggctattagagtggctggtgaagataatggaaattcgagggccgctgcaagagttgctattcctgaactggatggagaagctttgaatgatggcaaccaaggggacgaaagaggcccactttgggaggcctggactcgtgcgatggatgctgttcatcttgatgatatggactctgcttatgctgaggttctttcaactggtgatgctgaattacttgtaaagttgatggaacaaacgggaccgattattgatcaactttcaaatgaggttgcaaatgaagtcctacatgcagtgggacagtttctcgtggaagaaagcttctatgatgtagcattaaactggcttcagcagaatcctggcttttcatttggtctagaatgatggtccatcagttttactggattgctcaaggttgaagggggaaactgtagtgaagtatgtgataaatattgatactttctttgtcgaacacatgggttcttatttggtgaaacttgtttttacgttctcctttgtttgcccaatgataattatggtttccacctggagctggacagcagttgactgacctggtaatggaaaacggctctggttatctcggaatacctctggatgcaaagcgggacctcttactgggacttcatgaggctaccgtgattgagctttctgatgattgggagggagcaacacccgtacagataatgaagcagctagcttcatcctggcgcatcgacctgcagcaacttatcaattagggttacattgattgtcgatatatgggttaatttgaatatttgaattgttcgtttccctctggttcttgtctggtctttagctattagtattaggaatattatattgggtggggtggaagtggcactgtgttgaaatggattggttgtattggaaaatatggtattgatgttgtctcaccttcattgaggctagggagcaacgaagaaaaattctaggttgggttttagatctccatcctcgtcctggtcctggtgacggaaaaagtttcctgcggggatcccataaactcttgcccgtatttctttcccatttccgctccacgcggggataaatatctgtcgggatcctggtctccgcttaaattataatcgtgacatactttctttgttattaagacaaaatattgtcatttatatacattgtt

SEQ ID NO: 69955 - DNA, 1318 bp, Zea Mays
gtcttctggtatgaaaacccatcttggagaccagattctgaatcatgggaacaaatgcttattctggttcgagaagcggtatgaatgtgaggagaggattagattctgtttcatcagacaataggatggcaagaaatgaacggagtaatgatcaagcgggtcctcggagaggttgggacaaagggcagggaccctttaggttcggtgagggtccttctgcccgaagtgcatggcgagcatcaaaagatgaagcaacactggaggctattagagtggctggtgaagataatggaaattcgagggccgctgcaagagttgctattcctgaactggatggagaagctttgaatgatggcaaccaaggggacgaaagaggcccactttgggaggcctggactcgtgcgatggatgctgttcatcttgatgatatggactctgcttatgctgaggttctttcaactggtgatgctgaattacttgtaaagttgatggaacaaacgggaccgattattgatcaactttcaaatgaggttgcaaatgaagtcctacatgcagtgggacagtttctcgtggaagaaagcttctatgatgtagcattaaactggcttcagcagaatcctggcttttcatttggtctagaatgatggtccatcagttttactggattgctcaaggttgaagggggaaactgtagtgaattgactgacctggtaatggaaaacggctctggttatctcggaatacctctggatgcaaagcgggacctcttactgggacttcatgaggctaccgtgattgagctttctgatgattgggagggagcaacacccgtacagataatgaagcagctagcttcatcctggcgcatcgacctgcagcaacttatcaattagggttacattgattgtcgatatatgggttaatttgaatatttgaattgttcgtttccctctggttcttgtctggtctttagctattagtattaggaatattatattgggtggggtggaagtggcactgtgttgaaatggattggttgtattggaaaatatggtattgatgttgtctcaccttcattgaggctagggagcaacgaagaaaaattctaggttgggttttagatctccatcctcgtcctggtcctggtgacggaaaaagtttcctgcggggatcccataaactcttgcccgtatttctttcccatttccgctccacgcggggataaatatctgtcgggatcctggtctccgcttaaattataatcgtgacatactttctttgttattaagacaaaatattgtcatttatatacattgtt

SEQ ID NO: 69956 - DNA, 4744 bp, Zea Mays
gcgcaggcgcaaacgcaaacgcctcccttcttccctccgttcgttccatcgtcgctccctactccggggcgccctccctcggtttcttcctcgtctcgagctctcgtctagacgtcactgtcctcgcaccgctcccttctccggcatccgagccgtagccctgccctccgcatccacaatttgatgcggagggctcggccgccatgtcgtggggcctcggctggaaacgcagctccgagatcttccacctcacgctcgactatggggactacgacgacaacgacgaccatcagccctcgtccccgtcccctccggcgtcctcttccccttccgcctcggcatcgtcgaccccggtatcctcctcctcgcccaccgccacccgcaacggcgacgtcggcttccgcatcgagctcgaatggtcggcgggggacgacgaggatcaggtcgcgctccgcctccagtcccagctcatggtcgcgctgcccccgccccacgacgccgtctccgtcgacctgatcccgagagacgacggggaggaggaagtggtgcagatcgagatgcgtgtggtcaggaggcgggaggcactgcggtccgtgcgcgtgtcgcgggctcccggatccgcgctgggcagcggcgatggcgcgggggtgctcgcgcgcctcatcagatccaacctcgcgcccgcgcctgccgtggatggccccacagccgccgcgggcgtgccagtgctcgctgatcactggcggcccgtcgccatgctcagcctctgcaactgcggaatgtcggtacttccagttgagttaactcgccttccacttctcgagaagctatatcttgacaacaataaattgtcagttttgccccctgaagttggtgctttgaagaatatggaagtgctgtcagttaacaacaacatgctagtttctgtccctggtcaatgcccaagctccgaattttgcgtttgtttggaaatcctctagagtttcttccagaaattttgccactgcataacctcaggcatctcacacttgcaaatattagaattgaagcagtggaaagtcttaaatctgtcaatgtgcaaatagagactgagaatagttcctacttcatagcggccaggcacaaacttggtgcctttttttctcttgttttccgtttctcttcttgtcaccatcctttgctagcttctgctttggccaaaataatggaagatcgtagcaaccatattgcaattagcaaagaagaaaatgctgtcaggcagcttataagcatgataagcagtgataaccgtcatgtggttgagcaagcatgccttgctatttcatcactggcatctgatatttcttcagcaatgcagctgattaagtgtgacattatgaagcctattgaagctgtactaaagtcatctgacgaagaagaactagtatcagtattgcaagtggtagtcaccttaactttcgtttctgatcatgttgctcaaaagatgttgacgaaagatgtgttgaagtcactgaaagcactttgcggacacaagaactctgaggtgcaacgtctatctctgtttgcagttggcaatttggctttctgcttggagactcggcgcaccctcatgcattctgaaagtttgcgtgaccttttaatccgtttaactatttcacaagaacgtcgtgtcagcaaagcagctgcacgtgctttggcaatcctaggggagaatgagaacttgcgtcgagcaattagaggaaggccagttgcaaagaagggtctacgcattctatcaatggatggtggtggcatgaagggccttgcaacagttcaaatgcttaaacagatagagcaaggaactgggaaacgcatacatgaaatgtttgatctcatatgtggtacgtccactggtggcatgcttgcaatggctcttgggatcaagcagatgactttggatcagtgtgaagaaatatacacaaaacttggaaaacttgtatttgctgaacctatcccaaaggatgaagctgctacgtggaaggagaagcttgatcaacttttcaaaagttcgtcacaaagttttagagtggttgtacatgggtccaagcacagcgcagatcaattcgagaggttactaaaggaaatgtgtgccgatgaagatggtgaccttctaattgaatctgctgtaaaaggcattccaaaggtttttgctgtatccactttagtcagtgtcatgcctgctcaaccgtatatattccgaaactatcagtatcctcctggcactctggaggtatcaccaggaatggcagaaagtccatcaattagtgcaattggtactgctgtttctggtgcgccagttggtattaaacgtggtgccttcatggggagctgcaagcatcgtgtgtgggaagcgataagagcatcatctgcagcaccatattatttggatgatttctctgttgatgccaatcgttggcaagatggagctattgtagccaacaatcctacgatctttgccattagagaagcacaacttttgtggccagatacacgaatagattgtctagtttcgataggatgtggctcagttccaactaagagtcgtagaggtggatggcgctacttggacacagggcaagtgttaatagaaagtgcatgctcagtggagagagttgaagaaactttggatacactgataccaatgcttcctgaaatgcaatatttccgctttaatccagtggatgaacgatgtggtatggaattagatgaaactgatcctgctatctggcttaagttggaagctgcaactgatgagtacattcagaagaattttctggctttcaagaatctttgtgagcttctggtcccaaggtaccaagaggaagaaaagtcatctgatatttacaaatccctttcattttcaaggctgacatcactaaatcaaggtttcagcgaaagtaatcctaccttaggatggaggcgtgtggttttacttgtcgaggcttcctttagtcctgatttcgggaagaaaataaatcatgcacgctcccttgaatctttctgctcccagaatggtattaggttagctctaatgaatagtgcttctgggtttgggaaaccagccactgcacttcctaccccgataacttctcccttgtttactggaagtttcccatctagtccacttctatatagtccagatggcactcaacggatcggtcgaattgacctagttccaccacttagtttggatggccacccaactacaaagtcctcaccaccaacatcaccattgaagtcaaggcagccatcagcacatgttcggtcattgtatgataaactgcagaatatgcctcaagttggtgtaatacacctggctcttcaaaatgattcaaccggttcagtattgagttggcagaatgatgtatttgtggttgctgaacccggagaacttgcagacagatttctgcaatctgtcaaaactagcttgtcaaccttgttgcgtgggcgtaatagaaagggtgcatattccttgtccaagatttcatgtttatctgagctggttgctgaatgtccatcttttgaaatcggtgggatacaccaccgctatataggtcgacaaacacaagtaatggaagataaccaagaaattggcgcatatatgtttaggaggacagtgcctgctgttcacatggcacctgaagatgttcgatggatggttggagcatggagggagagaatcattgtatgcagcggtaagtatggcctcgctcatggcctggtgaaggcattcatggattgtggcgccaaagcagtcatctcatcgtccatcgagcctccggattcccagacaatagtctatcatgggatggatgtcaatggaagcctagagaatgggaagtttgtcatcggggatgaagaagccgatgaatcggaacctgaacctgttagccctgtaagtgactgggaggacagcgacgtggagaaaggtggcaaccatgacatggatgatgaggagtacctggctcagttcatgtgcctgatgtacgataaattgttccgtgagggtgtgactgtggatacagctctgcagcaagctctccgctcgcatcccaagttaaagtacagctgccacttacctcacgttttgtagttagggacattgacaaaccatacaggagtatagcaaaacgggcatggacaacaggaaatgaataaggattgggtggattcatagtggggttatagaggtttatatcgtgttcgttgtgcaggcgtagtgacagagggtacccccttactgaatctttgggcgagaaagcctatgtaaacctgtgtgctcatgagcagagtagttaagctgacgaataaaagcatgatgaagggcattgtaatctggatgtgcatttttgtttcagctaggagaatggacattcgcaatgttttggtgtctcatgacgttcagttgctagcttgcaggcttgcggcgtacagcctgtagttaactatcttcagagacccggtttcatgtatacactatacaggctggcaccttatgctagaaacctgaatgtgtgtactgtagaagttccccattttaccacagtttatgcgatgctggtagtggcatgaactttgctagcccatatgttctgtttaaggccccgtgctgtcttgaaacaaatctctgcattaataaacagtaaagacatcaagtgctaagctggcgattgagcggcggctctgattttcagtaattggcagc

SEQ ID NO: 69957 - DNA, 4596 bp, Zea Mays
gcgcaggcgcaaacgcaaacgcctcccttcttccctccgttcgttccatcgtcgctccctactccggggcgccctccctcggtttcttcctcgtctcgagctctcgtctagacgtcactgtcctcgcaccgctcccttctccggcatccgagccgtagccctgccctccgcatccacaatttgatgcggagggctcggccgccatgtcgtggggcctcggctggaaacgcagctccgagatcttccacctcacgctcgactatggggactacgacgacaacgacgaccatcagccctcgtccccgtcccctccggcgtcctcttccccttccgcctcggcatcgtcgaccccggtatcctcctcctcgcccaccgccacccgcaacggcgacgtcggcttccgcatcgagctcgaatggtcggcgggggacgacgaggatcaggtcgcgctccgcctccagtcccagctcatggtcgcgctgcccccgccccacgacgccgtctccgtcgacctgatcccgagagacgacggggaggaggaagtggtgcagatcgagatgcgtgtggtcaggaggcgggaggcactgcggtccgtgcgcgtgtcgcgggctcccggatccgcgctgggcagcggcgatggcgcgggggtgctcgcgcgcctcatcagatccaacctcgcgcccgcgcctgccgtggatggccccacagccgccgcgggcgtgccagtgctcgctgatcactggcggcccgtcgccatgctcagcctctgcaactgcggaatgtcggtcaatgcccaagctccgaattttgcgtttgtttggaaatcctctagagtttcttccagaaattttgccactgcataacctcaggcatctcacacttgcaaatattagaattgaagcagtggaaagtcttaaatctgtcaatgtgcaaatagagactgagaatagttcctacttcatagcggccaggcacaaacttggtgcctttttttctcttgttttccgtttctcttcttgtcaccatcctttgctagcttctgctttggccaaaataatggaagatcgtagcaaccatattgcaattagcaaagaagaaaatgctgtcaggcagcttataagcatgataagcagtgataaccgtcatgtggttgagcaagcatgccttgctatttcatcactggcatctgatatttcttcagcaatgcagctgattaagtgtgacattatgaagcctattgaagctgtactaaagtcatctgacgaagaagaactagtatcagtattgcaagtggtagtcaccttaactttcgtttctgatcatgttgctcaaaagatgttgacgaaagatgtgttgaagtcactgaaagcactttgcggacacaagaactctgaggtgcaacgtctatctctgtttgcagttggcaatttggctttctgcttggagactcggcgcaccctcatgcattctgaaagtttgcgtgaccttttaatccgtttaactatttcacaagaacgtcgtgtcagcaaagcagctgcacgtgctttggcaatcctaggggagaatgagaacttgcgtcgagcaattagaggaaggccagttgcaaagaagggtctacgcattctatcaatggatggtggtggcatgaagggccttgcaacagttcaaatgcttaaacagatagagcaaggaactgggaaacgcatacatgaaatgtttgatctcatatgtggtacgtccactggtggcatgcttgcaatggctcttgggatcaagcagatgactttggatcagtgtgaagaaatatacacaaaacttggaaaacttgtatttgctgaacctatcccaaaggatgaagctgctacgtggaaggagaagcttgatcaacttttcaaaagttcgtcacaaagttttagagtggttgtacatgggtccaagcacagcgcagatcaattcgagaggttactaaaggaaatgtgtgccgatgaagatggtgaccttctaattgaatctgctgtaaaaggcattccaaaggtttttgctgtatccactttagtcagtgtcatgcctgctcaaccgtatatattccgaaactatcagtatcctcctggcactctggaggtatcaccaggaatggcagaaagtccatcaattagtgcaattggtactgctgtttctggtgcgccagttggtattaaacgtggtgccttcatggggagctgcaagcatcgtgtgtgggaagcgataagagcatcatctgcagcaccatattatttggatgatttctctgttgatgccaatcgttggcaagatggagctattgtagccaacaatcctacgatctttgccattagagaagcacaacttttgtggccagatacacgaatagattgtctagtttcgataggatgtggctcagttccaactaagagtcgtagaggtggatggcgctacttggacacagggcaagtgttaatagaaagtgcatgctcagtggagagagttgaagaaactttggatacactgataccaatgcttcctgaaatgcaatatttccgctttaatccagtggatgaacgatgtggtatggaattagatgaaactgatcctgctatctggcttaagttggaagctgcaactgatgagtacattcagaagaattttctggctttcaagaatctttgtgagcttctggtcccaaggtaccaagaggaagaaaagtcatctgatatttacaaatccctttcattttcaaggctgacatcactaaatcaaggtttcagcgaaagtaatcctaccttaggatggaggcgtgtggttttacttgtcgaggcttcctttagtcctgatttcgggaagaaaataaatcatgcacgctcccttgaatctttctgctcccagaatggtattaggttagctctaatgaatagtgcttctgggtttgggaaaccagccactgcacttcctaccccgataacttctcccttgtttactggaagtttcccatctagtccacttctatatagtccagatggcactcaacggatcggtcgaattgacctagttccaccacttagtttggatggccacccaactacaaagtcctcaccaccaacatcaccattgaagtcaaggcagccatcagcacatgttcggtcattgtatgataaactgcagaatatgcctcaagttggtgtaatacacctggctcttcaaaatgattcaaccggttcagtattgagttggcagaatgatgtatttgtggttgctgaacccggagaacttgcagacagatttctgcaatctgtcaaaactagcttgtcaaccttgttgcgtgggcgtaatagaaagggtgcatattccttgtccaagatttcatgtttatctgagctggttgctgaatgtccatcttttgaaatcggtgggatacaccaccgctatataggtcgacaaacacaagtaatggaagataaccaagaaattggcgcatatatgtttaggaggacagtgcctgctgttcacatggcacctgaagatgttcgatggatggttggagcatggagggagagaatcattgtatgcagcggtaagtatggcctcgctcatggcctggtgaaggcattcatggattgtggcgccaaagcagtcatctcatcgtccatcgagcctccggattcccagacaatagtctatcatgggatggatgtcaatggaagcctagagaatgggaagtttgtcatcggggatgaagaagccgatgaatcggaacctgaacctgttagccctgtaagtgactgggaggacagcgacgtggagaaaggtggcaaccatgacatggatgatgaggagtacctggctcagttcatgtgcctgatgtacgataaattgttccgtgagggtgtgactgtggatacagctctgcagcaagctctccgctcgcatcccaagttaaagtacagctgccacttacctcacgttttgtagttagggacattgacaaaccatacaggagtatagcaaaacgggcatggacaacaggaaatgaataaggattgggtggattcatagtggggttatagaggtttatatcgtgttcgttgtgcaggcgtagtgacagagggtacccccttactgaatctttgggcgagaaagcctatgtaaacctgtgtgctcatgagcagagtagttaagctgacgaataaaagcatgatgaagggcattgtaatctggatgtgcatttttgtttcagctaggagaatggacattcgcaatgttttggtgtctcatgacgttcagttgctagcttgcaggcttgcggcgtacagcctgtagttaactatcttcagagacccggtttcatgtatacactatacaggctggcaccttatgctagaaacctgaatgtgtgtactgtagaagttccccattttaccacagtttatgcgatgctggtagtggcatgaactttgctagcccatatgttctgtttaaggccccgtgctgtcttgaaacaaatctctgcattaataaacagtaaagacatcaagtgctaagctggcgattgagcggcggctctgattttcagtaattggcagc

SEQ ID NO: 69958 - DNA, 4684 bp, Zea Mays
gcgcaggcgcaaacgcaaacgcctcccttcttccctccgttcgttccatcgtcgctccctactccggggcgccctccctcggtttcttcctcgtctcgagctctcgtctagacgtcactgtcctcgcaccgctcccttctccggcatccgagccgtagccctgccctccgcatccacaatttgatgcggagggctcggccgccatgtcgtggggcctcggctggaaacgcagctccgagatcttccacctcacgctcgactatggggactacgacgacaacgacgaccatcagccctcgtccccgtcccctccggcgtcctcttccccttccgcctcggcatcgtcgaccccggtatcctcctcctcgcccaccgccacccgcaacggcgacgtcggcttccgcatcgagctcgaatggtcggcgggggacgacgaggatcaggtcgcgctccgcctccagtcccagctcatggtcgcgctgcccccgccccacgacgccgtctccgtcgacctgatcccgagagacgacggggaggaggaagtggtgcagatcgagatgcgtgtggtcaggaggcgggaggcactgcggtccgtgcgcgtgtcgcgggctcccggatccgcgctgggcagcggcgatggcgcgggggtgctcgcgcgcctcatcagatccaacctcgcgcccgcgcctgccgtggatggccccacagccgccgcgggcgtgccagtgctcgctgatcactggcggcccgtcgccatgctcagcctctgcaactgcggaatgtcggtacttccagttgagttaactcgccttccacttctcgagaagctatatcttgacaacaataaattgtcagttttgccccctgaagttggtgctttgaagaatatggaagtgctgtcagttaacaacaacatgctagtttctgtccctgtagaactgcggcaatgtgttatgctggaggaattatcattagaacataacaagcttgtccgtccactattggatttcaggtcaatgcccaagctccgaattttgcgtttgtttggaaatcctctagagtttcttccagaaattttgccactgcataacctcaggcatctcacacttgcaaatattagaattgaagcagtggaaagtcttaaatctgtcaatgtgcaaatagagactgagaatagttcctacttcatagcggccaggcacaaacttggtgcctttttttctcttgttttccgtttctcttcttgtcaccatcctttgctagcttctgctttggccaaaataatggaagatcgtagcaaccatattgcaattagcaaagaagaaaatgctgtcaggcagcttataagcatgataagcagtgataaccgtcatgtggttgagcaagcatgccttgctatttcatcactggcatctgatatttcttcagcaatgcagctgattaagtgtgacattatgaagcctattgaagctgtactaaagtcatctgacgaagaagaactagtatcagtattgcaagtggtagtcaccttaactttcgtttctgatcatgttgctcaaaagatgttgacgaaagatgtgttgaagtcactgaaagcactttgcggacacaagaactctgaggtgcaacgtctatctctgtttgcagttggcaatttggctttctgcttggagactcggcgcaccctcatgcattctgaaagtttgcgtgaccttttaatccgtttaactatttcacaagaacgtcgtgtcagcaaagcagctgcacgtgctttggcaatcctaggggagaatgagaacttgcgtcgagcaattagaggaaggccagttgcaaagaagggtctacgcattctatcaatggatggtggtggcatgaagggccttgcaacagttcaaatgcttaaacagatagagcaaggaactgggaaacgcatacatgaaatgtttgatctcatatgtggtacgtccactggtggcatgcttgcaatggctcttgggatcaagcagatgactttggatcagtgtgaagaaatatacacaaaacttggaaaacttgtatttgctgaacctatcccaaaggatgaagctgctacgtggaaggagaagcttgatcaacttttcaaaagttcgtcacaaagttttagagtggttgtacatgggtccaagcacagcgcagatcaattcgagaggttactaaaggaaatgtgtgccgatgaagatggtgaccttctaattgaatctgctgtaaaaggcattccaaaggtttttgctgtatccactttagtcagtgtcatgcctgctcaaccgtatatattccgaaactatcagtatcctcctggcactctggaggtatcaccaggaatggcagaaagtccatcaattagtgcaattggtactgctgtttctggtgcgccagttggtattaaacgtggtgccttcatggggagctgcaagcatcgtgtgtgggaagcgataagagcatcatctgcagcaccatattatttggatgatttctctgttgatgccaatcgttggcaagatggagctattgtagccaacaatcctacgatctttgccattagagaagcacaacttttgtggccagatacacgaatagattgtctagtttcgataggatgtggctcagttccaactaagtggatgaacgatgtggtatggaattagatgaaactgatcctgctatctggcttaagttggaagctgcaactgatgagtacattcagaagaattttctggctttcaagaatctttgtgagcttctggtcccaaggtaccaagaggaagaaaagtcatctgatatttacaaatccctttcattttcaaggctgacatcactaaatcaaggtttcagcgaaagtaatcctaccttaggatggaggcgtgtggttttacttgtcgaggcttcctttagtcctgatttcgggaagaaaataaatcatgcacgctcccttgaatctttctgctcccagaatggtattaggttagctctaatgaatagtgcttctgggtttgggaaaccagccactgcacttcctaccccgataacttctcccttgtttactggaagtttcccatctagtccacttctatatagtccagatggcactcaacggatcggtcgaattgacctagttccaccacttagtttggatggccacccaactacaaagtcctcaccaccaacatcaccattgaagtcaaggcagccatcagcacatgttcggtcattgtatgataaactgcagaatatgcctcaagttggtgtaatacacctggctcttcaaaatgattcaaccggttcagtattgagttggcagaatgatgtatttgtggttgctgaacccggagaacttgcagacagatttctgcaatctgtcaaaactagcttgtcaaccttgttgcgtgggcgtaatagaaagggtgcatattccttgtccaagatttcatgtttatctgagctggttgctgaatgtccatcttttgaaatcggtgggatacaccaccgctatataggtcgacaaacacaagtaatggaagataaccaagaaattggcgcatatatgtttaggaggacagtgcctgctgttcacatggcacctgaagatgttcgatggatggttggagcatggagggagagaatcattgtatgcagcggtaagtatggcctcgctcatggcctggtgaaggcattcatggattgtggcgccaaagcagtcatctcatcgtccatcgagcctccggattcccagacaatagtctatcatgggatggatgtcaatggaagcctagagaatgggaagtttgtcatcggggatgaagaagccgatgaatcggaacctgaacctgttagccctgtaagtgactgggaggacagcgacgtggagaaaggtggcaaccatgacatggatgatgaggagtacctggctcagttcatgtgcctgatgtacgataaattgttccgtgagggtgtgactgtggatacagctctgcagcaagctctccgctcgcatcccaagttaaagtacagctgccacttacctcacgttttgtagttagggacattgacaaaccatacaggagtatagcaaaacgggcatggacaacaggaaatgaataaggattgggtggattcatagtggggttatagaggtttatatcgtgttcgttgtgcaggcgtagtgacagagggtacccccttactgaatctttgggcgagaaagcctatgtaaacctgtgtgctcatgagcagagtagttaagctgacgaataaaagcatgatgaagggcattgtaatctggatgtgcatttttgtttcagctaggagaatggacattcgcaatgttttggtgtctcatgacgttcagttgctagcttgcaggcttgcggcgtacagcctgtagttaactatcttcagagacccggtttcatgtatacactatacaggctggcaccttatgctagaaacctgaatgtgtgtactgtagaagttccccattttaccacagtttatgcgatgctggtagtggcatgaactttgctagcccatatgttctgtttaaggccccgtgctgtcttgaaacaaatctctgcattaataaacagtaaagacatcaagtgctaagctggcgattgagcggcggctctgattttcagtaattggcagc

SEQ ID NO: 69959 - DNA, 4963 bp, Zea Mays
ggcagtatacgctgacagctgactggaggacccgatcacccgactgtacgtcgtagattttggaagctcgtaaaacccacaacgaaaagaccaaataaacccagaaattccacagagagaaaaccaaacgaaccaaacaagcgcaggcgcaaacgcaaacgcctcccttcttccctccgttcgttccatcgtcgctccctactccggggcgccctccctcggtttcttcctcgtctcgagctctcgtctagacgtcactgtcctcgcaccgctcccttctccggcatccgagccgtagccctgccctccgcatccacaatttgatgcggagggctcggccgccatgtcgtggggcctcggctggaaacgcagctccgagatcttccacctcacgctcgactatggggactacgacgacaacgacgaccatcagccctcgtccccgtcccctccggcgtcctcttccccttccgcctcggcatcgtcgaccccggtatcctcctcctcgcccaccgccacccgcaacggcgacgtcggcttccgcatcgagctcgaatggtcggcgggggacgacgaggatcaggtcgcgctccgcctccagtcccagctcatggtcgcgctgcccccgccccacgacgccgtctccgtcgacctgatcccgagagacgacggggaggaggaagtggtgcagatcgagatgcgtgtggtcaggaggcgggaggcactgcggtccgtgcgcgtgtcgcgggctcccggatccgcgctgggcagcggcgatggcgcgggggtgctcgcgcgcctcatcagatccaacctcgcgcccgcgcctgccgtggatggccccacagccgccgcgggcgtgccagtgctcgctgatcactggcggcccgtcgccatgctcagcctctgcaactgcggaatgtcggtacttccagttgagttaactcgccttccacttctcgagaagctatatcttgacaacaataaattgtcagttttgccccctgaagttggtgctttgaagaatatggaagtgctgtcagttaacaacaacatgctagtttctgtccctgtagaactgcggcaatgtgttatgctggaggaattatcattagaacataacaagcttgtccgtccactattggatttcaggtcaatgcccaagctccgaattttgcgtttgtttggaaatcctctagagtttcttccagaaattttgccactgcataacctcaggcatctcacacttgcaaatattagaattgaagcagtggaaagtcttaaatctgtcaatgtgcaaatagagactgagaatagttcctacttcatagcggccaggcacaaacttggtgcctttttttctcttgttttccgtttctcttcttgtcaccatcctttgctagcttctgctttggccaaaataatggaagatcgtagcaaccatattgcaattagcaaagaagaaaatgctgtcaggcagcttataagcatgataagcagtgataaccgtcatgtggttgagcaagcatgccttgctatttcatcactggcatctgatatttcttcagcaatgcagctgattaagtgtgacattatgaagcctattgaagctgtactaaagtcatctgacgaagaagaactagtatcagtattgcaagtggtagtcaccttaactttcgtttctgatcatgttgctcaaaagatgttgacgaaagatgtgttgaagtcactgaaagcactttgcggacacaagaactctgaggtgcaacgtctatctctgtttgcagttggcaatttggctttctgcttggagactcggcgcaccctcatgcattctgaaagtttgcgtgaccttttaatccgtttaactatttcacaagaacgtcgtgtcagcaaagcagctgcacgtgctttggcaatcctaggggagaatgagaacttgcgtcgagcaattagaggaaggccagttgcaaagaagggtctacgcattctatcaatggatggtggtggcatgaagggccttgcaacagttcaaatgcttaaacagatagagcaaggaactgggaaacgcatacatgaaatgtttgatctcatatgtggtacgtccactggtggcatgcttgcaatggctcttgggatcaagcagatgactttggatcagtgtgaagaaatatacacaaaacttggaaaacttgtatttgctgaacctatcccaaaggatgaagctgctacgtggaaggagaagcttgatcaacttttcaaaagttcgtcacaaagttttagagtggttgtacatgggtccaagcacagcgcagatcaattcgagaggttactaaaggaaatgtgtgccgatgaagatggtgaccttctaattgaatctgctgtaaaaggcattccaaaggtttttgctgtatccactttagtcagtgtcatgcctgctcaaccgtatatattccgaaactatcagtatcctcctggcactctggaggtatcaccaggaatggcagaaagtccatcaattagtgcaattggtactgctgtttctggtgcgccagttggtattaaacgtggtgccttcatggggagctgcaagcatcgtgtgtgggaagcgataagagcatcatctgcagcaccatattatttggatgatttctctgttgatgccaatcgttggcaagatggagctattgtagccaacaatcctacgatctttgccattagagaagcacaacttttgtggccagatacacgaatagattgtctagtttcgataggatgtggctcagttccaactaagagtcgtagaggtggatggcgctacttggacacagggcaagtgttaatagaaagtgcatgctcagtggagagagttgaagaaactttggatacactgataccaatgcttcctgaaatgcaatatttccgctttaatccagtggatgaacgatgtggtatggaattagatgaaactgatcctgctatctggcttaagttggaagctgcaactgatgagtacattcagaagaattttctggctttcaagaatctttgtgagcttctggtcccaaggtaccaagaggaagaaaagtcatctgatatttacaaatccctttcattttcaaggctgacatcactaaatcaaggtttcagcgaaagtaatcctaccttaggatggaggcgtgtggttttacttgtcgaggcttcctttagtcctgatttcgggaagaaaataaatcatgcacgctcccttgaatctttctgctcccagaatggtattaggttagctctaatgaatagtgcttctgggtttgggaaaccagccactgcacttcctaccccgataacttctcccttgtttactggaagtttcccatctagtccacttctatatagtccagatggcactcaacggatcggtcgaattgacctagttccaccacttagtttggatggccacccaactacaaagtcctcaccaccaacatcaccattgaagtcaaggcagccatcagcacatgttcggtcattgtatgataaactgcagaatatgcctcaagttggtgtaatacacctggctcttcaaaatgattcaaccggttcagtattgagttggcagaatgatgtatttgtggttgctgaacccggagaacttgcagacagatttctgcaatctgtcaaaactagcttgtcaaccttgttgcgtgggcgtaatagaaagggtgcatattccttgtccaagatttcatgtttatctgagctggttgctgaatgtccatcttttgaaatcggtgggatacaccaccgctatataggtcgacaaacacaagtaatggaagataaccaagaaattggcgcatatatgtttaggaggacagtgcctgctgttcacatggcacctgaagatgttcgatggatggttggagcatggagggagagaatcattgtatgcagcggtaagtatggcctcgctcatggcctggtgaaggcattcatggattgtggcgccaaagcagtcatctcatcgtccatcgagcctccggattcccagacaatagtctatcatgggatggatgtcaatggaagcctagagaatgggaagtttgtcatcggggatgaagaagccgatgaatcggaacctgaacctgttagccctgtaagtgactgggaggacagcgacgtggagaaaggtggcaaccatgacatggatgatgaggagtacctggctcagttcatgtgcctgatgtacgataaattgttccgtgagggtgtgactgtggatacagctctgcagcaagctctccgctcgcatcccaagttaaagtacagctgccacttacctcacgttttgtagttagggacattgacaaaccatacaggagtatagcaaaacgggcatggacaacaggaaatgaataaggattgggtggattcatagtggggttatagaggtttatatcgtgttcgttgtgcaggcgtagtgacagagggtacccccttactgaatctttgggcgagaaagcctatgtaaacctgtgtgctcatgagcagagtagttaagctgacgaataaaagcatgatgaagggcattgtaatctggatgtgcatttttgtttcagctaggagaatggacattcgcaatgttttggtgtctcatgacgttcagttgctagcttgcaggcttgcggcgtacagcctgtagttaactatcttcagagacccggtttcatgtatacactatacaggctggcaccttatgctagaaacctgaatgtgtgtactgtagaagttccccattttaccacagtttatgcgatgctggtagtggcatgaactttgctagcccatatgttctgtttaaggccccgtgctgtcttgaaacaaatctctgcattaataaacagtaaagacatcaagtgctaagctggcgattgagcggcggctctgattttcagtaattggcagc

SEQ ID NO: 69960 - DNA, 1691 bp, Zea Mays
ctgctttctctcgtcccccactaccctcagcaaacaaaagaatcctgaaccccttcttcgccgattcctctaacccaactcatctcatctccgctcccaaggcgagatctcaccaccccattcccaaatcaacccaaacaccgaattccaaacctggtgatcgatccaaaaacgccataaatcccaccgaatccaactcaaattcgcaatcaaatgccccagattggcacccaaaccccgcacccagcaattcaaatctgacctcgccattcccgctcctccccctctaccctccgctgcatgctccagactcccatagcaatggcgaccgcgctctccaaatctgccgtcaaatcccaccctaggtcgcctaccacagcgcagccgccgccgaaccccggctcaaacgccgcatgcttggccaaggcagtggaaggggccgggcctgggcccggtgccatcgggatgtttgggaagctcggtcctaggatctgcaagttgctcggtgggcacggcgtgcaagccaaggcggcattgctcggcgtcatgggaagtttggcgcaggtgggagcaatcagttcccataatatgccgcagacactccaaagtatccgtgactgccttgagaatagcgattgggctactagaaaagcagctgctgatacattatgtgtctttgctacacattctggtcacttgataggtgacggaatagctccaaccatttctgctcttgaagcttgccgttttgataaggtaaggcctgtcagagatagcatgattgatgcagtacagttgtggaaaaaactgactggagaagatgcaactgcagacggtagaaataaggatctaggtgatggtgaagggaaactggactcaagacggtcaatgcaaagtggtggaaaatcagaatgctttgatgattgctctccagattcacctagtaacatgaagggaagtagcatagctgaaaaggcagcagttcttttgaagaaaagaccaacattaactgacagggaactgaaccctgagttcttccaaaagcttgagacaaggaaaacagatgacttggcagttgaggttgtagtcccccgcaagactctacaatctcacttacgaagtgaagatgacacagaagaagatgatgatcctgttggtccagttgacagcaatggatcagctgaagatgaagcaaatctaacccaaatgcgtgctagctctaattttcaaaatattcgggatagatgggctagccaaaggggaaatagcaacaaagatgcaaaatctaggacagctgatgttgaagataggggtgaacccagtacaaaagattccacagctgcaaccatgaacattcctggagaaggcccttccgtaaataataaaacaaattggttagcaatacagaggcaattgtcacacttggagagacagcaaactagtctcatgaacatgttgcagtttcatttcctgtttaatgctaagggaaaaagaacctgattggtggcaaagaactaatccaggagtgctaactattaagactgcaaataagacttttctcaactcagtgaactatgtaggtgaaattatcagcctgattggttgccctacatccagtggctgcagcagctgtggaacattaaaccaactaaccaaagcagcagcagcctgcagctgcaaccaagaaaaag

SEQ ID NO: 69961 - DNA, 2337 bp, Zea Mays
caccattgtagttctcctgctttctctcgtcccccactaccctcagcaaacaaaagaatcctgaaccccttcttcgccgattcctctaacccaactcatctcatctccgctcccaaggcgagatctcaccaccccattcccaaatcaacccaaacaccgaattccaaacctggtgatcgatccaaaaacgccataaatcccaccgaatccaactcaaattcgcaatcaaatgccccagattggcacccaaaccccgcacccagcaattcaaatctgacctcgccattcccgctcctccccctctaccctccgctgcatgctccagactcccatagcaatggcgaccgcgctctccaaatctgccgtcaaatcccaccctaggtcgcctaccacagcgcagccgccgccgaaccccggctcaaacgccgcgtcggctggcgtaggggcggctcctccgcctccgccgccgttgtcggccgccgccggtgccacgccgtcgaagaacgccgcgatggtggagctcaagtcgcgcgtgctcgccgcgctggccaagctctcggaccgcgacacgcaccacatcgccgtcgaggagctggaacgcatcatccgcgcgccgccgttgaccgacgccgtgcccatgctgctcaacgcactggcatctgactccccggggttcgcctccccggccaggcgcgagtctctgcgcctcctcgccacgctctgcgcgtcgcacccggacgctgccgcgccgcacctccacaaggtgcttgcccacctagcgcggcggctcaaggacccggcgtccgacacctccgttcgcgacgcgtgccgagacgtcgcgggccagctcgcggcagtgtacctccgccctctgtctgcttccggcgttgccgaggcgggcaatgccaccgtgatgctgttcgtgaagccgctgttcgaggtgatgggggagcagagtaaagcggtgcagggtggagcggccgcatgcttggccaaggcagtggaaggggccgggcctgggcccggtgccatcgggatgtttgggaagctcggtcctaggatctgcaagttgctcggtgggcacggcgtgcaagccaaggcggcattgctcggcgtcatgggaagtttggcgcaggttacaggccaagaatttgctatgaatgttattctctactctggctagggcttccagcgggtccactcctgctttgtggtgggagcaatcagttcccataatatgccgcagacactccaaagtatccgtgactgccttgagaatagcgattgggctactagaaaagcagctgctgatacattatgtgtctttgctacacattctggtcacttgataggtgacggaatagctccaaccatttctgctcttgaagcttgccgttttgataaggtaaggcctgtcagagatagcatgattgatgcagtacagttgtggaaaaaactgactggagaagatgcaactgacggtagaaataaggatctaggtgatggtgaagggaaactggactcaagacggtcaatgcaaagtggtggaaaatcagaatgctttgatgattgctctccagattcacctagtaacatgaagggaagtagcatagctgaaaaggcagcagttcttttgaagaaaagaccaacattaactgacagggaactgaaccctgagttcttccaaaagcttgagacaaggaaaacagatgacttggcagttgaggttgtagtcccccgcaagactctacaatctcacttacgaagtgaagatgacacagaagaagatgatgatcctgttggtccagttgacagcaatggatcagctgaagatgaagcaaatctaacccaaatgcgtgctagctctaattttcaaaatattcgggatagatgggctagccaaaggggaaatagcaacaaagatgcaaaatctaggacagctgatgttgaagataggggtgaacccagtacaaaagattccacagctgcaaccatgaacattcctggagaaggcccttccgtaaataataaaacaaattggttagcaatacagaggcaattgtcacacttggagagacagcaaactagtctcatgaacatgttgcagtttcatttcctgtttaatgctaagggaaaaagaacctgattggtggcaaagaactaatccaggagtgctaactattaagactgcaaataagacttttctcaactcagtgaactatgtaggtgaaattatcagcctgattggttgccctacatccagtggctgcagcagctgtggaacattaaaccaactaaccaaagcagcagcagcctgcagctgcaaccaagaaaaag

SEQ ID NO: 69962 - DNA, 2386 bp, Zea Mays
aaataaaaaatatacttagaaaaataaaaaagtatcttatagattaaaaaggaagaaatataatttagaattacgtataaatacgtaattgagaaaatggacagagtcctgccatgccaggccggtccaccattgtagttctcctgctttctctcgtcccccactaccctcagcaaacaaaagaatcctgaaccccttcttcgccgattcctctaacccaactcatctcatctccgctcccaaggcgagatctcaccaccccattcccaaatcaacccaaacaccgaattccaaacctggtgatcgatccaaaaacgccataaatcccaccgaatccaactcaaattcgcaatcaaatgccccagattggcacccaaaccccgcacccagcaattcaaatctgacctcgccattcccgctcctccccctctaccctccgctgcatgctccagactcccatagcaatggcgaccgcgctctccaaatctgccgtcaaatcccaccctaggtcgcctaccacagcgcagccgccgccgaaccccggctcaaacgccgcgtcggctggcgtaggggcggctcctccgcctccgccgccgttgtcggccgccgccggtgccacgccgtcgaagaacgccgcgatggtggagctcaagtcgcgcgtgctcgccgcgctggccaagctctcggaccgcgacacgcaccacatcgccgtcgaggagctggaacgcatcatccgcgcgccgccgttgaccgacgccgtgcccatgctgctcaacgcactggcatctgactccccggggttcgcctccccggccaggcgcgagtctctgcgcctcctcgccacgctctgcgcgtcgcacccggacgctgccgcgccgcacctccacaaggtgcttgcccacctagcgcggcggctcaaggacccggcgtccgacacctccgttcgcgacgcgtgccgagacgtcgcgggccagctcgcggcagtgtacctccgccctctgtctgcttccggcgttgccgaggcgggcaatgccaccgtgatgctgttcgtgaagccgctgttcgaggtgatgggggagcagagtaaagcggtgcagggtggagcggccgcatgcttggccaaggcagtggaaggggccgggcctgggcccggtgccatcgggatgtttgggaagctcggtcctaggatctgcaagttgctcggtgggcacggcgtgcaagccaaggcggcattgctcggcgtcatgggaagtttggcgcaggtgggagcaatcagttcccataatatgccgcagacactccaaagtatccgtgactgccttgagaatagcgattgggctactagaaaagcagctgctgatacattatgtgtctttgctacacattctggtcacttgataggtgacggaatagctccaaccatttctgctcttgaagcttgccgttttgataaggtaaggcctgtcagagatagcatgattgatgcagtacagttgtggaaaaaactgactggagaagatgcaactgacggtagaaataaggatctaggtgatggtgaagggaaactggactcaagacggtcaatgcaaagtggtggaaaatcagaatgctttgatgattgctctccagattcacctagtaacatgaagggaagtagcatagctgaaaaggcagcagttcttttgaagaaaagaccaacattaactgacagggaactgaaccctgagttcttccaaaagcttgagacaaggaaaacagatgacttggcagttgaggttgtagtcccccgcaagactctacaatctcacttacgaagtgaagatgacacagaagaagatgatgatcctgttggtccagttgacagcaatggatcagctgaagatgaagcaaatctaacccaaatgcgtgctagctctaattttcaaaatattcgggatagatgggctagccaaaggggaaatagcaacaaagatgcaaaatctaggacagctgatgttgaagataggggtgaacccagtacaaaagattccacagctgcaaccatgaacattcctggagaaggcccttccgtaaataataaaacaaattggttagcaatacagaggcaattgtcacacttggagagacagcaaactagtctcatgaacatgttgcagtttcatttcctgtttaatgctaagggaaaaagaacctgattggtggcaaagaactaatccaggagtgctaactattaagactgcaaataagacttttctcaactcagtgaactatgtaggtgaaattatcagcctgattggttgccctacatccagtggctgcagcagctgtggaacattaaaccaactaaccaaagcagcagcagcctgcagctgcaaccaagaaaaag

SEQ ID NO: 69963 - DNA, 1334 bp, Zea Mays
gcatgtgtgagtagaggaagaatgcagaggagaggagatggcaatgaaatggggagtgctcaaaccctagacccacgtcgttggtggaggactaggagggcgtgggcgcgaccgcattgtggactggagactagggatgaaagtaggatggaaaaatcccgaaccgaccgttatcgtataaccgatttggttagttttgtcccgatcgatttcgaacccgatgtaaaaaacgaaaacggaacgagaacgggatatacaaaacggtaaacagaaacgttagagttgttttcccgaccgtttaaccgggatcccgtttttaatcgggatgatcccgttttgttaccgtattttgtaattcgggatcacttcaatacggcctgctccaatccagatatcactctgaggcccagcccatctaagcaaaaacctaacctaggttacctagcgccgtccgctcctctctctgctctctcccagccgtagcaaacgccgtcgtccgccctccacagcttcactgctcgtctgctccagcgaccagcgggcagctgggcgcctgcgccattctcctgctctctctcagccgcgcgtgagccgtagcaaagtagcaaacgccgccgtcctcctgctctctggtctcccagccgtgagccgtagcaaacgccgccgtcctctcctactctctgctcaactgctctctccagcgggcagcggtgccggtccagcctccagagtccagaggccacggctcggcggctccctcccagacggccagcctccacacgccgccgtccgagaccagcccgagaagaagcttgctgcgttgaacactgctgaccacgccgccgtccgagaagaagcttgccgagaaaagcttgctccctctgctctccagtctccattgctggccacggctacagctctgctgtccacggctctgctctccactgctgaccacagaccacctgctgtccgcggaatgaagatatagcaagtggctcctctccatgagcaatatgtcttatgtttgttgagagatgtgagcaaataagtcttggttgtaatagtctatgcgtgctaagtgatctaatgagcaagtgattatgaatatgtgttttaaactttgtattgtgtcatgtgtgctagtagacttatatgacttcttatgttagccaagagcccaagacttatgtgctacattaaactttgtgtgctccggatttacatggcttttatagttttatttgtgtttaattaagacttgtgtttacaattttttatttgccgttaagttttgaatatatggtttcatggtgttgatttaccgaacaaaaata

SEQ ID NO: 69964 - DNA, 1063 bp, Zea Mays
aaacaacagattgtttatacagattcaacggtttcagaaaccagaacatgatacaacgtgtttcacagaaaacaacaactgtcacataggcactgcataagcttgtcacaataggcaccaaatgtccaaccaaactaataaaaagtttaggcaccaaatgtccaaccaagctaataaaaagtaaaacgattttttacagataataaaagatagtcatctccatccacacatatagggaagaaaaatagtgtttgagagagaacaaaactacaatccataagcttatcacataggcactgcagctacatttttcttctcaaagtattcattgcttccaccaagatctctacaagtaagcacaaggaaaaacattaacaactagtataaacgggatagactggaaaaactttagcgcaaggtagcatccaagatgtctttagataaggggataaaccctctattcaactttctacatctaagatgcacatggacataagtgacatactagacatactactcatgatgcatagacataagtagactggaaaactgtgactactcattagtgcccgttggtgctgcaaagtaactaacattgagttacaaccacattagactggaaaaaggaagaaagatgaatggtcgtctctaataacattaaatttgtgttaaaaaacaagaagtgacaacaacaaatgtggtatatatatccgtctatagaaatatactcccttggtccacataaatatacaatcaatatcattctatatttctaaattctgaaactttcagtacttcagtttactggtttagtactctaggaaaactacgacaatctgaattccaaaacttattgtgtgtgcgcggtacgctggttcagaggttcatattcttgtttaaagttttatagattattaatgattatgcactgcatgcatgaaacaaatttgaatttgcttttccaattatattcaagctatgaaatggatggacattggcagaaatagaacattgtccagtgtgctctcttcttagtataagcaacactaaccatgaccaaaac

SEQ ID NO: 69965 - DNA, 356 bp, Zea Mays
gcttcagatggtagctacaataactttggaatgagttacttcaaaatgaagaagccaacttggcagaagttgaacctgcaaccaaattctacttctgccagatattgctgctaggagacctagattcgtagctgttgttggaaaaataaaacctaaagcagcatctgcgtaactgttaactctgcattgagttgcactgaataattacatgtatccgctacgtagcacaaaactttacacgtttttaatcaaaagagcaaggagccagaacaggtgttatatatcttcagctgatcgatcaccttctaccgtttctggaagttcaaagccttggtgccgtacgcgaagaggaagac

SEQ ID NO: 69966 - DNA, 1950 bp, Zea Mays
attcccatcagagaagagataaccacacgtccacacaccacagaccacacgcacggtacagcctctccgcagctgcaggtgcatgctgttctccgacgagaccccaagaactcgccaacctatcccaattcccagccacccttccctctttcacaatgctggcctccgccgccaccgtcaagccctccaccgccgcggccgcggccacctgcaaggcggccttcaagccgctccacctccctcccctccccgccgccgccggcctcaggccgctctccctctccgtctccgcgcgcccgctgtaccgtcaggagcatgtcctggcatccgtggcggtggcggcggctgggcgcaacgaacgcgccacgtcccccgcgccgccgtccgccaccgctgacggcgcccggccgctggaggtcgccgcgccggcggagacgggtcggcgcgccaagatcggggtctacttcgccacgtggtgggcgctgaacgttatcttcaacatctacaacaagaaggtcctcaacgcgttcccgtacccgtggctcacgtcgacgctctccctcgccgccggctccgccatcatgctcgcgtcctgggccaccaggatcgccgaggcgccccagacggacctcgatttctggaaggcgctgactcccgttgcgatcgcgcacacgatcgggcacgtggcggcgacggtgagcatggccaaggtggccgtgtcgttcacgcacatcatcaagagcggggagccggcattcagcgtgctcgtctccaggttcttcctcggcgagcacttcccggcgccggtctacttctccctcctccccatcatcggcggatgcgcgctcgccgccgtcaccgagctcaacttcaacatggattcatgggggcaatgatctccaacctggcattcgtcgtccggaccatcttctccaagaaggggatgaagggcaagtccgtgagcgggatgaactactacgcctgcctctccatcatgtcgctggtgatcctcctgcccttcgccgtcgccatggaggggcccaaggtgtgggcagcgggctggcagacagcagtcgccgagatcggtcccaacttcgtctggtgggtggcggcgcagagcgtgttctaccacctgtacaaccaggtgtcctacatgtccctggacgagatctcgcccctcaccttctccatcggcaacaccatgaagcgcatctccgtcatcgtcgcgtccatcatcatcttccagacgcccgtccagcccatcaacgcgctcggggccgccatcgccatcctcggaaccttcatctactcccaggccaagcagtagccgcccttggcgcgcgcgtctggctctcaggcctcagttcagttcaccgccgaatcagctcggcgctcgaagatataacagattatataacttttgaggatatctacctagcttgtataatagtattattactagatcctctcttctttttttcgtattttcttttttcctaggactagcttattactagatcatttcgtcgtcgtgttttcactatgactatgatggcgtagagagagagagagagatggatccatctaaataaaaaaaaaggtaccggatcttgttttgtctctgtgcttttgttgcctccggatcctgcctgcgtgcggtccagaaaagcaatgcgtggctcagaatgcatcgggcagccattccatgtttgacaaggtcggttaggccatcttgttctcttgctggtgaggtgagcggtgacaggtacagcatgcatggccatggcgggaagcgctgtgcaatttgcacactgagatctttgcgacggattcagcgttggagcgtagctcatcgtcttgttgtgccccttggcagacttttatggccgtccgtgtaacaccgtctcgcaggaggcagatacccctgctcctgatccaatgaacaacctc

SEQ ID NO: 69967 - DNA, 2125 bp, Zea Mays
caggcacagcggcagtgttgatgcgccaccgatccttgtcctgtactgtgtagtgggtagcctccatgggtagcggcaacggcaaggtgtacgccacggtggtgctcatcaggctcatctacgcggggatgcacatcctcaccaaggcggccttcaacgaaggcacgagcaccaccgtcttcgtcttctaccggcacgccgtcgcggccgtcttcctgctgcctttcgccttccttgagatcaggaagcgaccggcgccacctctgaacttgaggctctgcatgaagatctttgctcacggcttctacgggatggctggaacgatcaacctgtactgcattggcctgaaatatgcttcggccacctcttcgtcggctatcttcaacatcgtgccggtggtcgccttcctcttggccgtcatgttcaggatggagaccctgaagctcaggagcgtccatggcatagccaaagcctgcgggatactcctctgcgtcgccggcgtcatcgtgctggcgctgtaccagggcccccagctcaagtcgccgaaccaccagcagctgctgaagcagcacgcgggcgcggccgccgcgcaggtccaccattccagcagggagtgggctctggggatcttcctgatgacaacgtcggtcgtgatatggtctctctggacggtgaagcaggggcccctgctgctggagtacccttccaagctcctgaacacgacgctgcagtgcgcgttcgcgagcgtccagtcgctggccatcgcccttgtcctcgagagggacttgtcgcggtggaagctcgccggccccgtcagcctcgcatccgtgctcttcacgggcgtcgtcgtggcggcgatctcgtactacctgcagatctgggtgatcgagaagagaggtcccgtgttcctgtccatgtcgatgccgctgagcctcgtcttcaccatggccatcgcctccttcctgctgggcgaagacgtcagcctaggaagcattatcggcagcgtcctcctcgtcgccggcctctacaatgtgctgtggggcaagagcagggaggagaagcaacaagcggcggcggcggtgggtgagacgacgacgacgacgacgacgacgacggatggcggccgcgacaacggagacgcggagaagaacgccgcggccgtgcagccggcggacggggaggacgacgacgacgacgacgacgcggcggccaaagtctgacatgcggatcatgcatgcaaagcgatctgccggctccgtgcgtctttgattcacgcaagaaggcgtggctggcggggcgggccaccggtgtttgtgcgatcactgcatgcagaaagggtgcgtgctgggctgctggcaggcactcatcatgtgtatatctgatctgaaagcaggttcttggggggtgtttcagcaccctgtatgcgccaccctttgtgtcatcgcatcaccaagttcagttcattctgggagatgattgggccttccatttcgtaaagacttttcttttttctcgcaatcaagggacctgcttagttttctttagaggaagaatctagtttattagtacgaccaggccaaatcgtgaaacgggtgtggaagctccgacgcaaagatcgagccgactagacagcacagcagggtccagcagcccgaagcaaaacggaagcaaggaaaacgaaagcagagaacaggcagggctatatatcaggctatggcctatgggtgaacctcctcccccagacgacccccacaccgcacacacctttttttttgttttttttttaaatgtggcctgtgaagattgcggaatataacaacaagataagtagatctttattctgtcccgatagaaatgacaactactacctttgtctgttataatttatacgacgttttgaagtgagtaggagagcaaggttgttggacaatgtggttgttatctttttttttaatctcaatacggacaatacatgtgatcgacgacgattaaaataataataatacatatttagttatttaaattttatttttttttataaaattttaaatctgtgatttatttaataatggtcatgtcatccatgatccatgcatatcaataaaaagaatatgacgtaatcgat

SEQ ID NO: 69968 - DNA, 1221 bp, Zea Mays
aggccacacagaggggcaaccaaagtcgttgccgcagaaaaaaataataatcacaagcgttctaccggtggaggacaaccattaatcagcaggctttggggccaaaagaaacggagaggagaaaagcgggggcggcaagcaaccacgggcggagctcggagcgtcctcctcctcccgtctataaattcccctccttttcttcctccatatataggggccatcagatccaagaagagggaagagcaccaaggaccttcggcgcccgttcaggatccacatcttcccgagcgagttcttggttgacctcttcctcttcggaccacctccaaggctcttggtgtagcttgccactctcaccaatcaagttttcatgtctgatctcgacattcagatcccaactgccttcgatcccttcgctgaggccaatgctggggactctggtgcggcagcagggtcaaaggactacgtacacgtgcgcatccagcagcgtaatggtcgcaagagcctgaccaccgtccagggattgaagaaggagttcagctacagcaagatcctcaaagatctcaagaaagagttctgctgcaatggtacagtggtccaggacccagaacttggacaggtcattcagctccagggtgatcagaggaagaacgtctcgaatttcctcgtccagaaggagcacatcaagattcatggtttctgagcaaccgccgggtccatagcaaaccaaccctgcatgcagggccagcttattatatataatatctgaggtggagcatatctatctggctgtgtactgcaagcaggcctagtacgccgcctgcgcgttcctcctattacacatataggcccctccctgcgtgtatgcttgttaccgtcgtgtcgaaccttgtactacgaggctccatcgaacatcgatggcttgcttctttatcagaacatgtttgaataaacgctatttggtaatgctgtgtgtcgaatgcttccgctgaattcaccaagtcctgttggatgggcggtatagtttaccaggctgacttgaagtgtcaaagacaattgatacggttaagcaggtgaagcccgcacagtcgccttgaagcatgctgctggcagaatacgattagatgttaatgaggtgtttgttggaagagtcaattcattcgtgaagcattatgacttcattacgactttattaatttggaggaatgaattcatttcatc

SEQ ID NO: 69969 - DNA, 1194 bp, Zea Mays
aaattatacaatcactggaagataaaaaggacatgaccaaagcaaggctacttaatggcctgagttcagggtgaatctcccaggggttggtgatgtcaacatcaatgcggcattctttaggaagtttgactatagtaattcaatggtcaggttgattggatcggttcctggttatcatgtgggctccaatattaggaagtggggccatatgaaacttaggaatgttctggatgaaatcatgttcaataaacaattttgcaaatcccctctgatttaccagttttcttccctggggtcacttgatgagaaatggatgagtgaatttgcatgctcgctgtcagctggtaaatcagatgatggatcacagctaggaatcgggaaaccactgattgtctggcctacggtggaggatgttcggtgctcgatagagggttatgcagctggtagttgcattccaagtcctcaaaagaatgttgagagagacttcttgaagaaatattggtccaggtggaaagcggatcatgtaggtcgttgtcgggctatgcctcacataaaaacctttactcgttacagtggccaaaacattgcatggtttctgcttacctcagcaaatttaagcaaagctgcttggggcgcgctacagaagaacaacacacagctaatgatacgttcatatgagctaggtgtattgttcttgccccaaacactccaatcagtaccacaattttcatgcacggaaaagagccgctcaatcagggatggcgtcgcccttggcaagacgatcaagaccaagctggtcactctttgctggaaaggtgacgaagaggatccatctattgtgagattgcctgtgccataccagcttcctccacaaccttatggcacacaagatgtcccttggtcgtgggatcggaggtacacaaagaaggatgtgtatggttccgtctggccacgatatggctagcctgtgatttggttttatttatatcccagaaaaagatgattcctaaccctgttactgttcgggtcggtttgaaccatcgggcagcccctctcgttctgtgaccctgctttcatggccactcgaccatcagtggcgagaattgtgggatacgatattttcatctggttgaagctatgatattgattgatgcgtgaacaaaatgccattggttgcttgctactgcgttgttt

SEQ ID NO: 69970 - DNA, 2514 bp, Zea Mays
cgctttctccctgtctcctcgacgccaccgccgccaccgcctgggcacctcccccggcctccgacgctgctaaccgctcgacgtcccgccacctccacaacgcagttgggcgcgcttccagcctccgccggaccggcgagctccggagtcactcgaactctcgaagaacagagtgtccatggaatgatttaaagatggcggcaccactgccttcgtcttgcacatctcttgcacactctcctagggtttagggtctagactcaaaccccttctcgaagactaccatatggcgtccgcatctcgagtgaggcttggcactctagttccccttaccaaggacaatgctggctcatcaaatggatctgtatcaagcattcctatattccaggggcccaatgtagtcgggagggatcatttggttgtcgtcgacaagaggatcagccgcaagcatctgagcctccacgcctctactgatggctccattgaagtagtagtggaaggtccaaaccctataattgtgcgatcgaagggacagaggaggaaggtttgtgctaaagagacagccaagattgctcatggtgatgtcctagaactgattcctggtgattatttcgtgaagtacgtggacatgggtgatgaacatgtaccaatgcatttgagcgacttaatgaagggtaagaggtatagtgaggaacatggcgcagcagtcaagaggattcgacagattatggaagatgaggctttggcaaaaacactacaggaaagctttgcagcagatgatgcagctgtttctggcatgccttctggccaaaaaataagttcacatgacagtgccggttcttccgaaagaaataatgacagaacacactctgttggtcctttgaaagatatgctccctttgacttttcggctcatgcatgtccaaggtcttccatcatggactaacacttcatcagttaccattcaagatgtcatacagggtgaagtactgcttgctgtactttcaaattacatggtggacattgattggttgcttactgcgtgcccaagtttgaggaaggttccacatgtcctggttctacatgggcaagatggtgcttcattagagcttatgaagaagctgaagcctgcaaattggatccttcacaggcctccactcccaatttcatttggaacacaccattctaaggctatgttgcttgtgtatcctcaaggaattcgaattgttgtgcacacagcaaatttgatacatgttgactggaattacaaaagtcagggactatggatgcaagattttccctggaaagacacagtcgatatgaataaaaaaacagcctttgagaatgatctagttgattatctaagtgcacttaagtggcctgagttcagggtgaatctcccaggggttggtgatgtcaacatcaatgcggcattctttaggaagtttgactatagtaattcaatggtcaggttgattggatcggttcctggttatcatgtgggctccaatattaggaagtggggccatatgaaacttaggaatgttctggatgaaatcatgttcaataaacaattttgcaaatcccctctgatttaccagttttcttccctggggtcacttgatgagaaatggatgagtgaatttgcatgctcgctgtcagctggtaaatcagatgatggatcacagctaggaatcgggaaaccactgattgtctggcctacggtggaggatgttcggtgctcgatagagggttatgcagctggtagttgcattccaagtcctcaaaagaatgttgagagagacttcttgaagaaatattggtccaggtggaaagcggatcatgtaggtcgttgtcgggctatgcctcacataaaaacctttactcgttacagtggccaaaacattgcatggtttctgcttacctcagcaaatttaagcaaagctgcttggggcgcgctacagaagaacaacacacagctaatgatacgttcatatgagctaggtgtattgttcttgccccaaacactccaatcagtaccacaattttcatgcacggaaaagagccgctcaatcagggatggcgtcgcccttggcaagacgatcaagaccaagctggtcactctttgctggaaaggtgacgaagaggatccatctattgtgagattgcctgtgccataccagcttcctccacaaccttatggcacacaagatgtcccttggtcgtgggatcggaggtacacaaagaaggatgtgtatggttccgtctggccacgatatggctagcctgtgatttggttttatttatatcccagaaaaagatgattcctaaccctgttactgttcgggtcggtttgaaccatcgggcagcccctctcgttctgtgaccctgctttcatggccactcgaccatcagtggcgagaattgtgggatacgatattttcatctggttgaagctatgatattgattgatgcgtgaacaaaatgccattggttgcttgctactgcgttgttt

SEQ ID NO: 69971 - DNA, 2446 bp, Zea Mays
cgctttctccctgtctcctcgacgccaccgccgccaccgcctgggcacctcccccggcctccgacgctgctaaccgctcgacgtcccgccacctccacaacgcagttgggcgcgcttccagcctccgccggaccggcgagctccggaggtctcagtcactcgaactctcgaagaacagagtgtccatggaatgatttaaagatggcggcaccactgccttcgtcttgcacatctcttgcacactctcctagggtttagggtctagactcaaaccccttctcgaagactaccatatggcgtccgcatctcgagtgaggcttggcactctagttccccttaccaaggacaatgctggctcatcaaatggatctgtatcaagcattcctatattccaggggcccaatgtagtcgggagggatcatttggttgtcgtcgacaagaggatcagccgcaagcatctgagcctccacgcctctactgatggctccattgaagtagtagtggaaggtccaaaccctataattgtgcgatcgaagggacagaggaggaagtacgtggacatgggtgatgaacatgtaccaatgcatttgagcgacttaatgaagggtaagaggtatagtgaggaacatggcgcagcagtcaagaggattcgacagattatggaagatgaggctttggcaaaaacactacaggaaagctttgcagcagatgatgcagctgtttctggcatgccttctggccaaaaaataagttcacatgacagtgccggttcttccgaaagaaataatgacagaacacactctgttggtcctttgaaagatatgctccctttgacttttcggctcatgcatgtccaaggtcttccatcatggactaacacttcatcagttaccattcaagatgtcatacagggtgaagtactgcttgctgtactttcaaattacatggtggacattgattggttgcttactgcgtgcccaagtttgaggaaggttccacatgtcctggttctacatgggcaagatggtgcttcattagagcttatgaagaagctgaagcctgcaaattggatccttcacaggcctccactcccaatttcatttggaacacaccattctaaggctatgttgcttgtgtatcctcaaggaattcgaattgttgtgcacacagcaaatttgatacatgttgactggaattacaaaagtcagggactatggatgcaagattttccctggaaagacacagtcgatatgaataaaaaaacagcctttgagaatgatctagttgattatctaagtgcacttaagtggcctgagttcagggtgaatctcccaggggttggtgatgtcaacatcaatgcggcattctttaggaagtttgactatagtaattcaatggtcaggttgattggatcggttcctggttatcatgtgggctccaatattaggaagtggggccatatgaaacttaggaatgttctggatgaaatcatgttcaataaacaattttgcaaatcccctctgatttaccagttttcttccctggggtcacttgatgagaaatggatgagtgaatttgcatgctcgctgtcagctggtaaatcagatgatggatcacagctaggaatcgggaaaccactgattgtctggcctacggtggaggatgttcggtgctcgatagagggttatgcagctggtagttgcattccaagtcctcaaaagaatgttgagagagacttcttgaagaaatattggtccaggtggaaagcggatcatgtaggtcgttgtcgggctatgcctcacataaaaacctttactcgttacagtggccaaaacattgcatggtttctgcttacctcagcaaatttaagcaaagctgcttggggcgcgctacagaagaacaacacacagctaatgatacgttcatatgagctaggtgtattgttcttgccccaaacactccaatcagtaccacaattttcatgcacggaaaagagccgctcaatcagggatggcgtcgcccttggcaagacgatcaagaccaagctggtcactctttgctggaaaggtgacgaagaggatccatctattgtgagattgcctgtgccataccagcttcctccacaaccttatggcacacaagatgtcccttggtcgtgggatcggaggtacacaaagaaggatgtgtatggttccgtctggccacgatatggctagcctgtgatttggttttatttatatcccagaaaaagatgattcctaaccctgttactgttcgggtcggtttgaaccatcgggcagcccctctcgttctgtgaccctgctttcatggccactcgaccatcagtggcgagaattgtgggatacgatattttcatctggttgaagctatgatattgattgatgcgtgaacaaaatgccattggttgcttgctactgcgttgttt

SEQ ID NO: 69972 - DNA, 2533 bp, Zea Mays
cgctttctccctgtctcctcgacgccaccgccgccaccgcctgggcacctcccccggcctccgacgctgctaaccgctcgacgtcccgccacctccacaacgcagttgggcgcgcttccagcctccgccggaccggcgagctccggaggtctcagagtgtccatggaatgatttaaagatggcggcaccactgccttcgtcttgcacatctcttgcacactctcctagggtttagggtctagactcaaaccccttctcgaagactaccatatggcgtccgcatctcgagtgaggcttggcactctagttccccttaccaaggacaatgctggctcatcaaatggatctgtatcaagcattcctatattccaggggcccaatgtagtcgggagggatcatttggttgtcgtcgacaagaggatcagccgcaagcatctgagcctccacgcctctactgatggctccattgaagtagtagtggaaggtccaaaccctataattgtgcgatcgaagggacagaggaggaaggtttgtgctaaagagacagccaagattgctcatggtgatgtcctagaactgattcctggtgattatttcgtgaagtacgtggacatgggtgatgaacatgtaccaatgcatttgagcgacttaatgaagggtaagaggtatagtgaggaacatggcgcagcagtcaagaggattcgacagattatggaagatgaggctttggcaaaaacactacaggaaagctttgcagcagatgatgcagctgtttctggcatgccttctggccaaaaaataagttcacatgacagtgccggttcttccgaaagaaataatgacagaacacactctgttggtcctttgaaagatatgctccctttgacttttcggctcatgcatgtccaaggtcttccatcatggactaacacttcatcagttaccattcaagatgtcatacagggtgaagtactgcttgctgtactttcaaattacatggtggacattgattggttgcttactgcgtgcccaagtttgaggaaggttccacatgtcctggttctacatgggcaagatggtgcttcattagagcttatgaagaagctgaagcctgcaaattggatccttcacaggcctccactcccaatttcatttggaacacaccattctaaggctatgttgcttgtgtatcctcaaggaattcgaattgttgtgcacacagcaaatttgatacatgttgactggaattacaaaagtcagggactatggatgcaagattttccctggaaagacacagtcgatatgaataaaaaaacagcctttgagaatgatctagttgattatctaagtgcacttaaggtagtaaagtgaattttcactaaatgacaatgcagtggcctgagttcagggtgaatctcccaggggttggtgatgtcaacatcaatgcggcattctttaggaagtttgactatagtaattcaatggtcaggttgattggatcggttcctggttatcatgtgggctccaatattaggaagtggggccatatgaaacttaggaatgttctggatgaaatcatgttcaataaacaattttgcaaatcccctctgatttaccagttttcttccctggggtcacttgatgagaaatggatgagtgaatttgcatgctcgctgtcagctggtaaatcagatgatggatcacagctaggaatcgggaaaccactgattgtctggcctacggtggaggatgttcggtgctcgatagagggttatgcagctggtagttgcattccaagtcctcaaaagaatgttgagagagacttcttgaagaaatattggtccaggtggaaagcggatcatgtaggtcgttgtcgggctatgcctcacataaaaacctttactcgttacagtggccaaaacattgcatggtttctgcttacctcagcaaatttaagcaaagctgcttggggcgcgctacagaagaacaacacacagctaatgatacgttcatatgagctaggtgtattgttcttgccccaaacactccaatcagtaccacaattttcatgcacggaaaagagccgctcaatcagggatggcgtcgcccttggcaagacgatcaagaccaagctggtcactctttgctggaaaggtgacgaagaggatccatctattgtgagattgcctgtgccataccagcttcctccacaaccttatggcacacaagatgtcccttggtcgtgggatcggaggtacacaaagaaggatgtgtatggttccgtctggccacgatatggctagcctgtgatttggttttatttatatcccagaaaaagatgattcctaaccctgttactgttcgggtcggtttgaaccatcgggcagcccctctcgttctgtgaccctgctttcatggccactcgaccatcagtggcgagaattgtgggatacgatattttcatctggttgaagctatgatattgattgatgcgtgaacaaaatgccattggttgcttgctactgcgttgttt

SEQ ID NO: 69973 - DNA, 2142 bp, Zea Mays
cgctttctccctgtctcctcgacgccaccgccgccaccgcctgggcacctcccccggcctccgacgctgctaaccgctcgacgtcccgccacctccacaacgcagttgggcgcgcttccagcctccgccggaccggcgagctccggaggtctcaggaaggtccaaaccctataattgtgcgatcgaagggacagaggaggaaggtttgtgctaaagagacagccaagattgctcatggtgatgtcctagaactgattcctggtgattatttcgtgaagtacgtggacatgggtgatgaacatgtaccaatgcatttgagcgacttaatgaagggtaagaggtatagtgaggaacatggcgcagcagtcaagaggattcgacagattatggaagatgaggctttggcaaaaacactacagatgatgcagctgtttctggcatgccttctggccaaaaaataagttcacatgacagtgccggttcttccgaaagaaataatgacagaacacactctgttggtcctttgaaagatatgctccctttgacttttcggctcatgcatgtccaaggtcttccatcatggactaacacttcatcagttaccattcaagatgtcatacagggtgaagtactgcttgctgtactttcaaattacatggtggacattgattggttgcttactgcgtgcccaagtttgaggaaggttccacatgtcctggttctacatgggcaagatggtgcttcattagagcttatgaagaagctgaagcctgcaaattggatccttcacaggcctccactcccaatttcatttggaacacaccattctaaggctatgttgcttgtgtatcctcaaggaattcgaattgttgtgcacacagcaaatttgatacatgttgactggaattacaaaagtcagggactatggatgcaagattttccctggaaagacacagtcgatatgaataaaaaaacagcctttgagaatgatctagttgattatctaagtgcacttaagtggcctgagttcagggtgaatctcccaggggttggtgatgtcaacatcaatgcggcattctttaggaagtttgactatagtaattcaatggttgattggatcggttcctggttatcatgtgggctccaatattaggaagtggggccatatgaaacttaggaatgttctggatgaaatcatgttcaataaacaattttgcaaatcccctctgatttaccagttttcttccctggggtcacttgatgagaaatggatgagtgaatttgcatgctcgctgtcagctggtaaatcagatgatggatcacagctaggaatcgggaaaccactgattgtctggcctacggtggaggatgttcggtgctcgatagagctggtagttgcattccaagtcctcaaaagaatgttgagagagacttcttgaagaaatattggtccaggtggaaagcggatcatgtaggtcgttgtcgggctatgcctcacataaaaacctttactcgttacagtggccaaaacattgcatggtttctgcttacctcagcaaatttaagcaaagctgcttggggcgcgctacagaagaacaacacacagctaatgatacgttcatatgagctaggtgtattgttcttgccccaaacactccaatcagtaccacaattttcatgcacggaaaagagccgctcaatcagggatggcgtcgcccttggcaagacgatcaagaccaagctggtcactctttgctggaaaggtgacgaagaggatccatctattgtgagattgcctgtgccataccagcttcctccacaaccttatggcacacaagatgtcccttggtcgtgggatcggaggtacacaaagaaggatgtgtatggttccgtctggccacgatatggctagcctgtgatttggttttatttatatcccagaaaaagatgattcctaaccctgttactgttcgggtcggtttgaaccatcgggcagcccctctcgttctgtgaccctgctttcatggccactcgaccatcagtggcgagaattgtgggatacgatattttcatctggttgaagctatgatattgattgatgcgtgaacaaaatgccattggttgcttgctactgcgttgttt

SEQ ID NO: 69974 - DNA, 2423 bp, Zea Mays
cgctttctccctgtctcctcgacgccaccgccgccaccgcctgggcacctcccccggcctccgacgctgctaaccgctcgacgtcccgccacctccacaacgcagttgggcgcgcttccagcctccgccggaccggcgagctccggaggtctcagagtgtccatggaatgatttaaagatggcggcaccactgccttcgtcttgcacatctcttgcacactctcctagggtttagggtctagactcaaaccccttctcgaagactaccatatggcgtccgcatctcgagtgaggcttggcactctagttccccttaccaaggacaatgctggctcatcaaatggatctgtatcaagcattcctatattccaggggcccaatgtagtcgggagggatcatttggttgtcgtcgacaagaggatcagccgcaagcatctgagcctccacgcctctactgatggctccattgaagtagtagtggaaggtccaaaccctataattgtgcgatcgaagggacagaggaggaagtacgtggacatgggtgatgaacatgtaccaatgcatttgagcgacttaatgaagggtaagaggtatagtgaggaacatggcgcagcagtcaagaggattcgacagattatggaagatgaggctttggcaaaaacactacaggaaagctttgcagcagatgatgcagctgtttctggcatgccttctggccaaaaaataagttcacatgacagtgccggttcttccgaaagaaataatgacagaacacactctgttggtcctttgaaagatatgctccctttgacttttcggctcatgcatgtccaaggtcttccatcatggactaacacttcatcagttaccattcaagatgtcatacagggtgaagtactgcttgctgtactttcaaattacatggtggacattgattggttgcttactgcgtgcccaagtttgaggaaggttccacatgtcctggttctacatgggcaagatggtgcttcattagagcttatgaagaagctgaagcctgcaaattggatccttcacaggcctccactcccaatttcatttggaacacaccattctaaggctatgttgcttgtgtatcctcaaggaattcgaattgttgtgcacacagcaaatttgatacatgttgactggaattacaaaagtcagggactatggatgcaagattttccctggaaagacacagtcgatatgaataaaaaaacagcctttgagaatgatctagttgattatctaagtgcacttaagtggcctgagttcagggtgaatctcccaggggttggtgatgtcaacatcaatgcggcattctttaggaagtttgactatagtaattcaatggtcaggttgattggatcggttcctggttatcatgtgggctccaatattaggaagtggggccatatgaaacttaggaatgttctggatgaaatcatgttcaataaacaattttgcaaatcccctctgatttaccagttttcttccctggggtcacttgatgagaaatggatgagtgaatttgcatgctcgctgtcagctggtaaatcagatgatggatcacagctaggaatcgggaaaccactgattgtctggcctacggtggaggatgttcggtgctcgatagagggttatgcagctggtagttgcattccaagtcctcaaaagaatgttgagagagacttcttgaagaaatattggtccaggtggaaagcggatcatgtaggtcgttgtcgggctatgcctcacataaaaacctttactcgttacagtggccaaaacattgcatggtttctgcttacctcagcaaatttaagcaaagctgcttggggcgcgctacagaagaacaacacacagctaatgatacgttcatatgagctaggtgtattgttcttgccccaaacactccaatcagtaccacaattttcatgcacggaaaagagccgctcaatcagggatggcgtcgcccttggcaagacgatcaagaccaagctggtcactctttgctggaaaggtgacgaagaggatccatctattgtgagattgcctgtgccataccagcttcctccacaaccttatggcacacaagatgtcccttggtcgtgggatcggaggtacacaaagaaggatgtgtatggttccgtctggccacgatatggctagcctgtgatttggttttatttatatcccagaaaaagatgattcctaaccctgttactgttcgggtcggtttgaaccatcgggcagcccctctcgttctgtgaccctgctttcatggccactcgaccatcagtggcgagaattgtgggatacgatattttcatctggttgaagctatgatattgattgatgcgtgaacaaaatgccattggttgcttgctactgcgttgttt

SEQ ID NO: 69975 - DNA, 2472 bp, Zea Mays
cgctttctccctgtctcctcgacgccaccgccgccaccgcctgggcacctcccccggcctccgacgctgctaaccgctcgacgtcccgccacctccacaacgcagttgggcgcgcttccagcctccgccggaccggcgagctccggaggtctcagagtgtccatggaatgatttaaagatggcggcaccactgccttcgtcttgcacatctcttgcacactctcctagggtttagggtctagactcaaaccccttctcgaagactaccatatggcgtccgcatctcgagtgaggcttggcactctagttccccttaccaaggacaatgctggctcatcaaatggatctgtatcaagcattcctatattccaggggcccaatgtagtcgggagggatcatttggttgtcgtcgacaagaggatcagccgcaagcatctgagcctccacgcctctactgatggctccattgaagtagtagtggaaggtccaaaccctataattgtgcgatcgaagggacagaggaggaaggtttgtgctaaagagacagccaagattgctcatggtgatgtcctagaactgattcctggtgattatttcgtgaagtacgtggacatgggtgatgaacatgtaccaatgcatttgagcgacttaatgaagggtaagaggtatagtgaggaacatggcgcagcagtcaagaggattcgacagattatggaagatgaggctttggcaaaaacactacagatgatgcagctgtttctggcatgccttctggccaaaaaataagttcacatgacagtgccggttcttccgaaagaaataatgacagaacacactctgttggtcctttgaaagatatgctccctttgacttttcggctcatgcatgtccaaggtcttccatcatggactaacacttcatcagttaccattcaagatgtcatacagggtgaagtactgcttgctgtactttcaaattacatggtggacattgattggttgcttactgcgtgcccaagtttgaggaaggttccacatgtcctggttctacatgggcaagatggtgcttcattagagcttatgaagaagctgaagcctgcaaattggatccttcacaggcctccactcccaatttcatttggaacacaccattctaaggctatgttgcttgtgtatcctcaaggaattcgaattgttgtgcacacagcaaatttgatacatgttgactggaattacaaaagtcagggactatggatgcaagattttccctggaaagacacagtcgatatgaataaaaaaacagcctttgagaatgatctagttgattatctaagtgcacttaagtggcctgagttcagggtgaatctcccaggggttggtgatgtcaacatcaatgcggcattctttaggaagtttgactatagtaattcaatggtcaggttgattggatcggttcctggttatcatgtgggctccaatattaggaagtggggccatatgaaacttaggaatgttctggatgaaatcatgttcaataaacaattttgcaaatcccctctgatttaccagttttcttccctggggtcacttgatgagaaatggatgagtgaatttgcatgctcgctgtcagctggtaaatcagatgatggatcacagctaggaatcgggaaaccactgattgtctggcctacggtggaggatgttcggtgctcgatagagctggtagttgcattccaagtcctcaaaagaatgttgagagagacttcttgaagaaatattggtccaggtggaaagcggatcatgtaggtcgttgtcgggctatgcctcacataaaaacctttactcgttacagtggccaaaacattgcatggtttctgcttacctcagcaaatttaagcaaagctgcttggggcgcgctacagaagaacaacacacagctaatgatacgttcatatgagctaggtgtattgttcttgccccaaacactccaatcagtaccacaattttcatgcacggaaaagagccgctcaatcagggatggcgtcgcccttggcaagacgatcaagaccaagctggtcactctttgctggaaaggtgacgaagaggatccatctattgtgagattgcctgtgccataccagcttcctccacaaccttatggcacacaagatgtcccttggtcgtgggatcggaggtacacaaagaaggatgtgtatggttccgtctggccacgatatggctagcctgtgatttggttttatttatatcccagaaaaagatgattcctaaccctgttactgttcgggtcggtttgaaccatcgggcagcccctctcgttctgtgaccctgctttcatggccactcgaccatcagtggcgagaattgtgggatacgatattttcatctggttgaagctatgatattgattgatgcgtgaacaaaatgccattggttgcttgctactgcgttgttt

SEQ ID NO: 69976 - DNA, 2516 bp, Zea Mays
cgctttctccctgtctcctcgacgccaccgccgccaccgcctgggcacctcccccggcctccgacgctgctaaccgctcgacgtcccgccacctccacaacgcagttgggcgcgcttccagcctccgccggaccggcgagctccggaggtctcagtcactcgaactctcgaagaacagagtgtccatggaatgatttaaagatggcggcaccactgccttcgtcttgcacatctcttgcacactctcctagggtttagggtctagactcaaaccccttctcgaagactaccatatggcgtccgcatctcgagtgaggcttggcactctagttccccttaccaaggacaatgctggctcatcaaatggatctgtatcaagcattcctatattccaggggcccaatgtagtcgggagggatcatttggttgtcgtcgacaagaggatcagccgcaagcatctgagcctccacgcctctactgatggctccattgaagtagtagtggaaggtccaaaccctataattgtgcgatcgaagggacagaggaggaaggtttgtgctaaagagacagccaagattgctcatggtgatgtcctagaactgattcctggtgattatttcgtgaagtacgtggacatgggtgatgaacatgtaccaatgcatttgagcgacttaatgaagggtaagaggtatagtgaggaacatggcgcagcagtcaagaggattcgacagattatggaagatgaggctttggcaaaaacactacaggaaagctttgcagcagatgatgcagctgtttctggcatgccttctggccaaaaaataagttcacatgacagtgccggttcttccgaaagaaataatgacagaacacactctgttggtcctttgaaagatatgctccctttgacttttcggctcatgcatgtccaaggtcttccatcatggactaacacttcatcagttaccattcaagatgtcatacagggtgaagtactgcttgctgtactttcaaattacatggtggacattgattggttgcttactgcgtgcccaagtttgaggaaggttccacatgtcctggttctacatgggcaagatggtgcttcattagagcttatgaagaagctgaagcctgcaaattggatccttcacaggcctccactcccaatttcatttggaacacaccattctaaggctatgttgcttgtgtatcctcaaggaattcgaattgttgtgcacacagcaaatttgatacatgttgactggaattacaaaagtcagggactatggatgcaagattttccctggaaagacacagtcgatatgaataaaaaaacagcctttgagaatgatctagttgattatctaagtgcacttaagtggcctgagttcagggtgaatctcccaggggttggtgatgtcaacatcaatgcggcattctttaggaagtttgactatagtaattcaatggttgattggatcggttcctggttatcatgtgggctccaatattaggaagtggggccatatgaaacttaggaatgttctggatgaaatcatgttcaataaacaattttgcaaatcccctctgatttaccagttttcttccctggggtcacttgatgagaaatggatgagtgaatttgcatgctcgctgtcagctggtaaatcagatgatggatcacagctaggaatcgggaaaccactgattgtctggcctacggtggaggatgttcggtgctcgatagagggttatgcagctggtagttgcattccaagtcctcaaaagaatgttgagagagacttcttgaagaaatattggtccaggtggaaagcggatcatgtaggtcgttgtcgggctatgcctcacataaaaacctttactcgttacagtggccaaaacattgcatggtttctgcttacctcagcaaatttaagcaaagctgcttggggcgcgctacagaagaacaacacacagctaatgatacgttcatatgagctaggtgtattgttcttgccccaaacactccaatcagtaccacaattttcatgcacggaaaagagccgctcaatcagggatggcgtcgcccttggcaagacgatcaagaccaagctggtcactctttgctggaaaggtgacgaagaggatccatctattgtgagattgcctgtgccataccagcttcctccacaaccttatggcacacaagatgtcccttggtcgtgggatcggaggtacacaaagaaggatgtgtatggttccgtctggccacgatatggctagcctgtgatttggttttatttatatcccagaaaaagatgattcctaaccctgttactgttcgggtcggtttgaaccatcgggcagcccctctcgttctgtgaccctgctttcatggccactcgaccatcagtggcgagaattgtgggatacgatattttcatctggttgaagctatgatattgattgatgcgtgaacaaaatgccattggttgcttgctactgcgttgttt

SEQ ID NO: 69977 - DNA, 794 bp, Zea Mays
agtcagctcaacatgacaagttgcagtagtccagcgtgggaacgctgatcctcctctacttcacgctatccatgagcagggcggacaccagtagtggcggcgccagcgacgctcggtgagacgccggcggtcgaaagcgaagggggcatttttgcctcgtctgagaattttcaaacttgcaaagattgacaagaatcaatacaagtagggccaggcatatcgacggtgaagagatcgagccggctggggattttgtggacaagtttgtgatggtagacatacttgtttcttcttgtattatctctctctctctctccttttttttcggattctctcaaaaagggatacatgtcgctttacagcgtaacagataatactgaaatttttactcccctctgatgctaaaaacacaaccaaaccattttcgccacatgtcttaacagggatggccaattgtctttgagctcggatgccgttcattcaacagtggtgtgtgtgtatttgttccctgaacctaacctcaacgaacaaacaaaccatgttgcaaatcacaaggggtgatccaagataatttgggaccctctatgcacactggcattaagaacaagttcaataataaagtcaagcgcttcactattgagtcaaattatagaatagtagtctcctaattgtgcataagaatttttttattgttaatttacccatgttccactttctctttctcctcacatcgttgtgttgttgagtggtggcccaccactatatagactctcgtgtccaacttagggtttgtt

SEQ ID NO: 69978 - DNA, 1258 bp, Zea Mays
aaaggggatttctcctctggcagaaacggcagcagcactgacaggagcttccgtgtccggttcctcttacttgcaggtcgtcgcggcgggagacgttggcagctcgccccgcgccacgtgcggcggcttcgtcgccctcgacgtcggcgcgctgtcgtctctggccggcgacgccggcccaccgggcacgcccaccgcgccgccgcggacacccaaggtgatgcggtcgctgtcgaggaagggcgacaggaagccggccgaccccgacgccaacgccaacgccaacggcaccgccggtggcggcggtagcgagcggcccgcagcttgttccgtgcacgtggcggccggcgaactcggggacgcgccccggcagcgcgcggctggtcgtccacacgccgctggccggcacgcccggaagcaagtcccggcggttcggcaggcggcggcgccgtggctcgatccccggagggtggtcctcctcttccccacgctgtccagcgtgggaacgctgatcctcctctacttcacgctatccatgagcagggcggacaccagtagtggcggcgccagcgacgctcggtgagacgccggcggtcgaaagcgaagggggcatttttgcctcgtctgagaattttcaaacttgcaaagattgacaagaatcaatacaagtagggccaggcatatcgacggtgaagagatcgagccggctggggattttgtggacaagtttgtgatggtagacatacttgtttcttcttgtattatctctctctctctctccttttttttcggattctctcaaaaagggatacatgtcgctttacagcgtaacagataatactgaaatttttactcccctctgatgctaaaaacacaaccaaaccattttcgccacatgtcttaacagggatggccaattgtctttgagctcggatgccgttcattcaacagtggtgtgtgtgtatttgttccctgaacctaacctcaacgaacaaacaaaccatgttgcaaatcacaaggggtgatccaagataatttgggaccctctatgcacactggcattaagaacaagttcaataataaagtcaagcgcttcactattgagtcaaattatagaatagtagtctcctaattgtgcataagaatttttttattgttaatttacccatgttccactttctctttctcctcacatcgttgtgttgttgagtggtggcccaccactatatagactctcgtgtccaacttagggtttgtt

SEQ ID NO: 69979 - DNA, 1728 bp, Zea Mays
agacctcgacctcccctcccacatgctcttcagtctttgggacttcacagggcacggcaccaagagaggggagaatctttcgccctgaaaaagagcaaagtttcagcccccccccccccccccccccggttccttcccccaacgaaccagcagagatatatcgcagggaacaaaacacaaggaggccaccagccgtagccgacacatggacacgcagcagagcgtcgtcgccgccgcgatccagtccagaggcatggtggccgccgccgcaaaccaccccgtgagtgtcgtcgcggcgggagacgttggcagctcgccccgcgccacgtgcggcggcttcgtcgccctcgacgtcggcgcgctgtcgtctctggccggcgacgccggcccaccgggcacgcccaccgcgccgccgcggacacccaaggtgatgcggtcgctgtcgaggaagggcgacaggaagccggccgaccccgacgccaacgccaacgccaacggcaccgccggtacgtcaccactccagacggttgccttgcctctccttggaatcgcgcgctgagtgaaattgatgcaatggttattattattttttctcgtggctctctagtttctttttatcttctttgtttggcttgcgtttatgattcgcttaagctagtgtcagcagaggtgacaattgacagcgatgtattagtattgccgataattccaacgacgtatcaaagagatgcaagggatgatgtatgtattggtacgtgtgctgcaggtggcggcggtagcgagcggcccgcagcttgttccgtgcacgtggcggccggcgaactcggggacgcgccccggcagcgcgcggctggtcgtccacacgccgctggccggcacgcccggaagcaagtcccggcggttcggcaggcggcggcgccgtggctcgatccccggagggtggtcctcctcttccccacgctgtccagcgtgggaacgctgatcctcctctacttcacgctatccatgagcagggcggacaccagtagtggcggcgccagcgacgctcggtgagacgccggcggtcgaaagcgaagggggcatttttgcctcgtctgagaattttcaaacttgcaaagattgacaagaatcaatacaagtagggccaggcatatcgacggtgaagagatcgagccggctggggattttgtggacaagtttgtgatggtagacatacttgtttcttcttgtattatctctctctctctctccttttttttcggattctctcaaaaagggatacatgtcgctttacagcgtaacagataatactgaaatttttactcccctctgatgctaaaaacacaaccaaaccattttcgccacatgtcttaacagggatggccaattgtctttgagctcggatgccgttcattcaacagtggtgtgtgtgtatttgttccctgaacctaacctcaacgaacaaacaaaccatgttgcaaatcacaaggggtgatccaagataatttgggaccctctatgcacactggcattaagaacaagttcaataataaagtcaagcgcttcactattgagtcaaattatagaatagtagtctcctaattgtgcataagaatttttttattgttaatttacccatgttccactttctctttctcctcacatcgttgtgttgttgagtggtggcccaccactatatagactctcgtgtccaacttagggtttgtt

SEQ ID NO: 69980 - DNA, 1861 bp, Zea Mays
ccaattcgctggaggagaggaggaaccgtacgcgcctcattacgcccatccacgtgctcgcctctccccatcggcccatcgcataattttcctcggcggcgtcgccatctcaccggcggcgggcctgcggccggcaaccggaggcgatggcgagctcgtctgtggcggcggacatggagctggaccgccccaacctggaggactacctcccgcccgactcgctcccgcaggaggcgcccaggaatctccatctgcgcgatctgcttgacatctcgccggtgctaaccgaggcagcgggtgccatagtcgatgattcattcacgcgctgctttaagtcgaattctccagaaccatggaactggaacatatatttgttccctttatggtgcttcggtgtagtaattcgatatggattactcttcccactgaggtccttaacgcttgcaataggatggttagcattttttgctgcctttttccccgtgcatttcctattgaaaggtcaagacaagttgagaaataaaattgagtgtttttgttgcttcatggactggagtgatcaagtaccatggaccacgcccaagcacacgacctcatcaggtatttgttgcaaaccatacatcaatgatagatttcattattctggagcaaatgacagcatttgctgtcatcatgcagaagcatcctggatgggttggtaggtctccagttcttcagaaacttctctgctgatttaagtttcaaatgttttatttattatttctctatttcccatttatttgcaggatttattcagaagactatcttggaaagtgtgggttgcatctggtttaaccgtaatgatctccgggatcgtgaagttacggcacggaaaaggaacttgtgttaacaaccagtatacggtcatgttcaagaaggtgaaccctaccttcatttactctgtcatttgtgtgtgcgttggagggtattcttatatttgcttctctacctcggtcttcctagtagccaaacagtaatttaatgccagaaactagaagttagtcacagcatggcattaaattgcatagttgctcacttgctgttgtttactatgacaatgtttttttatttggtgtgttttgtagggtgcctttgagcttgggtgtgctgtctgtccaatagctatcaaatacaataaaatatttgttgatgccttttggaacagtaagaagcaatcttttacgatgcacttggtccggttgatgacatcatgggctgttgtgtgtgatgtttggtacttggagcctcaatatctgagggagggagagactgcaattgcgtttgctgagagagtaagggacatgatagcagctagagctggtcttaagaaggtcccgtgggatggctatctgaaacacaaccgccctagtcccaaacacaccgaagagaagcaacgcatattcgccgaatctgtcttgaggagactagaggagaaatgaagagacatcaaacactacaagcgcatttggttagtggtttaccgttcagctaccttgtaattcggttggctccccgaaaaaaaaaagtccgggacacgtcaagtgcccagctcagttttgttgtaaatttattagaaatttgacagaattggtagtgtgaacttaccaagaaaggaagaatagccgcatgtgttgtggctgttcattctatgattggttaggaattgacacttgaaacacggtactctattcagaggctgtgtccgtatttatgaatcgacgatgtaatggttttaattcatgtgattattgattcaataatatgagtagattacatcctctgtaccttcttgagatttaaaacattggatttgaagaggttg

SEQ ID NO: 69981 - DNA, 1626 bp, Zea Mays
ctcagcaccaattcgctggaggagaggaggaaccgtacgcgcctcattacgcccatccacgtgctcgcctctccccatcggcccatcgcataattttcctcggcggcgtcgccatctcaccggcggcgggcctgcggccggcaaccggaggcgatggcgagctcgtctgtggcggcggacatggagctggaccgccccaacctggaggactacctcccgcccgactcgctcccgcaggaggcgcccaggaatctccatctgcgcgatctgcttgacatctcgccggtgctaaccgaggcagcgggtgccatagtcgatgattcattcacgcgctgctttaagtcgaattctccagaaccatggaactggaacatatatttgttccctttatggtgcttcggtgtagtaattcgatatggattactcttcccactgaggtccttaacgcttgcaataggatggttagcattttttgctgcctttttccccgtgcatttcctattgaaaggtcaagacaagttgagaaataaaattgagtgtttttgttgcttcatggactggagtgatcaagtaccatggaccacgcccaagcacacgacctcatcaggtatttgttgcaaaccatacatcaatgatagatttcattattctggagcaaatgacagcatttgctgtcatcatgcagaagcatcctggatgggttggatttattcagaagactatcttggaaagtgtgggttgcatctggtttaaccgtaatgatctccgggatcgtgaagttacggcacggaagttgcgtgatcatgttcaacatccagacaaaaaccctctcttgattttcccagaaggaacttgtgttaacaaccagtatacggtcatgttcaagaagggtgcctttgagcttgggtgtgctgtctgtccaatagctatcaaatacaataaaatatttgttgatgccttttggaacagtaagaagcaatcttttacgatgcacttggtccggttgatgacatcatgggctgttgtgtgtgatgtttggtacttggagcctcaatatctgagggagggagagactgcaattgcgtttgctgagagagtaagggacatgatagcagctagagctggtcttaagaaggtcccgtgggatggctatctgaaacacaaccgccctagtcccaaacacaccgaagagaagcaacgcatattcgccgaatctgtcttgaggagactagaggagaaatgaagagacatcaaacactacaagcgcatttggttagtggtttaccgttcagctaccttgtaattcggttggctccccgaaaaaaaaaagtccgggacacgtcaagtgcccagctcagttttgttgtaaatttattagaaatttgacagaattggtagtgtgaacttaccaagaaaggaagaatagccgcatgtgttgtggctgttcattctatgattggttaggaattgacacttgaaacacggtactctattcagaggctgtgtccgtatttatgaatcgacgatgtaatggttttaattcatgtgattattgattcaataatatgagtagattacatcctctgtaccttcttgagatttaaaacattggatttgaagaggttg

SEQ ID NO: 69982 - DNA, 1922 bp, Zea Mays
ctcagcaccaattcgctggaggagaggaggaaccgtacgcgcctcattacgcccatccacgtgctcgcctctccccatcggcccatcgcataattttcctcggcggcgtcgccatctcaccggcggcgggcctgcggccggcaaccggaggcgatggcgagctcgtctgtggcggcggacatggagctggaccgccccaacctggaggactacctcccgcccgactcgctcccgcaggaggcgcccaggaatctccatctgcgcgatctgcttgacatctcgccggtgctaaccgaggcagcgggtgccatagtcgatgattcattcacgcgctgctttaagtcgaattctccagaaccatggaactggaacatatatttgttccctttatggtgcttcggtgtagtaattcgatatggattactcttcccactgaggtccttaacgcttgcaataggatggttagcattttttgctgcctttttccccgtgcatttcctattgaaaggtcaagacaagttgagaaataaaattgagttggttgaaatgatgtgcagtgtttttgttgcttcatggactggagtgatcaagtaccatggaccacgcccaagcacacgacctcatcaggtatttgttgcaaaccatacatcaatgatagatttcattattctggagcaaatgacagcatttgctgtcatcatgcagaagcatcctggatgggttggatttattcagaagactatcttggaaagtgtgggttgcatctggtttaaccgtaatgatctccgggatcgtgaagttacggcacggaagtaagttgtctttgaatgacaaacccatttattatgtagttcattttgttcagagaattactttgtcaggttgcgtgatcatgttcaacatccagacaaaaaccctctcttgattttcccagaaggaacttgtgttaacaaccagtatacggtcatgttcaagaaggtgaaccctaccttcatttactctgtcatttgtgtgtgcgttggagggtattcttatatttgcttctctacctcggtcttcctagtagccaaacagtaatttaatgccagaaactagaagttagtcacagcatggcattaaattgcatagttgctcacttgctgttgtttactatgacaatgtttttttatttggtgtgttttgtagggtgcctttgagcttgggtgtgctgtctgtccaatagctatcaaatacaataaaatatttgttgatgccttttggaacagtaagaagcaatcttttacgatgcacttggtccggttgatgacatcatgggctgttgtgtgtgatgtttggtacttggagcctcaatatctgagggagggagagactgcaattgcgtttgctgagagagtaagggacatgatagcagctagagctggtcttaagaaggtcccgtgggatggctatctgaaacacaaccgccctagtcccaaacacaccgaagagaagcaacgcatattcgccgaatctgtcttgaggagactagaggagaaatgaagagacatcaaacactacaagcgcatttggttagtggtttaccgttcagctaccttgtaattcggttggctccccgaaaaaaaaaagtccgggacacgtcaagtgcccagctcagttttgttgtaaatttattagaaatttgacagaattggtagtgtgaacttaccaagaaaggaagaatagccgcatgtgttgtggctgttcattctatgattggttaggaattgacacttgaaacacggtactctattcagaggctgtgtccgtatttatgaatcgacgatgtaatggttttaattcatgtgattattgattcaataatatgagtagattacatcctctgtaccttcttgagatttaaaacattggatttgaagaggttg

SEQ ID NO: 69983 - DNA, 1653 bp, Zea Mays
cggcactcagcaccaattcgctggaggagaggaggaaccgtacgcgcctcattacgcccatccacgtgctcgcctctccccatcggcccatcgcataattttcctcggcggcgtcgccatctcaccggcggcgggcctgcggccggcaaccggaggcgatggcgagctcgtctgtggcggcggacatggagctggaccgccccaacctggaggactacctcccgcccgactcgctcccgcaggaggcgcccaggaatctccatctgcgcgatctgcttgacatctcgccggtgctaaccgaggcagcgggtgccatagtcgatgattcattcacgcgctgctttaagtcgaattctccagaaccatggaactggaacatatatttgttccctttatggtgcttcggtgtagtaattcgatatggattactcttcccactgaggtccttaacgcttgcaataggatggttagcattttttgctgcctttttccccgtgcatttcctattgaaaggtcaagacaagttgagaaataaaattgagaggaagttggttgaaatgatgtgcagtgtttttgttgcttcatggactggagtgatcaagtaccatggaccacgcccaagcacacgacctcatcaggtatttgttgcaaaccatacatcaatgatagatttcattattctggagcaaatgacagcatttgctgtcatcatgcagaagcatcctggatgggatttattcagaagactatcttggaaagtgtgggttgcatctggtttaaccgtaatgatctccgggatcgtgaagttacggcacggaagttgcgtgatcatgttcaacatccagacaaaaaccctctcttgattttcccagaaggaacttgtgttaacaaccagtatacggtcatgttcaagaagggtgcctttgagcttgggtgtgctgtctgtccaatagctatcaaatacaataaaatatttgttgatgccttttggaacagtaagaagcaatcttttacgatgcacttggtccggttgatgacatcatgggctgttgtgtgtgatgtttggtacttggagcctcaatatctgagggagggagagactgcaattgcgtttgctgagagagtaagggacatgatagcagctagagctggtcttaagaaggtcccgtgggatggctatctgaaacacaaccgccctagtcccaaacacaccgaagagaagcaacgcatattcgccgaatctgtcttgaggagactagaggagaaatgaagagacatcaaacactacaagcgcatttggttagtggtttaccgttcagctaccttgtaattcggttggctccccgaaaaaaaaaagtccgggacacgtcaagtgcccagctcagttttgttgtaaatttattagaaatttgacagaattggtagtgtgaacttaccaagaaaggaagaatagccgcatgtgttgtggctgttcattctatgattggttaggaattgacacttgaaacacggtactctattcagaggctgtgtccgtatttatgaatcgacgatgtaatggttttaattcatgtgattattgattcaataatatgagtagattacatcctctgtaccttcttgagatttaaaacattggatttgaagaggttg

SEQ ID NO: 69984 - DNA, 1874 bp, Zea Mays
cccggccgcacggcactcagcaccaattcgctggaggagaggaggaaccgtacgcgcctcattacgcccatccacgtgctcgcctctccccatcggcccatcgcataattttcctcggcggcgtcgccatctcaccggcggcgggcctgcggccggcaaccggaggcgatggcgagctcgtctgtggcggcggacatggagctggaccgccccaacctggaggactacctcccgcccgactcgctcccgcaggaggcgcccaggaatctccatctgcgcgatctgcttgacatctcgccggtgctaaccgaggcagcgggtgccatagtcgatgattcattcacgcgctgctttaagtcgaattctccagaaccatggaactggaacatatatttgttccctttatggtgcttcggtgtagtaattcgatatggattactcttcccactgaggtccttaacgcttgcaataggatggttagcattttttgctgcctttttccccgtgcatttcctattgaaaggtcaagacaagttgagaaataaaattgagaggaagttggttgaaatgatgtgcagtgtttttgttgcttcatggactggagtgatcaagtaccatggaccacgcccaagcacacgacctcatcaggtatttgttgcaaaccatacatcaatgatagatttcattattctggagcaaatgacagcatttgctgtcatcatgcagaagcatcctggatgggttggatttattcagaagactatcttggaaagtgtgggttgcatctggtttaaccgtaatgatctccgggatcgtgaagttacggcacggaagttgcgtgatcatgttcaacatccagacaaaaaccctctcttgattttcccagaaggaacttgtgttaacaaccagtatacggtcatgttcaagaaggtgaaccctaccttcatttactctgtcatttgtgtgtgcgttggagggtattcttatatttgcttctctacctcggtcttcctagtagccaaacagtaatttaatgccagaaactagaagttagtcacagcatggcattaaattgcatagttgctcacttgctgttgtttactatgacaatgtttttttatttggtgtgttttgtagggtgcctttgagcttgggtgtgctgtctgtccaatagctatcaaatacaataaaatatttgttgatgccttttggaacagtaagaagcaatcttttacgatgcacttggtccggttgatgacatcatgggctgttgtgtgtgatgtttggtacttggagcctcaatatctgagggagggagagactgcaattgcgtttgctgagagagtaagggacatgatagcagctagagctggtcttaagaaggtcccgtgggatggctatctgaaacacaaccgccctagtcccaaacacaccgaagagaagcaacgcatattcgccgaatctgtcttgaggagactagaggagaaatgaagagacatcaaacactacaagcgcatttggttagtggtttaccgttcagctaccttgtaattcggttggctccccgaaaaaaaaaagtccgggacacgtcaagtgcccagctcagttttgttgtaaatttattagaaatttgacagaattggtagtgtgaacttaccaagaaaggaagaatagccgcatgtgttgtggctgttcattctatgattggttaggaattgacacttgaaacacggtactctattcagaggctgtgtccgtatttatgaatcgacgatgtaatggttttaattcatgtgattattgattcaataatatgagtagattacatcctctgtaccttcttgagatttaaaacattggatttgaagaggttg

SEQ ID NO: 69985 - DNA, 1650 bp, Zea Mays
cgactcacacccggccgcacggcactcagcaccaattcgctggaggagaggaggaaccgtacgcgcctcattacgcccatccacgtgctcgcctctccccatcggcccatcgcataattttcctcggcggcgtcgccatctcaccggcggcgggcctgcggccggcaaccggaggcgatggcgagctcgtctgtggcggcggacatggagctggaccgccccaacctggaggactacctcccgcccgactcgctcccgcaggaggcgcccaggaatctccatctgcgcgatctgcttgacatctcgccggtgctaaccgaggcagcgggtgccatagtcgatgattcattcacgcgctgctttaagtcgaattctccagaaccatggaactggaacatatatttgttccctttatggtgcttcggtgtagtaattcgatatggattactcttcccactgaggtccttaacgcttgcaataggatggttagcattttttgctgcctttttccccgtgcatttcctattgaaaggtcaagacaagttgagaaataaaattgagaggaagttggttgaaatgatgtgcagtgtttttgttgcttcatggactggagtgatcaagtaccatggaccacgcccaagcacacgacctcatcaggtatttgttgcaaaccatacatcaatgatagatttcattattctggagcaaatgacagcatttgctgtcatcatgcagaagcatcctggatgggttggatttattcagaagactatcttggaaagtgtgggttgcatctggtttaaccgtaatgatctccgggatcgtgaagttacggcacggaaacaaaaaccctctcttgattttcccagaaggaacttgtgttaacaaccagtatacggtcatgttcaagaagggtgcctttgagcttgggtgtgctgtctgtccaatagctatcaaatacaataaaatatttgttgatgccttttggaacagtaagaagcaatcttttacgatgcacttggtccggttgatgacatcatgggctgttgtgtgtgatgtttggtacttggagcctcaatatctgagggagggagagactgcaattgcgtttgctgagagagtaagggacatgatagcagctagagctggtcttaagaaggtcccgtgggatggctatctgaaacacaaccgccctagtcccaaacacaccgaagagaagcaacgcatattcgccgaatctgtcttgaggagactagaggagaaatgaagagacatcaaacactacaagcgcatttggttagtggtttaccgttcagctaccttgtaattcggttggctccccgaaaaaaaaaagtccgggacacgtcaagtgcccagctcagttttgttgtaaatttattagaaatttgacagaattggtagtgtgaacttaccaagaaaggaagaatagccgcatgtgttgtggctgttcattctatgattggttaggaattgacacttgaaacacggtactctattcagaggctgtgtccgtatttatgaatcgacgatgtaatggttttaattcatgtgattattgattcaataatatgagtagattacatcctctgtaccttcttgagatttaaaacattggatttgaagaggttg

SEQ ID NO: 69986 - DNA, 1580 bp, Zea Mays
tcgactcacacccggccgcacggcactcagcaccaattcgctggaggagaggaggaaccgtacgcgcctcattacgcccatccacgtgctcgcctctccccatcggcccatcgcataattttcctcggcggcgtcgccatctcaccggcggcgggcctgcggccggcaaccggaggcgatggcgagctcgtctgtggcggcggacatggagctggaccgccccaacctggaggactacctcccgcccgactcgctcccgcaggaggcgcccaggaatctccatctgcgcgatctgcttgacatctcgccggtgctaaccgaggcagcgggtgccatagtcgatgattcattcacgcgctgctttaagtcgaattctccagaaccatggaactggaacatatatttgttccctttatggtgcttcggtgtagtaattcgatatggattactcttcccactgaggtccttaacgcttgcaataggatggttagcattttttgctgcctttttccccgtgcatttcctattgaaaggtcaagacaagttgagaaataaaattgagaggaagttggttgaaatgatgtgcagtgtttttgttgcttcatggactggagtgatcaagtaccatggaccacgcccaagcacacgacctcatcaggtatttgttgcaaaccatacatcaatgatagatttcattattctggagcaaatgacagcatttgctgtcatcatgcagaagcatcctggatgggttggatttattcagaagactatcttggaaagtgtgggttgcatctggtttaaccgtaatgatctccgggatcgtgaagttacggcacggaaggtgcctttgagcttgggtgtgctgtctgtccaatagctatcaaatacaataaaatatttgttgatgccttttggaacagtaagaagcaatcttttacgatgcacttggtccggttgatgacatcatgggctgttgtgtgtgatgtttggtacttggagcctcaatatctgagggagggagagactgcaattgcgtttgctgagagagtaagggacatgatagcagctagagctggtcttaagaaggtcccgtgggatggctatctgaaacacaaccgccctagtcccaaacacaccgaagagaagcaacgcatattcgccgaatctgtcttgaggagactagaggagaaatgaagagacatcaaacactacaagcgcatttggttagtggtttaccgttcagctaccttgtaattcggttggctccccgaaaaaaaaaagtccgggacacgtcaagtgcccagctcagttttgttgtaaatttattagaaatttgacagaattggtagtgtgaacttaccaagaaaggaagaatagccgcatgtgttgtggctgttcattctatgattggttaggaattgacacttgaaacacggtactctattcagaggctgtgtccgtatttatgaatcgacgatgtaatggttttaattcatgtgattattgattcaataatatgagtagattacatcctctgtaccttcttgagatttaaaacattggatttgaagaggttg

SEQ ID NO: 69987 - DNA, 1574 bp, Zea Mays
ctcgttggtgcgatttccactcgactcacacccggccgcacggcactcagcaccaattcgctggaggagaggaggaaccgtacgcgcctcattacgcccatccacgtgctcgcctctccccatcggcccatcgcataattttcctcggcggcgtcgccatctcaccggcggcgggcctgcggccggcaaccggaggcgatggcgagctcgtctgtggcggcggacatggagctggaccgccccaacctggaggactacctcccgcccgactcgctcccgcaggaggcgcccaggaatctccatctgcgcgatctgcttgacatctcgccggtgctaaccgaggcagcgggtgccatagtcgatgattcattcacgcgctgctttaagtcgaattctccagaaccatggaactggaacatatatttgttccctttatggtgcttcggtgtagtaattcgatatggattactcttcccactgaggtccttaacgcttgcaataggatggttagcattttttgctgcctttttccccgtgcatttcctattgaaaggtcaagacaagttgagaaataaaattgagtgtttttgttgcttcatggactggagtgatcaagtaccatggaccacgcccaagcacacgacctcatcaggtatttgttgcaaaccatacatcaatgatagatttcattattctggagcaaatgacagcatttgctgtcatcatgcagaagcatcctggatgggttggatttattcagaagactatcttggaaagtgtgggttgcatctggtttaaccgtaatgatctccgggatcgtgaagttacggcacggaaggtgcctttgagcttgggtgtgctgtctgtccaatagctatcaaatacaataaaatatttgttgatgccttttggaacagtaagaagcaatcttttacgatgcacttggtccggttgatgacatcatgggctgttgtgtgtgatgtttggtacttggagcctcaatatctgagggagggagagactgcaattgcgtttgctgagagagtaagggacatgatagcagctagagctggtcttaagaaggtcccgtgggatggctatctgaaacacaaccgccctagtcccaaacacaccgaagagaagcaacgcatattcgccgaatctgtcttgaggagactagaggagaaatgaagagacatcaaacactacaagcgcatttggttagtggtttaccgttcagctaccttgtaattcggttggctccccgaaaaaaaaaagtccgggacacgtcaagtgcccagctcagttttgttgtaaatttattagaaatttgacagaattggtagtgtgaacttaccaagaaaggaagaatagccgcatgtgttgtggctgttcattctatgattggttaggaattgacacttgaaacacggtactctattcagaggctgtgtccgtatttatgaatcgacgatgtaatggttttaattcatgtgattattgattcaataatatgagtagattacatcctctgtaccttcttgagatttaaaacattggatttgaagaggttg

SEQ ID NO: 69988 - DNA, 2151 bp, Zea Mays
ggaactgggtagtggtgacgaacagtgacggagagcacccttgcgccgcccgccagggacgcgccatgcctgcgacgggtacggccgcggactaccaccgcgacattctccgggtacagcttcgcgcaggtgctggcacagacattgcgccaattgaaccgagatagttacaagcatttttctcaaaaaacaatgacaatgtgcttctacctttccagcgtgatactcatagtcatattaatgcttcgtgatgaaacttcttcctcactaggatttacatggaagtaagctggctgcataggcttggctcatctgattttccgtccgtccaaagttgccaagcctgccaaagtaacatgtttttgtgaaacaagtgagatagagaatattctggccatcccaaaatctgatatttttggattcatttcactatccaagagaatgttacttgctttcaaatccctatggacaacgcataaccgtgaataattgtgaagaggcctttatgcaagtttgcacattgctcaaagcaggcctaatgcttgtgctaaagctttgaatgagcatttcaaacttaataggactgctgagcaaatttctaaccacttgaagacagtgaagaagaagtacgttaggattaatcaacttagggctgaaagtgggtccggttgggatgaagatttatttatggttacaatggaccatgagcagtacacaacccactttgcgaatgacaagaacaagggggatgatgagtacatcaacaaaccattaccttactatggcaatttagcaacaatatatggtaatagtacagcaacaggaaggtttgtgaagacctcaaatgaccctcttggagtagatgagttgaatacccaaaaagaaatggagaacattgggacaccaactaatggtttgaatgacaaggaaggcagcccacctaagagggacgaaggaggacctagtagaccatccaagagagctaagaaggatgaatgtggagcagatcctttggttcaagcctttcaaagtggtgctgaaactatagctaatgctattgaaaaggctgcagcaagtaaaggtttgccaaacggattgtttgaagcggtggacagccttcccggatttgagcttgagcacaagtctaggtactactctcatatgcttggtgatcctaatcttgcaaatggtttcatgaatgtgcccgtgctttacaagatcacaagatggccgatttcatgaacaagaatatgtaggcttcctaggtacttaagtagacctagttggatgattatattgagtagtcatggactcttgtggtatggatgattttgagacatgcatttgtatccatgaacaatgctctttggatattcttgcatgtcatggtggttgtattttgggatggtggttgctgccatattgaacattgattgtggctgctcattgttgacaatgtagttggtaatcacactatattggactgctcatatgttgagtattttgtgttgaatgtggctgctcatatgtaaccgcattgttgagaacattgtgatggtaatgagttgttgtatgttgatcatagtgtgttacaatttgaaattatactctagttccactcttgaaccaaacaaagaatggagccgatccgttctacttcactccagaaccaaacaaaaaatagagccgctccgttctacaataccaaacacagagcggaacggctccgctcctggaattggaatggagtggctctactccaacacactcttgaaccaaacacaccctaaagggtgcagcctgcctctctttacttgatatagcaagataagatgtagaagattctaccaactactactattgcagtgccatactggccataccatctactgttactgctaggccatacaagcatgctcctgtcactagacaggggaggcatagccaaaagaacataacactatctgctcataacgcatggaaggcaaaacagcaagagctagccagattaaacaacacaattcctgtagctgagtgcacctttactgcatgggcaaactgtgttttagcgagggagatcaggttagatttgtaggtgttgtttggcgcatggtttttaaagcggtaaggcggtccaaggcgttggagcac

SEQ ID NO: 69989 - DNA, 2019 bp, Zea Mays
ggaactgggtagtggtgacgaacagtgacggagagcacccttgcgccgcccgccagggacgcgccatgcctgcgacgggtacggccgcggactaccaccgcgacattctccgggtacagcttcgcgcaggtgctggcacagacattgcgccaattgaaccgagcgtgatactcatagtcatattaatgcttcgtgatgaaacttcttcctcactaggatttacatggaagtaagctggctgcataggcttggaatattctggccatcccaaaatctgatatttttggattcatttcactatccaagagaatgttacttgctttcaaatccctatggacaacgcataaccgtgaataattgtgaagaggcctttatgcaagtttgcacattgctcaaagcaggcctaatgcttgtgctaaagctttgaatgagcatttcaaacttaataggactgctgagcaaatttctaaccacttgaagacagtgaagaagaagtacgttaggattaatcaacttagggctgaaagtgggtccggttgggatgaagatttatttatggttacaatggaccatgagcagtacacaacccactttgcgaatgacaagaacaagggggatgatgagtacatcaacaaaccattaccttactatggcaatttagcaacaatatatggtaatagtacagcaacaggaaggtttgtgaagacctcaaatgaccctcttggagtagatgagttgaatacccaaaaagaaatggagaacattgggacaccaactaatggtttgaatgacaaggaaggcagcccacctaagagggacgaaggaggacctagtagaccatccaagagagctaagaaggatgaatgtggagcagatcctttggttcaagcctttcaaagtggtgctgaaactatagctaatgctattgaaaaggctgcagcaagtaaaggtttgccaaacggattgtttgaagcggtggacagccttcccggatttgagcttgagcacaagtctaggtactactctcatatgcttggtgatcctaatcttgcaaatggtttcatgaatgtgcccgtgctttacaagatcacaagatggccgatttcatgaacaagaatatgtaggcttcctaggtacttaagtagacctagttggatgattatattgagtagtcatggactcttgtggtatggatgattttgagacatgcatttgtatccatgaacaatgctctttggatattcttgcatgtcatggtggttgtattttgggatggtggttgctgccatattgaacattgattgtggctgctcattgttgacaatgtagttggtaatcacactatattggactgctcatatgttgagtattttgtgttgaatgtggctgctcatatgtaaccgcattgttgagaacattgtgatggtaatgagttgttgtatgttgatcatagtgtgttacaatttgaaattatactctagttccactcttgaaccaaacaaagaatggagccgatccgttctacttcactccagaaccaaacaaaaaatagagccgctccgttctacaataccaaacacagagcggaacggctccgctcctggaattggaatggagtggctctactccaacacactcttgaaccaaacacaccctaaagggtgcagcctgcctctctttacttgatatagcaagataagatgtagaagattctaccaactactactattgcagtgccatactggccataccatctactgttactgctaggccatacaagcatgctcctgtcactagacaggggaggcatagccaaaagaacataacactatctgctcataacgcatggaaggcaaaacagcaagagctagccagattaaacaacacaattcctgtagctgagtgcacctttactgcatgggcaaactgtgttttagcgagggagatcaggttagatttgtaggtgttgtttggcgcatggtttttaaagcggtaaggcggtccaaggcgttggagcac

SEQ ID NO: 69990 - DNA, 1930 bp, Zea Mays
ggaactgggtagtggtgacgaacagtgacggagagcacccttgcgccgcccgccagggacgcgccatgcctgcgacgggtacggccgcggactaccaccgcgacattctccgggtacagcttcgcgcaggtgctggcacagacattgcgccaattgaaccgagaatattctggccatcccaaaatctgatatttttggattcatttcactatccaagagaatgttacttgctttcaaatccctatggacaacgcataaccgtgaataattgtgaagaggcctttatgcaagtttgcacattgctcaaagcaggcctaatgcttgtgctaaagctttgaatgagcatttcaaacttaataggactgctgagcaaatttctaaccacttgaagacagtgaagaagaagtacgttaggattaatcaacttagggctgaaagtgggtccggttgggatgaagatttatttatggttacaatggaccatgagcagtacacaacccactttgcgaatgacaagaacaagggggatgatgagtacatcaacaaaccattaccttactatggcaatttagcaacaatatatggtaatagtacagcaacaggaaggtttgtgaagacctcaaatgaccctcttggagtagatgagttgaatacccaaaaagaaatggagaacattgggacaccaactaatggtttgaatgacaaggaaggcagcccacctaagagggacgaaggaggacctagtagaccatccaagagagctaagaaggatgaatgtggagcagatcctttggttcaagcctttcaaagtggtgctgaaactatagctaatgctattgaaaaggctgcagcaagtaaaggtttgccaaacggattgtttgaagcggtggacagccttcccggatttgagcttgagcacaagtctaggtactactctcatatgcttggtgatcctaatcttgcaaatggtttcatgaatgtgcccgtgctttacaagatcacaagatggccgatttcatgaacaagaatatgtaggcttcctaggtacttaagtagacctagttggatgattatattgagtagtcatggactcttgtggtatggatgattttgagacatgcatttgtatccatgaacaatgctctttggatattcttgcatgtcatggtggttgtattttgggatggtggttgctgccatattgaacattgattgtggctgctcattgttgacaatgtagttggtaatcacactatattggactgctcatatgttgagtattttgtgttgaatgtggctgctcatatgtaaccgcattgttgagaacattgtgatggtaatgagttgttgtatgttgatcatagtgtgttacaatttgaaattatactctagttccactcttgaaccaaacaaagaatggagccgatccgttctacttcactccagaaccaaacaaaaaatagagccgctccgttctacaataccaaacacagagcggaacggctccgctcctggaattggaatggagtggctctactccaacacactcttgaaccaaacacaccctaaagggtgcagcctgcctctctttacttgatatagcaagataagatgtagaagattctaccaactactactattgcagtgccatactggccataccatctactgttactgctaggccatacaagcatgctcctgtcactagacaggggaggcatagccaaaagaacataacactatctgctcataacgcatggaaggcaaaacagcaagagctagccagattaaacaacacaattcctgtagctgagtgcacctttactgcatgggcaaactgtgttttagcgagggagatcaggttagatttgtaggtgttgtttggcgcatggtttttaaagcggtaaggcggtccaaggcgttggagcac

SEQ ID NO: 69991 - DNA, 2109 bp, Zea Mays
gtcgaagtggaatggaactgggtagtggtgacgaacagtgacggagagcacccttgcgccgcccgccagggacgcgccatgcctgcgacgggtacggccgcggactaccaccgcgacattctccgggtacagcttcgcgcaggtgctggcacagacattgcgccaattgaaccgagcgtgatactcatagtcatattaatgcttcgtgatgaaacttcttcctcactaggatttacatggaagtaagctggctgcataggcttggctcatctgattttccgtccgtccaaagttgccaagcctgccaaagtaacatgtttttgtgaaacaagtgagatagagaatattctggccatcccaaaatctgatatttttggattcatttcactatccaagagaatgttacttgctttcaaatccctatggacaacgcataaccgtgaataattgtgaagaggcctttatgcaagtttgcacattgctcaaagcaggcctaatgcttgtgctaaagctttgaatgagcatttcaaacttaataggactgctgagcaaatttctaaccacttgaagacagtgaagaagaagtacgttaggattaatcaacttagggctgaaagtgggtccggttgggatgaagatttatttatggttacaatggaccatgagcagtacacaacccactttgcgaatgacaagaacaagggggatgatgagtacatcaacaaaccattaccttactatggcaatttagcaacaatatatggtaatagtacagcaacaggaaggtttgtgaagacctcaaatgaccctcttggagtagatgagttgaatacccaaaaagaaatggagaacattgggacaccaactaatggtttgaatgacaaggaaggcagcccacctaagagggacgaaggaggacctagtagaccatccaagagagctaagaaggatgaatgtggagcagatcctttggttcaagcctttcaaagtggtgctgaaactatagctaatgctattgaaaaggctgcagcaagtaaaggtttgccaaacggattgtttgaagcggtggacagccttcccggatttgagcttgagcacaagtctaggtactactctcatatgcttggtgatcctaatcttgcaaatggtttcatgaatgtgcccgtgctttacaagatcacaagatggccgatttcatgaacaagaatatgtaggcttcctaggtacttaagtagacctagttggatgattatattgagtagtcatggactcttgtggtatggatgattttgagacatgcatttgtatccatgaacaatgctctttggatattcttgcatgtcatggtggttgtattttgggatggtggttgctgccatattgaacattgattgtggctgctcattgttgacaatgtagttggtaatcacactatattggactgctcatatgttgagtattttgtgttgaatgtggctgctcatatgtaaccgcattgttgagaacattgtgatggtaatgagttgttgtatgttgatcatagtgtgttacaatttgaaattatactctagttccactcttgaaccaaacaaagaatggagccgatccgttctacttcactccagaaccaaacaaaaaatagagccgctccgttctacaataccaaacacagagcggaacggctccgctcctggaattggaatggagtggctctactccaacacactcttgaaccaaacacaccctaaagggtgcagcctgcctctctttacttgatatagcaagataagatgtagaagattctaccaactactactattgcagtgccatactggccataccatctactgttactgctaggccatacaagcatgctcctgtcactagacaggggaggcatagccaaaagaacataacactatctgctcataacgcatggaaggcaaaacagcaagagctagccagattaaacaacacaattcctgtagctgagtgcacctttactgcatgggcaaactgtgttttagcgagggagatcaggttagatttgtaggtgttgtttggcgcatggtttttaaagcggtaaggcggtccaaggcgttggagcac

SEQ ID NO: 69992 - DNA, 2129 bp, Zea Mays
caacggggtcgaagtggaatggaactgggtagtggtgacgaacagtgacggagagcacccttgcgccgcccgccagggacgcgccatgcctgcgacgggtacggccgcggactaccaccgcgacattctccgggtacagcttcgcgcaggtgctggcacagacattgcgccaattgaaccgagcgtgatactcatagtcatattaatgcttcgtgatgaaacttcttcctcactaggatttacatggaagtaagctggctgcataggcttgggagaataaatcagctcatctgattttccgtccgtccaaagttgccaagcctgccaaagtaacatgtttttgtgaaacaagtgagatagagaatattctggccatcccaaaatctgatatttttggattcatttcactatccaagagaatgttacttgctttcaaatccctatggacaacgcataaccgtgaataattgtgaagaggcctttatgcaagtttgcacattgctcaaagcaggcctaatgcttgtgctaaagctttgaatgagcatttcaaacttaataggactgctgagcaaatttctaaccacttgaagacagtgaagaagaagtacgttaggattaatcaacttagggctgaaagtgggtccggttgggatgaagatttatttatggttacaatggaccatgagcagtacacaacccactttgcgaatgacaagaacaagggggatgatgagtacatcaacaaaccattaccttactatggcaatttagcaacaatatatggtaatagtacagcaacaggaaggtttgtgaagacctcaaatgaccctcttggagtagatgagttgaatacccaaaaagaaatggagaacattgggacaccaactaatggtttgaatgacaaggaaggcagcccacctaagagggacgaaggaggacctagtagaccatccaagagagctaagaaggatgaatgtggagcagatcctttggttcaagcctttcaaagtggtgctgaaactatagctaatgctattgaaaaggctgcagcaagtaaaggtttgccaaacggattgtttgaagcggtggacagccttcccggatttgagcttgagcacaagtctaggtactactctcatatgcttggtgatcctaatcttgcaaatggtttcatgaatgtgcccgtgctttacaagatcacaagatggccgatttcatgaacaagaatatgtaggcttcctaggtacttaagtagacctagttggatgattatattgagtagtcatggactcttgtggtatggatgattttgagacatgcatttgtatccatgaacaatgctctttggatattcttgcatgtcatggtggttgtattttgggatggtggttgctgccatattgaacattgattgtggctgctcattgttgacaatgtagttggtaatcacactatattggactgctcatatgttgagtattttgtgttgaatgtggctgctcatatgtaaccgcattgttgagaacattgtgatggtaatgagttgttgtatgttgatcatagtgtgttacaatttgaaattatactctagttccactcttgaaccaaacaaagaatggagccgatccgttctacttcactccagaaccaaacaaaaaatagagccgctccgttctacaataccaaacacagagcggaacggctccgctcctggaattggaatggagtggctctactccaacacactcttgaaccaaacacaccctaaagggtgcagcctgcctctctttacttgatatagcaagataagatgtagaagattctaccaactactactattgcagtgccatactggccataccatctactgttactgctaggccatacaagcatgctcctgtcactagacaggggaggcatagccaaaagaacataacactatctgctcataacgcatggaaggcaaaacagcaagagctagccagattaaacaacacaattcctgtagctgagtgcacctttactgcatgggcaaactgtgttttagcgagggagatcaggttagatttgtaggtgttgtttggcgcatggtttttaaagcggtaaggcggtccaaggcgttggagcac

SEQ ID NO: 69993 - DNA, 2066 bp, Zea Mays
cgacaacggggtcgaagtggaatggaactgggtagtggtgacgaacagtgacggagagcacccttgcgccgcccgccagggacgcgccatgcctgcgacgggtacggccgcggactaccaccgcgacattctccgggtacagcttcgcgcaggtgctggcacagacattgcgccaattgaaccgaggatttacatggaagtaagctggctgcataggcttggctcatctgattttccgtccgtccaaagttgccaagcctgccaaagtaacatgtttttgtgaaacaagtgagatagagaatattctggccatcccaaaatctgatatttttggattcatttcactatccaagagaatgttacttgctttcaaatccctatggacaacgcataaccgtgaataattgtgaagaggcctttatgcaagtttgcacattgctcaaagcaggcctaatgcttgtgctaaagctttgaatgagcatttcaaacttaataggactgctgagcaaatttctaaccacttgaagacagtgaagaagaagtacgttaggattaatcaacttagggctgaaagtgggtccggttgggatgaagatttatttatggttacaatggaccatgagcagtacacaacccactttgcgaatgacaagaacaagggggatgatgagtacatcaacaaaccattaccttactatggcaatttagcaacaatatatggtaatagtacagcaacaggaaggtttgtgaagacctcaaatgaccctcttggagtagatgagttgaatacccaaaaagaaatggagaacattgggacaccaactaatggtttgaatgacaaggaaggcagcccacctaagagggacgaaggaggacctagtagaccatccaagagagctaagaaggatgaatgtggagcagatcctttggttcaagcctttcaaagtggtgctgaaactatagctaatgctattgaaaaggctgcagcaagtaaaggtttgccaaacggattgtttgaagcggtggacagccttcccggatttgagcttgagcacaagtctaggtactactctcatatgcttggtgatcctaatcttgcaaatggtttcatgaatgtgcccgtgctttacaagatcacaagatggccgatttcatgaacaagaatatgtaggcttcctaggtacttaagtagacctagttggatgattatattgagtagtcatggactcttgtggtatggatgattttgagacatgcatttgtatccatgaacaatgctctttggatattcttgcatgtcatggtggttgtattttgggatggtggttgctgccatattgaacattgattgtggctgctcattgttgacaatgtagttggtaatcacactatattggactgctcatatgttgagtattttgtgttgaatgtggctgctcatatgtaaccgcattgttgagaacattgtgatggtaatgagttgttgtatgttgatcatagtgtgttacaatttgaaattatactctagttccactcttgaaccaaacaaagaatggagccgatccgttctacttcactccagaaccaaacaaaaaatagagccgctccgttctacaataccaaacacagagcggaacggctccgctcctggaattggaatggagtggctctactccaacacactcttgaaccaaacacaccctaaagggtgcagcctgcctctctttacttgatatagcaagataagatgtagaagattctaccaactactactattgcagtgccatactggccataccatctactgttactgctaggccatacaagcatgctcctgtcactagacaggggaggcatagccaaaagaacataacactatctgctcataacgcatggaaggcaaaacagcaagagctagccagattaaacaacacaattcctgtagctgagtgcacctttactgcatgggcaaactgtgttttagcgagggagatcaggttagatttgtaggtgttgtttggcgcatggtttttaaagcggtaaggcggtccaaggcgttggagcac

SEQ ID NO: 69994 - DNA, 3289 bp, Zea Mays
tatgggtatggtggtacctgagtcctcacggaatcccgagcagctagaggcagcgtcggagacccgcggccaaactaatgaaatggctagctctgaatgccgtgcagcgcagcagcagctgccaccaccttggctcgatgctacagtctagctacacctgtcttgctcccgtctccttccttacttgttcatccccccgcttctcttctccctgcaatgcatgcatgatgtggttcatcttcatctcttcttcttgttccctactcttcacttcggagttgagtgtgagaacgaaggcacggagaaacgggaacagagaggctctctcttcatctgttgtatatcccaccagtgactcgcttgacacggggatatatagtttaattccattggccagaacaaactggagagcctaaagattaccaaaaccaatggctgcgcggtgcagcggcggctgcgacgggcgcgaggacagcgccgtggaggcgctggtgcagtggcagaaggtgagcgacttcctgatcggggcgtcctacatgtccatcccgctggagctgctgcacttcgccacctgcgccgacctcgcgccgctgcggtgggtgctcctccagttcggcgccttcatcgtgctctgcggcctcgtccacctcgtcgccatcttcacctacgcccgcccggactcgcgccgcctcctgctggccatcaccgccgccaaggcgctggccgccgtcgccgcgtccgtcgccgccgtctccctccccaccttcgtcccgcagctgctccgcctcaagacccgcgaggcgctgctccgggacaaggcgcgccagctggaccgcgacgtcgccctcgtcaggcgccgcgaggagaccgccacgcgcatcgtccgcgccatcacgaagcacgtctgctgcggctgccacggcggagcctctctcgcgcccgacgtgctgcgcaccgctgtcttccacctctctgacgccctcggcctccacagctgcgccgtctggatgcccgcggctgcggcggcggccagtgatggtggccccagcttgctgcacctggtacatcggctgcctgaagatgaccaccaggacccgacgacgaggctggccatttgcagcactgaccctgacgtggccgccgtcatggctagcaagaacgccaaggtgctgaggccgggctcggcgctcaggaggacgacgtcgacgtctggtcatgggcacgcgggtgcggctgccatacggatgccgatgctcagagtgtccaacttcgtcgacgcatcatcctcattatccgatgggcagggagctggtgtcagctacgcgatcatggtcttggtccttccggctccagctccgaccactaagaatcacaggactagaggacccagaggagaaggaggaggaggagcacgagagtggagcaggcaggagctggagatcgtggaggttgcggcggaccagttagccgtggcgctgtcgcacgcggcagtgctgaaggagtggcagctgactcggcacaagctggccgagcggcagagggtcctggtgcatgcccggcatgacgcagcggtggccaccagggccagggacgcctcgcagagcgccatgcgcgacggcgtgctgaggccgatgcactccgtcgcggggctgctctccctgatgcaggcgcagcagcacgaggacgaggccttccgttgcaccgagcagagggtcgcggtgggtgccatggccaggatcagcgccctctccaccacgctgaccgacgacgtcatggcggcgctgctgacgccgacggctgccggcgtgagcttggcgcggaggccgttcgacccccgcgcgctggttaaggacgcggccggcgtggcggggtgcctcgcccgctgcagggggctcggcttctcgcatcgggcggagatgagctctctgcccgccggatgctgggtggtcggcgacgacaggcgagtgttccacctcctgctgcacatggttggcgttctgctggaccagtgcgaatgccattgccatgacctctgctttgccgtggacactgttccggtgggtgaccaagagaccatgtcaggctcaggccttcctgattggatcacccccaacttctctggctgcaacacggtgtgcgtcaggttccgatttgggatcacaagacacttcagaaacggcttactgctctcgtccagcccacgacctcaagaaagaatcacaagacgcaccagcgtcagcatcagttcagccagctccaagacgcggctaagcatcgctacgtgcaacaagatcgtgcagatgatgaacggcaagatgtggtgggaatccacgccagcgtccggaggccagcatgaagagcacatgagcctcatcctgcacttccagctcgtctatggagtggcatcaccctctgcctcctccccggcaggcggcggcggattctaccacatcggtggcagattcggagtgccctcgccgtccaccagtgctcctcctcagcacaacttcaacggcctgcgcgtcctgctcttgaacactgatgacaccagccgggaggtgacgcggaagctcctggagaggctcggctgccaggtgcttccagttccatcggccgcccgctgcctcagccttctactggggagcgccaccgccaccggcggcggcgatcagccgtcattccagtccccgtacttggtactgcaggcggtgcttgtagacctccacacacctgccgcagctatcgctgacgccgccactgcaatggatgatgggtttgaggttgccctcaggatccgggaggtcaccggcgacaggttcagctggctgctcatacttgtcgcgctgccactgccgccgagagcgagccgcatcgacgttcgcgacgtgtgcaagcggacgggagtgaatggcgtgatctacaaacccatcagtccatcacgctgccagcgctggcagctgagctttacagggttctccaaaacgacaactgaccggtgatagatcatagatccccatgtacttgcggcctgtttgaaacgcgtttgattcacatatttgtaacgtaataggttttttttttgacgaagaggcgaagccccctatttcattaagaaataggcaagtttgaaacaaccgccaccacgtggtaaaacatccaaaagaccaaacacggccagcaccctatctagactctaaccactatcacgagatcagtgaagagcctacgataacaggaaaagttttggcctacgaaggactacataagactttcttatttacatcccaac

SEQ ID NO: 69995 - DNA, 3437 bp, Zea Mays
cgcactcgcaccaggcatatgggtatggtggtacctgagtcctcacggaatcccgagcagctagaggcagcgtcggagacccgcggccaaactaatgaaatggctagctctgaatgccgtgcagcgcagcagcagctgccaccaccttggctcgatgctacagtctagctacacctgtcttgctcccgtctccttccttacttgttcatccccccgcttctcttctccctgcaatgcatgcatgatgtggttcatcttcatctcttcttcttgttccctactcttcacttcggagttgagtgtgagaacgaaggcacggagaaacgggaacagagaggctctctcttcatctgttgtatatcccaccagtgactcgcttgctgtaacatgcgcccaaggattgaagacacggggatatatagtttaattccattggccagaacaaactggagaggtaataaatactagctgactactgtgttgcgcttgatgatggctcattctttattttcagctaattgcttgtatggcaagtgcaaggtgaaccaggagacgcgcgcctaaagattaccaaaaccaatggctgcgcggtgcagcggcggctgcgacgggcgcgaggacagcgccgtggaggcgctggtgcagtggcagaaggtgagcgacttcctgatcggggcgtcctacatgtccatcccgctggagctgctgcacttcgccacctgcgccgacctcgcgccgctgcggtgggtgctcctccagttcggcgccttcatcgtgctctgcggcctcgtccacctcgtcgccatcttcacctacgcccgcccggactcgcgccgcctcctgctggccatcaccgccgccaaggcgctggccgccgtcgccgcgtccgtcgccgccgtctccctccccaccttcgtcccgcagctgctccgcctcaagacccgcgaggcgctgctccgggacaaggcgcgccagctggaccgcgacgtcgccctcgtcaggcgccgcgaggagaccgccacgcgcatcgtccgcgccatcacgaagcacgtctgctgcggctgccacggcggagcctctctcgcgcccgacgtgctgcgcaccgctgtcttccacctctctgacgccctcggcctccacagctgcgccgtctggatgcccgcggctgcggcggcggccagtgatggtggccccagcttgctgcacctggtacatcggctgcctgaagatgaccaccaggacccgacgacgaggctggccatttgcagcactgaccctgacgtggccgccgtcatggctagcaagaacgccaaggtgctgaggccgggctcggcgctcaggaggacgacgtcgacgtctggtcatgggcacgcgggtgcggctgccatacggatgccgatgctcagagtgtccaacttcgtcgacgcatcatcctcattatccgatgggcagggagctggtgtcagctacgcgatcatggtcttggtccttccggctccagctccgaccactaagaatcacaggactagaggacccagaggagaaggaggaggaggagcacgagagtggagcaggcaggagctggagatcgtggaggttgcggcggaccagttagccgtggcgctgtcgcacgcggcagtgctgaaggagtggcagctgactcggcacaagctggccgagcggcagagggtcctggtgcatgcccggcatgacgcagcggtggccaccagggccagggacgcctcgcagagcgccatgcgcgacggcgtgctgaggccgatgcactccgtcgcggggctgctctccctgatgcaggcgcagcagcacgaggacgaggccttccgttgcaccgagcagagggtcgcggtgggtgccatggccaggatcagcgccctctccaccacgctgaccgacgacgtcatggcggcgctgctgacgccgacggctgccggcgtgagcttggcgcggaggccgttcgacccccgcgcgctggttaaggacgcggccggcgtggcggggtgcctcgcccgctgcagggggctcggcttctcgcatcgggcggagatgagctctctgcccgccggatgctgggtggtcggcgacgacaggcgagtgttccacctcctgctgcacatggttggcgttctgctggaccagtgcgaatgccattgccatgacctctgctttgccgtggacactgttccggtgggtgaccaagagaccatgtcaggctcaggccttcctgattggatcacccccaacttctctggctgcaacacggtgtgcgtcaggttccgatttgggatcacaagacacttcagaaacggcttactgctctcgtccagcccacgacctcaagaaagaatcacaagacgcaccagcgtcagcatcagttcagccagctccaagacgcggctaagcatcgctacgtgcaacaagatcgtgcagatgatgaacggcaagatgtggtgggaatccacgccagcgtccggaggccagcatgaagagcacatgagcctcatcctgcacttccagctcgtctatggagtggcatcaccctctgcctcctccccggcaggcggcggcggattctaccacatcggtggcagattcggagtgccctcgccgtccaccagtgctcctcctcagcacaacttcaacggcctgcgcgtcctgctcttgaacactgatgacaccagccgggaggtgacgcggaagctcctggagaggctcggctgccaggtgcttccagttccatcggccgcccgctgcctcagccttctactggggagcgccaccgccaccggcggcggcgatcagccgtcattccagtccccgtacttggtactgcaggcggtgcttgtagacctccacacacctgccgcagctatcgctgacgccgccactgcaatggatgatgggtttgaggttgccctcaggatccgggaggtcaccggcgacaggttcagctggctgctcatacttgtcgcgctgccactgccgccgagagcgagccgcatcgacgttcgcgacgtgtgcaagcggacgggagtgaatggcgtgatctacaaacccatcagtccatcacgctgccagcgctggcagctgagctttacagggttctccaaaacgacaactgaccggtgatagatcatagatccccatgtacttgcggcctgtttgaaacgcgtttgattcacatatttgtaacgtaataggttttttttttgacgaagaggcgaagccccctatttcattaagaaataggcaagtttgaaacaaccgccaccacgtggtaaaacatccaaaagaccaaacacggccagcaccctatctagactctaaccactatcacgagatcagtgaagagcctacgataacaggaaaagttttggcctacgaaggactacataagactttcttatttacatcccaac

SEQ ID NO: 69996 - DNA, 3422 bp, Zea Mays
cgcactcgcaccaggcatatgggtatggtggtacctgagtcctcacggaatcccgagcagctagaggcagcgtcggagacccgcggccaaactaatgaaatggctagctctgaatgccgtgcagcgcagcagcagctgccaccaccttggctcgatgctacagtctagctacacctgtcttgctcccgtctccttccttacttgttcatccccccgcttctcttctccctgcaatgcatgcatgatgtggttcatcttcatctcttcttcttgttccctactcttcacttcggagttgagtgtgagaacgaaggcacggagaaacgggaacagagaggctctctcttcatctgttgtatatcccaccagtgactcgcttgacacggggatatatagtttaattccattggccagaacaaactggagaggtaataaatactagctgactactgtgttgcgcttgatgatggctcattctttattttcagctaattgcttgtatggcaagtgcaaggtgaaccaggagacgcgcggtagatacatacctaaagattaccaaaaccaatggctgcgcggtgcagcggcggctgcgacgggcgcgaggacagcgccgtggaggcgctggtgcagtggcagaaggtgagcgacttcctgatcggggcgtcctacatgtccatcccgctggagctgctgcacttcgccacctgcgccgacctcgcgccgctgcggtgggtgctcctccagttcggcgccttcatcgtgctctgcggcctcgtccacctcgtcgccatcttcacctacgcccgcccggactcgcgccgcctcctgctggccatcaccgccgccaaggcgctggccgccgtcgccgcgtccgtcgccgccgtctccctccccaccttcgtcccgcagctgctccgcctcaagacccgcgaggcgctgctccgggacaaggcgcgccagctggaccgcgacgtcgccctcgtcaggcgccgcgaggagaccgccacgcgcatcgtccgcgccatcacgaagcacgtctgctgcggctgccacggcggagcctctctcgcgcccgacgtgctgcgcaccgctgtcttccacctctctgacgccctcggcctccacagctgcgccgtctggatgcccgcggctgcggcggcggccagtgatggtggccccagcttgctgcacctggtacatcggctgcctgaagatgaccaccaggacccgacgacgaggctggccatttgcagcactgaccctgacgtggccgccgtcatggctagcaagaacgccaaggtgctgaggccgggctcggcgctcaggaggacgacgtcgacgtctggtcatgggcacgcgggtgcggctgccatacggatgccgatgctcagagtgtccaacttcgtcgacgcatcatcctcattatccgatgggcagggagctggtgtcagctacgcgatcatggtcttggtccttccggctccagctccgaccactaagaatcacaggactagaggacccagaggagaaggaggaggaggagcacgagagtggagcaggcaggagctggagatcgtggaggttgcggcggaccagttagccgtggcgctgtcgcacgcggcagtgctgaaggagtggcagctgactcggcacaagctggccgagcggcagagggtcctggtgcatgcccggcatgacgcagcggtggccaccagggccagggacgcctcgcagagcgccatgcgcgacggcgtgctgaggccgatgcactccgtcgcggggctgctctccctgatgcaggcgcagcagcacgaggacgaggccttccgttgcaccgagcagagggtcgcggtgggtgccatggccaggatcagcgccctctccaccacgctgaccgacgacgtcatggcggcgctgctgacgccgacggctgccggcgtgagcttggcgcggaggccgttcgacccccgcgcgctggttaaggacgcggccggcgtggcggggtgcctcgcccgctgcagggggctcggcttctcgcatcgggcggagatgagctctctgcccgccggatgctgggtggtcggcgacgacaggcgagtgttccacctcctgctgcacatggttggcgttctgctggaccagtgcgaatgccattgccatgacctctgctttgccgtggacactgttccggtgggtgaccaagagaccatgtcaggctcaggccttcctgattggatcacccccaacttctctggctgcaacacggtgtgcgtcaggttccgatttgggatcacaagacacttcagaaacggcttactgctctcgtccagcccacgacctcaagaaagaatcacaagacgcaccagcgtcagcatcagttcagccagctccaagacgcggctaagcatcgctacgtgcaacaagatcgtgcagatgatgaacggcaagatgtggtgggaatccacgccagcgtccggaggccagcatgaagagcacatgagcctcatcctgcacttccagctcgtctatggagtggcatcaccctctgcctcctccccggcaggcggcggcggattctaccacatcggtggcagattcggagtgccctcgccgtccaccagtgctcctcctcagcacaacttcaacggcctgcgcgtcctgctcttgaacactgatgacaccagccgggaggtgacgcggaagctcctggagaggctcggctgccaggtgcttccagttccatcggccgcccgctgcctcagccttctactggggagcgccaccgccaccggcggcggcgatcagccgtcattccagtccccgtacttggtactgcaggcggtgcttgtagacctccacacacctgccgcagctatcgctgacgccgccactgcaatggatgatgggtttgaggttgccctcaggatccgggaggtcaccggcgacaggttcagctggctgctcatacttgtcgcgctgccactgccgccgagagcgagccgcatcgacgttcgcgacgtgtgcaagcggacgggagtgaatggcgtgatctacaaacccatcagtccatcacgctgccagcgctggcagctgagctttacagggttctccaaaacgacaactgaccggtgatagatcatagatccccatgtacttgcggcctgtttgaaacgcgtttgattcacatatttgtaacgtaataggttttttttttgacgaagaggcgaagccccctatttcattaagaaataggcaagtttgaaacaaccgccaccacgtggtaaaacatccaaaagaccaaacacggccagcaccctatctagactctaaccactatcacgagatcagtgaagagcctacgataacaggaaaagttttggcctacgaaggactacataagactttcttatttacatcccaac

SEQ ID NO: 69997 - DNA, 3411 bp, Zea Mays
tttacgagtgcccgacataatacactcagtaaatcgtcgagcaatcgaaaaaggctagattccgacagtgacggtgcaccgcactcgcaccaggcatatgggtatggtggtacctgagtcctcacggaatcccgagcagctagaggcagcgtcggagacccgcggccaaactaatgaaatggctagctctgaatgccgtgcagcgcagcagcagctgccaccaccttggctcgatgctacagtctagctacacctgtcttgctcccgtctccttccttacttgttcatccccccgcttctcttctccctgcaatgcatgcatgatgtggttcatcttcatctcttcttcttgttccctactcttcacttcggagttgagtgtgagaacgaaggcacggagaaacgggaacagagaggctctctcttcatctgttgtatatcccaccagtgactcgcttgctgtaacatgcgcccaaggattgaagacacggggatatatagtttaattccattggccagaacaaactggagagcctaaagattaccaaaaccaatggctgcgcggtgcagcggcggctgcgacgggcgcgaggacagcgccgtggaggcgctggtgcagtggcagaaggtgagcgacttcctgatcggggcgtcctacatgtccatcccgctggagctgctgcacttcgccacctgcgccgacctcgcgccgctgcggtgggtgctcctccagttcggcgccttcatcgtgctctgcggcctcgtccacctcgtcgccatcttcacctacgcccgcccggactcgcgccgcctcctgctggccatcaccgccgccaaggcgctggccgccgtcgccgcgtccgtcgccgccgtctccctccccaccttcgtcccgcagctgctccgcctcaagacccgcgaggcgctgctccgggacaaggcgcgccagctggaccgcgacgtcgccctcgtcaggcgccgcgaggagaccgccacgcgcatcgtccgcgccatcacgaagcacgtctgctgcggctgccacggcggagcctctctcgcgcccgacgtgctgcgcaccgctgtcttccacctctctgacgccctcggcctccacagctgcgccgtctggatgcccgcggctgcggcggcggccagtgatggtggccccagcttgctgcacctggtacatcggctgcctgaagatgaccaccaggacccgacgacgaggctggccatttgcagcactgaccctgacgtggccgccgtcatggctagcaagaacgccaaggtgctgaggccgggctcggcgctcaggaggacgacgtcgacgtctggtcatgggcacgcgggtgcggctgccatacggatgccgatgctcagagtgtccaacttcgtcgacgcatcatcctcattatccgatgggcagggagctggtgtcagctacgcgatcatggtcttggtccttccggctccagctccgaccactaagaatcacaggactagaggacccagaggagaaggaggaggaggagcacgagagtggagcaggcaggagctggagatcgtggaggttgcggcggaccagttagccgtggcgctgtcgcacgcggcagtgctgaaggagtggcagctgactcggcacaagctggccgagcggcagagggtcctggtgcatgcccggcatgacgcagcggtggccaccagggccagggacgcctcgcagagcgccatgcgcgacggcgtgctgaggccgatgcactccgtcgcggggctgctctccctgatgcaggcgcagcagcacgaggacgaggccttccgttgcaccgagcagagggtcgcggtgggtgccatggccaggatcagcgccctctccaccacgctgaccgacgacgtcatggcggcgctgctgacgccgacggctgccggcgtgagcttggcgcggaggccgttcgacccccgcgcgctggttaaggacgcggccggcgtggcggggtgcctcgcccgctgcagggggctcggcttctcgcatcgggcggagatgagctctctgcccgccggatgctgggtggtcggcgacgacaggcgagtgttccacctcctgctgcacatggttggcgttctgctggaccagtgcgaatgccattgccatgacctctgctttgccgtggacactgttccggtgggtgaccaagagaccatgtcaggctcaggccttcctgattggatcacccccaacttctctggctgcaacacggtgtgcgtcaggttccgatttgggatcacaagacacttcagaaacggcttactgctctcgtccagcccacgacctcaagaaagaatcacaagacgcaccagcgtcagcatcagttcagccagctccaagacgcggctaagcatcgctacgtgcaacaagatcgtgcagatgatgaacggcaagatgtggtgggaatccacgccagcgtccggaggccagcatgaagagcacatgagcctcatcctgcacttccagctcgtctatggagtggcatcaccctctgcctcctccccggcaggcggcggcggattctaccacatcggtggcagattcggagtgccctcgccgtccaccagtgctcctcctcagcacaacttcaacggcctgcgcgtcctgctcttgaacactgatgacaccagccgggaggtgacgcggaagctcctggagaggctcggctgccaggtgcttccagttccatcggccgcccgctgcctcagccttctactggggagcgccaccgccaccggcggcggcgatcagccgtcattccagtccccgtacttggtactgcaggcggtgcttgtagacctccacacacctgccgcagctatcgctgacgccgccactgcaatggatgatgggtttgaggttgccctcaggatccgggaggtcaccggcgacaggttcagctggctgctcatacttgtcgcgctgccactgccgccgagagcgagccgcatcgacgttcgcgacgtgtgcaagcggacgggagtgaatggcgtgatctacaaacccatcagtccatcacgctgccagcgctggcagctgagctttacagggttctccaaaacgacaactgaccggtgatagatcatagatccccatgtacttgcggcctgtttgaaacgcgtttgattcacatatttgtaacgtaataggttttttttttgacgaagaggcgaagccccctatttcattaagaaataggcaagtttgaaacaaccgccaccacgtggtaaaacatccaaaagaccaaacacggccagcaccctatctagactctaaccactatcacgagatcagtgaagagcctacgataacaggaaaagttttggcctacgaaggactacataagactttcttatttacatcccaac

SEQ ID NO: 69998 - DNA, 2901 bp, Zea Mays
agaaaatgaggttcctaaattagtcttaatccattttgaggggggtagaaaaacaactggcagggacgctggtgtgcgtcccccactccctacaacgacagtatgtgcagtgcatcgatcttccttcctcgatgccccaatacaatgtttcagaagaacctgctgcccctggccgcagtcctcgccgtcgtcgcatcgctcatggccgctgccgccggttacccgtggtcagtgtgcggtgacagcaccgacagcagcgactttatgcctaacggcagataccaggcccatctcgacttcatcgcagctgccttgcccaagaacgcctccaagtcgccatacctcttcgcaaccgtcgtcgccggcaccgtcccggaccaggtctgggccgtggggctctgccgcggcgacgccaagcccacggcgtgcttcacctgcctcaccctggccttccaggacctgcccggctactgcacctacgccaaggacgccagcatctactacgaccgctgcatggtccactactccgacgtgcacacactctccggcgacgacgacaccggcccgatgatggacaggtacgccatcggcgacacccaaaccatcgcatcggaccccggccggttcgtcctcctcgtggcggcgctcgtgaacgccaccgccgactacgccgcgtacggctccggctccgccgcccgccgggggtttgcgacaggcgaagccgacgcaggcttcgacccggagttccccaagctctacgccctggcccagtgcatgccgggccagacgccggcgctgtgccgggagtgcctctccaggctcatatcgcagtcgctggacggattccggaacagtatcggaggcagggtgctcgccgtcagctgcacctacaggtacgagagtgcgcctttctatgatggaccggcgatggtacggctggcaccaccaagctctggagcgccggcgccggcgccggctgtgaactttcgggttcctgcggcggacggacggaagtaccatgtgccctgggtggctcttgccgttgtgctaccggctctagcagccttgaaccttgtcgcctgcctctgtctccgcttccggaggcggcgccggcggcaaccaactgcaccacgggacaagcagcaaaaagatcccgtgcattccaccgaagcagaggacatcgagatggtggagtccatgatgatggacgtctccacccttcgagccgccacaggggatttcgacgagagcaacaagctcggcgaaggcggctttggtgctgtgtacaagggtgtcctcccggatggcgaggagatagcggtgaagcgtctgtctagcagctcgtcgcagggagtggaggagctgaagaacgagctcgcgctggtcgccaagctgaagcacaggaacctcgtcaggctcgtcggcgtctgcctggagcagcaggagcggctgctggtctacgagttcgtccccaaccggagcctcgacctggcactcttcggtgctgatggacgtgaacagccgccgctggagctggactgggggcagaggtacaggatcatcaacggcatcgctcggggcctgcagtacctccacgaggactcccggctcagggtggtgcaccgcgatctcaaggccagcaacgtcctccttgacaagaacatgaaccccaagatctcggacttcggcctggccaggatctttggccgagaccagacgcaggccgtcaccagccgcgtcgtgggcacctatgggtacatggcaccggagtacatgatgcgggggaactactccgtgaagtcggacgcgtttagcttcggcgtcatggtgctggagatcgtaacgggtcggaagaacagcaacgatggctgcgatctcttgaccacggtatggatgcactgggaggccgggacggtggcggagctggtcgaaccgacgagcatgggcggcagtttcccggagggcgacgtgctgaggtgcatccacatcggcctcttgtgcgtccagccagaccctgcggcccgaccagtgatgtcgtcggtcgtcacgatgctcggcagcgacacggtcaccctccaggctccgtccaagccgggattcttcgccaggaacaacagcgcctacacaaccgtgtcgacagtgccggtggatgcttagcctggccataggactgagagaccgtatccagtgcacatggtttgatggtgcacaaaatacacatattaaatcctgctctttcatgtaacatccaatggctcacacgtatctcacctctctctcactgctttttgctaaaatcccctcccatctctctcgtacctgctctctattagtttgctaaaaccccctctgctccatcctcgatggttcttcctggagaccaaacaaactgcaccgtcagtcagcttcccttgctatcacggttggccgacatcttctccaatgttgttgtgctttcaaggaagtgcataatatcagcttctgcaagtgtcacaacatgtcgctgggagagcagagagagctgttgagtgggggaagcagacagagctgctaagtggggggaaatagagagagtgtctgagtgcagggttcaattaaaacatgtcaaatttaacagtatccatggcacaatcaaaacatggcaatctgaaatctgcaccaccaaataagctaaccatacataacatgaactatatttaggtgccattcttggcaattttgctcttccgtggctttggtaattctttggctctcttgattcttttactccttcccttcgaaagaacattggttggtggatggatttcaatctcttgtggaattgtgcaaccaataaaggactcatattcttgttgacgagtttgtactgtggtaggcacaatttgaccaaacgaagtctct

SEQ ID NO: 69999 - DNA, 2329 bp, Zea Mays
aaacaattaaatatcccgcattccttggcgaaggagggaggagtagccgcccggcgatgttcacctgccgctgtgccgtcgtcgttgtcgtcgccctcgccgtgcttctactgccggccgcggcgacccagttggtttactgcgacgattccacctatgccgacaacagcacgttccaggcgaacctgaatctccttagcgcggcgctccccgccaacgcctccgcctcgccggcagggttcgccactggcgcagtcggtacggcgccggaacaggtcaatgggatggcgctctgccgcggcgatacgaacgcttcctcctgttcctcctgcgtcgcggccgcgttccggtacgcgcaggcgcagcagggctgccccctcacgaagggcgccaccgtctacctggacgattgtacccttcgcttcgccggcatccgattcctcgacttccttagagaggaccagtggctcgtcccagaattgtcccgcgattgaacctgcctctgggagcgtcaacgccacagatgcctggttcggcgccgccgtcgcggggatcttcacggccctggtcgaccgcgcagcggcggcgagcaacgcgacgaggaagtacttcgccacggcggagatggatttcgaccctaagctctacggcctcgcgcagtgcgcgccggatctgacgccggcgcagtgccagggctgccttggagacctccagtcgagggtgacggcgcagttcctgagcggacggcccctcggcaacaacgctttcatggtgtggtgctccctgaggtatagtgtgtcgccgttctacgctggccgggcgatgctacagcttccggcgccgccggcacctccaccaacgtccacgcccacgcttcattcttcagggaggaaagtgaatgcagcaggaatctctgcaggcatagcctgtgttgttgtgttgatgttgattctttcggtctttttctttattcgcttcaggctaaggattaaagtgaagaaaaatgatcactcactaaagaagattgggagagctcaatgcacgatctttgatttattgacactggaagaggcgactgaacatttcgcagagaaaaataagcttggaaaaggtggtttcggtattgtgtacaaggggatactgtctgacgggcaagagatagcagtcaagaaacttttaggaagagccgggagtgggttggatcagctacaaaatgaggtgcaagtactggcagagcttcagcacaaaaatcttgttgggttacagggtttttgctcgcatcataatgatacactgctagtttatgaatacatcaagaacgggagccttgacactattctatttgatgatagggaaggaaatgcacttaactgggagcaacagtacaacatcatctttggaattgccaaggggattttgtatctccatgaggactcaagcatgaggatcatccatcgggacctgaaggcaaataacattcttcttgacgacaacatggaaccgaaaattgcagatttcgggttggcaaggcttctaggagaaggccacacacatactcagacaggcagagttgttgggacattcggttatatggcgccagagtatgcatcacatggtagtgtgtcgcctaagattgacatctttagcttcggcgtcttgatccttgagatcgtgaccaggagaagcaactgcagctctgatgaccacagcactgtgaatctcctaagtgatgtctgggatcactggaagaaagggacgatgccacaaatgcttcaccggtcactggatgagtttgctcgaagccaagcgctgcgatgcatccacattggtctgctgtgcgtccagccggaacctgacgataggcctgacatatcagccgtagtgttcatgttaaccagggatagcatagagctccagccgccggggcagcctgcgttcttcttcggtagagaatcaccttcagctttacgattagatggtcaaagcagctatgtatatcaccgtgatggtttcaaattgggacagggcgtctcggtgaatggggttacactcagtgaactgtatcctagataggatcaaagtctggatactgagcacatggaatacagttaacatgttgaactcgataggtttctttgatgattagggtcttgctaatcccctctaacctgtctccatcctttagaaatgaagtaatcgatgtagatttactccgtttcgttttagttgtcgctggatagtgcaaaattgaactatctagcgacaactaaaaagaaacgaaggaagtacatatctaattgtggtggctaaggttggtaaaagtgttggc

SEQ ID NO: 70000 - DNA, 2202 bp, Zea Mays
aaacaattaaatatcccgcattccttggcgaaggagggaggagtagccgcccggcgatgttcacctgccgctgtgccgtcgtcgttgtcgtcgccctcgccgtgcttctactgccggccgcggcgacccagttggtttactgcgacgattccacctatgccgacaacagcacgttccaggcgaacctgaatctccttagcgcggcgctccccgccaacgcctccgcctcgccggcagggttcgccactggcgcagtcggtacggcgccggaacaggtcaatgggatggcgctctgccgcggcgatacgaacgcttcctcctgttcctcctgcgtcgcggccgcgttccggtacgcgcaggcgcagcagggctgccccctcacgaagggcgccaccgtctacctggacgattgtacccttcgcttcgccggcatccgattcctcgacttccttagagaggaccagtggctcgtcccagaattgtcccgcgattgaacctgcctctgggagcgtcaacgccacagatgcctggttcggcgccgccgtcgcggggatcttcacggccctggtcgaccgcgcagcggcggcgagcaacgcgacgaggaagtacttcgccacggcggagatggatttcgaccctaagctctacggcctcgcgcagtgcgcgccggatctgacgccggcgcagtgccagggctgccttggagacctccagtcgagggtgacggcgcagttcctgagcggacggcccctcggcaacaacgctttcatggtgtggtgctccctgaggtatagtgtgtcgccgttctacgctggccgggcgatgctacagcttccggcgccgccggcacctccaccaacgtccacgcccacgcttcattcttcagggaggaaagtgaatgcagcaggaatctctgcaggcatagcctgtgttgttgtgttgatgttgattctttcggtctttttctttattcgcttcaggctaaggattaaagtgaagaaaaatgatcactcactaaagaagattgggagagctcaatgcacgatctttgatttattgacactggaagaggcgactgaacatttcgcagagaaaaataagcttggaaaaggtggtttcggtattgtgtacaaggggatactgtctgacgggcaagagatagcagtcaagaaacttttaggaagagccgggagtgggttggatcagctacaaaatgagatgatagggaaggaaatgcacttaactgggagcaacagtacaacatcatctttggaattgccaaggggattttgtatctccatgaggactcaagcatgaggatcatccatcgggacctgaaggcaaataacattcttcttgacgacaacatggaaccgaaaattgcagatttcgggttggcaaggcttctaggagaaggccacacacatactcagacaggcagagttgttgggacattcggttatatggcgccagagtatgcatcacatggtagtgtgtcgcctaagattgacatctttagcttcggcgtcttgatccttgagatcgtgaccaggagaagcaactgcagctctgatgaccacagcactgtgaatctcctaagtgatgtctgggatcactggaagaaagggacgatgccacaaatgcttcaccggtcactggatgagtttgctcgaagccaagcgctgcgatgcatccacattggtctgctgtgcgtccagccggaacctgacgataggcctgacatatcagccgtagtgttcatgttaaccagggatagcatagagctccagccgccggggcagcctgcgttcttcttcggtagagaatcaccttcagctttacgattagatggtcaaagcagctatgtatatcaccgtgatggtttcaaattgggacagggcgtctcggtgaatggggttacactcagtgaactgtatcctagataggatcaaagtctggatactgagcacatggaatacagttaacatgttgaactcgataggtttctttgatgattagggtcttgctaatcccctctaacctgtctccatcctttagaaatgaagtaatcgatgtagatttactccgtttcgttttagttgtcgctggatagtgcaaaattgaactatctagcgacaactaaaaagaaacgaaggaagtacatatctaattgtggtggctaaggttggtaaaagtgttggc

SEQ ID NO: 70001 - DNA, 2357 bp, Zea Mays
gaccaaaataccaagttgagtgaaacacgtgcacctgctctggtcaggtttctgcgaaactggccaagcaacttgttgcagttgcagctcatctttccgtcagtttttggcttttggctactatatcatataataccggctaccgatgccattgtcacgcatgcatagctgatgatggtcggactctgagctcctctccgtgccaagtttctctgcacccatcgcttcagctcaccggttctcccccctgcactgcgctggctgtatggctcctcccttcgcgtgcgccatgcacggccgcgccctgctagcagcagcagcagcagcgctgctcgcgtcggccgtcacgctcacgcttctcccctccgccgccgcgcagccgtgggtgggcccgtggccgacgtgcgacgacaccaccggcaactactcggccggcagcgcctacgccaaaaacatcaagcagctcatcctcagcctccaggcaaacgcgtccaacacgcccgccctcttcgcgacgggctccgccggcgcgggcgccgacgccgtgtacgggctcatactctgccgcggcgacctcagccccaccgactgcttcgactgcggcaccaacgccggccaggacgtgtaccgggtctgcaacggcacccgggacgccgcgctcgtctacaaccagtgctacgtccgcctcgcccccacggacttcctcgccaccaccaacaacaccggcatgagagacctcatcaacggcaacagcgtccccgcgggagtcaacgtgacggcctacgacggcgccatcaccaggctgctcaacgccaccgcgcgctacgcggtggacagctccgccccgtccttgtctcccaggaagtacttcgccacgggccagatggcgggggtcgacccgcggttcccgaccggcatctggtccatggcgcagtgcgcgggggacatatcgccggtgcagtgccggagctgcctggacgacttgctggcgcagtggtggcagaagttcgacagcaaggagatcggcgcgaggctcgacggttcgcgatgcaacctcaggttcgaaacggggaacttctacaccggcagcccgatggtgaagctgcagatgaacggcgaggaggccgctccagctccggtgccttccacggatgttctacctggcaccacaggaggtaagaaaaattcagttggcaaacttctcggaattatattgccgatagtatttgttgctgcaatagctgccatagccctctgcatttggattgttcgtaagaagagaacataccaaggaacaaatcttccccaaacagacacaacttatatggccgaggacatcgaaagcatcaagtcgatattgttatcgttgccatcactacaagcagcaacaaataattttgatgaaagcaataaactaggcgaagggggatttggaacagtttacaagatcatgagaagaaaagacaactagattggaggaaacgattcaacataattgaaggagttgcacgtggattgcaatatcttcatgaagactctcaaaataagatagttcaccgtgacctaaaagcaagcaatattctgttggattcaaatatgaaccctaagattggtgactttggcctagccaggctctttttgcaagatcagactcgaggcatcacaaaccacatcgttgggacattcggctacatgtctcccgagtatgtgatgcgtggacaatactccataaaatcagatgtatttagtttcggcatccttgttatagagattgtaacaggacaaaagaacaatgggcattacttcgacgagcaaaacgaggatgttgtgagcattgtatggaagcactggagcgagggaacacttgcagagattatagatgattctttagggagaaactactcagagactgaggtgctaaaatgtgttaacattggcttgtggtgccttcaacagaatccaatggaccgacctacaatgtcagatgtcatggtgatgctcaatgatgatgatactagttctctacctgctgctgcaaaaccaacttttttcttggatgcaagctcaggctactcttacacctcgggcaccatttcacatccttctgcaaggtagtgtaggctaaggcctaatgcacacctttatatgaatatcgacatattgttgcttgtttgtttcttattgtgtattggttgaaataaacatggaattcatcctgaattgtaatagcttgtgctcattattagtttcttaccaaatcctcaaatataaattttctcttactatatgtcctacaagctttcagaaagtatggaaatgcttacacactttaaaaggttgtgctcactatatatgtg

SEQ ID NO: 70002 - DNA, 2332 bp, Zea Mays
tccatatccaacttgccaatgtgccattgaccatcgcaatgcgtagcactggtgcatcgatcctcctcttgcatcgagcgctcctccgtgccaagctgccaagcttctgtgcaccatcagtccagcagctcacagatccttcctccttcgcgcgcgccatgcacggccgcgtcaccgtcctgctagtagtagccgcagcagtgctgctgctcgcgtcgtcggccgtcgcgcagccgtggccgagctgcaacggcgccagcggcaactacctggccggcagcgcctacgccaacaacaccctgcagctcatcctgggcctccagacgaacgcgtccgactcgcccgcctacttcgcgtccggctccgtcggagcgggcgcggccgccgtccacgggctcatgatctgccgcggcgacgtcagcagcaacgactgcttcgactgcggcacccgcgcgtggcaggacgtgcaggctgtgcagccgctctgcaaccgcaccagggacgccgcgctcgccgacaaccagtgctacgtccgcgtcgccgccaccgacttcctcgcctcgcccaacaacaccggcctggtgagcgtcgtcggcggcgccagcatccccagcggcgtcgacgtcgcggcctacgacgccgcgctcaggcggctgctcaacgccaccgcgcggtacgcggtggacagctcggtcccgtcgtcgccgccgaggctgtacttcgcgacggggcagttcgtggggctcgacccgcgggtccccaacatctggtccctggcgcagtgtgcgggggacctggcgccggcacagtgccggaggtgcctggatgacctgatgacactgtggtggaacggaagtgggttcaagccggacggggaaagcgcgatgttcgctggctcgcggtgcaacctcaagtctgacctgggggacaagttctacaccagcagccccatggtgaagctgcagatgaacagcgaagtggtcgttccagcgcaagcgccttccatggcaggtaaaaataattcatcgggcaagcttcttggaatcatattgccaataatgtttgttgttgtagtaactgccatagtcctctttgtttgtaaaaagagaagatatcgaggaataaagctgccacacggaactcatatggccgaggactttgaaagcatcaagtcaactttattatcattgtcatcactacaagttgcaacaagtaactttgatgaaaacaataaacttggtgaagggggattcggtgtagtttataagggagatctttctggacaacaagtggctgtgaagaggttgtcaaaaggttcgggtcaggggctagaagaactaaaaaatgagttagttctggtcgccaaacttcaccataagaaccttgtccgcctagaaggtttttgcttagaagagggagaaagattgcttgtctatgagtacatgcccaacaaaagccttgacactattctttttgaccccgaggaaaaaatacgactagattggaggaaacggttcaacataataggaggagttgctagaggattacaatatctccatgaggaatctcaaaagaagattatacatcgtgacatgaaagcgagcaatgttttgttggatgaagacatgaaccctaagattggagactttggcctagctagactctttgggcaagatcagactcgagatgtcacaaaacacattgttgggacatttggctacatgtctcctgagtatgtgatgcgtggacagttttccacaaaatcagacgtgttcagttttgggatccttgttatagagatcataacagggcggagaaacattgggcactacttctttgatgagcaaaatgaagatattataagcctcgtatggagacactggactgagggaacaattgtagagatgatagatgattctcttgggagaaattactcggagagcgaggtgctaaaatgcgttaacattggtttgttgtgccttcaacatagtccaatggatcgacctacgatgtccgatgtcatggtgatgcttaatggtgatgatactagttctataccgtctgctgcgaggcccacatttttcttggatagaagcactccttactcctataattcatgtactattacacatatgtctcctaggtagcacaaacaattgttgatagtagcatattgttacttgttcgcatcttgatgtatagtagtttagatcaactagtttgatttatcacaaagtgtgatttgtagttgccatttgtaattgtggatttgaaagttgcctagagaggggtgaatatgtgaaacctaaaatttatcaaataaagaataaaa

SEQ ID NO: 70003 - DNA, 879 bp, Zea Mays
taaacagttgtattgtgtgctgtctgtgtatggaaatcagtagctctgtggactgtggtcaggaaaaagaacagccaacaaataaacgtccaaggtcagaaagtactacagaatcaagcacaaaagcatccagggagaaaattagaagggacaagctgaacgagaggtatgttccctgattcttggaattgggtgccattttggagccagggaaaactcctaaaatggacaaaacagctatattgagtgatgctattcgtgtagtaggtgaattgcgtagtgaagcaaaaaagctcaaggattcaaatgagaatctccaagagaagattaaagagctgaaggccgagaagaatgagctgcgagacgagaagcaaaggctgaaggccgagaaggagagcctggagcagcagatcaagttcctgaatgcccggccaagcctcgtaccacaccacccagtgatcccagcctctgcgttccctgctccccaggggccagcagccgccgccaggcacaagctgatgatgcctgtgattggctaccctggattcccgatgtggcagttcatgccgccttcagatgttgacacctctgatgaccctaggtcttgtcctcctgtggcgtagaagccgtgcgaaatcctgttggaaagaggcgatgctgccttccattgattcaaatcttgatcggtccgcagtgttgttggtgtagttgattccagaactgaaggggatgttacatgtgtcggacggtgacatggggtgatctgatgacccctttgtatattatatatggtatggtataaataaattccgcgaccagaagctaatgtggatcggtggattagcttatgtctattcttgcctgtttggttatgttcct

SEQ ID NO: 70004 - DNA, 1941 bp, Zea Mays
aaatacttgcaaaatctcgtaaattcgaagaatttaatctatagaaaaaggtggtcaaatatacgtattgaagactactccaagtcaaaggtggtcaaatattcttgactgaagatagtagtttgcagaatctgttagaaacatacaatcctcattctgcaatcaacttgtggctgctctattgttgggcctttataaggctagttactacccttgttcacagagaagaatagataaattccttttgggtcagtatattctttatgtattgatctcttggttcatccaatagtctgcagaaacaggttgcacacaagttgttgtaattgaatccttcatgattggtgtggtgtgaagaggattaccatattgtgctggggttctgacagctccattgctctttagtacatacaagctcatctttgatgttaagttggagaagttttgaggtgtttggttggctgctttaaacagttgtattgtgtgctgtctgtgtatggaaatcagtagctctgtggactgtggtcaggaaaaagaacagccaacaaataaacgtccaaggtcagaaagtactacagaatcaagcacaaaagcatccagggagaaaattagaagggacaagctgaacgagaggtatgttccctggtgagacaagacaatgattgcattttagtttgcagtttaatctttttttctcttcatattatcgtattcgtcaactaccactgtacttatgatattctttttgttagattcttggaattgggtgccattttggagccagggaaaactcctaaaatggacaaaacagctatattgagtgatgctattcgtgtagtaggtgaattgcgtagtgaagcaaaaaagctcaaggattcaaatgagaatctccaagagaagattaaagagctgaaggtctatactatttcatgtggccaagttataaatggtgctgttcagatgggaggtggcacgtgatgtgttgtttaggcacttcatactgttccattttcttgatttatgatcccctttttccatttggtcatttttttttcttatctagatttaattcatccagtcaaataacatgggaataattattagtacacctgtcattctccctccagtttgtggtttagtttattttgggttgcttgcattagcaactttatatccacataatgcgtttttttttcttaaatggttaaaccctgcagctgtataacagtatggacatttgtcaattcttttctctactgtatacacttctttgctacgtgttccataaaatatatagaggtttatgattcagcatctcatgtgctgcaaaaggctttggccttcgattttgctggttgttcatcagaaaaacaatctcaccctgaaatactttccttttgcaggccgagaagaatgagctgcgagacgagaagcaaaggctgaaggccgagaaggagagcctggagcagcagatcaagttcctgaatgcccggccaagcctcgtaccacaccacccagtgatcccagcctctgcgttccctgctccccaggggccagcagccgccgccaggcacaagctgatgatgcctgtgattggctaccctggattcccgatgtggcagttcatgccgccttcagatgttgacacctctgatgaccctaggtcttgtcctcctgtggcgtagaagccgtgcgaaatcctgttggaaagaggcgatgctgccttccattgattcaaatcttgatcggtccgcagtgttgttggtgtagttgattccagaactgaaggggatgttacatgtgtcggacggtgacatggggtgatctgatgacccctttgtatattatatatggtatggtataaataaattccgcgaccagaagctaatgtggatcggtggattagcttatgtctattcttgcctgtttggttatgttcct

SEQ ID NO: 70005 - DNA, 1482 bp, Zea Mays
ggaagttgaaaaaagcccaaacaaacagggccacagtatggaaatcagtagctctgtggactgtggtcaggaaaaagaacagccaacaaataaacgtccaaggtcagaaagtactacagaatcaagcacaaaagcatccagggagaaaattagaagggacaagctgaacgagaggtatgttccctggtgagacaagacaatgattgcattttagtttgcagtttaatctttttttctcttcatattatcgtattcgtcaactaccactgtacttatgatattctttttgttagattcttggaattgggtgccattttggagccagggaaaactcctaaaatggacaaaacagctatattgagtgatgctattcgtgtagtaggtgaattgcgtagtgaagcaaaaaagctcaaggattcaaatgagaatctccaagagaagattaaagagctgaaggtctatactatttcatgtggccaagttataaatggtgctgttcagatgggaggtggcacgtgatgtgttgtttaggcacttcatactgttccattttcttgatttatgatcccctttttccatttggtcatttttttttcttatctagatttaattcatccagtcaaataacatgggaataattattagtacacctgtcattctccctccagtttgtggtttagtttattttgggttgcttgcattagcaactttatatccacataatgcgtttttttttcttaaatggttaaaccctgcagctgtataacagtatggacatttgtcaattcttttctctactgtatacacttctttgctacgtgttccataaaatatatagaggtttatgattcagcatctcatgtgctgcaaaaggctttggccttcgattttgctggttgttcatcagaaaaacaatctcaccctgaaatactttccttttgcaggccgagaagaatgagctgcgagacgagaagcaaaggctgaaggccgagaaggagagcctggagcagcagatcaagttcctgaatgcccggccaagcctcgtaccacaccacccagtgatcccagcctctgcgttccctgctccccaggggccagcagccgccgccaggcacaagctgatgatgcctgtgattggctaccctggattcccgatgtggcagttcatgccgccttcagatgttgacacctctgatgaccctaggtcttgtcctcctgtggcgtagaagccgtgcgaaatcctgttggaaagaggcgatgctgccttccattgattcaaatcttgatcggtccgcagtgttgttggtgtagttgattccagaactgaaggggatgttacatgtgtcggacggtgacatggggtgatctgatgacccctttgtatattatatatggtatggtataaataaattccgcgaccagaagctaatgtggatcggtggattagcttatgtctattcttgcctgtttggttatgttcct

SEQ ID NO: 70006 - DNA, 3354 bp, Zea Mays
gagacccattcagcccaccggctacacggcccatattccgtactcgtgaacctcgtgctgacgtgctcacacagtcactccgtttagctcaaatccttatcggcgactcggcgtcggagctcacgaccacgaccgcttccacgccctcgaccccgaacccccaatcccggacgcgaccgctgaaccctagcatactccggccatctgctgccggccccggcgatcccccgccatggcctcccccgagggcacaacgtgggtcttcgactgtccccttatggacgacctcgcggtcgccgccgacttcgcggcagcccccgcgggaggatttttctgggcagcgccgccgtcgctgcagccgcaggcgccagtgcagtctgtcgttgccgcgtcggctcccaacccatggtaattgccggattacggtctcgatttgggctcggccgtggcggtggttggttggacttcgtggggttgggttgcatttggtcggggttcgttgccagcatatctgtagattctgtacgtatagtagttcgttatatggatcaatgacttgattggaattcggtgaagcggctgaactgtgggatttggaccgtgtccttggaatcgtgtttgcccaacattaatagtagaactgattatggttctttatgtttccaatttactataccagcgtcgtcctgtggaaggtgtgggctgtggactctgttggttctgccagtggagttgtgtgagaggactgaggaaatggttcacaggatgggtcagtggacctttactataagttctaagtagtatggcgtgaaaggactgttcccatcttatggtgtgcaagctggtaggtaggtgcatataggtagtctcatcaagcctagatgctttcctttgggcacacctttgtgtcatctatactcttgtcacaaaaacatattgtttattaaaacatttaataaagcattagaaactacaaacatcaataaccatcacattatttatttggaaatatgtaagttatatatgtgtagatttgtattcaaaatctgttaaacttgaaggattttaagaatttattctgtgtggccctgtggaatgtgtggatgagtcggtgtacctttactgtaataattctcggtagaacggtggaaaggattgttcacatcttatggtgctccgctggtgggtaggcaactaggcatatataaggcctgtttagtttagcttttttctgactattttttctaagaatctggatgtggagaaaatctgactgtgggaagaatctgaatatcgtggggattacacgcggaggaagatgaagtggtccaaagggtcaatgatctagaaagcgatgtatttctaatatcgtgacgactcgaccgattatgcgttcatgttgattttggacggtttttaccaaaacaattcttatagaagcggactgaaaagctggggcgtttggcagtccgcaacagattttggtggccggaagttgaaaaaagcccaaacaaacagggccacaggtagtgttatggctcctcatctagcctagattgcttttgtgcacactttgtgtcatctatactccctccagtcaccattgaaaatatttagctaaaccttggaaactacaataataactgtttagggttacattatttatttgggaacttaaagttttatgtgtagatttgtatcaaaatacttgcaaaatctcgtaaattcgaagaatttaatctatagaaaaaggtggtcaaatatacgtattgaagactactccaagtcaaaggtggtcaaatattcttgactgaagatagtagtttgcagaatctgttagaaacatacaatcctcattctgcaatcaacttgtggctgctctattgttgggcctttataaggctagttactacccttgttcacagagaagaatagataaattccttttgggtcagtatattctttatgtattgatctcttggttcatccaatagtctgcagaaacaggttgcacacaagttgttgtaattgaatccttcatgattggtgtggtgtgaagaggattaccatattgtgctggggttctgacagctccattgctctttagtacatacaagctcatctttgatgttaagttggagaagttttgaggtgtttggttggctgctttaaacagttgtattgtgtgctgtctgtggtaaattcttcttctatttttccacatatatttcgttagatgtagtttgtagggttatgacttgctatttgctaagttgaaaagcaccaagtagtgattttttatatttactaattattgtcttcgatttgcttgcatagatattttgtttaccatgctatgttatttgtctttttttgcttcttattatggcgcattatcttgatatttggcatcctaagggcgtacccagtgctgtaggcttcccgcactgtgcggggtctggggaagagtatctttaaatatttggcatcctaacattggcttttattttagcagtatggaaatcagtagctctgtggactgtggtcaggaaaaagaacagccaacaaataaacgtccaaggtcagaaagtactacagaatcaagcacaaaagcatccagggagaaaattagaagggacaagctgaacgagagattcttggaattgggtgccattttggagccagggaaaactcctaaaatggacaaaacagctatattgagtgatgctattcgtgtagtaggtgaattgcgtagtgaagcaaaaaagctcaaggattcaaatgagaatctccaagagaagattaaagagctgaaggccgagaagaatgagctgcgagacgagaagcaaaggctgaaggccgagaaggagagcctggagcagcagatcaagttcctgaatgcccggccaagcctcgtaccacaccacccagtgatcccagcctctgcgttccctgctccccaggggccagcagccgccgccaggcacaagctgatgatgcctgtgattggctaccctggattcccgatgtggcagttcatgccgccttcagatgttgacacctctgatgaccctaggtcttgtcctcctgtggcgtagaagccgtgcgaaatcctgttggaaagaggcgatgctgccttccattgattcaaatcttgatcggtccgcagtgttgttggtgtagttgattccagaactgaaggggatgttacatgtgtcggacggtgacatggggtgatctgatgacccctttgtatattatatatggtatggtataaataaattccgcgaccagaagctaatgtggatcggtggattagcttatgtctattcttgcctgtttggttatgttcct

SEQ ID NO: 70007 - DNA, 1084 bp, Zea Mays
gagacccattcagcccaccggctacacggcccatattccgtactcgtgaacctcgtgctgacgtgctcacacagtcactccgtttagctcaaatccttatcggcgactcggcgtcggagctcacgaccacgaccgcttccacgccctcgaccccgaacccccaatcccggacgcgaccgctgaaccctagcatactccggccatctgctgccggccccggcgatcccccgccatggcctcccccgagggcacaacgtgggtcttcgactgtccccttatggacgacctcgcggtcgccgccgacttcgcggcagcccccgcgggaggatttttctgggcagcgccgccgtcgctgcagccgcaggcgccagtgcagtctgtcgttgccgcgtcggctcccaacccatgtatggaaatcagtagctctgtggactgtggtcaggaaaaagaacagccaacaaataaacgtccaaggtcagaaagtactacagaatcaagcacaaaagcatccagggagaaaattagaagggacaagctgaacgagaggccgagaagaatgagctgcgagacgagaagcaaaggctgaaggccgagaaggagagcctggagcagcagatcaagttcctgaatgcccggccaagcctcgtaccacaccacccagtgatcccagcctctgcgttccctgctccccaggggccagcagccgccgccaggcacaagctgatgatgcctgtgattggctaccctggattcccgatgtggcagttcatgccgccttcagatgttgacacctctgatgaccctaggtcttgtcctcctgtggcgtagaagccgtgcgaaatcctgttggaaagaggcgatgctgccttccattgattcaaatcttgatcggtccgcagtgttgttggtgtagttgattccagaactgaaggggatgttacatgtgtcggacggtgacatggggtgatctgatgacccctttgtatattatatatggtatggtataaataaattccgcgaccagaagctaatgtggatcggtggattagcttatgtctattcttgcctgtttggttatgttcct

SEQ ID NO: 70008 - DNA, 1735 bp, Zea Mays
gagacccattcagcccaccggctacacggcccatattccgtactcgtgaacctcgtgctgacgtgctcacacagtcactccgtttagctcaaatccttatcggcgactcggcgtcggagctcacgaccacgaccgcttccacgccctcgaccccgaacccccaatcccggacgcgaccgctgaaccctagcatactccggccatctgctgccggccccggcgatcccccgccatggcctcccccgagggcacaacgtgggtcttcgactgtccccttatggacgacctcgcggtcgccgccgacttcgcggcagcccccgcgggaggatttttctgggcagcgccgccgtcgctgcagccgcaggcgccagtgcagtctgtcgttgccgcgtcggctcccaacccatgtatggaaatcagtagctctgtggactgtggtcaggaaaaagaacagccaacaaataaacgtccaaggtcagaaagtactacagaatcaagcacaaaagcatccagggagaaaattagaagggacaagctgaacgagagattcttggaattgggtgccattttggagccagggaaaactcctaaaatggacaaaacagctatattgagtgatgctattcgtgtagtaggtgaattgcgtagtgaagcaaaaaagctcaaggattcaaatgagaatctccaagagaagattaaagagctgaaggtctatactatttcatgtggccaagttataaatggtgctgttcagatgggaggtggcacgtgatgtgttgtttaggcacttcatactgttccattttcttgatttatgatcccctttttccatttggtcatttttttttcttatctagatttaattcatccagtcaaataacatgggaataattattagtacacctgtcattctccctccagtttgtggtttagtttattttgggttgcttgcattagcaactttatatccacataatgcgtttttttttcttaaatggttaaaccctgcagctgtataacagtatggacatttgtcaattcttttctctactgtatacacttctttgctacgtgttccataaaatatatagaggtttatgattcagcatctcatgtgctgcaaaaggctttggccttcgattttgctggttgttcatcagaaaaacaatctcaccctgaaatactttccttttgcaggccgagaagaatgagctgcgagacgagaagcaaaggctgaaggccgagaaggagagcctggagcagcagatcaagttcctgaatgcccggccaagcctcgtaccacaccacccagtgatcccagcctctgcgttccctgctccccaggggccagcagccgccgccaggcacaagctgatgatgcctgtgattggctaccctggattcccgatgtggcagttcatgccgccttcagatgttgacacctctgatgaccctaggtcttgtcctcctgtggcgtagaagccgtgcgaaatcctgttggaaagaggcgatgctgccttccattgattcaaatcttgatcggtccgcagtgttgttggtgtagttgattccagaactgaaggggatgttacatgtgtcggacggtgacatggggtgatctgatgacccctttgtatattatatatggtatggtataaataaattccgcgaccagaagctaatgtggatcggtggattagcttatgtctattcttgcctgtttggttatgttcct

SEQ ID NO: 70009 - DNA, 3842 bp, Zea Mays
gagacccattcagcccaccggctacacggcccatattccgtactcgtgaacctcgtgctgacgtgctcacacagtcactccgtttagctcaaatccttatcggcgactcggcgtcggagctcacgaccacgaccgcttccacgccctcgaccccgaacccccaatcccggacgcgaccgctgaaccctagcatactccggccatctgctgccggccccggcgatcccccgccatggcctcccccgagggcacaacgtgggtcttcgactgtccccttatggacgacctcgcggtcgccgccgacttcgcggcagcccccgcgggaggatttttctgggcagcgccgccgtcgctgcagccgcaggcgccagtgcagtctgtcgttgccgcgtcggctcccaacccatggtaattgccggattacggtctcgatttgggctcggccgtggcggtggttggttggacttcgtggggttgggttgcatttggtcggggttcgttgccagcatatctgtagattctgtacgtatagtagttcgttatatggatcaatgacttgattggaattcggtgaagcggctgaactgtgggatttggaccgtgtccttggaatcgtgtttgcccaacattaatagtagaactgattatggttctttatgtttccaatttactataccagcgtcgtcctgtggaaggtgtgggctgtggactctgttggttctgccagtggagttgtgtgagaggactgaggaaatggttcacaggatgggtcagtggacctttactataagttctaagtagtatggcgtgaaaggactgttcccatcttatggtgtgcaagctggtaggtaggtgcatataggtagtctcatcaagcctagatgctttcctttgggcacacctttgtgtcatctatactcttgtcacaaaaacatattgtttattaaaacatttaataaagcattagaaactacaaacatcaataaccatcacattatttatttggaaatatgtaagttatatatgtgtagatttgtattcaaaatctgttaaacttgaaggattttaagaatttattctgtgtggccctgtggaatgtgtggatgagtcggtgtacctttactgtaataattctcggtagaacggtggaaaggattgttcacatcttatggtgctccgctggtgggtaggcaactaggcatatataaggcctgtttagtttagcttttttctgactattttttctaagaatctggatgtggagaaaatctgactgtgggaagaatctgaatatcgtggggattacacgcggaggaagatgaagtggtccaaagggtcaatgatctagaaagcgatgtatttctaatatcgtgacgactcgaccgattatgcgttcatgttgattttggacggtttttaccaaaacaattcttatagaagcggactgaaaagctggggcgtttggcagtccgcaacagattttggtggccggaagttgaaaaaagcccaaacaaacagggccacaggtagtgttatggctcctcatctagcctagattgcttttgtgcacactttgtgtcatctatactccctccagtcaccattgaaaatatttagctaaaccttggaaactacaataataactgtttagggttacattatttatttgggaacttaaagttttatgtgtagatttgtatcaaaatacttgcaaaatctcgtaaattcgaagaatttaatctatagaaaaaggtggtcaaatatacgtattgaagactactccaagtcaaaggtggtcaaatattcttgactgaagatagtagtttgcagaatctgttagaaacatacaatcctcattctgcaatcaacttgtggctgctctattgttgggcctttataaggctagttactacccttgttcacagagaagaatagataaattccttttgggtcagtatattctttatgtattgatctcttggttcatccaatagtctgcagaaacaggttgcacacaagttgttgtaattgaatccttcatgattggtgtggtgtgaagaggattaccatattgtgctggggttctgacagctccattgctctttagtacatacaagctcatctttgatgttaagttggagaagttttgaggtgtttggttggctgctttaaacagttgtattgtgtgctgtctgtggtaaattcttcttctatttttccacatatatttcgttagatgtagtttgtagggttatgacttgctatttgctaagttgaaaagcaccaagtagtgattttttatatttactaattattgtcttcgatttgcttgcatagatattttgtttaccatgctatgttatttgtctttttttgcttcttattatggcgcattatcttgatatttggcatcctaagggcgtacccagtgctgtaggcttcccgcactgtgcggggtctggggaagagtatctttaaatatttggcatcctaacattggcttttattttagcagtatggaaatcagtagctctgtggactgtggtcaggaaaaagaacagccaacaaataaacgtccaaggtcagaaagtactacagaatcaagcacaaaagcatccagggagaaaattagaagggacaagctgaacgagagattcttggaattgggtgccattttggagccagggaaaactcctaaaatggacaaaacagctatattgagtgatgctattcgtgtagtaggtgaattgcgtagtgaagcaaaaaagctcaaggattcaaatgagaatctccaagagaagattaaagagctgaaggtctatactatttcatgtggccaagttataaatggtgctgttcagatgggaggtggcacgtgatgtgttgtttaggcacttcatactgttccattttcttgatttatgatcccctttttccatttggtcatttttttttcttatctagatttaattcatccagtcaaataacatgggaataattattagtacacctgtcattctccctccagtttgtggtttagtttattttgggttgcttgcattagcaactttatatccacataatgcgtttttttttcttaaatggttaaaccctgcagctgtataacagtatggacatttgtcaattcttttctctactgtatacacttctttgctacgtgttccataaaatatatagaggtttatgattcagcatctcatgtgctgcaaaaggctttggccttcgattttgctggttgttcatcagaaaaacaatctcaccctgaaatactttccttttgcaggccgagaagaatgagctgcgagacgagaagcaaaggctgaaggccgagaaggagagcctggagcagcagatcaagttcctgaatgcccggccaagcctcgtaccacaccacccagtgatcccagcctctgcgttccctgctccccaggggccagcagccgccgccaggcacaagctgatgatgcctgtgattggctaccctggattcccgatgtggcagttcatgccgccttcagatgttgacacctctgatgaccctaggtcttgtcctcctgtggcgtagaagccgtgcgaaatcctgttggaaagaggcgatgctgccttccattgattcaaatcttgatcggtccgcagtgttgttggtgtagttgattccagaactgaaggggatgttacatgtgtcggacggtgacatggggtgatctgatgacccctttgtatattatatatggtatggtataaataaattccgcgaccagaagctaatgtggatcggtggattagcttatgtctattcttgcctgtttggttatgttcct

SEQ ID NO: 70010 - DNA, 727 bp, Zea Mays
tcggaatataccgtgggccaggagagtgccccaactggccaactgcttgacgaacaatcctctccgttctcgcagtggcgggtttcggcgacagcgccgcctccgatgctcggctcgagcgccgcgtacagtggagggagcggagctcgaagggcgaaggcgcaggggggctcgcgagtcgctatccagcccacgccgtcacgcactcacgcagggagcttgagggtctatttatacagcggaggcaggggagatctggaatgcgactttgcagcgcttctccagcgatgcaaaaacctatctttccgtatagtcgcccaggaatgcgcatgtgcagggtgagctgatgattttggatatcgataccatcccgagctggcatatgtagcacagcaggttgttgccattgtgattcgcggggactgcgtcctgaagaactttggttttgacgccttgtatttgtacggcaatgattgggatgaacatggccggtgagaattttttattttacattttctgtcctcgtttgccacgtgagtgttgtctgattctgatgtaaaacagcaacgagtaaaaaaaaagtataagtggaacctgtaatgtgggattgtaacaaatatatatattgcatggcttattataacagcacacgggctgcggtaccatgtgtgtggcatgttttatacacatattccgctttgatgcttttttagcgccctgtatatat

SEQ ID NO: 70011 - DNA, 1551 bp, Zea Mays
ccgtgggccaggagagtgccccaactggccaactgcttgacgaacaatcctctccgttctcgcagtggcgggtttcggcgacagcgccgcctccgatgctcggctcgagcgccgcgtacagtggagggagcggagctcgaagggcgaaggcgcaggggggctcgcgagtcgctatccagcccacgccgtcacgcactcacgcagacaaatcttgtagcattttagaaattgaaaaaagaggaacacgaagaccttcgttgggccagccacgggagctgctgtgcttgatcttggacgaaacaagtgaatggtcttcagcgggtttcagacacttgcagtcgcttcctattcttctacgattaccttctattaccggcttatgttgtgttgcaaaatgcgttctgtagtatcgctttagtggtcctttgggaaccctcctattcggtaactctaattaccgacagggggtttgtactttgttcactctactccctcttaatgaaaaacgtgcaatgacacggtcacgaaaaaaaaatcttgtagcattttctaggagatttgtcctggtattttttaaaacagagaatgttaggtcatctggcttttattcaaggacttttgcctgagttggaccactagattggcaggatgttaaatcccacctccactaaccaagtggccgatctgtcgatcctcaggtttgatccttttttagttcaagttcgagcacgggttgcatgatgatccacactacatagtacatgtttatgccaatttgtgacatctttggctttgggttgaggtgaagcaaacatttttttagttacatgaaaggtttgtattcttttgaattatagaattggtagaggcagccgcaggaaatcgatgacaacctatcgtcacgataatggctgtacggcgtcaccgaccagttgtcattggcagtgcctgctaatagaatcgttggcaatcaagcatgccttgctcttccttgaaccctttatttatagtccataaatgactcaaccttccaaaggaaaatatagaaactctaaaggtagaaagacttaaatatagaaagataaggttattaatctgctaacctgaacctagacagaggctgactcaaccttccaaaggaaaatgtagaaactctaaagatagaaagataaggttattgatttgctaaccctgaacctagacggcgtcggacataaatccggtccagagccataacagtatgcataaaactgacacagaaaataggtgatccaaatcatatacaaccatggtgctctcttagcttcacaacacattttattcttttatcatcacaccattttgatttgattattatttttctcttgatgttgtgtaatgatttgtttttatcatcaccagaatgtgcaggtagaactattatttcaagcacttgtaaaccacacatactctctaaagggcacaataaataacccacaaagccacaatttttattccttagctcaaatacatacatacaacaggaagaccaaggctattattacaactcat

SEQ ID NO: 70012 - DNA, 1113 bp, Zea Mays
atgtggcccagccaacactgatacaacggcccaaagcccaatattgcagccctagcgctagcggccagctgagtggaagcatctccgcctctcgtccagcgccctgccgccctaggcaccaaaacctcgcaaggcaaccgcccgccggcgccgccgtcgtagcaagagagtcagctgaggatcagaggagggggaagatgtcgttccgggcgcgggagatgtacaagaaggtggtgcggcgcgtgggcggcgaggggaagctgccggcggagcttatgaagtcggtgaaggacatgcttcccgacagcaacgtcatcatggggcgggccaagcgcggcatcttcgctgggcgacacatccggttcgggaacaaggtctccgaggacggcggcaacaaatcaaggcgatcatggaagccaaatgttcaggagaagcgtcttttcagctatattcatgaccggcacattagagtcaaggttaccacacatgcgcttcggtgcattgacaaagctggtgggatagatgaatacctcctgaagacaccttacaataaaatggatactgagatggggatagtgtggaaagcaaaaatcgaaaagatgtattcagatttgggtgagatggaagtaggcttcttccctcctgaggaagaggctaaggttaaagagggctttgacgaggttcgtgctgccaagaaggactttcgtagggaagcaaaacgagctttggcaaagcaaaggcagctagaagcaagtagtgctggtgatgaccaagcgggtgaagtcacgcatacaaaggaaaaggtatcagctgctgctgctaaactctgagcttggcaatcattggatgtccctgggcaaataatgggaggcttgctgcttgatacaaactggggaaggtttctagtgcaataactataccccttttcagggagcaggcggtttatcttaagccagcgtattgtaaacacttgtcacgaggtcgaaattttgtacaatttgaaaattcaagagcctgaattgtggggcagtttgtattgtagaatctatcagagactcagagctaaattggctagagctccaaacgattctgaactcgtgatcaagattcaag

SEQ ID NO: 70013 - DNA, 428 bp, Zea Mays
atgtggcccagccaacactgatacaacggcccaaagcccaatattgcagccctagcgctagcggccagctgagtggaagcatctccgcctctcgtccagcgccctgccgccctaggcaccaaaacctcgcaaggcaaccgcccgccggcgccgccgtcgtagcaagagagtcagctgaggatcagaggagggggaagatgtcgttccgggcgcgggagatgtacaagaaggtggtgcggcgcgtgggcggcgaggggaagctgccggcggagcttatgaagtcggtgaaggacatgcttcccgacagcaacgtcatcatggggcgggccaagcgcggcatcttcgctgggcgacacatccggttcgggaacaaggtctccgaggacggcggcaacaactcaattttgttgcttcgctatttcgagctc

SEQ ID NO: 70014 - DNA, 635 bp, Zea Mays
caaaagtcaactagagatctggcgcacacgagggagatcgaggccctctcgaatcgatcgatcgggtcaaacctactttttggcactacggccacccgacggtgctgccggccttcacgccgacggcgttcctgttctgagcggtggcgaaccgcaagcaacgcaaaacgtcggcggaccggcggcggtgtttgtacagctcatgtgtgtggtggtggtgcagctcgacgacgacgacggcttcctgctttgtttttgttcttccaaccttcatgcacagcaaagagctgatccctagcttagtgcttctgatctatatatgatgtgtatacacaactctgctgtttcggatccccccccccccccccccccaccaccaccaccatacttgggcagcgcttttgtgatttctctcgcagccataaatagtgctacataatttgctccgttttggctcgcaccgcggcgtggctactgatagggctactttcggagctacaaaatcggaatctgtacccacaactactggaatctgcacccagtttcacctctttccttaatcaattgggccagattcgaacaacgaatgtaattgtaactgcgacccaacgaaacgggagatcaagttaaggaag

SEQ ID NO: 70015 - DNA, 1233 bp, Zea Mays
atgacgagggaatgcccatccgagcttgtatttgttttcttatttggccttgaagtaatcccaaactcttcttggtacaggtggaatttagatctactgagtagtggaaattttttatttcaatgcccgaccaaagcatcattcaataatcaatatacatgggcatgtgttgaacctggccatctagcaacaaaaaatgaccctcttctcaagactgttgaaggcactgatcatacaattatacttatgcttctggaaaccatcattcggcagcttaccaccaggaaaggacaggtcagagcgcatgtgcttcaagcaatggttcaaatggatgtccttgttcctactggagatatgactgctgtcagaagaaccgctcaatttttccttaatagcacaaaggaaggagagagaaatgacaaccgcagaactgggattcaaaaagcaattaactaaggaggagaagtttgaaaggaggaagcagagacttgctgcaatcggagaggatcttttggcgattgctgctgatcaaccatttcgcttccttgccacatttacatttgtggtcagagcattctcagttctagatggtattgggaaaggccttgatcctaggtttcatattacagagattgctaagtcatatgccaaggaattgctaaggtttaatgacgctggtgttgaaatagttgtgaaggcaagtttcaacatttggtgtgtgaagagacatgtgtattcctcctatgatgaattcctcaggctccatgaaggtaagcctgtcttaatgggcttgattgttgaacctgacttagtacttttatccatgtcacggcattgaaccagacagtcactcatgtccttaggatattaatggtatacatcaacaattcattctattttaattgcttgcaaaacttttttggcccttcagatgagttccacgcatcaagaagtcaagaatccaggaggcctaaaataggagaggagggcgcagtttgattcaatccatgtcaagtcagaggctgctgcgaggtttgcacatgcaagtagaatttagatggtgatgttttgtctttgttcccatttttataacgactaggtgtttgaattcctaagattaaagtttatgtagattcttctttgtaattagatctctgttaggcatctaactgaataaatgatctccattatggactggttatattattttttgtgcgatcggatgggttaaag
